United States Patent Application Publication US 2023/0048732 A1 - sequence listing, part 2

SEQ ID NO: 12231 - protein, 9 aa, Artificial Sequence
  Description of Artificial Sequence: Synthetic peptide
ECPYRMFQI

SEQ ID NO: 12232 - protein, 9 aa, Artificial Sequence
  Description of Artificial Sequence: Synthetic peptide
EHHWGDIID

SEQ ID NO: 12233 - protein, 9 aa, Artificial Sequence
  Description of Artificial Sequence: Synthetic peptide
ESAHECEHD

SEQ ID NO: 12234 - protein, 9 aa, Artificial Sequence
  Description of Artificial Sequence: Synthetic peptide
ESAHECGHD

SEQ ID NO: 12235 - protein, 9 aa, Artificial Sequence
  Description of Artificial Sequence: Synthetic peptide
ESAHEWEHD

SEQ ID NO: 12236 - protein, 9 aa, Artificial Sequence
  Description of Artificial Sequence: Synthetic peptide
EYHYRMFQI

SEQ ID NO: 12237 - protein, 9 aa, Artificial Sequence
  Description of Artificial Sequence: Synthetic peptide
FAVECVDCT

SEQ ID NO: 12238 - protein, 9 aa, Artificial Sequence
  Description of Artificial Sequence: Synthetic peptide
FEVECVDCT

SEQ ID NO: 12239 - protein, 9 aa, Artificial Sequence
  Description of Artificial Sequence: Synthetic peptide
FEVGCVDCT

SEQ ID NO: 12240 - protein, 9 aa, Artificial Sequence
  Description of Artificial Sequence: Synthetic peptide
FLGFKRYGG

SEQ ID NO: 12241 - protein, 9 aa, Artificial Sequence
  Description of Artificial Sequence: Synthetic peptide
FLSFERYGG

SEQ ID NO: 12242 - protein, 9 aa, Artificial Sequence
  Description of Artificial Sequence: Synthetic peptide
FLSFKRYGC

SEQ ID NO: 12243 - protein, 9 aa, Artificial Sequence
  Description of Artificial Sequence: Synthetic peptide
FLSFKRYGG

SEQ ID NO: 12244 - protein, 9 aa, Artificial Sequence
  Description of Artificial Sequence: Synthetic peptide
FLSFKRYGS

SEQ ID NO: 12245 - protein, 9 aa, Artificial Sequence
  Description of Artificial Sequence: Synthetic peptide
FLSFQRYGG

SEQ ID NO: 12246 - protein, 9 aa, Artificial Sequence
  Description of Artificial Sequence: Synthetic peptide
FLSFRRYGG

SEQ ID NO: 12247 - protein, 9 aa, Artificial Sequence
  Description of Artificial Sequence: Synthetic peptide
FNLTAHEDN

SEQ ID NO: 12248 - protein, 9 aa, Artificial Sequence
  Description of Artificial Sequence: Synthetic peptide
GLEINMLNC

SEQ ID NO: 12249 - protein, 9 aa, Artificial Sequence
  Description of Artificial Sequence: Synthetic peptide
HCAKFECMF

SEQ ID NO: 12250 - protein, 9 aa, Artificial Sequence
  Description of Artificial Sequence: Synthetic peptide
IANTNPRGR

SEQ ID NO: 12251 - protein, 9 aa, Artificial Sequence
  Description of Artificial Sequence: Synthetic peptide
IEAPKVNEY

SEQ ID NO: 12252 - protein, 9 aa, Artificial Sequence
  Description of Artificial Sequence: Synthetic peptide
IEDPEVNEY

SEQ ID NO: 12253 - protein, 9 aa, Artificial Sequence
  Description of Artificial Sequence: Synthetic peptide
IEDPKVNAY

SEQ ID NO: 12254 - protein, 9 aa, Artificial Sequence
  Description of Artificial Sequence: Synthetic peptide
IEDPKVNEC

SEQ ID NO: 12255 - protein, 9 aa, Artificial Sequence
  Description of Artificial Sequence: Synthetic peptide
IEDPKVNEH

SEQ ID NO: 12256 - protein, 9 aa, Artificial Sequence
  Description of Artificial Sequence: Synthetic peptide
IEDPKVSEY

SEQ ID NO: 12257 - protein, 9 aa, Artificial Sequence
  Description of Artificial Sequence: Synthetic peptide
IEDPRVNEY

SEQ ID NO: 12258 - protein, 9 aa, Artificial Sequence
  Description of Artificial Sequence: Synthetic peptide
IEDPTVNEY

SEQ ID NO: 12259 - protein, 9 aa, Artificial Sequence
  Description of Artificial Sequence: Synthetic peptide
IEDRKVNEY

SEQ ID NO: 12260 - protein, 9 aa, Artificial Sequence
  Description of Artificial Sequence: Synthetic peptide
IGDPKVNEY

SEQ ID NO: 12261 - protein, 9 aa, Artificial Sequence
  Description of Artificial Sequence: Synthetic peptide
IYTYQWDWI

SEQ ID NO: 12262 - protein, 9 aa, Artificial Sequence
  Description of Artificial Sequence: Synthetic peptide
IYTYQWDWT

SEQ ID NO: 12263 - protein, 9 aa, Artificial Sequence
  Description of Artificial Sequence: Synthetic peptide
IYTYQWGWT

SEQ ID NO: 12264 - protein, 9 aa, Artificial Sequence
  Description of Artificial Sequence: Synthetic peptide
KCHYRMFQI

SEQ ID NO: 12265 - protein, 9 aa, Artificial Sequence
  Description of Artificial Sequence: Synthetic peptide
KDTEGLEAP

SEQ ID NO: 12266 - protein, 9 aa, Artificial Sequence
  Description of Artificial Sequence: Synthetic peptide
KDTEGLGAP

SEQ ID NO: 12267 - protein, 9 aa, Artificial Sequence
  Description of Artificial Sequence: Synthetic peptide
LASQKRDCD

SEQ ID NO: 12268 - protein, 9 aa, Artificial Sequence
  Description of Artificial Sequence: Synthetic peptide
LEDPKVNEY

SEQ ID NO: 12269 - protein, 9 aa, Artificial Sequence
  Description of Artificial Sequence: Synthetic peptide
LINHWMHDN

SEQ ID NO: 12270 - protein, 9 aa, Artificial Sequence
  Description of Artificial Sequence: Synthetic peptide
LINKWMHDN

SEQ ID NO: 12271 - protein, 9 aa, Artificial Sequence
  Description of Artificial Sequence: Synthetic peptide
LINQWMHNN

SEQ ID NO: 12272 - protein, 9 aa, Artificial Sequence
  Description of Artificial Sequence: Synthetic peptide
LLNQWMHDN

SEQ ID NO: 12273 - protein, 9 aa, Artificial Sequence
  Description of Artificial Sequence: Synthetic peptide
LSSQKRDCA

SEQ ID NO: 12274 - protein, 9 aa, Artificial Sequence
  Description of Artificial Sequence: Synthetic peptide
LSSQKRDCG

SEQ ID NO: 12275 - protein, 9 aa, Artificial Sequence
  Description of Artificial Sequence: Synthetic peptide
LSSQKRDCN

SEQ ID NO: 12276 - protein, 9 aa, Artificial Sequence
  Description of Artificial Sequence: Synthetic peptide
LSSQKRDGD

SEQ ID NO: 12277 - protein, 9 aa, Artificial Sequence
  Description of Artificial Sequence: Synthetic peptide
LSSQRRDCD

SEQ ID NO: 12278 - protein, 9 aa, Artificial Sequence
  Description of Artificial Sequence: Synthetic peptide
MCATQHCEA

SEQ ID NO: 12279 - protein, 9 aa, Artificial Sequence
  Description of Artificial Sequence: Synthetic peptide
MCEQYWTED

SEQ ID NO: 12280 - protein, 9 aa, Artificial Sequence
  Description of Artificial Sequence: Synthetic peptide
MCEQYWTGD

SEQ ID NO: 12281 - protein, 9 aa, Artificial Sequence
  Description of Artificial Sequence: Synthetic peptide
MGEQYWTED

SEQ ID NO: 12282 - protein, 9 aa, Artificial Sequence
  Description of Artificial Sequence: Synthetic peptide
MGRMELDGV

SEQ ID NO: 12283 - protein, 9 aa, Artificial Sequence
  Description of Artificial Sequence: Synthetic peptide
MHMQQNQMM

SEQ ID NO: 12284 - protein, 9 aa, Artificial Sequence
  Description of Artificial Sequence: Synthetic peptide
MHMRQNQMM

SEQ ID NO: 12285 - protein, 9 aa, Artificial Sequence
  Description of Artificial Sequence: Synthetic peptide
MHMWQNQMM

SEQ ID NO: 12286 - protein, 9 aa, Artificial Sequence
  Description of Artificial Sequence: Synthetic peptide
MRATQHCEA

SEQ ID NO: 12287 - protein, 9 aa, Artificial Sequence
  Description of Artificial Sequence: Synthetic peptide
MSRMELDGV

SEQ ID NO: 12288 - protein, 9 aa, Artificial Sequence
  Description of Artificial Sequence: Synthetic peptide
MSRMEQDGV

SEQ ID NO: 12289 - protein, 9 aa, Artificial Sequence
  Description of Artificial Sequence: Synthetic peptide
MSRMGLDGV

SEQ ID NO: 12290 - protein, 9 aa, Artificial Sequence
  Description of Artificial Sequence: Synthetic peptide
MSWMELDGV

SEQ ID NO: 12291 - protein, 9 aa, Artificial Sequence
  Description of Artificial Sequence: Synthetic peptide
NDDPGQAVG

SEQ ID NO: 12292 - protein, 9 aa, Artificial Sequence
  Description of Artificial Sequence: Synthetic peptide
NVHLFPNEQ

SEQ ID NO: 12293 - protein, 9 aa, Artificial Sequence
  Description of Artificial Sequence: Synthetic peptide
NVHLFPTAQ

SEQ ID NO: 12294 - protein, 9 aa, Artificial Sequence
  Description of Artificial Sequence: Synthetic peptide
NVHLFPTEQ

SEQ ID NO: 12295 - protein, 9 aa, Artificial Sequence
  Description of Artificial Sequence: Synthetic peptide
NVHLFPTGQ

SEQ ID NO: 12296 - protein, 9 aa, Artificial Sequence
  Description of Artificial Sequence: Synthetic peptide
NVHLFPTKQ

SEQ ID NO: 12297 - protein, 9 aa, Artificial Sequence
  Description of Artificial Sequence: Synthetic peptide
PACYSDVLN

SEQ ID NO: 12298 - protein, 9 aa, Artificial Sequence
  Description of Artificial Sequence: Synthetic peptide
PEFLGEVDA

SEQ ID NO: 12299 - protein, 9 aa, Artificial Sequence
  Description of Artificial Sequence: Synthetic peptide
PEFPGAVDA

SEQ ID NO: 12300 - protein, 9 aa, Artificial Sequence
  Description of Artificial Sequence: Synthetic peptide
PEFPGEGDA

SEQ ID NO: 12301 - protein, 9 aa, Artificial Sequence
  Description of Artificial Sequence: Synthetic peptide
PEFPGEVDA

SEQ ID NO: 12302 - protein, 9 aa, Artificial Sequence
  Description of Artificial Sequence: Synthetic peptide
PEFPGEVDS

SEQ ID NO: 12303 - protein, 9 aa, Artificial Sequence
  Description of Artificial Sequence: Synthetic peptide
PEFPGEVDV

SEQ ID NO: 12304 - protein, 9 aa, Artificial Sequence
  Description of Artificial Sequence: Synthetic peptide
PEFPGEVYA

SEQ ID NO: 12305 - protein, 9 aa, Artificial Sequence
  Description of Artificial Sequence: Synthetic peptide
PGFPGEVDA

SEQ ID NO: 12306 - protein, 9 aa, Artificial Sequence
  Description of Artificial Sequence: Synthetic peptide
PKFPGEVDA

SEQ ID NO: 12307 - protein, 9 aa, Artificial Sequence
  Description of Artificial Sequence: Synthetic peptide
PQCLHHHWY

SEQ ID NO: 12308 - protein, 9 aa, Artificial Sequence
  Description of Artificial Sequence: Synthetic peptide
PQCLHNHWY

SEQ ID NO: 12309 - protein, 9 aa, Artificial Sequence
  Description of Artificial Sequence: Synthetic peptide
PQCLHSHWY

SEQ ID NO: 12310 - protein, 9 aa, Artificial Sequence
  Description of Artificial Sequence: Synthetic peptide
PQCLRNHWY

SEQ ID NO: 12311 - protein, 9 aa, Artificial Sequence
  Description of Artificial Sequence: Synthetic peptide
PQCLYNHWY

SEQ ID NO: 12312 - protein, 9 aa, Artificial Sequence
  Description of Artificial Sequence: Synthetic peptide
QPVGLFAFA

SEQ ID NO: 12313 - protein, 9 aa, Artificial Sequence
  Description of Artificial Sequence: Synthetic peptide
QSKSEGIHI

SEQ ID NO: 12314 - protein, 9 aa, Artificial Sequence
  Description of Artificial Sequence: Synthetic peptide
QTDILDYAW

SEQ ID NO: 12315 - protein, 9 aa, Artificial Sequence
  Description of Artificial Sequence: Synthetic peptide
QTDILDYDW

SEQ ID NO: 12316 - protein, 9 aa, Artificial Sequence
  Description of Artificial Sequence: Synthetic peptide
QTDILDYYW

SEQ ID NO: 12317 - protein, 9 aa, Artificial Sequence
  Description of Artificial Sequence: Synthetic peptide
RDRPDVNWV

SEQ ID NO: 12318 - protein, 9 aa, Artificial Sequence
  Description of Artificial Sequence: Synthetic peptide
RLEINMLHC

SEQ ID NO: 12319 - protein, 9 aa, Artificial Sequence
  Description of Artificial Sequence: Synthetic peptide
RLEINMLNC

SEQ ID NO: 12320 - protein, 9 aa, Artificial Sequence
  Description of Artificial Sequence: Synthetic peptide
RLEINMRNC

SEQ ID NO: 12321 - protein, 9 aa, Artificial Sequence
  Description of Artificial Sequence: Synthetic peptide
RLGINMLNC

SEQ ID NO: 12322 - protein, 9 aa, Artificial Sequence
  Description of Artificial Sequence: Synthetic peptide
SCHQCDLCD

SEQ ID NO: 12323 - protein, 9 aa, Artificial Sequence
  Description of Artificial Sequence: Synthetic peptide
SCHQCNLCD

SEQ ID NO: 12324 - protein, 9 aa, Artificial Sequence
  Description of Artificial Sequence: Synthetic peptide
SCHQCSLCD

SEQ ID NO: 12325 - protein, 9 aa, Artificial Sequence
  Description of Artificial Sequence: Synthetic peptide
SCIFRHWLT

SEQ ID NO: 12326 - protein, 9 aa, Artificial Sequence
  Description of Artificial Sequence: Synthetic peptide
SCSPDAWET

SEQ ID NO: 12327 - protein, 9 aa, Artificial Sequence
  Description of Artificial Sequence: Synthetic peptide
SCSPDDWGT

SEQ ID NO: 12328 - protein, 9 aa, Artificial Sequence
  Description of Artificial Sequence: Synthetic peptide
SCSPDGWET

SEQ ID NO: 12329 - protein, 9 aa, Artificial Sequence
  Description of Artificial Sequence: Synthetic peptide
SCSPGDWET

SEQ ID NO: 12330 - protein, 9 aa, Artificial Sequence
  Description of Artificial Sequence: Synthetic peptide
SLQRWFCRT

SEQ ID NO: 12331 - protein, 9 aa, Artificial Sequence
  Description of Artificial Sequence: Synthetic peptide
SLQRWVCRT

SEQ ID NO: 12332 - protein, 9 aa, Artificial Sequence
  Description of Artificial Sequence: Synthetic peptide
STIHAIEQG

SEQ ID NO: 12333 - protein, 9 aa, Artificial Sequence
  Description of Artificial Sequence: Synthetic peptide
SYHQCNLCD

SEQ ID NO: 12334 - protein, 9 aa, Artificial Sequence
  Description of Artificial Sequence: Synthetic peptide
TMNWWDAPQ

SEQ ID NO: 12335 - protein, 9 aa, Artificial Sequence
  Description of Artificial Sequence: Synthetic peptide
TSVQSVDRG

SEQ ID NO: 12336 - protein, 9 aa, Artificial Sequence
  Description of Artificial Sequence: Synthetic peptide
TSVRSVDRD

SEQ ID NO: 12337 - protein, 9 aa, Artificial Sequence
  Description of Artificial Sequence: Synthetic peptide
TSVRSVDRG

SEQ ID NO: 12338 - protein, 9 aa, Artificial Sequence
  Description of Artificial Sequence: Synthetic peptide
VQCIHHDYH

SEQ ID NO: 12339 - protein, 9 aa, Artificial Sequence
  Description of Artificial Sequence: Synthetic peptide
VQCIHHDYR

SEQ ID NO: 12340 - protein, 9 aa, Artificial Sequence
  Description of Artificial Sequence: Synthetic peptide
VQCIHHGYR

SEQ ID NO: 12341 - protein, 9 aa, Artificial Sequence
  Description of Artificial Sequence: Synthetic peptide
VQCIHHNYR

SEQ ID NO: 12342 - protein, 9 aa, Artificial Sequence
  Description of Artificial Sequence: Synthetic peptide
VQCIHPDYR

SEQ ID NO: 12343 - protein, 9 aa, Artificial Sequence
  Description of Artificial Sequence: Synthetic peptide
VQCIHRDYR

SEQ ID NO: 12344 - protein, 9 aa, Artificial Sequence
  Description of Artificial Sequence: Synthetic peptide
VQCIRHDYR

SEQ ID NO: 12345 - protein, 9 aa, Artificial Sequence
  Description of Artificial Sequence: Synthetic peptide
WKPPLSDAP

SEQ ID NO: 12346 - protein, 9 aa, Artificial Sequence
  Description of Artificial Sequence: Synthetic peptide
WPSMQCAAH

SEQ ID NO: 12347 - protein, 9 aa, Artificial Sequence
  Description of Artificial Sequence: Synthetic peptide
WPSMQCAAN

SEQ ID NO: 12348 - protein, 9 aa, Artificial Sequence
  Description of Artificial Sequence: Synthetic peptide
WPSMQCAAR

SEQ ID NO: 12349 - protein, 9 aa, Artificial Sequence
  Description of Artificial Sequence: Synthetic peptide
LSSQKRDCD

SEQ ID NO: 12350 - protein, 9 aa, Artificial Sequence
  Description of Artificial Sequence: Synthetic peptide
IEDPKVNEY

SEQ ID NO: 12351 - protein, 9 aa, Artificial Sequence
  Description of Artificial Sequence: Synthetic peptide
SCSPDDWET

SEQ ID NO: 12352 - protein, 9 aa, Artificial Sequence
  Description of Artificial Sequence: Synthetic peptide
AMNWWDAPQ

SEQ ID NO: 12353 - protein, 9 aa, Artificial Sequence
  Description of Artificial Sequence: Synthetic peptide
LINQWMHDN

SEQ ID NO: 12354 - protein, 9 aa, Artificial Sequence
  Description of Artificial Sequence: Synthetic peptide
AAEQRFNPE

SEQ ID NO: 12355 - protein, 9 aa, Artificial Sequence
  Description of Artificial Sequence: Synthetic peptide
AAILMSNAG

SEQ ID NO: 12356 - protein, 9 aa, Artificial Sequence
  Description of Artificial Sequence: Synthetic peptide
ACMMMWPYV

SEQ ID NO: 12357 - protein, 9 aa, Artificial Sequence
  Description of Artificial Sequence: Synthetic peptide
ADTGSTAVI

SEQ ID NO: 12358 - protein, 9 aa, Artificial Sequence
  Description of Artificial Sequence: Synthetic peptide
AESVEDYHT

SEQ ID NO: 12359 - protein, 9 aa, Artificial Sequence
  Description of Artificial Sequence: Synthetic peptide
AFELHYHHQ

SEQ ID NO: 12360 - protein, 9 aa, Artificial Sequence
  Description of Artificial Sequence: Synthetic peptide
AFKFKMLGQ

SEQ ID NO: 12361 - protein, 9 aa, Artificial Sequence
  Description of Artificial Sequence: Synthetic peptide
AFKWSHIHL

SEQ ID NO: 12362 - protein, 9 aa, Artificial Sequence
  Description of Artificial Sequence: Synthetic peptide
AGVQYTWCG

SEQ ID NO: 12363 - protein, 9 aa, Artificial Sequence
  Description of Artificial Sequence: Synthetic peptide
AIDQFSGCK

SEQ ID NO: 12364 - protein, 9 aa, Artificial Sequence
  Description of Artificial Sequence: Synthetic peptide
AIEYRKYDR

SEQ ID NO: 12365 - protein, 9 aa, Artificial Sequence
  Description of Artificial Sequence: Synthetic peptide
AIFMMSGPG

SEQ ID NO: 12366 - protein, 9 aa, Artificial Sequence
  Description of Artificial Sequence: Synthetic peptide
AKWMITIGC

SEQ ID NO: 12367 - protein, 9 aa, Artificial Sequence
  Description of Artificial Sequence: Synthetic peptide
ALDWCTRQA

SEQ ID NO: 12368 - protein, 9 aa, Artificial Sequence
  Description of Artificial Sequence: Synthetic peptide
ALICVNVFG

SEQ ID NO: 12369 - protein, 9 aa, Artificial Sequence
  Description of Artificial Sequence: Synthetic peptide
AMHTQGSLG

SEQ ID NO: 12370 - protein, 9 aa, Artificial Sequence
  Description of Artificial Sequence: Synthetic peptide
AMTQEQMAD

SEQ ID NO: 12371 - protein, 9 aa, Artificial Sequence
  Description of Artificial Sequence: Synthetic peptide
ANNSCYRPY

SEQ ID NO: 12372 - protein, 9 aa, Artificial Sequence
  Description of Artificial Sequence: Synthetic peptide
APLPWWVVP

SEQ ID NO: 12373 - protein, 9 aa, Artificial Sequence
  Description of Artificial Sequence: Synthetic peptide
ARRYNPELQ

SEQ ID NO: 12374 - protein, 9 aa, Artificial Sequence
  Description of Artificial Sequence: Synthetic peptide
ARSPWMHMS

SEQ ID NO: 12375 - protein, 9 aa, Artificial Sequence
  Description of Artificial Sequence: Synthetic peptide
ASDAKPAQL

SEQ ID NO: 12376 - protein, 9 aa, Artificial Sequence
  Description of Artificial Sequence: Synthetic peptide
ASDDQRDSK

SEQ ID NO: 12377 - protein, 9 aa, Artificial Sequence
  Description of Artificial Sequence: Synthetic peptide
ASHPCYSMH

SEQ ID NO: 12378 - protein, 9 aa, Artificial Sequence
  Description of Artificial Sequence: Synthetic peptide
ATDIWCAFC

SEQ ID NO: 12379 - protein, 9 aa, Artificial Sequence
  Description of Artificial Sequence: Synthetic peptide
ATNDSPHLA

SEQ ID NO: 12380 - protein, 9 aa, Artificial Sequence
  Description of Artificial Sequence: Synthetic peptide
ATSWNTAIG

SEQ ID NO: 12381 - protein, 9 aa, Artificial Sequence
  Description of Artificial Sequence: Synthetic peptide
ATYVYERFE

SEQ ID NO: 12382 - protein, 9 aa, Artificial Sequence
  Description of Artificial Sequence: Synthetic peptide
AWCITYGLG

SEQ ID NO: 12383 - protein, 9 aa, Artificial Sequence
  Description of Artificial Sequence: Synthetic peptide
AYERYDCYD

SEQ ID NO: 12384 - protein, 9 aa, Artificial Sequence
  Description of Artificial Sequence: Synthetic peptide
AYTKMAAQG

SEQ ID NO: 12385 - protein, 9 aa, Artificial Sequence
  Description of Artificial Sequence: Synthetic peptide
AYVAVASQW

SEQ ID NO: 12386 - protein, 9 aa, Artificial Sequence
  Description of Artificial Sequence: Synthetic peptide
AYVPEFRDT

SEQ ID NO: 12387 - protein, 9 aa, Artificial Sequence
  Description of Artificial Sequence: Synthetic peptide
CATRKDEMF

SEQ ID NO: 12388 - protein, 9 aa, Artificial Sequence
  Description of Artificial Sequence: Synthetic peptide
CEECQEMLT

SEQ ID NO: 12389 - protein, 9 aa, Artificial Sequence
  Description of Artificial Sequence: Synthetic peptide
CFRICVSEY

SEQ ID NO: 12390 - protein, 9 aa, Artificial Sequence
  Description of Artificial Sequence: Synthetic peptide
CGEDMKIWQ

SEQ ID NO: 12391 - protein, 9 aa, Artificial Sequence
  Description of Artificial Sequence: Synthetic peptide
CGGCLNLGT

SEQ ID NO: 12392 - protein, 9 aa, Artificial Sequence
  Description of Artificial Sequence: Synthetic peptide
CGGTHGMMG

SEQ ID NO: 12393 - protein, 9 aa, Artificial Sequence
  Description of Artificial Sequence: Synthetic peptide
CHVDRAMHH

SEQ ID NO: 12394 - protein, 9 aa, Artificial Sequence
  Description of Artificial Sequence: Synthetic peptide
CHVSVPVDC

SEQ ID NO: 12395 - protein, 9 aa, Artificial Sequence
  Description of Artificial Sequence: Synthetic peptide
CIANVDNFD

SEQ ID NO: 12396 - protein, 9 aa, Artificial Sequence
  Description of Artificial Sequence: Synthetic peptide
CIEYTHRLA

SEQ ID NO: 12397 - protein, 9 aa, Artificial Sequence
  Description of Artificial Sequence: Synthetic peptide
CILNTCSFC

SEQ ID NO: 12398 - protein, 9 aa, Artificial Sequence
  Description of Artificial Sequence: Synthetic peptide
CIPPLSDKF

SEQ ID NO: 12399 - protein, 9 aa, Artificial Sequence
  Description of Artificial Sequence: Synthetic peptide
CKAPAQDFR

SEQ ID NO: 12400 - protein, 9 aa, Artificial Sequence
  Description of Artificial Sequence: Synthetic peptide
CKAPTRSYR

SEQ ID NO: 12401 - protein, 9 aa, Artificial Sequence
  Description of Artificial Sequence: Synthetic peptide
CKSIGCMDE

SEQ ID NO: 12402 - protein, 9 aa, Artificial Sequence
  Description of Artificial Sequence: Synthetic peptide
CNDMTAQYV

SEQ ID NO: 12403 - protein, 9 aa, Artificial Sequence
  Description of Artificial Sequence: Synthetic peptide
CPDQYRAYP

SEQ ID NO: 12404 - protein, 9 aa, Artificial Sequence
  Description of Artificial Sequence: Synthetic peptide
CQGFVKGQS

SEQ ID NO: 12405 - protein, 9 aa, Artificial Sequence
  Description of Artificial Sequence: Synthetic peptide
CRINMERVS

SEQ ID NO: 12406 - protein, 9 aa, Artificial Sequence
  Description of Artificial Sequence: Synthetic peptide
CTKKDNMDN

SEQ ID NO: 12407 - protein, 9 aa, Artificial Sequence
  Description of Artificial Sequence: Synthetic peptide
CTNRHTPFI

SEQ ID NO: 12408 - protein, 9 aa, Artificial Sequence
  Description of Artificial Sequence: Synthetic peptide
CWATEWQMP

SEQ ID NO: 12409 - protein, 9 aa, Artificial Sequence
  Description of Artificial Sequence: Synthetic peptide
CWEQEWPFW

SEQ ID NO: 12410 - protein, 9 aa, Artificial Sequence
  Description of Artificial Sequence: Synthetic peptide
CWQNKINHI

SEQ ID NO: 12411 - protein, 9 aa, Artificial Sequence
  Description of Artificial Sequence: Synthetic peptide
CYVMRRIYC

SEQ ID NO: 12412 - protein, 9 aa, Artificial Sequence
  Description of Artificial Sequence: Synthetic peptide
DADQAAKAC

SEQ ID NO: 12413 - protein, 9 aa, Artificial Sequence
  Description of Artificial Sequence: Synthetic peptide
DAGMCEKED

SEQ ID NO: 12414 - protein, 9 aa, Artificial Sequence
  Description of Artificial Sequence: Synthetic peptide
DANIASSGR

SEQ ID NO: 12415 - protein, 9 aa, Artificial Sequence
  Description of Artificial Sequence: Synthetic peptide
DCMVFINYL

SEQ ID NO: 12416 - protein, 9 aa, Artificial Sequence
  Description of Artificial Sequence: Synthetic peptide
DDCTNGSME

SEQ ID NO: 12417 - protein, 9 aa, Artificial Sequence
  Description of Artificial Sequence: Synthetic peptide
DDVNNVAIA

SEQ ID NO: 12418 - protein, 9 aa, Artificial Sequence
  Description of Artificial Sequence: Synthetic peptide
DDWQKLGVP

SEQ ID NO: 12419 - protein, 9 aa, Artificial Sequence
  Description of Artificial Sequence: Synthetic peptide
DELYTGPCA

SEQ ID NO: 12420 - protein, 9 aa, Artificial Sequence
  Description of Artificial Sequence: Synthetic peptide
DFNTKTSSL

SEQ ID NO: 12421 - protein, 9 aa, Artificial Sequence
  Description of Artificial Sequence: Synthetic peptide
DGEFQAYWE

SEQ ID NO: 12422 - protein, 9 aa, Artificial Sequence
  Description of Artificial Sequence: Synthetic peptide
DGGMIRGVS

SEQ ID NO: 12423 - protein, 9 aa, Artificial Sequence
  Description of Artificial Sequence: Synthetic peptide
DGNKREWLS

SEQ ID NO: 12424 - protein, 9 aa, Artificial Sequence
  Description of Artificial Sequence: Synthetic peptide
DGSPKNTSS

SEQ ID NO: 12425 - protein, 9 aa, Artificial Sequence
  Description of Artificial Sequence: Synthetic peptide
DHIQMHRFN

SEQ ID NO: 12426 - protein, 9 aa, Artificial Sequence
  Description of Artificial Sequence: Synthetic peptide
DINANMDKR

SEQ ID NO: 12427 - protein, 9 aa, Artificial Sequence
  Description of Artificial Sequence: Synthetic peptide
DIQSNCSEA

SEQ ID NO: 12428 - protein, 9 aa, Artificial Sequence
  Description of Artificial Sequence: Synthetic peptide
DISEQNRMC

SEQ ID NO: 12429 - protein, 9 aa, Artificial Sequence
  Description of Artificial Sequence: Synthetic peptide
DISQHPIGS

SEQ ID NO: 12430 - protein, 9 aa, Artificial Sequence
  Description of Artificial Sequence: Synthetic peptide
DIYLSNGTY

SEQ ID NO: 12431 - protein, 9 aa, Artificial Sequence
  Description of Artificial Sequence: Synthetic peptide
DKCMLMDAS

SEQ ID NO: 12432 - protein, 9 aa, Artificial Sequence
  Description of Artificial Sequence: Synthetic peptide
DNENCVQKT

SEQ ID NO: 12433 - protein, 9 aa, Artificial Sequence
  Description of Artificial Sequence: Synthetic peptide
DQNEEGTKP

SEQ ID NO: 12434 - protein, 9 aa, Artificial Sequence
  Description of Artificial Sequence: Synthetic peptide
DRIGYCNNW

SEQ ID NO: 12435 - protein, 9 aa, Artificial Sequence
  Description of Artificial Sequence: Synthetic peptide
DRQGCNAPR

SEQ ID NO: 12436 - protein, 9 aa, Artificial Sequence
  Description of Artificial Sequence: Synthetic peptide
DSMWRTKEL

SEQ ID NO: 12437 - protein, 9 aa, Artificial Sequence
  Description of Artificial Sequence: Synthetic peptide
DSMYASSMP

SEQ ID NO: 12438 - protein, 9 aa, Artificial Sequence
  Description of Artificial Sequence: Synthetic peptide
DSRQVKKFN

SEQ ID NO: 12439 - protein, 9 aa, Artificial Sequence
  Description of Artificial Sequence: Synthetic peptide
DSTWLIAQQ

SEQ ID NO: 12440 - protein, 9 aa, Artificial Sequence
  Description of Artificial Sequence: Synthetic peptide
DTGVYSSWE

SEQ ID NO: 12441 - protein, 9 aa, Artificial Sequence
  Description of Artificial Sequence: Synthetic peptide
DTSADKSGW

SEQ ID NO: 12442 - protein, 9 aa, Artificial Sequence
  Description of Artificial Sequence: Synthetic peptide
DTWISHWWC

SEQ ID NO: 12443 - protein, 9 aa, Artificial Sequence
  Description of Artificial Sequence: Synthetic peptide
DVKSENHDW

SEQ ID NO: 12444 - protein, 9 aa, Artificial Sequence
  Description of Artificial Sequence: Synthetic peptide
DVNVAASWV

SEQ ID NO: 12445 - protein, 9 aa, Artificial Sequence
  Description of Artificial Sequence: Synthetic peptide
DVVQEFWAK

SEQ ID NO: 12446 - protein, 9 aa, Artificial Sequence
  Description of Artificial Sequence: Synthetic peptide
DWHHEHNPN

SEQ ID NO: 12447 - protein, 9 aa, Artificial Sequence
  Description of Artificial Sequence: Synthetic peptide
DWQRVKTMW

SEQ ID NO: 12448 - protein, 9 aa, Artificial Sequence
  Description of Artificial Sequence: Synthetic peptide
DWSTIEWTA

SEQ ID NO: 12449 - protein, 9 aa, Artificial Sequence
  Description of Artificial Sequence: Synthetic peptide
DYWSYPNYF

SEQ ID NO: 12450 - protein, 9 aa, Artificial Sequence
  Description of Artificial Sequence: Synthetic peptide
DYYESWWMH

SEQ ID NO: 12451 - protein, 9 aa, Artificial Sequence
  Description of Artificial Sequence: Synthetic peptide
EAHQSTLST

SEQ ID NO: 12452 - protein, 9 aa, Artificial Sequence
  Description of Artificial Sequence: Synthetic peptide
EAKFLGGCW

SEQ ID NO: 12453 - protein, 9 aa, Artificial Sequence
  Description of Artificial Sequence: Synthetic peptide
EANHYIEIQ

SEQ ID NO: 12454 - protein, 9 aa, Artificial Sequence
  Description of Artificial Sequence: Synthetic peptide
EAPKVTVWG

SEQ ID NO: 12455 - protein, 9 aa, Artificial Sequence
  Description of Artificial Sequence: Synthetic peptide
EASMKWWSN

SEQ ID NO: 12456 - protein, 9 aa, Artificial Sequence
  Description of Artificial Sequence: Synthetic peptide
ECDHHEEHY

SEQ ID NO: 12457 - protein, 9 aa, Artificial Sequence
  Description of Artificial Sequence: Synthetic peptide
ECQCCECQD

SEQ ID NO: 12458 - protein, 9 aa, Artificial Sequence
  Description of Artificial Sequence: Synthetic peptide
ECRMRLDNS

SEQ ID NO: 12459 - protein, 9 aa, Artificial Sequence
  Description of Artificial Sequence: Synthetic peptide
EDRNCSECL

SEQ ID NO: 12460 - protein, 9 aa, Artificial Sequence
  Description of Artificial Sequence: Synthetic peptide
EEKPNYHTA

SEQ ID NO: 12461 - protein, 9 aa, Artificial Sequence
  Description of Artificial Sequence: Synthetic peptide
EFDYYCLKT

SEQ ID NO: 12462 - protein, 9 aa, Artificial Sequence
  Description of Artificial Sequence: Synthetic peptide
EFITKNWEH

SEQ ID NO: 12463 - protein, 9 aa, Artificial Sequence
  Description of Artificial Sequence: Synthetic peptide
EHECPNSGM

SEQ ID NO: 12464 - protein, 9 aa, Artificial Sequence
  Description of Artificial Sequence: Synthetic peptide
EHETTMAEA

SEQ ID NO: 12465 - protein, 9 aa, Artificial Sequence
  Description of Artificial Sequence: Synthetic peptide
EICSHLCWA

SEQ ID NO: 12466 - protein, 9 aa, Artificial Sequence
  Description of Artificial Sequence: Synthetic peptide
EIILGGYHN

SEQ ID NO: 12467 - protein, 9 aa, Artificial Sequence
  Description of Artificial Sequence: Synthetic peptide
EKGWSEPGN

SEQ ID NO: 12468 - protein, 9 aa, Artificial Sequence
  Description of Artificial Sequence: Synthetic peptide
EKQQIEIAS

SEQ ID NO: 12469 - protein, 9 aa, Artificial Sequence
  Description of Artificial Sequence: Synthetic peptide
EMMSQSACA

SEQ ID NO: 12470 - protein, 9 aa, Artificial Sequence
  Description of Artificial Sequence: Synthetic peptide
ENESSHTNP

SEQ ID NO: 12471 - protein, 9 aa, Artificial Sequence
  Description of Artificial Sequence: Synthetic peptide
ENKVCVYMM

SEQ ID NO: 12472 - protein, 9 aa, Artificial Sequence
  Description of Artificial Sequence: Synthetic peptide
EPYQKDCEL

SEQ ID NO: 12473 - protein, 9 aa, Artificial Sequence
  Description of Artificial Sequence: Synthetic peptide
EQQAPDHVK

SEQ ID NO: 12474 - protein, 9 aa, Artificial Sequence
  Description of Artificial Sequence: Synthetic peptide
ERGVMCHFW

SEQ ID NO: 12475 - protein, 9 aa, Artificial Sequence
  Description of Artificial Sequence: Synthetic peptide
ESENPMGPY

SEQ ID NO: 12476 - protein, 9 aa, Artificial Sequence
  Description of Artificial Sequence: Synthetic peptide
ESHMMRISE

SEQ ID NO: 12477 - protein, 9 aa, Artificial Sequence
  Description of Artificial Sequence: Synthetic peptide
ETQTHYTSC

SEQ ID NO: 12478 - protein, 9 aa, Artificial Sequence
  Description of Artificial Sequence: Synthetic peptide
ETWLMHHHV

SEQ ID NO: 12479 - protein, 9 aa, Artificial Sequence
  Description of Artificial Sequence: Synthetic peptide
ETYIGGCCM

SEQ ID NO: 12480 - protein, 9 aa, Artificial Sequence
  Description of Artificial Sequence: Synthetic peptide
EVGWIPPYM

SEQ ID NO: 12481 - protein, 9 aa, Artificial Sequence
  Description of Artificial Sequence: Synthetic peptide
EVNYVKCND

SEQ ID NO: 12482 - protein, 9 aa, Artificial Sequence
  Description of Artificial Sequence: Synthetic peptide
EVTNRTIPR

SEQ ID NO: 12483 - protein, 9 aa, Artificial Sequence
  Description of Artificial Sequence: Synthetic peptide
EWKCSQNLT

SEQ ID NO: 12484 - protein, 9 aa, Artificial Sequence
  Description of Artificial Sequence: Synthetic peptide
EWKYSQNLT

SEQ ID NO: 12485 - protein, 9 aa, Artificial Sequence
  Description of Artificial Sequence: Synthetic peptide
EYNQCTFGM

SEQ ID NO: 12486 - protein, 9 aa, Artificial Sequence
  Description of Artificial Sequence: Synthetic peptide
EYYQSVKMS

SEQ ID NO: 12487 - protein, 9 aa, Artificial Sequence
  Description of Artificial Sequence: Synthetic peptide
FAQLHAVGN

SEQ ID NO: 12488 - protein, 9 aa, Artificial Sequence
  Description of Artificial Sequence: Synthetic peptide
FASAMDVTL

SEQ ID NO: 12489 - protein, 9 aa, Artificial Sequence
  Description of Artificial Sequence: Synthetic peptide
FDRHRWQPL

SEQ ID NO: 12490 - protein, 9 aa, Artificial Sequence
  Description of Artificial Sequence: Synthetic peptide
FEHFDLSAS

SEQ ID NO: 12491 - protein, 9 aa, Artificial Sequence
  Description of Artificial Sequence: Synthetic peptide
FLGNIKSYE

SEQ ID NO: 12492 - protein, 9 aa, Artificial Sequence
  Description of Artificial Sequence: Synthetic peptide
FLQNVGFFN

SEQ ID NO: 12493 - protein, 9 aa, Artificial Sequence
  Description of Artificial Sequence: Synthetic peptide
FMMAFKLDC

SEQ ID NO: 12494 - protein, 9 aa, Artificial Sequence
  Description of Artificial Sequence: Synthetic peptide
FMQPIKQMD

SEQ ID NO: 12495 - protein, 9 aa, Artificial Sequence
  Description of Artificial Sequence: Synthetic peptide
FNPWDKYGW

SEQ ID NO: 12496 - protein, 9 aa, Artificial Sequence
  Description of Artificial Sequence: Synthetic peptide
FQPHIRDVG

SEQ ID NO: 12497 - protein, 9 aa, Artificial Sequence
  Description of Artificial Sequence: Synthetic peptide
FQYRPAEHV

SEQ ID NO: 12498 - protein, 9 aa, Artificial Sequence
  Description of Artificial Sequence: Synthetic peptide
FRVLQGNSV

SEQ ID NO: 12499 - protein, 9 aa, Artificial Sequence
  Description of Artificial Sequence: Synthetic peptide
FTETTHCGH

SEQ ID NO: 12500 - protein, 9 aa, Artificial Sequence
  Description of Artificial Sequence: Synthetic peptide
FTSGHGYME

SEQ ID NO: 12501 - protein, 9 aa, Artificial Sequence
  Description of Artificial Sequence: Synthetic peptide
FVHKTEGED

SEQ ID NO: 12502 - protein, 9 aa, Artificial Sequence
  Description of Artificial Sequence: Synthetic peptide
FVHTVTVNP

SEQ ID NO: 12503 - protein, 9 aa, Artificial Sequence
  Description of Artificial Sequence: Synthetic peptide
FYFPIGMRP

SEQ ID NO: 12504 - protein, 9 aa, Artificial Sequence
  Description of Artificial Sequence: Synthetic peptide
GDGRAETWQ

SEQ ID NO: 12505 - protein, 9 aa, Artificial Sequence
  Description of Artificial Sequence: Synthetic peptide
GEDCPSAEE

SEQ ID NO: 12506 - protein, 9 aa, Artificial Sequence
  Description of Artificial Sequence: Synthetic peptide
GELVRRLSQ

SEQ ID NO: 12507 - protein, 9 aa, Artificial Sequence
  Description of Artificial Sequence: Synthetic peptide
GFCYPNKMI

SEQ ID NO: 12508 - protein, 9 aa, Artificial Sequence
  Description of Artificial Sequence: Synthetic peptide
GFTQDPVGH

SEQ ID NO: 12509 - protein, 9 aa, Artificial Sequence
  Description of Artificial Sequence: Synthetic peptide
GGDTGEYLF

SEQ ID NO: 12510 - protein, 9 aa, Artificial Sequence
  Description of Artificial Sequence: Synthetic peptide
GHEPNKHFQ

SEQ ID NO: 12511 - protein, 9 aa, Artificial Sequence
  Description of Artificial Sequence: Synthetic peptide
GHQVTEYMF

SEQ ID NO: 12512 - protein, 9 aa, Artificial Sequence
  Description of Artificial Sequence: Synthetic peptide
GHYVIHKTN

SEQ ID NO: 12513 - protein, 9 aa, Artificial Sequence
  Description of Artificial Sequence: Synthetic peptide
GIITPSMGS

SEQ ID NO: 12514 - protein, 9 aa, Artificial Sequence
  Description of Artificial Sequence: Synthetic peptide
GMNPQLECP

SEQ ID NO: 12515 - protein, 9 aa, Artificial Sequence
  Description of Artificial Sequence: Synthetic peptide
GQPINGKQE

SEQ ID NO: 12516 - protein, 9 aa, Artificial Sequence
  Description of Artificial Sequence: Synthetic peptide
GSARQDGKP

SEQ ID NO: 12517 - protein, 9 aa, Artificial Sequence
  Description of Artificial Sequence: Synthetic peptide
GSCLGISDM

SEQ ID NO: 12518 - protein, 9 aa, Artificial Sequence
  Description of Artificial Sequence: Synthetic peptide
GSMQIAQEG

SEQ ID NO: 12519 - protein, 9 aa, Artificial Sequence
  Description of Artificial Sequence: Synthetic peptide
GSMQSPTRR

SEQ ID NO: 12520 - protein, 9 aa, Artificial Sequence
  Description of Artificial Sequence: Synthetic peptide
GSNSHLPLQ

SEQ ID NO: 12521 - protein, 9 aa, Artificial Sequence
  Description of Artificial Sequence: Synthetic peptide
GSNSHLPLR

SEQ ID NO: 12522 - protein, 9 aa, Artificial Sequence
  Description of Artificial Sequence: Synthetic peptide
GSTSKDSSM

SEQ ID NO: 12523 - protein, 9 aa, Artificial Sequence
  Description of Artificial Sequence: Synthetic peptide
GTHPCGCPI

SEQ ID NO: 12524 - protein, 9 aa, Artificial Sequence
  Description of Artificial Sequence: Synthetic peptide
GTSFNVHGA

SEQ ID NO: 12525 - protein, 9 aa, Artificial Sequence
  Description of Artificial Sequence: Synthetic peptide
GVDHFFWVS

SEQ ID NO: 12526 - protein, 9 aa, Artificial Sequence
  Description of Artificial Sequence: Synthetic peptide
GVHSAFYQT

SEQ ID NO: 12527 - protein, 9 aa, Artificial Sequence
  Description of Artificial Sequence: Synthetic peptide
GVIWIHDEN

SEQ ID NO: 12528 - protein, 9 aa, Artificial Sequence
  Description of Artificial Sequence: Synthetic peptide
GYNHVDSWS

SEQ ID NO: 12529 - protein, 9 aa, Artificial Sequence
  Description of Artificial Sequence: Synthetic peptide
HCHLCSLRG

SEQ ID NO: 12530 - protein, 9 aa, Artificial Sequence
  Description of Artificial Sequence: Synthetic peptide
HDERMWAMD

SEQ ID NO: 12531 - protein, 9 aa, Artificial Sequence
  Description of Artificial Sequence: Synthetic peptide
HEPRTICTF

SEQ ID NO: 12532 - protein, 9 aa, Artificial Sequence
  Description of Artificial Sequence: Synthetic peptide
HEQIGPEYR

SEQ ID NO: 12533 - protein, 9 aa, Artificial Sequence
  Description of Artificial Sequence: Synthetic peptide
HFGYMHCSQ

SEQ ID NO: 12534 - protein, 9 aa, Artificial Sequence
  Description of Artificial Sequence: Synthetic peptide
HNEHKVGYG

SEQ ID NO: 12535 - protein, 9 aa, Artificial Sequence
  Description of Artificial Sequence: Synthetic peptide
HPLKIPIGK

SEQ ID NO: 12536 - protein, 9 aa, Artificial Sequence
  Description of Artificial Sequence: Synthetic peptide
HPPSMIRVV

SEQ ID NO: 12537 - protein, 9 aa, Artificial Sequence
  Description of Artificial Sequence: Synthetic peptide
HQNHPPAFD

SEQ ID NO: 12538 - protein, 9 aa, Artificial Sequence
  Description of Artificial Sequence: Synthetic peptide
HSFEIHDEG

SEQ ID NO: 12539 - protein, 9 aa, Artificial Sequence
  Description of Artificial Sequence: Synthetic peptide
HSNPRCVFF

SEQ ID NO: 12540 - protein, 9 aa, Artificial Sequence
  Description of Artificial Sequence: Synthetic peptide
HTDQDRHAE

SEQ ID NO: 12541 - protein, 9 aa, Artificial Sequence
  Description of Artificial Sequence: Synthetic peptide
HTSPCWGSY

SEQ ID NO: 12542 - protein, 9 aa, Artificial Sequence
  Description of Artificial Sequence: Synthetic peptide
HVEMPAPGC

SEQ ID NO: 12543 - protein, 9 aa, Artificial Sequence
  Description of Artificial Sequence: Synthetic peptide
HWIHMVNQQ

SEQ ID NO: 12544 - protein, 9 aa, Artificial Sequence
  Description of Artificial Sequence: Synthetic peptide
ICFWTIAQW

SEQ ID NO: 12545 - protein, 9 aa, Artificial Sequence
  Description of Artificial Sequence: Synthetic peptide
ICKPEGGFK

SEQ ID NO: 12546 - protein, 9 aa, Artificial Sequence
  Description of Artificial Sequence: Synthetic peptide
IDNMPKCRP

SEQ ID NO: 12547 - protein, 9 aa, Artificial Sequence
  Description of Artificial Sequence: Synthetic peptide
IDVHNGFDQ

SEQ ID NO: 12548 - protein, 9 aa, Artificial Sequence
  Description of Artificial Sequence: Synthetic peptide
IDVRPHFAD

SEQ ID NO: 12549 - protein, 9 aa, Artificial Sequence
  Description of Artificial Sequence: Synthetic peptide
IEMSEQPNC

SEQ ID NO: 12550 - protein, 9 aa, Artificial Sequence
  Description of Artificial Sequence: Synthetic peptide
IETRMESMG

SEQ ID NO: 12551 - protein, 9 aa, Artificial Sequence
  Description of Artificial Sequence: Synthetic peptide
IFSHWFAGW

SEQ ID NO: 12552 - protein, 9 aa, Artificial Sequence
  Description of Artificial Sequence: Synthetic peptide
IGCLYTSNW

SEQ ID NO: 12553 - protein, 9 aa, Artificial Sequence
  Description of Artificial Sequence: Synthetic peptide
IGDQAMECS

SEQ ID NO: 12554 - protein, 9 aa, Artificial Sequence
  Description of Artificial Sequence: Synthetic peptide
IKCEPWVSG

SEQ ID NO: 12555 - protein, 9 aa, Artificial Sequence
  Description of Artificial Sequence: Synthetic peptide
ILAQENRWA

SEQ ID NO: 12556 - protein, 9 aa, Artificial Sequence
  Description of Artificial Sequence: Synthetic peptide
IMEWKNTMV

SEQ ID NO: 12557 - protein, 9 aa, Artificial Sequence
  Description of Artificial Sequence: Synthetic peptide
IMMHRVMSD

SEQ ID NO: 12558 - protein, 9 aa, Artificial Sequence
  Description of Artificial Sequence: Synthetic peptide
IMRDMVLPV

SEQ ID NO: 12559 - protein, 9 aa, Artificial Sequence
  Description of Artificial Sequence: Synthetic peptide
IMTNYHYLD

SEQ ID NO: 12560 - protein, 9 aa, Artificial Sequence
  Description of Artificial Sequence: Synthetic peptide
IMVKRTVNA

SEQ ID NO: 12561 - protein, 9 aa, Artificial Sequence
  Description of Artificial Sequence: Synthetic peptide
INCKPSVQF

SEQ ID NO: 12562 - protein, 9 aa, Artificial Sequence
  Description of Artificial Sequence: Synthetic peptide
INVDKDQFL

SEQ ID NO: 12563 - protein, 9 aa, Artificial Sequence
  Description of Artificial Sequence: Synthetic peptide
IQCSTNSWE

SEQ ID NO: 12564 - protein, 9 aa, Artificial Sequence
  Description of Artificial Sequence: Synthetic peptide
IQFVTWRFE

SEQ ID NO: 12565 - protein, 9 aa, Artificial Sequence
  Description of Artificial Sequence: Synthetic peptide
IQGPSWHKN

SEQ ID NO: 12566 - protein, 9 aa, Artificial Sequence
  Description of Artificial Sequence: Synthetic peptide
IQQVDMMCP

SEQ ID NO: 12567 - protein, 9 aa, Artificial Sequence
  Description of Artificial Sequence: Synthetic peptide
IRWVEPMCQ

SEQ ID NO: 12568 - protein, 9 aa, Artificial Sequence
  Description of Artificial Sequence: Synthetic peptide
ISPCPTVVA

SEQ ID NO: 12569 - protein, 9 aa, Artificial Sequence
  Description of Artificial Sequence: Synthetic peptide
ISPNMQWYP

SEQ ID NO: 12570 - protein, 9 aa, Artificial Sequence
  Description of Artificial Sequence: Synthetic peptide
IVFQGDTGT

SEQ ID NO: 12571 - protein, 9 aa, Artificial Sequence
  Description of Artificial Sequence: Synthetic peptide
IVTVNCAGE

SEQ ID NO: 12572 - protein, 9 aa, Artificial Sequence
  Description of Artificial Sequence: Synthetic peptide
IWCNGQMDD

SEQ ID NO: 12573 - protein, 9 aa, Artificial Sequence
  Description of Artificial Sequence: Synthetic peptide
IYTYFIEWF

SEQ ID NO: 12574 - protein, 9 aa, Artificial Sequence
  Description of Artificial Sequence: Synthetic peptide
KAFPIDLIA

SEQ ID NO: 12575 - protein, 9 aa, Artificial Sequence
  Description of Artificial Sequence: Synthetic peptide
KDDHCAFWN

SEQ ID NO: 12576 - protein, 9 aa, Artificial Sequence
  Description of Artificial Sequence: Synthetic peptide
KEGVDQEFF

SEQ ID NO: 12577 - protein, 9 aa, Artificial Sequence
  Description of Artificial Sequence: Synthetic peptide
KEKQNAKCL

SEQ ID NO: 12578 - protein, 9 aa, Artificial Sequence
  Description of Artificial Sequence: Synthetic peptide
KHHPTDADN

SEQ ID NO: 12579 - protein, 9 aa, Artificial Sequence
  Description of Artificial Sequence: Synthetic peptide
KICMYHLID

SEQ ID NO: 12580 - protein, 9 aa, Artificial Sequence
  Description of Artificial Sequence: Synthetic peptide
KIFWTTEFH

SEQ ID NO: 12581 - protein, 9 aa, Artificial Sequence
  Description of Artificial Sequence: Synthetic peptide
KKTEEHHCQ

SEQ ID NO: 12582 - protein, 9 aa, Artificial Sequence
  Description of Artificial Sequence: Synthetic peptide
KMMHLPQEE

SEQ ID NO: 12583 - protein, 9 aa, Artificial Sequence
  Description of Artificial Sequence: Synthetic peptide
KMVQDEMWC

SEQ ID NO: 12584 - protein, 9 aa, Artificial Sequence
  Description of Artificial Sequence: Synthetic peptide
KQEPMHCSA

SEQ ID NO: 12585 - protein, 9 aa, Artificial Sequence
  Description of Artificial Sequence: Synthetic peptide
KSDQVWQGE

SEQ ID NO: 12586 - protein, 9 aa, Artificial Sequence
  Description of Artificial Sequence: Synthetic peptide
KSTIFKMRH

SEQ ID NO: 12587 - protein, 9 aa, Artificial Sequence
  Description of Artificial Sequence: Synthetic peptide
KTECFFSMH

SEQ ID NO: 12588 - protein, 9 aa, Artificial Sequence
  Description of Artificial Sequence: Synthetic peptide
KTFPAADVK

SEQ ID NO: 12589 - protein, 9 aa, Artificial Sequence
  Description of Artificial Sequence: Synthetic peptide
KVEFTATVM

SEQ ID NO: 12590 - protein, 9 aa, Artificial Sequence
  Description of Artificial Sequence: Synthetic peptide
KVNIYSDTL

SEQ ID NO: 12591 - protein, 9 aa, Artificial Sequence
  Description of Artificial Sequence: Synthetic peptide
LAERWEQNN

SEQ ID NO: 12592 - protein, 9 aa, Artificial Sequence
  Description of Artificial Sequence: Synthetic peptide
LAHEPYWSP

SEQ ID NO: 12593 - protein, 9 aa, Artificial Sequence
  Description of Artificial Sequence: Synthetic peptide
LALCDAVND

SEQ ID NO: 12594 - protein, 9 aa, Artificial Sequence
  Description of Artificial Sequence: Synthetic peptide
LALHSQFCE

SEQ ID NO: 12595 - protein, 9 aa, Artificial Sequence
  Description of Artificial Sequence: Synthetic peptide
LASPKQMVA

SEQ ID NO: 12596 - protein, 9 aa, Artificial Sequence
  Description of Artificial Sequence: Synthetic peptide
LCAPYNREV

SEQ ID NO: 12597 - protein, 9 aa, Artificial Sequence
  Description of Artificial Sequence: Synthetic peptide
LCGCCMMHY

SEQ ID NO: 12598 - protein, 9 aa, Artificial Sequence
  Description of Artificial Sequence: Synthetic peptide
LCGNDKKCD

SEQ ID NO: 12599 - protein, 9 aa, Artificial Sequence
  Description of Artificial Sequence: Synthetic peptide
LCHFTKGVY

SEQ ID NO: 12600 - protein, 9 aa, Artificial Sequence
  Description of Artificial Sequence: Synthetic peptide
LDQGMYFHK

SEQ ID NO: 12601 - protein, 9 aa, Artificial Sequence
  Description of Artificial Sequence: Synthetic peptide
LECWNKIAR

SEQ ID NO: 12602 - protein, 9 aa, Artificial Sequence
  Description of Artificial Sequence: Synthetic peptide
LGYHVKDFM

SEQ ID NO: 12603 - protein, 9 aa, Artificial Sequence
  Description of Artificial Sequence: Synthetic peptide
LIAFLVDRI

SEQ ID NO: 12604 - protein, 9 aa, Artificial Sequence
  Description of Artificial Sequence: Synthetic peptide
LIMPLTTQM

SEQ ID NO: 12605 - protein, 9 aa, Artificial Sequence
  Description of Artificial Sequence: Synthetic peptide
LMKMWTSMG

SEQ ID NO: 12606 - protein, 9 aa, Artificial Sequence
  Description of Artificial Sequence: Synthetic peptide
LPDFWRTRN

SEQ ID NO: 12607 - protein, 9 aa, Artificial Sequence
  Description of Artificial Sequence: Synthetic peptide
LPIFVQGDF

SEQ ID NO: 12608 - protein, 9 aa, Artificial Sequence
  Description of Artificial Sequence: Synthetic peptide
LRAILDCGW

SEQ ID NO: 12609 - protein, 9 aa, Artificial Sequence
  Description of Artificial Sequence: Synthetic peptide
LSATMVWAQ

SEQ ID NO: 12610 - protein, 9 aa, Artificial Sequence
  Description of Artificial Sequence: Synthetic peptide
LSIQDNRGQ

SEQ ID NO: 12611 - protein, 9 aa, Artificial Sequence
  Description of Artificial Sequence: Synthetic peptide
LSTSSQLTP

SEQ ID NO: 12612 - protein, 9 aa, Artificial Sequence
  Description of Artificial Sequence: Synthetic peptide
LSVAVQESN

SEQ ID NO: 12613 - protein, 9 aa, Artificial Sequence
  Description of Artificial Sequence: Synthetic peptide
LSWMACAQA

SEQ ID NO: 12614 - protein, 9 aa, Artificial Sequence
  Description of Artificial Sequence: Synthetic peptide
LSYVMDTAA

SEQ ID NO: 12615 - protein, 9 aa, Artificial Sequence
  Description of Artificial Sequence: Synthetic peptide
LTQFSCVSH

SEQ ID NO: 12616 - protein, 9 aa, Artificial Sequence
  Description of Artificial Sequence: Synthetic peptide
LWVWWMKDH

SEQ ID NO: 12617 - protein, 9 aa, Artificial Sequence
  Description of Artificial Sequence: Synthetic peptide
LYEEHHACW

SEQ ID NO: 12618 - protein, 9 aa, Artificial Sequence
  Description of Artificial Sequence: Synthetic peptide
MAASGMLCY

SEQ ID NO: 12619 - protein, 9 aa, Artificial Sequence
  Description of Artificial Sequence: Synthetic peptide
MADGRPRMP

SEQ ID NO: 12620 - protein, 9 aa, Artificial Sequence
  Description of Artificial Sequence: Synthetic peptide
MATCYHDHW

SEQ ID NO: 12621 - protein, 9 aa, Artificial Sequence
  Description of Artificial Sequence: Synthetic peptide
MCAQPCNLP

SEQ ID NO: 12622 - protein, 9 aa, Artificial Sequence
  Description of Artificial Sequence: Synthetic peptide
MCVHKFLTG

SEQ ID NO: 12623 - protein, 9 aa, Artificial Sequence
  Description of Artificial Sequence: Synthetic peptide
MDGPWMGKL

SEQ ID NO: 12624 - protein, 9 aa, Artificial Sequence
  Description of Artificial Sequence: Synthetic peptide
MEHVPTRDQ

SEQ ID NO: 12625 - protein, 9 aa, Artificial Sequence
  Description of Artificial Sequence: Synthetic peptide
MEMPLMDVI

SEQ ID NO: 12626 - protein, 9 aa, Artificial Sequence
  Description of Artificial Sequence: Synthetic peptide
MGTQYQFTG

SEQ ID NO: 12627 - protein, 9 aa, Artificial Sequence
  Description of Artificial Sequence: Synthetic peptide
MHAETDIQM

SEQ ID NO: 12628 - protein, 9 aa, Artificial Sequence
  Description of Artificial Sequence: Synthetic peptide
MHFTSWPVD

SEQ ID NO: 12629 - protein, 9 aa, Artificial Sequence
  Description of Artificial Sequence: Synthetic peptide
MKIMCENVR

SEQ ID NO: 12630 - protein, 9 aa, Artificial Sequence
  Description of Artificial Sequence: Synthetic peptide
MNMEKLQID

SEQ ID NO: 12631 - protein, 9 aa, Artificial Sequence
  Description of Artificial Sequence: Synthetic peptide
MNRIMMVAD

SEQ ID NO: 12632 - protein, 9 aa, Artificial Sequence
  Description of Artificial Sequence: Synthetic peptide
MNSPRRECI

SEQ ID NO: 12633 - protein, 9 aa, Artificial Sequence
  Description of Artificial Sequence: Synthetic peptide
MQIILEFPR

SEQ ID NO: 12634 - protein, 9 aa, Artificial Sequence
  Description of Artificial Sequence: Synthetic peptide
MQTAHPVYL

SEQ ID NO: 12635 - protein, 9 aa, Artificial Sequence
  Description of Artificial Sequence: Synthetic peptide
MRNHGDFDF

SEQ ID NO: 12636 - protein, 9 aa, Artificial Sequence
  Description of Artificial Sequence: Synthetic peptide
MSILASVRV

SEQ ID NO: 12637 - protein, 9 aa, Artificial Sequence
  Description of Artificial Sequence: Synthetic peptide
MSIRGNWGY

SEQ ID NO: 12638 - protein, 9 aa, Artificial Sequence
  Description of Artificial Sequence: Synthetic peptide
MSKPCRVCE

SEQ ID NO: 12639 - protein, 9 aa, Artificial Sequence
  Description of Artificial Sequence: Synthetic peptide
MTDPGMKRR

SEQ ID NO: 12640 - protein, 9 aa, Artificial Sequence
  Description of Artificial Sequence: Synthetic peptide
MWVQRETGG

SEQ ID NO: 12641 - protein, 9 aa, Artificial Sequence
  Description of Artificial Sequence: Synthetic peptide
NAAIWEHVH

SEQ ID NO: 12642 - protein, 9 aa, Artificial Sequence
  Description of Artificial Sequence: Synthetic peptide
NACTKVKMT

SEQ ID NO: 12643 - protein, 9 aa, Artificial Sequence
  Description of Artificial Sequence: Synthetic peptide
NAYNFTKDC

SEQ ID NO: 12644 - protein, 9 aa, Artificial Sequence
  Description of Artificial Sequence: Synthetic peptide
NCENKQNVI

SEQ ID NO: 12645 - protein, 9 aa, Artificial Sequence
  Description of Artificial Sequence: Synthetic peptide
NCPCHTDAY

SEQ ID NO: 12646 - protein, 9 aa, Artificial Sequence
  Description of Artificial Sequence: Synthetic peptide
NCREHPEEG

SEQ ID NO: 12647 - protein, 9 aa, Artificial Sequence
  Description of Artificial Sequence: Synthetic peptide
NDIECEMAS

SEQ ID NO: 12648 - protein, 9 aa, Artificial Sequence
  Description of Artificial Sequence: Synthetic peptide
NEYEKLFPR

SEQ ID NO: 12649 - protein, 9 aa, Artificial Sequence
  Description of Artificial Sequence: Synthetic peptide
NFMSMYGFE

SEQ ID NO: 12650 - protein, 9 aa, Artificial Sequence
  Description of Artificial Sequence: Synthetic peptide
NHFPILIDH

SEQ ID NO: 12651 - protein, 9 aa, Artificial Sequence
  Description of Artificial Sequence: Synthetic peptide
NHKLHTGPG

SEQ ID NO: 12652 - protein, 9 aa, Artificial Sequence
  Description of Artificial Sequence: Synthetic peptide
NHWMGEKEC

SEQ ID NO: 12653 - protein, 9 aa, Artificial Sequence
  Description of Artificial Sequence: Synthetic peptide
NIGFAIVDP

SEQ ID NO: 12654 - protein, 9 aa, Artificial Sequence
  Description of Artificial Sequence: Synthetic peptide
NIGKERMEN

SEQ ID NO: 12655 - protein, 9 aa, Artificial Sequence
  Description of Artificial Sequence: Synthetic peptide
NIGTHMGHT

SEQ ID NO: 12656 - protein, 9 aa, Artificial Sequence
  Description of Artificial Sequence: Synthetic peptide
NIYVTRAHC

SEQ ID NO: 12657 - protein, 9 aa, Artificial Sequence
  Description of Artificial Sequence: Synthetic peptide
NKSPTWTES

SEQ ID NO: 12658 - protein, 9 aa, Artificial Sequence
  Description of Artificial Sequence: Synthetic peptide
NLHTPAGCM

SEQ ID NO: 12659 - protein, 9 aa, Artificial Sequence
  Description of Artificial Sequence: Synthetic peptide
NLVCRESSC

SEQ ID NO: 12660 - protein, 9 aa, Artificial Sequence
  Description of Artificial Sequence: Synthetic peptide
NPCIKASYF

SEQ ID NO: 12661 - protein, 9 aa, Artificial Sequence
  Description of Artificial Sequence: Synthetic peptide
NPNGPLHYD

SEQ ID NO: 12662 - protein, 9 aa, Artificial Sequence
  Description of Artificial Sequence: Synthetic peptide
NQMPKEKWD

SEQ ID NO: 12663 - protein, 9 aa, Artificial Sequence
  Description of Artificial Sequence: Synthetic peptide
NRTGVTPST

SEQ ID NO: 12664 - protein, 9 aa, Artificial Sequence
  Description of Artificial Sequence: Synthetic peptide
NRVDAMIHY

SEQ ID NO: 12665 - protein, 9 aa, Artificial Sequence
  Description of Artificial Sequence: Synthetic peptide
NRWMMGMKP

SEQ ID NO: 12666 - protein, 9 aa, Artificial Sequence
  Description of Artificial Sequence: Synthetic peptide
NSTEQEIIQ

SEQ ID NO: 12667 - protein, 9 aa, Artificial Sequence
  Description of Artificial Sequence: Synthetic peptide
NTMTSAPVC

SEQ ID NO: 12668 - protein, 9 aa, Artificial Sequence
  Description of Artificial Sequence: Synthetic peptide
NTNMAWKQF

SEQ ID NO: 12669 - protein, 9 aa, Artificial Sequence
  Description of Artificial Sequence: Synthetic peptide
NVTELHNPK

SEQ ID NO: 12670 - protein, 9 aa, Artificial Sequence
  Description of Artificial Sequence: Synthetic peptide
NVTETGPDA

SEQ ID NO: 12671 - protein, 9 aa, Artificial Sequence
  Description of Artificial Sequence: Synthetic peptide
NYASEEFLT

SEQ ID NO: 12672 - protein, 9 aa, Artificial Sequence
  Description of Artificial Sequence: Synthetic peptide
NYMGIDEQK

SEQ ID NO: 12673 - protein, 9 aa, Artificial Sequence
  Description of Artificial Sequence: Synthetic peptide
NYSMPVDWS

SEQ ID NO: 12674 - protein, 9 aa, Artificial Sequence
  Description of Artificial Sequence: Synthetic peptide
PCVEPNAAM

SEQ ID NO: 12675 - protein, 9 aa, Artificial Sequence
  Description of Artificial Sequence: Synthetic peptide
PDARGMHFL

SEQ ID NO: 12676 - protein, 9 aa, Artificial Sequence
  Description of Artificial Sequence: Synthetic peptide
PEHPRDWLM

SEQ ID NO: 12677 - protein, 9 aa, Artificial Sequence
  Description of Artificial Sequence: Synthetic peptide
PHAGQGNKG

SEQ ID NO: 12678 - protein, 9 aa, Artificial Sequence
  Description of Artificial Sequence: Synthetic peptide
PHGPITNPE

SEQ ID NO: 12679 - protein, 9 aa, Artificial Sequence
  Description of Artificial Sequence: Synthetic peptide
PIAIKDQGW

SEQ ID NO: 12680 - protein, 9 aa, Artificial Sequence
  Description of Artificial Sequence: Synthetic peptide
PIASMFNGP

SEQ ID NO: 12681 - protein, 9 aa, Artificial Sequence
  Description of Artificial Sequence: Synthetic peptide
PKILFMFSF

SEQ ID NO: 12682 - protein, 9 aa, Artificial Sequence
  Description of Artificial Sequence: Synthetic peptide
PLMIARYDP

SEQ ID NO: 12683 - protein, 9 aa, Artificial Sequence
  Description of Artificial Sequence: Synthetic peptide
PMAPDWRNS

SEQ ID NO: 12684 - protein, 9 aa, Artificial Sequence
  Description of Artificial Sequence: Synthetic peptide
PMTLPLECW

SEQ ID NO: 12685 - protein, 9 aa, Artificial Sequence
  Description of Artificial Sequence: Synthetic peptide
PNEWYLWAC

SEQ ID NO: 12686 - protein, 9 aa, Artificial Sequence
  Description of Artificial Sequence: Synthetic peptide
PPNMTSCDW

SEQ ID NO: 12687 - protein, 9 aa, Artificial Sequence
  Description of Artificial Sequence: Synthetic peptide
PQDQSCAGQ

SEQ ID NO: 12688 - protein, 9 aa, Artificial Sequence
  Description of Artificial Sequence: Synthetic peptide
PQHWKSVGA

SEQ ID NO: 12689 - protein, 9 aa, Artificial Sequence
  Description of Artificial Sequence: Synthetic peptide
PTAMWLTHM

SEQ ID NO: 12690 - protein, 9 aa, Artificial Sequence
  Description of Artificial Sequence: Synthetic peptide
PVATYNVSR

SEQ ID NO: 12691 - protein, 9 aa, Artificial Sequence
  Description of Artificial Sequence: Synthetic peptide
PVEPSCQMK

SEQ ID NO: 12692 - protein, 9 aa, Artificial Sequence
  Description of Artificial Sequence: Synthetic peptide
PVEVMQWKP

SEQ ID NO: 12693 - protein, 9 aa, Artificial Sequence
  Description of Artificial Sequence: Synthetic peptide
PYEPQTINC

SEQ ID NO: 12694 - protein, 9 aa, Artificial Sequence
  Description of Artificial Sequence: Synthetic peptide
PYVDKWANH

SEQ ID NO: 12695 - protein, 9 aa, Artificial Sequence
  Description of Artificial Sequence: Synthetic peptide
QAAPVHAKG

SEQ ID NO: 12696 - protein, 9 aa, Artificial Sequence
  Description of Artificial Sequence: Synthetic peptide
QAEATHAEF

SEQ ID NO: 12697 - protein, 9 aa, Artificial Sequence
  Description of Artificial Sequence: Synthetic peptide
QATCTRYGH

SEQ ID NO: 12698 - protein, 9 aa, Artificial Sequence
  Description of Artificial Sequence: Synthetic peptide
QCGCCKMKW

SEQ ID NO: 12699 - protein, 9 aa, Artificial Sequence
  Description of Artificial Sequence: Synthetic peptide
QCIQIDMER

SEQ ID NO: 12700 - protein, 9 aa, Artificial Sequence
  Description of Artificial Sequence: Synthetic peptide
QDDEYHMTP

SEQ ID NO: 12701 - protein, 9 aa, Artificial Sequence
  Description of Artificial Sequence: Synthetic peptide
QEIAKKWSN

SEQ ID NO: 12702 - protein, 9 aa, Artificial Sequence
  Description of Artificial Sequence: Synthetic peptide
QETGPKSST

SEQ ID NO: 12703 - protein, 9 aa, Artificial Sequence
  Description of Artificial Sequence: Synthetic peptide
QFKDSRGAG

SEQ ID NO: 12704 - protein, 9 aa, Artificial Sequence
  Description of Artificial Sequence: Synthetic peptide
QGDPVKFMS

SEQ ID NO: 12705 - protein, 9 aa, Artificial Sequence
  Description of Artificial Sequence: Synthetic peptide
QGKAKQIQH

SEQ ID NO: 12706 - protein, 9 aa, Artificial Sequence
  Description of Artificial Sequence: Synthetic peptide
QGTHSQNDD

SEQ ID NO: 12707 - protein, 9 aa, Artificial Sequence
  Description of Artificial Sequence: Synthetic peptide
QIAQQPCMW

SEQ ID NO: 12708 - protein, 9 aa, Artificial Sequence
  Description of Artificial Sequence: Synthetic peptide
QIDNVNQDP

SEQ ID NO: 12709 - protein, 9 aa, Artificial Sequence
  Description of Artificial Sequence: Synthetic peptide
QITKKDNLM

SEQ ID NO: 12710 - protein, 9 aa, Artificial Sequence
  Description of Artificial Sequence: Synthetic peptide
QKLVHKESF

SEQ ID NO: 12711 - protein, 9 aa, Artificial Sequence
  Description of Artificial Sequence: Synthetic peptide
QNEKYGKTL

SEQ ID NO: 12712 - protein, 9 aa, Artificial Sequence
  Description of Artificial Sequence: Synthetic peptide
QQGPLQRIM

SEQ ID NO: 12713 - protein, 9 aa, Artificial Sequence
  Description of Artificial Sequence: Synthetic peptide
QQKRVCDQM

SEQ ID NO: 12714 - protein, 9 aa, Artificial Sequence
  Description of Artificial Sequence: Synthetic peptide
QRPWHDLTY

SEQ ID NO: 12715 - protein, 9 aa, Artificial Sequence
  Description of Artificial Sequence: Synthetic peptide
QSAQSHSHV

SEQ ID NO: 12716 - protein, 9 aa, Artificial Sequence
  Description of Artificial Sequence: Synthetic peptide
QSNHEFRWF

SEQ ID NO: 12717 - protein, 9 aa, Artificial Sequence
  Description of Artificial Sequence: Synthetic peptide
QVAVDQSPF

SEQ ID NO: 12718 - protein, 9 aa, Artificial Sequence
  Description of Artificial Sequence: Synthetic peptide
QVYALSKHW

SEQ ID NO: 12719 - protein, 9 aa, Artificial Sequence
  Description of Artificial Sequence: Synthetic peptide
QWDRCLVQV

SEQ ID NO: 12720 - protein, 9 aa, Artificial Sequence
  Description of Artificial Sequence: Synthetic peptide
QWFVQGITL

SEQ ID NO: 12721 - protein, 9 aa, Artificial Sequence
  Description of Artificial Sequence: Synthetic peptide
QYKVKERGM

SEQ ID NO: 12722 - protein, 9 aa, Artificial Sequence
  Description of Artificial Sequence: Synthetic peptide
QYNSHFLYG

SEQ ID NO: 12723 - protein, 9 aa, Artificial Sequence
  Description of Artificial Sequence: Synthetic peptide
RCDQHDDQW

SEQ ID NO: 12724 - protein, 9 aa, Artificial Sequence
  Description of Artificial Sequence: Synthetic peptide
RCTDCSYFY

SEQ ID NO: 12725 - protein, 9 aa, Artificial Sequence
  Description of Artificial Sequence: Synthetic peptide
RDQQIHHED

SEQ ID NO: 12726 - protein, 9 aa, Artificial Sequence
  Description of Artificial Sequence: Synthetic peptide
REVKPMHVH

SEQ ID NO: 12727 - protein, 9 aa, Artificial Sequence
  Description of Artificial Sequence: Synthetic peptide
RNDVCCEMQ

SEQ ID NO: 12728 - protein, 9 aa, Artificial Sequence
  Description of Artificial Sequence: Synthetic peptide
RNLYENQGC

SEQ ID NO: 12729 - protein, 9 aa, Artificial Sequence
  Description of Artificial Sequence: Synthetic peptide
RPCSKSHEF

SEQ ID NO: 12730 - protein, 9 aa, Artificial Sequence
  Description of Artificial Sequence: Synthetic peptide
RPESEHPEG

SEQ ID NO: 12731 - protein, 9 aa, Artificial Sequence
  Description of Artificial Sequence: Synthetic peptide
RPREGEWPG

SEQ ID NO: 12732 - protein, 9 aa, Artificial Sequence
  Description of Artificial Sequence: Synthetic peptide
RSLHYGNSV

SEQ ID NO: 12733 - protein, 9 aa, Artificial Sequence
  Description of Artificial Sequence: Synthetic peptide
RSPPCDSFP

SEQ ID NO: 12734 - protein, 9 aa, Artificial Sequence
  Description of Artificial Sequence: Synthetic peptide
RTNDHPDKH

SEQ ID NO: 12735 - protein, 9 aa, Artificial Sequence
  Description of Artificial Sequence: Synthetic peptide
RVDCETPYH

SEQ ID NO: 12736 - protein, 9 aa, Artificial Sequence
  Description of Artificial Sequence: Synthetic peptide
RVGNERLHH

SEQ ID NO: 12737 - protein, 9 aa, Artificial Sequence
  Description of Artificial Sequence: Synthetic peptide
RWYHYLLRN

SEQ ID NO: 12738 - protein, 9 aa, Artificial Sequence
  Description of Artificial Sequence: Synthetic peptide
RYCLLDEIE

SEQ ID NO: 12739 - protein, 9 aa, Artificial Sequence
  Description of Artificial Sequence: Synthetic peptide
SCKHDDMGK

SEQ ID NO: 12740 - protein, 9 aa, Artificial Sequence
  Description of Artificial Sequence: Synthetic peptide
SCKWIQSNR

SEQ ID NO: 12741 - protein, 9 aa, Artificial Sequence
  Description of Artificial Sequence: Synthetic peptide
SCLDHQDID

SEQ ID NO: 12742 - protein, 9 aa, Artificial Sequence
  Description of Artificial Sequence: Synthetic peptide
SCNCKKNKI

SEQ ID NO: 12743 - protein, 9 aa, Artificial Sequence
  Description of Artificial Sequence: Synthetic peptide
SDKGRQHYN

SEQ ID NO: 12744 - protein, 9 aa, Artificial Sequence
  Description of Artificial Sequence: Synthetic peptide
SDNNAPEFQ

SEQ ID NO: 12745 - protein, 9 aa, Artificial Sequence
  Description of Artificial Sequence: Synthetic peptide
SEGVYNQVY

SEQ ID NO: 12746 - protein, 9 aa, Artificial Sequence
  Description of Artificial Sequence: Synthetic peptide
SFHVAQGDY

SEQ ID NO: 12747 - protein, 9 aa, Artificial Sequence
  Description of Artificial Sequence: Synthetic peptide
SFIAPCDLS

SEQ ID NO: 12748 - protein, 9 aa, Artificial Sequence
  Description of Artificial Sequence: Synthetic peptide
SGCTWDMSP

SEQ ID NO: 12749 - protein, 9 aa, Artificial Sequence
  Description of Artificial Sequence: Synthetic peptide
SGPDTVFFT

SEQ ID NO: 12750 - protein, 9 aa, Artificial Sequence
  Description of Artificial Sequence: Synthetic peptide
SHASGIECT

SEQ ID NO: 12751 - protein, 9 aa, Artificial Sequence
  Description of Artificial Sequence: Synthetic peptide
SHESTNAGA

SEQ ID NO: 12752 - protein, 9 aa, Artificial Sequence
  Description of Artificial Sequence: Synthetic peptide
SHMQDKNTT

SEQ ID NO: 12753 - protein, 9 aa, Artificial Sequence
  Description of Artificial Sequence: Synthetic peptide
SHVEPVMGF

SEQ ID NO: 12754 - protein, 9 aa, Artificial Sequence
  Description of Artificial Sequence: Synthetic peptide
SIRWFYTDC

SEQ ID NO: 12755 - protein, 9 aa, Artificial Sequence
  Description of Artificial Sequence: Synthetic peptide
SIVNHNEAR

SEQ ID NO: 12756 - protein, 9 aa, Artificial Sequence
  Description of Artificial Sequence: Synthetic peptide
SIWGCNVGG

SEQ ID NO: 12757 - protein, 9 aa, Artificial Sequence
  Description of Artificial Sequence: Synthetic peptide
SKHEWDMHV

SEQ ID NO: 12758 - protein, 9 aa, Artificial Sequence
  Description of Artificial Sequence: Synthetic peptide
SLDRFNQSG

SEQ ID NO: 12759 - protein, 9 aa, Artificial Sequence
  Description of Artificial Sequence: Synthetic peptide
SLILMHEQT

SEQ ID NO: 12760 - protein, 9 aa, Artificial Sequence
  Description of Artificial Sequence: Synthetic peptide
SLNWWFWGG

SEQ ID NO: 12761 - protein, 9 aa, Artificial Sequence
  Description of Artificial Sequence: Synthetic peptide
SMGPLWDPL

SEQ ID NO: 12762 - protein, 9 aa, Artificial Sequence
  Description of Artificial Sequence: Synthetic peptide
SMHTVINKG

SEQ ID NO: 12763 - protein, 9 aa, Artificial Sequence
  Description of Artificial Sequence: Synthetic peptide
SNDCRNEFT

SEQ ID NO: 12764 - protein, 9 aa, Artificial Sequence
  Description of Artificial Sequence: Synthetic peptide
SNSCEYQIM

SEQ ID NO: 12765 - protein, 9 aa, Artificial Sequence
  Description of Artificial Sequence: Synthetic peptide
SPCFYPDCS

SEQ ID NO: 12766 - protein, 9 aa, Artificial Sequence
  Description of Artificial Sequence: Synthetic peptide
SPICLQHDR

SEQ ID NO: 12767 - protein, 9 aa, Artificial Sequence
  Description of Artificial Sequence: Synthetic peptide
SQKNSRHLS

SEQ ID NO: 12768 - protein, 9 aa, Artificial Sequence
  Description of Artificial Sequence: Synthetic peptide
SSALITRKE

SEQ ID NO: 12769 - protein, 9 aa, Artificial Sequence
  Description of Artificial Sequence: Synthetic peptide
SSSFWENKP

SEQ ID NO: 12770 - protein, 9 aa, Artificial Sequence
  Description of Artificial Sequence: Synthetic peptide
SSSSHLAAD

SEQ ID NO: 12771 - protein, 9 aa, Artificial Sequence
  Description of Artificial Sequence: Synthetic peptide
SSVCKTACW

SEQ ID NO: 12772 - protein, 9 aa, Artificial Sequence
  Description of Artificial Sequence: Synthetic peptide
STARDLYLM

SEQ ID NO: 12773 - protein, 9 aa, Artificial Sequence
  Description of Artificial Sequence: Synthetic peptide
STSHPDNSI

SEQ ID NO: 12774 - protein, 9 aa, Artificial Sequence
  Description of Artificial Sequence: Synthetic peptide
SVFDVWCDQ

SEQ ID NO: 12775 - protein, 9 aa, Artificial Sequence
  Description of Artificial Sequence: Synthetic peptide
SVMQGSSIQ

SEQ ID NO: 12776 - protein, 9 aa, Artificial Sequence
  Description of Artificial Sequence: Synthetic peptide
SVWSTRMQK

SEQ ID NO: 12777 - protein, 9 aa, Artificial Sequence
  Description of Artificial Sequence: Synthetic peptide
SWEILHDCH

SEQ ID NO: 12778 - protein, 9 aa, Artificial Sequence
  Description of Artificial Sequence: Synthetic peptide
SWHWMTTQN

SEQ ID NO: 12779 - protein, 9 aa, Artificial Sequence
  Description of Artificial Sequence: Synthetic peptide
SWYGNEEDQ

SEQ ID NO: 12780 - protein, 9 aa, Artificial Sequence
  Description of Artificial Sequence: Synthetic peptide
SYHDHEQGI

SEQ ID NO: 12781 - protein, 9 aa, Artificial Sequence
  Description of Artificial Sequence: Synthetic peptide
SYQLPILHS

SEQ ID NO: 12782 - protein, 9 aa, Artificial Sequence
  Description of Artificial Sequence: Synthetic peptide
SYSYVNDEA

SEQ ID NO: 12783 - protein, 9 aa, Artificial Sequence
  Description of Artificial Sequence: Synthetic peptide
TCKGMDNAI

SEQ ID NO: 12784 - protein, 9 aa, Artificial Sequence
  Description of Artificial Sequence: Synthetic peptide
TCTEPIVEC

SEQ ID NO: 12785 - protein, 9 aa, Artificial Sequence
  Description of Artificial Sequence: Synthetic peptide
TCVQMEHVK

SEQ ID NO: 12786 - protein, 9 aa, Artificial Sequence
  Description of Artificial Sequence: Synthetic peptide
TCYWDNCWY

SEQ ID NO: 12787 - protein, 9 aa, Artificial Sequence
  Description of Artificial Sequence: Synthetic peptide
TDRWTRVMS

SEQ ID NO: 12788 - protein, 9 aa, Artificial Sequence
  Description of Artificial Sequence: Synthetic peptide
TEDQYNNIH

SEQ ID NO: 12789 - protein, 9 aa, Artificial Sequence
  Description of Artificial Sequence: Synthetic peptide
TERWGWLPH

SEQ ID NO: 12790 - protein, 9 aa, Artificial Sequence
  Description of Artificial Sequence: Synthetic peptide
TFWCAQLGV

SEQ ID NO: 12791 - protein, 9 aa, Artificial Sequence
  Description of Artificial Sequence: Synthetic peptide
TFWIRMAAG

SEQ ID NO: 12792 - protein, 9 aa, Artificial Sequence
  Description of Artificial Sequence: Synthetic peptide
TGLYYEMQE

SEQ ID NO: 12793 - protein, 9 aa, Artificial Sequence
  Description of Artificial Sequence: Synthetic peptide
TGQNGWSKT

SEQ ID NO: 12794 - protein, 9 aa, Artificial Sequence
  Description of Artificial Sequence: Synthetic peptide
TGVVDTAYS

SEQ ID NO: 12795 - protein, 9 aa, Artificial Sequence
  Description of Artificial Sequence: Synthetic peptide
THSKSDCAY

SEQ ID NO: 12796 - protein, 9 aa, Artificial Sequence
  Description of Artificial Sequence: Synthetic peptide
THTVRDSHI

SEQ ID NO: 12797 - protein, 9 aa, Artificial Sequence
  Description of Artificial Sequence: Synthetic peptide
TIDRCNWHY

SEQ ID NO: 12798 - protein, 9 aa, Artificial Sequence
  Description of Artificial Sequence: Synthetic peptide
TILHGMLLE

SEQ ID NO: 12799 - protein, 9 aa, Artificial Sequence
  Description of Artificial Sequence: Synthetic peptide
TITHEQPGP

SEQ ID NO: 12800 - protein, 9 aa, Artificial Sequence
  Description of Artificial Sequence: Synthetic peptide
TIVPYEYNQ

SEQ ID NO: 12801 - protein, 9 aa, Artificial Sequence
  Description of Artificial Sequence: Synthetic peptide
TMDPCRKSC

SEQ ID NO: 12802 - protein, 9 aa, Artificial Sequence
  Description of Artificial Sequence: Synthetic peptide
TMGVYSFDW

SEQ ID NO: 12803 - protein, 9 aa, Artificial Sequence
  Description of Artificial Sequence: Synthetic peptide
TMMLVVLRG

SEQ ID NO: 12804 - protein, 9 aa, Artificial Sequence
  Description of Artificial Sequence: Synthetic peptide
TNGIGGKKE

SEQ ID NO: 12805 - protein, 9 aa, Artificial Sequence
  Description of Artificial Sequence: Synthetic peptide
TQLHWNDGR

SEQ ID NO: 12806 - protein, 9 aa, Artificial Sequence
  Description of Artificial Sequence: Synthetic peptide
TQQALPLAC

SEQ ID NO: 12807 - protein, 9 aa, Artificial Sequence
  Description of Artificial Sequence: Synthetic peptide
TSAPDRLSS

SEQ ID NO: 12808 - protein, 9 aa, Artificial Sequence
  Description of Artificial Sequence: Synthetic peptide
TTEQIRDID

SEQ ID NO: 12809 - protein, 9 aa, Artificial Sequence
  Description of Artificial Sequence: Synthetic peptide
TTVSCVCKG

SEQ ID NO: 12810 - protein, 9 aa, Artificial Sequence
  Description of Artificial Sequence: Synthetic peptide
TVLRRCNYE

SEQ ID NO: 12811 - protein, 9 aa, Artificial Sequence
  Description of Artificial Sequence: Synthetic peptide
TVYAWLLSM

SEQ ID NO: 12812 - protein, 9 aa, Artificial Sequence
  Description of Artificial Sequence: Synthetic peptide
TWFVGQSTR

SEQ ID NO: 12813 - protein, 9 aa, Artificial Sequence
  Description of Artificial Sequence: Synthetic peptide
TWQRTENNK

SEQ ID NO: 12814 - protein, 9 aa, Artificial Sequence
  Description of Artificial Sequence: Synthetic peptide
TYLMNQFHM

SEQ ID NO: 12815 - protein, 9 aa, Artificial Sequence
  Description of Artificial Sequence: Synthetic peptide
VCKMPMYQH

SEQ ID NO: 12816 - protein, 9 aa, Artificial Sequence
  Description of Artificial Sequence: Synthetic peptide
VCRCTKYTA

SEQ ID NO: 12817 - protein, 9 aa, Artificial Sequence
  Description of Artificial Sequence: Synthetic peptide
VDPNLQYPW

SEQ ID NO: 12818 - protein, 9 aa, Artificial Sequence
  Description of Artificial Sequence: Synthetic peptide
VDWFTAPAP

SEQ ID NO: 12819 - protein, 9 aa, Artificial Sequence
  Description of Artificial Sequence: Synthetic peptide
VFCNYQKKA

SEQ ID NO: 12820 - protein, 9 aa, Artificial Sequence
  Description of Artificial Sequence: Synthetic peptide
VGSKWHVLG

SEQ ID NO: 12821 - protein, 9 aa, Artificial Sequence
  Description of Artificial Sequence: Synthetic peptide
VGYSTVGEW

SEQ ID NO: 12822 - protein, 9 aa, Artificial Sequence
  Description of Artificial Sequence: Synthetic peptide
VHHDLGESK

SEQ ID NO: 12823 - protein, 9 aa, Artificial Sequence
  Description of Artificial Sequence: Synthetic peptide
VHHHGYPTS

SEQ ID NO: 12824 - protein, 9 aa, Artificial Sequence
  Description of Artificial Sequence: Synthetic peptide
VHKEWHWQC

SEQ ID NO: 12825 - protein, 9 aa, Artificial Sequence
  Description of Artificial Sequence: Synthetic peptide
VHMYPMTQV

SEQ ID NO: 12826 - protein, 9 aa, Artificial Sequence
  Description of Artificial Sequence: Synthetic peptide
VKPNETDLH

SEQ ID NO: 12827 - protein, 9 aa, Artificial Sequence
  Description of Artificial Sequence: Synthetic peptide
VLGFDHDPQ

SEQ ID NO: 12828 - protein, 9 aa, Artificial Sequence
  Description of Artificial Sequence: Synthetic peptide
VLLMDGRTF

SEQ ID NO: 12829 - protein, 9 aa, Artificial Sequence
  Description of Artificial Sequence: Synthetic peptide
VLRYVNSAG

SEQ ID NO: 12830 - protein, 9 aa, Artificial Sequence
  Description of Artificial Sequence: Synthetic peptide
VMELMMHNH

SEQ ID NO: 12831 - protein, 9 aa, Artificial Sequence
  Description of Artificial Sequence: Synthetic peptide
VPLVNDGRC

SEQ ID NO: 12832 - protein, 9 aa, Artificial Sequence
  Description of Artificial Sequence: Synthetic peptide
VPTICMATY

SEQ ID NO: 12833 - protein, 9 aa, Artificial Sequence
  Description of Artificial Sequence: Synthetic peptide
VQNEADMNP

SEQ ID NO: 12834 - protein, 9 aa, Artificial Sequence
  Description of Artificial Sequence: Synthetic peptide
VRAMPFDPD

SEQ ID NO: 12835 - protein, 9 aa, Artificial Sequence
  Description of Artificial Sequence: Synthetic peptide
VRNTEMDWF

SEQ ID NO: 12836 - protein, 9 aa, Artificial Sequence
  Description of Artificial Sequence: Synthetic peptide
VSAPFCHIY

SEQ ID NO: 12837 - protein, 9 aa, Artificial Sequence
  Description of Artificial Sequence: Synthetic peptide
VSMWYDRDD

SEQ ID NO: 12838 - protein, 9 aa, Artificial Sequence
  Description of Artificial Sequence: Synthetic peptide
VTFMITMFH

SEQ ID NO: 12839 - protein, 9 aa, Artificial Sequence
  Description of Artificial Sequence: Synthetic peptide
VVDHFFWVS

SEQ ID NO: 12840 - protein, 9 aa, Artificial Sequence
  Description of Artificial Sequence: Synthetic peptide
VVITDGGQV

SEQ ID NO: 12841 - protein, 9 aa, Artificial Sequence
  Description of Artificial Sequence: Synthetic peptide
VYMIFSGWQ

SEQ ID NO: 12842 - protein, 9 aa, Artificial Sequence
  Description of Artificial Sequence: Synthetic peptide
WALAPELWY

SEQ ID NO: 12843 - protein, 9 aa, Artificial Sequence
  Description of Artificial Sequence: Synthetic peptide
WAMDNMNRC

SEQ ID NO: 12844 - protein, 9 aa, Artificial Sequence
  Description of Artificial Sequence: Synthetic peptide
WDHRYQTGH

SEQ ID NO: 12845 - protein, 9 aa, Artificial Sequence
  Description of Artificial Sequence: Synthetic peptide
WDQCTMINQ

SEQ ID NO: 12846 - protein, 9 aa, Artificial Sequence
  Description of Artificial Sequence: Synthetic peptide
WDSPQTNFT

SEQ ID NO: 12847 - protein, 9 aa, Artificial Sequence
  Description of Artificial Sequence: Synthetic peptide
WFHTRHPQE

SEQ ID NO: 12848 - protein, 9 aa, Artificial Sequence
  Description of Artificial Sequence: Synthetic peptide
WGPCKHPWQ

SEQ ID NO: 12849 - protein, 9 aa, Artificial Sequence
  Description of Artificial Sequence: Synthetic peptide
WGVVKMVLC

SEQ ID NO: 12850 - protein, 9 aa, Artificial Sequence
  Description of Artificial Sequence: Synthetic peptide
WHDKLRNNK

SEQ ID NO: 12851 - protein, 9 aa, Artificial Sequence
  Description of Artificial Sequence: Synthetic peptide
WIDGIVDIC

SEQ ID NO: 12852 - protein, 9 aa, Artificial Sequence
  Description of Artificial Sequence: Synthetic peptide
WINGPASRY

SEQ ID NO: 12853 - protein, 9 aa, Artificial Sequence
  Description of Artificial Sequence: Synthetic peptide
WIQLNHQEV

SEQ ID NO: 12854 - protein, 9 aa, Artificial Sequence
  Description of Artificial Sequence: Synthetic peptide
WITAFDSIG

SEQ ID NO: 12855 - protein, 9 aa, Artificial Sequence
  Description of Artificial Sequence: Synthetic peptide
WITVKEFST

SEQ ID NO: 12856 - protein, 9 aa, Artificial Sequence
  Description of Artificial Sequence: Synthetic peptide
WLISNSPQW

SEQ ID NO: 12857 - protein, 9 aa, Artificial Sequence
  Description of Artificial Sequence: Synthetic peptide
WRCPPEQWW

SEQ ID NO: 12858 - protein, 9 aa, Artificial Sequence
  Description of Artificial Sequence: Synthetic peptide
WVSADTYEH

SEQ ID NO: 12859 - protein, 9 aa, Artificial Sequence
  Description of Artificial Sequence: Synthetic peptide
YASLWESGW

SEQ ID NO: 12860 - protein, 9 aa, Artificial Sequence
  Description of Artificial Sequence: Synthetic peptide
YCMTVICSE

SEQ ID NO: 12861 - protein, 9 aa, Artificial Sequence
  Description of Artificial Sequence: Synthetic peptide
YDECQKIFV

SEQ ID NO: 12862 - protein, 9 aa, Artificial Sequence
  Description of Artificial Sequence: Synthetic peptide
YDGCMWMPF

SEQ ID NO: 12863 - protein, 9 aa, Artificial Sequence
  Description of Artificial Sequence: Synthetic peptide
YDQKGGQCW

SEQ ID NO: 12864 - protein, 9 aa, Artificial Sequence
  Description of Artificial Sequence: Synthetic peptide
YEDIIWNMH

SEQ ID NO: 12865 - protein, 9 aa, Artificial Sequence
  Description of Artificial Sequence: Synthetic peptide
YENVGSKAW

SEQ ID NO: 12866 - protein, 9 aa, Artificial Sequence
  Description of Artificial Sequence: Synthetic peptide
YGHRRDEAR

SEQ ID NO: 12867 - protein, 9 aa, Artificial Sequence
  Description of Artificial Sequence: Synthetic peptide
YHSHLDAGQ

SEQ ID NO: 12868 - protein, 9 aa, Artificial Sequence
  Description of Artificial Sequence: Synthetic peptide
YKLNCFARP

SEQ ID NO: 12869 - protein, 9 aa, Artificial Sequence
  Description of Artificial Sequence: Synthetic peptide
YLDCPHTQF

SEQ ID NO: 12870 - protein, 9 aa, Artificial Sequence
  Description of Artificial Sequence: Synthetic peptide
YPMAKNRGD

SEQ ID NO: 12871 - protein, 9 aa, Artificial Sequence
  Description of Artificial Sequence: Synthetic peptide
YPRHWTLQH

SEQ ID NO: 12872 - protein, 9 aa, Artificial Sequence
  Description of Artificial Sequence: Synthetic peptide
YQHVWSQER

SEQ ID NO: 12873 - protein, 9 aa, Artificial Sequence
  Description of Artificial Sequence: Synthetic peptide
YQNPDAPAL

SEQ ID NO: 12874 - protein, 9 aa, Artificial Sequence
  Description of Artificial Sequence: Synthetic peptide
YQQQLMMNE

SEQ ID NO: 12875 - protein, 9 aa, Artificial Sequence
  Description of Artificial Sequence: Synthetic peptide
YSDAVYCSM

SEQ ID NO: 12876 - protein, 9 aa, Artificial Sequence
  Description of Artificial Sequence: Synthetic peptide
YTDALGMEP

SEQ ID NO: 12877 - protein, 9 aa, Artificial Sequence
  Description of Artificial Sequence: Synthetic peptide
YTPLPAVNG

SEQ ID NO: 12878 - protein, 9 aa, Artificial Sequence
  Description of Artificial Sequence: Synthetic peptide
YWLCYPKLC

SEQ ID NO: 12879 - protein, 9 aa, Artificial Sequence
  Description of Artificial Sequence: Synthetic peptide
EKLTADAAI

SEQ ID NO: 12880 - protein, 9 aa, Artificial Sequence
  Description of Artificial Sequence: Synthetic peptide
INSESEWNP

SEQ ID NO: 12881 - protein, 9 aa, Artificial Sequence
  Description of Artificial Sequence: Synthetic peptide
QTTEFALVQ

SEQ ID NO: 12882 - protein, 9 aa, Artificial Sequence
  Description of Artificial Sequence: Synthetic peptide
SGLYSQCGG

SEQ ID NO: 12883 - protein, 9 aa, Artificial Sequence
  Description of Artificial Sequence: Synthetic peptide
SDVHMFCML

SEQ ID NO: 12884 - protein, 9 aa, Artificial Sequence
  Description of Artificial Sequence: Synthetic peptide
QSNLMEFHS

SEQ ID NO: 12885 - protein, 9 aa, Artificial Sequence
  Description of Artificial Sequence: Synthetic peptide
EAQNIHDPH

SEQ ID NO: 12886 - protein, 9 aa, Artificial Sequence
  Description of Artificial Sequence: Synthetic peptide
HTTLNYMSN

SEQ ID NO: 12887 - protein, 9 aa, Artificial Sequence
  Description of Artificial Sequence: Synthetic peptide
AATPQKNQE

SEQ ID NO: 12888 - protein, 9 aa, Artificial Sequence
  Description of Artificial Sequence: Synthetic peptide
AFCRGHYQA

SEQ ID NO: 12889 - protein, 9 aa, Artificial Sequence
  Description of Artificial Sequence: Synthetic peptide
AGAPPLAVH

SEQ ID NO: 12890 - protein, 9 aa, Artificial Sequence
  Description of Artificial Sequence: Synthetic peptide
AGWQMCFDS

SEQ ID NO: 12891 - protein, 9 aa, Artificial Sequence
  Description of Artificial Sequence: Synthetic peptide
AGWQMCYGS

SEQ ID NO: 12892 - protein, 9 aa, Artificial Sequence
  Description of Artificial Sequence: Synthetic peptide
AHPILQGWD

SEQ ID NO: 12893 - protein, 9 aa, Artificial Sequence
  Description of Artificial Sequence: Synthetic peptide
AHYQQSTDR

SEQ ID NO: 12894 - protein, 9 aa, Artificial Sequence
  Description of Artificial Sequence: Synthetic peptide
AIGHGAWKC

SEQ ID NO: 12895 - protein, 9 aa, Artificial Sequence
  Description of Artificial Sequence: Synthetic peptide
AMCMLSHIH

SEQ ID NO: 12896 - protein, 9 aa, Artificial Sequence
  Description of Artificial Sequence: Synthetic peptide
ANELSWHPR

SEQ ID NO: 12897 - protein, 9 aa, Artificial Sequence
  Description of Artificial Sequence: Synthetic peptide
AQGCKFYNG

SEQ ID NO: 12898 - protein, 9 aa, Artificial Sequence
  Description of Artificial Sequence: Synthetic peptide
ATVTRARSM

SEQ ID NO: 12899 - protein, 9 aa, Artificial Sequence
  Description of Artificial Sequence: Synthetic peptide
CACHMKQGN

SEQ ID NO: 12900 - protein, 9 aa, Artificial Sequence
  Description of Artificial Sequence: Synthetic peptide
CDSLSLLQN

SEQ ID NO: 12901 - protein, 9 aa, Artificial Sequence
  Description of Artificial Sequence: Synthetic peptide
CFCQCGMPS

SEQ ID NO: 12902 - protein, 9 aa, Artificial Sequence
  Description of Artificial Sequence: Synthetic peptide
CHHSGESHQ

SEQ ID NO: 12903 - protein, 9 aa, Artificial Sequence
  Description of Artificial Sequence: Synthetic peptide
CKGRANWYM

SEQ ID NO: 12904 - protein, 9 aa, Artificial Sequence
  Description of Artificial Sequence: Synthetic peptide
CKWLAIPCR

SEQ ID NO: 12905 - protein, 9 aa, Artificial Sequence
  Description of Artificial Sequence: Synthetic peptide
CQVGLQNCW

SEQ ID NO: 12906 - protein, 9 aa, Artificial Sequence
  Description of Artificial Sequence: Synthetic peptide
CTKMHTMIE

SEQ ID NO: 12907 - protein, 9 aa, Artificial Sequence
  Description of Artificial Sequence: Synthetic peptide
CWALNGQLG

SEQ ID NO: 12908 - protein, 9 aa, Artificial Sequence
  Description of Artificial Sequence: Synthetic peptide
DALPERRYF

SEQ ID NO: 12909 - protein, 9 aa, Artificial Sequence
  Description of Artificial Sequence: Synthetic peptide
DAMQKISCV

SEQ ID NO: 12910 - protein, 9 aa, Artificial Sequence
  Description of Artificial Sequence: Synthetic peptide
DFIYHHQAP

SEQ ID NO: 12911 - protein, 9 aa, Artificial Sequence
  Description of Artificial Sequence: Synthetic peptide
DGVVTVTNL

SEQ ID NO: 12912 - protein, 9 aa, Artificial Sequence
  Description of Artificial Sequence: Synthetic peptide
DHDLATEWE

SEQ ID NO: 12913 - protein, 9 aa, Artificial Sequence
  Description of Artificial Sequence: Synthetic peptide
DKHHSRIDG

SEQ ID NO: 12914 - protein, 9 aa, Artificial Sequence
  Description of Artificial Sequence: Synthetic peptide
DMNMYLGSQ

SEQ ID NO: 12915 - protein, 9 aa, Artificial Sequence
  Description of Artificial Sequence: Synthetic peptide
DSKITQFNH

SEQ ID NO: 12916 - protein, 9 aa, Artificial Sequence
  Description of Artificial Sequence: Synthetic peptide
DVETNNWRC

SEQ ID NO: 12917 - protein, 9 aa, Artificial Sequence
  Description of Artificial Sequence: Synthetic peptide
DVHDSQMCY

SEQ ID NO: 12918 - protein, 9 aa, Artificial Sequence
  Description of Artificial Sequence: Synthetic peptide
DYNDFNWYF

SEQ ID NO: 12919 - protein, 9 aa, Artificial Sequence
  Description of Artificial Sequence: Synthetic peptide
ELGTYDGMG

SEQ ID NO: 12920 - protein, 9 aa, Artificial Sequence
  Description of Artificial Sequence: Synthetic peptide
EMQMEERLP

SEQ ID NO: 12921 - protein, 9 aa, Artificial Sequence
  Description of Artificial Sequence: Synthetic peptide
EPGRMHHSW

SEQ ID NO: 12922 - protein, 9 aa, Artificial Sequence
  Description of Artificial Sequence: Synthetic peptide
EQCLAAAAE

SEQ ID NO: 12923 - protein, 9 aa, Artificial Sequence
  Description of Artificial Sequence: Synthetic peptide
ESRPMIQPF

SEQ ID NO: 12924 - protein, 9 aa, Artificial Sequence
  Description of Artificial Sequence: Synthetic peptide
EVCGHQKIQ

SEQ ID NO: 12925 - protein, 9 aa, Artificial Sequence
  Description of Artificial Sequence: Synthetic peptide
EVHVTACGN

SEQ ID NO: 12926 - protein, 9 aa, Artificial Sequence
  Description of Artificial Sequence: Synthetic peptide
EVVRIENPM

SEQ ID NO: 12927 - protein, 9 aa, Artificial Sequence
  Description of Artificial Sequence: Synthetic peptide
EWFCYCGTC

SEQ ID NO: 12928 - protein, 9 aa, Artificial Sequence
  Description of Artificial Sequence: Synthetic peptide
EYHKTQWGH

SEQ ID NO: 12929 - protein, 9 aa, Artificial Sequence
  Description of Artificial Sequence: Synthetic peptide
FALIYHKDE

SEQ ID NO: 12930 - protein, 9 aa, Artificial Sequence
  Description of Artificial Sequence: Synthetic peptide
FASPVLWGQ

SEQ ID NO: 12931 - protein, 9 aa, Artificial Sequence
  Description of Artificial Sequence: Synthetic peptide
FEGFIERQH

SEQ ID NO: 12932 - protein, 9 aa, Artificial Sequence
  Description of Artificial Sequence: Synthetic peptide
FGHRYDSAY

SEQ ID NO: 12933 - protein, 9 aa, Artificial Sequence
  Description of Artificial Sequence: Synthetic peptide
FGNPMQTCP

SEQ ID NO: 12934 - protein, 9 aa, Artificial Sequence
  Description of Artificial Sequence: Synthetic peptide
FGVNDMDSA

SEQ ID NO: 12935 - protein, 9 aa, Artificial Sequence
  Description of Artificial Sequence: Synthetic peptide
FHCICWTHM

SEQ ID NO: 12936 - protein, 9 aa, Artificial Sequence
  Description of Artificial Sequence: Synthetic peptide
FKYDCYQRN

SEQ ID NO: 12937 - protein, 9 aa, Artificial Sequence
  Description of Artificial Sequence: Synthetic peptide
FLGCYCPYA

SEQ ID NO: 12938 - protein, 9 aa, Artificial Sequence
  Description of Artificial Sequence: Synthetic peptide
FLRNTWLGP

SEQ ID NO: 12939 - protein, 9 aa, Artificial Sequence
  Description of Artificial Sequence: Synthetic peptide
FMPYCVHSG

SEQ ID NO: 12940 - protein, 9 aa, Artificial Sequence
  Description of Artificial Sequence: Synthetic peptide
FPSWMMKAP

SEQ ID NO: 12941 - protein, 9 aa, Artificial Sequence
  Description of Artificial Sequence: Synthetic peptide
FSTAHMFGW

SEQ ID NO: 12942 - protein, 9 aa, Artificial Sequence
  Description of Artificial Sequence: Synthetic peptide
FWCRPRLHD

SEQ ID NO: 12943 - protein, 9 aa, Artificial Sequence
  Description of Artificial Sequence: Synthetic peptide
FYHHLPEEP

SEQ ID NO: 12944 - protein, 9 aa, Artificial Sequence
  Description of Artificial Sequence: Synthetic peptide
GAGRMNCNV

SEQ ID NO: 12945 - protein, 9 aa, Artificial Sequence
  Description of Artificial Sequence: Synthetic peptide
GANMMHMMN

SEQ ID NO: 12946 - protein, 9 aa, Artificial Sequence
  Description of Artificial Sequence: Synthetic peptide
GCLISECAY

SEQ ID NO: 12947 - protein, 9 aa, Artificial Sequence
  Description of Artificial Sequence: Synthetic peptide
GDKMGIYHC

SEQ ID NO: 12948 - protein, 9 aa, Artificial Sequence
  Description of Artificial Sequence: Synthetic peptide
GEMPYCNRQ

SEQ ID NO: 12949 - protein, 9 aa, Artificial Sequence
  Description of Artificial Sequence: Synthetic peptide
GFKVEQPYE

SEQ ID NO: 12950 - protein, 9 aa, Artificial Sequence
  Description of Artificial Sequence: Synthetic peptide
GHTNCFAMS

SEQ ID NO: 12951 - protein, 9 aa, Artificial Sequence
  Description of Artificial Sequence: Synthetic peptide
GIDEAKADY

SEQ ID NO: 12952 - protein, 9 aa, Artificial Sequence
  Description of Artificial Sequence: Synthetic peptide
GKYWLQRSV

SEQ ID NO: 12953 - protein, 9 aa, Artificial Sequence
  Description of Artificial Sequence: Synthetic peptide
GLFHPQFVQ

SEQ ID NO: 12954 - protein, 9 aa, Artificial Sequence
  Description of Artificial Sequence: Synthetic peptide
GNISTFCWQ

SEQ ID NO: 12955 - protein, 9 aa, Artificial Sequence
  Description of Artificial Sequence: Synthetic peptide
GQHHEETIY

SEQ ID NO: 12956 - protein, 9 aa, Artificial Sequence
  Description of Artificial Sequence: Synthetic peptide
GQILFRSHT

SEQ ID NO: 12957 - protein, 9 aa, Artificial Sequence
  Description of Artificial Sequence: Synthetic peptide
GQNPKMSAE

SEQ ID NO: 12958 - protein, 9 aa, Artificial Sequence
  Description of Artificial Sequence: Synthetic peptide
GSCCLHIHH

SEQ ID NO: 12959 - protein, 9 aa, Artificial Sequence
  Description of Artificial Sequence: Synthetic peptide
GTQHEKMYQ

SEQ ID NO: 12960 - protein, 9 aa, Artificial Sequence
  Description of Artificial Sequence: Synthetic peptide
GTTQCTVHT

SEQ ID NO: 12961 - protein, 9 aa, Artificial Sequence
  Description of Artificial Sequence: Synthetic peptide
GYDSSEAFE

SEQ ID NO: 12962 - protein, 9 aa, Artificial Sequence
  Description of Artificial Sequence: Synthetic peptide
GYVTEGFDE

SEQ ID NO: 12963 - protein, 9 aa, Artificial Sequence
  Description of Artificial Sequence: Synthetic peptide
HCPCKCTWL

SEQ ID NO: 12964 - protein, 9 aa, Artificial Sequence
  Description of Artificial Sequence: Synthetic peptide
HERHATLMR

SEQ ID NO: 12965 - protein, 9 aa, Artificial Sequence
  Description of Artificial Sequence: Synthetic peptide
HLLGNLEYM

SEQ ID NO: 12966 - protein, 9 aa, Artificial Sequence
  Description of Artificial Sequence: Synthetic peptide
HNVCTMWAQ

SEQ ID NO: 12967 - protein, 9 aa, Artificial Sequence
  Description of Artificial Sequence: Synthetic peptide
HQIQFCPCP

SEQ ID NO: 12968 - protein, 9 aa, Artificial Sequence
  Description of Artificial Sequence: Synthetic peptide
HTQEELITP

SEQ ID NO: 12969 - protein, 9 aa, Artificial Sequence
  Description of Artificial Sequence: Synthetic peptide
HTYCYWQSC

SEQ ID NO: 12970 - protein, 9 aa, Artificial Sequence
  Description of Artificial Sequence: Synthetic peptide
IAAKVQNHD

SEQ ID NO: 12971 - protein, 9 aa, Artificial Sequence
  Description of Artificial Sequence: Synthetic peptide
ICAAPNSAK

SEQ ID NO: 12972 - protein, 9 aa, Artificial Sequence
  Description of Artificial Sequence: Synthetic peptide
IDHDNWDML

SEQ ID NO: 12973 - protein, 9 aa, Artificial Sequence
  Description of Artificial Sequence: Synthetic peptide
IIGQTSIQD

SEQ ID NO: 12974 - protein, 9 aa, Artificial Sequence
  Description of Artificial Sequence: Synthetic peptide
IKEHIPYWD

SEQ ID NO: 12975 - protein, 9 aa, Artificial Sequence
  Description of Artificial Sequence: Synthetic peptide
IMNKAHYRF

SEQ ID NO: 12976 - protein, 9 aa, Artificial Sequence
  Description of Artificial Sequence: Synthetic peptide
IQAGHQATM

SEQ ID NO: 12977 - protein, 9 aa, Artificial Sequence
  Description of Artificial Sequence: Synthetic peptide
IVDMNTATK

SEQ ID NO: 12978 - protein, 9 aa, Artificial Sequence
  Description of Artificial Sequence: Synthetic peptide
KCFTHAIVG

SEQ ID NO: 12979 - protein, 9 aa, Artificial Sequence
  Description of Artificial Sequence: Synthetic peptide
KDWIPSYAL

SEQ ID NO: 12980 - protein, 9 aa, Artificial Sequence
  Description of Artificial Sequence: Synthetic peptide
KEGCHVRMG

SEQ ID NO: 12981 - protein, 9 aa, Artificial Sequence
  Description of Artificial Sequence: Synthetic peptide
KMQGGNGYG

SEQ ID NO: 12982 - protein, 9 aa, Artificial Sequence
  Description of Artificial Sequence: Synthetic peptide
KNAYNMTIQ

SEQ ID NO: 12983 - protein, 9 aa, Artificial Sequence
  Description of Artificial Sequence: Synthetic peptide
KPEILHFHD

SEQ ID NO: 12984 - protein, 9 aa, Artificial Sequence
  Description of Artificial Sequence: Synthetic peptide
KTAENVWAM

SEQ ID NO: 12985 - protein, 9 aa, Artificial Sequence
  Description of Artificial Sequence: Synthetic peptide
KTESIVKLQ

SEQ ID NO: 12986 - protein, 9 aa, Artificial Sequence
  Description of Artificial Sequence: Synthetic peptide
KTIQHGTAD

SEQ ID NO: 12987 - protein, 9 aa, Artificial Sequence
  Description of Artificial Sequence: Synthetic peptide
KYSDFCCPV

SEQ ID NO: 12988 - protein, 9 aa, Artificial Sequence
  Description of Artificial Sequence: Synthetic peptide
KYTEALSCG

SEQ ID NO: 12989 - protein, 9 aa, Artificial Sequence
  Description of Artificial Sequence: Synthetic peptide
LAMCALDNF

SEQ ID NO: 12990 - protein, 9 aa, Artificial Sequence
  Description of Artificial Sequence: Synthetic peptide
LAMRALDNF

SEQ ID NO: 12991 - protein, 9 aa, Artificial Sequence
  Description of Artificial Sequence: Synthetic peptide
LCSTEGMHT

SEQ ID NO: 12992 - protein, 9 aa, Artificial Sequence
  Description of Artificial Sequence: Synthetic peptide
LCSTKGMHT

SEQ ID NO: 12993 - protein, 9 aa, Artificial Sequence
  Description of Artificial Sequence: Synthetic peptide
LDTKRTFKK

SEQ ID NO: 12994 - protein, 9 aa, Artificial Sequence
  Description of Artificial Sequence: Synthetic peptide
LGEATWQAV

SEQ ID NO: 12995 - protein, 9 aa, Artificial Sequence
  Description of Artificial Sequence: Synthetic peptide
LMMKCCAMH

SEQ ID NO: 12996 - protein, 9 aa, Artificial Sequence
  Description of Artificial Sequence: Synthetic peptide
LPDRDWHKW

SEQ ID NO: 12997 - protein, 9 aa, Artificial Sequence
  Description of Artificial Sequence: Synthetic peptide
LQTKKDCPA

SEQ ID NO: 12998 - protein, 9 aa, Artificial Sequence
  Description of Artificial Sequence: Synthetic peptide
LVVEKPSES

SEQ ID NO: 12999 - protein, 9 aa, Artificial Sequence
  Description of Artificial Sequence: Synthetic peptide
MACKKAQDV

SEQ ID NO: 13000 - protein, 9 aa, Artificial Sequence
  Description of Artificial Sequence: Synthetic peptide
MAKRVELVT

SEQ ID NO: 13001 - protein, 9 aa, Artificial Sequence
  Description of Artificial Sequence: Synthetic peptide
MCHSFPTRP

SEQ ID NO: 13002 - protein, 9 aa, Artificial Sequence
  Description of Artificial Sequence: Synthetic peptide
MEVEAEKPN

SEQ ID NO: 13003 - protein, 9 aa, Artificial Sequence
  Description of Artificial Sequence: Synthetic peptide
MMKYYDAIG

SEQ ID NO: 13004 - protein, 9 aa, Artificial Sequence
  Description of Artificial Sequence: Synthetic peptide
MMMPQMWSG

SEQ ID NO: 13005 - protein, 9 aa, Artificial Sequence
  Description of Artificial Sequence: Synthetic peptide
MNRNVEMDH

SEQ ID NO: 13006 - protein, 9 aa, Artificial Sequence
  Description of Artificial Sequence: Synthetic peptide
MTDKLYQED

SEQ ID NO: 13007 - protein, 9 aa, Artificial Sequence
  Description of Artificial Sequence: Synthetic peptide
MTNWLMRGR

SEQ ID NO: 13008 - protein, 9 aa, Artificial Sequence
  Description of Artificial Sequence: Synthetic peptide
MVNNWDWFY

SEQ ID NO: 13009 - protein, 9 aa, Artificial Sequence
  Description of Artificial Sequence: Synthetic peptide
NCDFMVASI

SEQ ID NO: 13010 - protein, 9 aa, Artificial Sequence
  Description of Artificial Sequence: Synthetic peptide
NCQPYGEPT

SEQ ID NO: 13011 - protein, 9 aa, Artificial Sequence
  Description of Artificial Sequence: Synthetic peptide
NCSHYTQHY

SEQ ID NO: 13012 - protein, 9 aa, Artificial Sequence
  Description of Artificial Sequence: Synthetic peptide
NGLLDFDPH

SEQ ID NO: 13013 - protein, 9 aa, Artificial Sequence
  Description of Artificial Sequence: Synthetic peptide
NGLVDFDPH

SEQ ID NO: 13014 - protein, 9 aa, Artificial Sequence
  Description of Artificial Sequence: Synthetic peptide
NIAPGGTIF

SEQ ID NO: 13015 - protein, 9 aa, Artificial Sequence
  Description of Artificial Sequence: Synthetic peptide
NLEAMDCNY

SEQ ID NO: 13016 - protein, 9 aa, Artificial Sequence
  Description of Artificial Sequence: Synthetic peptide
NMCTTFRLL

SEQ ID NO: 13017 - protein, 9 aa, Artificial Sequence
  Description of Artificial Sequence: Synthetic peptide
NMKTKSAHK

SEQ ID NO: 13018 - protein, 9 aa, Artificial Sequence
  Description of Artificial Sequence: Synthetic peptide
NNHRLNDAN

SEQ ID NO: 13019 - protein, 9 aa, Artificial Sequence
  Description of Artificial Sequence: Synthetic peptide
NTMQSPAWV

SEQ ID NO: 13020 - protein, 9 aa, Artificial Sequence
  Description of Artificial Sequence: Synthetic peptide
NVTPTDREG

SEQ ID NO: 13021 - protein, 9 aa, Artificial Sequence
  Description of Artificial Sequence: Synthetic peptide
PCGRTCFNG

SEQ ID NO: 13022 - protein, 9 aa, Artificial Sequence
  Description of Artificial Sequence: Synthetic peptide
PMMSFIFHH

SEQ ID NO: 13023 - protein, 9 aa, Artificial Sequence
  Description of Artificial Sequence: Synthetic peptide
PQTAAQKSD

SEQ ID NO: 13024 - protein, 9 aa, Artificial Sequence
  Description of Artificial Sequence: Synthetic peptide
PTEVTVSDM

SEQ ID NO: 13025 - protein, 9 aa, Artificial Sequence
  Description of Artificial Sequence: Synthetic peptide
PTQWAMGDY

SEQ ID NO: 13026 - protein, 9 aa, Artificial Sequence
  Description of Artificial Sequence: Synthetic peptide
QAAYCRCTF

SEQ ID NO: 13027 - protein, 9 aa, Artificial Sequence
  Description of Artificial Sequence: Synthetic peptide
QATHDLMHQ

SEQ ID NO: 13028 - protein, 9 aa, Artificial Sequence
  Description of Artificial Sequence: Synthetic peptide
QATLHHCTN

SEQ ID NO: 13029 - protein, 9 aa, Artificial Sequence
  Description of Artificial Sequence: Synthetic peptide
QCLLWNDCQ

SEQ ID NO: 13030 - protein, 9 aa, Artificial Sequence
  Description of Artificial Sequence: Synthetic peptide
QGQEKEWYY

SEQ ID NO: 13031 - protein, 9 aa, Artificial Sequence
  Description of Artificial Sequence: Synthetic peptide
QHMELQEHD

SEQ ID NO: 13032 - protein, 9 aa, Artificial Sequence
  Description of Artificial Sequence: Synthetic peptide
QPCIPVQIA

SEQ ID NO: 13033 - protein, 9 aa, Artificial Sequence
  Description of Artificial Sequence: Synthetic peptide
QQLYFTTDK

SEQ ID NO: 13034 - protein, 9 aa, Artificial Sequence
  Description of Artificial Sequence: Synthetic peptide
QVIPVTYRK

SEQ ID NO: 13035 - protein, 9 aa, Artificial Sequence
  Description of Artificial Sequence: Synthetic peptide
QVKMGVIDQ

SEQ ID NO: 13036 - protein, 9 aa, Artificial Sequence
  Description of Artificial Sequence: Synthetic peptide
QVLATMNNK

SEQ ID NO: 13037 - protein, 9 aa, Artificial Sequence
  Description of Artificial Sequence: Synthetic peptide
QWRQMDRMQ

SEQ ID NO: 13038 - protein, 9 aa, Artificial Sequence
  Description of Artificial Sequence: Synthetic peptide
RDDQPPMVW

SEQ ID NO: 13039 - protein, 9 aa, Artificial Sequence
  Description of Artificial Sequence: Synthetic peptide
RDFVAEQQP

SEQ ID NO: 13040 - protein, 9 aa, Artificial Sequence
  Description of Artificial Sequence: Synthetic peptide
REERYFKDE

SEQ ID NO: 13041 - protein, 9 aa, Artificial Sequence
  Description of Artificial Sequence: Synthetic peptide
RIEMHQSVT

SEQ ID NO: 13042 - protein, 9 aa, Artificial Sequence
  Description of Artificial Sequence: Synthetic peptide
RKAEQEDVY

SEQ ID NO: 13043 - protein, 9 aa, Artificial Sequence
  Description of Artificial Sequence: Synthetic peptide
RLVTYPHTA

SEQ ID NO: 13044 - protein, 9 aa, Artificial Sequence
  Description of Artificial Sequence: Synthetic peptide
RNATKIKLT

SEQ ID NO: 13045 - protein, 9 aa, Artificial Sequence
  Description of Artificial Sequence: Synthetic peptide
RNCLTDAWD

SEQ ID NO: 13046 - protein, 9 aa, Artificial Sequence
  Description of Artificial Sequence: Synthetic peptide
RSDQECSKA

SEQ ID NO: 13047 - protein, 9 aa, Artificial Sequence
  Description of Artificial Sequence: Synthetic peptide
RTCKTIGYY

SEQ ID NO: 13048 - protein, 9 aa, Artificial Sequence
  Description of Artificial Sequence: Synthetic peptide
RTEPTFVDP

SEQ ID NO: 13049 - protein, 9 aa, Artificial Sequence
  Description of Artificial Sequence: Synthetic peptide
RTYQYEYEV

SEQ ID NO: 13050 - protein, 9 aa, Artificial Sequence
  Description of Artificial Sequence: Synthetic peptide
SCWRETMKE

SEQ ID NO: 13051 - protein, 9 aa, Artificial Sequence
  Description of Artificial Sequence: Synthetic peptide
SLENEARRC

SEQ ID NO: 13052 - protein, 9 aa, Artificial Sequence
  Description of Artificial Sequence: Synthetic peptide
SLHIHGNGP

SEQ ID NO: 13053 - protein, 9 aa, Artificial Sequence
  Description of Artificial Sequence: Synthetic peptide
SMGMCELPI

SEQ ID NO: 13054 - protein, 9 aa, Artificial Sequence
  Description of Artificial Sequence: Synthetic peptide
SNAHMQVGC

SEQ ID NO: 13055 - protein, 9 aa, Artificial Sequence
  Description of Artificial Sequence: Synthetic peptide
SNAYHAWKN

SEQ ID NO: 13056 - protein, 9 aa, Artificial Sequence
  Description of Artificial Sequence: Synthetic peptide
SQDLFCNAA

SEQ ID NO: 13057 - protein, 9 aa, Artificial Sequence
  Description of Artificial Sequence: Synthetic peptide
SSGWDHGNL

SEQ ID NO: 13058 - protein, 9 aa, Artificial Sequence
  Description of Artificial Sequence: Synthetic peptide
SSTWQNVDK

SEQ ID NO: 13059 - protein, 9 aa, Artificial Sequence
  Description of Artificial Sequence: Synthetic peptide
STHPLNLYH

SEQ ID NO: 13060 - protein, 9 aa, Artificial Sequence
  Description of Artificial Sequence: Synthetic peptide
SVQPFLHDG

SEQ ID NO: 13061 - protein, 9 aa, Artificial Sequence
  Description of Artificial Sequence: Synthetic peptide
TADRQLVHS

SEQ ID NO: 13062 - protein, 9 aa, Artificial Sequence
  Description of Artificial Sequence: Synthetic peptide
TCGKMHGPN

SEQ ID NO: 13063 - protein, 9 aa, Artificial Sequence
  Description of Artificial Sequence: Synthetic peptide
TLWDNTNTP

SEQ ID NO: 13064 - protein, 9 aa, Artificial Sequence
  Description of Artificial Sequence: Synthetic peptide
TPSWFNVGA

SEQ ID NO: 13065 - protein, 9 aa, Artificial Sequence
  Description of Artificial Sequence: Synthetic peptide
TRGHHCAED

SEQ ID NO: 13066 - protein, 9 aa, Artificial Sequence
  Description of Artificial Sequence: Synthetic peptide
TVTCPEVRF

SEQ ID NO: 13067 - protein, 9 aa, Artificial Sequence
  Description of Artificial Sequence: Synthetic peptide
VNQLHIHVQ

SEQ ID NO: 13068 - protein, 9 aa, Artificial Sequence
  Description of Artificial Sequence: Synthetic peptide
VPWYEGPYE

SEQ ID NO: 13069 - protein, 9 aa, Artificial Sequence
  Description of Artificial Sequence: Synthetic peptide
VRFEMMSCT

SEQ ID NO: 13070 - protein, 9 aa, Artificial Sequence
  Description of Artificial Sequence: Synthetic peptide
VTKCGWMLQ

SEQ ID NO: 13071 - protein, 9 aa, Artificial Sequence
  Description of Artificial Sequence: Synthetic peptide
WDNSKGYNV

SEQ ID NO: 13072 - protein, 9 aa, Artificial Sequence
  Description of Artificial Sequence: Synthetic peptide
WNNEDLKVW

SEQ ID NO: 13073 - protein, 9 aa, Artificial Sequence
  Description of Artificial Sequence: Synthetic peptide
YATQMRHLE

SEQ ID NO: 13074 - protein, 9 aa, Artificial Sequence
  Description of Artificial Sequence: Synthetic peptide
YCLMDKEDT

SEQ ID NO: 13075 - protein, 9 aa, Artificial Sequence
  Description of Artificial Sequence: Synthetic peptide
YDGKTFLHW

SEQ ID NO: 13076 - protein, 9 aa, Artificial Sequence
  Description of Artificial Sequence: Synthetic peptide
YFDCSRAHP

SEQ ID NO: 13077 - protein, 9 aa, Artificial Sequence
  Description of Artificial Sequence: Synthetic peptide
YGTKCERCY

SEQ ID NO: 13078 - protein, 9 aa, Artificial Sequence
  Description of Artificial Sequence: Synthetic peptide
YGTKSERCY

SEQ ID NO: 13079 - protein, 9 aa, Artificial Sequence
  Description of Artificial Sequence: Synthetic peptide
YHDLFFAWY

SEQ ID NO: 13080 - protein, 9 aa, Artificial Sequence
  Description of Artificial Sequence: Synthetic peptide
YHTNNMEPW

SEQ ID NO: 13081 - protein, 9 aa, Artificial Sequence
  Description of Artificial Sequence: Synthetic peptide
YMHVPPSIH

SEQ ID NO: 13082 - protein, 9 aa, Artificial Sequence
  Description of Artificial Sequence: Synthetic peptide
YMWIYPPDQ

SEQ ID NO: 13083 - protein, 9 aa, Artificial Sequence
  Description of Artificial Sequence: Synthetic peptide
YNVCTMWAQ

SEQ ID NO: 13084 - protein, 9 aa, Artificial Sequence
  Description of Artificial Sequence: Synthetic peptide
YTQLYCSHL

SEQ ID NO: 13085 - protein, 9 aa, Artificial Sequence
  Description of Artificial Sequence: Synthetic peptide
YVPCERCEW

SEQ ID NO: 13086 - protein, 9 aa, Artificial Sequence
  Description of Artificial Sequence: Synthetic peptide
YVQSYWNES

SEQ ID NO: 13087 - protein, 9 aa, Artificial Sequence
  Description of Artificial Sequence: Synthetic peptide
YWERHCMTI

SEQ ID NO: 13088 - protein, 9 aa, Artificial Sequence
  Description of Artificial Sequence: Synthetic peptide
YYGWLLVMV

SEQ ID NO: 13089 - protein, 9 aa, Artificial Sequence
  Description of Artificial Sequence: Synthetic peptide
AGWQMCYDS

SEQ ID NO: 13090 - protein, 9 aa, Artificial Sequence
  Description of Artificial Sequence: Synthetic peptide
VNCNKRHNW

SEQ ID NO: 13091 - protein, 9 aa, Artificial Sequence
  Description of Artificial Sequence: Synthetic peptide
PYCSIKQAS

SEQ ID NO: 13092 - protein, 9 aa, Artificial Sequence
  Description of Artificial Sequence: Synthetic peptide
CQTHWEKGD

SEQ ID NO: 13093 - protein, 9 aa, Artificial Sequence
  Description of Artificial Sequence: Synthetic peptide
EMISNNCHP

SEQ ID NO: 13094 - protein, 9 aa, Artificial Sequence
  Description of Artificial Sequence: Synthetic peptide
RQRYMGMQF

SEQ ID NO: 13095 - protein, 9 aa, Artificial Sequence
  Description of Artificial Sequence: Synthetic peptide
SYLFSKHSE

SEQ ID NO: 13096 - protein, 9 aa, Artificial Sequence
  Description of Artificial Sequence: Synthetic peptide
KAISLHAHG

SEQ ID NO: 13097 - protein, 9 aa, Artificial Sequence
  Description of Artificial Sequence: Synthetic peptide
GIGEMQCTE

SEQ ID NO: 13098 - protein, 9 aa, Artificial Sequence
  Description of Artificial Sequence: Synthetic peptide
ILERYQHMD

SEQ ID NO: 13099 - protein, 9 aa, Artificial Sequence
  Description of Artificial Sequence: Synthetic peptide
IQKDEMPVC

SEQ ID NO: 13100 - protein, 9 aa, Artificial Sequence
  Description of Artificial Sequence: Synthetic peptide
GTQFWMSVE

SEQ ID NO: 13101 - protein, 9 aa, Artificial Sequence
  Description of Artificial Sequence: Synthetic peptide
QMSWGKYHQ

SEQ ID NO: 13102 - protein, 9 aa, Artificial Sequence
  Description of Artificial Sequence: Synthetic peptide
KDYWAGYQM

SEQ ID NO: 13103 - protein, 9 aa, Artificial Sequence
  Description of Artificial Sequence: Synthetic peptide
ICDLYSQER

SEQ ID NO: 13104 - protein, 9 aa, Artificial Sequence
  Description of Artificial Sequence: Synthetic peptide
EEAPGFICF

SEQ ID NO: 13105 - protein, 9 aa, Artificial Sequence
  Description of Artificial Sequence: Synthetic peptide
DLPNDMGAV

SEQ ID NO: 13106 - protein, 9 aa, Artificial Sequence
  Description of Artificial Sequence: Synthetic peptide
GMHATELWL

SEQ ID NO: 13107 - protein, 9 aa, Artificial Sequence
  Description of Artificial Sequence: Synthetic peptide
LMHPQMTMC

SEQ ID NO: 13108 - protein, 9 aa, Artificial Sequence
  Description of Artificial Sequence: Synthetic peptide
AAKKGRDLH

SEQ ID NO: 13109 - protein, 9 aa, Artificial Sequence
  Description of Artificial Sequence: Synthetic peptide
RHIYRKGWR

SEQ ID NO: 13110 - protein, 9 aa, Artificial Sequence
  Description of Artificial Sequence: Synthetic peptide
GEFADNPWN

SEQ ID NO: 13111 - protein, 9 aa, Artificial Sequence
  Description of Artificial Sequence: Synthetic peptide
ERQMKLRCA

SEQ ID NO: 13112 - protein, 9 aa, Artificial Sequence
  Description of Artificial Sequence: Synthetic peptide
TDSSDQLQI

SEQ ID NO: 13113 - protein, 9 aa, Artificial Sequence
  Description of Artificial Sequence: Synthetic peptide
YNMVHGDEP

SEQ ID NO: 13114 - protein, 9 aa, Artificial Sequence
  Description of Artificial Sequence: Synthetic peptide
NIKMLVHCG

SEQ ID NO: 13115 - protein, 9 aa, Artificial Sequence
  Description of Artificial Sequence: Synthetic peptide
MKGYFVHHS

SEQ ID NO: 13116 - protein, 9 aa, Artificial Sequence
  Description of Artificial Sequence: Synthetic peptide
MLRTQIHCA

SEQ ID NO: 13117 - protein, 9 aa, Artificial Sequence
  Description of Artificial Sequence: Synthetic peptide
CKDNTFVSY

SEQ ID NO: 13118 - protein, 9 aa, Artificial Sequence
  Description of Artificial Sequence: Synthetic peptide
KAAPMDISI

SEQ ID NO: 13119 - protein, 9 aa, Artificial Sequence
  Description of Artificial Sequence: Synthetic peptide
KADCPAYKA

SEQ ID NO: 13120 - protein, 9 aa, Artificial Sequence
  Description of Artificial Sequence: Synthetic peptide
KADVWMAIA

SEQ ID NO: 13121 - protein, 9 aa, Artificial Sequence
  Description of Artificial Sequence: Synthetic peptide
KAELSDHVL

SEQ ID NO: 13122 - protein, 9 aa, Artificial Sequence
  Description of Artificial Sequence: Synthetic peptide
KATDALPSC

SEQ ID NO: 13123 - protein, 9 aa, Artificial Sequence
  Description of Artificial Sequence: Synthetic peptide
KCSKQASYP

SEQ ID NO: 13124 - protein, 9 aa, Artificial Sequence
  Description of Artificial Sequence: Synthetic peptide
KDGYALLSC

SEQ ID NO: 13125 - protein, 9 aa, Artificial Sequence
  Description of Artificial Sequence: Synthetic peptide
KDNEAQYQP

SEQ ID NO: 13126 - protein, 9 aa, Artificial Sequence
  Description of Artificial Sequence: Synthetic peptide
KDYMFNLPF

SEQ ID NO: 13127 - protein, 9 aa, Artificial Sequence
  Description of Artificial Sequence: Synthetic peptide
KEAMMYNAN

SEQ ID NO: 13128 - protein, 9 aa, Artificial Sequence
  Description of Artificial Sequence: Synthetic peptide
KEGLIFSTE

SEQ ID NO: 13129 - protein, 9 aa, Artificial Sequence
  Description of Artificial Sequence: Synthetic peptide
KEHTNICRH

SEQ ID NO: 13130 - protein, 9 aa, Artificial Sequence
  Description of Artificial Sequence: Synthetic peptide
KEIVEVDGN

SEQ ID NO: 13131 - protein, 9 aa, Artificial Sequence
  Description of Artificial Sequence: Synthetic peptide
KEMAYQHMW

SEQ ID NO: 13132 - protein, 9 aa, Artificial Sequence
  Description of Artificial Sequence: Synthetic peptide
KEMLAMWLQ

SEQ ID NO: 13133 - protein, 9 aa, Artificial Sequence
  Description of Artificial Sequence: Synthetic peptide
KEWFVTWKA

SEQ ID NO: 13134 - protein, 9 aa, Artificial Sequence
  Description of Artificial Sequence: Synthetic peptide
KFLPCITSY

SEQ ID NO: 13135 - protein, 9 aa, Artificial Sequence
  Description of Artificial Sequence: Synthetic peptide
KFPYLPHRN

SEQ ID NO: 13136 - protein, 9 aa, Artificial Sequence
  Description of Artificial Sequence: Synthetic peptide
KGCMSWEEG

SEQ ID NO: 13137 - protein, 9 aa, Artificial Sequence
  Description of Artificial Sequence: Synthetic peptide
KGDRFCGEV

SEQ ID NO: 13138 - protein, 9 aa, Artificial Sequence
  Description of Artificial Sequence: Synthetic peptide
KGEPGYMYY

SEQ ID NO: 13139 - protein, 9 aa, Artificial Sequence
  Description of Artificial Sequence: Synthetic peptide
KGMFVANSH

SEQ ID NO: 13140 - protein, 9 aa, Artificial Sequence
  Description of Artificial Sequence: Synthetic peptide
KGTKGPQMQ

SEQ ID NO: 13141 - protein, 9 aa, Artificial Sequence
  Description of Artificial Sequence: Synthetic peptide
KHAGTRYKG

SEQ ID NO: 13142 - protein, 9 aa, Artificial Sequence
  Description of Artificial Sequence: Synthetic peptide
KHFTSCDRT

SEQ ID NO: 13143 - protein, 9 aa, Artificial Sequence
  Description of Artificial Sequence: Synthetic peptide
KHHDAAREM

SEQ ID NO: 13144 - protein, 9 aa, Artificial Sequence
  Description of Artificial Sequence: Synthetic peptide
KHIFNECDC

SEQ ID NO: 13145 - protein, 9 aa, Artificial Sequence
  Description of Artificial Sequence: Synthetic peptide
KHMQKYVHY

SEQ ID NO: 13146 - protein, 9 aa, Artificial Sequence
  Description of Artificial Sequence: Synthetic peptide
KHPRFTGWH

SEQ ID NO: 13147 - protein, 9 aa, Artificial Sequence
  Description of Artificial Sequence: Synthetic peptide
KIESDWHAQ

SEQ ID NO: 13148 - protein, 9 aa, Artificial Sequence
  Description of Artificial Sequence: Synthetic peptide
KKHQFCEGT

SEQ ID NO: 13149 - protein, 9 aa, Artificial Sequence
  Description of Artificial Sequence: Synthetic peptide
KLELHGCQN

SEQ ID NO: 13150 - protein, 9 aa, Artificial Sequence
  Description of Artificial Sequence: Synthetic peptide
KLMSFRELE

SEQ ID NO: 13151 - protein, 9 aa, Artificial Sequence
  Description of Artificial Sequence: Synthetic peptide
KLQLEKPLN

SEQ ID NO: 13152 - protein, 9 aa, Artificial Sequence
  Description of Artificial Sequence: Synthetic peptide
KMDCHKYGV

SEQ ID NO: 13153 - protein, 9 aa, Artificial Sequence
  Description of Artificial Sequence: Synthetic peptide
KMNETTNPR

SEQ ID NO: 13154 - protein, 9 aa, Artificial Sequence
  Description of Artificial Sequence: Synthetic peptide
KMVDQSLAT

SEQ ID NO: 13155 - protein, 9 aa, Artificial Sequence
  Description of Artificial Sequence: Synthetic peptide
KMVMIDTDV

SEQ ID NO: 13156 - protein, 9 aa, Artificial Sequence
  Description of Artificial Sequence: Synthetic peptide
KNFMNHEPQ

SEQ ID NO: 13157 - protein, 9 aa, Artificial Sequence
  Description of Artificial Sequence: Synthetic peptide
KNNRTIRWG

SEQ ID NO: 13158 - protein, 9 aa, Artificial Sequence
  Description of Artificial Sequence: Synthetic peptide
KNNTWKWWY

SEQ ID NO: 13159 - protein, 9 aa, Artificial Sequence
  Description of Artificial Sequence: Synthetic peptide
KNQYFITSQ

SEQ ID NO: 13160 - protein, 9 aa, Artificial Sequence
  Description of Artificial Sequence: Synthetic peptide
KNWEKQNEV

SEQ ID NO: 13161 - protein, 9 aa, Artificial Sequence
  Description of Artificial Sequence: Synthetic peptide
KNYNPVNYE

SEQ ID NO: 13162 - protein, 9 aa, Artificial Sequence
  Description of Artificial Sequence: Synthetic peptide
KPCKACLNS

SEQ ID NO: 13163 - protein, 9 aa, Artificial Sequence
  Description of Artificial Sequence: Synthetic peptide
KPCWDQAMQ

SEQ ID NO: 13164 - protein, 9 aa, Artificial Sequence
  Description of Artificial Sequence: Synthetic peptide
KPDQKLWWD

SEQ ID NO: 13165 - protein, 9 aa, Artificial Sequence
  Description of Artificial Sequence: Synthetic peptide
KPDWWIKVN

SEQ ID NO: 13166 - protein, 9 aa, Artificial Sequence
  Description of Artificial Sequence: Synthetic peptide
KPSNSKQTV

SEQ ID NO: 13167 - protein, 9 aa, Artificial Sequence
  Description of Artificial Sequence: Synthetic peptide
KPTQHGVGP

SEQ ID NO: 13168 - protein, 9 aa, Artificial Sequence
  Description of Artificial Sequence: Synthetic peptide
KQAIGDDVG

SEQ ID NO: 13169 - protein, 9 aa, Artificial Sequence
  Description of Artificial Sequence: Synthetic peptide
KQHIFQWHH

SEQ ID NO: 13170 - protein, 9 aa, Artificial Sequence
  Description of Artificial Sequence: Synthetic peptide
KQIHEWEGQ

SEQ ID NO: 13171 - protein, 9 aa, Artificial Sequence
  Description of Artificial Sequence: Synthetic peptide
KQLPEQQPL

SEQ ID NO: 13172 - protein, 9 aa, Artificial Sequence
  Description of Artificial Sequence: Synthetic peptide
KQMLEFAPY

SEQ ID NO: 13173 - protein, 9 aa, Artificial Sequence
  Description of Artificial Sequence: Synthetic peptide
KQNEINHSC

SEQ ID NO: 13174 - protein, 9 aa, Artificial Sequence
  Description of Artificial Sequence: Synthetic peptide
KRIDHYGWG

SEQ ID NO: 13175 - protein, 9 aa, Artificial Sequence
  Description of Artificial Sequence: Synthetic peptide
KRSFEWLER

SEQ ID NO: 13176 - protein, 9 aa, Artificial Sequence
  Description of Artificial Sequence: Synthetic peptide
KSDYNSYDA

SEQ ID NO: 13177 - protein, 9 aa, Artificial Sequence
  Description of Artificial Sequence: Synthetic peptide
KSLSSEMGV

SEQ ID NO: 13178 - protein, 9 aa, Artificial Sequence
  Description of Artificial Sequence: Synthetic peptide
KSMDKDLTS

SEQ ID NO: 13179 - protein, 9 aa, Artificial Sequence
  Description of Artificial Sequence: Synthetic peptide
KSSCVDDSS

SEQ ID NO: 13180 - protein, 9 aa, Artificial Sequence
  Description of Artificial Sequence: Synthetic peptide
KSVAEGAND

SEQ ID NO: 13181 - protein, 9 aa, Artificial Sequence
  Description of Artificial Sequence: Synthetic peptide
KTAQLSVME

SEQ ID NO: 13182 - protein, 9 aa, Artificial Sequence
  Description of Artificial Sequence: Synthetic peptide
KTAYELVDG

SEQ ID NO: 13183 - protein, 9 aa, Artificial Sequence
  Description of Artificial Sequence: Synthetic peptide
KTCDSQTMT

SEQ ID NO: 13184 - protein, 9 aa, Artificial Sequence
  Description of Artificial Sequence: Synthetic peptide
KTEMYSDQC

SEQ ID NO: 13185 - protein, 9 aa, Artificial Sequence
  Description of Artificial Sequence: Synthetic peptide
KTFEWLCPY

SEQ ID NO: 13186 - protein, 9 aa, Artificial Sequence
  Description of Artificial Sequence: Synthetic peptide
KTMPVGAWD

SEQ ID NO: 13187 - protein, 9 aa, Artificial Sequence
  Description of Artificial Sequence: Synthetic peptide
KTTWVDDFD

SEQ ID NO: 13188 - protein, 9 aa, Artificial Sequence
  Description of Artificial Sequence: Synthetic peptide
KTYYVMAIV

SEQ ID NO: 13189 - protein, 9 aa, Artificial Sequence
  Description of Artificial Sequence: Synthetic peptide
KVLDTLTEH

SEQ ID NO: 13190 - protein, 9 aa, Artificial Sequence
  Description of Artificial Sequence: Synthetic peptide
KVMHACNAN

SEQ ID NO: 13191 - protein, 9 aa, Artificial Sequence
  Description of Artificial Sequence: Synthetic peptide
KWDETMFMS

SEQ ID NO: 13192 - protein, 9 aa, Artificial Sequence
  Description of Artificial Sequence: Synthetic peptide
KWEDFGWWK

SEQ ID NO: 13193 - protein, 9 aa, Artificial Sequence
  Description of Artificial Sequence: Synthetic peptide
KWEQPNPQA

SEQ ID NO: 13194 - protein, 9 aa, Artificial Sequence
  Description of Artificial Sequence: Synthetic peptide
KWEYVRCAS

SEQ ID NO: 13195 - protein, 9 aa, Artificial Sequence
  Description of Artificial Sequence: Synthetic peptide
KWLIARMYL

SEQ ID NO: 13196 - protein, 9 aa, Artificial Sequence
  Description of Artificial Sequence: Synthetic peptide
KWLKTLMCL

SEQ ID NO: 13197 - protein, 9 aa, Artificial Sequence
  Description of Artificial Sequence: Synthetic peptide
KWQDAHYIL

SEQ ID NO: 13198 - protein, 9 aa, Artificial Sequence
  Description of Artificial Sequence: Synthetic peptide
KWTLDAWLT

SEQ ID NO: 13199 - protein, 9 aa, Artificial Sequence
  Description of Artificial Sequence: Synthetic peptide
KWWVDRLCQ

SEQ ID NO: 13200 - protein, 9 aa, Artificial Sequence
  Description of Artificial Sequence: Synthetic peptide
KYAVSPCDP

SEQ ID NO: 13201 - protein, 9 aa, Artificial Sequence
  Description of Artificial Sequence: Synthetic peptide
KYDWLDAGG

SEQ ID NO: 13202 - protein, 9 aa, Artificial Sequence
  Description of Artificial Sequence: Synthetic peptide
KTDPIAEYC

SEQ ID NO: 13203 - protein, 9 aa, Artificial Sequence
  Description of Artificial Sequence: Synthetic peptide
KGNPLDGDT

SEQ ID NO: 13204 - protein, 9 aa, Artificial Sequence
  Description of Artificial Sequence: Synthetic peptide
VAHICDPET

SEQ ID NO: 13205 - protein, 9 aa, Artificial Sequence
  Description of Artificial Sequence: Synthetic peptide
VASEHSCLP

SEQ ID NO: 13206 - protein, 9 aa, Artificial Sequence
  Description of Artificial Sequence: Synthetic peptide
VAVEDRPAL

SEQ ID NO: 13207 - protein, 9 aa, Artificial Sequence
  Description of Artificial Sequence: Synthetic peptide
WAREELGFA

SEQ ID NO: 13208 - protein, 9 aa, Artificial Sequence
  Description of Artificial Sequence: Synthetic peptide
YAMCHRWMR

SEQ ID NO: 13209 - protein, 9 aa, Artificial Sequence
  Description of Artificial Sequence: Synthetic peptide
YAPNNSHWP

SEQ ID NO: 13210 - protein, 9 aa, Artificial Sequence
  Description of Artificial Sequence: Synthetic peptide
AACPHQFKD

SEQ ID NO: 13211 - protein, 9 aa, Artificial Sequence
  Description of Artificial Sequence: Synthetic peptide
AADLGQSMC

SEQ ID NO: 13212 - protein, 9 aa, Artificial Sequence
  Description of Artificial Sequence: Synthetic peptide
AAESAKFHE

SEQ ID NO: 13213 - protein, 9 aa, Artificial Sequence
  Description of Artificial Sequence: Synthetic peptide
AAGIAVACT

SEQ ID NO: 13214 - protein, 9 aa, Artificial Sequence
  Description of Artificial Sequence: Synthetic peptide
AAIRCMQTS

SEQ ID NO: 13215 - protein, 9 aa, Artificial Sequence
  Description of Artificial Sequence: Synthetic peptide
AAKLYMDLS

SEQ ID NO: 13216 - protein, 9 aa, Artificial Sequence
  Description of Artificial Sequence: Synthetic peptide
AAMKGEVIG

SEQ ID NO: 13217 - protein, 9 aa, Artificial Sequence
  Description of Artificial Sequence: Synthetic peptide
AAMLRLLGK

SEQ ID NO: 13218 - protein, 9 aa, Artificial Sequence
  Description of Artificial Sequence: Synthetic peptide
AANMLYCST

SEQ ID NO: 13219 - protein, 9 aa, Artificial Sequence
  Description of Artificial Sequence: Synthetic peptide
AANWTHCSL

SEQ ID NO: 13220 - protein, 9 aa, Artificial Sequence
  Description of Artificial Sequence: Synthetic peptide
AAPMHLHEI

SEQ ID NO: 13221 - protein, 9 aa, Artificial Sequence
  Description of Artificial Sequence: Synthetic peptide
AAQFMEKNQ

SEQ ID NO: 13222 - protein, 9 aa, Artificial Sequence
  Description of Artificial Sequence: Synthetic peptide
AASGLEVVA

SEQ ID NO: 13223 - protein, 9 aa, Artificial Sequence
  Description of Artificial Sequence: Synthetic peptide
AATNWGVET

SEQ ID NO: 13224 - protein, 9 aa, Artificial Sequence
  Description of Artificial Sequence: Synthetic peptide
AAVKWDQPL

SEQ ID NO: 13225 - protein, 9 aa, Artificial Sequence
  Description of Artificial Sequence: Synthetic peptide
AAVPELHHS

SEQ ID NO: 13226 - protein, 9 aa, Artificial Sequence
  Description of Artificial Sequence: Synthetic peptide
AAVQQPEHT

SEQ ID NO: 13227 - protein, 9 aa, Artificial Sequence
  Description of Artificial Sequence: Synthetic peptide
AAYSQSAGS

SEQ ID NO: 13228 - protein, 9 aa, Artificial Sequence
  Description of Artificial Sequence: Synthetic peptide
CADSCYWYP

SEQ ID NO: 13229 - protein, 9 aa, Artificial Sequence
  Description of Artificial Sequence: Synthetic peptide
CAEAWFPQR

SEQ ID NO: 13230 - protein, 9 aa, Artificial Sequence
  Description of Artificial Sequence: Synthetic peptide
CAFLDWDWC

SEQ ID NO: 13231 - protein, 9 aa, Artificial Sequence
  Description of Artificial Sequence: Synthetic peptide
CAFRWVEWD

SEQ ID NO: 13232 - protein, 9 aa, Artificial Sequence
  Description of Artificial Sequence: Synthetic peptide
CAHHVMWYP

SEQ ID NO: 13233 - protein, 9 aa, Artificial Sequence
  Description of Artificial Sequence: Synthetic peptide
CAHQPDGYA

SEQ ID NO: 13234 - protein, 9 aa, Artificial Sequence
  Description of Artificial Sequence: Synthetic peptide
CANAENATC

SEQ ID NO: 13235 - protein, 9 aa, Artificial Sequence
  Description of Artificial Sequence: Synthetic peptide
CANCVAISP

SEQ ID NO: 13236 - protein, 9 aa, Artificial Sequence
  Description of Artificial Sequence: Synthetic peptide
CAQPNTHNS

SEQ ID NO: 13237 - protein, 9 aa, Artificial Sequence
  Description of Artificial Sequence: Synthetic peptide
CAVAWKGDY

SEQ ID NO: 13238 - protein, 9 aa, Artificial Sequence
  Description of Artificial Sequence: Synthetic peptide
DAAQCTWAR

SEQ ID NO: 13239 - protein, 9 aa, Artificial Sequence
  Description of Artificial Sequence: Synthetic peptide
DAHPEGPQR

SEQ ID NO: 13240 - protein, 9 aa, Artificial Sequence
  Description of Artificial Sequence: Synthetic peptide
DALIYHSPF

SEQ ID NO: 13241 - protein, 9 aa, Artificial Sequence
  Description of Artificial Sequence: Synthetic peptide
DAMRTHENT

SEQ ID NO: 13242 - protein, 9 aa, Artificial Sequence
  Description of Artificial Sequence: Synthetic peptide
DAQKQQVMH

SEQ ID NO: 13243 - protein, 9 aa, Artificial Sequence
  Description of Artificial Sequence: Synthetic peptide
DAQWIGCLE

SEQ ID NO: 13244 - protein, 9 aa, Artificial Sequence
  Description of Artificial Sequence: Synthetic peptide
DARWRSQCP

SEQ ID NO: 13245 - protein, 9 aa, Artificial Sequence
  Description of Artificial Sequence: Synthetic peptide
DARYSWPGA

SEQ ID NO: 13246 - protein, 9 aa, Artificial Sequence
  Description of Artificial Sequence: Synthetic peptide
DATFNTSSL

SEQ ID NO: 13247 - protein, 9 aa, Artificial Sequence
  Description of Artificial Sequence: Synthetic peptide
DAVLFTAMQ

SEQ ID NO: 13248 - protein, 9 aa, Artificial Sequence
  Description of Artificial Sequence: Synthetic peptide
EAFGNGIDP

SEQ ID NO: 13249 - protein, 9 aa, Artificial Sequence
  Description of Artificial Sequence: Synthetic peptide
EAGIHQKVI

SEQ ID NO: 13250 - protein, 9 aa, Artificial Sequence
  Description of Artificial Sequence: Synthetic peptide
EAGRNYMDL

SEQ ID NO: 13251 - protein, 9 aa, Artificial Sequence
  Description of Artificial Sequence: Synthetic peptide
EANQCHVHI

SEQ ID NO: 13252 - protein, 9 aa, Artificial Sequence
  Description of Artificial Sequence: Synthetic peptide
EATWTAQGA

SEQ ID NO: 13253 - protein, 9 aa, Artificial Sequence
  Description of Artificial Sequence: Synthetic peptide
EAYLWENQL

SEQ ID NO: 13254 - protein, 9 aa, Artificial Sequence
  Description of Artificial Sequence: Synthetic peptide
FAEWKTEQQ

SEQ ID NO: 13255 - protein, 9 aa, Artificial Sequence
  Description of Artificial Sequence: Synthetic peptide
FAHCAMNES

SEQ ID NO: 13256 - protein, 9 aa, Artificial Sequence
  Description of Artificial Sequence: Synthetic peptide
FAHWRDCWY

SEQ ID NO: 13257 - protein, 9 aa, Artificial Sequence
  Description of Artificial Sequence: Synthetic peptide
FAKIRERHV

SEQ ID NO: 13258 - protein, 9 aa, Artificial Sequence
  Description of Artificial Sequence: Synthetic peptide
FASCMRGRA

SEQ ID NO: 13259 - protein, 9 aa, Artificial Sequence
  Description of Artificial Sequence: Synthetic peptide
FASPAGPWS

SEQ ID NO: 13260 - protein, 9 aa, Artificial Sequence
  Description of Artificial Sequence: Synthetic peptide
FAVNEHDVF

SEQ ID NO: 13261 - protein, 9 aa, Artificial Sequence
  Description of Artificial Sequence: Synthetic peptide
FAYATIRRD

SEQ ID NO: 13262 - protein, 9 aa, Artificial Sequence
  Description of Artificial Sequence: Synthetic peptide
GAEIMVNGW

SEQ ID NO: 13263 - protein, 9 aa, Artificial Sequence
  Description of Artificial Sequence: Synthetic peptide
GAEPYVKGG

SEQ ID NO: 13264 - protein, 9 aa, Artificial Sequence
  Description of Artificial Sequence: Synthetic peptide
GAERQWFTP

SEQ ID NO: 13265 - protein, 9 aa, Artificial Sequence
  Description of Artificial Sequence: Synthetic peptide
GAHVNSMNA

SEQ ID NO: 13266 - protein, 9 aa, Artificial Sequence
  Description of Artificial Sequence: Synthetic peptide
GANSSELQQ

SEQ ID NO: 13267 - protein, 9 aa, Artificial Sequence
  Description of Artificial Sequence: Synthetic peptide
GAVMWERDG

SEQ ID NO: 13268 - protein, 9 aa, Artificial Sequence
  Description of Artificial Sequence: Synthetic peptide
HADCYVADF

SEQ ID NO: 13269 - protein, 9 aa, Artificial Sequence
  Description of Artificial Sequence: Synthetic peptide
HADRMEGPW

SEQ ID NO: 13270 - protein, 9 aa, Artificial Sequence
  Description of Artificial Sequence: Synthetic peptide
HADRPMSAC

SEQ ID NO: 13271 - protein, 9 aa, Artificial Sequence
  Description of Artificial Sequence: Synthetic peptide
HAEWTEPVD

SEQ ID NO: 13272 - protein, 9 aa, Artificial Sequence
  Description of Artificial Sequence: Synthetic peptide
HAIPACKRD

SEQ ID NO: 13273 - protein, 9 aa, Artificial Sequence
  Description of Artificial Sequence: Synthetic peptide
HAKLETMWG

SEQ ID NO: 13274 - protein, 9 aa, Artificial Sequence
  Description of Artificial Sequence: Synthetic peptide
HALAWCTKH

SEQ ID NO: 13275 - protein, 9 aa, Artificial Sequence
  Description of Artificial Sequence: Synthetic peptide
HATYCQMAM

SEQ ID NO: 13276 - protein, 9 aa, Artificial Sequence
  Description of Artificial Sequence: Synthetic peptide
HAVSQERAG

SEQ ID NO: 13277 - protein, 9 aa, Artificial Sequence
  Description of Artificial Sequence: Synthetic peptide
IACVHMKQW

SEQ ID NO: 13278 - protein, 9 aa, Artificial Sequence
  Description of Artificial Sequence: Synthetic peptide
IADERWCMA

SEQ ID NO: 13279 - protein, 9 aa, Artificial Sequence
  Description of Artificial Sequence: Synthetic peptide
IADYEQCSS

SEQ ID NO: 13280 - protein, 9 aa, Artificial Sequence
  Description of Artificial Sequence: Synthetic peptide
IAFETYWTN

SEQ ID NO: 13281 - protein, 9 aa, Artificial Sequence
  Description of Artificial Sequence: Synthetic peptide
IAGQWAAFG

SEQ ID NO: 13282 - protein, 9 aa, Artificial Sequence
  Description of Artificial Sequence: Synthetic peptide
IAKCIDVMD

SEQ ID NO: 13283 - protein, 9 aa, Artificial Sequence
  Description of Artificial Sequence: Synthetic peptide
IAKWIEKIG

SEQ ID NO: 13284 - protein, 9 aa, Artificial Sequence
  Description of Artificial Sequence: Synthetic peptide
IAMLSQHTV

SEQ ID NO: 13285 - protein, 9 aa, Artificial Sequence
  Description of Artificial Sequence: Synthetic peptide
IAQPYDNWG

SEQ ID NO: 13286 - protein, 9 aa, Artificial Sequence
  Description of Artificial Sequence: Synthetic peptide
IATNHSAGP

SEQ ID NO: 13287 - protein, 9 aa, Artificial Sequence
  Description of Artificial Sequence: Synthetic peptide
IAVTGFAMS

SEQ ID NO: 13288 - protein, 9 aa, Artificial Sequence
  Description of Artificial Sequence: Synthetic peptide
LADGMGKVP

SEQ ID NO: 13289 - protein, 9 aa, Artificial Sequence
  Description of Artificial Sequence: Synthetic peptide
LAFSDITWS

SEQ ID NO: 13290 - protein, 9 aa, Artificial Sequence
  Description of Artificial Sequence: Synthetic peptide
LAHSEDRTS

SEQ ID NO: 13291 - protein, 9 aa, Artificial Sequence
  Description of Artificial Sequence: Synthetic peptide
LALQLMGAH

SEQ ID NO: 13292 - protein, 9 aa, Artificial Sequence
  Description of Artificial Sequence: Synthetic peptide
LAMWFNESC

SEQ ID NO: 13293 - protein, 9 aa, Artificial Sequence
  Description of Artificial Sequence: Synthetic peptide
LAMWKMRQH

SEQ ID NO: 13294 - protein, 9 aa, Artificial Sequence
  Description of Artificial Sequence: Synthetic peptide
LATMEDQSN

SEQ ID NO: 13295 - protein, 9 aa, Artificial Sequence
  Description of Artificial Sequence: Synthetic peptide
MAAPYQPYN

SEQ ID NO: 13296 - protein, 9 aa, Artificial Sequence
  Description of Artificial Sequence: Synthetic peptide
MAAVMIDQA

SEQ ID NO: 13297 - protein, 9 aa, Artificial Sequence
  Description of Artificial Sequence: Synthetic peptide
MACRAWIFV

SEQ ID NO: 13298 - protein, 9 aa, Artificial Sequence
  Description of Artificial Sequence: Synthetic peptide
MADKCANNA

SEQ ID NO: 13299 - protein, 9 aa, Artificial Sequence
  Description of Artificial Sequence: Synthetic peptide
MAEQAVNSK

SEQ ID NO: 13300 - protein, 9 aa, Artificial Sequence
  Description of Artificial Sequence: Synthetic peptide
MAGNVCLCV

SEQ ID NO: 13301 - protein, 9 aa, Artificial Sequence
  Description of Artificial Sequence: Synthetic peptide
MAHMNTGVP

SEQ ID NO: 13302 - protein, 9 aa, Artificial Sequence
  Description of Artificial Sequence: Synthetic peptide
MAKWDDSFS

SEQ ID NO: 13303 - protein, 9 aa, Artificial Sequence
  Description of Artificial Sequence: Synthetic peptide
MALMVEECD

SEQ ID NO: 13304 - protein, 9 aa, Artificial Sequence
  Description of Artificial Sequence: Synthetic peptide
MAMLCSICS

SEQ ID NO: 13305 - protein, 9 aa, Artificial Sequence
  Description of Artificial Sequence: Synthetic peptide
MANPEMYMQ

SEQ ID NO: 13306 - protein, 9 aa, Artificial Sequence
  Description of Artificial Sequence: Synthetic peptide
MAQFVWCNG

SEQ ID NO: 13307 - protein, 9 aa, Artificial Sequence
  Description of Artificial Sequence: Synthetic peptide
MASMMNACN

SEQ ID NO: 13308 - protein, 9 aa, Artificial Sequence
  Description of Artificial Sequence: Synthetic peptide
MASMSKDDS

SEQ ID NO: 13309 - protein, 9 aa, Artificial Sequence
  Description of Artificial Sequence: Synthetic peptide
MASQEHQES

SEQ ID NO: 13310 - protein, 9 aa, Artificial Sequence
  Description of Artificial Sequence: Synthetic peptide
MAVHRPTFC

SEQ ID NO: 13311 - protein, 9 aa, Artificial Sequence
  Description of Artificial Sequence: Synthetic peptide
MAWDKWFWP

SEQ ID NO: 13312 - protein, 9 aa, Artificial Sequence
  Description of Artificial Sequence: Synthetic peptide
MAYQQVIAG

SEQ ID NO: 13313 - protein, 9 aa, Artificial Sequence
  Description of Artificial Sequence: Synthetic peptide
MAYQRHAAF

SEQ ID NO: 13314 - protein, 9 aa, Artificial Sequence
  Description of Artificial Sequence: Synthetic peptide
NACIRRTTW

SEQ ID NO: 13315 - protein, 9 aa, Artificial Sequence
  Description of Artificial Sequence: Synthetic peptide
NACIRWAFD

SEQ ID NO: 13316 - protein, 9 aa, Artificial Sequence
  Description of Artificial Sequence: Synthetic peptide
NADALGALQ

SEQ ID NO: 13317 - protein, 9 aa, Artificial Sequence
  Description of Artificial Sequence: Synthetic peptide
NADREMFEH

SEQ ID NO: 13318 - protein, 9 aa, Artificial Sequence
  Description of Artificial Sequence: Synthetic peptide
NAEHRGMTN

SEQ ID NO: 13319 - protein, 9 aa, Artificial Sequence
  Description of Artificial Sequence: Synthetic peptide
NAGAQWLGI

SEQ ID NO: 13320 - protein, 9 aa, Artificial Sequence
  Description of Artificial Sequence: Synthetic peptide
NAGLEWKLQ

SEQ ID NO: 13321 - protein, 9 aa, Artificial Sequence
  Description of Artificial Sequence: Synthetic peptide
NAHCGAACC

SEQ ID NO: 13322 - protein, 9 aa, Artificial Sequence
  Description of Artificial Sequence: Synthetic peptide
NAMAYENDY

SEQ ID NO: 13323 - protein, 9 aa, Artificial Sequence
  Description of Artificial Sequence: Synthetic peptide
NAMLTLGAG

SEQ ID NO: 13324 - protein, 9 aa, Artificial Sequence
  Description of Artificial Sequence: Synthetic peptide
NAMQRANIR

SEQ ID NO: 13325 - protein, 9 aa, Artificial Sequence
  Description of Artificial Sequence: Synthetic peptide
NAPCFRYYN

SEQ ID NO: 13326 - protein, 9 aa, Artificial Sequence
  Description of Artificial Sequence: Synthetic peptide
NARDDSIFN

SEQ ID NO: 13327 - protein, 9 aa, Artificial Sequence
  Description of Artificial Sequence: Synthetic peptide
NASHYEKDG

SEQ ID NO: 13328 - protein, 9 aa, Artificial Sequence
  Description of Artificial Sequence: Synthetic peptide
NATSYHKFM

SEQ ID NO: 13329 - protein, 9 aa, Artificial Sequence
  Description of Artificial Sequence: Synthetic peptide
PAEIKMPSQ

SEQ ID NO: 13330 - protein, 9 aa, Artificial Sequence
  Description of Artificial Sequence: Synthetic peptide
PARLMMWEF

SEQ ID NO: 13331 - protein, 9 aa, Artificial Sequence
  Description of Artificial Sequence: Synthetic peptide
QADQYYSLE

SEQ ID NO: 13332 - protein, 9 aa, Artificial Sequence
  Description of Artificial Sequence: Synthetic peptide
QAMLKQGPR

SEQ ID NO: 13333 - protein, 9 aa, Artificial Sequence
  Description of Artificial Sequence: Synthetic peptide
QASCISWSQ

SEQ ID NO: 13334 - protein, 9 aa, Artificial Sequence
  Description of Artificial Sequence: Synthetic peptide
QASQENRLT

SEQ ID NO: 13335 - protein, 9 aa, Artificial Sequence
  Description of Artificial Sequence: Synthetic peptide
QAVECTQAP

SEQ ID NO: 13336 - protein, 9 aa, Artificial Sequence
  Description of Artificial Sequence: Synthetic peptide
QAYTGDKDI

SEQ ID NO: 13337 - protein, 9 aa, Artificial Sequence
  Description of Artificial Sequence: Synthetic peptide
RADDYQPVS

SEQ ID NO: 13338 - protein, 9 aa, Artificial Sequence
  Description of Artificial Sequence: Synthetic peptide
RAELFNNGK

SEQ ID NO: 13339 - protein, 9 aa, Artificial Sequence
  Description of Artificial Sequence: Synthetic peptide
RAEQADWHE

SEQ ID NO: 13340 - protein, 9 aa, Artificial Sequence
  Description of Artificial Sequence: Synthetic peptide
RAILNEKRD

SEQ ID NO: 13341 - protein, 9 aa, Artificial Sequence
  Description of Artificial Sequence: Synthetic peptide
RAINFDKAS

SEQ ID NO: 13342 - protein, 9 aa, Artificial Sequence
  Description of Artificial Sequence: Synthetic peptide
RAPELVMNE

SEQ ID NO: 13343 - protein, 9 aa, Artificial Sequence
  Description of Artificial Sequence: Synthetic peptide
RAPYEADSN

SEQ ID NO: 13344 - protein, 9 aa, Artificial Sequence
  Description of Artificial Sequence: Synthetic peptide
SAAYIVKGP

SEQ ID NO: 13345 - protein, 9 aa, Artificial Sequence
  Description of Artificial Sequence: Synthetic peptide
SADGQQAAT

SEQ ID NO: 13346 - protein, 9 aa, Artificial Sequence
  Description of Artificial Sequence: Synthetic peptide
SADLSLTYD

SEQ ID NO: 13347 - protein, 9 aa, Artificial Sequence
  Description of Artificial Sequence: Synthetic peptide
SADQVPECP

SEQ ID NO: 13348 - protein, 9 aa, Artificial Sequence
  Description of Artificial Sequence: Synthetic peptide
SAIYRNWFE

SEQ ID NO: 13349 - protein, 9 aa, Artificial Sequence
  Description of Artificial Sequence: Synthetic peptide
SAKLSEQNV

SEQ ID NO: 13350 - protein, 9 aa, Artificial Sequence
  Description of Artificial Sequence: Synthetic peptide
SAYALQSPR

SEQ ID NO: 13351 - protein, 9 aa, Artificial Sequence
  Description of Artificial Sequence: Synthetic peptide
TAAIVGKES

SEQ ID NO: 13352 - protein, 9 aa, Artificial Sequence
  Description of Artificial Sequence: Synthetic peptide
TACMDHHIR

SEQ ID NO: 13353 - protein, 9 aa, Artificial Sequence
  Description of Artificial Sequence: Synthetic peptide
TACNMMCAY

SEQ ID NO: 13354 - protein, 9 aa, Artificial Sequence
  Description of Artificial Sequence: Synthetic peptide
TADWYNGGP

SEQ ID NO: 13355 - protein, 9 aa, Artificial Sequence
  Description of Artificial Sequence: Synthetic peptide
TAEVWWVFH

SEQ ID NO: 13356 - protein, 9 aa, Artificial Sequence
  Description of Artificial Sequence: Synthetic peptide
TAGFAKHFP

SEQ ID NO: 13357 - protein, 9 aa, Artificial Sequence
  Description of Artificial Sequence: Synthetic peptide
TANMCDEGI

SEQ ID NO: 13358 - protein, 9 aa, Artificial Sequence
  Description of Artificial Sequence: Synthetic peptide
TANSEAHYT

SEQ ID NO: 13359 - protein, 9 aa, Artificial Sequence
  Description of Artificial Sequence: Synthetic peptide
TARWLDEHL

SEQ ID NO: 13360 - protein, 9 aa, Artificial Sequence
  Description of Artificial Sequence: Synthetic peptide
TARYITSRA

SEQ ID NO: 13361 - protein, 9 aa, Artificial Sequence
  Description of Artificial Sequence: Synthetic peptide
TASEFPCGV

SEQ ID NO: 13362 - protein, 9 aa, Artificial Sequence
  Description of Artificial Sequence: Synthetic peptide
TAWKADSGM

SEQ ID NO: 13363 - protein, 9 aa, Artificial Sequence
  Description of Artificial Sequence: Synthetic peptide
TAWWNDCWF

SEQ ID NO: 13364 - protein, 9 aa, Artificial Sequence
  Description of Artificial Sequence: Synthetic peptide
VAAGPLFYG

SEQ ID NO: 13365 - protein, 9 aa, Artificial Sequence
  Description of Artificial Sequence: Synthetic peptide
VACAPEAMG

SEQ ID NO: 13366 - protein, 9 aa, Artificial Sequence
  Description of Artificial Sequence: Synthetic peptide
VADGRQPME

SEQ ID NO: 13367 - protein, 9 aa, Artificial Sequence
  Description of Artificial Sequence: Synthetic peptide
VAFYNKMRG

SEQ ID NO: 13368 - protein, 9 aa, Artificial Sequence
  Description of Artificial Sequence: Synthetic peptide
VAIQSVGYH

SEQ ID NO: 13369 - protein, 9 aa, Artificial Sequence
  Description of Artificial Sequence: Synthetic peptide
VAIVWMCSE

SEQ ID NO: 13370 - protein, 9 aa, Artificial Sequence
  Description of Artificial Sequence: Synthetic peptide
VALPRCQLV

SEQ ID NO: 13371 - protein, 9 aa, Artificial Sequence
  Description of Artificial Sequence: Synthetic peptide
VAMYTRCHT

SEQ ID NO: 13372 - protein, 9 aa, Artificial Sequence
  Description of Artificial Sequence: Synthetic peptide
VAPKDNQQM

SEQ ID NO: 13373 - protein, 9 aa, Artificial Sequence
  Description of Artificial Sequence: Synthetic peptide
VAPQCTNEH

SEQ ID NO: 13374 - protein, 9 aa, Artificial Sequence
  Description of Artificial Sequence: Synthetic peptide
VAQPVQDMG

SEQ ID NO: 13375 - protein, 9 aa, Artificial Sequence
  Description of Artificial Sequence: Synthetic peptide
VASKTQFAM

SEQ ID NO: 13376 - protein, 9 aa, Artificial Sequence
  Description of Artificial Sequence: Synthetic peptide
VAYYFDQAG

SEQ ID NO: 13377 - protein, 9 aa, Artificial Sequence
  Description of Artificial Sequence: Synthetic peptide
WAPPCYYDV

SEQ ID NO: 13378 - protein, 9 aa, Artificial Sequence
  Description of Artificial Sequence: Synthetic peptide
YAANKDCFL

SEQ ID NO: 13379 - protein, 9 aa, Artificial Sequence
  Description of Artificial Sequence: Synthetic peptide
YAKYGQRWM

SEQ ID NO: 13380 - protein, 9 aa, Artificial Sequence
  Description of Artificial Sequence: Synthetic peptide
YATFEVWFR

SEQ ID NO: 13381 - protein, 9 aa, Artificial Sequence
  Description of Artificial Sequence: Synthetic peptide
YATMEYNNN

SEQ ID NO: 13382 - protein, 9 aa, Artificial Sequence
  Description of Artificial Sequence: Synthetic peptide
EAFQKCNWQ

SEQ ID NO: 13383 - protein, 9 aa, Artificial Sequence
  Description of Artificial Sequence: Synthetic peptide
HATGLVNFM

SEQ ID NO: 13384 - protein, 9 aa, Artificial Sequence
  Description of Artificial Sequence: Synthetic peptide
AADIFAIND

SEQ ID NO: 13385 - protein, 9 aa, Artificial Sequence
  Description of Artificial Sequence: Synthetic peptide
EAELENVNM

SEQ ID NO: 13386 - protein, 9 aa, Artificial Sequence
  Description of Artificial Sequence: Synthetic peptide
IAYHYDQQN

SEQ ID NO: 13387 - protein, 9 aa, Artificial Sequence
  Description of Artificial Sequence: Synthetic peptide
TSEPLLAML

SEQ ID NO: 13388 - protein, 9 aa, Artificial Sequence
  Description of Artificial Sequence: Synthetic peptide
TTEDCPNRV

SEQ ID NO: 13389 - protein, 9 aa, Artificial Sequence
  Description of Artificial Sequence: Synthetic peptide
TTEYTCEDQ

SEQ ID NO: 13390 - protein, 9 aa, Artificial Sequence
  Description of Artificial Sequence: Synthetic peptide
VFENCSRTF

SEQ ID NO: 13391 - protein, 9 aa, Artificial Sequence
  Description of Artificial Sequence: Synthetic peptide
VGEWEDEHD

SEQ ID NO: 13392 - protein, 9 aa, Artificial Sequence
  Description of Artificial Sequence: Synthetic peptide
VIEHAHHVN

SEQ ID NO: 13393 - protein, 9 aa, Artificial Sequence
  Description of Artificial Sequence: Synthetic peptide
VSEGQVNMD

SEQ ID NO: 13394 - protein, 9 aa, Artificial Sequence
  Description of Artificial Sequence: Synthetic peptide
VSEHDDCGL

SEQ ID NO: 13395 - protein, 9 aa, Artificial Sequence
  Description of Artificial Sequence: Synthetic peptide
VSEVYLAER

SEQ ID NO: 13396 - protein, 9 aa, Artificial Sequence
  Description of Artificial Sequence: Synthetic peptide
WYEKLMDAF

SEQ ID NO: 13397 - protein, 9 aa, Artificial Sequence
  Description of Artificial Sequence: Synthetic peptide
YCEVPQNPV

SEQ ID NO: 13398 - protein, 9 aa, Artificial Sequence
  Description of Artificial Sequence: Synthetic peptide
YDEYCESKS

SEQ ID NO: 13399 - protein, 9 aa, Artificial Sequence
  Description of Artificial Sequence: Synthetic peptide
YIEIVRGPM

SEQ ID NO: 13400 - protein, 9 aa, Artificial Sequence
  Description of Artificial Sequence: Synthetic peptide
YSEDATPKG

SEQ ID NO: 13401 - protein, 9 aa, Artificial Sequence
  Description of Artificial Sequence: Synthetic peptide
AFEFTDGCC

SEQ ID NO: 13402 - protein, 9 aa, Artificial Sequence
  Description of Artificial Sequence: Synthetic peptide
AFESAADHW

SEQ ID NO: 13403 - protein, 9 aa, Artificial Sequence
  Description of Artificial Sequence: Synthetic peptide
AIEVEGMWD

SEQ ID NO: 13404 - protein, 9 aa, Artificial Sequence
  Description of Artificial Sequence: Synthetic peptide
ALELEAHRP

SEQ ID NO: 13405 - protein, 9 aa, Artificial Sequence
  Description of Artificial Sequence: Synthetic peptide
AMERIKMRN

SEQ ID NO: 13406 - protein, 9 aa, Artificial Sequence
  Description of Artificial Sequence: Synthetic peptide
ATEAYSKLQ

SEQ ID NO: 13407 - protein, 9 aa, Artificial Sequence
  Description of Artificial Sequence: Synthetic peptide
ATEKDHRVC

SEQ ID NO: 13408 - protein, 9 aa, Artificial Sequence
  Description of Artificial Sequence: Synthetic peptide
AVEFQHGHC

SEQ ID NO: 13409 - protein, 9 aa, Artificial Sequence
  Description of Artificial Sequence: Synthetic peptide
AVEIHKCID

SEQ ID NO: 13410 - protein, 9 aa, Artificial Sequence
  Description of Artificial Sequence: Synthetic peptide
AVEPGISPF

SEQ ID NO: 13411 - protein, 9 aa, Artificial Sequence
  Description of Artificial Sequence: Synthetic peptide
AYEHDFKCS

SEQ ID NO: 13412 - protein, 9 aa, Artificial Sequence
  Description of Artificial Sequence: Synthetic peptide
CCEIKRHYY

SEQ ID NO: 13413 - protein, 9 aa, Artificial Sequence
  Description of Artificial Sequence: Synthetic peptide
CIEKSISST

SEQ ID NO: 13414 - protein, 9 aa, Artificial Sequence
  Description of Artificial Sequence: Synthetic peptide
CLEQMCRTN

SEQ ID NO: 13415 - protein, 9 aa, Artificial Sequence
  Description of Artificial Sequence: Synthetic peptide
CPEPFQKVD

SEQ ID NO: 13416 - protein, 9 aa, Artificial Sequence
  Description of Artificial Sequence: Synthetic peptide
CREQNNCDR

SEQ ID NO: 13417 - protein, 9 aa, Artificial Sequence
  Description of Artificial Sequence: Synthetic peptide
CSEHGCDIP

SEQ ID NO: 13418 - protein, 9 aa, Artificial Sequence
  Description of Artificial Sequence: Synthetic peptide
CSEWIRAVR

SEQ ID NO: 13419 - protein, 9 aa, Artificial Sequence
  Description of Artificial Sequence: Synthetic peptide
CTEQYLVDK

SEQ ID NO: 13420 - protein, 9 aa, Artificial Sequence
  Description of Artificial Sequence: Synthetic peptide
CTEVRNWYD

SEQ ID NO: 13421 - protein, 9 aa, Artificial Sequence
  Description of Artificial Sequence: Synthetic peptide
DCEFPMGAN

SEQ ID NO: 13422 - protein, 9 aa, Artificial Sequence
  Description of Artificial Sequence: Synthetic peptide
DDEGYIFNQ

SEQ ID NO: 13423 - protein, 9 aa, Artificial Sequence
  Description of Artificial Sequence: Synthetic peptide
DGEFRYVVS

SEQ ID NO: 13424 - protein, 9 aa, Artificial Sequence
  Description of Artificial Sequence: Synthetic peptide
DGEQESGQT

SEQ ID NO: 13425 - protein, 9 aa, Artificial Sequence
  Description of Artificial Sequence: Synthetic peptide
DHEVSVAGS

SEQ ID NO: 13426 - protein, 9 aa, Artificial Sequence
  Description of Artificial Sequence: Synthetic peptide
DIEMCPCYN

SEQ ID NO: 13427 - protein, 9 aa, Artificial Sequence
  Description of Artificial Sequence: Synthetic peptide
DKEIVNMVW

SEQ ID NO: 13428 - protein, 9 aa, Artificial Sequence
  Description of Artificial Sequence: Synthetic peptide
DLEYVEFDW

SEQ ID NO: 13429 - protein, 9 aa, Artificial Sequence
  Description of Artificial Sequence: Synthetic peptide
DQEVFQTHF

SEQ ID NO: 13430 - protein, 9 aa, Artificial Sequence
  Description of Artificial Sequence: Synthetic peptide
EEEFWMHNA

SEQ ID NO: 13431 - protein, 9 aa, Artificial Sequence
  Description of Artificial Sequence: Synthetic peptide
EIEPTIGPE

SEQ ID NO: 13432 - protein, 9 aa, Artificial Sequence
  Description of Artificial Sequence: Synthetic peptide
EKETMWAEP

SEQ ID NO: 13433 - protein, 9 aa, Artificial Sequence
  Description of Artificial Sequence: Synthetic peptide
ELEKYKLTN

SEQ ID NO: 13434 - protein, 9 aa, Artificial Sequence
  Description of Artificial Sequence: Synthetic peptide
ELEVRHSND

SEQ ID NO: 13435 - protein, 9 aa, Artificial Sequence
  Description of Artificial Sequence: Synthetic peptide
EVEEETDEK

SEQ ID NO: 13436 - protein, 9 aa, Artificial Sequence
  Description of Artificial Sequence: Synthetic peptide
EWEYERGAE

SEQ ID NO: 13437 - protein, 9 aa, Artificial Sequence
  Description of Artificial Sequence: Synthetic peptide
FCETEPSGA

SEQ ID NO: 13438 - protein, 9 aa, Artificial Sequence
  Description of Artificial Sequence: Synthetic peptide
FKEHVQNHM

SEQ ID NO: 13439 - protein, 9 aa, Artificial Sequence
  Description of Artificial Sequence: Synthetic peptide
FQEACMACH

SEQ ID NO: 13440 - protein, 9 aa, Artificial Sequence
  Description of Artificial Sequence: Synthetic peptide
FSEPSNNFC

SEQ ID NO: 13441 - protein, 9 aa, Artificial Sequence
  Description of Artificial Sequence: Synthetic peptide
FWESTSPFT

SEQ ID NO: 13442 - protein, 9 aa, Artificial Sequence
  Description of Artificial Sequence: Synthetic peptide
GEEWVEPTA

SEQ ID NO: 13443 - protein, 9 aa, Artificial Sequence
  Description of Artificial Sequence: Synthetic peptide
GHEHGWQLS

SEQ ID NO: 13444 - protein, 9 aa, Artificial Sequence
  Description of Artificial Sequence: Synthetic peptide
GNERLSVCI

SEQ ID NO: 13445 - protein, 9 aa, Artificial Sequence
  Description of Artificial Sequence: Synthetic peptide
GNETLEMHG

SEQ ID NO: 13446 - protein, 9 aa, Artificial Sequence
  Description of Artificial Sequence: Synthetic peptide
GRECKQGGH

SEQ ID NO: 13447 - protein, 9 aa, Artificial Sequence
  Description of Artificial Sequence: Synthetic peptide
GTEHWLSAC

SEQ ID NO: 13448 - protein, 9 aa, Artificial Sequence
  Description of Artificial Sequence: Synthetic peptide
GYENYNKRD

SEQ ID NO: 13449 - protein, 9 aa, Artificial Sequence
  Description of Artificial Sequence: Synthetic peptide
HCEYCQMMN

SEQ ID NO: 13450 - protein, 9 aa, Artificial Sequence
  Description of Artificial Sequence: Synthetic peptide
HFEAGYACS

SEQ ID NO: 13451 - protein, 9 aa, Artificial Sequence
  Description of Artificial Sequence: Synthetic peptide
HIEGYFRWP

SEQ ID NO: 13452 - protein, 9 aa, Artificial Sequence
  Description of Artificial Sequence: Synthetic peptide
HIEYTNKCL

SEQ ID NO: 13453 - protein, 9 aa, Artificial Sequence
  Description of Artificial Sequence: Synthetic peptide
HPEKARPLA

SEQ ID NO: 13454 - protein, 9 aa, Artificial Sequence
  Description of Artificial Sequence: Synthetic peptide
HPEMKHQNH

SEQ ID NO: 13455 - protein, 9 aa, Artificial Sequence
  Description of Artificial Sequence: Synthetic peptide
HVENALVFT

SEQ ID NO: 13456 - protein, 9 aa, Artificial Sequence
  Description of Artificial Sequence: Synthetic peptide
ICEEQFLMG

SEQ ID NO: 13457 - protein, 9 aa, Artificial Sequence
  Description of Artificial Sequence: Synthetic peptide
IHEEQECGS

SEQ ID NO: 13458 - protein, 9 aa, Artificial Sequence
  Description of Artificial Sequence: Synthetic peptide
IHEGYKTAP

SEQ ID NO: 13459 - protein, 9 aa, Artificial Sequence
  Description of Artificial Sequence: Synthetic peptide
IMEQSAQHT

SEQ ID NO: 13460 - protein, 9 aa, Artificial Sequence
  Description of Artificial Sequence: Synthetic peptide
IRECGQHGS

SEQ ID NO: 13461 - protein, 9 aa, Artificial Sequence
  Description of Artificial Sequence: Synthetic peptide
ITETWDIFF

SEQ ID NO: 13462 - protein, 9 aa, Artificial Sequence
  Description of Artificial Sequence: Synthetic peptide
LDEFGFWTH

SEQ ID NO: 13463 - protein, 9 aa, Artificial Sequence
  Description of Artificial Sequence: Synthetic peptide
LGESEHCMA

SEQ ID NO: 13464 - protein, 9 aa, Artificial Sequence
  Description of Artificial Sequence: Synthetic peptide
LKEAWICKG

SEQ ID NO: 13465 - protein, 9 aa, Artificial Sequence
  Description of Artificial Sequence: Synthetic peptide
LKEGINHIC

SEQ ID NO: 13466 - protein, 9 aa, Artificial Sequence
  Description of Artificial Sequence: Synthetic peptide
LMEGSAKAM

SEQ ID NO: 13467 - protein, 9 aa, Artificial Sequence
  Description of Artificial Sequence: Synthetic peptide
LYEGRPWYN

SEQ ID NO: 13468 - protein, 9 aa, Artificial Sequence
  Description of Artificial Sequence: Synthetic peptide
MDEQMGKMS

SEQ ID NO: 13469 - protein, 9 aa, Artificial Sequence
  Description of Artificial Sequence: Synthetic peptide
MIEKQYPTM

SEQ ID NO: 13470 - protein, 9 aa, Artificial Sequence
  Description of Artificial Sequence: Synthetic peptide
MKEESKSWP

SEQ ID NO: 13471 - protein, 9 aa, Artificial Sequence
  Description of Artificial Sequence: Synthetic peptide
MLENYEHMH

SEQ ID NO: 13472 - protein, 9 aa, Artificial Sequence
  Description of Artificial Sequence: Synthetic peptide
MNEPQKMRQ

SEQ ID NO: 13473 - protein, 9 aa, Artificial Sequence
  Description of Artificial Sequence: Synthetic peptide
MPEYMKTMQ

SEQ ID NO: 13474 - protein, 9 aa, Artificial Sequence
  Description of Artificial Sequence: Synthetic peptide
MPEYQARLM

SEQ ID NO: 13475 - protein, 9 aa, Artificial Sequence
  Description of Artificial Sequence: Synthetic peptide
MREQMPVQY

SEQ ID NO: 13476 - protein, 9 aa, Artificial Sequence
  Description of Artificial Sequence: Synthetic peptide
MRETVFHEP

SEQ ID NO: 13477 - protein, 9 aa, Artificial Sequence
  Description of Artificial Sequence: Synthetic peptide
MTESGMKDK

SEQ ID NO: 13478 - protein, 9 aa, Artificial Sequence
  Description of Artificial Sequence: Synthetic peptide
MVEVSRGEA

SEQ ID NO: 13479 - protein, 9 aa, Artificial Sequence
  Description of Artificial Sequence: Synthetic peptide
MWECGYGGN

SEQ ID NO: 13480 - protein, 9 aa, Artificial Sequence
  Description of Artificial Sequence: Synthetic peptide
MWERIGMGG

SEQ ID NO: 13481 - protein, 9 aa, Artificial Sequence
  Description of Artificial Sequence: Synthetic peptide
MYEDTHCVC

SEQ ID NO: 13482 - protein, 9 aa, Artificial Sequence
  Description of Artificial Sequence: Synthetic peptide
MYEHINSQR

SEQ ID NO: 13483 - protein, 9 aa, Artificial Sequence
  Description of Artificial Sequence: Synthetic peptide
MYEKQDGVL

SEQ ID NO: 13484 - protein, 9 aa, Artificial Sequence
  Description of Artificial Sequence: Synthetic peptide
NGEGSQTCE

SEQ ID NO: 13485 - protein, 9 aa, Artificial Sequence
  Description of Artificial Sequence: Synthetic peptide
NHEQKSYIF

SEQ ID NO: 13486 - protein, 9 aa, Artificial Sequence
  Description of Artificial Sequence: Synthetic peptide
NLEIYLQMN

SEQ ID NO: 13487 - protein, 9 aa, Artificial Sequence
  Description of Artificial Sequence: Synthetic peptide
NVEFMRCNS

SEQ ID NO: 13488 - protein, 9 aa, Artificial Sequence
  Description of Artificial Sequence: Synthetic peptide
NVEWWAPHV

SEQ ID NO: 13489 - protein, 9 aa, Artificial Sequence
  Description of Artificial Sequence: Synthetic peptide
NWEQEFVMI

SEQ ID NO: 13490 - protein, 9 aa, Artificial Sequence
  Description of Artificial Sequence: Synthetic peptide
NWEYMRRKC

SEQ ID NO: 13491 - protein, 9 aa, Artificial Sequence
  Description of Artificial Sequence: Synthetic peptide
QDERMDLVQ

SEQ ID NO: 13492 - protein, 9 aa, Artificial Sequence
  Description of Artificial Sequence: Synthetic peptide
QIESGCPHC

SEQ ID NO: 13493 - protein, 9 aa, Artificial Sequence
  Description of Artificial Sequence: Synthetic peptide
QRELITMGC

SEQ ID NO: 13494 - protein, 9 aa, Artificial Sequence
  Description of Artificial Sequence: Synthetic peptide
QSEVTHLKW

SEQ ID NO: 13495 - protein, 9 aa, Artificial Sequence
  Description of Artificial Sequence: Synthetic peptide
QTEQWMCSH

SEQ ID NO: 13496 - protein, 9 aa, Artificial Sequence
  Description of Artificial Sequence: Synthetic peptide
QWEHIWCWH

SEQ ID NO: 13497 - protein, 9 aa, Artificial Sequence
  Description of Artificial Sequence: Synthetic peptide
QYENINKVD

SEQ ID NO: 13498 - protein, 9 aa, Artificial Sequence
  Description of Artificial Sequence: Synthetic peptide
RDEVVFAHC

SEQ ID NO: 13499 - protein, 9 aa, Artificial Sequence
  Description of Artificial Sequence: Synthetic peptide
RNEPNVWVN

SEQ ID NO: 13500 - protein, 9 aa, Artificial Sequence
  Description of Artificial Sequence: Synthetic peptide
RTEQSRVWE

SEQ ID NO: 13501 - protein, 9 aa, Artificial Sequence
  Description of Artificial Sequence: Synthetic peptide
RVEVWYGEL

SEQ ID NO: 13502 - protein, 9 aa, Artificial Sequence
  Description of Artificial Sequence: Synthetic peptide
SEESVVTHF

SEQ ID NO: 13503 - protein, 9 aa, Artificial Sequence
  Description of Artificial Sequence: Synthetic peptide
SHEQLAGCP

SEQ ID NO: 13504 - protein, 9 aa, Artificial Sequence
  Description of Artificial Sequence: Synthetic peptide
SMENRWEYL

SEQ ID NO: 13505 - protein, 9 aa, Artificial Sequence
  Description of Artificial Sequence: Synthetic peptide
SMEYYYGME

SEQ ID NO: 13506 - protein, 9 aa, Artificial Sequence
  Description of Artificial Sequence: Synthetic peptide
SNEQMMTMQ

SEQ ID NO: 13507 - protein, 9 aa, Artificial Sequence
  Description of Artificial Sequence: Synthetic peptide
STECSGLSG

SEQ ID NO: 13508 - protein, 9 aa, Artificial Sequence
  Description of Artificial Sequence: Synthetic peptide
SYEVTYHMD

SEQ ID NO: 13509 - protein, 9 aa, Artificial Sequence
  Description of Artificial Sequence: Synthetic peptide
TCEKLISVC

SEQ ID NO: 13510 - protein, 9 aa, Artificial Sequence
  Description of Artificial Sequence: Synthetic peptide
TKELTRSEA

SEQ ID NO: 13511 - protein, 9 aa, Artificial Sequence
  Description of Artificial Sequence: Synthetic peptide
TNEAIMQVC

SEQ ID NO: 13512 - protein, 9 aa, Artificial Sequence
  Description of Artificial Sequence: Synthetic peptide
TNEIGEWWF

SEQ ID NO: 13513 - protein, 9 aa, Artificial Sequence
  Description of Artificial Sequence: Synthetic peptide
TSELLVNGD

SEQ ID NO: 13514 - protein, 9 aa, Artificial Sequence
  Description of Artificial Sequence: Synthetic peptide
TSENREYMQ

SEQ ID NO: 13515 - protein, 9 aa, Artificial Sequence
  Description of Artificial Sequence: Synthetic peptide
TWEKQSRNG

SEQ ID NO: 13516 - protein, 9 aa, Artificial Sequence
  Description of Artificial Sequence: Synthetic peptide
TWELIQTKF

SEQ ID NO: 13517 - protein, 9 aa, Artificial Sequence
  Description of Artificial Sequence: Synthetic peptide
VCEEAGELG

SEQ ID NO: 13518 - protein, 9 aa, Artificial Sequence
  Description of Artificial Sequence: Synthetic peptide
VHEYYRSCA

SEQ ID NO: 13519 - protein, 9 aa, Artificial Sequence
  Description of Artificial Sequence: Synthetic peptide
VLEFCKDEE

SEQ ID NO: 13520 - protein, 9 aa, Artificial Sequence
  Description of Artificial Sequence: Synthetic peptide
VMEKQGNGG

SEQ ID NO: 13521 - protein, 9 aa, Artificial Sequence
  Description of Artificial Sequence: Synthetic peptide
VMEYMLIAW

SEQ ID NO: 13522 - protein, 9 aa, Artificial Sequence
  Description of Artificial Sequence: Synthetic peptide
VNENNELSA

SEQ ID NO: 13523 - protein, 9 aa, Artificial Sequence
  Description of Artificial Sequence: Synthetic peptide
VNEQWQIMC

SEQ ID NO: 13524 - protein, 9 aa, Artificial Sequence
  Description of Artificial Sequence: Synthetic peptide
VNEWSADCS

SEQ ID NO: 13525 - protein, 9 aa, Artificial Sequence
  Description of Artificial Sequence: Synthetic peptide
VSEFHDLHL

SEQ ID NO: 13526 - protein, 9 aa, Artificial Sequence
  Description of Artificial Sequence: Synthetic peptide
VSELCTNMA

SEQ ID NO: 13527 - protein, 9 aa, Artificial Sequence
  Description of Artificial Sequence: Synthetic peptide
VTERWIGPM

SEQ ID NO: 13528 - protein, 9 aa, Artificial Sequence
  Description of Artificial Sequence: Synthetic peptide
VYEKFSYIT

SEQ ID NO: 13529 - protein, 9 aa, Artificial Sequence
  Description of Artificial Sequence: Synthetic peptide
VYEREQMDV

SEQ ID NO: 13530 - protein, 9 aa, Artificial Sequence
  Description of Artificial Sequence: Synthetic peptide
YHECKEGHI

SEQ ID NO: 13531 - protein, 9 aa, Artificial Sequence
  Description of Artificial Sequence: Synthetic peptide
YSENRIFFR

SEQ ID NO: 13532 - protein, 9 aa, Artificial Sequence
  Description of Artificial Sequence: Synthetic peptide
YYECLGQDL

SEQ ID NO: 13533 - protein, 9 aa, Artificial Sequence
  Description of Artificial Sequence: Synthetic peptide
WIEGTLIGA

SEQ ID NO: 13534 - protein, 9 aa, Artificial Sequence
  Description of Artificial Sequence: Synthetic peptide
NWEFNARHD

SEQ ID NO: 13535 - protein, 9 aa, Artificial Sequence
  Description of Artificial Sequence: Synthetic peptide
YWEKVPCMK

SEQ ID NO: 13536 - protein, 9 aa, Artificial Sequence
  Description of Artificial Sequence: Synthetic peptide
GNEDCNLAC

SEQ ID NO: 13537 - protein, 9 aa, Artificial Sequence
  Description of Artificial Sequence: Synthetic peptide
MNECFSGAQ

SEQ ID NO: 13538 - protein, 9 aa, Artificial Sequence
  Description of Artificial Sequence: Synthetic peptide
TYESLQNSW

SEQ ID NO: 13539 - protein, 9 aa, Artificial Sequence
  Description of Artificial Sequence: Synthetic peptide
YCECGHWPN

SEQ ID NO: 13540 - protein, 9 aa, Artificial Sequence
  Description of Artificial Sequence: Synthetic peptide
CWECCTDSG

SEQ ID NO: 13541 - protein, 9 aa, Artificial Sequence
  Description of Artificial Sequence: Synthetic peptide
VCPRDMTWE

SEQ ID NO: 13542 - protein, 9 aa, Artificial Sequence
  Description of Artificial Sequence: Synthetic peptide
VPCRPIYQH

SEQ ID NO: 13543 - protein, 9 aa, Artificial Sequence
  Description of Artificial Sequence: Synthetic peptide
VRWRGDVAN

SEQ ID NO: 13544 - protein, 9 aa, Artificial Sequence
  Description of Artificial Sequence: Synthetic peptide
WVLRCTYEY

SEQ ID NO: 13545 - protein, 9 aa, Artificial Sequence
  Description of Artificial Sequence: Synthetic peptide
ADARVMTMM

SEQ ID NO: 13546 - protein, 9 aa, Artificial Sequence
  Description of Artificial Sequence: Synthetic peptide
ADLRPSVDY

SEQ ID NO: 13547 - protein, 9 aa, Artificial Sequence
  Description of Artificial Sequence: Synthetic peptide
AGDRSQILG

SEQ ID NO: 13548 - protein, 9 aa, Artificial Sequence
  Description of Artificial Sequence: Synthetic peptide
AMMRAWSTF

SEQ ID NO: 13549 - protein, 9 aa, Artificial Sequence
  Description of Artificial Sequence: Synthetic peptide
AQDRFMLGC

SEQ ID NO: 13550 - protein, 9 aa, Artificial Sequence
  Description of Artificial Sequence: Synthetic peptide
ATNRIMAAW

SEQ ID NO: 13551 - protein, 9 aa, Artificial Sequence
  Description of Artificial Sequence: Synthetic peptide
AVVREHVES

SEQ ID NO: 13552 - protein, 9 aa, Artificial Sequence
  Description of Artificial Sequence: Synthetic peptide
CIWRKYPEF

SEQ ID NO: 13553 - protein, 9 aa, Artificial Sequence
  Description of Artificial Sequence: Synthetic peptide
CQCRFCHPL

SEQ ID NO: 13554 - protein, 9 aa, Artificial Sequence
  Description of Artificial Sequence: Synthetic peptide
CTIRVQNGE

SEQ ID NO: 13555 - protein, 9 aa, Artificial Sequence
  Description of Artificial Sequence: Synthetic peptide
DEFRFLPAD

SEQ ID NO: 13556 - protein, 9 aa, Artificial Sequence
  Description of Artificial Sequence: Synthetic peptide
DGGRFDDYY

SEQ ID NO: 13557 - protein, 9 aa, Artificial Sequence
  Description of Artificial Sequence: Synthetic peptide
DHWRKLHKA

SEQ ID NO: 13558 - protein, 9 aa, Artificial Sequence
  Description of Artificial Sequence: Synthetic peptide
DIARLQVLG

SEQ ID NO: 13559 - protein, 9 aa, Artificial Sequence
  Description of Artificial Sequence: Synthetic peptide
DKYRQQENS

SEQ ID NO: 13560 - protein, 9 aa, Artificial Sequence
  Description of Artificial Sequence: Synthetic peptide
DQIRTLQMT

SEQ ID NO: 13561 - protein, 9 aa, Artificial Sequence
  Description of Artificial Sequence: Synthetic peptide
DRLRDDYPC

SEQ ID NO: 13562 - protein, 9 aa, Artificial Sequence
  Description of Artificial Sequence: Synthetic peptide
DRPRPMWGH

SEQ ID NO: 13563 - protein, 9 aa, Artificial Sequence
  Description of Artificial Sequence: Synthetic peptide
DVIRIVHDY

SEQ ID NO: 13564 - protein, 9 aa, Artificial Sequence
  Description of Artificial Sequence: Synthetic peptide
DYARNHMMW

SEQ ID NO: 13565 - protein, 9 aa, Artificial Sequence
  Description of Artificial Sequence: Synthetic peptide
DYTRYHSYF

SEQ ID NO: 13566 - protein, 9 aa, Artificial Sequence
  Description of Artificial Sequence: Synthetic peptide
EGNRPEGLA

SEQ ID NO: 13567 - protein, 9 aa, Artificial Sequence
  Description of Artificial Sequence: Synthetic peptide
ERVRPLSTD

SEQ ID NO: 13568 - protein, 9 aa, Artificial Sequence
  Description of Artificial Sequence: Synthetic peptide
ESDREEQSR

SEQ ID NO: 13569 - protein, 9 aa, Artificial Sequence
  Description of Artificial Sequence: Synthetic peptide
ESWRECMCR

SEQ ID NO: 13570 - protein, 9 aa, Artificial Sequence
  Description of Artificial Sequence: Synthetic peptide
ETMRCQTMA

SEQ ID NO: 13571 - protein, 9 aa, Artificial Sequence
  Description of Artificial Sequence: Synthetic peptide
EVARGQDWA

SEQ ID NO: 13572 - protein, 9 aa, Artificial Sequence
  Description of Artificial Sequence: Synthetic peptide
EVNREETIQ

SEQ ID NO: 13573 - protein, 9 aa, Artificial Sequence
  Description of Artificial Sequence: Synthetic peptide
EYLRESMMP

SEQ ID NO: 13574 - protein, 9 aa, Artificial Sequence
  Description of Artificial Sequence: Synthetic peptide
FDDREPFNG

SEQ ID NO: 13575 - protein, 9 aa, Artificial Sequence
  Description of Artificial Sequence: Synthetic peptide
FDGRPRMFE

SEQ ID NO: 13576 - protein, 9 aa, Artificial Sequence
  Description of Artificial Sequence: Synthetic peptide
FGPRKNRHE

SEQ ID NO: 13577 - protein, 9 aa, Artificial Sequence
  Description of Artificial Sequence: Synthetic peptide
FPRRLDHHQ

SEQ ID NO: 13578 - protein, 9 aa, Artificial Sequence
  Description of Artificial Sequence: Synthetic peptide
FPYRIEGED

SEQ ID NO: 13579 - protein, 9 aa, Artificial Sequence
  Description of Artificial Sequence: Synthetic peptide
FPYRKVECG

SEQ ID NO: 13580 - protein, 9 aa, Artificial Sequence
  Description of Artificial Sequence: Synthetic peptide
FTARSYQDA

SEQ ID NO: 13581 - protein, 9 aa, Artificial Sequence
  Description of Artificial Sequence: Synthetic peptide
FVDRVDKHH

SEQ ID NO: 13582 - protein, 9 aa, Artificial Sequence
  Description of Artificial Sequence: Synthetic peptide
GNDRAEPDR

SEQ ID NO: 13583 - protein, 9 aa, Artificial Sequence
  Description of Artificial Sequence: Synthetic peptide
GTCREYGRN

SEQ ID NO: 13584 - protein, 9 aa, Artificial Sequence
  Description of Artificial Sequence: Synthetic peptide
HGARCCWGV

SEQ ID NO: 13585 - protein, 9 aa, Artificial Sequence
  Description of Artificial Sequence: Synthetic peptide
HLSRNEYKS

SEQ ID NO: 13586 - protein, 9 aa, Artificial Sequence
  Description of Artificial Sequence: Synthetic peptide
HSLRDWFKH

SEQ ID NO: 13587 - protein, 9 aa, Artificial Sequence
  Description of Artificial Sequence: Synthetic peptide
HSPRRATMV

SEQ ID NO: 13588 - protein, 9 aa, Artificial Sequence
  Description of Artificial Sequence: Synthetic peptide
IHGRMINSI

SEQ ID NO: 13589 - protein, 9 aa, Artificial Sequence
  Description of Artificial Sequence: Synthetic peptide
IPPRYRHMA

SEQ ID NO: 13590 - protein, 9 aa, Artificial Sequence
  Description of Artificial Sequence: Synthetic peptide
IRLRDPELH

SEQ ID NO: 13591 - protein, 9 aa, Artificial Sequence
  Description of Artificial Sequence: Synthetic peptide
IWIRWPSMG

SEQ ID NO: 13592 - protein, 9 aa, Artificial Sequence
  Description of Artificial Sequence: Synthetic peptide
LFDRVGIEA

SEQ ID NO: 13593 - protein, 9 aa, Artificial Sequence
  Description of Artificial Sequence: Synthetic peptide
LGCRETRHD

SEQ ID NO: 13594 - protein, 9 aa, Artificial Sequence
  Description of Artificial Sequence: Synthetic peptide
LIMRNASWC

SEQ ID NO: 13595 - protein, 9 aa, Artificial Sequence
  Description of Artificial Sequence: Synthetic peptide
LWIRWGSCT

SEQ ID NO: 13596 - protein, 9 aa, Artificial Sequence
  Description of Artificial Sequence: Synthetic peptide
MHTRIRWLV

SEQ ID NO: 13597 - protein, 9 aa, Artificial Sequence
  Description of Artificial Sequence: Synthetic peptide
MKCRIEKVN

SEQ ID NO: 13598 - protein, 9 aa, Artificial Sequence
  Description of Artificial Sequence: Synthetic peptide
MVYRIKMTY

SEQ ID NO: 13599 - protein, 9 aa, Artificial Sequence
  Description of Artificial Sequence: Synthetic peptide
NFHRWDMNT

SEQ ID NO: 13600 - protein, 9 aa, Artificial Sequence
  Description of Artificial Sequence: Synthetic peptide
NRDRSWCQH

SEQ ID NO: 13601 - protein, 9 aa, Artificial Sequence
  Description of Artificial Sequence: Synthetic peptide
NSDRMHCME

SEQ ID NO: 13602 - protein, 9 aa, Artificial Sequence
  Description of Artificial Sequence: Synthetic peptide
NYPRDHRQH

SEQ ID NO: 13603 - protein, 9 aa, Artificial Sequence
  Description of Artificial Sequence: Synthetic peptide
NYYRALKWD

SEQ ID NO: 13604 - protein, 9 aa, Artificial Sequence
  Description of Artificial Sequence: Synthetic peptide
PVTRWEAGS

SEQ ID NO: 13605 - protein, 9 aa, Artificial Sequence
  Description of Artificial Sequence: Synthetic peptide
QIDRAEKQE

SEQ ID NO: 13606 - protein, 9 aa, Artificial Sequence
  Description of Artificial Sequence: Synthetic peptide
QNVRSNAYT

SEQ ID NO: 13607 - protein, 9 aa, Artificial Sequence
  Description of Artificial Sequence: Synthetic peptide
SDLRNLCAR

SEQ ID NO: 13608 - protein, 9 aa, Artificial Sequence
  Description of Artificial Sequence: Synthetic peptide
SFIRVLRSN

SEQ ID NO: 13609 - protein, 9 aa, Artificial Sequence
  Description of Artificial Sequence: Synthetic peptide
SIYRMVMQC

SEQ ID NO: 13610 - protein, 9 aa, Artificial Sequence
  Description of Artificial Sequence: Synthetic peptide
SNDRFPIMC

SEQ ID NO: 13611 - protein, 9 aa, Artificial Sequence
  Description of Artificial Sequence: Synthetic peptide
SQGRMASGA

SEQ ID NO: 13612 - protein, 9 aa, Artificial Sequence
  Description of Artificial Sequence: Synthetic peptide
SQTRDTLNF

SEQ ID NO: 13613 - protein, 9 aa, Artificial Sequence
  Description of Artificial Sequence: Synthetic peptide
SVKRFQHNN

SEQ ID NO: 13614 - protein, 9 aa, Artificial Sequence
  Description of Artificial Sequence: Synthetic peptide
TQQRVYSIE

SEQ ID NO: 13615 - protein, 9 aa, Artificial Sequence
  Description of Artificial Sequence: Synthetic peptide
TYDRMQKCN

SEQ ID NO: 13616 - protein, 9 aa, Artificial Sequence
  Description of Artificial Sequence: Synthetic peptide
VPCRGLVVL

SEQ ID NO: 13617 - protein, 9 aa, Artificial Sequence
  Description of Artificial Sequence: Synthetic peptide
VPLRHLTDH

SEQ ID NO: 13618 - protein, 9 aa, Artificial Sequence
  Description of Artificial Sequence: Synthetic peptide
VTDRAFSMN

SEQ ID NO: 13619 - protein, 9 aa, Artificial Sequence
  Description of Artificial Sequence: Synthetic peptide
VTPRHKTLF

SEQ ID NO: 13620 - protein, 9 aa, Artificial Sequence
  Description of Artificial Sequence: Synthetic peptide
VTTRVEHFP

SEQ ID NO: 13621 - protein, 9 aa, Artificial Sequence
  Description of Artificial Sequence: Synthetic peptide
VVMRDEGGR

SEQ ID NO: 13622 - protein, 9 aa, Artificial Sequence
  Description of Artificial Sequence: Synthetic peptide
WCHRVGCTG

SEQ ID NO: 13623 - protein, 9 aa, Artificial Sequence
  Description of Artificial Sequence: Synthetic peptide
WDGRFQAAY

SEQ ID NO: 13624 - protein, 9 aa, Artificial Sequence
  Description of Artificial Sequence: Synthetic peptide
WNLRKANAP

SEQ ID NO: 13625 - protein, 9 aa, Artificial Sequence
  Description of Artificial Sequence: Synthetic peptide
YHDRFERAH

SEQ ID NO: 13626 - protein, 9 aa, Artificial Sequence
  Description of Artificial Sequence: Synthetic peptide
YHYREPSAD

SEQ ID NO: 13627 - protein, 9 aa, Artificial Sequence
  Description of Artificial Sequence: Synthetic peptide
YPGRQHVAN

SEQ ID NO: 13628 - protein, 9 aa, Artificial Sequence
  Description of Artificial Sequence: Synthetic peptide
YRIRKTCAF

SEQ ID NO: 13629 - protein, 9 aa, Artificial Sequence
  Description of Artificial Sequence: Synthetic peptide
YVNRYGAGW

SEQ ID NO: 13630 - protein, 9 aa, Artificial Sequence
  Description of Artificial Sequence: Synthetic peptide
NNVRKVGNT

SEQ ID NO: 13631 - protein, 9 aa, Artificial Sequence
  Description of Artificial Sequence: Synthetic peptide
TSDWLKHFC

SEQ ID NO: 13632 - protein, 9 aa, Artificial Sequence
  Description of Artificial Sequence: Synthetic peptide
TWSLLQQGD

SEQ ID NO: 13633 - protein, 9 aa, Artificial Sequence
  Description of Artificial Sequence: Synthetic peptide
VRAYLMGPN

SEQ ID NO: 13634 - protein, 9 aa, Artificial Sequence
  Description of Artificial Sequence: Synthetic peptide
VSHALIDWH

SEQ ID NO: 13635 - protein, 9 aa, Artificial Sequence
  Description of Artificial Sequence: Synthetic peptide
YPKQLHVWT

SEQ ID NO: 13636 - protein, 9 aa, Artificial Sequence
  Description of Artificial Sequence: Synthetic peptide
ACHTLDQQD

SEQ ID NO: 13637 - protein, 9 aa, Artificial Sequence
  Description of Artificial Sequence: Synthetic peptide
AHQVLHVRS

SEQ ID NO: 13638 - protein, 9 aa, Artificial Sequence
  Description of Artificial Sequence: Synthetic peptide
AKRELLDHD

SEQ ID NO: 13639 - protein, 9 aa, Artificial Sequence
  Description of Artificial Sequence: Synthetic peptide
ANCYLNHTT

SEQ ID NO: 13640 - protein, 9 aa, Artificial Sequence
  Description of Artificial Sequence: Synthetic peptide
APKKLEHVD

SEQ ID NO: 13641 - protein, 9 aa, Artificial Sequence
  Description of Artificial Sequence: Synthetic peptide
AQNALWERI

SEQ ID NO: 13642 - protein, 9 aa, Artificial Sequence
  Description of Artificial Sequence: Synthetic peptide
CFAALDYAS

SEQ ID NO: 13643 - protein, 9 aa, Artificial Sequence
  Description of Artificial Sequence: Synthetic peptide
CGNALPLIH

SEQ ID NO: 13644 - protein, 9 aa, Artificial Sequence
  Description of Artificial Sequence: Synthetic peptide
CNDCLMFCD

SEQ ID NO: 13645 - protein, 9 aa, Artificial Sequence
  Description of Artificial Sequence: Synthetic peptide
CNTMLVSAG

SEQ ID NO: 13646 - protein, 9 aa, Artificial Sequence
  Description of Artificial Sequence: Synthetic peptide
CSMYLMEFG

SEQ ID NO: 13647 - protein, 9 aa, Artificial Sequence
  Description of Artificial Sequence: Synthetic peptide
CWYMLKAYT

SEQ ID NO: 13648 - protein, 9 aa, Artificial Sequence
  Description of Artificial Sequence: Synthetic peptide
DFVQLINRA

SEQ ID NO: 13649 - protein, 9 aa, Artificial Sequence
  Description of Artificial Sequence: Synthetic peptide
DGYHLEGQC

SEQ ID NO: 13650 - protein, 9 aa, Artificial Sequence
  Description of Artificial Sequence: Synthetic peptide
DIKALMDGW

SEQ ID NO: 13651 - protein, 9 aa, Artificial Sequence
  Description of Artificial Sequence: Synthetic peptide
DKSKLDVSY

SEQ ID NO: 13652 - protein, 9 aa, Artificial Sequence
  Description of Artificial Sequence: Synthetic peptide
DTCKLGGWF

SEQ ID NO: 13653 - protein, 9 aa, Artificial Sequence
  Description of Artificial Sequence: Synthetic peptide
EHMLLVEQL

SEQ ID NO: 13654 - protein, 9 aa, Artificial Sequence
  Description of Artificial Sequence: Synthetic peptide
EYNGLGQAY

SEQ ID NO: 13655 - protein, 9 aa, Artificial Sequence
  Description of Artificial Sequence: Synthetic peptide
FCCLLYARR

SEQ ID NO: 13656 - protein, 9 aa, Artificial Sequence
  Description of Artificial Sequence: Synthetic peptide
FFSGLEGRH

SEQ ID NO: 13657 - protein, 9 aa, Artificial Sequence
  Description of Artificial Sequence: Synthetic peptide
FTDQLFTNP

SEQ ID NO: 13658 - protein, 9 aa, Artificial Sequence
  Description of Artificial Sequence: Synthetic peptide
GGNILDIGP

SEQ ID NO: 13659 - protein, 9 aa, Artificial Sequence
  Description of Artificial Sequence: Synthetic peptide
GIIPLHWQP

SEQ ID NO: 13660 - protein, 9 aa, Artificial Sequence
  Description of Artificial Sequence: Synthetic peptide
GSDLLVYSA

SEQ ID NO: 13661 - protein, 9 aa, Artificial Sequence
  Description of Artificial Sequence: Synthetic peptide
GSMLLGGME

SEQ ID NO: 13662 - protein, 9 aa, Artificial Sequence
  Description of Artificial Sequence: Synthetic peptide
GTMLLWRQN

SEQ ID NO: 13663 - protein, 9 aa, Artificial Sequence
  Description of Artificial Sequence: Synthetic peptide
GVANLIGLT

SEQ ID NO: 13664 - protein, 9 aa, Artificial Sequence
  Description of Artificial Sequence: Synthetic peptide
HELYLTTNT

SEQ ID NO: 13665 - protein, 9 aa, Artificial Sequence
  Description of Artificial Sequence: Synthetic peptide
HSACLMTMS

SEQ ID NO: 13666 - protein, 9 aa, Artificial Sequence
  Description of Artificial Sequence: Synthetic peptide
IDTALNVHC

SEQ ID NO: 13667 - protein, 9 aa, Artificial Sequence
  Description of Artificial Sequence: Synthetic peptide
IENWLFVWL

SEQ ID NO: 13668 - protein, 9 aa, Artificial Sequence
  Description of Artificial Sequence: Synthetic peptide
IMTMLTSET

SEQ ID NO: 13669 - protein, 9 aa, Artificial Sequence
  Description of Artificial Sequence: Synthetic peptide
INAVLWWRL

SEQ ID NO: 13670 - protein, 9 aa, Artificial Sequence
  Description of Artificial Sequence: Synthetic peptide
ITHGLQTWD

SEQ ID NO: 13671 - protein, 9 aa, Artificial Sequence
  Description of Artificial Sequence: Synthetic peptide
ITTDLQMDH

SEQ ID NO: 13672 - protein, 9 aa, Artificial Sequence
  Description of Artificial Sequence: Synthetic peptide
IWNELILGC

SEQ ID NO: 13673 - protein, 9 aa, Artificial Sequence
  Description of Artificial Sequence: Synthetic peptide
LDCELYQTR

SEQ ID NO: 13674 - protein, 9 aa, Artificial Sequence
  Description of Artificial Sequence: Synthetic peptide
LGMYLQLGQ

SEQ ID NO: 13675 - protein, 9 aa, Artificial Sequence
  Description of Artificial Sequence: Synthetic peptide
LGVQLSSAP

SEQ ID NO: 13676 - protein, 9 aa, Artificial Sequence
  Description of Artificial Sequence: Synthetic peptide
LHLKLYGQL

SEQ ID NO: 13677 - protein, 9 aa, Artificial Sequence
  Description of Artificial Sequence: Synthetic peptide
LLTLLMYWV

SEQ ID NO: 13678 - protein, 9 aa, Artificial Sequence
  Description of Artificial Sequence: Synthetic peptide
LMYMLPPRH

SEQ ID NO: 13679 - protein, 9 aa, Artificial Sequence
  Description of Artificial Sequence: Synthetic peptide
LRPWLPDST

SEQ ID NO: 13680 - protein, 9 aa, Artificial Sequence
  Description of Artificial Sequence: Synthetic peptide
LTHALGTWE

SEQ ID NO: 13681 - protein, 9 aa, Artificial Sequence
  Description of Artificial Sequence: Synthetic peptide
LWTHLMANH

SEQ ID NO: 13682 - protein, 9 aa, Artificial Sequence
  Description of Artificial Sequence: Synthetic peptide
MDQKLLTWQ

SEQ ID NO: 13683 - protein, 9 aa, Artificial Sequence
  Description of Artificial Sequence: Synthetic peptide
MEDMLMEGH

SEQ ID NO: 13684 - protein, 9 aa, Artificial Sequence
  Description of Artificial Sequence: Synthetic peptide
MHMLLHDVK

SEQ ID NO: 13685 - protein, 9 aa, Artificial Sequence
  Description of Artificial Sequence: Synthetic peptide
MITWLTDQV

SEQ ID NO: 13686 - protein, 9 aa, Artificial Sequence
  Description of Artificial Sequence: Synthetic peptide
MNVGLWALW

SEQ ID NO: 13687 - protein, 9 aa, Artificial Sequence
  Description of Artificial Sequence: Synthetic peptide
MYACLAQPP

SEQ ID NO: 13688 - protein, 9 aa, Artificial Sequence
  Description of Artificial Sequence: Synthetic peptide
NHCMLHHMG

SEQ ID NO: 13689 - protein, 9 aa, Artificial Sequence
  Description of Artificial Sequence: Synthetic peptide
NHDHLFERY

SEQ ID NO: 13690 - protein, 9 aa, Artificial Sequence
  Description of Artificial Sequence: Synthetic peptide
NQPHLWSCG

SEQ ID NO: 13691 - protein, 9 aa, Artificial Sequence
  Description of Artificial Sequence: Synthetic peptide
NTRDLHTKR

SEQ ID NO: 13692 - protein, 9 aa, Artificial Sequence
  Description of Artificial Sequence: Synthetic peptide
PNGLLQMVI

SEQ ID NO: 13693 - protein, 9 aa, Artificial Sequence
  Description of Artificial Sequence: Synthetic peptide
QIAALHQNH

SEQ ID NO: 13694 - protein, 9 aa, Artificial Sequence
  Description of Artificial Sequence: Synthetic peptide
QLGMLPRAM

SEQ ID NO: 13695 - protein, 9 aa, Artificial Sequence
  Description of Artificial Sequence: Synthetic peptide
QMVMLKDQY

SEQ ID NO: 13696 - protein, 9 aa, Artificial Sequence
  Description of Artificial Sequence: Synthetic peptide
QQGQLKTWS

SEQ ID NO: 13697 - protein, 9 aa, Artificial Sequence
  Description of Artificial Sequence: Synthetic peptide
QVSCLVRDD

SEQ ID NO: 13698 - protein, 9 aa, Artificial Sequence
  Description of Artificial Sequence: Synthetic peptide
RTWTLECDF

SEQ ID NO: 13699 - protein, 9 aa, Artificial Sequence
  Description of Artificial Sequence: Synthetic peptide
RVNILEKIA

SEQ ID NO: 13700 - protein, 9 aa, Artificial Sequence
  Description of Artificial Sequence: Synthetic peptide
SFAHLIDDR

SEQ ID NO: 13701 - protein, 9 aa, Artificial Sequence
  Description of Artificial Sequence: Synthetic peptide
SIAVLCHGN

SEQ ID NO: 13702 - protein, 9 aa, Artificial Sequence
  Description of Artificial Sequence: Synthetic peptide
SIDALKSAF

SEQ ID NO: 13703 - protein, 9 aa, Artificial Sequence
  Description of Artificial Sequence: Synthetic peptide
SIVKLNRSV

SEQ ID NO: 13704 - protein, 9 aa, Artificial Sequence
  Description of Artificial Sequence: Synthetic peptide
SLNKLFHQE

SEQ ID NO: 13705 - protein, 9 aa, Artificial Sequence
  Description of Artificial Sequence: Synthetic peptide
SLQFLYHGS

SEQ ID NO: 13706 - protein, 9 aa, Artificial Sequence
  Description of Artificial Sequence: Synthetic peptide
TERLLQQFY

SEQ ID NO: 13707 - protein, 9 aa, Artificial Sequence
  Description of Artificial Sequence: Synthetic peptide
TFATLCDQQ

SEQ ID NO: 13708 - protein, 9 aa, Artificial Sequence
  Description of Artificial Sequence: Synthetic peptide
TIMGLLGNV

SEQ ID NO: 13709 - protein, 9 aa, Artificial Sequence
  Description of Artificial Sequence: Synthetic peptide
TMYPLMHYS

SEQ ID NO: 13710 - protein, 9 aa, Artificial Sequence
  Description of Artificial Sequence: Synthetic peptide
TPAQLNGYG

SEQ ID NO: 13711 - protein, 9 aa, Artificial Sequence
  Description of Artificial Sequence: Synthetic peptide
TQCMLHGPY

SEQ ID NO: 13712 - protein, 9 aa, Artificial Sequence
  Description of Artificial Sequence: Synthetic peptide
TQGWLTLCY

SEQ ID NO: 13713 - protein, 9 aa, Artificial Sequence
  Description of Artificial Sequence: Synthetic peptide
TSDWLQNYI

SEQ ID NO: 13714 - protein, 9 aa, Artificial Sequence
  Description of Artificial Sequence: Synthetic peptide
TTQCLDRWQ

SEQ ID NO: 13715 - protein, 9 aa, Artificial Sequence
  Description of Artificial Sequence: Synthetic peptide
TTWILPHHD

SEQ ID NO: 13716 - protein, 9 aa, Artificial Sequence
  Description of Artificial Sequence: Synthetic peptide
TYVPLWAYW

SEQ ID NO: 13717 - protein, 9 aa, Artificial Sequence
  Description of Artificial Sequence: Synthetic peptide
VEVQLKALQ

SEQ ID NO: 13718 - protein, 9 aa, Artificial Sequence
  Description of Artificial Sequence: Synthetic peptide
VMHCLRQFM

SEQ ID NO: 13719 - protein, 9 aa, Artificial Sequence
  Description of Artificial Sequence: Synthetic peptide
VRPWLVMDN

SEQ ID NO: 13720 - protein, 9 aa, Artificial Sequence
  Description of Artificial Sequence: Synthetic peptide
VTDGLGFRQ

SEQ ID NO: 13721 - protein, 9 aa, Artificial Sequence
  Description of Artificial Sequence: Synthetic peptide
WVRDLKCPV

SEQ ID NO: 13722 - protein, 9 aa, Artificial Sequence
  Description of Artificial Sequence: Synthetic peptide
YRIFLMHLC

SEQ ID NO: 13723 - protein, 9 aa, Artificial Sequence
  Description of Artificial Sequence: Synthetic peptide
CIDVLFKHL

SEQ ID NO: 13724 - protein, 9 aa, Artificial Sequence
  Description of Artificial Sequence: Synthetic peptide
VFKPLDKRY

SEQ ID NO: 13725 - protein, 9 aa, Artificial Sequence
  Description of Artificial Sequence: Synthetic peptide
TQGSVHVMN

SEQ ID NO: 13726 - protein, 9 aa, Artificial Sequence
  Description of Artificial Sequence: Synthetic peptide
VEPTWHCDW

SEQ ID NO: 13727 - protein, 9 aa, Artificial Sequence
  Description of Artificial Sequence: Synthetic peptide
VISNRHHLP

SEQ ID NO: 13728 - protein, 9 aa, Artificial Sequence
  Description of Artificial Sequence: Synthetic peptide
WRVSAHYYI

SEQ ID NO: 13729 - protein, 9 aa, Artificial Sequence
  Description of Artificial Sequence: Synthetic peptide
YDHTIHRNP

SEQ ID NO: 13730 - protein, 9 aa, Artificial Sequence
  Description of Artificial Sequence: Synthetic peptide
YLLYPHSSG

SEQ ID NO: 13731 - protein, 9 aa, Artificial Sequence
  Description of Artificial Sequence: Synthetic peptide
ACDLQHNIA

SEQ ID NO: 13732 - protein, 9 aa, Artificial Sequence
  Description of Artificial Sequence: Synthetic peptide
ADQQQHKVI

SEQ ID NO: 13733 - protein, 9 aa, Artificial Sequence
  Description of Artificial Sequence: Synthetic peptide
ADWHCHRND

SEQ ID NO: 13734 - protein, 9 aa, Artificial Sequence
  Description of Artificial Sequence: Synthetic peptide
AEAQFHTGE

SEQ ID NO: 13735 - protein, 9 aa, Artificial Sequence
  Description of Artificial Sequence: Synthetic peptide
ANHWKHEWE

SEQ ID NO: 13736 - protein, 9 aa, Artificial Sequence
  Description of Artificial Sequence: Synthetic peptide
ASGWGHCWR

SEQ ID NO: 13737 - protein, 9 aa, Artificial Sequence
  Description of Artificial Sequence: Synthetic peptide
AVIKAHCAA

SEQ ID NO: 13738 - protein, 9 aa, Artificial Sequence
  Description of Artificial Sequence: Synthetic peptide
AYCHQHQHA

SEQ ID NO: 13739 - protein, 9 aa, Artificial Sequence
  Description of Artificial Sequence: Synthetic peptide
AYMPYHKEQ

SEQ ID NO: 13740 - protein, 9 aa, Artificial Sequence
  Description of Artificial Sequence: Synthetic peptide
AYQAEHVGM

SEQ ID NO: 13741 - protein, 9 aa, Artificial Sequence
  Description of Artificial Sequence: Synthetic peptide
CINWKHVAS

SEQ ID NO: 13742 - protein, 9 aa, Artificial Sequence
  Description of Artificial Sequence: Synthetic peptide
DDHWHHRAK

SEQ ID NO: 13743 - protein, 9 aa, Artificial Sequence
  Description of Artificial Sequence: Synthetic peptide
DFLTAHCIE

SEQ ID NO: 13744 - protein, 9 aa, Artificial Sequence
  Description of Artificial Sequence: Synthetic peptide
DFLYMHRMG

SEQ ID NO: 13745 - protein, 9 aa, Artificial Sequence
  Description of Artificial Sequence: Synthetic peptide
DGDAAHTKP

SEQ ID NO: 13746 - protein, 9 aa, Artificial Sequence
  Description of Artificial Sequence: Synthetic peptide
DHQLCHVAL

SEQ ID NO: 13747 - protein, 9 aa, Artificial Sequence
  Description of Artificial Sequence: Synthetic peptide
DHVDNHEEA

SEQ ID NO: 13748 - protein, 9 aa, Artificial Sequence
  Description of Artificial Sequence: Synthetic peptide
DNAYFHIKG

SEQ ID NO: 13749 - protein, 9 aa, Artificial Sequence
  Description of Artificial Sequence: Synthetic peptide
DPCNHHWCI

SEQ ID NO: 13750 - protein, 9 aa, Artificial Sequence
  Description of Artificial Sequence: Synthetic peptide
DVVYTHCIN

SEQ ID NO: 13751 - protein, 9 aa, Artificial Sequence
  Description of Artificial Sequence: Synthetic peptide
EENHSHDER

SEQ ID NO: 13752 - protein, 9 aa, Artificial Sequence
  Description of Artificial Sequence: Synthetic peptide
EINFQHRHV

SEQ ID NO: 13753 - protein, 9 aa, Artificial Sequence
  Description of Artificial Sequence: Synthetic peptide
EIQWNHWYV

SEQ ID NO: 13754 - protein, 9 aa, Artificial Sequence
  Description of Artificial Sequence: Synthetic peptide
EKDMHHVAS

SEQ ID NO: 13755 - protein, 9 aa, Artificial Sequence
  Description of Artificial Sequence: Synthetic peptide
ELLKVHGPK

SEQ ID NO: 13756 - protein, 9 aa, Artificial Sequence
  Description of Artificial Sequence: Synthetic peptide
EMNGRHWMP

SEQ ID NO: 13757 - protein, 9 aa, Artificial Sequence
  Description of Artificial Sequence: Synthetic peptide
EPAVTHDSA

SEQ ID NO: 13758 - protein, 9 aa, Artificial Sequence
  Description of Artificial Sequence: Synthetic peptide
EQHIMHEQW

SEQ ID NO: 13759 - protein, 9 aa, Artificial Sequence
  Description of Artificial Sequence: Synthetic peptide
ERMVCHWDA

SEQ ID NO: 13760 - protein, 9 aa, Artificial Sequence
  Description of Artificial Sequence: Synthetic peptide
EWPINHQKV

SEQ ID NO: 13761 - protein, 9 aa, Artificial Sequence
  Description of Artificial Sequence: Synthetic peptide
FDKAFHVHM

SEQ ID NO: 13762 - protein, 9 aa, Artificial Sequence
  Description of Artificial Sequence: Synthetic peptide
FKPIVHHCG

SEQ ID NO: 13763 - protein, 9 aa, Artificial Sequence
  Description of Artificial Sequence: Synthetic peptide
GEDQIHVWH

SEQ ID NO: 13764 - protein, 9 aa, Artificial Sequence
  Description of Artificial Sequence: Synthetic peptide
GHQSEHRCS

SEQ ID NO: 13765 - protein, 9 aa, Artificial Sequence
  Description of Artificial Sequence: Synthetic peptide
GINSHHNDL

SEQ ID NO: 13766 - protein, 9 aa, Artificial Sequence
  Description of Artificial Sequence: Synthetic peptide
GKQNNHRIE

SEQ ID NO: 13767 - protein, 9 aa, Artificial Sequence
  Description of Artificial Sequence: Synthetic peptide
GNKYMHHHA

SEQ ID NO: 13768 - protein, 9 aa, Artificial Sequence
  Description of Artificial Sequence: Synthetic peptide
GPKPVHFDV

SEQ ID NO: 13769 - protein, 9 aa, Artificial Sequence
  Description of Artificial Sequence: Synthetic peptide
GSVMGHCGS

SEQ ID NO: 13770 - protein, 9 aa, Artificial Sequence
  Description of Artificial Sequence: Synthetic peptide
GWGCGHGVH

SEQ ID NO: 13771 - protein, 9 aa, Artificial Sequence
  Description of Artificial Sequence: Synthetic peptide
HGYNWHHLG

SEQ ID NO: 13772 - protein, 9 aa, Artificial Sequence
  Description of Artificial Sequence: Synthetic peptide
HTLHRHWFW

SEQ ID NO: 13773 - protein, 9 aa, Artificial Sequence
  Description of Artificial Sequence: Synthetic peptide
HTQFAHGVD

SEQ ID NO: 13774 - protein, 9 aa, Artificial Sequence
  Description of Artificial Sequence: Synthetic peptide
HVAIGHGGF

SEQ ID NO: 13775 - protein, 9 aa, Artificial Sequence
  Description of Artificial Sequence: Synthetic peptide
IERHEHNPY

SEQ ID NO: 13776 - protein, 9 aa, Artificial Sequence
  Description of Artificial Sequence: Synthetic peptide
IIPHFHLCY

SEQ ID NO: 13777 - protein, 9 aa, Artificial Sequence
  Description of Artificial Sequence: Synthetic peptide
IKCIQHVHY

SEQ ID NO: 13778 - protein, 9 aa, Artificial Sequence
  Description of Artificial Sequence: Synthetic peptide
IKDITHNHP

SEQ ID NO: 13779 - protein, 9 aa, Artificial Sequence
  Description of Artificial Sequence: Synthetic peptide
LCRQTHKWV

SEQ ID NO: 13780 - protein, 9 aa, Artificial Sequence
  Description of Artificial Sequence: Synthetic peptide
LFGVYHFSG

SEQ ID NO: 13781 - protein, 9 aa, Artificial Sequence
  Description of Artificial Sequence: Synthetic peptide
LICKYHYCQ

SEQ ID NO: 13782 - protein, 9 aa, Artificial Sequence
  Description of Artificial Sequence: Synthetic peptide
LQPMMHTHS

SEQ ID NO: 13783 - protein, 9 aa, Artificial Sequence
  Description of Artificial Sequence: Synthetic peptide
LTLCMHEAD

SEQ ID NO: 13784 - protein, 9 aa, Artificial Sequence
  Description of Artificial Sequence: Synthetic peptide
MCGLYHTEG

SEQ ID NO: 13785 - protein, 9 aa, Artificial Sequence
  Description of Artificial Sequence: Synthetic peptide
MCHGCHRSY

SEQ ID NO: 13786 - protein, 9 aa, Artificial Sequence
  Description of Artificial Sequence: Synthetic peptide
MFDNCHVFP

SEQ ID NO: 13787 - protein, 9 aa, Artificial Sequence
  Description of Artificial Sequence: Synthetic peptide
MNDTYHRRA

SEQ ID NO: 13788 - protein, 9 aa, Artificial Sequence
  Description of Artificial Sequence: Synthetic peptide
MNLTIHEQF

SEQ ID NO: 13789 - protein, 9 aa, Artificial Sequence
  Description of Artificial Sequence: Synthetic peptide
MQMFKHNWI

SEQ ID NO: 13790 - protein, 9 aa, Artificial Sequence
  Description of Artificial Sequence: Synthetic peptide
MTGVEHVFY

SEQ ID NO: 13791 - protein, 9 aa, Artificial Sequence
  Description of Artificial Sequence: Synthetic peptide
NCFWTHVSG

SEQ ID NO: 13792 - protein, 9 aa, Artificial Sequence
  Description of Artificial Sequence: Synthetic peptide
NDYPIHCYS

SEQ ID NO: 13793 - protein, 9 aa, Artificial Sequence
  Description of Artificial Sequence: Synthetic peptide
NFTSFHTYS

SEQ ID NO: 13794 - protein, 9 aa, Artificial Sequence
  Description of Artificial Sequence: Synthetic peptide
NHMLTHHYH

SEQ ID NO: 13795 - protein, 9 aa, Artificial Sequence
  Description of Artificial Sequence: Synthetic peptide
NYAFNHQGV

SEQ ID NO: 13796 - protein, 9 aa, Artificial Sequence
  Description of Artificial Sequence: Synthetic peptide
NYQQHHFFS

SEQ ID NO: 13797 - protein, 9 aa, Artificial Sequence
  Description of Artificial Sequence: Synthetic peptide
QHSWKHFDS

SEQ ID NO: 13798 - protein, 9 aa, Artificial Sequence
  Description of Artificial Sequence: Synthetic peptide
QILHYHYHG

SEQ ID NO: 13799 - protein, 9 aa, Artificial Sequence
  Description of Artificial Sequence: Synthetic peptide
QMNWKHVWN

SEQ ID NO: 13800 - protein, 9 aa, Artificial Sequence
  Description of Artificial Sequence: Synthetic peptide
QNSERHDEP

SEQ ID NO: 13801 - protein, 9 aa, Artificial Sequence
  Description of Artificial Sequence: Synthetic peptide
QRMFTHQEY

SEQ ID NO: 13802 - protein, 9 aa, Artificial Sequence
  Description of Artificial Sequence: Synthetic peptide
QSFSPHFGV

SEQ ID NO: 13803 - protein, 9 aa, Artificial Sequence
  Description of Artificial Sequence: Synthetic peptide
QSVHTHANL

SEQ ID NO: 13804 - protein, 9 aa, Artificial Sequence
  Description of Artificial Sequence: Synthetic peptide
QTGNAHWQE

SEQ ID NO: 13805 - protein, 9 aa, Artificial Sequence
  Description of Artificial Sequence: Synthetic peptide
RCNEDHEQD

SEQ ID NO: 13806 - protein, 9 aa, Artificial Sequence
  Description of Artificial Sequence: Synthetic peptide
RIIEQHAHG

SEQ ID NO: 13807 - protein, 9 aa, Artificial Sequence
  Description of Artificial Sequence: Synthetic peptide
RQCEMHTVD

SEQ ID NO: 13808 - protein, 9 aa, Artificial Sequence
  Description of Artificial Sequence: Synthetic peptide
SCGWKHDNP

SEQ ID NO: 13809 - protein, 9 aa, Artificial Sequence
  Description of Artificial Sequence: Synthetic peptide
SCTEMHAGR

SEQ ID NO: 13810 - protein, 9 aa, Artificial Sequence
  Description of Artificial Sequence: Synthetic peptide
SLYVHHKDG

SEQ ID NO: 13811 - protein, 9 aa, Artificial Sequence
  Description of Artificial Sequence: Synthetic peptide
STGLQHDFN

SEQ ID NO: 13812 - protein, 9 aa, Artificial Sequence
  Description of Artificial Sequence: Synthetic peptide
TEGQTHHTA

SEQ ID NO: 13813 - protein, 9 aa, Artificial Sequence
  Description of Artificial Sequence: Synthetic peptide
TERSAHVTY

SEQ ID NO: 13814 - protein, 9 aa, Artificial Sequence
  Description of Artificial Sequence: Synthetic peptide
TFKWMHEGW

SEQ ID NO: 13815 - protein, 9 aa, Artificial Sequence
  Description of Artificial Sequence: Synthetic peptide
TFNNCHMQS

SEQ ID NO: 13816 - protein, 9 aa, Artificial Sequence
  Description of Artificial Sequence: Synthetic peptide
THTQQHVVN

SEQ ID NO: 13817 - protein, 9 aa, Artificial Sequence
  Description of Artificial Sequence: Synthetic peptide
TMSDRHICH

SEQ ID NO: 13818 - protein, 9 aa, Artificial Sequence
  Description of Artificial Sequence: Synthetic peptide
TNATSHWCG

SEQ ID NO: 13819 - protein, 9 aa, Artificial Sequence
  Description of Artificial Sequence: Synthetic peptide
TNGWMHHWD

SEQ ID NO: 13820 - protein, 9 aa, Artificial Sequence
  Description of Artificial Sequence: Synthetic peptide
TTMIRHHGH

SEQ ID NO: 13821 - protein, 9 aa, Artificial Sequence
  Description of Artificial Sequence: Synthetic peptide
TVFGTHRAL

SEQ ID NO: 13822 - protein, 9 aa, Artificial Sequence
  Description of Artificial Sequence: Synthetic peptide
TVGMFHCQG

SEQ ID NO: 13823 - protein, 9 aa, Artificial Sequence
  Description of Artificial Sequence: Synthetic peptide
TYTPRHRFS

SEQ ID NO: 13824 - protein, 9 aa, Artificial Sequence
  Description of Artificial Sequence: Synthetic peptide
VRKWQHHGG

SEQ ID NO: 13825 - protein, 9 aa, Artificial Sequence
  Description of Artificial Sequence: Synthetic peptide
VTTHCHHTY

SEQ ID NO: 13826 - protein, 9 aa, Artificial Sequence
  Description of Artificial Sequence: Synthetic peptide
WEAKWHAWE

SEQ ID NO: 13827 - protein, 9 aa, Artificial Sequence
  Description of Artificial Sequence: Synthetic peptide
WGFNDHKRG

SEQ ID NO: 13828 - protein, 9 aa, Artificial Sequence
  Description of Artificial Sequence: Synthetic peptide
WRGIGHADL

SEQ ID NO: 13829 - protein, 9 aa, Artificial Sequence
  Description of Artificial Sequence: Synthetic peptide
WTTAFHKRT

SEQ ID NO: 13830 - protein, 9 aa, Artificial Sequence
  Description of Artificial Sequence: Synthetic peptide
YIVQTHCGG

SEQ ID NO: 13831 - protein, 9 aa, Artificial Sequence
  Description of Artificial Sequence: Synthetic peptide
YKCHDHCHD

SEQ ID NO: 13832 - protein, 9 aa, Artificial Sequence
  Description of Artificial Sequence: Synthetic peptide
YNNFHHQMY

SEQ ID NO: 13833 - protein, 9 aa, Artificial Sequence
  Description of Artificial Sequence: Synthetic peptide
YRNEPHQGF

SEQ ID NO: 13834 - protein, 9 aa, Artificial Sequence
  Description of Artificial Sequence: Synthetic peptide
YTNYKHCCF

SEQ ID NO: 13835 - protein, 9 aa, Artificial Sequence
  Description of Artificial Sequence: Synthetic peptide
TGCNHHGRF

SEQ ID NO: 13836 - protein, 9 aa, Artificial Sequence
  Description of Artificial Sequence: Synthetic peptide
DVCDDHKPN

SEQ ID NO: 13837 - protein, 9 aa, Artificial Sequence
  Description of Artificial Sequence: Synthetic peptide
DVAPMHQVE

SEQ ID NO: 13838 - protein, 9 aa, Artificial Sequence
  Description of Artificial Sequence: Synthetic peptide
VFKPNSFQT

SEQ ID NO: 13839 - protein, 9 aa, Artificial Sequence
  Description of Artificial Sequence: Synthetic peptide
VPIQFSFAS

SEQ ID NO: 13840 - protein, 9 aa, Artificial Sequence
  Description of Artificial Sequence: Synthetic peptide
VPLWDVFQT

SEQ ID NO: 13841 - protein, 9 aa, Artificial Sequence
  Description of Artificial Sequence: Synthetic peptide
VTGVTIFEL

SEQ ID NO: 13842 - protein, 9 aa, Artificial Sequence
  Description of Artificial Sequence: Synthetic peptide
YTPTRYFGK

SEQ ID NO: 13843 - protein, 9 aa, Artificial Sequence
  Description of Artificial Sequence: Synthetic peptide
YVGWHMFLD

SEQ ID NO: 13844 - protein, 9 aa, Artificial Sequence
  Description of Artificial Sequence: Synthetic peptide
IWKIQEFGT

SEQ ID NO: 13845 - protein, 9 aa, Artificial Sequence
  Description of Artificial Sequence: Synthetic peptide
AGQPVTFHF

SEQ ID NO: 13846 - protein, 9 aa, Artificial Sequence
  Description of Artificial Sequence: Synthetic peptide
AHASHMFGG

SEQ ID NO: 13847 - protein, 9 aa, Artificial Sequence
  Description of Artificial Sequence: Synthetic peptide
ARQMICFGG

SEQ ID NO: 13848 - protein, 9 aa, Artificial Sequence
  Description of Artificial Sequence: Synthetic peptide
ATYYNQFHD

SEQ ID NO: 13849 - protein, 9 aa, Artificial Sequence
  Description of Artificial Sequence: Synthetic peptide
CCTWKCFCQ

SEQ ID NO: 13850 - protein, 9 aa, Artificial Sequence
  Description of Artificial Sequence: Synthetic peptide
DFPLFTFGN

SEQ ID NO: 13851 - protein, 9 aa, Artificial Sequence
  Description of Artificial Sequence: Synthetic peptide
DIRHMSFEF

SEQ ID NO: 13852 - protein, 9 aa, Artificial Sequence
  Description of Artificial Sequence: Synthetic peptide
DPSQPGFNA

SEQ ID NO: 13853 - protein, 9 aa, Artificial Sequence
  Description of Artificial Sequence: Synthetic peptide
DVAHKCFIS

SEQ ID NO: 13854 - protein, 9 aa, Artificial Sequence
  Description of Artificial Sequence: Synthetic peptide
EGGKERFQQ

SEQ ID NO: 13855 - protein, 9 aa, Artificial Sequence
  Description of Artificial Sequence: Synthetic peptide
EKMTWVFAG

SEQ ID NO: 13856 - protein, 9 aa, Artificial Sequence
  Description of Artificial Sequence: Synthetic peptide
ENTTCNFQG

SEQ ID NO: 13857 - protein, 9 aa, Artificial Sequence
  Description of Artificial Sequence: Synthetic peptide
ESLGCEFML

SEQ ID NO: 13858 - protein, 9 aa, Artificial Sequence
  Description of Artificial Sequence: Synthetic peptide
FGCCGRFVI

SEQ ID NO: 13859 - protein, 9 aa, Artificial Sequence
  Description of Artificial Sequence: Synthetic peptide
FTGKRDFMK

SEQ ID NO: 13860 - protein, 9 aa, Artificial Sequence
  Description of Artificial Sequence: Synthetic peptide
FTMWHRFAW

SEQ ID NO: 13861 - protein, 9 aa, Artificial Sequence
  Description of Artificial Sequence: Synthetic peptide
GDNAKDFRG

SEQ ID NO: 13862 - protein, 9 aa, Artificial Sequence
  Description of Artificial Sequence: Synthetic peptide
GHAPHLFAD

SEQ ID NO: 13863 - protein, 9 aa, Artificial Sequence
  Description of Artificial Sequence: Synthetic peptide
GIRSTDFYQ

SEQ ID NO: 13864 - protein, 9 aa, Artificial Sequence
  Description of Artificial Sequence: Synthetic peptide
GMIVDVFWV

SEQ ID NO: 13865 - protein, 9 aa, Artificial Sequence
  Description of Artificial Sequence: Synthetic peptide
GMTTMAFQG

SEQ ID NO: 13866 - protein, 9 aa, Artificial Sequence
  Description of Artificial Sequence: Synthetic peptide
HGAKAPFTA

SEQ ID NO: 13867 - protein, 9 aa, Artificial Sequence
  Description of Artificial Sequence: Synthetic peptide
HNDYPQFQP

SEQ ID NO: 13868 - protein, 9 aa, Artificial Sequence
  Description of Artificial Sequence: Synthetic peptide
HVNAGSFGS

SEQ ID NO: 13869 - protein, 9 aa, Artificial Sequence
  Description of Artificial Sequence: Synthetic peptide
IFILRTFFA

SEQ ID NO: 13870 - protein, 9 aa, Artificial Sequence
  Description of Artificial Sequence: Synthetic peptide
IFPWFKFHW

SEQ ID NO: 13871 - protein, 9 aa, Artificial Sequence
  Description of Artificial Sequence: Synthetic peptide
IQVHSLFGC

SEQ ID NO: 13872 - protein, 9 aa, Artificial Sequence
  Description of Artificial Sequence: Synthetic peptide
IRPFIEFLQ

SEQ ID NO: 13873 - protein, 9 aa, Artificial Sequence
  Description of Artificial Sequence: Synthetic peptide
LHQKPNFDC

SEQ ID NO: 13874 - protein, 9 aa, Artificial Sequence
  Description of Artificial Sequence: Synthetic peptide
LIHHCTFEQ

SEQ ID NO: 13875 - protein, 9 aa, Artificial Sequence
  Description of Artificial Sequence: Synthetic peptide
LQLEDRFNG

SEQ ID NO: 13876 - protein, 9 aa, Artificial Sequence
  Description of Artificial Sequence: Synthetic peptide
MCSHYQFMS

SEQ ID NO: 13877 - protein, 9 aa, Artificial Sequence
  Description of Artificial Sequence: Synthetic peptide
MFYLEDFRQ

SEQ ID NO: 13878 - protein, 9 aa, Artificial Sequence
  Description of Artificial Sequence: Synthetic peptide
MITQFIFNI

SEQ ID NO: 13879 - protein, 9 aa, Artificial Sequence
  Description of Artificial Sequence: Synthetic peptide
MTVMQGFLS

SEQ ID NO: 13880 - protein, 9 aa, Artificial Sequence
  Description of Artificial Sequence: Synthetic peptide
NPQWGLFNQ

SEQ ID NO: 13881 - protein, 9 aa, Artificial Sequence
  Description of Artificial Sequence: Synthetic peptide
NTGARPFAG

SEQ ID NO: 13882 - protein, 9 aa, Artificial Sequence
  Description of Artificial Sequence: Synthetic peptide
PCLQTRFAQ

SEQ ID NO: 13883 - protein, 9 aa, Artificial Sequence
  Description of Artificial Sequence: Synthetic peptide
PMYQDMFTL

SEQ ID NO: 13884 - protein, 9 aa, Artificial Sequence
  Description of Artificial Sequence: Synthetic peptide
QGDLMGFHY

SEQ ID NO: 13885 - protein, 9 aa, Artificial Sequence
  Description of Artificial Sequence: Synthetic peptide
QIGMNTFMS

SEQ ID NO: 13886 - protein, 9 aa, Artificial Sequence
  Description of Artificial Sequence: Synthetic peptide
QMHVMIFGS

SEQ ID NO: 13887 - protein, 9 aa, Artificial Sequence
  Description of Artificial Sequence: Synthetic peptide
REWDHYFQI

SEQ ID NO: 13888 - protein, 9 aa, Artificial Sequence
  Description of Artificial Sequence: Synthetic peptide
RLRISPFNI

SEQ ID NO: 13889 - protein, 9 aa, Artificial Sequence
  Description of Artificial Sequence: Synthetic peptide
RMGAWSFPS

SEQ ID NO: 13890 - protein, 9 aa, Artificial Sequence
  Description of Artificial Sequence: Synthetic peptide
RVTTAEFLC

SEQ ID NO: 13891 - protein, 9 aa, Artificial Sequence
  Description of Artificial Sequence: Synthetic peptide
RWSQNKFQR

SEQ ID NO: 13892 - protein, 9 aa, Artificial Sequence
  Description of Artificial Sequence: Synthetic peptide
SDHDNVFED

SEQ ID NO: 13893 - protein, 9 aa, Artificial Sequence
  Description of Artificial Sequence: Synthetic peptide
SHTTYDFFK

SEQ ID NO: 13894 - protein, 9 aa, Artificial Sequence
  Description of Artificial Sequence: Synthetic peptide
SNVCNSFVN

SEQ ID NO: 13895 - protein, 9 aa, Artificial Sequence
  Description of Artificial Sequence: Synthetic peptide
SPHAGPFGC

SEQ ID NO: 13896 - protein, 9 aa, Artificial Sequence
  Description of Artificial Sequence: Synthetic peptide
SQFMMDFGP

SEQ ID NO: 13897 - protein, 9 aa, Artificial Sequence
  Description of Artificial Sequence: Synthetic peptide
SQVPGRFIF

SEQ ID NO: 13898 - protein, 9 aa, Artificial Sequence
  Description of Artificial Sequence: Synthetic peptide
TCCLYEFIH

SEQ ID NO: 13899 - protein, 9 aa, Artificial Sequence
  Description of Artificial Sequence: Synthetic peptide
TGGTAEFGL

SEQ ID NO: 13900 - protein, 9 aa, Artificial Sequence
  Description of Artificial Sequence: Synthetic peptide
TSNWHEFTN

SEQ ID NO: 13901 - protein, 9 aa, Artificial Sequence
  Description of Artificial Sequence: Synthetic peptide
TSPCCTFGI

SEQ ID NO: 13902 - protein, 9 aa, Artificial Sequence
  Description of Artificial Sequence: Synthetic peptide
VHDAQGFCA

SEQ ID NO: 13903 - protein, 9 aa, Artificial Sequence
  Description of Artificial Sequence: Synthetic peptide
VKMMWDFAD

SEQ ID NO: 13904 - protein, 9 aa, Artificial Sequence
  Description of Artificial Sequence: Synthetic peptide
VTHITEFMA

SEQ ID NO: 13905 - protein, 9 aa, Artificial Sequence
  Description of Artificial Sequence: Synthetic peptide
VVSTDMFIH

SEQ ID NO: 13906 - protein, 9 aa, Artificial Sequence
  Description of Artificial Sequence: Synthetic peptide
WCAPAVFNE

SEQ ID NO: 13907 - protein, 9 aa, Artificial Sequence
  Description of Artificial Sequence: Synthetic peptide
YFREKPFDV

SEQ ID NO: 13908 - protein, 9 aa, Artificial Sequence
  Description of Artificial Sequence: Synthetic peptide
YQCKMAFHV

SEQ ID NO: 13909 - protein, 9 aa, Artificial Sequence
  Description of Artificial Sequence: Synthetic peptide
GVWMQGFHP

SEQ ID NO: 13910 - protein, 9 aa, Artificial Sequence
  Description of Artificial Sequence: Synthetic peptide
MWGCKLFVC

SEQ ID NO: 13911 - protein, 9 aa, Artificial Sequence
  Description of Artificial Sequence: Synthetic peptide
YLDSSECCW

SEQ ID NO: 13912 - protein, 9 aa, Artificial Sequence
  Description of Artificial Sequence: Synthetic peptide
YVKPCYDCI

SEQ ID NO: 13913 - protein, 9 aa, Artificial Sequence
  Description of Artificial Sequence: Synthetic peptide
AGLQHDTCV

SEQ ID NO: 13914 - protein, 9 aa, Artificial Sequence
  Description of Artificial Sequence: Synthetic peptide
AITHVMHCH

SEQ ID NO: 13915 - protein, 9 aa, Artificial Sequence
  Description of Artificial Sequence: Synthetic peptide
ASVLQQLCV

SEQ ID NO: 13916 - protein, 9 aa, Artificial Sequence
  Description of Artificial Sequence: Synthetic peptide
ATTGMLACH

SEQ ID NO: 13917 - protein, 9 aa, Artificial Sequence
  Description of Artificial Sequence: Synthetic peptide
AVGATMMCH

SEQ ID NO: 13918 - protein, 9 aa, Artificial Sequence
  Description of Artificial Sequence: Synthetic peptide
AVHDNFWCL

SEQ ID NO: 13919 - protein, 9 aa, Artificial Sequence
  Description of Artificial Sequence: Synthetic peptide
CCKYNQLCH

SEQ ID NO: 13920 - protein, 9 aa, Artificial Sequence
  Description of Artificial Sequence: Synthetic peptide
CDKIDPYCD

SEQ ID NO: 13921 - protein, 9 aa, Artificial Sequence
  Description of Artificial Sequence: Synthetic peptide
CDTDESGCY

SEQ ID NO: 13922 - protein, 9 aa, Artificial Sequence
  Description of Artificial Sequence: Synthetic peptide
CHRCKVNCQ

SEQ ID NO: 13923 - protein, 9 aa, Artificial Sequence
  Description of Artificial Sequence: Synthetic peptide
CITPYRPCD

SEQ ID NO: 13924 - protein, 9 aa, Artificial Sequence
  Description of Artificial Sequence: Synthetic peptide
CMYSWVPCG

SEQ ID NO: 13925 - protein, 9 aa, Artificial Sequence
  Description of Artificial Sequence: Synthetic peptide
CVHYCFGCS

SEQ ID NO: 13926 - protein, 9 aa, Artificial Sequence
  Description of Artificial Sequence: Synthetic peptide
CVKSYEKCF

SEQ ID NO: 13927 - protein, 9 aa, Artificial Sequence
  Description of Artificial Sequence: Synthetic peptide
DEHAHWSCS

SEQ ID NO: 13928 - protein, 9 aa, Artificial Sequence
  Description of Artificial Sequence: Synthetic peptide
DEHQMMECG

SEQ ID NO: 13929 - protein, 9 aa, Artificial Sequence
  Description of Artificial Sequence: Synthetic peptide
DIGFRIDCD

SEQ ID NO: 13930 - protein, 9 aa, Artificial Sequence
  Description of Artificial Sequence: Synthetic peptide
DMCEFMYCD

SEQ ID NO: 13931 - protein, 9 aa, Artificial Sequence
  Description of Artificial Sequence: Synthetic peptide
DMFYWQPCE

SEQ ID NO: 13932 - protein, 9 aa, Artificial Sequence
  Description of Artificial Sequence: Synthetic peptide
DRRDHEACN

SEQ ID NO: 13933 - protein, 9 aa, Artificial Sequence
  Description of Artificial Sequence: Synthetic peptide
EFDSPNQCY

SEQ ID NO: 13934 - protein, 9 aa, Artificial Sequence
  Description of Artificial Sequence: Synthetic peptide
EFHPHDWCL

SEQ ID NO: 13935 - protein, 9 aa, Artificial Sequence
  Description of Artificial Sequence: Synthetic peptide
ERGFMEHCH

SEQ ID NO: 13936 - protein, 9 aa, Artificial Sequence
  Description of Artificial Sequence: Synthetic peptide
ESMSTRACG

SEQ ID NO: 13937 - protein, 9 aa, Artificial Sequence
  Description of Artificial Sequence: Synthetic peptide
ETDPYKSCH

SEQ ID NO: 13938 - protein, 9 aa, Artificial Sequence
  Description of Artificial Sequence: Synthetic peptide
ETVSPVGCH

SEQ ID NO: 13939 - protein, 9 aa, Artificial Sequence
  Description of Artificial Sequence: Synthetic peptide
EVAQTMRCA

SEQ ID NO: 13940 - protein, 9 aa, Artificial Sequence
  Description of Artificial Sequence: Synthetic peptide
EYQLSETCT

SEQ ID NO: 13941 - protein, 9 aa, Artificial Sequence
  Description of Artificial Sequence: Synthetic peptide
FHKCYSACR

SEQ ID NO: 13942 - protein, 9 aa, Artificial Sequence
  Description of Artificial Sequence: Synthetic peptide
FKDMIARCP

SEQ ID NO: 13943 - protein, 9 aa, Artificial Sequence
  Description of Artificial Sequence: Synthetic peptide
GDDCKFDCL

SEQ ID NO: 13944 - protein, 9 aa, Artificial Sequence
  Description of Artificial Sequence: Synthetic peptide
GTGSTWECT

SEQ ID NO: 13945 - protein, 9 aa, Artificial Sequence
  Description of Artificial Sequence: Synthetic peptide
GVAVTTCCR

SEQ ID NO: 13946 - protein, 9 aa, Artificial Sequence
  Description of Artificial Sequence: Synthetic peptide
HSNMRSACE

SEQ ID NO: 13947 - protein, 9 aa, Artificial Sequence
  Description of Artificial Sequence: Synthetic peptide
IKRTYPACW

SEQ ID NO: 13948 - protein, 9 aa, Artificial Sequence
  Description of Artificial Sequence: Synthetic peptide
IMCECQHCE

SEQ ID NO: 13949 - protein, 9 aa, Artificial Sequence
  Description of Artificial Sequence: Synthetic peptide
IPFPMCGCC

SEQ ID NO: 13950 - protein, 9 aa, Artificial Sequence
  Description of Artificial Sequence: Synthetic peptide
IRAPFNRCE

SEQ ID NO: 13951 - protein, 9 aa, Artificial Sequence
  Description of Artificial Sequence: Synthetic peptide
ITCTYRNCE

SEQ ID NO: 13952 - protein, 9 aa, Artificial Sequence
  Description of Artificial Sequence: Synthetic peptide
ITDYQSDCY

SEQ ID NO: 13953 - protein, 9 aa, Artificial Sequence
  Description of Artificial Sequence: Synthetic peptide
LCALHEQCQ

SEQ ID NO: 13954 - protein, 9 aa, Artificial Sequence
  Description of Artificial Sequence: Synthetic peptide
LSVSSDACY

SEQ ID NO: 13955 - protein, 9 aa, Artificial Sequence
  Description of Artificial Sequence: Synthetic peptide
LVVAHCGCV

SEQ ID NO: 13956 - protein, 9 aa, Artificial Sequence
  Description of Artificial Sequence: Synthetic peptide
MDAYFNSCQ

SEQ ID NO: 13957 - protein, 9 aa, Artificial Sequence
  Description of Artificial Sequence: Synthetic peptide
MGTFVAHCY

SEQ ID NO: 13958 - protein, 9 aa, Artificial Sequence
  Description of Artificial Sequence: Synthetic peptide
MIALNQNCT

SEQ ID NO: 13959 - protein, 9 aa, Artificial Sequence
  Description of Artificial Sequence: Synthetic peptide
MMPSYTLCW

SEQ ID NO: 13960 - protein, 9 aa, Artificial Sequence
  Description of Artificial Sequence: Synthetic peptide
MPAWMMNCH

SEQ ID NO: 13961 - protein, 9 aa, Artificial Sequence
  Description of Artificial Sequence: Synthetic peptide
MQQCDGGCG

SEQ ID NO: 13962 - protein, 9 aa, Artificial Sequence
  Description of Artificial Sequence: Synthetic peptide
MSWSVYWCI

SEQ ID NO: 13963 - protein, 9 aa, Artificial Sequence
  Description of Artificial Sequence: Synthetic peptide
MTNCIEYCA

SEQ ID NO: 13964 - protein, 9 aa, Artificial Sequence
  Description of Artificial Sequence: Synthetic peptide
MTTLYQSCL

SEQ ID NO: 13965 - protein, 9 aa, Artificial Sequence
  Description of Artificial Sequence: Synthetic peptide
MVHGALMCR

SEQ ID NO: 13966 - protein, 9 aa, Artificial Sequence
  Description of Artificial Sequence: Synthetic peptide
MVRSREQCI

SEQ ID NO: 13967 - protein, 9 aa, Artificial Sequence
  Description of Artificial Sequence: Synthetic peptide
NGGKGQQCD

SEQ ID NO: 13968 - protein, 9 aa, Artificial Sequence
  Description of Artificial Sequence: Synthetic peptide
NLGYCEHCY

SEQ ID NO: 13969 - protein, 9 aa, Artificial Sequence
  Description of Artificial Sequence: Synthetic peptide
NLMTPWPCQ

SEQ ID NO: 13970 - protein, 9 aa, Artificial Sequence
  Description of Artificial Sequence: Synthetic peptide
NSNMMAHCE

SEQ ID NO: 13971 - protein, 9 aa, Artificial Sequence
  Description of Artificial Sequence: Synthetic peptide
NWVPVYDCH

SEQ ID NO: 13972 - protein, 9 aa, Artificial Sequence
  Description of Artificial Sequence: Synthetic peptide
PFILSNCCA

SEQ ID NO: 13973 - protein, 9 aa, Artificial Sequence
  Description of Artificial Sequence: Synthetic peptide
QNGVWENCE

SEQ ID NO: 13974 - protein, 9 aa, Artificial Sequence
  Description of Artificial Sequence: Synthetic peptide
QSDGFEDCS

SEQ ID NO: 13975 - protein, 9 aa, Artificial Sequence
  Description of Artificial Sequence: Synthetic peptide
QTTNNQRCD

SEQ ID NO: 13976 - protein, 9 aa, Artificial Sequence
  Description of Artificial Sequence: Synthetic peptide
RDTKRSCCH

SEQ ID NO: 13977 - protein, 9 aa, Artificial Sequence
  Description of Artificial Sequence: Synthetic peptide
RFVDFGSCQ

SEQ ID NO: 13978 - protein, 9 aa, Artificial Sequence
  Description of Artificial Sequence: Synthetic peptide
RHYYWVLCP

SEQ ID NO: 13979 - protein, 9 aa, Artificial Sequence
  Description of Artificial Sequence: Synthetic peptide
RNMYFVDCM

SEQ ID NO: 13980 - protein, 9 aa, Artificial Sequence
  Description of Artificial Sequence: Synthetic peptide
RYDKVCYCV

SEQ ID NO: 13981 - protein, 9 aa, Artificial Sequence
  Description of Artificial Sequence: Synthetic peptide
SGFSEKCCK

SEQ ID NO: 13982 - protein, 9 aa, Artificial Sequence
  Description of Artificial Sequence: Synthetic peptide
SGRPKLVCN

SEQ ID NO: 13983 - protein, 9 aa, Artificial Sequence
  Description of Artificial Sequence: Synthetic peptide
SHDPHNTCG

SEQ ID NO: 13984 - protein, 9 aa, Artificial Sequence
  Description of Artificial Sequence: Synthetic peptide
SIGYYCHCM

SEQ ID NO: 13985 - protein, 9 aa, Artificial Sequence
  Description of Artificial Sequence: Synthetic peptide
SILPTWGCD

SEQ ID NO: 13986 - protein, 9 aa, Artificial Sequence
  Description of Artificial Sequence: Synthetic peptide
SKHDFDHCF

SEQ ID NO: 13987 - protein, 9 aa, Artificial Sequence
  Description of Artificial Sequence: Synthetic peptide
THILYSWCT

SEQ ID NO: 13988 - protein, 9 aa, Artificial Sequence
  Description of Artificial Sequence: Synthetic peptide
TIFYCRWCN

SEQ ID NO: 13989 - protein, 9 aa, Artificial Sequence
  Description of Artificial Sequence: Synthetic peptide
TKNEYGLCF

SEQ ID NO: 13990 - protein, 9 aa, Artificial Sequence
  Description of Artificial Sequence: Synthetic peptide
TVQYGRGCS

SEQ ID NO: 13991 - protein, 9 aa, Artificial Sequence
  Description of Artificial Sequence: Synthetic peptide
TWGLKWMCP

SEQ ID NO: 13992 - protein, 9 aa, Artificial Sequence
  Description of Artificial Sequence: Synthetic peptide
VDMVVDNCC

SEQ ID NO: 13993 - protein, 9 aa, Artificial Sequence
  Description of Artificial Sequence: Synthetic peptide
VFGDGAHCI

SEQ ID NO: 13994 - protein, 9 aa, Artificial Sequence
  Description of Artificial Sequence: Synthetic peptide
VHDQRLVCD

SEQ ID NO: 13995 - protein, 9 aa, Artificial Sequence
  Description of Artificial Sequence: Synthetic peptide
VNPCAQGCH

SEQ ID NO: 13996 - protein, 9 aa, Artificial Sequence
  Description of Artificial Sequence: Synthetic peptide
VNPQFSQCT

SEQ ID NO: 13997 - protein, 9 aa, Artificial Sequence
  Description of Artificial Sequence: Synthetic peptide
VPMYTQVCN

SEQ ID NO: 13998 - protein, 9 aa, Artificial Sequence
  Description of Artificial Sequence: Synthetic peptide
VSALIDHCC

SEQ ID NO: 13999 - protein, 9 aa, Artificial Sequence
  Description of Artificial Sequence: Synthetic peptide
VTGPMPTCL

SEQ ID NO: 14000 - protein, 9 aa, Artificial Sequence
  Description of Artificial Sequence: Synthetic peptide
VTMQVRQCA

SEQ ID NO: 14001 - protein, 9 aa, Artificial Sequence
  Description of Artificial Sequence: Synthetic peptide
VVMQKIGCI

SEQ ID NO: 14002 - protein, 9 aa, Artificial Sequence
  Description of Artificial Sequence: Synthetic peptide
VVNTVGCCV

SEQ ID NO: 14003 - protein, 9 aa, Artificial Sequence
  Description of Artificial Sequence: Synthetic peptide
WHLFSACCS

SEQ ID NO: 14004 - protein, 9 aa, Artificial Sequence
  Description of Artificial Sequence: Synthetic peptide
WHMLCDGCS

SEQ ID NO: 14005 - protein, 9 aa, Artificial Sequence
  Description of Artificial Sequence: Synthetic peptide
WMRTQCWCP

SEQ ID NO: 14006 - protein, 9 aa, Artificial Sequence
  Description of Artificial Sequence: Synthetic peptide
YGGLSCGCL

SEQ ID NO: 14007 - protein, 9 aa, Artificial Sequence
  Description of Artificial Sequence: Synthetic peptide
YGPSTEPCQ

SEQ ID NO: 14008 - protein, 9 aa, Artificial Sequence
  Description of Artificial Sequence: Synthetic peptide
LSAQRLVCD

SEQ ID NO: 14009 - protein, 9 aa, Artificial Sequence
  Description of Artificial Sequence: Synthetic peptide
WVHPYSYCA

SEQ ID NO: 14010 - protein, 9 aa, Artificial Sequence
  Description of Artificial Sequence: Synthetic peptide
TYHDIIVTA

SEQ ID NO: 14011 - protein, 9 aa, Artificial Sequence
  Description of Artificial Sequence: Synthetic peptide
VPNVQNMKA

SEQ ID NO: 14012 - protein, 9 aa, Artificial Sequence
  Description of Artificial Sequence: Synthetic peptide
VWAWQNGYA

SEQ ID NO: 14013 - protein, 9 aa, Artificial Sequence
  Description of Artificial Sequence: Synthetic peptide
AEAIWLPWA

SEQ ID NO: 14014 - protein, 9 aa, Artificial Sequence
  Description of Artificial Sequence: Synthetic peptide
AECLGYVDA

SEQ ID NO: 14015 - protein, 9 aa, Artificial Sequence
  Description of Artificial Sequence: Synthetic peptide
AHVVHTSGA

SEQ ID NO: 14016 - protein, 9 aa, Artificial Sequence
  Description of Artificial Sequence: Synthetic peptide
ALLFAPARA

SEQ ID NO: 14017 - protein, 9 aa, Artificial Sequence
  Description of Artificial Sequence: Synthetic peptide
AMPNGLDVA

SEQ ID NO: 14018 - protein, 9 aa, Artificial Sequence
  Description of Artificial Sequence: Synthetic peptide
ARLCTWPYA

SEQ ID NO: 14019 - protein, 9 aa, Artificial Sequence
  Description of Artificial Sequence: Synthetic peptide
ATNKNCAHA

SEQ ID NO: 14020 - protein, 9 aa, Artificial Sequence
  Description of Artificial Sequence: Synthetic peptide
CCFQNNTQA

SEQ ID NO: 14021 - protein, 9 aa, Artificial Sequence
  Description of Artificial Sequence: Synthetic peptide
CLNGWKQAA

SEQ ID NO: 14022 - protein, 9 aa, Artificial Sequence
  Description of Artificial Sequence: Synthetic peptide
CSQSYAADA

SEQ ID NO: 14023 - protein, 9 aa, Artificial Sequence
  Description of Artificial Sequence: Synthetic peptide
CTNHNDHDA

SEQ ID NO: 14024 - protein, 9 aa, Artificial Sequence
  Description of Artificial Sequence: Synthetic peptide
DFIMMQDQA

SEQ ID NO: 14025 - protein, 9 aa, Artificial Sequence
  Description of Artificial Sequence: Synthetic peptide
DPLVHTMIA

SEQ ID NO: 14026 - protein, 9 aa, Artificial Sequence
  Description of Artificial Sequence: Synthetic peptide
DRDNVDSQA

SEQ ID NO: 14027 - protein, 9 aa, Artificial Sequence
  Description of Artificial Sequence: Synthetic peptide
DRSEMGAYA

SEQ ID NO: 14028 - protein, 9 aa, Artificial Sequence
  Description of Artificial Sequence: Synthetic peptide
DRSVVDVDA

SEQ ID NO: 14029 - protein, 9 aa, Artificial Sequence
  Description of Artificial Sequence: Synthetic peptide
DTDMIAQFA

SEQ ID NO: 14030 - protein, 9 aa, Artificial Sequence
  Description of Artificial Sequence: Synthetic peptide
DTWKVMMAA

SEQ ID NO: 14031 - protein, 9 aa, Artificial Sequence
  Description of Artificial Sequence: Synthetic peptide
EGQSMMYQA

SEQ ID NO: 14032 - protein, 9 aa, Artificial Sequence
  Description of Artificial Sequence: Synthetic peptide
EIVGQKGWA

SEQ ID NO: 14033 - protein, 9 aa, Artificial Sequence
  Description of Artificial Sequence: Synthetic peptide
EKQLYMYEA

SEQ ID NO: 14034 - protein, 9 aa, Artificial Sequence
  Description of Artificial Sequence: Synthetic peptide
ELTIIMVVA

SEQ ID NO: 14035 - protein, 9 aa, Artificial Sequence
  Description of Artificial Sequence: Synthetic peptide
ERDGWNMAA

SEQ ID NO: 14036 - protein, 9 aa, Artificial Sequence
  Description of Artificial Sequence: Synthetic peptide
ESSLFEHYA

SEQ ID NO: 14037 - protein, 9 aa, Artificial Sequence
  Description of Artificial Sequence: Synthetic peptide
ETQWWDVIA

SEQ ID NO: 14038 - protein, 9 aa, Artificial Sequence
  Description of Artificial Sequence: Synthetic peptide
FVIPSGAGA

SEQ ID NO: 14039 - protein, 9 aa, Artificial Sequence
  Description of Artificial Sequence: Synthetic peptide
GGHNYGMHA

SEQ ID NO: 14040 - protein, 9 aa, Artificial Sequence
  Description of Artificial Sequence: Synthetic peptide
GIAASCHLA

SEQ ID NO: 14041 - protein, 9 aa, Artificial Sequence
  Description of Artificial Sequence: Synthetic peptide
GSCSTLTSA

SEQ ID NO: 14042 - protein, 9 aa, Artificial Sequence
  Description of Artificial Sequence: Synthetic peptide
GSLPYSMYA

SEQ ID NO: 14043 - protein, 9 aa, Artificial Sequence
  Description of Artificial Sequence: Synthetic peptide
GTMIYSHMA

SEQ ID NO: 14044 - protein, 9 aa, Artificial Sequence
  Description of Artificial Sequence: Synthetic peptide
HHGQCGGMA

SEQ ID NO: 14045 - protein, 9 aa, Artificial Sequence
  Description of Artificial Sequence: Synthetic peptide
HTFLCNITA

SEQ ID NO: 14046 - protein, 9 aa, Artificial Sequence
  Description of Artificial Sequence: Synthetic peptide
IISAKQHDA

SEQ ID NO: 14047 - protein, 9 aa, Artificial Sequence
  Description of Artificial Sequence: Synthetic peptide
IKCIPGWYA

SEQ ID NO: 14048 - protein, 9 aa, Artificial Sequence
  Description of Artificial Sequence: Synthetic peptide
ILAQANIHA

SEQ ID NO: 14049 - protein, 9 aa, Artificial Sequence
  Description of Artificial Sequence: Synthetic peptide
ILHSVTVRA

SEQ ID NO: 14050 - protein, 9 aa, Artificial Sequence
  Description of Artificial Sequence: Synthetic peptide
INRQCDMIA

SEQ ID NO: 14051 - protein, 9 aa, Artificial Sequence
  Description of Artificial Sequence: Synthetic peptide
IQKYGAEVA

SEQ ID NO: 14052 - protein, 9 aa, Artificial Sequence
  Description of Artificial Sequence: Synthetic peptide
IQMLVQGSA

SEQ ID NO: 14053 - protein, 9 aa, Artificial Sequence
  Description of Artificial Sequence: Synthetic peptide
IRMHMPRDA

SEQ ID NO: 14054 - protein, 9 aa, Artificial Sequence
  Description of Artificial Sequence: Synthetic peptide
ISKPYQLTA

SEQ ID NO: 14055 - protein, 9 aa, Artificial Sequence
  Description of Artificial Sequence: Synthetic peptide
ITKCDGNTA

SEQ ID NO: 14056 - protein, 9 aa, Artificial Sequence
  Description of Artificial Sequence: Synthetic peptide
IVTASVCQA

SEQ ID NO: 14057 - protein, 9 aa, Artificial Sequence
  Description of Artificial Sequence: Synthetic peptide
LNSLVCSFA

SEQ ID NO: 14058 - protein, 9 aa, Artificial Sequence
  Description of Artificial Sequence: Synthetic peptide
LTKIVTTGA

SEQ ID NO: 14059 - protein, 9 aa, Artificial Sequence
  Description of Artificial Sequence: Synthetic peptide
LWCVSNSFA

SEQ ID NO: 14060 - protein, 9 aa, Artificial Sequence
  Description of Artificial Sequence: Synthetic peptide
MEIGIMKIA

SEQ ID NO: 14061 - protein, 9 aa, Artificial Sequence
  Description of Artificial Sequence: Synthetic peptide
MERIMLSLA

SEQ ID NO: 14062 - protein, 9 aa, Artificial Sequence
  Description of Artificial Sequence: Synthetic peptide
MGWYIVRHA

SEQ ID NO: 14063 - protein, 9 aa, Artificial Sequence
  Description of Artificial Sequence: Synthetic peptide
MHNWGGKIA

SEQ ID NO: 14064 - protein, 9 aa, Artificial Sequence
  Description of Artificial Sequence: Synthetic peptide
MHWLKYNYA

SEQ ID NO: 14065 - protein, 9 aa, Artificial Sequence
  Description of Artificial Sequence: Synthetic peptide
MMAHSGHMA

SEQ ID NO: 14066 - protein, 9 aa, Artificial Sequence
  Description of Artificial Sequence: Synthetic peptide
MMDPCNPPA

SEQ ID NO: 14067 - protein, 9 aa, Artificial Sequence
  Description of Artificial Sequence: Synthetic peptide
MNGMPTSFA

SEQ ID NO: 14068 - protein, 9 aa, Artificial Sequence
  Description of Artificial Sequence: Synthetic peptide
MPDSWVRVA

SEQ ID NO: 14069 - protein, 9 aa, Artificial Sequence
  Description of Artificial Sequence: Synthetic peptide
MRIAQCNGA

SEQ ID NO: 14070 - protein, 9 aa, Artificial Sequence
  Description of Artificial Sequence: Synthetic peptide
MSMQHLEHA

SEQ ID NO: 14071 - protein, 9 aa, Artificial Sequence
  Description of Artificial Sequence: Synthetic peptide
MSTHEDHVA

SEQ ID NO: 14072 - protein, 9 aa, Artificial Sequence
  Description of Artificial Sequence: Synthetic peptide
MVNTGGNTA

SEQ ID NO: 14073 - protein, 9 aa, Artificial Sequence
  Description of Artificial Sequence: Synthetic peptide
MVTCVQSGA

SEQ ID NO: 14074 - protein, 9 aa, Artificial Sequence
  Description of Artificial Sequence: Synthetic peptide
MWMMQGMNA

SEQ ID NO: 14075 - protein, 9 aa, Artificial Sequence
  Description of Artificial Sequence: Synthetic peptide
NCDQMSISA

SEQ ID NO: 14076 - protein, 9 aa, Artificial Sequence
  Description of Artificial Sequence: Synthetic peptide
NCKLESDLA

SEQ ID NO: 14077 - protein, 9 aa, Artificial Sequence
  Description of Artificial Sequence: Synthetic peptide
NDMYVKGTA

SEQ ID NO: 14078 - protein, 9 aa, Artificial Sequence
  Description of Artificial Sequence: Synthetic peptide
NINGIINQA

SEQ ID NO: 14079 - protein, 9 aa, Artificial Sequence
  Description of Artificial Sequence: Synthetic peptide
NRTDRMMDA

SEQ ID NO: 14080 - protein, 9 aa, Artificial Sequence
  Description of Artificial Sequence: Synthetic peptide
NTCQHVNFA

SEQ ID NO: 14081 - protein, 9 aa, Artificial Sequence
  Description of Artificial Sequence: Synthetic peptide
PCSTWLLAA

SEQ ID NO: 14082 - protein, 9 aa, Artificial Sequence
  Description of Artificial Sequence: Synthetic peptide
QKMFGDSYA

SEQ ID NO: 14083 - protein, 9 aa, Artificial Sequence
  Description of Artificial Sequence: Synthetic peptide
QNMSNWLDA

SEQ ID NO: 14084 - protein, 9 aa, Artificial Sequence
  Description of Artificial Sequence: Synthetic peptide
QQVCDIPSA

SEQ ID NO: 14085 - protein, 9 aa, Artificial Sequence
  Description of Artificial Sequence: Synthetic peptide
QSTKEYWQA

SEQ ID NO: 14086 - protein, 9 aa, Artificial Sequence
  Description of Artificial Sequence: Synthetic peptide
QVMCMCAAA

SEQ ID NO: 14087 - protein, 9 aa, Artificial Sequence
  Description of Artificial Sequence: Synthetic peptide
RTNLQQVDA

SEQ ID NO: 14088 - protein, 9 aa, Artificial Sequence
  Description of Artificial Sequence: Synthetic peptide
SCAQERHDA

SEQ ID NO: 14089 - protein, 9 aa, Artificial Sequence
  Description of Artificial Sequence: Synthetic peptide
SILTGGGFA

SEQ ID NO: 14090 - protein, 9 aa, Artificial Sequence
  Description of Artificial Sequence: Synthetic peptide
SLVCHRNFA

SEQ ID NO: 14091 - protein, 9 aa, Artificial Sequence
  Description of Artificial Sequence: Synthetic peptide
SMDVHCNDA

SEQ ID NO: 14092 - protein, 9 aa, Artificial Sequence
  Description of Artificial Sequence: Synthetic peptide
SMKLISEAA

SEQ ID NO: 14093 - protein, 9 aa, Artificial Sequence
  Description of Artificial Sequence: Synthetic peptide
SMNATRWKA

SEQ ID NO: 14094 - protein, 9 aa, Artificial Sequence
  Description of Artificial Sequence: Synthetic peptide
SQACSNHYA

SEQ ID NO: 14095 - protein, 9 aa, Artificial Sequence
  Description of Artificial Sequence: Synthetic peptide
SYMLKSDYA

SEQ ID NO: 14096 - protein, 9 aa, Artificial Sequence
  Description of Artificial Sequence: Synthetic peptide
THVNRARWA

SEQ ID NO: 14097 - protein, 9 aa, Artificial Sequence
  Description of Artificial Sequence: Synthetic peptide
TRCTCERYA

SEQ ID NO: 14098 - protein, 9 aa, Artificial Sequence
  Description of Artificial Sequence: Synthetic peptide
TTDACWQHA

SEQ ID NO: 14099 - protein, 9 aa, Artificial Sequence
  Description of Artificial Sequence: Synthetic peptide
TTHHAQAGA

SEQ ID NO: 14100 - protein, 9 aa, Artificial Sequence
  Description of Artificial Sequence: Synthetic peptide
TTSMGKHYA

SEQ ID NO: 14101 - protein, 9 aa, Artificial Sequence
  Description of Artificial Sequence: Synthetic peptide
TVGLDAHSA

SEQ ID NO: 14102 - protein, 9 aa, Artificial Sequence
  Description of Artificial Sequence: Synthetic peptide
TYWPGCANA

SEQ ID NO: 14103 - protein, 9 aa, Artificial Sequence
  Description of Artificial Sequence: Synthetic peptide
VCTAINDNA

SEQ ID NO: 14104 - protein, 9 aa, Artificial Sequence
  Description of Artificial Sequence: Synthetic peptide
VIDTIAGHA

SEQ ID NO: 14105 - protein, 9 aa, Artificial Sequence
  Description of Artificial Sequence: Synthetic peptide
VLSLFKEPA

SEQ ID NO: 14106 - protein, 9 aa, Artificial Sequence
  Description of Artificial Sequence: Synthetic peptide
VNQQIESDA

SEQ ID NO: 14107 - protein, 9 aa, Artificial Sequence
  Description of Artificial Sequence: Synthetic peptide
VTQLVTRLA

SEQ ID NO: 14108 - protein, 9 aa, Artificial Sequence
  Description of Artificial Sequence: Synthetic peptide
VTTQIKRIA

SEQ ID NO: 14109 - protein, 9 aa, Artificial Sequence
  Description of Artificial Sequence: Synthetic peptide
VWHVPRDQA

SEQ ID NO: 14110 - protein, 9 aa, Artificial Sequence
  Description of Artificial Sequence: Synthetic peptide
VYCGNKTKA

SEQ ID NO: 14111 - protein, 9 aa, Artificial Sequence
  Description of Artificial Sequence: Synthetic peptide
YDAKSSVNA

SEQ ID NO: 14112 - protein, 9 aa, Artificial Sequence
  Description of Artificial Sequence: Synthetic peptide
YGREKQAYA

SEQ ID NO: 14113 - protein, 9 aa, Artificial Sequence
  Description of Artificial Sequence: Synthetic peptide
YVHADPEFA

SEQ ID NO: 14114 - protein, 9 aa, Artificial Sequence
  Description of Artificial Sequence: Synthetic peptide
YVSQKEAIA

SEQ ID NO: 14115 - protein, 9 aa, Artificial Sequence
  Description of Artificial Sequence: Synthetic peptide
YWLEVDSKA

SEQ ID NO: 14116 - protein, 9 aa, Artificial Sequence
  Description of Artificial Sequence: Synthetic peptide
DVQGSGQWA

SEQ ID NO: 14117 - protein, 9 aa, Artificial Sequence
  Description of Artificial Sequence: Synthetic peptide
SVLHVQALA

SEQ ID NO: 14118 - protein, 9 aa, Artificial Sequence
  Description of Artificial Sequence: Synthetic peptide
AADFFAIND

SEQ ID NO: 14119 - protein, 9 aa, Artificial Sequence
  Description of Artificial Sequence: Synthetic peptide
AADIFAISD

SEQ ID NO: 14120 - protein, 9 aa, Artificial Sequence
  Description of Artificial Sequence: Synthetic peptide
AADIFGIND

SEQ ID NO: 14121 - protein, 9 aa, Artificial Sequence
  Description of Artificial Sequence: Synthetic peptide
AADIFVIND

SEQ ID NO: 14122 - protein, 9 aa, Artificial Sequence
  Description of Artificial Sequence: Synthetic peptide
AADIYAIND

SEQ ID NO: 14123 - protein, 9 aa, Artificial Sequence
  Description of Artificial Sequence: Synthetic peptide
AADMFAIND

SEQ ID NO: 14124 - protein, 9 aa, Artificial Sequence
  Description of Artificial Sequence: Synthetic peptide
AAYIFAIND

SEQ ID NO: 14125 - protein, 9 aa, Artificial Sequence
  Description of Artificial Sequence: Synthetic peptide
ACDCHHWDQ

SEQ ID NO: 14126 - protein, 9 aa, Artificial Sequence
  Description of Artificial Sequence: Synthetic peptide
ACIEWNWGE

SEQ ID NO: 14127 - protein, 9 aa, Artificial Sequence
  Description of Artificial Sequence: Synthetic peptide
AGDCCLAER

SEQ ID NO: 14128 - protein, 9 aa, Artificial Sequence
  Description of Artificial Sequence: Synthetic peptide
AHECCLPNR

SEQ ID NO: 14129 - protein, 9 aa, Artificial Sequence
  Description of Artificial Sequence: Synthetic peptide
AIQPRDMYS

SEQ ID NO: 14130 - protein, 9 aa, Artificial Sequence
  Description of Artificial Sequence: Synthetic peptide
AKECTGLKN

SEQ ID NO: 14131 - protein, 9 aa, Artificial Sequence
  Description of Artificial Sequence: Synthetic peptide
AKGMEKLRT

SEQ ID NO: 14132 - protein, 9 aa, Artificial Sequence
  Description of Artificial Sequence: Synthetic peptide
AKNGDVLEM

SEQ ID NO: 14133 - protein, 9 aa, Artificial Sequence
  Description of Artificial Sequence: Synthetic peptide
ALPCDNWRG

SEQ ID NO: 14134 - protein, 9 aa, Artificial Sequence
  Description of Artificial Sequence: Synthetic peptide
APRCESCNM

SEQ ID NO: 14135 - protein, 9 aa, Artificial Sequence
  Description of Artificial Sequence: Synthetic peptide
AQIDCITGL

SEQ ID NO: 14136 - protein, 9 aa, Artificial Sequence
  Description of Artificial Sequence: Synthetic peptide
ASDYCTTER

SEQ ID NO: 14137 - protein, 9 aa, Artificial Sequence
  Description of Artificial Sequence: Synthetic peptide
ATMNLSWAL

SEQ ID NO: 14138 - protein, 9 aa, Artificial Sequence
  Description of Artificial Sequence: Synthetic peptide
AVCDDHKPN

SEQ ID NO: 14139 - protein, 9 aa, Artificial Sequence
  Description of Artificial Sequence: Synthetic peptide
AVDWHCEVL

SEQ ID NO: 14140 - protein, 9 aa, Artificial Sequence
  Description of Artificial Sequence: Synthetic peptide
AVESKDIPQ

SEQ ID NO: 14141 - protein, 9 aa, Artificial Sequence
  Description of Artificial Sequence: Synthetic peptide
AVGDEQPTD

SEQ ID NO: 14142 - protein, 9 aa, Artificial Sequence
  Description of Artificial Sequence: Synthetic peptide
CCECGHWPN

SEQ ID NO: 14143 - protein, 9 aa, Artificial Sequence
  Description of Artificial Sequence: Synthetic peptide
CDDCYLINR

SEQ ID NO: 14144 - protein, 9 aa, Artificial Sequence
  Description of Artificial Sequence: Synthetic peptide
CDICKHEEY

SEQ ID NO: 14145 - protein, 9 aa, Artificial Sequence
  Description of Artificial Sequence: Synthetic peptide
CDNCYAEPH

SEQ ID NO: 14146 - protein, 9 aa, Artificial Sequence
  Description of Artificial Sequence: Synthetic peptide
CDWMASVSV

SEQ ID NO: 14147 - protein, 9 aa, Artificial Sequence
  Description of Artificial Sequence: Synthetic peptide
CDWMPNVSV

SEQ ID NO: 14148 - protein, 9 aa, Artificial Sequence
  Description of Artificial Sequence: Synthetic peptide
CDWMSNVSV

SEQ ID NO: 14149 - protein, 9 aa, Artificial Sequence
  Description of Artificial Sequence: Synthetic peptide
CEYGWILKR

SEQ ID NO: 14150 - protein, 9 aa, Artificial Sequence
  Description of Artificial Sequence: Synthetic peptide
CGDWDFGEW

SEQ ID NO: 14151 - protein, 9 aa, Artificial Sequence
  Description of Artificial Sequence: Synthetic peptide
CKCCRMEKC

SEQ ID NO: 14152 - protein, 9 aa, Artificial Sequence
  Description of Artificial Sequence: Synthetic peptide
CKFRDFAES

SEQ ID NO: 14153 - protein, 9 aa, Artificial Sequence
  Description of Artificial Sequence: Synthetic peptide
CKMLCRPPV

SEQ ID NO: 14154 - protein, 9 aa, Artificial Sequence
  Description of Artificial Sequence: Synthetic peptide
CKPGDFVRK

SEQ ID NO: 14155 - protein, 9 aa, Artificial Sequence
  Description of Artificial Sequence: Synthetic peptide
CLECCTDSA

SEQ ID NO: 14156 - protein, 9 aa, Artificial Sequence
  Description of Artificial Sequence: Synthetic peptide
CPDCGPTGP

SEQ ID NO: 14157 - protein, 9 aa, Artificial Sequence
  Description of Artificial Sequence: Synthetic peptide
CPECSVDPW

SEQ ID NO: 14158 - protein, 9 aa, Artificial Sequence
  Description of Artificial Sequence: Synthetic peptide
CQMLCRSPM

SEQ ID NO: 14159 - protein, 9 aa, Artificial Sequence
  Description of Artificial Sequence: Synthetic peptide
CRDCCLRGW

SEQ ID NO: 14160 - protein, 9 aa, Artificial Sequence
  Description of Artificial Sequence: Synthetic peptide
CRECSNERV

SEQ ID NO: 14161 - protein, 9 aa, Artificial Sequence
  Description of Artificial Sequence: Synthetic peptide
CRECVHNRC

SEQ ID NO: 14162 - protein, 9 aa, Artificial Sequence
  Description of Artificial Sequence: Synthetic peptide
CRICRATIW

SEQ ID NO: 14163 - protein, 9 aa, Artificial Sequence
  Description of Artificial Sequence: Synthetic peptide
CSDPKNMSI

SEQ ID NO: 14164 - protein, 9 aa, Artificial Sequence
  Description of Artificial Sequence: Synthetic peptide
CWECCNDSG

SEQ ID NO: 14165 - protein, 9 aa, Artificial Sequence
  Description of Artificial Sequence: Synthetic peptide
CWECCPDSG

SEQ ID NO: 14166 - protein, 9 aa, Artificial Sequence
  Description of Artificial Sequence: Synthetic peptide
CWECCTDGG

SEQ ID NO: 14167 - protein, 9 aa, Artificial Sequence
  Description of Artificial Sequence: Synthetic peptide
CWECCTDNG

SEQ ID NO: 14168 - protein, 9 aa, Artificial Sequence
  Description of Artificial Sequence: Synthetic peptide
CWECCTDRV

SEQ ID NO: 14169 - protein, 9 aa, Artificial Sequence
  Description of Artificial Sequence: Synthetic peptide
CWECCTDSV

SEQ ID NO: 14170 - protein, 9 aa, Artificial Sequence
  Description of Artificial Sequence: Synthetic peptide
CWECCTDSW

SEQ ID NO: 14171 - protein, 9 aa, Artificial Sequence
  Description of Artificial Sequence: Synthetic peptide
CWECFTDSG

SEQ ID NO: 14172 - protein, 9 aa, Artificial Sequence
  Description of Artificial Sequence: Synthetic peptide
CWECGTDSG

SEQ ID NO: 14173 - protein, 9 aa, Artificial Sequence
  Description of Artificial Sequence: Synthetic peptide
CWECYTDSG

SEQ ID NO: 14174 - protein, 9 aa, Artificial Sequence
  Description of Artificial Sequence: Synthetic peptide
CWEWCTDSG

SEQ ID NO: 14175 - protein, 9 aa, Artificial Sequence
  Description of Artificial Sequence: Synthetic peptide
CWGCCTDSG

SEQ ID NO: 14176 - protein, 9 aa, Artificial Sequence
  Description of Artificial Sequence: Synthetic peptide
CWVCCTDSG

SEQ ID NO: 14177 - protein, 9 aa, Artificial Sequence
  Description of Artificial Sequence: Synthetic peptide
CYWCGWDNR

SEQ ID NO: 14178 - protein, 9 aa, Artificial Sequence
  Description of Artificial Sequence: Synthetic peptide
DAMDQREQY

SEQ ID NO: 14179 - protein, 9 aa, Artificial Sequence
  Description of Artificial Sequence: Synthetic peptide
DAVDIVKDE

SEQ ID NO: 14180 - protein, 9 aa, Artificial Sequence
  Description of Artificial Sequence: Synthetic peptide
DCNQFNWSE

SEQ ID NO: 14181 - protein, 9 aa, Artificial Sequence
  Description of Artificial Sequence: Synthetic peptide
DDDDFAEKG

SEQ ID NO: 14182 - protein, 9 aa, Artificial Sequence
  Description of Artificial Sequence: Synthetic peptide
DDEILKEDG

SEQ ID NO: 14183 - protein, 9 aa, Artificial Sequence
  Description of Artificial Sequence: Synthetic peptide
DDIVGKPKW

SEQ ID NO: 14184 - protein, 9 aa, Artificial Sequence
  Description of Artificial Sequence: Synthetic peptide
DDVEKDETN

SEQ ID NO: 14185 - protein, 9 aa, Artificial Sequence
  Description of Artificial Sequence: Synthetic peptide
DERERKTKD

SEQ ID NO: 14186 - protein, 9 aa, Artificial Sequence
  Description of Artificial Sequence: Synthetic peptide
DFKALDVPC

SEQ ID NO: 14187 - protein, 9 aa, Artificial Sequence
  Description of Artificial Sequence: Synthetic peptide
DFKVLDVQC

SEQ ID NO: 14188 - protein, 9 aa, Artificial Sequence
  Description of Artificial Sequence: Synthetic peptide
DGCDDHKPN

SEQ ID NO: 14189 - protein, 9 aa, Artificial Sequence
  Description of Artificial Sequence: Synthetic peptide
DGKIEPIRF

SEQ ID NO: 14190 - protein, 9 aa, Artificial Sequence
  Description of Artificial Sequence: Synthetic peptide
DGMRCKEKK

SEQ ID NO: 14191 - protein, 9 aa, Artificial Sequence
  Description of Artificial Sequence: Synthetic peptide
DGVGRPGDN

SEQ ID NO: 14192 - protein, 9 aa, Artificial Sequence
  Description of Artificial Sequence: Synthetic peptide
DHRIDNIDA

SEQ ID NO: 14193 - protein, 9 aa, Artificial Sequence
  Description of Artificial Sequence: Synthetic peptide
DIDDLNFAT

SEQ ID NO: 14194 - protein, 9 aa, Artificial Sequence
  Description of Artificial Sequence: Synthetic peptide
DIDFMECAF

SEQ ID NO: 14195 - protein, 9 aa, Artificial Sequence
  Description of Artificial Sequence: Synthetic peptide
DIEEWEMAE

SEQ ID NO: 14196 - protein, 9 aa, Artificial Sequence
  Description of Artificial Sequence: Synthetic peptide
DIEGQNNGM

SEQ ID NO: 14197 - protein, 9 aa, Artificial Sequence
  Description of Artificial Sequence: Synthetic peptide
DIEHIRDPP

SEQ ID NO: 14198 - protein, 9 aa, Artificial Sequence
  Description of Artificial Sequence: Synthetic peptide
DIEMFNENG

SEQ ID NO: 14199 - protein, 9 aa, Artificial Sequence
  Description of Artificial Sequence: Synthetic peptide
DIEMNITAL

SEQ ID NO: 14200 - protein, 9 aa, Artificial Sequence
  Description of Artificial Sequence: Synthetic peptide
DIGDIWMSQ

SEQ ID NO: 14201 - protein, 9 aa, Artificial Sequence
  Description of Artificial Sequence: Synthetic peptide
DIIEYQKVE

SEQ ID NO: 14202 - protein, 9 aa, Artificial Sequence
  Description of Artificial Sequence: Synthetic peptide
DIIPKDAAP

SEQ ID NO: 14203 - protein, 9 aa, Artificial Sequence
  Description of Artificial Sequence: Synthetic peptide
DIKVLDSQP

SEQ ID NO: 14204 - protein, 9 aa, Artificial Sequence
  Description of Artificial Sequence: Synthetic peptide
DILCICETS

SEQ ID NO: 14205 - protein, 9 aa, Artificial Sequence
  Description of Artificial Sequence: Synthetic peptide
DINNNNCGY

SEQ ID NO: 14206 - protein, 9 aa, Artificial Sequence
  Description of Artificial Sequence: Synthetic peptide
DIQPFDYYL

SEQ ID NO: 14207 - protein, 9 aa, Artificial Sequence
  Description of Artificial Sequence: Synthetic peptide
DIQPNDGCS

SEQ ID NO: 14208 - protein, 9 aa, Artificial Sequence
  Description of Artificial Sequence: Synthetic peptide
DIRDEDNIG

SEQ ID NO: 14209 - protein, 9 aa, Artificial Sequence
  Description of Artificial Sequence: Synthetic peptide
DIRDSWTES

SEQ ID NO: 14210 - protein, 9 aa, Artificial Sequence
  Description of Artificial Sequence: Synthetic peptide
DITEEDVTL

SEQ ID NO: 14211 - protein, 9 aa, Artificial Sequence
  Description of Artificial Sequence: Synthetic peptide
DITHHNDGK

SEQ ID NO: 14212 - protein, 9 aa, Artificial Sequence
  Description of Artificial Sequence: Synthetic peptide
DIVDHDHAG

SEQ ID NO: 14213 - protein, 9 aa, Artificial Sequence
  Description of Artificial Sequence: Synthetic peptide
DIVECIQYN

SEQ ID NO: 14214 - protein, 9 aa, Artificial Sequence
  Description of Artificial Sequence: Synthetic peptide
DIYNDSWST

SEQ ID NO: 14215 - protein, 9 aa, Artificial Sequence
  Description of Artificial Sequence: Synthetic peptide
DLCRPNPKN

SEQ ID NO: 14216 - protein, 9 aa, Artificial Sequence
  Description of Artificial Sequence: Synthetic peptide
DLIVATELF

SEQ ID NO: 14217 - protein, 9 aa, Artificial Sequence
  Description of Artificial Sequence: Synthetic peptide
DLIVVTEWF

SEQ ID NO: 14218 - protein, 9 aa, Artificial Sequence
  Description of Artificial Sequence: Synthetic peptide
DLPNSQPPH

SEQ ID NO: 14219 - protein, 9 aa, Artificial Sequence
  Description of Artificial Sequence: Synthetic peptide
DLSEPTEWF

SEQ ID NO: 14220 - protein, 9 aa, Artificial Sequence
  Description of Artificial Sequence: Synthetic peptide
DLTVATEWF

SEQ ID NO: 14221 - protein, 9 aa, Artificial Sequence
  Description of Artificial Sequence: Synthetic peptide
DMDCPEDQQ

SEQ ID NO: 14222 - protein, 9 aa, Artificial Sequence
  Description of Artificial Sequence: Synthetic peptide
DMFQLKPQN

SEQ ID NO: 14223 - protein, 9 aa, Artificial Sequence
  Description of Artificial Sequence: Synthetic peptide
DMVDLDVNP

SEQ ID NO: 14224 - protein, 9 aa, Artificial Sequence
  Description of Artificial Sequence: Synthetic peptide
DNVNMNDAI

SEQ ID NO: 14225 - protein, 9 aa, Artificial Sequence
  Description of Artificial Sequence: Synthetic peptide
DQRCNKAPG

SEQ ID NO: 14226 - protein, 9 aa, Artificial Sequence
  Description of Artificial Sequence: Synthetic peptide
DRCDSIILA

SEQ ID NO: 14227 - protein, 9 aa, Artificial Sequence
  Description of Artificial Sequence: Synthetic peptide
DSDAKNMSI

SEQ ID NO: 14228 - protein, 9 aa, Artificial Sequence
  Description of Artificial Sequence: Synthetic peptide
DSDPKNMSI

SEQ ID NO: 14229 - protein, 9 aa, Artificial Sequence
  Description of Artificial Sequence: Synthetic peptide
DSDSKNMSI

SEQ ID NO: 14230 - protein, 9 aa, Artificial Sequence
  Description of Artificial Sequence: Synthetic peptide
DSDTKNMSI

SEQ ID NO: 14231 - protein, 9 aa, Artificial Sequence
  Description of Artificial Sequence: Synthetic peptide
DSNDQDTPE

SEQ ID NO: 14232 - protein, 9 aa, Artificial Sequence
  Description of Artificial Sequence: Synthetic peptide
DSSEVDMNF

SEQ ID NO: 14233 - protein, 9 aa, Artificial Sequence
  Description of Artificial Sequence: Synthetic peptide
DSYDDSWST

SEQ ID NO: 14234 - protein, 9 aa, Artificial Sequence
  Description of Artificial Sequence: Synthetic peptide
DSYNDGWST

SEQ ID NO: 14235 - protein, 9 aa, Artificial Sequence
  Description of Artificial Sequence: Synthetic peptide
DSYNDSWSP

SEQ ID NO: 14236 - protein, 9 aa, Artificial Sequence
  Description of Artificial Sequence: Synthetic peptide
DTAPKQEAE

SEQ ID NO: 14237 - protein, 9 aa, Artificial Sequence
  Description of Artificial Sequence: Synthetic peptide
DTIQKKMDH

SEQ ID NO: 14238 - protein, 9 aa, Artificial Sequence
  Description of Artificial Sequence: Synthetic peptide
DTIWADINN

SEQ ID NO: 14239 - protein, 9 aa, Artificial Sequence
  Description of Artificial Sequence: Synthetic peptide
DVADWNGYD

SEQ ID NO: 14240 - protein, 9 aa, Artificial Sequence
  Description of Artificial Sequence: Synthetic peptide
DVAERVEQI

SEQ ID NO: 14241 - protein, 9 aa, Artificial Sequence
  Description of Artificial Sequence: Synthetic peptide
DVAGLDKNA

SEQ ID NO: 14242 - protein, 9 aa, Artificial Sequence
  Description of Artificial Sequence: Synthetic peptide
DVAPMDQVE

SEQ ID NO: 14243 - protein, 9 aa, Artificial Sequence
  Description of Artificial Sequence: Synthetic peptide
DVAPMHEVE

SEQ ID NO: 14244 - protein, 9 aa, Artificial Sequence
  Description of Artificial Sequence: Synthetic peptide
DVAPMHQDE

SEQ ID NO: 14245 - protein, 9 aa, Artificial Sequence
  Description of Artificial Sequence: Synthetic peptide
DVAPMHQIE

SEQ ID NO: 14246 - protein, 9 aa, Artificial Sequence
  Description of Artificial Sequence: Synthetic peptide
DVAPMHRVE

SEQ ID NO: 14247 - protein, 9 aa, Artificial Sequence
  Description of Artificial Sequence: Synthetic peptide
DVAPMNQVE

SEQ ID NO: 14248 - protein, 9 aa, Artificial Sequence
  Description of Artificial Sequence: Synthetic peptide
DVCDDHKAN

SEQ ID NO: 14249 - protein, 9 aa, Artificial Sequence
  Description of Artificial Sequence: Synthetic peptide
DVCDDHKPH

SEQ ID NO: 14250 - protein, 9 aa, Artificial Sequence
  Description of Artificial Sequence: Synthetic peptide
DVCDDHKPI

SEQ ID NO: 14251 - protein, 9 aa, Artificial Sequence
  Description of Artificial Sequence: Synthetic peptide
DVCDDHKPS

SEQ ID NO: 14252 - protein, 9 aa, Artificial Sequence
  Description of Artificial Sequence: Synthetic peptide
DVCDDHKPT

SEQ ID NO: 14253 - protein, 9 aa, Artificial Sequence
  Description of Artificial Sequence: Synthetic peptide
DVCDDHKQN

SEQ ID NO: 14254 - protein, 9 aa, Artificial Sequence
  Description of Artificial Sequence: Synthetic peptide
DVCDDHKRN

SEQ ID NO: 14255 - protein, 9 aa, Artificial Sequence
  Description of Artificial Sequence: Synthetic peptide
DVCDDHKSN

SEQ ID NO: 14256 - protein, 9 aa, Artificial Sequence
  Description of Artificial Sequence: Synthetic peptide
DVCDDHKTN

SEQ ID NO: 14257 - protein, 9 aa, Artificial Sequence
  Description of Artificial Sequence: Synthetic peptide
DVCDDHQPN

SEQ ID NO: 14258 - protein, 9 aa, Artificial Sequence
  Description of Artificial Sequence: Synthetic peptide
DVCDDHTPN

SEQ ID NO: 14259 - protein, 9 aa, Artificial Sequence
  Description of Artificial Sequence: Synthetic peptide
DVCDDPKPN

SEQ ID NO: 14260 - protein, 9 aa, Artificial Sequence
  Description of Artificial Sequence: Synthetic peptide
DVCPFPDGK

SEQ ID NO: 14261 - protein, 9 aa, Artificial Sequence
  Description of Artificial Sequence: Synthetic peptide
DVCPVDVQN

SEQ ID NO: 14262 - protein, 9 aa, Artificial Sequence
  Description of Artificial Sequence: Synthetic peptide
DVDDIHVSF

SEQ ID NO: 14263 - protein, 9 aa, Artificial Sequence
  Description of Artificial Sequence: Synthetic peptide
DVDEISDGV

SEQ ID NO: 14264 - protein, 9 aa, Artificial Sequence
  Description of Artificial Sequence: Synthetic peptide
DVDIHEWPP

SEQ ID NO: 14265 - protein, 9 aa, Artificial Sequence
  Description of Artificial Sequence: Synthetic peptide
DVDMIDTCP

SEQ ID NO: 14266 - protein, 9 aa, Artificial Sequence
  Description of Artificial Sequence: Synthetic peptide
DVDPWDVTE

SEQ ID NO: 14267 - protein, 9 aa, Artificial Sequence
  Description of Artificial Sequence: Synthetic peptide
DVDQMHHND

SEQ ID NO: 14268 - protein, 9 aa, Artificial Sequence
  Description of Artificial Sequence: Synthetic peptide
DVDTVEMES

SEQ ID NO: 14269 - protein, 9 aa, Artificial Sequence
  Description of Artificial Sequence: Synthetic peptide
DVEEKDNKA

SEQ ID NO: 14270 - protein, 9 aa, Artificial Sequence
  Description of Artificial Sequence: Synthetic peptide
DVEETEAAY

SEQ ID NO: 14271 - protein, 9 aa, Artificial Sequence
  Description of Artificial Sequence: Synthetic peptide
DVEHCNTNA

SEQ ID NO: 14272 - protein, 9 aa, Artificial Sequence
  Description of Artificial Sequence: Synthetic peptide
DVEHQDWGG

SEQ ID NO: 14273 - protein, 9 aa, Artificial Sequence
  Description of Artificial Sequence: Synthetic peptide
DVEIHKWGG

SEQ ID NO: 14274 - protein, 9 aa, Artificial Sequence
  Description of Artificial Sequence: Synthetic peptide
DVETTDNLK

SEQ ID NO: 14275 - protein, 9 aa, Artificial Sequence
  Description of Artificial Sequence: Synthetic peptide
DVEWDNMKQ

SEQ ID NO: 14276 - protein, 9 aa, Artificial Sequence
  Description of Artificial Sequence: Synthetic peptide
DVGDDHKPN

SEQ ID NO: 14277 - protein, 9 aa, Artificial Sequence
  Description of Artificial Sequence: Synthetic peptide
DVGEDEFQP

SEQ ID NO: 14278 - protein, 9 aa, Artificial Sequence
  Description of Artificial Sequence: Synthetic peptide
DVGEWTMNN

SEQ ID NO: 14279 - protein, 9 aa, Artificial Sequence
  Description of Artificial Sequence: Synthetic peptide
DVGILDFNG

SEQ ID NO: 14280 - protein, 9 aa, Artificial Sequence
  Description of Artificial Sequence: Synthetic peptide
DVGPMDCQP

SEQ ID NO: 14281 - protein, 9 aa, Artificial Sequence
  Description of Artificial Sequence: Synthetic peptide
DVHEYDHPE

SEQ ID NO: 14282 - protein, 9 aa, Artificial Sequence
  Description of Artificial Sequence: Synthetic peptide
DVHFFENSR

SEQ ID NO: 14283 - protein, 9 aa, Artificial Sequence
  Description of Artificial Sequence: Synthetic peptide
DVIPRDGAE

SEQ ID NO: 14284 - protein, 9 aa, Artificial Sequence
  Description of Artificial Sequence: Synthetic peptide
DVKDQSIML

SEQ ID NO: 14285 - protein, 9 aa, Artificial Sequence
  Description of Artificial Sequence: Synthetic peptide
DVKEIDELC

SEQ ID NO: 14286 - protein, 9 aa, Artificial Sequence
  Description of Artificial Sequence: Synthetic peptide
DVMPMPEAQ

SEQ ID NO: 14287 - protein, 9 aa, Artificial Sequence
  Description of Artificial Sequence: Synthetic peptide
DVNEDGFNM

SEQ ID NO: 14288 - protein, 9 aa, Artificial Sequence
  Description of Artificial Sequence: Synthetic peptide
DVNENEWTD

SEQ ID NO: 14289 - protein, 9 aa, Artificial Sequence
  Description of Artificial Sequence: Synthetic peptide
DVRDSMKRD

SEQ ID NO: 14290 - protein, 9 aa, Artificial Sequence
  Description of Artificial Sequence: Synthetic peptide
DVSDFIQHF

SEQ ID NO: 14291 - protein, 9 aa, Artificial Sequence
  Description of Artificial Sequence: Synthetic peptide
DVSEGDDST

SEQ ID NO: 14292 - protein, 9 aa, Artificial Sequence
  Description of Artificial Sequence: Synthetic peptide
DVSQIPITF

SEQ ID NO: 14293 - protein, 9 aa, Artificial Sequence
  Description of Artificial Sequence: Synthetic peptide
DVTEYQWST

SEQ ID NO: 14294 - protein, 9 aa, Artificial Sequence
  Description of Artificial Sequence: Synthetic peptide
DVTPNSWIE

SEQ ID NO: 14295 - protein, 9 aa, Artificial Sequence
  Description of Artificial Sequence: Synthetic peptide
DVTPTSWSE

SEQ ID NO: 14296 - protein, 9 aa, Artificial Sequence
  Description of Artificial Sequence: Synthetic peptide
DVTTLNESQ

SEQ ID NO: 14297 - protein, 9 aa, Artificial Sequence
  Description of Artificial Sequence: Synthetic peptide
DVVDFSIVK

SEQ ID NO: 14298 - protein, 9 aa, Artificial Sequence
  Description of Artificial Sequence: Synthetic peptide
DVVEQRECP

SEQ ID NO: 14299 - protein, 9 aa, Artificial Sequence
  Description of Artificial Sequence: Synthetic peptide
DVYDDHKPN

SEQ ID NO: 14300 - protein, 9 aa, Artificial Sequence
  Description of Artificial Sequence: Synthetic peptide
DVYEKMWAN

SEQ ID NO: 14301 - protein, 9 aa, Artificial Sequence
  Description of Artificial Sequence: Synthetic peptide
DYFDMNLTD

SEQ ID NO: 14302 - protein, 9 aa, Artificial Sequence
  Description of Artificial Sequence: Synthetic peptide
DYGPEDFSM

SEQ ID NO: 14303 - protein, 9 aa, Artificial Sequence
  Description of Artificial Sequence: Synthetic peptide
EAAPRDSDD

SEQ ID NO: 14304 - protein, 9 aa, Artificial Sequence
  Description of Artificial Sequence: Synthetic peptide
EAECKMWPT

SEQ ID NO: 14305 - protein, 9 aa, Artificial Sequence
  Description of Artificial Sequence: Synthetic peptide
EAELGNVNM

SEQ ID NO: 14306 - protein, 9 aa, Artificial Sequence
  Description of Artificial Sequence: Synthetic peptide
EAGCRMWPT

SEQ ID NO: 14307 - protein, 9 aa, Artificial Sequence
  Description of Artificial Sequence: Synthetic peptide
EARIQCKID

SEQ ID NO: 14308 - protein, 9 aa, Artificial Sequence
  Description of Artificial Sequence: Synthetic peptide
EARMDIWPI

SEQ ID NO: 14309 - protein, 9 aa, Artificial Sequence
  Description of Artificial Sequence: Synthetic peptide
EAVNRPNMK

SEQ ID NO: 14310 - protein, 9 aa, Artificial Sequence
  Description of Artificial Sequence: Synthetic peptide
ECGCMYWCY

SEQ ID NO: 14311 - protein, 9 aa, Artificial Sequence
  Description of Artificial Sequence: Synthetic peptide
ECGCMYWGC

SEQ ID NO: 14312 - protein, 9 aa, Artificial Sequence
  Description of Artificial Sequence: Synthetic peptide
ECGCMYWVY

SEQ ID NO: 14313 - protein, 9 aa, Artificial Sequence
  Description of Artificial Sequence: Synthetic peptide
EDDWQRMLY

SEQ ID NO: 14314 - protein, 9 aa, Artificial Sequence
  Description of Artificial Sequence: Synthetic peptide
EDRIQCKID

SEQ ID NO: 14315 - protein, 9 aa, Artificial Sequence
  Description of Artificial Sequence: Synthetic peptide
EDRMDKIFT

SEQ ID NO: 14316 - protein, 9 aa, Artificial Sequence
  Description of Artificial Sequence: Synthetic peptide
EDTGEREAW

SEQ ID NO: 14317 - protein, 9 aa, Artificial Sequence
  Description of Artificial Sequence: Synthetic peptide
EDYAACFEF

SEQ ID NO: 14318 - protein, 9 aa, Artificial Sequence
  Description of Artificial Sequence: Synthetic peptide
EEGMQMISQ

SEQ ID NO: 14319 - protein, 9 aa, Artificial Sequence
  Description of Artificial Sequence: Synthetic peptide
EERCYDGSW

SEQ ID NO: 14320 - protein, 9 aa, Artificial Sequence
  Description of Artificial Sequence: Synthetic peptide
EFHEFRASN

SEQ ID NO: 14321 - protein, 9 aa, Artificial Sequence
  Description of Artificial Sequence: Synthetic peptide
EFRIQCKID

SEQ ID NO: 14322 - protein, 9 aa, Artificial Sequence
  Description of Artificial Sequence: Synthetic peptide
EIAIYNFAN

SEQ ID NO: 14323 - protein, 9 aa, Artificial Sequence
  Description of Artificial Sequence: Synthetic peptide
EIAPNMCPP

SEQ ID NO: 14324 - protein, 9 aa, Artificial Sequence
  Description of Artificial Sequence: Synthetic peptide
EIAPREVVN

SEQ ID NO: 14325 - protein, 9 aa, Artificial Sequence
  Description of Artificial Sequence: Synthetic peptide
EICPVDRTQ

SEQ ID NO: 14326 - protein, 9 aa, Artificial Sequence
  Description of Artificial Sequence: Synthetic peptide
EICSFEEGH

SEQ ID NO: 14327 - protein, 9 aa, Artificial Sequence
  Description of Artificial Sequence: Synthetic peptide
EIDDDMLEE

SEQ ID NO: 14328 - protein, 9 aa, Artificial Sequence
  Description of Artificial Sequence: Synthetic peptide
EIDDTDQRW

SEQ ID NO: 14329 - protein, 9 aa, Artificial Sequence
  Description of Artificial Sequence: Synthetic peptide
EIDDVGEPG

SEQ ID NO: 14330 - protein, 9 aa, Artificial Sequence
  Description of Artificial Sequence: Synthetic peptide
EIDEFSASN

SEQ ID NO: 14331 - protein, 9 aa, Artificial Sequence
  Description of Artificial Sequence: Synthetic peptide
EIDQKDISQ

SEQ ID NO: 14332 - protein, 9 aa, Artificial Sequence
  Description of Artificial Sequence: Synthetic peptide
EIDRGDSYK

SEQ ID NO: 14333 - protein, 9 aa, Artificial Sequence
  Description of Artificial Sequence: Synthetic peptide
EIEALMKER

SEQ ID NO: 14334 - protein, 9 aa, Artificial Sequence
  Description of Artificial Sequence: Synthetic peptide
EIEEDDEWY

SEQ ID NO: 14335 - protein, 9 aa, Artificial Sequence
  Description of Artificial Sequence: Synthetic peptide
EIEEFMKMR

SEQ ID NO: 14336 - protein, 9 aa, Artificial Sequence
  Description of Artificial Sequence: Synthetic peptide
EIEQDNEPG

SEQ ID NO: 14337 - protein, 9 aa, Artificial Sequence
  Description of Artificial Sequence: Synthetic peptide
EIEQSFLDS

SEQ ID NO: 14338 - protein, 9 aa, Artificial Sequence
  Description of Artificial Sequence: Synthetic peptide
EIEVTAWAC

SEQ ID NO: 14339 - protein, 9 aa, Artificial Sequence
  Description of Artificial Sequence: Synthetic peptide
EIEYIDAGG

SEQ ID NO: 14340 - protein, 9 aa, Artificial Sequence
  Description of Artificial Sequence: Synthetic peptide
EIGCVDSAK

SEQ ID NO: 14341 - protein, 9 aa, Artificial Sequence
  Description of Artificial Sequence: Synthetic peptide
EIGMQIAQE

SEQ ID NO: 14342 - protein, 9 aa, Artificial Sequence
  Description of Artificial Sequence: Synthetic peptide
EIGTFDNSE

SEQ ID NO: 14343 - protein, 9 aa, Artificial Sequence
  Description of Artificial Sequence: Synthetic peptide
EIHDQQIVF

SEQ ID NO: 14344 - protein, 9 aa, Artificial Sequence
  Description of Artificial Sequence: Synthetic peptide
EIHDVDFGM

SEQ ID NO: 14345 - protein, 9 aa, Artificial Sequence
  Description of Artificial Sequence: Synthetic peptide
EIHEFFHNR

SEQ ID NO: 14346 - protein, 9 aa, Artificial Sequence
  Description of Artificial Sequence: Synthetic peptide
EIHEFGASN

SEQ ID NO: 14347 - protein, 9 aa, Artificial Sequence
  Description of Artificial Sequence: Synthetic peptide
EIHEFPASN

SEQ ID NO: 14348 - protein, 9 aa, Artificial Sequence
  Description of Artificial Sequence: Synthetic peptide
EIHEFRAAN

SEQ ID NO: 14349 - protein, 9 aa, Artificial Sequence
  Description of Artificial Sequence: Synthetic peptide
EIHEFRAPN

SEQ ID NO: 14350 - protein, 9 aa, Artificial Sequence
  Description of Artificial Sequence: Synthetic peptide
EIHEFRASI

SEQ ID NO: 14351 - protein, 9 aa, Artificial Sequence
  Description of Artificial Sequence: Synthetic peptide
EIHEFRAST

SEQ ID NO: 14352 - protein, 9 aa, Artificial Sequence
  Description of Artificial Sequence: Synthetic peptide
EIHEFRAYN

SEQ ID NO: 14353 - protein, 9 aa, Artificial Sequence
  Description of Artificial Sequence: Synthetic peptide
EIHEFRDSN

SEQ ID NO: 14354 - protein, 9 aa, Artificial Sequence
  Description of Artificial Sequence: Synthetic peptide
EIHEFRGSN

SEQ ID NO: 14355 - protein, 9 aa, Artificial Sequence
  Description of Artificial Sequence: Synthetic peptide
EIHEFRSSN

SEQ ID NO: 14356 - protein, 9 aa, Artificial Sequence
  Description of Artificial Sequence: Synthetic peptide
EIHEFSASN

SEQ ID NO: 14357 - protein, 9 aa, Artificial Sequence
  Description of Artificial Sequence: Synthetic peptide
EIHEISTHD

SEQ ID NO: 14358 - protein, 9 aa, Artificial Sequence
  Description of Artificial Sequence: Synthetic peptide
EIHGMDTCP

SEQ ID NO: 14359 - protein, 9 aa, Artificial Sequence
  Description of Artificial Sequence: Synthetic peptide
EIHMFEQSE

SEQ ID NO: 14360 - protein, 9 aa, Artificial Sequence
  Description of Artificial Sequence: Synthetic peptide
EIHPWHRTN

SEQ ID NO: 14361 - protein, 9 aa, Artificial Sequence
  Description of Artificial Sequence: Synthetic peptide
EIIDTSCNC

SEQ ID NO: 14362 - protein, 9 aa, Artificial Sequence
  Description of Artificial Sequence: Synthetic peptide
EIISMNDFM

SEQ ID NO: 14363 - protein, 9 aa, Artificial Sequence
  Description of Artificial Sequence: Synthetic peptide
EILDYCSYN

SEQ ID NO: 14364 - protein, 9 aa, Artificial Sequence
  Description of Artificial Sequence: Synthetic peptide
EILVRCEVD

SEQ ID NO: 14365 - protein, 9 aa, Artificial Sequence
  Description of Artificial Sequence: Synthetic peptide
EIMPDSIMC

SEQ ID NO: 14366 - protein, 9 aa, Artificial Sequence
  Description of Artificial Sequence: Synthetic peptide
EIMPNHNMI

SEQ ID NO: 14367 - protein, 9 aa, Artificial Sequence
  Description of Artificial Sequence: Synthetic peptide
EINDQRPWP

SEQ ID NO: 14368 - protein, 9 aa, Artificial Sequence
  Description of Artificial Sequence: Synthetic peptide
EINEFRASN

SEQ ID NO: 14369 - protein, 9 aa, Artificial Sequence
  Description of Artificial Sequence: Synthetic peptide
EINPKSEDE

SEQ ID NO: 14370 - protein, 9 aa, Artificial Sequence
  Description of Artificial Sequence: Synthetic peptide
EIPEFRASN

SEQ ID NO: 14371 - protein, 9 aa, Artificial Sequence
  Description of Artificial Sequence: Synthetic peptide
EIQDIVKID

SEQ ID NO: 14372 - protein, 9 aa, Artificial Sequence
  Description of Artificial Sequence: Synthetic peptide
EIQPLNAVN

SEQ ID NO: 14373 - protein, 9 aa, Artificial Sequence
  Description of Artificial Sequence: Synthetic peptide
EIRCHHKFA

SEQ ID NO: 14374 - protein, 9 aa, Artificial Sequence
  Description of Artificial Sequence: Synthetic peptide
EIRDMAHHG

SEQ ID NO: 14375 - protein, 9 aa, Artificial Sequence
  Description of Artificial Sequence: Synthetic peptide
EIRDTHEMQ

SEQ ID NO: 14376 - protein, 9 aa, Artificial Sequence
  Description of Artificial Sequence: Synthetic peptide
EIREFRASN

SEQ ID NO: 14377 - protein, 9 aa, Artificial Sequence
  Description of Artificial Sequence: Synthetic peptide
EIREQCIGP

SEQ ID NO: 14378 - protein, 9 aa, Artificial Sequence
  Description of Artificial Sequence: Synthetic peptide
EIRFEGNME

SEQ ID NO: 14379 - protein, 9 aa, Artificial Sequence
  Description of Artificial Sequence: Synthetic peptide
EIRIQCKID

SEQ ID NO: 14380 - protein, 9 aa, Artificial Sequence
  Description of Artificial Sequence: Synthetic peptide
EIRPWDCKW

SEQ ID NO: 14381 - protein, 9 aa, Artificial Sequence
  Description of Artificial Sequence: Synthetic peptide
EIRTIDWQW

SEQ ID NO: 14382 - protein, 9 aa, Artificial Sequence
  Description of Artificial Sequence: Synthetic peptide
EISDIHDLR

SEQ ID NO: 14383 - protein, 9 aa, Artificial Sequence
  Description of Artificial Sequence: Synthetic peptide
EISEYCQPS

SEQ ID NO: 14384 - protein, 9 aa, Artificial Sequence
  Description of Artificial Sequence: Synthetic peptide
EISPYNDVE

SEQ ID NO: 14385 - protein, 9 aa, Artificial Sequence
  Description of Artificial Sequence: Synthetic peptide
EISQIPPGW

SEQ ID NO: 14386 - protein, 9 aa, Artificial Sequence
  Description of Artificial Sequence: Synthetic peptide
EITCLCVHS

SEQ ID NO: 14387 - protein, 9 aa, Artificial Sequence
  Description of Artificial Sequence: Synthetic peptide
EITDFQYEN

SEQ ID NO: 14388 - protein, 9 aa, Artificial Sequence
  Description of Artificial Sequence: Synthetic peptide
EITDKDVCT

SEQ ID NO: 14389 - protein, 9 aa, Artificial Sequence
  Description of Artificial Sequence: Synthetic peptide
EITEFWGNY

SEQ ID NO: 14390 - protein, 9 aa, Artificial Sequence
  Description of Artificial Sequence: Synthetic peptide
EITEITMSK

SEQ ID NO: 14391 - protein, 9 aa, Artificial Sequence
  Description of Artificial Sequence: Synthetic peptide
EITPKDSHT

SEQ ID NO: 14392 - protein, 9 aa, Artificial Sequence
  Description of Artificial Sequence: Synthetic peptide
EIVDFDNYF

SEQ ID NO: 14393 - protein, 9 aa, Artificial Sequence
  Description of Artificial Sequence: Synthetic peptide
EIVEQCGNR

SEQ ID NO: 14394 - protein, 9 aa, Artificial Sequence
  Description of Artificial Sequence: Synthetic peptide
EIVHQDDVN

SEQ ID NO: 14395 - protein, 9 aa, Artificial Sequence
  Description of Artificial Sequence: Synthetic peptide
EIYEFQMWD

SEQ ID NO: 14396 - protein, 9 aa, Artificial Sequence
  Description of Artificial Sequence: Synthetic peptide
EIYEFRASN

SEQ ID NO: 14397 - protein, 9 aa, Artificial Sequence
  Description of Artificial Sequence: Synthetic peptide
EKQMDGINH

SEQ ID NO: 14398 - protein, 9 aa, Artificial Sequence
  Description of Artificial Sequence: Synthetic peptide
EKYFKMFDN

SEQ ID NO: 14399 - protein, 9 aa, Artificial Sequence
  Description of Artificial Sequence: Synthetic peptide
ELRCTKLQN

SEQ ID NO: 14400 - protein, 9 aa, Artificial Sequence
  Description of Artificial Sequence: Synthetic peptide
ELRIQCKID

SEQ ID NO: 14401 - protein, 9 aa, Artificial Sequence
  Description of Artificial Sequence: Synthetic peptide
ELSDSMDSN

SEQ ID NO: 14402 - protein, 9 aa, Artificial Sequence
  Description of Artificial Sequence: Synthetic peptide
EMHECPMAW

SEQ ID NO: 14403 - protein, 9 aa, Artificial Sequence
  Description of Artificial Sequence: Synthetic peptide
EMKCIDVED

SEQ ID NO: 14404 - protein, 9 aa, Artificial Sequence
  Description of Artificial Sequence: Synthetic peptide
EMRTYNKDY

SEQ ID NO: 14405 - protein, 9 aa, Artificial Sequence
  Description of Artificial Sequence: Synthetic peptide
ENYPWEQLE

SEQ ID NO: 14406 - protein, 9 aa, Artificial Sequence
  Description of Artificial Sequence: Synthetic peptide
EPRCENYME

SEQ ID NO: 14407 - protein, 9 aa, Artificial Sequence
  Description of Artificial Sequence: Synthetic peptide
EQCRGEPDE

SEQ ID NO: 14408 - protein, 9 aa, Artificial Sequence
  Description of Artificial Sequence: Synthetic peptide
EQKDNMMMN

SEQ ID NO: 14409 - protein, 9 aa, Artificial Sequence
  Description of Artificial Sequence: Synthetic peptide
ERRCAWFNA

SEQ ID NO: 14410 - protein, 9 aa, Artificial Sequence
  Description of Artificial Sequence: Synthetic peptide
ESDEREEAD

SEQ ID NO: 14411 - protein, 9 aa, Artificial Sequence
  Description of Artificial Sequence: Synthetic peptide
ESDPINEAN

SEQ ID NO: 14412 - protein, 9 aa, Artificial Sequence
  Description of Artificial Sequence: Synthetic peptide
ESGCKMWPT

SEQ ID NO: 14413 - protein, 9 aa, Artificial Sequence
  Description of Artificial Sequence: Synthetic peptide
ESHEIRDHN

SEQ ID NO: 14414 - protein, 9 aa, Artificial Sequence
  Description of Artificial Sequence: Synthetic peptide
ESQEAEWGW

SEQ ID NO: 14415 - protein, 9 aa, Artificial Sequence
  Description of Artificial Sequence: Synthetic peptide
ESRCGDKGC

SEQ ID NO: 14416 - protein, 9 aa, Artificial Sequence
  Description of Artificial Sequence: Synthetic peptide
ESRCVDNTV

SEQ ID NO: 14417 - protein, 9 aa, Artificial Sequence
  Description of Artificial Sequence: Synthetic peptide
ESTDFDELN

SEQ ID NO: 14418 - protein, 9 aa, Artificial Sequence
  Description of Artificial Sequence: Synthetic peptide
ESTELRTGN

SEQ ID NO: 14419 - protein, 9 aa, Artificial Sequence
  Description of Artificial Sequence: Synthetic peptide
ESTNIPMAF

SEQ ID NO: 14420 - protein, 9 aa, Artificial Sequence
  Description of Artificial Sequence: Synthetic peptide
ESVPKHEYM

SEQ ID NO: 14421 - protein, 9 aa, Artificial Sequence
  Description of Artificial Sequence: Synthetic peptide
ETAGKSIHH

SEQ ID NO: 14422 - protein, 9 aa, Artificial Sequence
  Description of Artificial Sequence: Synthetic peptide
ETEDYRTSN

SEQ ID NO: 14423 - protein, 9 aa, Artificial Sequence
  Description of Artificial Sequence: Synthetic peptide
ETEEIQKGH

SEQ ID NO: 14424 - protein, 9 aa, Artificial Sequence
  Description of Artificial Sequence: Synthetic peptide
ETHEFRASN

SEQ ID NO: 14425 - protein, 9 aa, Artificial Sequence
  Description of Artificial Sequence: Synthetic peptide
ETMDKLWAN

SEQ ID NO: 14426 - protein, 9 aa, Artificial Sequence
  Description of Artificial Sequence: Synthetic peptide
ETMNQSWGL

SEQ ID NO: 14427 - protein, 9 aa, Artificial Sequence
  Description of Artificial Sequence: Synthetic peptide
ETNEEEDGN

SEQ ID NO: 14428 - protein, 9 aa, Artificial Sequence
  Description of Artificial Sequence: Synthetic peptide
ETQMFEIGE

SEQ ID NO: 14429 - protein, 9 aa, Artificial Sequence
  Description of Artificial Sequence: Synthetic peptide
EVACFDDKN

SEQ ID NO: 14430 - protein, 9 aa, Artificial Sequence
  Description of Artificial Sequence: Synthetic peptide
EVACLGVIN

SEQ ID NO: 14431 - protein, 9 aa, Artificial Sequence
  Description of Artificial Sequence: Synthetic peptide
EVAETDNFF

SEQ ID NO: 14432 - protein, 9 aa, Artificial Sequence
  Description of Artificial Sequence: Synthetic peptide
EVAHENFRM

SEQ ID NO: 14433 - protein, 9 aa, Artificial Sequence
  Description of Artificial Sequence: Synthetic peptide
EVAHLDATK

SEQ ID NO: 14434 - protein, 9 aa, Artificial Sequence
  Description of Artificial Sequence: Synthetic peptide
EVAPECKFE

SEQ ID NO: 14435 - protein, 9 aa, Artificial Sequence
  Description of Artificial Sequence: Synthetic peptide
EVCDLIHDN

SEQ ID NO: 14436 - protein, 9 aa, Artificial Sequence
  Description of Artificial Sequence: Synthetic peptide
EVCEEEFDP

SEQ ID NO: 14437 - protein, 9 aa, Artificial Sequence
  Description of Artificial Sequence: Synthetic peptide
EVDDKYHED

SEQ ID NO: 14438 - protein, 9 aa, Artificial Sequence
  Description of Artificial Sequence: Synthetic peptide
EVDEGHNNE

SEQ ID NO: 14439 - protein, 9 aa, Artificial Sequence
  Description of Artificial Sequence: Synthetic peptide
EVDGRNRGQ

SEQ ID NO: 14440 - protein, 9 aa, Artificial Sequence
  Description of Artificial Sequence: Synthetic peptide
EVDPLEIAL

SEQ ID NO: 14441 - protein, 9 aa, Artificial Sequence
  Description of Artificial Sequence: Synthetic peptide
EVECRHETC

SEQ ID NO: 14442 - protein, 9 aa, Artificial Sequence
  Description of Artificial Sequence: Synthetic peptide
EVEELWNPF

SEQ ID NO: 14443 - protein, 9 aa, Artificial Sequence
  Description of Artificial Sequence: Synthetic peptide
EVEEMNWGK

SEQ ID NO: 14444 - protein, 9 aa, Artificial Sequence
  Description of Artificial Sequence: Synthetic peptide
EVEEQIELI

SEQ ID NO: 14445 - protein, 9 aa, Artificial Sequence
  Description of Artificial Sequence: Synthetic peptide
EVESLPCSL

SEQ ID NO: 14446 - protein, 9 aa, Artificial Sequence
  Description of Artificial Sequence: Synthetic peptide
EVEWSCRFE

SEQ ID NO: 14447 - protein, 9 aa, Artificial Sequence
  Description of Artificial Sequence: Synthetic peptide
EVGGMGEVK

SEQ ID NO: 14448 - protein, 9 aa, Artificial Sequence
  Description of Artificial Sequence: Synthetic peptide
EVGIQCKID

SEQ ID NO: 14449 - protein, 9 aa, Artificial Sequence
  Description of Artificial Sequence: Synthetic peptide
EVGIQCKVD

SEQ ID NO: 14450 - protein, 9 aa, Artificial Sequence
  Description of Artificial Sequence: Synthetic peptide
EVGPLNEWG

SEQ ID NO: 14451 - protein, 9 aa, Artificial Sequence
  Description of Artificial Sequence: Synthetic peptide
EVGTHDCLD

SEQ ID NO: 14452 - protein, 9 aa, Artificial Sequence
  Description of Artificial Sequence: Synthetic peptide
EVHDFHYIP

SEQ ID NO: 14453 - protein, 9 aa, Artificial Sequence
  Description of Artificial Sequence: Synthetic peptide
EVHDKNTQF

SEQ ID NO: 14454 - protein, 9 aa, Artificial Sequence
  Description of Artificial Sequence: Synthetic peptide
EVHEARPYF

SEQ ID NO: 14455 - protein, 9 aa, Artificial Sequence
  Description of Artificial Sequence: Synthetic peptide
EVHEFRASN

SEQ ID NO: 14456 - protein, 9 aa, Artificial Sequence
  Description of Artificial Sequence: Synthetic peptide
EVHELENIN

SEQ ID NO: 14457 - protein, 9 aa, Artificial Sequence
  Description of Artificial Sequence: Synthetic peptide
EVHMIPEMQ

SEQ ID NO: 14458 - protein, 9 aa, Artificial Sequence
  Description of Artificial Sequence: Synthetic peptide
EVHTEDYGK

SEQ ID NO: 14459 - protein, 9 aa, Artificial Sequence
  Description of Artificial Sequence: Synthetic peptide
EVHVSEIMK

SEQ ID NO: 14460 - protein, 9 aa, Artificial Sequence
  Description of Artificial Sequence: Synthetic peptide
EVIEWCNYE

SEQ ID NO: 14461 - protein, 9 aa, Artificial Sequence
  Description of Artificial Sequence: Synthetic peptide
EVIMQCMMK

SEQ ID NO: 14462 - protein, 9 aa, Artificial Sequence
  Description of Artificial Sequence: Synthetic peptide
EVIPTCHFG

SEQ ID NO: 14463 - protein, 9 aa, Artificial Sequence
  Description of Artificial Sequence: Synthetic peptide
EVKPKDEAH

SEQ ID NO: 14464 - protein, 9 aa, Artificial Sequence
  Description of Artificial Sequence: Synthetic peptide
EVKQWNEVM

SEQ ID NO: 14465 - protein, 9 aa, Artificial Sequence
  Description of Artificial Sequence: Synthetic peptide
EVLIQCKID

SEQ ID NO: 14466 - protein, 9 aa, Artificial Sequence
  Description of Artificial Sequence: Synthetic peptide
EVMHWNIEW

SEQ ID NO: 14467 - protein, 9 aa, Artificial Sequence
  Description of Artificial Sequence: Synthetic peptide
EVMMFSCYE

SEQ ID NO: 14468 - protein, 9 aa, Artificial Sequence
  Description of Artificial Sequence: Synthetic peptide
EVMSLESFE

SEQ ID NO: 14469 - protein, 9 aa, Artificial Sequence
  Description of Artificial Sequence: Synthetic peptide
EVMYRCLMP

SEQ ID NO: 14470 - protein, 9 aa, Artificial Sequence
  Description of Artificial Sequence: Synthetic peptide
EVPEIEHDK

SEQ ID NO: 14471 - protein, 9 aa, Artificial Sequence
  Description of Artificial Sequence: Synthetic peptide
EVPIQCKID

SEQ ID NO: 14472 - protein, 9 aa, Artificial Sequence
  Description of Artificial Sequence: Synthetic peptide
EVPTRDCCD

SEQ ID NO: 14473 - protein, 9 aa, Artificial Sequence
  Description of Artificial Sequence: Synthetic peptide
EVQCDQIHP

SEQ ID NO: 14474 - protein, 9 aa, Artificial Sequence
  Description of Artificial Sequence: Synthetic peptide
EVQDDSKAN

SEQ ID NO: 14475 - protein, 9 aa, Artificial Sequence
  Description of Artificial Sequence: Synthetic peptide
EVQDDYESN

SEQ ID NO: 14476 - protein, 9 aa, Artificial Sequence
  Description of Artificial Sequence: Synthetic peptide
EVQDLDMMD

SEQ ID NO: 14477 - protein, 9 aa, Artificial Sequence
  Description of Artificial Sequence: Synthetic peptide
EVQDTDCSP

SEQ ID NO: 14478 - protein, 9 aa, Artificial Sequence
  Description of Artificial Sequence: Synthetic peptide
EVQEDCMFE

SEQ ID NO: 14479 - protein, 9 aa, Artificial Sequence
  Description of Artificial Sequence: Synthetic peptide
EVQIQCKID

SEQ ID NO: 14480 - protein, 9 aa, Artificial Sequence
  Description of Artificial Sequence: Synthetic peptide
EVRCFHELE

SEQ ID NO: 14481 - protein, 9 aa, Artificial Sequence
  Description of Artificial Sequence: Synthetic peptide
EVREKEPND

SEQ ID NO: 14482 - protein, 9 aa, Artificial Sequence
  Description of Artificial Sequence: Synthetic peptide
EVRESDFRE

SEQ ID NO: 14483 - protein, 9 aa, Artificial Sequence
  Description of Artificial Sequence: Synthetic peptide
EVRFEMRYE

SEQ ID NO: 14484 - protein, 9 aa, Artificial Sequence
  Description of Artificial Sequence: Synthetic peptide
EVRIECKID

SEQ ID NO: 14485 - protein, 9 aa, Artificial Sequence
  Description of Artificial Sequence: Synthetic peptide
EVRIHCKLD

SEQ ID NO: 14486 - protein, 9 aa, Artificial Sequence
  Description of Artificial Sequence: Synthetic peptide
EVRIPCKID

SEQ ID NO: 14487 - protein, 9 aa, Artificial Sequence
  Description of Artificial Sequence: Synthetic peptide
EVRIQCEID

SEQ ID NO: 14488 - protein, 9 aa, Artificial Sequence
  Description of Artificial Sequence: Synthetic peptide
EVRIQCKFD

SEQ ID NO: 14489 - protein, 9 aa, Artificial Sequence
  Description of Artificial Sequence: Synthetic peptide
EVRIQCKFG

SEQ ID NO: 14490 - protein, 9 aa, Artificial Sequence
  Description of Artificial Sequence: Synthetic peptide
EVRIQCKIN

SEQ ID NO: 14491 - protein, 9 aa, Artificial Sequence
  Description of Artificial Sequence: Synthetic peptide
EVRIQCKIV

SEQ ID NO: 14492 - protein, 9 aa, Artificial Sequence
  Description of Artificial Sequence: Synthetic peptide
EVRIQCKIY

SEQ ID NO: 14493 - protein, 9 aa, Artificial Sequence
  Description of Artificial Sequence: Synthetic peptide
EVRIQCKLD

SEQ ID NO: 14494 - protein, 9 aa, Artificial Sequence
  Description of Artificial Sequence: Synthetic peptide
EVRIQCKLV

SEQ ID NO: 14495 - protein, 9 aa, Artificial Sequence
  Description of Artificial Sequence: Synthetic peptide
EVRIQCKMD

SEQ ID NO: 14496 - protein, 9 aa, Artificial Sequence
  Description of Artificial Sequence: Synthetic peptide
EVRIQCQID

SEQ ID NO: 14497 - protein, 9 aa, Artificial Sequence
  Description of Artificial Sequence: Synthetic peptide
EVRIQCTID

SEQ ID NO: 14498 - protein, 9 aa, Artificial Sequence
  Description of Artificial Sequence: Synthetic peptide
EVRIQFKID

SEQ ID NO: 14499 - protein, 9 aa, Artificial Sequence
  Description of Artificial Sequence: Synthetic peptide
EVRIQWKID

SEQ ID NO: 14500 - protein, 9 aa, Artificial Sequence
  Description of Artificial Sequence: Synthetic peptide
EVRIRCKID

SEQ ID NO: 14501 - protein, 9 aa, Artificial Sequence
  Description of Artificial Sequence: Synthetic peptide
EVRIRCKMD

SEQ ID NO: 14502 - protein, 9 aa, Artificial Sequence
  Description of Artificial Sequence: Synthetic peptide
EVRIYCKID

SEQ ID NO: 14503 - protein, 9 aa, Artificial Sequence
  Description of Artificial Sequence: Synthetic peptide
EVRMQCKID

SEQ ID NO: 14504 - protein, 9 aa, Artificial Sequence
  Description of Artificial Sequence: Synthetic peptide
EVRNKCKID

SEQ ID NO: 14505 - protein, 9 aa, Artificial Sequence
  Description of Artificial Sequence: Synthetic peptide
EVRNQCKID

SEQ ID NO: 14506 - protein, 9 aa, Artificial Sequence
  Description of Artificial Sequence: Synthetic peptide
EVRSECKID

SEQ ID NO: 14507 - protein, 9 aa, Artificial Sequence
  Description of Artificial Sequence: Synthetic peptide
EVRSKCKID

SEQ ID NO: 14508 - protein, 9 aa, Artificial Sequence
  Description of Artificial Sequence: Synthetic peptide
EVRSQCKID

SEQ ID NO: 14509 - protein, 9 aa, Artificial Sequence
  Description of Artificial Sequence: Synthetic peptide
EVRTKCKID

SEQ ID NO: 14510 - protein, 9 aa, Artificial Sequence
  Description of Artificial Sequence: Synthetic peptide
EVRTKNEAW

SEQ ID NO: 14511 - protein, 9 aa, Artificial Sequence
  Description of Artificial Sequence: Synthetic peptide
EVRTQCKID

SEQ ID NO: 14512 - protein, 9 aa, Artificial Sequence
  Description of Artificial Sequence: Synthetic peptide
EVRTQIIMD

SEQ ID NO: 14513 - protein, 9 aa, Artificial Sequence
  Description of Artificial Sequence: Synthetic peptide
EVRVQCKID

SEQ ID NO: 14514 - protein, 9 aa, Artificial Sequence
  Description of Artificial Sequence: Synthetic peptide
EVRYNPFHW

SEQ ID NO: 14515 - protein, 9 aa, Artificial Sequence
  Description of Artificial Sequence: Synthetic peptide
EVSELDGAW

SEQ ID NO: 14516 - protein, 9 aa, Artificial Sequence
  Description of Artificial Sequence: Synthetic peptide
EVSEVKENG

SEQ ID NO: 14517 - protein, 9 aa, Artificial Sequence
  Description of Artificial Sequence: Synthetic peptide
EVSGTDELI

SEQ ID NO: 14518 - protein, 9 aa, Artificial Sequence
  Description of Artificial Sequence: Synthetic peptide
EVSLWEIGC

SEQ ID NO: 14519 - protein, 9 aa, Artificial Sequence
  Description of Artificial Sequence: Synthetic peptide
EVTDPNMLD

SEQ ID NO: 14520 - protein, 9 aa, Artificial Sequence
  Description of Artificial Sequence: Synthetic peptide
EVTDYSGMF

SEQ ID NO: 14521 - protein, 9 aa, Artificial Sequence
  Description of Artificial Sequence: Synthetic peptide
EVTEGCPMG

SEQ ID NO: 14522 - protein, 9 aa, Artificial Sequence
  Description of Artificial Sequence: Synthetic peptide
EVTPMQDID

SEQ ID NO: 14523 - protein, 9 aa, Artificial Sequence
  Description of Artificial Sequence: Synthetic peptide
EVTQIWLFP

SEQ ID NO: 14524 - protein, 9 aa, Artificial Sequence
  Description of Artificial Sequence: Synthetic peptide
EVVDCNWLM

SEQ ID NO: 14525 - protein, 9 aa, Artificial Sequence
  Description of Artificial Sequence: Synthetic peptide
EVVEFHWQQ

SEQ ID NO: 14526 - protein, 9 aa, Artificial Sequence
  Description of Artificial Sequence: Synthetic peptide
EVVVRNMPT

SEQ ID NO: 14527 - protein, 9 aa, Artificial Sequence
  Description of Artificial Sequence: Synthetic peptide
EVWIQCKID

SEQ ID NO: 14528 - protein, 9 aa, Artificial Sequence
  Description of Artificial Sequence: Synthetic peptide
EVYDHDTYI

SEQ ID NO: 14529 - protein, 9 aa, Artificial Sequence
  Description of Artificial Sequence: Synthetic peptide
EVYHICGAN

SEQ ID NO: 14530 - protein, 9 aa, Artificial Sequence
  Description of Artificial Sequence: Synthetic peptide
EWIWCYDRG

SEQ ID NO: 14531 - protein, 9 aa, Artificial Sequence
  Description of Artificial Sequence: Synthetic peptide
EWTMFIEAH

SEQ ID NO: 14532 - protein, 9 aa, Artificial Sequence
  Description of Artificial Sequence: Synthetic peptide
FCDCGHWPN

SEQ ID NO: 14533 - protein, 9 aa, Artificial Sequence
  Description of Artificial Sequence: Synthetic peptide
FCECGHWPN

SEQ ID NO: 14534 - protein, 9 aa, Artificial Sequence
  Description of Artificial Sequence: Synthetic peptide
FDCHTFGYR

SEQ ID NO: 14535 - protein, 9 aa, Artificial Sequence
  Description of Artificial Sequence: Synthetic peptide
FDECFPEYW

SEQ ID NO: 14536 - protein, 9 aa, Artificial Sequence
  Description of Artificial Sequence: Synthetic peptide
FDKMFREIL

SEQ ID NO: 14537 - protein, 9 aa, Artificial Sequence
  Description of Artificial Sequence: Synthetic peptide
FDRCRNANW

SEQ ID NO: 14538 - protein, 9 aa, Artificial Sequence
  Description of Artificial Sequence: Synthetic peptide
FDRPGRNIL

SEQ ID NO: 14539 - protein, 9 aa, Artificial Sequence
  Description of Artificial Sequence: Synthetic peptide
FEDCGWDKT

SEQ ID NO: 14540 - protein, 9 aa, Artificial Sequence
  Description of Artificial Sequence: Synthetic peptide
FEIGGKTRT

SEQ ID NO: 14541 - protein, 9 aa, Artificial Sequence
  Description of Artificial Sequence: Synthetic peptide
FENCRDAGR

SEQ ID NO: 14542 - protein, 9 aa, Artificial Sequence
  Description of Artificial Sequence: Synthetic peptide
FERCEGDNH

SEQ ID NO: 14543 - protein, 9 aa, Artificial Sequence
  Description of Artificial Sequence: Synthetic peptide
FHCICAMGH

SEQ ID NO: 14544 - protein, 9 aa, Artificial Sequence
  Description of Artificial Sequence: Synthetic peptide
FHSLCAMGH

SEQ ID NO: 14545 - protein, 9 aa, Artificial Sequence
  Description of Artificial Sequence: Synthetic peptide
FKFEPWEYW

SEQ ID NO: 14546 - protein, 9 aa, Artificial Sequence
  Description of Artificial Sequence: Synthetic peptide
FKHSLRQWT

SEQ ID NO: 14547 - protein, 9 aa, Artificial Sequence
  Description of Artificial Sequence: Synthetic peptide
FKHSQREWT

SEQ ID NO: 14548 - protein, 9 aa, Artificial Sequence
  Description of Artificial Sequence: Synthetic peptide
FKHSRREWT

SEQ ID NO: 14549 - protein, 9 aa, Artificial Sequence
  Description of Artificial Sequence: Synthetic peptide
FKKEDAGQF

SEQ ID NO: 14550 - protein, 9 aa, Artificial Sequence
  Description of Artificial Sequence: Synthetic peptide
FKQDDRSEV

SEQ ID NO: 14551 - protein, 9 aa, Artificial Sequence
  Description of Artificial Sequence: Synthetic peptide
FKVLPWWYH

SEQ ID NO: 14552 - protein, 9 aa, Artificial Sequence
  Description of Artificial Sequence: Synthetic peptide
FLRCKKWHI

SEQ ID NO: 14553 - protein, 9 aa, Artificial Sequence
  Description of Artificial Sequence: Synthetic peptide
FMRPCDMGM

SEQ ID NO: 14554 - protein, 9 aa, Artificial Sequence
  Description of Artificial Sequence: Synthetic peptide
FNRCGRPKN

SEQ ID NO: 14555 - protein, 9 aa, Artificial Sequence
  Description of Artificial Sequence: Synthetic peptide
FNVDCGTWF

SEQ ID NO: 14556 - protein, 9 aa, Artificial Sequence
  Description of Artificial Sequence: Synthetic peptide
FPAFRGGSF

SEQ ID NO: 14557 - protein, 9 aa, Artificial Sequence
  Description of Artificial Sequence: Synthetic peptide
FPIDFVPFR

SEQ ID NO: 14558 - protein, 9 aa, Artificial Sequence
  Description of Artificial Sequence: Synthetic peptide
FPKASECNW

SEQ ID NO: 14559 - protein, 9 aa, Artificial Sequence
  Description of Artificial Sequence: Synthetic peptide
FPKECECNW

SEQ ID NO: 14560 - protein, 9 aa, Artificial Sequence
  Description of Artificial Sequence: Synthetic peptide
FPKGSECTW

SEQ ID NO: 14561 - protein, 9 aa, Artificial Sequence
  Description of Artificial Sequence: Synthetic peptide
FPKHDWPTS

SEQ ID NO: 14562 - protein, 9 aa, Artificial Sequence
  Description of Artificial Sequence: Synthetic peptide
FPPFCWSGM

SEQ ID NO: 14563 - protein, 9 aa, Artificial Sequence
  Description of Artificial Sequence: Synthetic peptide
FPPWPLDLV

SEQ ID NO: 14564 - protein, 9 aa, Artificial Sequence
  Description of Artificial Sequence: Synthetic peptide
FPRFGDDRM

SEQ ID NO: 14565 - protein, 9 aa, Artificial Sequence
  Description of Artificial Sequence: Synthetic peptide
FPRGSECNW

SEQ ID NO: 14566 - protein, 9 aa, Artificial Sequence
  Description of Artificial Sequence: Synthetic peptide
FPSCHQCNI

SEQ ID NO: 14567 - protein, 9 aa, Artificial Sequence
  Description of Artificial Sequence: Synthetic peptide
FQPWPKYWC

SEQ ID NO: 14568 - protein, 9 aa, Artificial Sequence
  Description of Artificial Sequence: Synthetic peptide
FQWRSEMKN

SEQ ID NO: 14569 - protein, 9 aa, Artificial Sequence
  Description of Artificial Sequence: Synthetic peptide
FRHSLREWT

SEQ ID NO: 14570 - protein, 9 aa, Artificial Sequence
  Description of Artificial Sequence: Synthetic peptide
FRMENRNAN

SEQ ID NO: 14571 - protein, 9 aa, Artificial Sequence
  Description of Artificial Sequence: Synthetic peptide
FRQSPWPVV

SEQ ID NO: 14572 - protein, 9 aa, Artificial Sequence
  Description of Artificial Sequence: Synthetic peptide
FRVTPKPEA

SEQ ID NO: 14573 - protein, 9 aa, Artificial Sequence
  Description of Artificial Sequence: Synthetic peptide
FSDPKNMSI

SEQ ID NO: 14574 - protein, 9 aa, Artificial Sequence
  Description of Artificial Sequence: Synthetic peptide
FWECCTDSG

SEQ ID NO: 14575 - protein, 9 aa, Artificial Sequence
  Description of Artificial Sequence: Synthetic peptide
FWGCNWDPK

SEQ ID NO: 14576 - protein, 9 aa, Artificial Sequence
  Description of Artificial Sequence: Synthetic peptide
FWQCPWQED

SEQ ID NO: 14577 - protein, 9 aa, Artificial Sequence
  Description of Artificial Sequence: Synthetic peptide
GGDWDFGEW

SEQ ID NO: 14578 - protein, 9 aa, Artificial Sequence
  Description of Artificial Sequence: Synthetic peptide
GKSADLLKQ

SEQ ID NO: 14579 - protein, 9 aa, Artificial Sequence
  Description of Artificial Sequence: Synthetic peptide
GPDCECQRG

SEQ ID NO: 14580 - protein, 9 aa, Artificial Sequence
  Description of Artificial Sequence: Synthetic peptide
GQPTPWLDH

SEQ ID NO: 14581 - protein, 9 aa, Artificial Sequence
  Description of Artificial Sequence: Synthetic peptide
GRDCKYINW

SEQ ID NO: 14582 - protein, 9 aa, Artificial Sequence
  Description of Artificial Sequence: Synthetic peptide
GRGCQIEKY

SEQ ID NO: 14583 - protein, 9 aa, Artificial Sequence
  Description of Artificial Sequence: Synthetic peptide
GRPCCGYNY

SEQ ID NO: 14584 - protein, 9 aa, Artificial Sequence
  Description of Artificial Sequence: Synthetic peptide
GRPCEPILQ

SEQ ID NO: 14585 - protein, 9 aa, Artificial Sequence
  Description of Artificial Sequence: Synthetic peptide
GRYCECVEH

SEQ ID NO: 14586 - protein, 9 aa, Artificial Sequence
  Description of Artificial Sequence: Synthetic peptide
GSDEFMAYG

SEQ ID NO: 14587 - protein, 9 aa, Artificial Sequence
  Description of Artificial Sequence: Synthetic peptide
GTMNLSWGL

SEQ ID NO: 14588 - protein, 9 aa, Artificial Sequence
  Description of Artificial Sequence: Synthetic peptide
GVCDDHKPN

SEQ ID NO: 14589 - protein, 9 aa, Artificial Sequence
  Description of Artificial Sequence: Synthetic peptide
GWECCTDSG

SEQ ID NO: 14590 - protein, 9 aa, Artificial Sequence
  Description of Artificial Sequence: Synthetic peptide
HARCVDNTV

SEQ ID NO: 14591 - protein, 9 aa, Artificial Sequence
  Description of Artificial Sequence: Synthetic peptide
HCECGHWPN

SEQ ID NO: 14592 - protein, 9 aa, Artificial Sequence
  Description of Artificial Sequence: Synthetic peptide
HDCKLKPIM

SEQ ID NO: 14593 - protein, 9 aa, Artificial Sequence
  Description of Artificial Sequence: Synthetic peptide
HDRCFASYC

SEQ ID NO: 14594 - protein, 9 aa, Artificial Sequence
  Description of Artificial Sequence: Synthetic peptide
HDRCFDSTA

SEQ ID NO: 14595 - protein, 9 aa, Artificial Sequence
  Description of Artificial Sequence: Synthetic peptide
HGVGRSGDN

SEQ ID NO: 14596 - protein, 9 aa, Artificial Sequence
  Description of Artificial Sequence: Synthetic peptide
HHFHVSLDI

SEQ ID NO: 14597 - protein, 9 aa, Artificial Sequence
  Description of Artificial Sequence: Synthetic peptide
HHFQVNLDI

SEQ ID NO: 14598 - protein, 9 aa, Artificial Sequence
  Description of Artificial Sequence: Synthetic peptide
HHFYVNLDI

SEQ ID NO: 14599 - protein, 9 aa, Artificial Sequence
  Description of Artificial Sequence: Synthetic peptide
HHYHVNLDI

SEQ ID NO: 14600 - protein, 9 aa, Artificial Sequence
  Description of Artificial Sequence: Synthetic peptide
HKGMEKNPV

SEQ ID NO: 14601 - protein, 9 aa, Artificial Sequence
  Description of Artificial Sequence: Synthetic peptide
HKYIDWIDG

SEQ ID NO: 14602 - protein, 9 aa, Artificial Sequence
  Description of Artificial Sequence: Synthetic peptide
HPFHVNLDI

SEQ ID NO: 14603 - protein, 9 aa, Artificial Sequence
  Description of Artificial Sequence: Synthetic peptide
HPKCSEQYR

SEQ ID NO: 14604 - protein, 9 aa, Artificial Sequence
  Description of Artificial Sequence: Synthetic peptide
HPRCATDHA

SEQ ID NO: 14605 - protein, 9 aa, Artificial Sequence
  Description of Artificial Sequence: Synthetic peptide
HQRCPDRAD

SEQ ID NO: 14606 - protein, 9 aa, Artificial Sequence
  Description of Artificial Sequence: Synthetic peptide
HRQCNLLDI

SEQ ID NO: 14607 - protein, 9 aa, Artificial Sequence
  Description of Artificial Sequence: Synthetic peptide
HRSCDRMIM

SEQ ID NO: 14608 - protein, 9 aa, Artificial Sequence
  Description of Artificial Sequence: Synthetic peptide
HSDPKNMSI

SEQ ID NO: 14609 - protein, 9 aa, Artificial Sequence
  Description of Artificial Sequence: Synthetic peptide
HTPDRTEFE

SEQ ID NO: 14610 - protein, 9 aa, Artificial Sequence
  Description of Artificial Sequence: Synthetic peptide
HTRCVDHDT

SEQ ID NO: 14611 - protein, 9 aa, Artificial Sequence
  Description of Artificial Sequence: Synthetic peptide
HVDDLNDWA

SEQ ID NO: 14612 - protein, 9 aa, Artificial Sequence
  Description of Artificial Sequence: Synthetic peptide
HVKCLDYQI

SEQ ID NO: 14613 - protein, 9 aa, Artificial Sequence
  Description of Artificial Sequence: Synthetic peptide
IDICGIEHR

SEQ ID NO: 14614 - protein, 9 aa, Artificial Sequence
  Description of Artificial Sequence: Synthetic peptide
IDRMGMILN

SEQ ID NO: 14615 - protein, 9 aa, Artificial Sequence
  Description of Artificial Sequence: Synthetic peptide
IDYISFVDR

SEQ ID NO: 14616 - protein, 9 aa, Artificial Sequence
  Description of Artificial Sequence: Synthetic peptide
IGIGRSGDN

SEQ ID NO: 14617 - protein, 9 aa, Artificial Sequence
  Description of Artificial Sequence: Synthetic peptide
IIAQRDQLN

SEQ ID NO: 14618 - protein, 9 aa, Artificial Sequence
  Description of Artificial Sequence: Synthetic peptide
IIGDFSQLG

SEQ ID NO: 14619 - protein, 9 aa, Artificial Sequence
  Description of Artificial Sequence: Synthetic peptide
IIKEMDIHW

SEQ ID NO: 14620 - protein, 9 aa, Artificial Sequence
  Description of Artificial Sequence: Synthetic peptide
IIPDREDIS

SEQ ID NO: 14621 - protein, 9 aa, Artificial Sequence
  Description of Artificial Sequence: Synthetic peptide
IITQRDQVN

SEQ ID NO: 14622 - protein, 9 aa, Artificial Sequence
  Description of Artificial Sequence: Synthetic peptide
IMDCDTNKY

SEQ ID NO: 14623 - protein, 9 aa, Artificial Sequence
  Description of Artificial Sequence: Synthetic peptide
INDISFVDR

SEQ ID NO: 14624 - protein, 9 aa, Artificial Sequence
  Description of Artificial Sequence: Synthetic peptide
INFISFVDR

SEQ ID NO: 14625 - protein, 9 aa, Artificial Sequence
  Description of Artificial Sequence: Synthetic peptide
INYISFDDR

SEQ ID NO: 14626 - protein, 9 aa, Artificial Sequence
  Description of Artificial Sequence: Synthetic peptide
INYISFIDR

SEQ ID NO: 14627 - protein, 9 aa, Artificial Sequence
  Description of Artificial Sequence: Synthetic peptide
INYISFVAR

SEQ ID NO: 14628 - protein, 9 aa, Artificial Sequence
  Description of Artificial Sequence: Synthetic peptide
INYISFVDP

SEQ ID NO: 14629 - protein, 9 aa, Artificial Sequence
  Description of Artificial Sequence: Synthetic peptide
INYISFVDS

SEQ ID NO: 14630 - protein, 9 aa, Artificial Sequence
  Description of Artificial Sequence: Synthetic peptide
INYISFVNR

SEQ ID NO: 14631 - protein, 9 aa, Artificial Sequence
  Description of Artificial Sequence: Synthetic peptide
INYSSFVDR

SEQ ID NO: 14632 - protein, 9 aa, Artificial Sequence
  Description of Artificial Sequence: Synthetic peptide
ISYISFVDR

SEQ ID NO: 14633 - protein, 9 aa, Artificial Sequence
  Description of Artificial Sequence: Synthetic peptide
ITYISFVDR

SEQ ID NO: 14634 - protein, 9 aa, Artificial Sequence
  Description of Artificial Sequence: Synthetic peptide
IVDQWNMGI

SEQ ID NO: 14635 - protein, 9 aa, Artificial Sequence
  Description of Artificial Sequence: Synthetic peptide
IWDCMVEKF

SEQ ID NO: 14636 - protein, 9 aa, Artificial Sequence
  Description of Artificial Sequence: Synthetic peptide
KDDCGTQER

SEQ ID NO: 14637 - protein, 9 aa, Artificial Sequence
  Description of Artificial Sequence: Synthetic peptide
KDDFDPDQG

SEQ ID NO: 14638 - protein, 9 aa, Artificial Sequence
  Description of Artificial Sequence: Synthetic peptide
KDEIEDFKS

SEQ ID NO: 14639 - protein, 9 aa, Artificial Sequence
  Description of Artificial Sequence: Synthetic peptide
KDKFEWLTH

SEQ ID NO: 14640 - protein, 9 aa, Artificial Sequence
  Description of Artificial Sequence: Synthetic peptide
KDWRGWEER

SEQ ID NO: 14641 - protein, 9 aa, Artificial Sequence
  Description of Artificial Sequence: Synthetic peptide
KDWWEDDKQ

SEQ ID NO: 14642 - protein, 9 aa, Artificial Sequence
  Description of Artificial Sequence: Synthetic peptide
KDWYAWEEW

SEQ ID NO: 14643 - protein, 9 aa, Artificial Sequence
  Description of Artificial Sequence: Synthetic peptide
KEGCETDKS

SEQ ID NO: 14644 - protein, 9 aa, Artificial Sequence
  Description of Artificial Sequence: Synthetic peptide
KEMCQWDAQ

SEQ ID NO: 14645 - protein, 9 aa, Artificial Sequence
  Description of Artificial Sequence: Synthetic peptide
KRDCPWHNL

SEQ ID NO: 14646 - protein, 9 aa, Artificial Sequence
  Description of Artificial Sequence: Synthetic peptide
KSRCADNTV

SEQ ID NO: 14647 - protein, 9 aa, Artificial Sequence
  Description of Artificial Sequence: Synthetic peptide
KVIEFDMDI

SEQ ID NO: 14648 - protein, 9 aa, Artificial Sequence
  Description of Artificial Sequence: Synthetic peptide
LAECMEEMC

SEQ ID NO: 14649 - protein, 9 aa, Artificial Sequence
  Description of Artificial Sequence: Synthetic peptide
LCDYSWWRY

SEQ ID NO: 14650 - protein, 9 aa, Artificial Sequence
  Description of Artificial Sequence: Synthetic peptide
LCPCRLWDW

SEQ ID NO: 14651 - protein, 9 aa, Artificial Sequence
  Description of Artificial Sequence: Synthetic peptide
LCTDKMDGD

SEQ ID NO: 14652 - protein, 9 aa, Artificial Sequence
  Description of Artificial Sequence: Synthetic peptide
LDECCYDTR

SEQ ID NO: 14653 - protein, 9 aa, Artificial Sequence
  Description of Artificial Sequence: Synthetic peptide
LDEYARPQQ

SEQ ID NO: 14654 - protein, 9 aa, Artificial Sequence
  Description of Artificial Sequence: Synthetic peptide
LDRCLVIVQ

SEQ ID NO: 14655 - protein, 9 aa, Artificial Sequence
  Description of Artificial Sequence: Synthetic peptide
LDWAEHFNC

SEQ ID NO: 14656 - protein, 9 aa, Artificial Sequence
  Description of Artificial Sequence: Synthetic peptide
LEFGGKTRT

SEQ ID NO: 14657 - protein, 9 aa, Artificial Sequence
  Description of Artificial Sequence: Synthetic peptide
LEIGAKTRT

SEQ ID NO: 14658 - protein, 9 aa, Artificial Sequence
  Description of Artificial Sequence: Synthetic peptide
LEIGGKTKT

SEQ ID NO: 14659 - protein, 9 aa, Artificial Sequence
  Description of Artificial Sequence: Synthetic peptide
LERCLGLNQ

SEQ ID NO: 14660 - protein, 9 aa, Artificial Sequence
  Description of Artificial Sequence: Synthetic peptide
LESAGKTRT

SEQ ID NO: 14661 - protein, 9 aa, Artificial Sequence
  Description of Artificial Sequence: Synthetic peptide
LHECRKEIH

SEQ ID NO: 14662 - protein, 9 aa, Artificial Sequence
  Description of Artificial Sequence: Synthetic peptide
LKDCHGDGR

SEQ ID NO: 14663 - protein, 9 aa, Artificial Sequence
  Description of Artificial Sequence: Synthetic peptide
LKGCPCDTM

SEQ ID NO: 14664 - protein, 9 aa, Artificial Sequence
  Description of Artificial Sequence: Synthetic peptide
LNCQCWPER

SEQ ID NO: 14665 - protein, 9 aa, Artificial Sequence
  Description of Artificial Sequence: Synthetic peptide
LNGCDSRMR

SEQ ID NO: 14666 - protein, 9 aa, Artificial Sequence
  Description of Artificial Sequence: Synthetic peptide
LTDGWDPER

SEQ ID NO: 14667 - protein, 9 aa, Artificial Sequence
  Description of Artificial Sequence: Synthetic peptide
LWQECDEAW

SEQ ID NO: 14668 - protein, 9 aa, Artificial Sequence
  Description of Artificial Sequence: Synthetic peptide
MDKEIETWP

SEQ ID NO: 14669 - protein, 9 aa, Artificial Sequence
  Description of Artificial Sequence: Synthetic peptide
MDPQDEMKF

SEQ ID NO: 14670 - protein, 9 aa, Artificial Sequence
  Description of Artificial Sequence: Synthetic peptide
MDRCPPERT

SEQ ID NO: 14671 - protein, 9 aa, Artificial Sequence
  Description of Artificial Sequence: Synthetic peptide
MDSCYDRVR

SEQ ID NO: 14672 - protein, 9 aa, Artificial Sequence
  Description of Artificial Sequence: Synthetic peptide
MDWFKGERS

SEQ ID NO: 14673 - protein, 9 aa, Artificial Sequence
  Description of Artificial Sequence: Synthetic peptide
MEGSCKQER

SEQ ID NO: 14674 - protein, 9 aa, Artificial Sequence
  Description of Artificial Sequence: Synthetic peptide
MEILGTMKQ

SEQ ID NO: 14675 - protein, 9 aa, Artificial Sequence
  Description of Artificial Sequence: Synthetic peptide
MEQQPGPKR

SEQ ID NO: 14676 - protein, 9 aa, Artificial Sequence
  Description of Artificial Sequence: Synthetic peptide
MGDCQTLSY

SEQ ID NO: 14677 - protein, 9 aa, Artificial Sequence
  Description of Artificial Sequence: Synthetic peptide
MHPRPRPEV

SEQ ID NO: 14678 - protein, 9 aa, Artificial Sequence
  Description of Artificial Sequence: Synthetic peptide
MIDFREDVQ

SEQ ID NO: 14679 - protein, 9 aa, Artificial Sequence
  Description of Artificial Sequence: Synthetic peptide
MIEPYEMHY

SEQ ID NO: 14680 - protein, 9 aa, Artificial Sequence
  Description of Artificial Sequence: Synthetic peptide
MINDMKMFF

SEQ ID NO: 14681 - protein, 9 aa, Artificial Sequence
  Description of Artificial Sequence: Synthetic peptide
MKWINIIDW

SEQ ID NO: 14682 - protein, 9 aa, Artificial Sequence
  Description of Artificial Sequence: Synthetic peptide
MMFENHQRN

SEQ ID NO: 14683 - protein, 9 aa, Artificial Sequence
  Description of Artificial Sequence: Synthetic peptide
MNRQRDHIR

SEQ ID NO: 14684 - protein, 9 aa, Artificial Sequence
  Description of Artificial Sequence: Synthetic peptide
MPKFEDVDH

SEQ ID NO: 14685 - protein, 9 aa, Artificial Sequence
  Description of Artificial Sequence: Synthetic peptide
MQIECTWSH

SEQ ID NO: 14686 - protein, 9 aa, Artificial Sequence
  Description of Artificial Sequence: Synthetic peptide
MQLDCTWHN

SEQ ID NO: 14687 - protein, 9 aa, Artificial Sequence
  Description of Artificial Sequence: Synthetic peptide
MRGCMDKTR

SEQ ID NO: 14688 - protein, 9 aa, Artificial Sequence
  Description of Artificial Sequence: Synthetic peptide
MSDEWMCNN

SEQ ID NO: 14689 - protein, 9 aa, Artificial Sequence
  Description of Artificial Sequence: Synthetic peptide
MTRCVDADY

SEQ ID NO: 14690 - protein, 9 aa, Artificial Sequence
  Description of Artificial Sequence: Synthetic peptide
MVEEQEEND

SEQ ID NO: 14691 - protein, 9 aa, Artificial Sequence
  Description of Artificial Sequence: Synthetic peptide
MVEICCSNK

SEQ ID NO: 14692 - protein, 9 aa, Artificial Sequence
  Description of Artificial Sequence: Synthetic peptide
MVMIWDHDQ

SEQ ID NO: 14693 - protein, 9 aa, Artificial Sequence
  Description of Artificial Sequence: Synthetic peptide
MVNPIDWQC

SEQ ID NO: 14694 - protein, 9 aa, Artificial Sequence
  Description of Artificial Sequence: Synthetic peptide
MVRCVEGDD

SEQ ID NO: 14695 - protein, 9 aa, Artificial Sequence
  Description of Artificial Sequence: Synthetic peptide
MYECGNIGE

SEQ ID NO: 14696 - protein, 9 aa, Artificial Sequence
  Description of Artificial Sequence: Synthetic peptide
NCECGHWPN

SEQ ID NO: 14697 - protein, 9 aa, Artificial Sequence
  Description of Artificial Sequence: Synthetic peptide
NERWDHDQL

SEQ ID NO: 14698 - protein, 9 aa, Artificial Sequence
  Description of Artificial Sequence: Synthetic peptide
NESIDDIEQ

SEQ ID NO: 14699 - protein, 9 aa, Artificial Sequence
  Description of Artificial Sequence: Synthetic peptide
NHWNQELDF

SEQ ID NO: 14700 - protein, 9 aa, Artificial Sequence
  Description of Artificial Sequence: Synthetic peptide
NIALRDSMN

SEQ ID NO: 14701 - protein, 9 aa, Artificial Sequence
  Description of Artificial Sequence: Synthetic peptide
NIDAWDNHN

SEQ ID NO: 14702 - protein, 9 aa, Artificial Sequence
  Description of Artificial Sequence: Synthetic peptide
NIVDDQYGN

SEQ ID NO: 14703 - protein, 9 aa, Artificial Sequence
  Description of Artificial Sequence: Synthetic peptide
NKPFDAFKW

SEQ ID NO: 14704 - protein, 9 aa, Artificial Sequence
  Description of Artificial Sequence: Synthetic peptide
NKWHPMIVI

SEQ ID NO: 14705 - protein, 9 aa, Artificial Sequence
  Description of Artificial Sequence: Synthetic peptide
NLDCRPVNG

SEQ ID NO: 14706 - protein, 9 aa, Artificial Sequence
  Description of Artificial Sequence: Synthetic peptide
NMFPLKPQN

SEQ ID NO: 14707 - protein, 9 aa, Artificial Sequence
  Description of Artificial Sequence: Synthetic peptide
NMFQLKPQH

SEQ ID NO: 14708 - protein, 9 aa, Artificial Sequence
  Description of Artificial Sequence: Synthetic peptide
NMFQLKPQT

SEQ ID NO: 14709 - protein, 9 aa, Artificial Sequence
  Description of Artificial Sequence: Synthetic peptide
NMIQLKPQN

SEQ ID NO: 14710 - protein, 9 aa, Artificial Sequence
  Description of Artificial Sequence: Synthetic peptide
NNMLIRPNF

SEQ ID NO: 14711 - protein, 9 aa, Artificial Sequence
  Description of Artificial Sequence: Synthetic peptide
NSDPKNMPI

SEQ ID NO: 14712 - protein, 9 aa, Artificial Sequence
  Description of Artificial Sequence: Synthetic peptide
NSDPKNMSI

SEQ ID NO: 14713 - protein, 9 aa, Artificial Sequence
  Description of Artificial Sequence: Synthetic peptide
NVNEWEECE

SEQ ID NO: 14714 - protein, 9 aa, Artificial Sequence
  Description of Artificial Sequence: Synthetic peptide
NVREYDRYE

SEQ ID NO: 14715 - protein, 9 aa, Artificial Sequence
  Description of Artificial Sequence: Synthetic peptide
NVVEQHEYN

SEQ ID NO: 14716 - protein, 9 aa, Artificial Sequence
  Description of Artificial Sequence: Synthetic peptide
NWEFNARND

SEQ ID NO: 14717 - protein, 9 aa, Artificial Sequence
  Description of Artificial Sequence: Synthetic peptide
PAEGGNVSD

SEQ ID NO: 14718 - protein, 9 aa, Artificial Sequence
  Description of Artificial Sequence: Synthetic peptide
PAFCQRPEQ

SEQ ID NO: 14719 - protein, 9 aa, Artificial Sequence
  Description of Artificial Sequence: Synthetic peptide
PCAMHNWGF

SEQ ID NO: 14720 - protein, 9 aa, Artificial Sequence
  Description of Artificial Sequence: Synthetic peptide
PCDMHNWGC

SEQ ID NO: 14721 - protein, 9 aa, Artificial Sequence
  Description of Artificial Sequence: Synthetic peptide
PCGMHNWGC

SEQ ID NO: 14722 - protein, 9 aa, Artificial Sequence
  Description of Artificial Sequence: Synthetic peptide
PCGPIEYDE

SEQ ID NO: 14723 - protein, 9 aa, Artificial Sequence
  Description of Artificial Sequence: Synthetic peptide
PCPCDHGGK

SEQ ID NO: 14724 - protein, 9 aa, Artificial Sequence
  Description of Artificial Sequence: Synthetic peptide
PCSQPIHEP

SEQ ID NO: 14725 - protein, 9 aa, Artificial Sequence
  Description of Artificial Sequence: Synthetic peptide
PCTMPYVEN

SEQ ID NO: 14726 - protein, 9 aa, Artificial Sequence
  Description of Artificial Sequence: Synthetic peptide
PCTMTYVED

SEQ ID NO: 14727 - protein, 9 aa, Artificial Sequence
  Description of Artificial Sequence: Synthetic peptide
PDCLRPVMK

SEQ ID NO: 14728 - protein, 9 aa, Artificial Sequence
  Description of Artificial Sequence: Synthetic peptide
PDHCDPMPE

SEQ ID NO: 14729 - protein, 9 aa, Artificial Sequence
  Description of Artificial Sequence: Synthetic peptide
PDHCVKNER

SEQ ID NO: 14730 - protein, 9 aa, Artificial Sequence
  Description of Artificial Sequence: Synthetic peptide
PDICVWHDN

SEQ ID NO: 14731 - protein, 9 aa, Artificial Sequence
  Description of Artificial Sequence: Synthetic peptide
PDIDMDMDY

SEQ ID NO: 14732 - protein, 9 aa, Artificial Sequence
  Description of Artificial Sequence: Synthetic peptide
PDLRPRDAC

SEQ ID NO: 14733 - protein, 9 aa, Artificial Sequence
  Description of Artificial Sequence: Synthetic peptide
PDRFPQIKS

SEQ ID NO: 14734 - protein, 9 aa, Artificial Sequence
  Description of Artificial Sequence: Synthetic peptide
PDTEKEMRF

SEQ ID NO: 14735 - protein, 9 aa, Artificial Sequence
  Description of Artificial Sequence: Synthetic peptide
PDTYVRERY

SEQ ID NO: 14736 - protein, 9 aa, Artificial Sequence
  Description of Artificial Sequence: Synthetic peptide
PEAGDQFKT

SEQ ID NO: 14737 - protein, 9 aa, Artificial Sequence
  Description of Artificial Sequence: Synthetic peptide
PEEMKYPLK

SEQ ID NO: 14738 - protein, 9 aa, Artificial Sequence
  Description of Artificial Sequence: Synthetic peptide
PEVFTDIRP

SEQ ID NO: 14739 - protein, 9 aa, Artificial Sequence
  Description of Artificial Sequence: Synthetic peptide
PEWGTSCNW

SEQ ID NO: 14740 - protein, 9 aa, Artificial Sequence
  Description of Artificial Sequence: Synthetic peptide
PFACDGYEM

SEQ ID NO: 14741 - protein, 9 aa, Artificial Sequence
  Description of Artificial Sequence: Synthetic peptide
PGGCRGIRY

SEQ ID NO: 14742 - protein, 9 aa, Artificial Sequence
  Description of Artificial Sequence: Synthetic peptide
PGICGEPGK

SEQ ID NO: 14743 - protein, 9 aa, Artificial Sequence
  Description of Artificial Sequence: Synthetic peptide
PGICVWHDN

SEQ ID NO: 14744 - protein, 9 aa, Artificial Sequence
  Description of Artificial Sequence: Synthetic peptide
PGKCANERM

SEQ ID NO: 14745 - protein, 9 aa, Artificial Sequence
  Description of Artificial Sequence: Synthetic peptide
PGPCVMEIW

SEQ ID NO: 14746 - protein, 9 aa, Artificial Sequence
  Description of Artificial Sequence: Synthetic peptide
PHFHVNLDI

SEQ ID NO: 14747 - protein, 9 aa, Artificial Sequence
  Description of Artificial Sequence: Synthetic peptide
PHPCMFPTM

SEQ ID NO: 14748 - protein, 9 aa, Artificial Sequence
  Description of Artificial Sequence: Synthetic peptide
PICQGMMEN

SEQ ID NO: 14749 - protein, 9 aa, Artificial Sequence
  Description of Artificial Sequence: Synthetic peptide
PIICVWHDN

SEQ ID NO: 14750 - protein, 9 aa, Artificial Sequence
  Description of Artificial Sequence: Synthetic peptide
PKGSNMFDW

SEQ ID NO: 14751 - protein, 9 aa, Artificial Sequence
  Description of Artificial Sequence: Synthetic peptide
PKKVFCPEE

SEQ ID NO: 14752 - protein, 9 aa, Artificial Sequence
  Description of Artificial Sequence: Synthetic peptide
PKQCKVHEQ

SEQ ID NO: 14753 - protein, 9 aa, Artificial Sequence
  Description of Artificial Sequence: Synthetic peptide
PKSCKFIDT

SEQ ID NO: 14754 - protein, 9 aa, Artificial Sequence
  Description of Artificial Sequence: Synthetic peptide
PKYFECIYY

SEQ ID NO: 14755 - protein, 9 aa, Artificial Sequence
  Description of Artificial Sequence: Synthetic peptide
PMDCGKHKK

SEQ ID NO: 14756 - protein, 9 aa, Artificial Sequence
  Description of Artificial Sequence: Synthetic peptide
PMFHPRQYP

SEQ ID NO: 14757 - protein, 9 aa, Artificial Sequence
  Description of Artificial Sequence: Synthetic peptide
PMMISYIQR

SEQ ID NO: 14758 - protein, 9 aa, Artificial Sequence
  Description of Artificial Sequence: Synthetic peptide
PMRCGDDAK

SEQ ID NO: 14759 - protein, 9 aa, Artificial Sequence
  Description of Artificial Sequence: Synthetic peptide
PNCKQWVDN

SEQ ID NO: 14760 - protein, 9 aa, Artificial Sequence
  Description of Artificial Sequence: Synthetic peptide
PNDLKFETF

SEQ ID NO: 14761 - protein, 9 aa, Artificial Sequence
  Description of Artificial Sequence: Synthetic peptide
PNICPLDEQ

SEQ ID NO: 14762 - protein, 9 aa, Artificial Sequence
  Description of Artificial Sequence: Synthetic peptide
PNKLSGGEE

SEQ ID NO: 14763 - protein, 9 aa, Artificial Sequence
  Description of Artificial Sequence: Synthetic peptide
PNRCHDDRG

SEQ ID NO: 14764 - protein, 9 aa, Artificial Sequence
  Description of Artificial Sequence: Synthetic peptide
PPVRPWEEM

SEQ ID NO: 14765 - protein, 9 aa, Artificial Sequence
  Description of Artificial Sequence: Synthetic peptide
PQFFSWSEY

SEQ ID NO: 14766 - protein, 9 aa, Artificial Sequence
  Description of Artificial Sequence: Synthetic peptide
PQHAKCGEF

SEQ ID NO: 14767 - protein, 9 aa, Artificial Sequence
  Description of Artificial Sequence: Synthetic peptide
PQRVLPMEY

SEQ ID NO: 14768 - protein, 9 aa, Artificial Sequence
  Description of Artificial Sequence: Synthetic peptide
PREFEWYPH

SEQ ID NO: 14769 - protein, 9 aa, Artificial Sequence
  Description of Artificial Sequence: Synthetic peptide
PRGCDCLQS

SEQ ID NO: 14770 - protein, 9 aa, Artificial Sequence
  Description of Artificial Sequence: Synthetic peptide
PRRCDNWKT

SEQ ID NO: 14771 - protein, 9 aa, Artificial Sequence
  Description of Artificial Sequence: Synthetic peptide
PSGPIQYDE

SEQ ID NO: 14772 - protein, 9 aa, Artificial Sequence
  Description of Artificial Sequence: Synthetic peptide
PSKCEWTDN

SEQ ID NO: 14773 - protein, 9 aa, Artificial Sequence
  Description of Artificial Sequence: Synthetic peptide
PSRCFDNTV

SEQ ID NO: 14774 - protein, 9 aa, Artificial Sequence
  Description of Artificial Sequence: Synthetic peptide
PSRCVDNTV

SEQ ID NO: 14775 - protein, 9 aa, Artificial Sequence
  Description of Artificial Sequence: Synthetic peptide
PTMNLSWGL

SEQ ID NO: 14776 - protein, 9 aa, Artificial Sequence
  Description of Artificial Sequence: Synthetic peptide
PTNEEEDGN

SEQ ID NO: 14777 - protein, 9 aa, Artificial Sequence
  Description of Artificial Sequence: Synthetic peptide
PVACVWHDN

SEQ ID NO: 14778 - protein, 9 aa, Artificial Sequence
  Description of Artificial Sequence: Synthetic peptide
PVFCVWHDN

SEQ ID NO: 14779 - protein, 9 aa, Artificial Sequence
  Description of Artificial Sequence: Synthetic peptide
PVGFDPPPF

SEQ ID NO: 14780 - protein, 9 aa, Artificial Sequence
  Description of Artificial Sequence: Synthetic peptide
PVHDFDAAY

SEQ ID NO: 14781 - protein, 9 aa, Artificial Sequence
  Description of Artificial Sequence: Synthetic peptide
PVHSHNIDN

SEQ ID NO: 14782 - protein, 9 aa, Artificial Sequence
  Description of Artificial Sequence: Synthetic peptide
PVICDWHDN

SEQ ID NO: 14783 - protein, 9 aa, Artificial Sequence
  Description of Artificial Sequence: Synthetic peptide
PVICGWHDN

SEQ ID NO: 14784 - protein, 9 aa, Artificial Sequence
  Description of Artificial Sequence: Synthetic peptide
PVICGWHEN

SEQ ID NO: 14785 - protein, 9 aa, Artificial Sequence
  Description of Artificial Sequence: Synthetic peptide
PVICLWHDN

SEQ ID NO: 14786 - protein, 9 aa, Artificial Sequence
  Description of Artificial Sequence: Synthetic peptide
PVICVWHAN

SEQ ID NO: 14787 - protein, 9 aa, Artificial Sequence
  Description of Artificial Sequence: Synthetic peptide
PVICVWHDH

SEQ ID NO: 14788 - protein, 9 aa, Artificial Sequence
  Description of Artificial Sequence: Synthetic peptide
PVICVWHDS

SEQ ID NO: 14789 - protein, 9 aa, Artificial Sequence
  Description of Artificial Sequence: Synthetic peptide
PVICVWHDT

SEQ ID NO: 14790 - protein, 9 aa, Artificial Sequence
  Description of Artificial Sequence: Synthetic peptide
PVICVWHGN

SEQ ID NO: 14791 - protein, 9 aa, Artificial Sequence
  Description of Artificial Sequence: Synthetic peptide
PVICVWHHN

SEQ ID NO: 14792 - protein, 9 aa, Artificial Sequence
  Description of Artificial Sequence: Synthetic peptide
PVICVWHNN

SEQ ID NO: 14793 - protein, 9 aa, Artificial Sequence
  Description of Artificial Sequence: Synthetic peptide
PVICVWPDN

SEQ ID NO: 14794 - protein, 9 aa, Artificial Sequence
  Description of Artificial Sequence: Synthetic peptide
PVICVWYDN

SEQ ID NO: 14795 - protein, 9 aa, Artificial Sequence
  Description of Artificial Sequence: Synthetic peptide
PVIFVWHDN

SEQ ID NO: 14796 - protein, 9 aa, Artificial Sequence
  Description of Artificial Sequence: Synthetic peptide
PVIYIWHDN

SEQ ID NO: 14797 - protein, 9 aa, Artificial Sequence
  Description of Artificial Sequence: Synthetic peptide
PVLCVWHDK

SEQ ID NO: 14798 - protein, 9 aa, Artificial Sequence
  Description of Artificial Sequence: Synthetic peptide
PVLCVWHDN

SEQ ID NO: 14799 - protein, 9 aa, Artificial Sequence
  Description of Artificial Sequence: Synthetic peptide
PVMCVWHDN

SEQ ID NO: 14800 - protein, 9 aa, Artificial Sequence
  Description of Artificial Sequence: Synthetic peptide
PVNCVWHDN

SEQ ID NO: 14801 - protein, 9 aa, Artificial Sequence
  Description of Artificial Sequence: Synthetic peptide
PVQCNWERE

SEQ ID NO: 14802 - protein, 9 aa, Artificial Sequence
  Description of Artificial Sequence: Synthetic peptide
PVRCTKPRD

SEQ ID NO: 14803 - protein, 9 aa, Artificial Sequence
  Description of Artificial Sequence: Synthetic peptide
PVSCVWHDN

SEQ ID NO: 14804 - protein, 9 aa, Artificial Sequence
  Description of Artificial Sequence: Synthetic peptide
PVTCVWHDN

SEQ ID NO: 14805 - protein, 9 aa, Artificial Sequence
  Description of Artificial Sequence: Synthetic peptide
PVVCVWHDN

SEQ ID NO: 14806 - protein, 9 aa, Artificial Sequence
  Description of Artificial Sequence: Synthetic peptide
PWLDDSEME

SEQ ID NO: 14807 - protein, 9 aa, Artificial Sequence
  Description of Artificial Sequence: Synthetic peptide
PWLWHKSAC

SEQ ID NO: 14808 - protein, 9 aa, Artificial Sequence
  Description of Artificial Sequence: Synthetic peptide
PWQCKGPIN

SEQ ID NO: 14809 - protein, 9 aa, Artificial Sequence
  Description of Artificial Sequence: Synthetic peptide
PWQFCYPWT

SEQ ID NO: 14810 - protein, 9 aa, Artificial Sequence
  Description of Artificial Sequence: Synthetic peptide
PWRVQKHGV

SEQ ID NO: 14811 - protein, 9 aa, Artificial Sequence
  Description of Artificial Sequence: Synthetic peptide
PWRWHKSAW

SEQ ID NO: 14812 - protein, 9 aa, Artificial Sequence
  Description of Artificial Sequence: Synthetic peptide
PWRWHKSDC

SEQ ID NO: 14813 - protein, 9 aa, Artificial Sequence
  Description of Artificial Sequence: Synthetic peptide
PWRWHKSPC

SEQ ID NO: 14814 - protein, 9 aa, Artificial Sequence
  Description of Artificial Sequence: Synthetic peptide
PWRWHKSSC

SEQ ID NO: 14815 - protein, 9 aa, Artificial Sequence
  Description of Artificial Sequence: Synthetic peptide
PWRWHKSTC

SEQ ID NO: 14816 - protein, 9 aa, Artificial Sequence
  Description of Artificial Sequence: Synthetic peptide
PWRWHKSVC

SEQ ID NO: 14817 - protein, 9 aa, Artificial Sequence
  Description of Artificial Sequence: Synthetic peptide
PWRWHRSAC

SEQ ID NO: 14818 - protein, 9 aa, Artificial Sequence
  Description of Artificial Sequence: Synthetic peptide
PWRWRKSAC

SEQ ID NO: 14819 - protein, 9 aa, Artificial Sequence
  Description of Artificial Sequence: Synthetic peptide
PWRWYKSAC

SEQ ID NO: 14820 - protein, 9 aa, Artificial Sequence
  Description of Artificial Sequence: Synthetic peptide
PWSCQPEQA

SEQ ID NO: 14821 - protein, 9 aa, Artificial Sequence
  Description of Artificial Sequence: Synthetic peptide
PWTYDKEFY

SEQ ID NO: 14822 - protein, 9 aa, Artificial Sequence
  Description of Artificial Sequence: Synthetic peptide
PWVFTYPSN

SEQ ID NO: 14823 - protein, 9 aa, Artificial Sequence
  Description of Artificial Sequence: Synthetic peptide
PYGPFEYDE

SEQ ID NO: 14824 - protein, 9 aa, Artificial Sequence
  Description of Artificial Sequence: Synthetic peptide
PYGWRNIDQ

SEQ ID NO: 14825 - protein, 9 aa, Artificial Sequence
  Description of Artificial Sequence: Synthetic peptide
PYIMEFHAF

SEQ ID NO: 14826 - protein, 9 aa, Artificial Sequence
  Description of Artificial Sequence: Synthetic peptide
PYIMEFHPC

SEQ ID NO: 14827 - protein, 9 aa, Artificial Sequence
  Description of Artificial Sequence: Synthetic peptide
PYIMEFHPV

SEQ ID NO: 14828 - protein, 9 aa, Artificial Sequence
  Description of Artificial Sequence: Synthetic peptide
PYIMEFHTC

SEQ ID NO: 14829 - protein, 9 aa, Artificial Sequence
  Description of Artificial Sequence: Synthetic peptide
PYSMEFHPF

SEQ ID NO: 14830 - protein, 9 aa, Artificial Sequence
  Description of Artificial Sequence: Synthetic peptide
QANEEEDGN

SEQ ID NO: 14831 - protein, 9 aa, Artificial Sequence
  Description of Artificial Sequence: Synthetic peptide
QCDCSWWRY

SEQ ID NO: 14832 - protein, 9 aa, Artificial Sequence
  Description of Artificial Sequence: Synthetic peptide
QCDYSWWRD

SEQ ID NO: 14833 - protein, 9 aa, Artificial Sequence
  Description of Artificial Sequence: Synthetic peptide
QCDYSWWRH

SEQ ID NO: 14834 - protein, 9 aa, Artificial Sequence
  Description of Artificial Sequence: Synthetic peptide
QCDYSWWRN

SEQ ID NO: 14835 - protein, 9 aa, Artificial Sequence
  Description of Artificial Sequence: Synthetic peptide
QDGTGEPKG

SEQ ID NO: 14836 - protein, 9 aa, Artificial Sequence
  Description of Artificial Sequence: Synthetic peptide
QFRCVDNKV

SEQ ID NO: 14837 - protein, 9 aa, Artificial Sequence
  Description of Artificial Sequence: Synthetic peptide
QIEFIWDAH

SEQ ID NO: 14838 - protein, 9 aa, Artificial Sequence
  Description of Artificial Sequence: Synthetic peptide
QIEMTEISQ

SEQ ID NO: 14839 - protein, 9 aa, Artificial Sequence
  Description of Artificial Sequence: Synthetic peptide
QISEGEVLN

SEQ ID NO: 14840 - protein, 9 aa, Artificial Sequence
  Description of Artificial Sequence: Synthetic peptide
QKNEEEDGN

SEQ ID NO: 14841 - protein, 9 aa, Artificial Sequence
  Description of Artificial Sequence: Synthetic peptide
QKPCKVEQV

SEQ ID NO: 14842 - protein, 9 aa, Artificial Sequence
  Description of Artificial Sequence: Synthetic peptide
QKRCCWHRC

SEQ ID NO: 14843 - protein, 9 aa, Artificial Sequence
  Description of Artificial Sequence: Synthetic peptide
QLDSWVEKR

SEQ ID NO: 14844 - protein, 9 aa, Artificial Sequence
  Description of Artificial Sequence: Synthetic peptide
QMEEIQIGH

SEQ ID NO: 14845 - protein, 9 aa, Artificial Sequence
  Description of Artificial Sequence: Synthetic peptide
QNLEIIGAG

SEQ ID NO: 14846 - protein, 9 aa, Artificial Sequence
  Description of Artificial Sequence: Synthetic peptide
QPICRRDKR

SEQ ID NO: 14847 - protein, 9 aa, Artificial Sequence
  Description of Artificial Sequence: Synthetic peptide
QPMEWKMVR

SEQ ID NO: 14848 - protein, 9 aa, Artificial Sequence
  Description of Artificial Sequence: Synthetic peptide
QPRCLDNTV

SEQ ID NO: 14849 - protein, 9 aa, Artificial Sequence
  Description of Artificial Sequence: Synthetic peptide
QPRCYRNIS

SEQ ID NO: 14850 - protein, 9 aa, Artificial Sequence
  Description of Artificial Sequence: Synthetic peptide
QSDEYNIAF

SEQ ID NO: 14851 - protein, 9 aa, Artificial Sequence
  Description of Artificial Sequence: Synthetic peptide
QSRCFDNTV

SEQ ID NO: 14852 - protein, 9 aa, Artificial Sequence
  Description of Artificial Sequence: Synthetic peptide
QSRCLDNTL

SEQ ID NO: 14853 - protein, 9 aa, Artificial Sequence
  Description of Artificial Sequence: Synthetic peptide
QSRCVDITV

SEQ ID NO: 14854 - protein, 9 aa, Artificial Sequence
  Description of Artificial Sequence: Synthetic peptide
QSRCVDNPG

SEQ ID NO: 14855 - protein, 9 aa, Artificial Sequence
  Description of Artificial Sequence: Synthetic peptide
QSRCVDNRV

SEQ ID NO: 14856 - protein, 9 aa, Artificial Sequence
  Description of Artificial Sequence: Synthetic peptide
QSRCVDNSV

SEQ ID NO: 14857 - protein, 9 aa, Artificial Sequence
  Description of Artificial Sequence: Synthetic peptide
QSRCVDTTV

SEQ ID NO: 14858 - protein, 9 aa, Artificial Sequence
  Description of Artificial Sequence: Synthetic peptide
QTHEEDDGN

SEQ ID NO: 14859 - protein, 9 aa, Artificial Sequence
  Description of Artificial Sequence: Synthetic peptide
QTHEEEDGN

SEQ ID NO: 14860 - protein, 9 aa, Artificial Sequence
  Description of Artificial Sequence: Synthetic peptide
QTNDKEDGN

SEQ ID NO: 14861 - protein, 9 aa, Artificial Sequence
  Description of Artificial Sequence: Synthetic peptide
QTNEEEAGN

SEQ ID NO: 14862 - protein, 9 aa, Artificial Sequence
  Description of Artificial Sequence: Synthetic peptide
QTNEEEDAN

SEQ ID NO: 14863 - protein, 9 aa, Artificial Sequence
  Description of Artificial Sequence: Synthetic peptide
QTNEEEDGH

SEQ ID NO: 14864 - protein, 9 aa, Artificial Sequence
  Description of Artificial Sequence: Synthetic peptide
QTNEEEDGT

SEQ ID NO: 14865 - protein, 9 aa, Artificial Sequence
  Description of Artificial Sequence: Synthetic peptide
QTNEEEDSN

SEQ ID NO: 14866 - protein, 9 aa, Artificial Sequence
  Description of Artificial Sequence: Synthetic peptide
QTNEEEDVN

SEQ ID NO: 14867 - protein, 9 aa, Artificial Sequence
  Description of Artificial Sequence: Synthetic peptide
QTNEGEDGN

SEQ ID NO: 14868 - protein, 9 aa, Artificial Sequence
  Description of Artificial Sequence: Synthetic peptide
QTNEQEDGN

SEQ ID NO: 14869 - protein, 9 aa, Artificial Sequence
  Description of Artificial Sequence: Synthetic peptide
QTSVEEDGN

SEQ ID NO: 14870 - protein, 9 aa, Artificial Sequence
  Description of Artificial Sequence: Synthetic peptide
QTTEEEDGN

SEQ ID NO: 14871 - protein, 9 aa, Artificial Sequence
  Description of Artificial Sequence: Synthetic peptide
QTYEEEDGN

SEQ ID NO: 14872 - protein, 9 aa, Artificial Sequence
  Description of Artificial Sequence: Synthetic peptide
QVGDDRSFA

SEQ ID NO: 14873 - protein, 9 aa, Artificial Sequence
  Description of Artificial Sequence: Synthetic peptide
QVRIQCKID

SEQ ID NO: 14874 - protein, 9 aa, Artificial Sequence
  Description of Artificial Sequence: Synthetic peptide
QWDDDQWST

SEQ ID NO: 14875 - protein, 9 aa, Artificial Sequence
  Description of Artificial Sequence: Synthetic peptide
QWPDDQWST

SEQ ID NO: 14876 - protein, 9 aa, Artificial Sequence
  Description of Artificial Sequence: Synthetic peptide
QYRCSDSAF

SEQ ID NO: 14877 - protein, 9 aa, Artificial Sequence
  Description of Artificial Sequence: Synthetic peptide
RDCCDAWSR

SEQ ID NO: 14878 - protein, 9 aa, Artificial Sequence
  Description of Artificial Sequence: Synthetic peptide
RDECRMESG

SEQ ID NO: 14879 - protein, 9 aa, Artificial Sequence
  Description of Artificial Sequence: Synthetic peptide
RDKCRMESG

SEQ ID NO: 14880 - protein, 9 aa, Artificial Sequence
  Description of Artificial Sequence: Synthetic peptide
RDPCRMESG

SEQ ID NO: 14881 - protein, 9 aa, Artificial Sequence
  Description of Artificial Sequence: Synthetic peptide
RDPLNDSRY

SEQ ID NO: 14882 - protein, 9 aa, Artificial Sequence
  Description of Artificial Sequence: Synthetic peptide
RDQCRMEAG

SEQ ID NO: 14883 - protein, 9 aa, Artificial Sequence
  Description of Artificial Sequence: Synthetic peptide
RDQCRMECG

SEQ ID NO: 14884 - protein, 9 aa, Artificial Sequence
  Description of Artificial Sequence: Synthetic peptide
RDQCRMEDG

SEQ ID NO: 14885 - protein, 9 aa, Artificial Sequence
  Description of Artificial Sequence: Synthetic peptide
RDQCRMEFG

SEQ ID NO: 14886 - protein, 9 aa, Artificial Sequence
  Description of Artificial Sequence: Synthetic peptide
RDQCRMEHG

SEQ ID NO: 14887 - protein, 9 aa, Artificial Sequence
  Description of Artificial Sequence: Synthetic peptide
RDQCRMESA

SEQ ID NO: 14888 - protein, 9 aa, Artificial Sequence
  Description of Artificial Sequence: Synthetic peptide
RDQCRMESD

SEQ ID NO: 14889 - protein, 9 aa, Artificial Sequence
  Description of Artificial Sequence: Synthetic peptide
RDQCRMESR

SEQ ID NO: 14890 - protein, 9 aa, Artificial Sequence
  Description of Artificial Sequence: Synthetic peptide
RDQCRMESS

SEQ ID NO: 14891 - protein, 9 aa, Artificial Sequence
  Description of Artificial Sequence: Synthetic peptide
RDQCRMESV

SEQ ID NO: 14892 - protein, 9 aa, Artificial Sequence
  Description of Artificial Sequence: Synthetic peptide
RDQCRMETC

SEQ ID NO: 14893 - protein, 9 aa, Artificial Sequence
  Description of Artificial Sequence: Synthetic peptide
RDQCRMEYG

SEQ ID NO: 14894 - protein, 9 aa, Artificial Sequence
  Description of Artificial Sequence: Synthetic peptide
RDQCRMKSG

SEQ ID NO: 14895 - protein, 9 aa, Artificial Sequence
  Description of Artificial Sequence: Synthetic peptide
RDQCRVESG

SEQ ID NO: 14896 - protein, 9 aa, Artificial Sequence
  Description of Artificial Sequence: Synthetic peptide
RDSHDEFEW

SEQ ID NO: 14897 - protein, 9 aa, Artificial Sequence
  Description of Artificial Sequence: Synthetic peptide
REDCWPPEN

SEQ ID NO: 14898 - protein, 9 aa, Artificial Sequence
  Description of Artificial Sequence: Synthetic peptide
REHIGFMKF

SEQ ID NO: 14899 - protein, 9 aa, Artificial Sequence
  Description of Artificial Sequence: Synthetic peptide
REIGGKTRT

SEQ ID NO: 14900 - protein, 9 aa, Artificial Sequence
  Description of Artificial Sequence: Synthetic peptide
REKCHQHQC

SEQ ID NO: 14901 - protein, 9 aa, Artificial Sequence
  Description of Artificial Sequence: Synthetic peptide
RSRCVDNTV

SEQ ID NO: 14902 - protein, 9 aa, Artificial Sequence
  Description of Artificial Sequence: Synthetic peptide
RWGCDLPQI

SEQ ID NO: 14903 - protein, 9 aa, Artificial Sequence
  Description of Artificial Sequence: Synthetic peptide
RYQCRMESG

SEQ ID NO: 14904 - protein, 9 aa, Artificial Sequence
  Description of Artificial Sequence: Synthetic peptide
SADIFAIND

SEQ ID NO: 14905 - protein, 9 aa, Artificial Sequence
  Description of Artificial Sequence: Synthetic peptide
SCECGHWPI

SEQ ID NO: 14906 - protein, 9 aa, Artificial Sequence
  Description of Artificial Sequence: Synthetic peptide
SCECGHWPN

SEQ ID NO: 14907 - protein, 9 aa, Artificial Sequence
  Description of Artificial Sequence: Synthetic peptide
SDPGEILKR

SEQ ID NO: 14908 - protein, 9 aa, Artificial Sequence
  Description of Artificial Sequence: Synthetic peptide
SGDGDFGEW

SEQ ID NO: 14909 - protein, 9 aa, Artificial Sequence
  Description of Artificial Sequence: Synthetic peptide
SGDLDFGEW

SEQ ID NO: 14910 - protein, 9 aa, Artificial Sequence
  Description of Artificial Sequence: Synthetic peptide
SGDWAFGEW

SEQ ID NO: 14911 - protein, 9 aa, Artificial Sequence
  Description of Artificial Sequence: Synthetic peptide
SGDWDFGKW

SEQ ID NO: 14912 - protein, 9 aa, Artificial Sequence
  Description of Artificial Sequence: Synthetic peptide
SGDWNFGEW

SEQ ID NO: 14913 - protein, 9 aa, Artificial Sequence
  Description of Artificial Sequence: Synthetic peptide
SGRCPFSSK

SEQ ID NO: 14914 - protein, 9 aa, Artificial Sequence
  Description of Artificial Sequence: Synthetic peptide
SIEECCEEM

SEQ ID NO: 14915 - protein, 9 aa, Artificial Sequence
  Description of Artificial Sequence: Synthetic peptide
SMFQLKPQN

SEQ ID NO: 14916 - protein, 9 aa, Artificial Sequence
  Description of Artificial Sequence: Synthetic peptide
SNDACIQSF

SEQ ID NO: 14917 - protein, 9 aa, Artificial Sequence
  Description of Artificial Sequence: Synthetic peptide
SNECWNEMA

SEQ ID NO: 14918 - protein, 9 aa, Artificial Sequence
  Description of Artificial Sequence: Synthetic peptide
SNGDCIQAF

SEQ ID NO: 14919 - protein, 9 aa, Artificial Sequence
  Description of Artificial Sequence: Synthetic peptide
SNRCHDDRG

SEQ ID NO: 14920 - protein, 9 aa, Artificial Sequence
  Description of Artificial Sequence: Synthetic peptide
SNVDCIQSF

SEQ ID NO: 14921 - protein, 9 aa, Artificial Sequence
  Description of Artificial Sequence: Synthetic peptide
SPERMDYDG

SEQ ID NO: 14922 - protein, 9 aa, Artificial Sequence
  Description of Artificial Sequence: Synthetic peptide
SPKGSECNW

SEQ ID NO: 14923 - protein, 9 aa, Artificial Sequence
  Description of Artificial Sequence: Synthetic peptide
SQQWCEQPD

SEQ ID NO: 14924 - protein, 9 aa, Artificial Sequence
  Description of Artificial Sequence: Synthetic peptide
SRPCCKDIR

SEQ ID NO: 14925 - protein, 9 aa, Artificial Sequence
  Description of Artificial Sequence: Synthetic peptide
SSDPKNMSI

SEQ ID NO: 14926 - protein, 9 aa, Artificial Sequence
  Description of Artificial Sequence: Synthetic peptide
STMDLSWGL

SEQ ID NO: 14927 - protein, 9 aa, Artificial Sequence
  Description of Artificial Sequence: Synthetic peptide
STMNLSWGF

SEQ ID NO: 14928 - protein, 9 aa, Artificial Sequence
  Description of Artificial Sequence: Synthetic peptide
SVDYEDEVW

SEQ ID NO: 14929 - protein, 9 aa, Artificial Sequence
  Description of Artificial Sequence: Synthetic peptide
SVEPKSMTG

SEQ ID NO: 14930 - protein, 9 aa, Artificial Sequence
  Description of Artificial Sequence: Synthetic peptide
SVETLDQSL

SEQ ID NO: 14931 - protein, 9 aa, Artificial Sequence
  Description of Artificial Sequence: Synthetic peptide
SVICVWHDN

SEQ ID NO: 14932 - protein, 9 aa, Artificial Sequence
  Description of Artificial Sequence: Synthetic peptide
SVLRRDEVN

SEQ ID NO: 14933 - protein, 9 aa, Artificial Sequence
  Description of Artificial Sequence: Synthetic peptide
SVMDIDCHQ

SEQ ID NO: 14934 - protein, 9 aa, Artificial Sequence
  Description of Artificial Sequence: Synthetic peptide
SWLDNILPK

SEQ ID NO: 14935 - protein, 9 aa, Artificial Sequence
  Description of Artificial Sequence: Synthetic peptide
SYFWCFMDC

SEQ ID NO: 14936 - protein, 9 aa, Artificial Sequence
  Description of Artificial Sequence: Synthetic peptide
TADIFAIND

SEQ ID NO: 14937 - protein, 9 aa, Artificial Sequence
  Description of Artificial Sequence: Synthetic peptide
TAEIFAVND

SEQ ID NO: 14938 - protein, 9 aa, Artificial Sequence
  Description of Artificial Sequence: Synthetic peptide
TDKYCDQKR

SEQ ID NO: 14939 - protein, 9 aa, Artificial Sequence
  Description of Artificial Sequence: Synthetic peptide
TFSEIRDQC

SEQ ID NO: 14940 - protein, 9 aa, Artificial Sequence
  Description of Artificial Sequence: Synthetic peptide
THPWEMTKE

SEQ ID NO: 14941 - protein, 9 aa, Artificial Sequence
  Description of Artificial Sequence: Synthetic peptide
THRCHDDRG

SEQ ID NO: 14942 - protein, 9 aa, Artificial Sequence
  Description of Artificial Sequence: Synthetic peptide
TIDSWFQER

SEQ ID NO: 14943 - protein, 9 aa, Artificial Sequence
  Description of Artificial Sequence: Synthetic peptide
TIGEINDAN

SEQ ID NO: 14944 - protein, 9 aa, Artificial Sequence
  Description of Artificial Sequence: Synthetic peptide
TKFHDGDWC

SEQ ID NO: 14945 - protein, 9 aa, Artificial Sequence
  Description of Artificial Sequence: Synthetic peptide
TKMLDRDAE

SEQ ID NO: 14946 - protein, 9 aa, Artificial Sequence
  Description of Artificial Sequence: Synthetic peptide
TNRCHDDRC

SEQ ID NO: 14947 - protein, 9 aa, Artificial Sequence
  Description of Artificial Sequence: Synthetic peptide
TNRCHDDRD

SEQ ID NO: 14948 - protein, 9 aa, Artificial Sequence
  Description of Artificial Sequence: Synthetic peptide
TNRCHDDRV

SEQ ID NO: 14949 - protein, 9 aa, Artificial Sequence
  Description of Artificial Sequence: Synthetic peptide
TNRCHDHRG

SEQ ID NO: 14950 - protein, 9 aa, Artificial Sequence
  Description of Artificial Sequence: Synthetic peptide
TNRCHDYRG

SEQ ID NO: 14951 - protein, 9 aa, Artificial Sequence
  Description of Artificial Sequence: Synthetic peptide
TPPWESIRK

SEQ ID NO: 14952 - protein, 9 aa, Artificial Sequence
  Description of Artificial Sequence: Synthetic peptide
TQPFSKDED

SEQ ID NO: 14953 - protein, 9 aa, Artificial Sequence
  Description of Artificial Sequence: Synthetic peptide
TREHQIISP

SEQ ID NO: 14954 - protein, 9 aa, Artificial Sequence
  Description of Artificial Sequence: Synthetic peptide
TRPCGTLSH

SEQ ID NO: 14955 - protein, 9 aa, Artificial Sequence
  Description of Artificial Sequence: Synthetic peptide
TTHEGHEDN

SEQ ID NO: 14956 - protein, 9 aa, Artificial Sequence
  Description of Artificial Sequence: Synthetic peptide
TVICVWHDN

SEQ ID NO: 14957 - protein, 9 aa, Artificial Sequence
  Description of Artificial Sequence: Synthetic peptide
TVPCMWQTY

SEQ ID NO: 14958 - protein, 9 aa, Artificial Sequence
  Description of Artificial Sequence: Synthetic peptide
TVWEQDLLE

SEQ ID NO: 14959 - protein, 9 aa, Artificial Sequence
  Description of Artificial Sequence: Synthetic peptide
TWAPWCCDC

SEQ ID NO: 14960 - protein, 9 aa, Artificial Sequence
  Description of Artificial Sequence: Synthetic peptide
TWAPWCCYY

SEQ ID NO: 14961 - protein, 9 aa, Artificial Sequence
  Description of Artificial Sequence: Synthetic peptide
TWGPWCCYF

SEQ ID NO: 14962 - protein, 9 aa, Artificial Sequence
  Description of Artificial Sequence: Synthetic peptide
TWPPWCCYF

SEQ ID NO: 14963 - protein, 9 aa, Artificial Sequence
  Description of Artificial Sequence: Synthetic peptide
TWRCGDIGH

SEQ ID NO: 14964 - protein, 9 aa, Artificial Sequence
  Description of Artificial Sequence: Synthetic peptide
TYRCHDDRG

SEQ ID NO: 14965 - protein, 9 aa, Artificial Sequence
  Description of Artificial Sequence: Synthetic peptide
VADCKQPRF

SEQ ID NO: 14966 - protein, 9 aa, Artificial Sequence
  Description of Artificial Sequence: Synthetic peptide
VDCSKILRR

SEQ ID NO: 14967 - protein, 9 aa, Artificial Sequence
  Description of Artificial Sequence: Synthetic peptide
VDDRPKPEH

SEQ ID NO: 14968 - protein, 9 aa, Artificial Sequence
  Description of Artificial Sequence: Synthetic peptide
VDRLFRMEF

SEQ ID NO: 14969 - protein, 9 aa, Artificial Sequence
  Description of Artificial Sequence: Synthetic peptide
VDRQVRMEY

SEQ ID NO: 14970 - protein, 9 aa, Artificial Sequence
  Description of Artificial Sequence: Synthetic peptide
VDSHKIIRR

SEQ ID NO: 14971 - protein, 9 aa, Artificial Sequence
  Description of Artificial Sequence: Synthetic peptide
VEIRGKTRT

SEQ ID NO: 14972 - protein, 9 aa, Artificial Sequence
  Description of Artificial Sequence: Synthetic peptide
VHEGKTFDI

SEQ ID NO: 14973 - protein, 9 aa, Artificial Sequence
  Description of Artificial Sequence: Synthetic peptide
VHQDKIIGE

SEQ ID NO: 14974 - protein, 9 aa, Artificial Sequence
  Description of Artificial Sequence: Synthetic peptide
VICEFEEGN

SEQ ID NO: 14975 - protein, 9 aa, Artificial Sequence
  Description of Artificial Sequence: Synthetic peptide
VITEDDQAE

SEQ ID NO: 14976 - protein, 9 aa, Artificial Sequence
  Description of Artificial Sequence: Synthetic peptide
VNEWEADAE

SEQ ID NO: 14977 - protein, 9 aa, Artificial Sequence
  Description of Artificial Sequence: Synthetic peptide
VQLCDLLRR

SEQ ID NO: 14978 - protein, 9 aa, Artificial Sequence
  Description of Artificial Sequence: Synthetic peptide
VRYSDMFWW

SEQ ID NO: 14979 - protein, 9 aa, Artificial Sequence
  Description of Artificial Sequence: Synthetic peptide
WAEHDFPKG

SEQ ID NO: 14980 - protein, 9 aa, Artificial Sequence
  Description of Artificial Sequence: Synthetic peptide
WCDDDMRRQ

SEQ ID NO: 14981 - protein, 9 aa, Artificial Sequence
  Description of Artificial Sequence: Synthetic peptide
WCTEEWEEK

SEQ ID NO: 14982 - protein, 9 aa, Artificial Sequence
  Description of Artificial Sequence: Synthetic peptide
WDCSMTKKH

SEQ ID NO: 14983 - protein, 9 aa, Artificial Sequence
  Description of Artificial Sequence: Synthetic peptide
WDFSGRIDN

SEQ ID NO: 14984 - protein, 9 aa, Artificial Sequence
  Description of Artificial Sequence: Synthetic peptide
WDHREERTH

SEQ ID NO: 14985 - protein, 9 aa, Artificial Sequence
  Description of Artificial Sequence: Synthetic peptide
WDICSGLRQ

SEQ ID NO: 14986 - protein, 9 aa, Artificial Sequence
  Description of Artificial Sequence: Synthetic peptide
WDKCIPMHW

SEQ ID NO: 14987 - protein, 9 aa, Artificial Sequence
  Description of Artificial Sequence: Synthetic peptide
WDLVDPPKY

SEQ ID NO: 14988 - protein, 9 aa, Artificial Sequence
  Description of Artificial Sequence: Synthetic peptide
WDMNGKDGS

SEQ ID NO: 14989 - protein, 9 aa, Artificial Sequence
  Description of Artificial Sequence: Synthetic peptide
WDPRRPVKK

SEQ ID NO: 14990 - protein, 9 aa, Artificial Sequence
  Description of Artificial Sequence: Synthetic peptide
WDRCLELNK

SEQ ID NO: 14991 - protein, 9 aa, Artificial Sequence
  Description of Artificial Sequence: Synthetic peptide
WDSLEWDRA

SEQ ID NO: 14992 - protein, 9 aa, Artificial Sequence
  Description of Artificial Sequence: Synthetic peptide
WDYSMPKKH

SEQ ID NO: 14993 - protein, 9 aa, Artificial Sequence
  Description of Artificial Sequence: Synthetic peptide
WDYSMSKKH

SEQ ID NO: 14994 - protein, 9 aa, Artificial Sequence
  Description of Artificial Sequence: Synthetic peptide
WDYSMTKKN

SEQ ID NO: 14995 - protein, 9 aa, Artificial Sequence
  Description of Artificial Sequence: Synthetic peptide
WDYSMTKKP

SEQ ID NO: 14996 - protein, 9 aa, Artificial Sequence
  Description of Artificial Sequence: Synthetic peptide
WEFTMAPEV

SEQ ID NO: 14997 - protein, 9 aa, Artificial Sequence
  Description of Artificial Sequence: Synthetic peptide
WEKCGWPPI

SEQ ID NO: 14998 - protein, 9 aa, Artificial Sequence
  Description of Artificial Sequence: Synthetic peptide
WELCMELNQ

SEQ ID NO: 14999 - protein, 9 aa, Artificial Sequence
  Description of Artificial Sequence: Synthetic peptide
WEPCLELNQ

SEQ ID NO: 15000 - protein, 9 aa, Artificial Sequence
  Description of Artificial Sequence: Synthetic peptide
WERCLELDQ

SEQ ID NO: 15001 - protein, 9 aa, Artificial Sequence
  Description of Artificial Sequence: Synthetic peptide
WERCLELHQ

SEQ ID NO: 15002 - protein, 9 aa, Artificial Sequence
  Description of Artificial Sequence: Synthetic peptide
WERCLELNL

SEQ ID NO: 15003 - protein, 9 aa, Artificial Sequence
  Description of Artificial Sequence: Synthetic peptide
WERCLELNP

SEQ ID NO: 15004 - protein, 9 aa, Artificial Sequence
  Description of Artificial Sequence: Synthetic peptide
WERCLEQNH

SEQ ID NO: 15005 - protein, 9 aa, Artificial Sequence
  Description of Artificial Sequence: Synthetic peptide
WERCLEVNQ

SEQ ID NO: 15006 - protein, 9 aa, Artificial Sequence
  Description of Artificial Sequence: Synthetic peptide
WERCLGLNQ

SEQ ID NO: 15007 - protein, 9 aa, Artificial Sequence
  Description of Artificial Sequence: Synthetic peptide
WERCLGLTQ

SEQ ID NO: 15008 - protein, 9 aa, Artificial Sequence
  Description of Artificial Sequence: Synthetic peptide
WERCLQLNQ

SEQ ID NO: 15009 - protein, 9 aa, Artificial Sequence
  Description of Artificial Sequence: Synthetic peptide
WERCLVLNQ

SEQ ID NO: 15010 - protein, 9 aa, Artificial Sequence
  Description of Artificial Sequence: Synthetic peptide
WERCMELNQ

SEQ ID NO: 15011 - protein, 9 aa, Artificial Sequence
  Description of Artificial Sequence: Synthetic peptide
WERCQELNH

SEQ ID NO: 15012 - protein, 9 aa, Artificial Sequence
  Description of Artificial Sequence: Synthetic peptide
WGAFRGVCE

SEQ ID NO: 15013 - protein, 9 aa, Artificial Sequence
  Description of Artificial Sequence: Synthetic peptide
WHGFHKIMF

SEQ ID NO: 15014 - protein, 9 aa, Artificial Sequence
  Description of Artificial Sequence: Synthetic peptide
WIAPRHMGL

SEQ ID NO: 15015 - protein, 9 aa, Artificial Sequence
  Description of Artificial Sequence: Synthetic peptide
WKAFRGGIG

SEQ ID NO: 15016 - protein, 9 aa, Artificial Sequence
  Description of Artificial Sequence: Synthetic peptide
WKDCKQMKM

SEQ ID NO: 15017 - protein, 9 aa, Artificial Sequence
  Description of Artificial Sequence: Synthetic peptide
WKFGDKLIM

SEQ ID NO: 15018 - protein, 9 aa, Artificial Sequence
  Description of Artificial Sequence: Synthetic peptide
WKGAPALER

SEQ ID NO: 15019 - protein, 9 aa, Artificial Sequence
  Description of Artificial Sequence: Synthetic peptide
WKHCEREIN

SEQ ID NO: 15020 - protein, 9 aa, Artificial Sequence
  Description of Artificial Sequence: Synthetic peptide
WKIDPCVLQ

SEQ ID NO: 15021 - protein, 9 aa, Artificial Sequence
  Description of Artificial Sequence: Synthetic peptide
WKLGDGIQD

SEQ ID NO: 15022 - protein, 9 aa, Artificial Sequence
  Description of Artificial Sequence: Synthetic peptide
WKRPPGGEH

SEQ ID NO: 15023 - protein, 9 aa, Artificial Sequence
  Description of Artificial Sequence: Synthetic peptide
WKSHEWDPH

SEQ ID NO: 15024 - protein, 9 aa, Artificial Sequence
  Description of Artificial Sequence: Synthetic peptide
WLECNPPEQ

SEQ ID NO: 15025 - protein, 9 aa, Artificial Sequence
  Description of Artificial Sequence: Synthetic peptide
WLHPYSYCA

SEQ ID NO: 15026 - protein, 9 aa, Artificial Sequence
  Description of Artificial Sequence: Synthetic peptide
WNLQDKPGE

SEQ ID NO: 15027 - protein, 9 aa, Artificial Sequence
  Description of Artificial Sequence: Synthetic peptide
WNPARKDDI

SEQ ID NO: 15028 - protein, 9 aa, Artificial Sequence
  Description of Artificial Sequence: Synthetic peptide
WNSCPWQLP

SEQ ID NO: 15029 - protein, 9 aa, Artificial Sequence
  Description of Artificial Sequence: Synthetic peptide
WPCHDAPIW

SEQ ID NO: 15030 - protein, 9 aa, Artificial Sequence
  Description of Artificial Sequence: Synthetic peptide
WPIGEKMVF

SEQ ID NO: 15031 - protein, 9 aa, Artificial Sequence
  Description of Artificial Sequence: Synthetic peptide
WPKERVPKG

SEQ ID NO: 15032 - protein, 9 aa, Artificial Sequence
  Description of Artificial Sequence: Synthetic peptide
WPNDDMTRM

SEQ ID NO: 15033 - protein, 9 aa, Artificial Sequence
  Description of Artificial Sequence: Synthetic peptide
WQFTGKPTL

SEQ ID NO: 15034 - protein, 9 aa, Artificial Sequence
  Description of Artificial Sequence: Synthetic peptide
WQHIMKPQI

SEQ ID NO: 15035 - protein, 9 aa, Artificial Sequence
  Description of Artificial Sequence: Synthetic peptide
WQMLCRPPV

SEQ ID NO: 15036 - protein, 9 aa, Artificial Sequence
  Description of Artificial Sequence: Synthetic peptide
WQRCLELNQ

SEQ ID NO: 15037 - protein, 9 aa, Artificial Sequence
  Description of Artificial Sequence: Synthetic peptide
WRQFPCAEQ

SEQ ID NO: 15038 - protein, 9 aa, Artificial Sequence
  Description of Artificial Sequence: Synthetic peptide
WRSCPKGLV

SEQ ID NO: 15039 - protein, 9 aa, Artificial Sequence
  Description of Artificial Sequence: Synthetic peptide
WSRCVDNTV

SEQ ID NO: 15040 - protein, 9 aa, Artificial Sequence
  Description of Artificial Sequence: Synthetic peptide
WTIEPEWYF

SEQ ID NO: 15041 - protein, 9 aa, Artificial Sequence
  Description of Artificial Sequence: Synthetic peptide
WTKDDEQLE

SEQ ID NO: 15042 - protein, 9 aa, Artificial Sequence
  Description of Artificial Sequence: Synthetic peptide
WVHPFSYCA

SEQ ID NO: 15043 - protein, 9 aa, Artificial Sequence
  Description of Artificial Sequence: Synthetic peptide
WVHPYTYCA

SEQ ID NO: 15044 - protein, 9 aa, Artificial Sequence
  Description of Artificial Sequence: Synthetic peptide
WVHQYSYCA

SEQ ID NO: 15045 - protein, 9 aa, Artificial Sequence
  Description of Artificial Sequence: Synthetic peptide
WVHTYSYCA

SEQ ID NO: 15046 - protein, 9 aa, Artificial Sequence
  Description of Artificial Sequence: Synthetic peptide
WVLDISHCG

SEQ ID NO: 15047 - protein, 9 aa, Artificial Sequence
  Description of Artificial Sequence: Synthetic peptide
WVRCLELKQ

SEQ ID NO: 15048 - protein, 9 aa, Artificial Sequence
  Description of Artificial Sequence: Synthetic peptide
WVYPYSYCA

SEQ ID NO: 15049 - protein, 9 aa, Artificial Sequence
  Description of Artificial Sequence: Synthetic peptide
WWRVPCESH

SEQ ID NO: 15050 - protein, 9 aa, Artificial Sequence
  Description of Artificial Sequence: Synthetic peptide
WYDWIHERT

SEQ ID NO: 15051 - protein, 9 aa, Artificial Sequence
  Description of Artificial Sequence: Synthetic peptide
WYICQKDSM

SEQ ID NO: 15052 - protein, 9 aa, Artificial Sequence
  Description of Artificial Sequence: Synthetic peptide
WYKCQDVDR

SEQ ID NO: 15053 - protein, 9 aa, Artificial Sequence
  Description of Artificial Sequence: Synthetic peptide
YADPKNMSI

SEQ ID NO: 15054 - protein, 9 aa, Artificial Sequence
  Description of Artificial Sequence: Synthetic peptide
YCECEHWPN

SEQ ID NO: 15055 - protein, 9 aa, Artificial Sequence
  Description of Artificial Sequence: Synthetic peptide
YCECGHCPI

SEQ ID NO: 15056 - protein, 9 aa, Artificial Sequence
  Description of Artificial Sequence: Synthetic peptide
YCECGHSPN

SEQ ID NO: 15057 - protein, 9 aa, Artificial Sequence
  Description of Artificial Sequence: Synthetic peptide
YCECGHWPD

SEQ ID NO: 15058 - protein, 9 aa, Artificial Sequence
  Description of Artificial Sequence: Synthetic peptide
YCECGHWPH

SEQ ID NO: 15059 - protein, 9 aa, Artificial Sequence
  Description of Artificial Sequence: Synthetic peptide
YCECGHWPI

SEQ ID NO: 15060 - protein, 9 aa, Artificial Sequence
  Description of Artificial Sequence: Synthetic peptide
YCECGHWPY

SEQ ID NO: 15061 - protein, 9 aa, Artificial Sequence
  Description of Artificial Sequence: Synthetic peptide
YCECGHWQN

SEQ ID NO: 15062 - protein, 9 aa, Artificial Sequence
  Description of Artificial Sequence: Synthetic peptide
YCECGHWSN

SEQ ID NO: 15063 - protein, 9 aa, Artificial Sequence
  Description of Artificial Sequence: Synthetic peptide
YCECGHWTS

SEQ ID NO: 15064 - protein, 9 aa, Artificial Sequence
  Description of Artificial Sequence: Synthetic peptide
YCECGNWPN

SEQ ID NO: 15065 - protein, 9 aa, Artificial Sequence
  Description of Artificial Sequence: Synthetic peptide
YCECGRWPI

SEQ ID NO: 15066 - protein, 9 aa, Artificial Sequence
  Description of Artificial Sequence: Synthetic peptide
YCECGRWPN

SEQ ID NO: 15067 - protein, 9 aa, Artificial Sequence
  Description of Artificial Sequence: Synthetic peptide
YCECGYWPN

SEQ ID NO: 15068 - protein, 9 aa, Artificial Sequence
  Description of Artificial Sequence: Synthetic peptide
YCEGGHWPN

SEQ ID NO: 15069 - protein, 9 aa, Artificial Sequence
  Description of Artificial Sequence: Synthetic peptide
YCGCGIHQQ

SEQ ID NO: 15070 - protein, 9 aa, Artificial Sequence
  Description of Artificial Sequence: Synthetic peptide
YDESVRISR

SEQ ID NO: 15071 - protein, 9 aa, Artificial Sequence
  Description of Artificial Sequence: Synthetic peptide
YEEFPEIIM

SEQ ID NO: 15072 - protein, 9 aa, Artificial Sequence
  Description of Artificial Sequence: Synthetic peptide
YEETRVEAR

SEQ ID NO: 15073 - protein, 9 aa, Artificial Sequence
  Description of Artificial Sequence: Synthetic peptide
YELYQDIDN

SEQ ID NO: 15074 - protein, 9 aa, Artificial Sequence
  Description of Artificial Sequence: Synthetic peptide
YERCHHQGD

SEQ ID NO: 15075 - protein, 9 aa, Artificial Sequence
  Description of Artificial Sequence: Synthetic peptide
YGPCCHFQF

SEQ ID NO: 15076 - protein, 9 aa, Artificial Sequence
  Description of Artificial Sequence: Synthetic peptide
YHKFGDMDI

SEQ ID NO: 15077 - protein, 9 aa, Artificial Sequence
  Description of Artificial Sequence: Synthetic peptide
YHRCDEFFL

SEQ ID NO: 15078 - protein, 9 aa, Artificial Sequence
  Description of Artificial Sequence: Synthetic peptide
YIRPEQPVC

SEQ ID NO: 15079 - protein, 9 aa, Artificial Sequence
  Description of Artificial Sequence: Synthetic peptide
YKDRDICRL

SEQ ID NO: 15080 - protein, 9 aa, Artificial Sequence
  Description of Artificial Sequence: Synthetic peptide
YKEHEAVQF

SEQ ID NO: 15081 - protein, 9 aa, Artificial Sequence
  Description of Artificial Sequence: Synthetic peptide
YKFYPGLPT

SEQ ID NO: 15082 - protein, 9 aa, Artificial Sequence
  Description of Artificial Sequence: Synthetic peptide
YKGMEKNAG

SEQ ID NO: 15083 - protein, 9 aa, Artificial Sequence
  Description of Artificial Sequence: Synthetic peptide
YKGMEKNRV

SEQ ID NO: 15084 - protein, 9 aa, Artificial Sequence
  Description of Artificial Sequence: Synthetic peptide
YKGMEKTPV

SEQ ID NO: 15085 - protein, 9 aa, Artificial Sequence
  Description of Artificial Sequence: Synthetic peptide
YKMCDHDDC

SEQ ID NO: 15086 - protein, 9 aa, Artificial Sequence
  Description of Artificial Sequence: Synthetic peptide
YKPCMTIDV

SEQ ID NO: 15087 - protein, 9 aa, Artificial Sequence
  Description of Artificial Sequence: Synthetic peptide
YKQHEGEQF

SEQ ID NO: 15088 - protein, 9 aa, Artificial Sequence
  Description of Artificial Sequence: Synthetic peptide
YPHCRLLGP

SEQ ID NO: 15089 - protein, 9 aa, Artificial Sequence
  Description of Artificial Sequence: Synthetic peptide
YPHMDCSEE

SEQ ID NO: 15090 - protein, 9 aa, Artificial Sequence
  Description of Artificial Sequence: Synthetic peptide
YRDCEQMEV

SEQ ID NO: 15091 - protein, 9 aa, Artificial Sequence
  Description of Artificial Sequence: Synthetic peptide
YRDCRQFNR

SEQ ID NO: 15092 - protein, 9 aa, Artificial Sequence
  Description of Artificial Sequence: Synthetic peptide
YRVLPRIKD

SEQ ID NO: 15093 - protein, 9 aa, Artificial Sequence
  Description of Artificial Sequence: Synthetic peptide
YSDAKNMSI

SEQ ID NO: 15094 - protein, 9 aa, Artificial Sequence
  Description of Artificial Sequence: Synthetic peptide
YSDGKNMSI

SEQ ID NO: 15095 - protein, 9 aa, Artificial Sequence
  Description of Artificial Sequence: Synthetic peptide
YSDHQNMSI

SEQ ID NO: 15096 - protein, 9 aa, Artificial Sequence
  Description of Artificial Sequence: Synthetic peptide
YSDPKDMSI

SEQ ID NO: 15097 - protein, 9 aa, Artificial Sequence
  Description of Artificial Sequence: Synthetic peptide
YSDPKNISM

SEQ ID NO: 15098 - protein, 9 aa, Artificial Sequence
  Description of Artificial Sequence: Synthetic peptide
YSDPKNMFI

SEQ ID NO: 15099 - protein, 9 aa, Artificial Sequence
  Description of Artificial Sequence: Synthetic peptide
YSDPKNMPI

SEQ ID NO: 15100 - protein, 9 aa, Artificial Sequence
  Description of Artificial Sequence: Synthetic peptide
YSDPKNMSV

SEQ ID NO: 15101 - protein, 9 aa, Artificial Sequence
  Description of Artificial Sequence: Synthetic peptide
YSDPKNMTL

SEQ ID NO: 15102 - protein, 9 aa, Artificial Sequence
  Description of Artificial Sequence: Synthetic peptide
YSDPKNMTT

SEQ ID NO: 15103 - protein, 9 aa, Artificial Sequence
  Description of Artificial Sequence: Synthetic peptide
YSDPKNMYI

SEQ ID NO: 15104 - protein, 9 aa, Artificial Sequence
  Description of Artificial Sequence: Synthetic peptide
YSDPKTMSI

SEQ ID NO: 15105 - protein, 9 aa, Artificial Sequence
  Description of Artificial Sequence: Synthetic peptide
YSDTKKMSI

SEQ ID NO: 15106 - protein, 9 aa, Artificial Sequence
  Description of Artificial Sequence: Synthetic peptide
YSGPKNMSI

SEQ ID NO: 15107 - protein, 9 aa, Artificial Sequence
  Description of Artificial Sequence: Synthetic peptide
YSHPKHMSI

SEQ ID NO: 15108 - protein, 9 aa, Artificial Sequence
  Description of Artificial Sequence: Synthetic peptide
YSYPKNMTI

SEQ ID NO: 15109 - protein, 9 aa, Artificial Sequence
  Description of Artificial Sequence: Synthetic peptide
YVDPYEMYG

SEQ ID NO: 15110 - protein, 9 aa, Artificial Sequence
  Description of Artificial Sequence: Synthetic peptide
YVFGQKDEM

SEQ ID NO: 15111 - protein, 9 aa, Artificial Sequence
  Description of Artificial Sequence: Synthetic peptide
YVIEQKDEM

SEQ ID NO: 15112 - protein, 9 aa, Artificial Sequence
  Description of Artificial Sequence: Synthetic peptide
YVIGQKDEV

SEQ ID NO: 15113 - protein, 9 aa, Artificial Sequence
  Description of Artificial Sequence: Synthetic peptide
YVLDSWRTS

SEQ ID NO: 15114 - protein, 9 aa, Artificial Sequence
  Description of Artificial Sequence: Synthetic peptide
YWECGHWPN

SEQ ID NO: 15115 - protein, 9 aa, Artificial Sequence
  Description of Artificial Sequence: Synthetic peptide
YWGCPDQVR

SEQ ID NO: 15116 - protein, 9 aa, Artificial Sequence
  Description of Artificial Sequence: Synthetic peptide
YYNHKIFEP

SEQ ID NO: 15117 - protein, 9 aa, Artificial Sequence
  Description of Artificial Sequence: Synthetic peptide
YYNPKIVEP

SEQ ID NO: 15118 - protein, 9 aa, Artificial Sequence
  Description of Artificial Sequence: Synthetic peptide
ADIDQIMCQ

SEQ ID NO: 15119 - protein, 9 aa, Artificial Sequence
  Description of Artificial Sequence: Synthetic peptide
ADIDQIVCQ

SEQ ID NO: 15120 - protein, 9 aa, Artificial Sequence
  Description of Artificial Sequence: Synthetic peptide
ADIDQVMCQ

SEQ ID NO: 15121 - protein, 9 aa, Artificial Sequence
  Description of Artificial Sequence: Synthetic peptide
AHKYDWEYL

SEQ ID NO: 15122 - protein, 9 aa, Artificial Sequence
  Description of Artificial Sequence: Synthetic peptide
ARSDWRCMC

SEQ ID NO: 15123 - protein, 9 aa, Artificial Sequence
  Description of Artificial Sequence: Synthetic peptide
AWCEGNCLE

SEQ ID NO: 15124 - protein, 9 aa, Artificial Sequence
  Description of Artificial Sequence: Synthetic peptide
CCCIMSVMC

SEQ ID NO: 15125 - protein, 9 aa, Artificial Sequence
  Description of Artificial Sequence: Synthetic peptide
CCCIMSVMG

SEQ ID NO: 15126 - protein, 9 aa, Artificial Sequence
  Description of Artificial Sequence: Synthetic peptide
CSRIMALSN

SEQ ID NO: 15127 - protein, 9 aa, Artificial Sequence
  Description of Artificial Sequence: Synthetic peptide
DNRTEGYFT

SEQ ID NO: 15128 - protein, 9 aa, Artificial Sequence
  Description of Artificial Sequence: Synthetic peptide
ECHLLSDYD

SEQ ID NO: 15129 - protein, 9 aa, Artificial Sequence
  Description of Artificial Sequence: Synthetic peptide
EDWHGWNEH

SEQ ID NO: 15130 - protein, 9 aa, Artificial Sequence
  Description of Artificial Sequence: Synthetic peptide
ELYMQMHWP

SEQ ID NO: 15131 - protein, 9 aa, Artificial Sequence
  Description of Artificial Sequence: Synthetic peptide
ENRLRLAHE

SEQ ID NO: 15132 - protein, 9 aa, Artificial Sequence
  Description of Artificial Sequence: Synthetic peptide
EQTMFNSPP

SEQ ID NO: 15133 - protein, 9 aa, Artificial Sequence
  Description of Artificial Sequence: Synthetic peptide
FAMVVTTEY

SEQ ID NO: 15134 - protein, 9 aa, Artificial Sequence
  Description of Artificial Sequence: Synthetic peptide
FFPHDGTIV

SEQ ID NO: 15135 - protein, 9 aa, Artificial Sequence
  Description of Artificial Sequence: Synthetic peptide
FYQMFHASG

SEQ ID NO: 15136 - protein, 9 aa, Artificial Sequence
  Description of Artificial Sequence: Synthetic peptide
GFPPRWKIP

SEQ ID NO: 15137 - protein, 9 aa, Artificial Sequence
  Description of Artificial Sequence: Synthetic peptide
GHCCSNGPT

SEQ ID NO: 15138 - protein, 9 aa, Artificial Sequence
  Description of Artificial Sequence: Synthetic peptide
GKQQCPAQT

SEQ ID NO: 15139 - protein, 9 aa, Artificial Sequence
  Description of Artificial Sequence: Synthetic peptide
GKQQCPTQT

SEQ ID NO: 15140 - protein, 9 aa, Artificial Sequence
  Description of Artificial Sequence: Synthetic peptide
GNRTEGYFT

SEQ ID NO: 15141 - protein, 9 aa, Artificial Sequence
  Description of Artificial Sequence: Synthetic peptide
HDCALYGRF

SEQ ID NO: 15142 - protein, 9 aa, Artificial Sequence
  Description of Artificial Sequence: Synthetic peptide
HLNPMTGSN

SEQ ID NO: 15143 - protein, 9 aa, Artificial Sequence
  Description of Artificial Sequence: Synthetic peptide
HNVMCDACC

SEQ ID NO: 15144 - protein, 9 aa, Artificial Sequence
  Description of Artificial Sequence: Synthetic peptide
ICKYPMIPH

SEQ ID NO: 15145 - protein, 9 aa, Artificial Sequence
  Description of Artificial Sequence: Synthetic peptide
ICKYPMISH

SEQ ID NO: 15146 - protein, 9 aa, Artificial Sequence
  Description of Artificial Sequence: Synthetic peptide
ICMYPMIPH

SEQ ID NO: 15147 - protein, 9 aa, Artificial Sequence
  Description of Artificial Sequence: Synthetic peptide
IDEFWYGPF

SEQ ID NO: 15148 - protein, 9 aa, Artificial Sequence
  Description of Artificial Sequence: Synthetic peptide
IDPRRNNDL

SEQ ID NO: 15149 - protein, 9 aa, Artificial Sequence
  Description of Artificial Sequence: Synthetic peptide
KINPSMPMD

SEQ ID NO: 15150 - protein, 9 aa, Artificial Sequence
  Description of Artificial Sequence: Synthetic peptide
KPDTSVGIG

SEQ ID NO: 15151 - protein, 9 aa, Artificial Sequence
  Description of Artificial Sequence: Synthetic peptide
KPDTSVGIV

SEQ ID NO: 15152 - protein, 9 aa, Artificial Sequence
  Description of Artificial Sequence: Synthetic peptide
KWPCHWHHE

SEQ ID NO: 15153 - protein, 9 aa, Artificial Sequence
  Description of Artificial Sequence: Synthetic peptide
KWPCHWHHG

SEQ ID NO: 15154 - protein, 9 aa, Artificial Sequence
  Description of Artificial Sequence: Synthetic peptide
LCINKYFNY

SEQ ID NO: 15155 - protein, 9 aa, Artificial Sequence
  Description of Artificial Sequence: Synthetic peptide
LEPKMKLAD

SEQ ID NO: 15156 - protein, 9 aa, Artificial Sequence
  Description of Artificial Sequence: Synthetic peptide
LEPKMKLAE

SEQ ID NO: 15157 - protein, 9 aa, Artificial Sequence
  Description of Artificial Sequence: Synthetic peptide
LVCEVACKD

SEQ ID NO: 15158 - protein, 9 aa, Artificial Sequence
  Description of Artificial Sequence: Synthetic peptide
MFTQNAGKI

SEQ ID NO: 15159 - protein, 9 aa, Artificial Sequence
  Description of Artificial Sequence: Synthetic peptide
MSCPKFHIV

SEQ ID NO: 15160 - protein, 9 aa, Artificial Sequence
  Description of Artificial Sequence: Synthetic peptide
NEDSLWNMH

SEQ ID NO: 15161 - protein, 9 aa, Artificial Sequence
  Description of Artificial Sequence: Synthetic peptide
NEDSPWNMH

SEQ ID NO: 15162 - protein, 9 aa, Artificial Sequence
  Description of Artificial Sequence: Synthetic peptide
NEDSPWSMH

SEQ ID NO: 15163 - protein, 9 aa, Artificial Sequence
  Description of Artificial Sequence: Synthetic peptide
NNRCKDQTE

SEQ ID NO: 15164 - protein, 9 aa, Artificial Sequence
  Description of Artificial Sequence: Synthetic peptide
PFTQHVAYI

SEQ ID NO: 15165 - protein, 9 aa, Artificial Sequence
  Description of Artificial Sequence: Synthetic peptide
PFTQHVAYS

SEQ ID NO: 15166 - protein, 9 aa, Artificial Sequence
  Description of Artificial Sequence: Synthetic peptide
PQQFAWNND

SEQ ID NO: 15167 - protein, 9 aa, Artificial Sequence
  Description of Artificial Sequence: Synthetic peptide
PTAIQAYMR

SEQ ID NO: 15168 - protein, 9 aa, Artificial Sequence
  Description of Artificial Sequence: Synthetic peptide
QHVSTEPPY

SEQ ID NO: 15169 - protein, 9 aa, Artificial Sequence
  Description of Artificial Sequence: Synthetic peptide
QIADGWGWE

SEQ ID NO: 15170 - protein, 9 aa, Artificial Sequence
  Description of Artificial Sequence: Synthetic peptide
QMCATMNHE

SEQ ID NO: 15171 - protein, 9 aa, Artificial Sequence
  Description of Artificial Sequence: Synthetic peptide
QMQHCMDYL

SEQ ID NO: 15172 - protein, 9 aa, Artificial Sequence
  Description of Artificial Sequence: Synthetic peptide
QVGWKECVM

SEQ ID NO: 15173 - protein, 9 aa, Artificial Sequence
  Description of Artificial Sequence: Synthetic peptide
RCQQFHGQI

SEQ ID NO: 15174 - protein, 9 aa, Artificial Sequence
  Description of Artificial Sequence: Synthetic peptide
RDINIDPCC

SEQ ID NO: 15175 - protein, 9 aa, Artificial Sequence
  Description of Artificial Sequence: Synthetic peptide
SAMVVTTEY

SEQ ID NO: 15176 - protein, 9 aa, Artificial Sequence
  Description of Artificial Sequence: Synthetic peptide
SFTQHVAYS

SEQ ID NO: 15177 - protein, 9 aa, Artificial Sequence
  Description of Artificial Sequence: Synthetic peptide
SKQQCPAQT

SEQ ID NO: 15178 - protein, 9 aa, Artificial Sequence
  Description of Artificial Sequence: Synthetic peptide
SNRTEGYFT

SEQ ID NO: 15179 - protein, 9 aa, Artificial Sequence
  Description of Artificial Sequence: Synthetic peptide
TDIDQIMCQ

SEQ ID NO: 15180 - protein, 9 aa, Artificial Sequence
  Description of Artificial Sequence: Synthetic peptide
TDRHDGVFA

SEQ ID NO: 15181 - protein, 9 aa, Artificial Sequence
  Description of Artificial Sequence: Synthetic peptide
TEYQNARTM

SEQ ID NO: 15182 - protein, 9 aa, Artificial Sequence
  Description of Artificial Sequence: Synthetic peptide
TITCEADNW

SEQ ID NO: 15183 - protein, 9 aa, Artificial Sequence
  Description of Artificial Sequence: Synthetic peptide
VFRNRWLEW

SEQ ID NO: 15184 - protein, 9 aa, Artificial Sequence
  Description of Artificial Sequence: Synthetic peptide
VIEVEQACT

SEQ ID NO: 15185 - protein, 9 aa, Artificial Sequence
  Description of Artificial Sequence: Synthetic peptide
VIKVEQACT

SEQ ID NO: 15186 - protein, 9 aa, Artificial Sequence
  Description of Artificial Sequence: Synthetic peptide
VPNPKNFGW

SEQ ID NO: 15187 - protein, 9 aa, Artificial Sequence
  Description of Artificial Sequence: Synthetic peptide
VSVVQNEAL

SEQ ID NO: 15188 - protein, 9 aa, Artificial Sequence
  Description of Artificial Sequence: Synthetic peptide
YCSIIGRSC

SEQ ID NO: 15189 - protein, 9 aa, Artificial Sequence
  Description of Artificial Sequence: Synthetic peptide
YFALCPPYT

SEQ ID NO: 15190 - protein, 9 aa, Artificial Sequence
  Description of Artificial Sequence: Synthetic peptide
YHAFYWQPY

SEQ ID NO: 15191 - protein, 9 aa, Artificial Sequence
  Description of Artificial Sequence: Synthetic peptide
AADHWVCQF

SEQ ID NO: 15192 - protein, 9 aa, Artificial Sequence
  Description of Artificial Sequence: Synthetic peptide
AAFQCAKQG

SEQ ID NO: 15193 - protein, 9 aa, Artificial Sequence
  Description of Artificial Sequence: Synthetic peptide
AAGMHWNAA

SEQ ID NO: 15194 - protein, 9 aa, Artificial Sequence
  Description of Artificial Sequence: Synthetic peptide
AAHMGHGWP

SEQ ID NO: 15195 - protein, 9 aa, Artificial Sequence
  Description of Artificial Sequence: Synthetic peptide
AANQEQECL

SEQ ID NO: 15196 - protein, 9 aa, Artificial Sequence
  Description of Artificial Sequence: Synthetic peptide
AAPCPDRFV

SEQ ID NO: 15197 - protein, 9 aa, Artificial Sequence
  Description of Artificial Sequence: Synthetic peptide
AASDSNRIH

SEQ ID NO: 15198 - protein, 9 aa, Artificial Sequence
  Description of Artificial Sequence: Synthetic peptide
ACCDKTRPE

SEQ ID NO: 15199 - protein, 9 aa, Artificial Sequence
  Description of Artificial Sequence: Synthetic peptide
ACMFWHRCG

SEQ ID NO: 15200 - protein, 9 aa, Artificial Sequence
  Description of Artificial Sequence: Synthetic peptide
ADGRGMDCP

SEQ ID NO: 15201 - protein, 9 aa, Artificial Sequence
  Description of Artificial Sequence: Synthetic peptide
AEENWRQCA

SEQ ID NO: 15202 - protein, 9 aa, Artificial Sequence
  Description of Artificial Sequence: Synthetic peptide
AEHDLKIVS

SEQ ID NO: 15203 - protein, 9 aa, Artificial Sequence
  Description of Artificial Sequence: Synthetic peptide
AEVEQYAEA

SEQ ID NO: 15204 - protein, 9 aa, Artificial Sequence
  Description of Artificial Sequence: Synthetic peptide
AFDPTFIDT

SEQ ID NO: 15205 - protein, 9 aa, Artificial Sequence
  Description of Artificial Sequence: Synthetic peptide
AFEAFDYDH

SEQ ID NO: 15206 - protein, 9 aa, Artificial Sequence
  Description of Artificial Sequence: Synthetic peptide
AFFLTPAEP

SEQ ID NO: 15207 - protein, 9 aa, Artificial Sequence
  Description of Artificial Sequence: Synthetic peptide
AFGNLEVHM

SEQ ID NO: 15208 - protein, 9 aa, Artificial Sequence
  Description of Artificial Sequence: Synthetic peptide
AGAPLIHQQ

SEQ ID NO: 15209 - protein, 9 aa, Artificial Sequence
  Description of Artificial Sequence: Synthetic peptide
AGAQQYWAD

SEQ ID NO: 15210 - protein, 9 aa, Artificial Sequence
  Description of Artificial Sequence: Synthetic peptide
AGECQLLMT

SEQ ID NO: 15211 - protein, 9 aa, Artificial Sequence
  Description of Artificial Sequence: Synthetic peptide
AHNCNGHVP

SEQ ID NO: 15212 - protein, 9 aa, Artificial Sequence
  Description of Artificial Sequence: Synthetic peptide
AHNWPAMYT

SEQ ID NO: 15213 - protein, 9 aa, Artificial Sequence
  Description of Artificial Sequence: Synthetic peptide
AHNYCGYYV

SEQ ID NO: 15214 - protein, 9 aa, Artificial Sequence
  Description of Artificial Sequence: Synthetic peptide
AHQPDQYCK

SEQ ID NO: 15215 - protein, 9 aa, Artificial Sequence
  Description of Artificial Sequence: Synthetic peptide
AIAHCVQIE

SEQ ID NO: 15216 - protein, 9 aa, Artificial Sequence
  Description of Artificial Sequence: Synthetic peptide
AIEGLTGRD

SEQ ID NO: 15217 - protein, 9 aa, Artificial Sequence
  Description of Artificial Sequence: Synthetic peptide
AIEYMNMGF

SEQ ID NO: 15218 - protein, 9 aa, Artificial Sequence
  Description of Artificial Sequence: Synthetic peptide
AIKDMRLAL

SEQ ID NO: 15219 - protein, 9 aa, Artificial Sequence
  Description of Artificial Sequence: Synthetic peptide
AISSHWQWP

SEQ ID NO: 15220 - protein, 9 aa, Artificial Sequence
  Description of Artificial Sequence: Synthetic peptide
AKNEECDCN

SEQ ID NO: 15221 - protein, 9 aa, Artificial Sequence
  Description of Artificial Sequence: Synthetic peptide
AKVEMEEWN

SEQ ID NO: 15222 - protein, 9 aa, Artificial Sequence
  Description of Artificial Sequence: Synthetic peptide
ALAWQMRAQ

SEQ ID NO: 15223 - protein, 9 aa, Artificial Sequence
  Description of Artificial Sequence: Synthetic peptide
AMNDELKMQ

SEQ ID NO: 15224 - protein, 9 aa, Artificial Sequence
  Description of Artificial Sequence: Synthetic peptide
AMVIIYTDF

SEQ ID NO: 15225 - protein, 9 aa, Artificial Sequence
  Description of Artificial Sequence: Synthetic peptide
AMVLMFLYQ

SEQ ID NO: 15226 - protein, 9 aa, Artificial Sequence
  Description of Artificial Sequence: Synthetic peptide
ANNQHRARA

SEQ ID NO: 15227 - protein, 9 aa, Artificial Sequence
  Description of Artificial Sequence: Synthetic peptide
APFMSEDCS

SEQ ID NO: 15228 - protein, 9 aa, Artificial Sequence
  Description of Artificial Sequence: Synthetic peptide
APLMTAFDP

SEQ ID NO: 15229 - protein, 9 aa, Artificial Sequence
  Description of Artificial Sequence: Synthetic peptide
APMSQWHTV

SEQ ID NO: 15230 - protein, 9 aa, Artificial Sequence
  Description of Artificial Sequence: Synthetic peptide
APNGYTMFY

SEQ ID NO: 15231 - protein, 9 aa, Artificial Sequence
  Description of Artificial Sequence: Synthetic peptide
APSAHHTHL

SEQ ID NO: 15232 - protein, 9 aa, Artificial Sequence
  Description of Artificial Sequence: Synthetic peptide
APYWDCFDR

SEQ ID NO: 15233 - protein, 9 aa, Artificial Sequence
  Description of Artificial Sequence: Synthetic peptide
AQGPMSVQL

SEQ ID NO: 15234 - protein, 9 aa, Artificial Sequence
  Description of Artificial Sequence: Synthetic peptide
ARPIFPWIV

SEQ ID NO: 15235 - protein, 9 aa, Artificial Sequence
  Description of Artificial Sequence: Synthetic peptide
ASTVVYAEM

SEQ ID NO: 15236 - protein, 9 aa, Artificial Sequence
  Description of Artificial Sequence: Synthetic peptide
ASWLADNLC

SEQ ID NO: 15237 - protein, 9 aa, Artificial Sequence
  Description of Artificial Sequence: Synthetic peptide
ATAFRHRIN

SEQ ID NO: 15238 - protein, 9 aa, Artificial Sequence
  Description of Artificial Sequence: Synthetic peptide
ATARLNWDA

SEQ ID NO: 15239 - protein, 9 aa, Artificial Sequence
  Description of Artificial Sequence: Synthetic peptide
ATDQYWFPT

SEQ ID NO: 15240 - protein, 9 aa, Artificial Sequence
  Description of Artificial Sequence: Synthetic peptide
ATEIKGSHS

SEQ ID NO: 15241 - protein, 9 aa, Artificial Sequence
  Description of Artificial Sequence: Synthetic peptide
ATESKWDQD

SEQ ID NO: 15242 - protein, 9 aa, Artificial Sequence
  Description of Artificial Sequence: Synthetic peptide
ATHIHYHGL

SEQ ID NO: 15243 - protein, 9 aa, Artificial Sequence
  Description of Artificial Sequence: Synthetic peptide
ATIEGDGVL

SEQ ID NO: 15244 - protein, 9 aa, Artificial Sequence
  Description of Artificial Sequence: Synthetic peptide
ATIRVITIG

SEQ ID NO: 15245 - protein, 9 aa, Artificial Sequence
  Description of Artificial Sequence: Synthetic peptide
ATNYVVRHT

SEQ ID NO: 15246 - protein, 9 aa, Artificial Sequence
  Description of Artificial Sequence: Synthetic peptide
ATSVMAWWD

SEQ ID NO: 15247 - protein, 9 aa, Artificial Sequence
  Description of Artificial Sequence: Synthetic peptide
ATWRICSSG

SEQ ID NO: 15248 - protein, 9 aa, Artificial Sequence
  Description of Artificial Sequence: Synthetic peptide
AVDFCQTYD

SEQ ID NO: 15249 - protein, 9 aa, Artificial Sequence
  Description of Artificial Sequence: Synthetic peptide
AVHAAYCYW

SEQ ID NO: 15250 - protein, 9 aa, Artificial Sequence
  Description of Artificial Sequence: Synthetic peptide
AVHAGPQAI

SEQ ID NO: 15251 - protein, 9 aa, Artificial Sequence
  Description of Artificial Sequence: Synthetic peptide
AVKPREAWM

SEQ ID NO: 15252 - protein, 9 aa, Artificial Sequence
  Description of Artificial Sequence: Synthetic peptide
AVMYNDTYD

SEQ ID NO: 15253 - protein, 9 aa, Artificial Sequence
  Description of Artificial Sequence: Synthetic peptide
AVPCQLSGA

SEQ ID NO: 15254 - protein, 9 aa, Artificial Sequence
  Description of Artificial Sequence: Synthetic peptide
AVQERFLQN

SEQ ID NO: 15255 - protein, 9 aa, Artificial Sequence
  Description of Artificial Sequence: Synthetic peptide
AVQSQTKNM

SEQ ID NO: 15256 - protein, 9 aa, Artificial Sequence
  Description of Artificial Sequence: Synthetic peptide
AVQWVEHEK

SEQ ID NO: 15257 - protein, 9 aa, Artificial Sequence
  Description of Artificial Sequence: Synthetic peptide
AVRCDPYRF

SEQ ID NO: 15258 - protein, 9 aa, Artificial Sequence
  Description of Artificial Sequence: Synthetic peptide
AVSTTVDWY

SEQ ID NO: 15259 - protein, 9 aa, Artificial Sequence
  Description of Artificial Sequence: Synthetic peptide
AVTTPDVYV

SEQ ID NO: 15260 - protein, 9 aa, Artificial Sequence
  Description of Artificial Sequence: Synthetic peptide
AVVAMNHHT

SEQ ID NO: 15261 - protein, 9 aa, Artificial Sequence
  Description of Artificial Sequence: Synthetic peptide
AWGEMNFSV

SEQ ID NO: 15262 - protein, 9 aa, Artificial Sequence
  Description of Artificial Sequence: Synthetic peptide
AWMPFIDSG

SEQ ID NO: 15263 - protein, 9 aa, Artificial Sequence
  Description of Artificial Sequence: Synthetic peptide
AWPDIMWAS

SEQ ID NO: 15264 - protein, 9 aa, Artificial Sequence
  Description of Artificial Sequence: Synthetic peptide
AWRGSKMSN

SEQ ID NO: 15265 - protein, 9 aa, Artificial Sequence
  Description of Artificial Sequence: Synthetic peptide
AWSVQGPYG

SEQ ID NO: 15266 - protein, 9 aa, Artificial Sequence
  Description of Artificial Sequence: Synthetic peptide
AWVDQEIPA

SEQ ID NO: 15267 - protein, 9 aa, Artificial Sequence
  Description of Artificial Sequence: Synthetic peptide
AWVGAEHAG

SEQ ID NO: 15268 - protein, 9 aa, Artificial Sequence
  Description of Artificial Sequence: Synthetic peptide
AYEHITDGR

SEQ ID NO: 15269 - protein, 9 aa, Artificial Sequence
  Description of Artificial Sequence: Synthetic peptide
AYTDTNAGY

SEQ ID NO: 15270 - protein, 9 aa, Artificial Sequence
  Description of Artificial Sequence: Synthetic peptide
AYVEKMRFD

SEQ ID NO: 15271 - protein, 9 aa, Artificial Sequence
  Description of Artificial Sequence: Synthetic peptide
AYYHEMAVP

SEQ ID NO: 15272 - protein, 9 aa, Artificial Sequence
  Description of Artificial Sequence: Synthetic peptide
CAAMQQGRD

SEQ ID NO: 15273 - protein, 9 aa, Artificial Sequence
  Description of Artificial Sequence: Synthetic peptide
CAEAIIKNF

SEQ ID NO: 15274 - protein, 9 aa, Artificial Sequence
  Description of Artificial Sequence: Synthetic peptide
CAHSNKGGA

SEQ ID NO: 15275 - protein, 9 aa, Artificial Sequence
  Description of Artificial Sequence: Synthetic peptide
CAMQPCLAV

SEQ ID NO: 15276 - protein, 9 aa, Artificial Sequence
  Description of Artificial Sequence: Synthetic peptide
CAVDKCMPH

SEQ ID NO: 15277 - protein, 9 aa, Artificial Sequence
  Description of Artificial Sequence: Synthetic peptide
CCSSFRDMV

SEQ ID NO: 15278 - protein, 9 aa, Artificial Sequence
  Description of Artificial Sequence: Synthetic peptide
CCWLANGGG

SEQ ID NO: 15279 - protein, 9 aa, Artificial Sequence
  Description of Artificial Sequence: Synthetic peptide
CDMLTRMQY

SEQ ID NO: 15280 - protein, 9 aa, Artificial Sequence
  Description of Artificial Sequence: Synthetic peptide
CDPWSWTQI

SEQ ID NO: 15281 - protein, 9 aa, Artificial Sequence
  Description of Artificial Sequence: Synthetic peptide
CDSTRFCCV

SEQ ID NO: 15282 - protein, 9 aa, Artificial Sequence
  Description of Artificial Sequence: Synthetic peptide
CEVARWLDY

SEQ ID NO: 15283 - protein, 9 aa, Artificial Sequence
  Description of Artificial Sequence: Synthetic peptide
CEWKHHAKF

SEQ ID NO: 15284 - protein, 9 aa, Artificial Sequence
  Description of Artificial Sequence: Synthetic peptide
CFHDPYEKQ

SEQ ID NO: 15285 - protein, 9 aa, Artificial Sequence
  Description of Artificial Sequence: Synthetic peptide
CGCYSPFLE

SEQ ID NO: 15286 - protein, 9 aa, Artificial Sequence
  Description of Artificial Sequence: Synthetic peptide
CGSDCNPAY

SEQ ID NO: 15287 - protein, 9 aa, Artificial Sequence
  Description of Artificial Sequence: Synthetic peptide
CGYQLFECF

SEQ ID NO: 15288 - protein, 9 aa, Artificial Sequence
  Description of Artificial Sequence: Synthetic peptide
CHNEDLCVW

SEQ ID NO: 15289 - protein, 9 aa, Artificial Sequence
  Description of Artificial Sequence: Synthetic peptide
CHTMQDIKD

SEQ ID NO: 15290 - protein, 9 aa, Artificial Sequence
  Description of Artificial Sequence: Synthetic peptide
CIGCPNEWC

SEQ ID NO: 15291 - protein, 9 aa, Artificial Sequence
  Description of Artificial Sequence: Synthetic peptide
CIQHIAESE

SEQ ID NO: 15292 - protein, 9 aa, Artificial Sequence
  Description of Artificial Sequence: Synthetic peptide
CISEMDDQR

SEQ ID NO: 15293 - protein, 9 aa, Artificial Sequence
  Description of Artificial Sequence: Synthetic peptide
CISFSNKWV

SEQ ID NO: 15294 - protein, 9 aa, Artificial Sequence
  Description of Artificial Sequence: Synthetic peptide
CKAAGPWTD

SEQ ID NO: 15295 - protein, 9 aa, Artificial Sequence
  Description of Artificial Sequence: Synthetic peptide
CKDSFASVW

SEQ ID NO: 15296 - protein, 9 aa, Artificial Sequence
  Description of Artificial Sequence: Synthetic peptide
CKPRLCEVP

SEQ ID NO: 15297 - protein, 9 aa, Artificial Sequence
  Description of Artificial Sequence: Synthetic peptide
CKYMIHPDC

SEQ ID NO: 15298 - protein, 9 aa, Artificial Sequence
  Description of Artificial Sequence: Synthetic peptide
CLYPLQLEW

SEQ ID NO: 15299 - protein, 9 aa, Artificial Sequence
  Description of Artificial Sequence: Synthetic peptide
CMDQYRIQF

SEQ ID NO: 15300 - protein, 9 aa, Artificial Sequence
  Description of Artificial Sequence: Synthetic peptide
CNACQAIEC

SEQ ID NO: 15301 - protein, 9 aa, Artificial Sequence
  Description of Artificial Sequence: Synthetic peptide
CNKAVQKTS

SEQ ID NO: 15302 - protein, 9 aa, Artificial Sequence
  Description of Artificial Sequence: Synthetic peptide
CNMPQITGA

SEQ ID NO: 15303 - protein, 9 aa, Artificial Sequence
  Description of Artificial Sequence: Synthetic peptide
CNPAKSKDG

SEQ ID NO: 15304 - protein, 9 aa, Artificial Sequence
  Description of Artificial Sequence: Synthetic peptide
CPCKGRRLG

SEQ ID NO: 15305 - protein, 9 aa, Artificial Sequence
  Description of Artificial Sequence: Synthetic peptide
CPCLYCNLA

SEQ ID NO: 15306 - protein, 9 aa, Artificial Sequence
  Description of Artificial Sequence: Synthetic peptide
CPEFGFICE

SEQ ID NO: 15307 - protein, 9 aa, Artificial Sequence
  Description of Artificial Sequence: Synthetic peptide
CQIPKKIGM

SEQ ID NO: 15308 - protein, 9 aa, Artificial Sequence
  Description of Artificial Sequence: Synthetic peptide
CQTAFYVGH

SEQ ID NO: 15309 - protein, 9 aa, Artificial Sequence
  Description of Artificial Sequence: Synthetic peptide
CRDRDMAHQ

SEQ ID NO: 15310 - protein, 9 aa, Artificial Sequence
  Description of Artificial Sequence: Synthetic peptide
CRLKKYYLK

SEQ ID NO: 15311 - protein, 9 aa, Artificial Sequence
  Description of Artificial Sequence: Synthetic peptide
CSPRKSHFC

SEQ ID NO: 15312 - protein, 9 aa, Artificial Sequence
  Description of Artificial Sequence: Synthetic peptide
CSRFMDSQW

SEQ ID NO: 15313 - protein, 9 aa, Artificial Sequence
  Description of Artificial Sequence: Synthetic peptide
CSVDKEDMD

SEQ ID NO: 15314 - protein, 9 aa, Artificial Sequence
  Description of Artificial Sequence: Synthetic peptide
CTKLSGLNA

SEQ ID NO: 15315 - protein, 9 aa, Artificial Sequence
  Description of Artificial Sequence: Synthetic peptide
CTKWQRTLG

SEQ ID NO: 15316 - protein, 9 aa, Artificial Sequence
  Description of Artificial Sequence: Synthetic peptide
CTLEFPSFL

SEQ ID NO: 15317 - protein, 9 aa, Artificial Sequence
  Description of Artificial Sequence: Synthetic peptide
CVGIMTNGK

SEQ ID NO: 15318 - protein, 9 aa, Artificial Sequence
  Description of Artificial Sequence: Synthetic peptide
CVGWAMGLG

SEQ ID NO: 15319 - protein, 9 aa, Artificial Sequence
  Description of Artificial Sequence: Synthetic peptide
CVHKQGENE

SEQ ID NO: 15320 - protein, 9 aa, Artificial Sequence
  Description of Artificial Sequence: Synthetic peptide
CVIQSNTHV

SEQ ID NO: 15321 - protein, 9 aa, Artificial Sequence
  Description of Artificial Sequence: Synthetic peptide
CVQPTYADH

SEQ ID NO: 15322 - protein, 9 aa, Artificial Sequence
  Description of Artificial Sequence: Synthetic peptide
CVTLEMQQG

SEQ ID NO: 15323 - protein, 9 aa, Artificial Sequence
  Description of Artificial Sequence: Synthetic peptide
CWAMDWGDT

SEQ ID NO: 15324 - protein, 9 aa, Artificial Sequence
  Description of Artificial Sequence: Synthetic peptide
CWQFTRCAS

SEQ ID NO: 15325 - protein, 9 aa, Artificial Sequence
  Description of Artificial Sequence: Synthetic peptide
CYYHTCLGG

SEQ ID NO: 15326 - protein, 9 aa, Artificial Sequence
  Description of Artificial Sequence: Synthetic peptide
DACFYGNFE

SEQ ID NO: 15327 - protein, 9 aa, Artificial Sequence
  Description of Artificial Sequence: Synthetic peptide
DAENCMLGW

SEQ ID NO: 15328 - protein, 9 aa, Artificial Sequence
  Description of Artificial Sequence: Synthetic peptide
DAGYCQSGV

SEQ ID NO: 15329 - protein, 9 aa, Artificial Sequence
  Description of Artificial Sequence: Synthetic peptide
DALSFQSSA

SEQ ID NO: 15330 - protein, 9 aa, Artificial Sequence
  Description of Artificial Sequence: Synthetic peptide
DANRKDLRG

SEQ ID NO: 15331 - protein, 9 aa, Artificial Sequence
  Description of Artificial Sequence: Synthetic peptide
DAQAGWRFN

SEQ ID NO: 15332 - protein, 9 aa, Artificial Sequence
  Description of Artificial Sequence: Synthetic peptide
DASSGFTWT

SEQ ID NO: 15333 - protein, 9 aa, Artificial Sequence
  Description of Artificial Sequence: Synthetic peptide
DATDWKCAW

SEQ ID NO: 15334 - protein, 9 aa, Artificial Sequence
  Description of Artificial Sequence: Synthetic peptide
DAVKAEVMW

SEQ ID NO: 15335 - protein, 9 aa, Artificial Sequence
  Description of Artificial Sequence: Synthetic peptide
DAWAKGYEW

SEQ ID NO: 15336 - protein, 9 aa, Artificial Sequence
  Description of Artificial Sequence: Synthetic peptide
DAWSANEAW

SEQ ID NO: 15337 - protein, 9 aa, Artificial Sequence
  Description of Artificial Sequence: Synthetic peptide
DAYWMQWWL

SEQ ID NO: 15338 - protein, 9 aa, Artificial Sequence
  Description of Artificial Sequence: Synthetic peptide
DCASFPAVD

SEQ ID NO: 15339 - protein, 9 aa, Artificial Sequence
  Description of Artificial Sequence: Synthetic peptide
DCQGWTAWD

SEQ ID NO: 15340 - protein, 9 aa, Artificial Sequence
  Description of Artificial Sequence: Synthetic peptide
DCVKAIQGW

SEQ ID NO: 15341 - protein, 9 aa, Artificial Sequence
  Description of Artificial Sequence: Synthetic peptide
DCVQMNVNV

SEQ ID NO: 15342 - protein, 9 aa, Artificial Sequence
  Description of Artificial Sequence: Synthetic peptide
DDCWQDRHV

SEQ ID NO: 15343 - protein, 9 aa, Artificial Sequence
  Description of Artificial Sequence: Synthetic peptide
DDVWKELDV

SEQ ID NO: 15344 - protein, 9 aa, Artificial Sequence
  Description of Artificial Sequence: Synthetic peptide
DEAYRMPLQ

SEQ ID NO: 15345 - protein, 9 aa, Artificial Sequence
  Description of Artificial Sequence: Synthetic peptide
DEGAAAKAI

SEQ ID NO: 15346 - protein, 9 aa, Artificial Sequence
  Description of Artificial Sequence: Synthetic peptide
DEGTSQTKT

SEQ ID NO: 15347 - protein, 9 aa, Artificial Sequence
  Description of Artificial Sequence: Synthetic peptide
DEHDGCKKS

SEQ ID NO: 15348 - protein, 9 aa, Artificial Sequence
  Description of Artificial Sequence: Synthetic peptide
DEMYVSSQF

SEQ ID NO: 15349 - protein, 9 aa, Artificial Sequence
  Description of Artificial Sequence: Synthetic peptide
DFAQRNSAC

SEQ ID NO: 15350 - protein, 9 aa, Artificial Sequence
  Description of Artificial Sequence: Synthetic peptide
DFGMKNYLA

SEQ ID NO: 15351 - protein, 9 aa, Artificial Sequence
  Description of Artificial Sequence: Synthetic peptide
DFKFEMTDR

SEQ ID NO: 15352 - protein, 9 aa, Artificial Sequence
  Description of Artificial Sequence: Synthetic peptide
DFLYSPIGI

SEQ ID NO: 15353 - protein, 9 aa, Artificial Sequence
  Description of Artificial Sequence: Synthetic peptide
DFSTPYQFG

SEQ ID NO: 15354 - protein, 9 aa, Artificial Sequence
  Description of Artificial Sequence: Synthetic peptide
DGCTSKDNQ

SEQ ID NO: 15355 - protein, 9 aa, Artificial Sequence
  Description of Artificial Sequence: Synthetic peptide
DGIHSLTGW

SEQ ID NO: 15356 - protein, 9 aa, Artificial Sequence
  Description of Artificial Sequence: Synthetic peptide
DGNQLCRLT

SEQ ID NO: 15357 - protein, 9 aa, Artificial Sequence
  Description of Artificial Sequence: Synthetic peptide
DGNYIRVDV

SEQ ID NO: 15358 - protein, 9 aa, Artificial Sequence
  Description of Artificial Sequence: Synthetic peptide
DGPCAQYRG

SEQ ID NO: 15359 - protein, 9 aa, Artificial Sequence
  Description of Artificial Sequence: Synthetic peptide
DGPMFATDI

SEQ ID NO: 15360 - protein, 9 aa, Artificial Sequence
  Description of Artificial Sequence: Synthetic peptide
DHHGAGYNR

SEQ ID NO: 15361 - protein, 9 aa, Artificial Sequence
  Description of Artificial Sequence: Synthetic peptide
DHISDYQHY

SEQ ID NO: 15362 - protein, 9 aa, Artificial Sequence
  Description of Artificial Sequence: Synthetic peptide
DIILRIRLK

SEQ ID NO: 15363 - protein, 9 aa, Artificial Sequence
  Description of Artificial Sequence: Synthetic peptide
DIKAILSKD

SEQ ID NO: 15364 - protein, 9 aa, Artificial Sequence
  Description of Artificial Sequence: Synthetic peptide
DILGVHLGS

SEQ ID NO: 15365 - protein, 9 aa, Artificial Sequence
  Description of Artificial Sequence: Synthetic peptide
DIQWQHEWM

SEQ ID NO: 15366 - protein, 9 aa, Artificial Sequence
  Description of Artificial Sequence: Synthetic peptide
DISCNLQFL

SEQ ID NO: 15367 - protein, 9 aa, Artificial Sequence
  Description of Artificial Sequence: Synthetic peptide
DKMLKTDLM

SEQ ID NO: 15368 - protein, 9 aa, Artificial Sequence
  Description of Artificial Sequence: Synthetic peptide
DKNSCCLNP

SEQ ID NO: 15369 - protein, 9 aa, Artificial Sequence
  Description of Artificial Sequence: Synthetic peptide
DKPVGRYGH

SEQ ID NO: 15370 - protein, 9 aa, Artificial Sequence
  Description of Artificial Sequence: Synthetic peptide
DKQFVEDNQ

SEQ ID NO: 15371 - protein, 9 aa, Artificial Sequence
  Description of Artificial Sequence: Synthetic peptide
DKRFQKSYS

SEQ ID NO: 15372 - protein, 9 aa, Artificial Sequence
  Description of Artificial Sequence: Synthetic peptide
DLMMHYEHK

SEQ ID NO: 15373 - protein, 9 aa, Artificial Sequence
  Description of Artificial Sequence: Synthetic peptide
DLQMSVNTG

SEQ ID NO: 15374 - protein, 9 aa, Artificial Sequence
  Description of Artificial Sequence: Synthetic peptide
DLSQMNKNY

SEQ ID NO: 15375 - protein, 9 aa, Artificial Sequence
  Description of Artificial Sequence: Synthetic peptide
DMGEVQVGI

SEQ ID NO: 15376 - protein, 9 aa, Artificial Sequence
  Description of Artificial Sequence: Synthetic peptide
DMNPDACVR

SEQ ID NO: 15377 - protein, 9 aa, Artificial Sequence
  Description of Artificial Sequence: Synthetic peptide
DMQVLNTDD

SEQ ID NO: 15378 - protein, 9 aa, Artificial Sequence
  Description of Artificial Sequence: Synthetic peptide
DMSEVDKVF

SEQ ID NO: 15379 - protein, 9 aa, Artificial Sequence
  Description of Artificial Sequence: Synthetic peptide
DMTIAAWAC

SEQ ID NO: 15380 - protein, 9 aa, Artificial Sequence
  Description of Artificial Sequence: Synthetic peptide
DMTKVTPFL

SEQ ID NO: 15381 - protein, 9 aa, Artificial Sequence
  Description of Artificial Sequence: Synthetic peptide
DNACVHCAE

SEQ ID NO: 15382 - protein, 9 aa, Artificial Sequence
  Description of Artificial Sequence: Synthetic peptide
DNCWLNDSA

SEQ ID NO: 15383 - protein, 9 aa, Artificial Sequence
  Description of Artificial Sequence: Synthetic peptide
DNEPNNRKS

SEQ ID NO: 15384 - protein, 9 aa, Artificial Sequence
  Description of Artificial Sequence: Synthetic peptide
DNISWSAWD

SEQ ID NO: 15385 - protein, 9 aa, Artificial Sequence
  Description of Artificial Sequence: Synthetic peptide
DPHQGIAGE

SEQ ID NO: 15386 - protein, 9 aa, Artificial Sequence
  Description of Artificial Sequence: Synthetic peptide
DPPIVQQWH

SEQ ID NO: 15387 - protein, 9 aa, Artificial Sequence
  Description of Artificial Sequence: Synthetic peptide
DQKWDTLKP

SEQ ID NO: 15388 - protein, 9 aa, Artificial Sequence
  Description of Artificial Sequence: Synthetic peptide
DQRRKTNIR

SEQ ID NO: 15389 - protein, 9 aa, Artificial Sequence
  Description of Artificial Sequence: Synthetic peptide
DQTTLRLMG

SEQ ID NO: 15390 - protein, 9 aa, Artificial Sequence
  Description of Artificial Sequence: Synthetic peptide
DQYWAWADS

SEQ ID NO: 15391 - protein, 9 aa, Artificial Sequence
  Description of Artificial Sequence: Synthetic peptide
DRLEDKESQ

SEQ ID NO: 15392 - protein, 9 aa, Artificial Sequence
  Description of Artificial Sequence: Synthetic peptide
DRMQFFVRN

SEQ ID NO: 15393 - protein, 9 aa, Artificial Sequence
  Description of Artificial Sequence: Synthetic peptide
DRMTCDTDR

SEQ ID NO: 15394 - protein, 9 aa, Artificial Sequence
  Description of Artificial Sequence: Synthetic peptide
DSEWTIDEH

SEQ ID NO: 15395 - protein, 9 aa, Artificial Sequence
  Description of Artificial Sequence: Synthetic peptide
DSGEVRTAS

SEQ ID NO: 15396 - protein, 9 aa, Artificial Sequence
  Description of Artificial Sequence: Synthetic peptide
DSKVFEWKC

SEQ ID NO: 15397 - protein, 9 aa, Artificial Sequence
  Description of Artificial Sequence: Synthetic peptide
DSQLTNACG

SEQ ID NO: 15398 - protein, 9 aa, Artificial Sequence
  Description of Artificial Sequence: Synthetic peptide
DTELVHNGW

SEQ ID NO: 15399 - protein, 9 aa, Artificial Sequence
  Description of Artificial Sequence: Synthetic peptide
DTLSSDAFL

SEQ ID NO: 15400 - protein, 9 aa, Artificial Sequence
  Description of Artificial Sequence: Synthetic peptide
DTMCYAWCK

SEQ ID NO: 15401 - protein, 9 aa, Artificial Sequence
  Description of Artificial Sequence: Synthetic peptide
DTQPWVPCG

SEQ ID NO: 15402 - protein, 9 aa, Artificial Sequence
  Description of Artificial Sequence: Synthetic peptide
DTRESGFWV

SEQ ID NO: 15403 - protein, 9 aa, Artificial Sequence
  Description of Artificial Sequence: Synthetic peptide
DTRIKMMLP

SEQ ID NO: 15404 - protein, 9 aa, Artificial Sequence
  Description of Artificial Sequence: Synthetic peptide
DVAKKNMDG

SEQ ID NO: 15405 - protein, 9 aa, Artificial Sequence
  Description of Artificial Sequence: Synthetic peptide
DVASFGHEI

SEQ ID NO: 15406 - protein, 9 aa, Artificial Sequence
  Description of Artificial Sequence: Synthetic peptide
DVCMLVDLP

SEQ ID NO: 15407 - protein, 9 aa, Artificial Sequence
  Description of Artificial Sequence: Synthetic peptide
DVCMSNELT

SEQ ID NO: 15408 - protein, 9 aa, Artificial Sequence
  Description of Artificial Sequence: Synthetic peptide
DVDCCEFCT

SEQ ID NO: 15409 - protein, 9 aa, Artificial Sequence
  Description of Artificial Sequence: Synthetic peptide
DVDFHWQGM

SEQ ID NO: 15410 - protein, 9 aa, Artificial Sequence
  Description of Artificial Sequence: Synthetic peptide
DVDHKWQYD

SEQ ID NO: 15411 - protein, 9 aa, Artificial Sequence
  Description of Artificial Sequence: Synthetic peptide
DVDPMPCFY

SEQ ID NO: 15412 - protein, 9 aa, Artificial Sequence
  Description of Artificial Sequence: Synthetic peptide
DVGIMDYWS

SEQ ID NO: 15413 - protein, 9 aa, Artificial Sequence
  Description of Artificial Sequence: Synthetic peptide
DVLQHQGAL

SEQ ID NO: 15414 - protein, 9 aa, Artificial Sequence
  Description of Artificial Sequence: Synthetic peptide
DVMMCFHWR

SEQ ID NO: 15415 - protein, 9 aa, Artificial Sequence
  Description of Artificial Sequence: Synthetic peptide
DVPDKPWYH

SEQ ID NO: 15416 - protein, 9 aa, Artificial Sequence
  Description of Artificial Sequence: Synthetic peptide
DVQLDQEWD

SEQ ID NO: 15417 - protein, 9 aa, Artificial Sequence
  Description of Artificial Sequence: Synthetic peptide
DVQRKTSGE

SEQ ID NO: 15418 - protein, 9 aa, Artificial Sequence
  Description of Artificial Sequence: Synthetic peptide
DVRFISEQG

SEQ ID NO: 15419 - protein, 9 aa, Artificial Sequence
  Description of Artificial Sequence: Synthetic peptide
DVRPPAVNE

SEQ ID NO: 15420 - protein, 9 aa, Artificial Sequence
  Description of Artificial Sequence: Synthetic peptide
DWPCDDFRK

SEQ ID NO: 15421 - protein, 9 aa, Artificial Sequence
  Description of Artificial Sequence: Synthetic peptide
DYLSFCWKD

SEQ ID NO: 15422 - protein, 9 aa, Artificial Sequence
  Description of Artificial Sequence: Synthetic peptide
DYNKDPKLV

SEQ ID NO: 15423 - protein, 9 aa, Artificial Sequence
  Description of Artificial Sequence: Synthetic peptide
EACMHRTVL

SEQ ID NO: 15424 - protein, 9 aa, Artificial Sequence
  Description of Artificial Sequence: Synthetic peptide
EADFVGPNS

SEQ ID NO: 15425 - protein, 9 aa, Artificial Sequence
  Description of Artificial Sequence: Synthetic peptide
EAEEHCTFW

SEQ ID NO: 15426 - protein, 9 aa, Artificial Sequence
  Description of Artificial Sequence: Synthetic peptide
EAEEYEPWK

SEQ ID NO: 15427 - protein, 9 aa, Artificial Sequence
  Description of Artificial Sequence: Synthetic peptide
EAFQEDAHP

SEQ ID NO: 15428 - protein, 9 aa, Artificial Sequence
  Description of Artificial Sequence: Synthetic peptide
EANSEYNVY

SEQ ID NO: 15429 - protein, 9 aa, Artificial Sequence
  Description of Artificial Sequence: Synthetic peptide
EATKSVETR

SEQ ID NO: 15430 - protein, 9 aa, Artificial Sequence
  Description of Artificial Sequence: Synthetic peptide
EAVTARVQH

SEQ ID NO: 15431 - protein, 9 aa, Artificial Sequence
  Description of Artificial Sequence: Synthetic peptide
ECDDYDCHY

SEQ ID NO: 15432 - protein, 9 aa, Artificial Sequence
  Description of Artificial Sequence: Synthetic peptide
ECTRSGKWG

SEQ ID NO: 15433 - protein, 9 aa, Artificial Sequence
  Description of Artificial Sequence: Synthetic peptide
EDHVMTKKD

SEQ ID NO: 15434 - protein, 9 aa, Artificial Sequence
  Description of Artificial Sequence: Synthetic peptide
EDIEKNTFE

SEQ ID NO: 15435 - protein, 9 aa, Artificial Sequence
  Description of Artificial Sequence: Synthetic peptide
EDKQAQTCQ

SEQ ID NO: 15436 - protein, 9 aa, Artificial Sequence
  Description of Artificial Sequence: Synthetic peptide
EDRSSCVWM

SEQ ID NO: 15437 - protein, 9 aa, Artificial Sequence
  Description of Artificial Sequence: Synthetic peptide
EEEPLSEMA

SEQ ID NO: 15438 - protein, 9 aa, Artificial Sequence
  Description of Artificial Sequence: Synthetic peptide
EEKMSVDRK

SEQ ID NO: 15439 - protein, 9 aa, Artificial Sequence
  Description of Artificial Sequence: Synthetic peptide
EETVSKRKK

SEQ ID NO: 15440 - protein, 9 aa, Artificial Sequence
  Description of Artificial Sequence: Synthetic peptide
EFIFHIHDQ

SEQ ID NO: 15441 - protein, 9 aa, Artificial Sequence
  Description of Artificial Sequence: Synthetic peptide
EFMQSFFIE

SEQ ID NO: 15442 - protein, 9 aa, Artificial Sequence
  Description of Artificial Sequence: Synthetic peptide
EGEDYMDIE

SEQ ID NO: 15443 - protein, 9 aa, Artificial Sequence
  Description of Artificial Sequence: Synthetic peptide
EGNQFWMFS

SEQ ID NO: 15444 - protein, 9 aa, Artificial Sequence
  Description of Artificial Sequence: Synthetic peptide
EGQTSNIWE

SEQ ID NO: 15445 - protein, 9 aa, Artificial Sequence
  Description of Artificial Sequence: Synthetic peptide
EGVTTLQSS

SEQ ID NO: 15446 - protein, 9 aa, Artificial Sequence
  Description of Artificial Sequence: Synthetic peptide
EHDTMEGFG

SEQ ID NO: 15447 - protein, 9 aa, Artificial Sequence
  Description of Artificial Sequence: Synthetic peptide
EHGQEEMIM

SEQ ID NO: 15448 - protein, 9 aa, Artificial Sequence
  Description of Artificial Sequence: Synthetic peptide
EHTAMWMHG

SEQ ID NO: 15449 - protein, 9 aa, Artificial Sequence
  Description of Artificial Sequence: Synthetic peptide
EICNKGQPD

SEQ ID NO: 15450 - protein, 9 aa, Artificial Sequence
  Description of Artificial Sequence: Synthetic peptide
EIEGVKANV

SEQ ID NO: 15451 - protein, 9 aa, Artificial Sequence
  Description of Artificial Sequence: Synthetic peptide
EIGGNPIYD

SEQ ID NO: 15452 - protein, 9 aa, Artificial Sequence
  Description of Artificial Sequence: Synthetic peptide
EIGYCMTCD

SEQ ID NO: 15453 - protein, 9 aa, Artificial Sequence
  Description of Artificial Sequence: Synthetic peptide
EIKLPMEQD

SEQ ID NO: 15454 - protein, 9 aa, Artificial Sequence
  Description of Artificial Sequence: Synthetic peptide
EIKPMVASH

SEQ ID NO: 15455 - protein, 9 aa, Artificial Sequence
  Description of Artificial Sequence: Synthetic peptide
EILNHTRLW

SEQ ID NO: 15456 - protein, 9 aa, Artificial Sequence
  Description of Artificial Sequence: Synthetic peptide
EIMDTKQCS

SEQ ID NO: 15457 - protein, 9 aa, Artificial Sequence
  Description of Artificial Sequence: Synthetic peptide
EIMTMEFQD

SEQ ID NO: 15458 - protein, 9 aa, Artificial Sequence
  Description of Artificial Sequence: Synthetic peptide
EINTPFFMS

SEQ ID NO: 15459 - protein, 9 aa, Artificial Sequence
  Description of Artificial Sequence: Synthetic peptide
EINVTQTHQ

SEQ ID NO: 15460 - protein, 9 aa, Artificial Sequence
  Description of Artificial Sequence: Synthetic peptide
EIQQMDDAP

SEQ ID NO: 15461 - protein, 9 aa, Artificial Sequence
  Description of Artificial Sequence: Synthetic peptide
EIVATYGQN

SEQ ID NO: 15462 - protein, 9 aa, Artificial Sequence
  Description of Artificial Sequence: Synthetic peptide
EIVELATQY

SEQ ID NO: 15463 - protein, 9 aa, Artificial Sequence
  Description of Artificial Sequence: Synthetic peptide
EKHAFSYSF

SEQ ID NO: 15464 - protein, 9 aa, Artificial Sequence
  Description of Artificial Sequence: Synthetic peptide
EKHMTMAGI

SEQ ID NO: 15465 - protein, 9 aa, Artificial Sequence
  Description of Artificial Sequence: Synthetic peptide
EKMAREWQT

SEQ ID NO: 15466 - protein, 9 aa, Artificial Sequence
  Description of Artificial Sequence: Synthetic peptide
EKMWPLNWG

SEQ ID NO: 15467 - protein, 9 aa, Artificial Sequence
  Description of Artificial Sequence: Synthetic peptide
EKVMQMHMQ

SEQ ID NO: 15468 - protein, 9 aa, Artificial Sequence
  Description of Artificial Sequence: Synthetic peptide
ELWKAMPPE

SEQ ID NO: 15469 - protein, 9 aa, Artificial Sequence
  Description of Artificial Sequence: Synthetic peptide
EMEINPTVE

SEQ ID NO: 15470 - protein, 9 aa, Artificial Sequence
  Description of Artificial Sequence: Synthetic peptide
EMHMTNTGW

SEQ ID NO: 15471 - protein, 9 aa, Artificial Sequence
  Description of Artificial Sequence: Synthetic peptide
EMTKYLNHA

SEQ ID NO: 15472 - protein, 9 aa, Artificial Sequence
  Description of Artificial Sequence: Synthetic peptide
ENHCWSAKE

SEQ ID NO: 15473 - protein, 9 aa, Artificial Sequence
  Description of Artificial Sequence: Synthetic peptide
ENNAERWMF

SEQ ID NO: 15474 - protein, 9 aa, Artificial Sequence
  Description of Artificial Sequence: Synthetic peptide
ENVQCELMQ

SEQ ID NO: 15475 - protein, 9 aa, Artificial Sequence
  Description of Artificial Sequence: Synthetic peptide
ENWTWKPEE

SEQ ID NO: 15476 - protein, 9 aa, Artificial Sequence
  Description of Artificial Sequence: Synthetic peptide
EPMYFIVCS

SEQ ID NO: 15477 - protein, 9 aa, Artificial Sequence
  Description of Artificial Sequence: Synthetic peptide
EPVNFNIQV

SEQ ID NO: 15478 - protein, 9 aa, Artificial Sequence
  Description of Artificial Sequence: Synthetic peptide
EQDGHNINE

SEQ ID NO: 15479 - protein, 9 aa, Artificial Sequence
  Description of Artificial Sequence: Synthetic peptide
EQEQFHICG

SEQ ID NO: 15480 - protein, 9 aa, Artificial Sequence
  Description of Artificial Sequence: Synthetic peptide
EQMLWNQIS

SEQ ID NO: 15481 - protein, 9 aa, Artificial Sequence
  Description of Artificial Sequence: Synthetic peptide
EQQWNSVNE

SEQ ID NO: 15482 - protein, 9 aa, Artificial Sequence
  Description of Artificial Sequence: Synthetic peptide
ERIMHLHES

SEQ ID NO: 15483 - protein, 9 aa, Artificial Sequence
  Description of Artificial Sequence: Synthetic peptide
ERMPLTCMS

SEQ ID NO: 15484 - protein, 9 aa, Artificial Sequence
  Description of Artificial Sequence: Synthetic peptide
ERSEHPCMF

SEQ ID NO: 15485 - protein, 9 aa, Artificial Sequence
  Description of Artificial Sequence: Synthetic peptide
ESCWPQVTG

SEQ ID NO: 15486 - protein, 9 aa, Artificial Sequence
  Description of Artificial Sequence: Synthetic peptide
ESEPIVYGW

SEQ ID NO: 15487 - protein, 9 aa, Artificial Sequence
  Description of Artificial Sequence: Synthetic peptide
ESHNTTEGH

SEQ ID NO: 15488 - protein, 9 aa, Artificial Sequence
  Description of Artificial Sequence: Synthetic peptide
ESLENPNDR

SEQ ID NO: 15489 - protein, 9 aa, Artificial Sequence
  Description of Artificial Sequence: Synthetic peptide
ETDNFSDCA

SEQ ID NO: 15490 - protein, 9 aa, Artificial Sequence
  Description of Artificial Sequence: Synthetic peptide
ETFVTCTGA

SEQ ID NO: 15491 - protein, 9 aa, Artificial Sequence
  Description of Artificial Sequence: Synthetic peptide
ETHHGQMFC

SEQ ID NO: 15492 - protein, 9 aa, Artificial Sequence
  Description of Artificial Sequence: Synthetic peptide
ETHMYERRE

SEQ ID NO: 15493 - protein, 9 aa, Artificial Sequence
  Description of Artificial Sequence: Synthetic peptide
ETHVVQNDN

SEQ ID NO: 15494 - protein, 9 aa, Artificial Sequence
  Description of Artificial Sequence: Synthetic peptide
ETILAPSGT

SEQ ID NO: 15495 - protein, 9 aa, Artificial Sequence
  Description of Artificial Sequence: Synthetic peptide
ETLMTVKKC

SEQ ID NO: 15496 - protein, 9 aa, Artificial Sequence
  Description of Artificial Sequence: Synthetic peptide
ETVRQGNPE

SEQ ID NO: 15497 - protein, 9 aa, Artificial Sequence
  Description of Artificial Sequence: Synthetic peptide
EVARKVQNE

SEQ ID NO: 15498 - protein, 9 aa, Artificial Sequence
  Description of Artificial Sequence: Synthetic peptide
EVAWMGRQN

SEQ ID NO: 15499 - protein, 9 aa, Artificial Sequence
  Description of Artificial Sequence: Synthetic peptide
EVDPWGHME

SEQ ID NO: 15500 - protein, 9 aa, Artificial Sequence
  Description of Artificial Sequence: Synthetic peptide
EVHVNWKDE

SEQ ID NO: 15501 - protein, 9 aa, Artificial Sequence
  Description of Artificial Sequence: Synthetic peptide
EVIDHGHME

SEQ ID NO: 15502 - protein, 9 aa, Artificial Sequence
  Description of Artificial Sequence: Synthetic peptide
EVLEWRHYQ

SEQ ID NO: 15503 - protein, 9 aa, Artificial Sequence
  Description of Artificial Sequence: Synthetic peptide
EVNISGEYV

SEQ ID NO: 15504 - protein, 9 aa, Artificial Sequence
  Description of Artificial Sequence: Synthetic peptide
EVTEPVKAI

SEQ ID NO: 15505 - protein, 9 aa, Artificial Sequence
  Description of Artificial Sequence: Synthetic peptide
EVTKHLVAC

SEQ ID NO: 15506 - protein, 9 aa, Artificial Sequence
  Description of Artificial Sequence: Synthetic peptide
EVWTPCFPI

SEQ ID NO: 15507 - protein, 9 aa, Artificial Sequence
  Description of Artificial Sequence: Synthetic peptide
EWCNEWCGP

SEQ ID NO: 15508 - protein, 9 aa, Artificial Sequence
  Description of Artificial Sequence: Synthetic peptide
EWDEWLISF

SEQ ID NO: 15509 - protein, 9 aa, Artificial Sequence
  Description of Artificial Sequence: Synthetic peptide
EWIHLYCCF

SEQ ID NO: 15510 - protein, 9 aa, Artificial Sequence
  Description of Artificial Sequence: Synthetic peptide
EWIPYAVGN

SEQ ID NO: 15511 - protein, 9 aa, Artificial Sequence
  Description of Artificial Sequence: Synthetic peptide
EYDYIFNHH

SEQ ID NO: 15512 - protein, 9 aa, Artificial Sequence
  Description of Artificial Sequence: Synthetic peptide
EYEADTITC

SEQ ID NO: 15513 - protein, 9 aa, Artificial Sequence
  Description of Artificial Sequence: Synthetic peptide
EYMGFRCDR

SEQ ID NO: 15514 - protein, 9 aa, Artificial Sequence
  Description of Artificial Sequence: Synthetic peptide
EYMSIMMNH

SEQ ID NO: 15515 - protein, 9 aa, Artificial Sequence
  Description of Artificial Sequence: Synthetic peptide
EYNPTNHIL

SEQ ID NO: 15516 - protein, 9 aa, Artificial Sequence
  Description of Artificial Sequence: Synthetic peptide
EYPAEFAQC

SEQ ID NO: 15517 - protein, 9 aa, Artificial Sequence
  Description of Artificial Sequence: Synthetic peptide
EYQQLARHW

SEQ ID NO: 15518 - protein, 9 aa, Artificial Sequence
  Description of Artificial Sequence: Synthetic peptide
FACMPNEFL

SEQ ID NO: 15519 - protein, 9 aa, Artificial Sequence
  Description of Artificial Sequence: Synthetic peptide
FAFDTQMVF

SEQ ID NO: 15520 - protein, 9 aa, Artificial Sequence
  Description of Artificial Sequence: Synthetic peptide
FAPPTHTLE

SEQ ID NO: 15521 - protein, 9 aa, Artificial Sequence
  Description of Artificial Sequence: Synthetic peptide
FCHNIFTEC

SEQ ID NO: 15522 - protein, 9 aa, Artificial Sequence
  Description of Artificial Sequence: Synthetic peptide
FDHSERQYH

SEQ ID NO: 15523 - protein, 9 aa, Artificial Sequence
  Description of Artificial Sequence: Synthetic peptide
FEKTRIAAW

SEQ ID NO: 15524 - protein, 9 aa, Artificial Sequence
  Description of Artificial Sequence: Synthetic peptide
FEMGQKSLS

SEQ ID NO: 15525 - protein, 9 aa, Artificial Sequence
  Description of Artificial Sequence: Synthetic peptide
FFEFRPSTK

SEQ ID NO: 15526 - protein, 9 aa, Artificial Sequence
  Description of Artificial Sequence: Synthetic peptide
FGMVMPMWA

SEQ ID NO: 15527 - protein, 9 aa, Artificial Sequence
  Description of Artificial Sequence: Synthetic peptide
FGPDSTHLC

SEQ ID NO: 15528 - protein, 9 aa, Artificial Sequence
  Description of Artificial Sequence: Synthetic peptide
FGQLLMTDG

SEQ ID NO: 15529 - protein, 9 aa, Artificial Sequence
  Description of Artificial Sequence: Synthetic peptide
FGWYYFWDP

SEQ ID NO: 15530 - protein, 9 aa, Artificial Sequence
  Description of Artificial Sequence: Synthetic peptide
FHSCSRMGL

SEQ ID NO: 15531 - protein, 9 aa, Artificial Sequence
  Description of Artificial Sequence: Synthetic peptide
FIDTACSHG

SEQ ID NO: 15532 - protein, 9 aa, Artificial Sequence
  Description of Artificial Sequence: Synthetic peptide
FIGDTYAGG

SEQ ID NO: 15533 - protein, 9 aa, Artificial Sequence
  Description of Artificial Sequence: Synthetic peptide
FIGMQSALE

SEQ ID NO: 15534 - protein, 9 aa, Artificial Sequence
  Description of Artificial Sequence: Synthetic peptide
FITMRQEGP

SEQ ID NO: 15535 - protein, 9 aa, Artificial Sequence
  Description of Artificial Sequence: Synthetic peptide
FIVILNNSD

SEQ ID NO: 15536 - protein, 9 aa, Artificial Sequence
  Description of Artificial Sequence: Synthetic peptide
FNPDTDQDH

SEQ ID NO: 15537 - protein, 9 aa, Artificial Sequence
  Description of Artificial Sequence: Synthetic peptide
FPFGTMHGS

SEQ ID NO: 15538 - protein, 9 aa, Artificial Sequence
  Description of Artificial Sequence: Synthetic peptide
FPFLTKSPK

SEQ ID NO: 15539 - protein, 9 aa, Artificial Sequence
  Description of Artificial Sequence: Synthetic peptide
FPQLPQNEA

SEQ ID NO: 15540 - protein, 9 aa, Artificial Sequence
  Description of Artificial Sequence: Synthetic peptide
FSMDKQQFQ

SEQ ID NO: 15541 - protein, 9 aa, Artificial Sequence
  Description of Artificial Sequence: Synthetic peptide
FTCEYTYAY

SEQ ID NO: 15542 - protein, 9 aa, Artificial Sequence
  Description of Artificial Sequence: Synthetic peptide
FTELSMVQD

SEQ ID NO: 15543 - protein, 9 aa, Artificial Sequence
  Description of Artificial Sequence: Synthetic peptide
FTKQADELP

SEQ ID NO: 15544 - protein, 9 aa, Artificial Sequence
  Description of Artificial Sequence: Synthetic peptide
FTNFEYSME

SEQ ID NO: 15545 - protein, 9 aa, Artificial Sequence
  Description of Artificial Sequence: Synthetic peptide
FTQGGEVYA

SEQ ID NO: 15546 - protein, 9 aa, Artificial Sequence
  Description of Artificial Sequence: Synthetic peptide
FTSWMDVQD

SEQ ID NO: 15547 - protein, 9 aa, Artificial Sequence
  Description of Artificial Sequence: Synthetic peptide
FTTQPSVAW

SEQ ID NO: 15548 - protein, 9 aa, Artificial Sequence
  Description of Artificial Sequence: Synthetic peptide
FVPQVWQIP

SEQ ID NO: 15549 - protein, 9 aa, Artificial Sequence
  Description of Artificial Sequence: Synthetic peptide
FVSSYYAIH

SEQ ID NO: 15550 - protein, 9 aa, Artificial Sequence
  Description of Artificial Sequence: Synthetic peptide
FVSTESVWN

SEQ ID NO: 15551 - protein, 9 aa, Artificial Sequence
  Description of Artificial Sequence: Synthetic peptide
FYIMMEKML

SEQ ID NO: 15552 - protein, 9 aa, Artificial Sequence
  Description of Artificial Sequence: Synthetic peptide
GACCKQIGE

SEQ ID NO: 15553 - protein, 9 aa, Artificial Sequence
  Description of Artificial Sequence: Synthetic peptide
GAKWQAQPD

SEQ ID NO: 15554 - protein, 9 aa, Artificial Sequence
  Description of Artificial Sequence: Synthetic peptide
GATQHECWC

SEQ ID NO: 15555 - protein, 9 aa, Artificial Sequence
  Description of Artificial Sequence: Synthetic peptide
GAYDTVWGW

SEQ ID NO: 15556 - protein, 9 aa, Artificial Sequence
  Description of Artificial Sequence: Synthetic peptide
GCATWHNLY

SEQ ID NO: 15557 - protein, 9 aa, Artificial Sequence
  Description of Artificial Sequence: Synthetic peptide
GCMLRSVTG

SEQ ID NO: 15558 - protein, 9 aa, Artificial Sequence
  Description of Artificial Sequence: Synthetic peptide
GCNLLSVSN

SEQ ID NO: 15559 - protein, 9 aa, Artificial Sequence
  Description of Artificial Sequence: Synthetic peptide
GDAFSCVFP

SEQ ID NO: 15560 - protein, 9 aa, Artificial Sequence
  Description of Artificial Sequence: Synthetic peptide
GDDPMFFEK

SEQ ID NO: 15561 - protein, 9 aa, Artificial Sequence
  Description of Artificial Sequence: Synthetic peptide
GEHTGMMLY

SEQ ID NO: 15562 - protein, 9 aa, Artificial Sequence
  Description of Artificial Sequence: Synthetic peptide
GFMAVVQSW

SEQ ID NO: 15563 - protein, 9 aa, Artificial Sequence
  Description of Artificial Sequence: Synthetic peptide
GGRCYFWED

SEQ ID NO: 15564 - protein, 9 aa, Artificial Sequence
  Description of Artificial Sequence: Synthetic peptide
GGRLYKPEW

SEQ ID NO: 15565 - protein, 9 aa, Artificial Sequence
  Description of Artificial Sequence: Synthetic peptide
GHASWAMWY

SEQ ID NO: 15566 - protein, 9 aa, Artificial Sequence
  Description of Artificial Sequence: Synthetic peptide
GHGHKWIYS

SEQ ID NO: 15567 - protein, 9 aa, Artificial Sequence
  Description of Artificial Sequence: Synthetic peptide
GHMYLLDME

SEQ ID NO: 15568 - protein, 9 aa, Artificial Sequence
  Description of Artificial Sequence: Synthetic peptide
GHTCPCKWD

SEQ ID NO: 15569 - protein, 9 aa, Artificial Sequence
  Description of Artificial Sequence: Synthetic peptide
GIDTDDVGH

SEQ ID NO: 15570 - protein, 9 aa, Artificial Sequence
  Description of Artificial Sequence: Synthetic peptide
GIGMFCVTN

SEQ ID NO: 15571 - protein, 9 aa, Artificial Sequence
  Description of Artificial Sequence: Synthetic peptide
GKARRCATW

SEQ ID NO: 15572 - protein, 9 aa, Artificial Sequence
  Description of Artificial Sequence: Synthetic peptide
GKDVKQCCD

SEQ ID NO: 15573 - protein, 9 aa, Artificial Sequence
  Description of Artificial Sequence: Synthetic peptide
GKLGLDCQD

SEQ ID NO: 15574 - protein, 9 aa, Artificial Sequence
  Description of Artificial Sequence: Synthetic peptide
GKVVDAHMG

SEQ ID NO: 15575 - protein, 9 aa, Artificial Sequence
  Description of Artificial Sequence: Synthetic peptide
GLQNKGYPT

SEQ ID NO: 15576 - protein, 9 aa, Artificial Sequence
  Description of Artificial Sequence: Synthetic peptide
GLSIEISTP

SEQ ID NO: 15577 - protein, 9 aa, Artificial Sequence
  Description of Artificial Sequence: Synthetic peptide
GLSLHKSDH

SEQ ID NO: 15578 - protein, 9 aa, Artificial Sequence
  Description of Artificial Sequence: Synthetic peptide
GMADMVHGP

SEQ ID NO: 15579 - protein, 9 aa, Artificial Sequence
  Description of Artificial Sequence: Synthetic peptide
GMASHSHYI

SEQ ID NO: 15580 - protein, 9 aa, Artificial Sequence
  Description of Artificial Sequence: Synthetic peptide
GMQTIEQFN

SEQ ID NO: 15581 - protein, 9 aa, Artificial Sequence
  Description of Artificial Sequence: Synthetic peptide
GNEFIECRQ

SEQ ID NO: 15582 - protein, 9 aa, Artificial Sequence
  Description of Artificial Sequence: Synthetic peptide
GNHWGWSIS

SEQ ID NO: 15583 - protein, 9 aa, Artificial Sequence
  Description of Artificial Sequence: Synthetic peptide
GPEMTVAQT

SEQ ID NO: 15584 - protein, 9 aa, Artificial Sequence
  Description of Artificial Sequence: Synthetic peptide
GQTPCSSWG

SEQ ID NO: 15585 - protein, 9 aa, Artificial Sequence
  Description of Artificial Sequence: Synthetic peptide
GQVDNMMAT

SEQ ID NO: 15586 - protein, 9 aa, Artificial Sequence
  Description of Artificial Sequence: Synthetic peptide
GRELEIEPQ

SEQ ID NO: 15587 - protein, 9 aa, Artificial Sequence
  Description of Artificial Sequence: Synthetic peptide
GSDRATGKE

SEQ ID NO: 15588 - protein, 9 aa, Artificial Sequence
  Description of Artificial Sequence: Synthetic peptide
GSEFCILNE

SEQ ID NO: 15589 - protein, 9 aa, Artificial Sequence
  Description of Artificial Sequence: Synthetic peptide
GSKPSSKQS

SEQ ID NO: 15590 - protein, 9 aa, Artificial Sequence
  Description of Artificial Sequence: Synthetic peptide
GSSHFNDLG

SEQ ID NO: 15591 - protein, 9 aa, Artificial Sequence
  Description of Artificial Sequence: Synthetic peptide
GTCHGPVLM

SEQ ID NO: 15592 - protein, 9 aa, Artificial Sequence
  Description of Artificial Sequence: Synthetic peptide
GTCQVQLHS

SEQ ID NO: 15593 - protein, 9 aa, Artificial Sequence
  Description of Artificial Sequence: Synthetic peptide
GTEIKTLHG

SEQ ID NO: 15594 - protein, 9 aa, Artificial Sequence
  Description of Artificial Sequence: Synthetic peptide
GTEVIGLNT

SEQ ID NO: 15595 - protein, 9 aa, Artificial Sequence
  Description of Artificial Sequence: Synthetic peptide
GVFLGYAQR

SEQ ID NO: 15596 - protein, 9 aa, Artificial Sequence
  Description of Artificial Sequence: Synthetic peptide
GVISDGKYA

SEQ ID NO: 15597 - protein, 9 aa, Artificial Sequence
  Description of Artificial Sequence: Synthetic peptide
GVKDFDVCT

SEQ ID NO: 15598 - protein, 9 aa, Artificial Sequence
  Description of Artificial Sequence: Synthetic peptide
GVMVNPCNM

SEQ ID NO: 15599 - protein, 9 aa, Artificial Sequence
  Description of Artificial Sequence: Synthetic peptide
GVSAEGKAQ

SEQ ID NO: 15600 - protein, 9 aa, Artificial Sequence
  Description of Artificial Sequence: Synthetic peptide
GVSGMQITG

SEQ ID NO: 15601 - protein, 9 aa, Artificial Sequence
  Description of Artificial Sequence: Synthetic peptide
GVTMNTECE

SEQ ID NO: 15602 - protein, 9 aa, Artificial Sequence
  Description of Artificial Sequence: Synthetic peptide
GVVATDCEI

SEQ ID NO: 15603 - protein, 9 aa, Artificial Sequence
  Description of Artificial Sequence: Synthetic peptide
GVYMESAVR

SEQ ID NO: 15604 - protein, 9 aa, Artificial Sequence
  Description of Artificial Sequence: Synthetic peptide
GWETPLVWF

SEQ ID NO: 15605 - protein, 9 aa, Artificial Sequence
  Description of Artificial Sequence: Synthetic peptide
GWWNHYLFW

SEQ ID NO: 15606 - protein, 9 aa, Artificial Sequence
  Description of Artificial Sequence: Synthetic peptide
GYIYHKMYT

SEQ ID NO: 15607 - protein, 9 aa, Artificial Sequence
  Description of Artificial Sequence: Synthetic peptide
HAAETEIHQ

SEQ ID NO: 15608 - protein, 9 aa, Artificial Sequence
  Description of Artificial Sequence: Synthetic peptide
HCDTHVNLE

SEQ ID NO: 15609 - protein, 9 aa, Artificial Sequence
  Description of Artificial Sequence: Synthetic peptide
HCKSGQQML

SEQ ID NO: 15610 - protein, 9 aa, Artificial Sequence
  Description of Artificial Sequence: Synthetic peptide
HCTCYDAIE

SEQ ID NO: 15611 - protein, 9 aa, Artificial Sequence
  Description of Artificial Sequence: Synthetic peptide
HDKWKWSDR

SEQ ID NO: 15612 - protein, 9 aa, Artificial Sequence
  Description of Artificial Sequence: Synthetic peptide
HENYYREGA

SEQ ID NO: 15613 - protein, 9 aa, Artificial Sequence
  Description of Artificial Sequence: Synthetic peptide
HFLQMEHGH

SEQ ID NO: 15614 - protein, 9 aa, Artificial Sequence
  Description of Artificial Sequence: Synthetic peptide
HFMYDMNFQ

SEQ ID NO: 15615 - protein, 9 aa, Artificial Sequence
  Description of Artificial Sequence: Synthetic peptide
HILKHVHTP

SEQ ID NO: 15616 - protein, 9 aa, Artificial Sequence
  Description of Artificial Sequence: Synthetic peptide
HISFHTIPG

SEQ ID NO: 15617 - protein, 9 aa, Artificial Sequence
  Description of Artificial Sequence: Synthetic peptide
HITGEYIAP

SEQ ID NO: 15618 - protein, 9 aa, Artificial Sequence
  Description of Artificial Sequence: Synthetic peptide
HKESSEGAT

SEQ ID NO: 15619 - protein, 9 aa, Artificial Sequence
  Description of Artificial Sequence: Synthetic peptide
HLNNCHWRR

SEQ ID NO: 15620 - protein, 9 aa, Artificial Sequence
  Description of Artificial Sequence: Synthetic peptide
HMGQMYWHM

SEQ ID NO: 15621 - protein, 9 aa, Artificial Sequence
  Description of Artificial Sequence: Synthetic peptide
HMVDINILA

SEQ ID NO: 15622 - protein, 9 aa, Artificial Sequence
  Description of Artificial Sequence: Synthetic peptide
HNGVMMHSH

SEQ ID NO: 15623 - protein, 9 aa, Artificial Sequence
  Description of Artificial Sequence: Synthetic peptide
HNKACITAL

SEQ ID NO: 15624 - protein, 9 aa, Artificial Sequence
  Description of Artificial Sequence: Synthetic peptide
HPNNFNRAH

SEQ ID NO: 15625 - protein, 9 aa, Artificial Sequence
  Description of Artificial Sequence: Synthetic peptide
HPVHYNMCS

SEQ ID NO: 15626 - protein, 9 aa, Artificial Sequence
  Description of Artificial Sequence: Synthetic peptide
HSCTMMGGD

SEQ ID NO: 15627 - protein, 9 aa, Artificial Sequence
  Description of Artificial Sequence: Synthetic peptide
HSMGIFSNL

SEQ ID NO: 15628 - protein, 9 aa, Artificial Sequence
  Description of Artificial Sequence: Synthetic peptide
HSMVQWNST

SEQ ID NO: 15629 - protein, 9 aa, Artificial Sequence
  Description of Artificial Sequence: Synthetic peptide
HVEMANAGK

SEQ ID NO: 15630 - protein, 9 aa, Artificial Sequence
  Description of Artificial Sequence: Synthetic peptide
HVIPHNRSE

SEQ ID NO: 15631 - protein, 9 aa, Artificial Sequence
  Description of Artificial Sequence: Synthetic peptide
HVMPWLCQW

SEQ ID NO: 15632 - protein, 9 aa, Artificial Sequence
  Description of Artificial Sequence: Synthetic peptide
HVMTLVDYD

SEQ ID NO: 15633 - protein, 9 aa, Artificial Sequence
  Description of Artificial Sequence: Synthetic peptide
HVNTEQKYY

SEQ ID NO: 15634 - protein, 9 aa, Artificial Sequence
  Description of Artificial Sequence: Synthetic peptide
HWNCNCRNA

SEQ ID NO: 15635 - protein, 9 aa, Artificial Sequence
  Description of Artificial Sequence: Synthetic peptide
HWPQRLNEH

SEQ ID NO: 15636 - protein, 9 aa, Artificial Sequence
  Description of Artificial Sequence: Synthetic peptide
HWSWFASFV

SEQ ID NO: 15637 - protein, 9 aa, Artificial Sequence
  Description of Artificial Sequence: Synthetic peptide
HWTNQDSNK

SEQ ID NO: 15638 - protein, 9 aa, Artificial Sequence
  Description of Artificial Sequence: Synthetic peptide
HYHQYTRLP

SEQ ID NO: 15639 - protein, 9 aa, Artificial Sequence
  Description of Artificial Sequence: Synthetic peptide
IADVIHSKW

SEQ ID NO: 15640 - protein, 9 aa, Artificial Sequence
  Description of Artificial Sequence: Synthetic peptide
IAETLIGVL

SEQ ID NO: 15641 - protein, 9 aa, Artificial Sequence
  Description of Artificial Sequence: Synthetic peptide
IAHGASAYL

SEQ ID NO: 15642 - protein, 9 aa, Artificial Sequence
  Description of Artificial Sequence: Synthetic peptide
IAYSLLANY

SEQ ID NO: 15643 - protein, 9 aa, Artificial Sequence
  Description of Artificial Sequence: Synthetic peptide
ICMFEEEQW

SEQ ID NO: 15644 - protein, 9 aa, Artificial Sequence
  Description of Artificial Sequence: Synthetic peptide
ICPPFQRQV

SEQ ID NO: 15645 - protein, 9 aa, Artificial Sequence
  Description of Artificial Sequence: Synthetic peptide
ICPYAEVSD

SEQ ID NO: 15646 - protein, 9 aa, Artificial Sequence
  Description of Artificial Sequence: Synthetic peptide
ICSNPWNKE

SEQ ID NO: 15647 - protein, 9 aa, Artificial Sequence
  Description of Artificial Sequence: Synthetic peptide
IDCQGKCDW

SEQ ID NO: 15648 - protein, 9 aa, Artificial Sequence
  Description of Artificial Sequence: Synthetic peptide
IEDDPLHAE

SEQ ID NO: 15649 - protein, 9 aa, Artificial Sequence
  Description of Artificial Sequence: Synthetic peptide
IEHRFMIAG

SEQ ID NO: 15650 - protein, 9 aa, Artificial Sequence
  Description of Artificial Sequence: Synthetic peptide
IEPIHNWKK

SEQ ID NO: 15651 - protein, 9 aa, Artificial Sequence
  Description of Artificial Sequence: Synthetic peptide
IESVTHLCD

SEQ ID NO: 15652 - protein, 9 aa, Artificial Sequence
  Description of Artificial Sequence: Synthetic peptide
IGELDEACD

SEQ ID NO: 15653 - protein, 9 aa, Artificial Sequence
  Description of Artificial Sequence: Synthetic peptide
IGFMDNTSC

SEQ ID NO: 15654 - protein, 9 aa, Artificial Sequence
  Description of Artificial Sequence: Synthetic peptide
IGIPIHMWD

SEQ ID NO: 15655 - protein, 9 aa, Artificial Sequence
  Description of Artificial Sequence: Synthetic peptide
IGQSIVTMQ

SEQ ID NO: 15656 - protein, 9 aa, Artificial Sequence
  Description of Artificial Sequence: Synthetic peptide
IHMFRMWPE

SEQ ID NO: 15657 - protein, 9 aa, Artificial Sequence
  Description of Artificial Sequence: Synthetic peptide
IHPQIAEGM

SEQ ID NO: 15658 - protein, 9 aa, Artificial Sequence
  Description of Artificial Sequence: Synthetic peptide
IIDVFPRHT

SEQ ID NO: 15659 - protein, 9 aa, Artificial Sequence
  Description of Artificial Sequence: Synthetic peptide
IIFFLCRDP

SEQ ID NO: 15660 - protein, 9 aa, Artificial Sequence
  Description of Artificial Sequence: Synthetic peptide
IKQPANDTD

SEQ ID NO: 15661 - protein, 9 aa, Artificial Sequence
  Description of Artificial Sequence: Synthetic peptide
IKYGMRHTN

SEQ ID NO: 15662 - protein, 9 aa, Artificial Sequence
  Description of Artificial Sequence: Synthetic peptide
ILVMVWLGQ

SEQ ID NO: 15663 - protein, 9 aa, Artificial Sequence
  Description of Artificial Sequence: Synthetic peptide
IMRWHYGMV

SEQ ID NO: 15664 - protein, 9 aa, Artificial Sequence
  Description of Artificial Sequence: Synthetic peptide
INASSCDYW

SEQ ID NO: 15665 - protein, 9 aa, Artificial Sequence
  Description of Artificial Sequence: Synthetic peptide
INRNYWDFI

SEQ ID NO: 15666 - protein, 9 aa, Artificial Sequence
  Description of Artificial Sequence: Synthetic peptide
INSELPVDV

SEQ ID NO: 15667 - protein, 9 aa, Artificial Sequence
  Description of Artificial Sequence: Synthetic peptide
INYSSVATV

SEQ ID NO: 15668 - protein, 9 aa, Artificial Sequence
  Description of Artificial Sequence: Synthetic peptide
IPQPTMMQD

SEQ ID NO: 15669 - protein, 9 aa, Artificial Sequence
  Description of Artificial Sequence: Synthetic peptide
IQEYIQDAD

SEQ ID NO: 15670 - protein, 9 aa, Artificial Sequence
  Description of Artificial Sequence: Synthetic peptide
IRESWIGQF

SEQ ID NO: 15671 - protein, 9 aa, Artificial Sequence
  Description of Artificial Sequence: Synthetic peptide
IRYVTAYYK

SEQ ID NO: 15672 - protein, 9 aa, Artificial Sequence
  Description of Artificial Sequence: Synthetic peptide
ISEIMPSNP

SEQ ID NO: 15673 - protein, 9 aa, Artificial Sequence
  Description of Artificial Sequence: Synthetic peptide
ISMYQSTQV

SEQ ID NO: 15674 - protein, 9 aa, Artificial Sequence
  Description of Artificial Sequence: Synthetic peptide
ISNWRCSQK

SEQ ID NO: 15675 - protein, 9 aa, Artificial Sequence
  Description of Artificial Sequence: Synthetic peptide
ITCSNEKDF

SEQ ID NO: 15676 - protein, 9 aa, Artificial Sequence
  Description of Artificial Sequence: Synthetic peptide
ITENRGYYH

SEQ ID NO: 15677 - protein, 9 aa, Artificial Sequence
  Description of Artificial Sequence: Synthetic peptide
ITSNELPME

SEQ ID NO: 15678 - protein, 9 aa, Artificial Sequence
  Description of Artificial Sequence: Synthetic peptide
IVEFMHCDD

SEQ ID NO: 15679 - protein, 9 aa, Artificial Sequence
  Description of Artificial Sequence: Synthetic peptide
IVEMYAKNN

SEQ ID NO: 15680 - protein, 9 aa, Artificial Sequence
  Description of Artificial Sequence: Synthetic peptide
IVHDEPRHN

SEQ ID NO: 15681 - protein, 9 aa, Artificial Sequence
  Description of Artificial Sequence: Synthetic peptide
IVHDIWGQA

SEQ ID NO: 15682 - protein, 9 aa, Artificial Sequence
  Description of Artificial Sequence: Synthetic peptide
IVKYRAYPG

SEQ ID NO: 15683 - protein, 9 aa, Artificial Sequence
  Description of Artificial Sequence: Synthetic peptide
IVNKNCSQP

SEQ ID NO: 15684 - protein, 9 aa, Artificial Sequence
  Description of Artificial Sequence: Synthetic peptide
IVPFGCGGF

SEQ ID NO: 15685 - protein, 9 aa, Artificial Sequence
  Description of Artificial Sequence: Synthetic peptide
IWKCLNTQN

SEQ ID NO: 15686 - protein, 9 aa, Artificial Sequence
  Description of Artificial Sequence: Synthetic peptide
IWTCCKGGG

SEQ ID NO: 15687 - protein, 9 aa, Artificial Sequence
  Description of Artificial Sequence: Synthetic peptide
IWVDYEITR

SEQ ID NO: 15688 - protein, 9 aa, Artificial Sequence
  Description of Artificial Sequence: Synthetic peptide
IYEARTIVR

SEQ ID NO: 15689 - protein, 9 aa, Artificial Sequence
  Description of Artificial Sequence: Synthetic peptide
KALPGMSAG

SEQ ID NO: 15690 - protein, 9 aa, Artificial Sequence
  Description of Artificial Sequence: Synthetic peptide
KAPGVCTRS

SEQ ID NO: 15691 - protein, 9 aa, Artificial Sequence
  Description of Artificial Sequence: Synthetic peptide
KCDMKRGQF

SEQ ID NO: 15692 - protein, 9 aa, Artificial Sequence
  Description of Artificial Sequence: Synthetic peptide
KCELMSNQT

SEQ ID NO: 15693 - protein, 9 aa, Artificial Sequence
  Description of Artificial Sequence: Synthetic peptide
KCWYKFITN

SEQ ID NO: 15694 - protein, 9 aa, Artificial Sequence
  Description of Artificial Sequence: Synthetic peptide
KDALFDFPC

SEQ ID NO: 15695 - protein, 9 aa, Artificial Sequence
  Description of Artificial Sequence: Synthetic peptide
KDDGMCYGR

SEQ ID NO: 15696 - protein, 9 aa, Artificial Sequence
  Description of Artificial Sequence: Synthetic peptide
KDEDWNWCD

SEQ ID NO: 15697 - protein, 9 aa, Artificial Sequence
  Description of Artificial Sequence: Synthetic peptide
KDFWAMSMV

SEQ ID NO: 15698 - protein, 9 aa, Artificial Sequence
  Description of Artificial Sequence: Synthetic peptide
KDIGKAAGY

SEQ ID NO: 15699 - protein, 9 aa, Artificial Sequence
  Description of Artificial Sequence: Synthetic peptide
KDVMFREMH

SEQ ID NO: 15700 - protein, 9 aa, Artificial Sequence
  Description of Artificial Sequence: Synthetic peptide
KECEQLMFP

SEQ ID NO: 15701 - protein, 9 aa, Artificial Sequence
  Description of Artificial Sequence: Synthetic peptide
KFDHDSEFY

SEQ ID NO: 15702 - protein, 9 aa, Artificial Sequence
  Description of Artificial Sequence: Synthetic peptide
KFEPRYGDC

SEQ ID NO: 15703 - protein, 9 aa, Artificial Sequence
  Description of Artificial Sequence: Synthetic peptide
KGIHEPISC

SEQ ID NO: 15704 - protein, 9 aa, Artificial Sequence
  Description of Artificial Sequence: Synthetic peptide
KHDSDWMWY

SEQ ID NO: 15705 - protein, 9 aa, Artificial Sequence
  Description of Artificial Sequence: Synthetic peptide
KHIQDARWF

SEQ ID NO: 15706 - protein, 9 aa, Artificial Sequence
  Description of Artificial Sequence: Synthetic peptide
KHWREMITV

SEQ ID NO: 15707 - protein, 9 aa, Artificial Sequence
  Description of Artificial Sequence: Synthetic peptide
KIDDDSRVY

SEQ ID NO: 15708 - protein, 9 aa, Artificial Sequence
  Description of Artificial Sequence: Synthetic peptide
KIQYDDFDG

SEQ ID NO: 15709 - protein, 9 aa, Artificial Sequence
  Description of Artificial Sequence: Synthetic peptide
KIVDIDWWA

SEQ ID NO: 15710 - protein, 9 aa, Artificial Sequence
  Description of Artificial Sequence: Synthetic peptide
KLMWFASTD

SEQ ID NO: 15711 - protein, 9 aa, Artificial Sequence
  Description of Artificial Sequence: Synthetic peptide
KLSNDRFIY

SEQ ID NO: 15712 - protein, 9 aa, Artificial Sequence
  Description of Artificial Sequence: Synthetic peptide
KMQTVMRAL

SEQ ID NO: 15713 - protein, 9 aa, Artificial Sequence
  Description of Artificial Sequence: Synthetic peptide
KNDMLKKFG

SEQ ID NO: 15714 - protein, 9 aa, Artificial Sequence
  Description of Artificial Sequence: Synthetic peptide
KPIPQTVWL

SEQ ID NO: 15715 - protein, 9 aa, Artificial Sequence
  Description of Artificial Sequence: Synthetic peptide
KPQAHYYTI

SEQ ID NO: 15716 - protein, 9 aa, Artificial Sequence
  Description of Artificial Sequence: Synthetic peptide
KQLLTRMYM

SEQ ID NO: 15717 - protein, 9 aa, Artificial Sequence
  Description of Artificial Sequence: Synthetic peptide
KQPEPTPLA

SEQ ID NO: 15718 - protein, 9 aa, Artificial Sequence
  Description of Artificial Sequence: Synthetic peptide
KRMQEMTCR

SEQ ID NO: 15719 - protein, 9 aa, Artificial Sequence
  Description of Artificial Sequence: Synthetic peptide
KSASPTQPY

SEQ ID NO: 15720 - protein, 9 aa, Artificial Sequence
  Description of Artificial Sequence: Synthetic peptide
KSPAIHTEE

SEQ ID NO: 15721 - protein, 9 aa, Artificial Sequence
  Description of Artificial Sequence: Synthetic peptide
KSSGVWMCC

SEQ ID NO: 15722 - protein, 9 aa, Artificial Sequence
  Description of Artificial Sequence: Synthetic peptide
KTEWYDMKN

SEQ ID NO: 15723 - protein, 9 aa, Artificial Sequence
  Description of Artificial Sequence: Synthetic peptide
KVEENLRSM

SEQ ID NO: 15724 - protein, 9 aa, Artificial Sequence
  Description of Artificial Sequence: Synthetic peptide
KVIPEDQNC

SEQ ID NO: 15725 - protein, 9 aa, Artificial Sequence
  Description of Artificial Sequence: Synthetic peptide
KWDSTCYRW

SEQ ID NO: 15726 - protein, 9 aa, Artificial Sequence
  Description of Artificial Sequence: Synthetic peptide
KWTEFDRCD

SEQ ID NO: 15727 - protein, 9 aa, Artificial Sequence
  Description of Artificial Sequence: Synthetic peptide
KYEEQYHFH

SEQ ID NO: 15728 - protein, 9 aa, Artificial Sequence
  Description of Artificial Sequence: Synthetic peptide
KYQPDGWCY

SEQ ID NO: 15729 - protein, 9 aa, Artificial Sequence
  Description of Artificial Sequence: Synthetic peptide
LAAGVWDQE

SEQ ID NO: 15730 - protein, 9 aa, Artificial Sequence
  Description of Artificial Sequence: Synthetic peptide
LACKREAMW

SEQ ID NO: 15731 - protein, 9 aa, Artificial Sequence
  Description of Artificial Sequence: Synthetic peptide
LAVCKTHEP

SEQ ID NO: 15732 - protein, 9 aa, Artificial Sequence
  Description of Artificial Sequence: Synthetic peptide
LCHPGEHWQ

SEQ ID NO: 15733 - protein, 9 aa, Artificial Sequence
  Description of Artificial Sequence: Synthetic peptide
LCVTGFDTH

SEQ ID NO: 15734 - protein, 9 aa, Artificial Sequence
  Description of Artificial Sequence: Synthetic peptide
LDESWSVAG

SEQ ID NO: 15735 - protein, 9 aa, Artificial Sequence
  Description of Artificial Sequence: Synthetic peptide
LDPNRCMDQ

SEQ ID NO: 15736 - protein, 9 aa, Artificial Sequence
  Description of Artificial Sequence: Synthetic peptide
LGFWETQIM

SEQ ID NO: 15737 - protein, 9 aa, Artificial Sequence
  Description of Artificial Sequence: Synthetic peptide
LGHMQASTP

SEQ ID NO: 15738 - protein, 9 aa, Artificial Sequence
  Description of Artificial Sequence: Synthetic peptide
LGNQYWWHF

SEQ ID NO: 15739 - protein, 9 aa, Artificial Sequence
  Description of Artificial Sequence: Synthetic peptide
LHEIHLETN

SEQ ID NO: 15740 - protein, 9 aa, Artificial Sequence
  Description of Artificial Sequence: Synthetic peptide
LHLPQLLHD

SEQ ID NO: 15741 - protein, 9 aa, Artificial Sequence
  Description of Artificial Sequence: Synthetic peptide
LHSAWMHLA

SEQ ID NO: 15742 - protein, 9 aa, Artificial Sequence
  Description of Artificial Sequence: Synthetic peptide
LIAHWIHSF

SEQ ID NO: 15743 - protein, 9 aa, Artificial Sequence
  Description of Artificial Sequence: Synthetic peptide
LIAPYFGQL

SEQ ID NO: 15744 - protein, 9 aa, Artificial Sequence
  Description of Artificial Sequence: Synthetic peptide
LICTMSDMN

SEQ ID NO: 15745 - protein, 9 aa, Artificial Sequence
  Description of Artificial Sequence: Synthetic peptide
LIDHIQNQH

SEQ ID NO: 15746 - protein, 9 aa, Artificial Sequence
  Description of Artificial Sequence: Synthetic peptide
LKEMTWINW

SEQ ID NO: 15747 - protein, 9 aa, Artificial Sequence
  Description of Artificial Sequence: Synthetic peptide
LKQFRHMDG

SEQ ID NO: 15748 - protein, 9 aa, Artificial Sequence
  Description of Artificial Sequence: Synthetic peptide
LLYMAHCPP

SEQ ID NO: 15749 - protein, 9 aa, Artificial Sequence
  Description of Artificial Sequence: Synthetic peptide
LMDGCTPFM

SEQ ID NO: 15750 - protein, 9 aa, Artificial Sequence
  Description of Artificial Sequence: Synthetic peptide
LMEVYRSKA

SEQ ID NO: 15751 - protein, 9 aa, Artificial Sequence
  Description of Artificial Sequence: Synthetic peptide
LMHYGMVWP

SEQ ID NO: 15752 - protein, 9 aa, Artificial Sequence
  Description of Artificial Sequence: Synthetic peptide
LMSKENNCN

SEQ ID NO: 15753 - protein, 9 aa, Artificial Sequence
  Description of Artificial Sequence: Synthetic peptide
LNGECVVGY

SEQ ID NO: 15754 - protein, 9 aa, Artificial Sequence
  Description of Artificial Sequence: Synthetic peptide
LNTDVAEAF

SEQ ID NO: 15755 - protein, 9 aa, Artificial Sequence
  Description of Artificial Sequence: Synthetic peptide
LNVGKKGYG

SEQ ID NO: 15756 - protein, 9 aa, Artificial Sequence
  Description of Artificial Sequence: Synthetic peptide
LQQCEPMKS

SEQ ID NO: 15757 - protein, 9 aa, Artificial Sequence
  Description of Artificial Sequence: Synthetic peptide
LQSEHNEDE

SEQ ID NO: 15758 - protein, 9 aa, Artificial Sequence
  Description of Artificial Sequence: Synthetic peptide
LSICDQYDV

SEQ ID NO: 15759 - protein, 9 aa, Artificial Sequence
  Description of Artificial Sequence: Synthetic peptide
LSMRCMDQW

SEQ ID NO: 15760 - protein, 9 aa, Artificial Sequence
  Description of Artificial Sequence: Synthetic peptide
LSNFSWQYG

SEQ ID NO: 15761 - protein, 9 aa, Artificial Sequence
  Description of Artificial Sequence: Synthetic peptide
LSVKHVHYS

SEQ ID NO: 15762 - protein, 9 aa, Artificial Sequence
  Description of Artificial Sequence: Synthetic peptide
LTCMWGVYP

SEQ ID NO: 15763 - protein, 9 aa, Artificial Sequence
  Description of Artificial Sequence: Synthetic peptide
LTTLVEAIP

SEQ ID NO: 15764 - protein, 9 aa, Artificial Sequence
  Description of Artificial Sequence: Synthetic peptide
LTTQWNAKG

SEQ ID NO: 15765 - protein, 9 aa, Artificial Sequence
  Description of Artificial Sequence: Synthetic peptide
LTVFSNGGV

SEQ ID NO: 15766 - protein, 9 aa, Artificial Sequence
  Description of Artificial Sequence: Synthetic peptide
LTWVFGPFS

SEQ ID NO: 15767 - protein, 9 aa, Artificial Sequence
  Description of Artificial Sequence: Synthetic peptide
LVDTWNNHR

SEQ ID NO: 15768 - protein, 9 aa, Artificial Sequence
  Description of Artificial Sequence: Synthetic peptide
LWCKTWHNY

SEQ ID NO: 15769 - protein, 9 aa, Artificial Sequence
  Description of Artificial Sequence: Synthetic peptide
LWDGEAWCW

SEQ ID NO: 15770 - protein, 9 aa, Artificial Sequence
  Description of Artificial Sequence: Synthetic peptide
LWNMIKPLY

SEQ ID NO: 15771 - protein, 9 aa, Artificial Sequence
  Description of Artificial Sequence: Synthetic peptide
LYELQQFGA

SEQ ID NO: 15772 - protein, 9 aa, Artificial Sequence
  Description of Artificial Sequence: Synthetic peptide
LYHWWGYIE

SEQ ID NO: 15773 - protein, 9 aa, Artificial Sequence
  Description of Artificial Sequence: Synthetic peptide
LYQSTFDWR

SEQ ID NO: 15774 - protein, 9 aa, Artificial Sequence
  Description of Artificial Sequence: Synthetic peptide
MAADRWPLG

SEQ ID NO: 15775 - protein, 9 aa, Artificial Sequence
  Description of Artificial Sequence: Synthetic peptide
MAGQSAAYW

SEQ ID NO: 15776 - protein, 9 aa, Artificial Sequence
  Description of Artificial Sequence: Synthetic peptide
MAHIEGVAN

SEQ ID NO: 15777 - protein, 9 aa, Artificial Sequence
  Description of Artificial Sequence: Synthetic peptide
MASDTDYSF

SEQ ID NO: 15778 - protein, 9 aa, Artificial Sequence
  Description of Artificial Sequence: Synthetic peptide
MAVMIANAA

SEQ ID NO: 15779 - protein, 9 aa, Artificial Sequence
  Description of Artificial Sequence: Synthetic peptide
MCGLTKFRP

SEQ ID NO: 15780 - protein, 9 aa, Artificial Sequence
  Description of Artificial Sequence: Synthetic peptide
MCPPYQQAE

SEQ ID NO: 15781 - protein, 9 aa, Artificial Sequence
  Description of Artificial Sequence: Synthetic peptide
MCSSQHSYS

SEQ ID NO: 15782 - protein, 9 aa, Artificial Sequence
  Description of Artificial Sequence: Synthetic peptide
MDDDNDPVF

SEQ ID NO: 15783 - protein, 9 aa, Artificial Sequence
  Description of Artificial Sequence: Synthetic peptide
MDKDSEIMG

SEQ ID NO: 15784 - protein, 9 aa, Artificial Sequence
  Description of Artificial Sequence: Synthetic peptide
MEEYNTTTC

SEQ ID NO: 15785 - protein, 9 aa, Artificial Sequence
  Description of Artificial Sequence: Synthetic peptide
MEGGHPYRT

SEQ ID NO: 15786 - protein, 9 aa, Artificial Sequence
  Description of Artificial Sequence: Synthetic peptide
MESKYWHSD

SEQ ID NO: 15787 - protein, 9 aa, Artificial Sequence
  Description of Artificial Sequence: Synthetic peptide
MFHDTLGMF

SEQ ID NO: 15788 - protein, 9 aa, Artificial Sequence
  Description of Artificial Sequence: Synthetic peptide
MFMRLGTLP

SEQ ID NO: 15789 - protein, 9 aa, Artificial Sequence
  Description of Artificial Sequence: Synthetic peptide
MFNMYEGSQ

SEQ ID NO: 15790 - protein, 9 aa, Artificial Sequence
  Description of Artificial Sequence: Synthetic peptide
MFNWAEMED

SEQ ID NO: 15791 - protein, 9 aa, Artificial Sequence
  Description of Artificial Sequence: Synthetic peptide
MFTDNTFKC

SEQ ID NO: 15792 - protein, 9 aa, Artificial Sequence
  Description of Artificial Sequence: Synthetic peptide
MGIQTNYEA

SEQ ID NO: 15793 - protein, 9 aa, Artificial Sequence
  Description of Artificial Sequence: Synthetic peptide
MGNMPASMA

SEQ ID NO: 15794 - protein, 9 aa, Artificial Sequence
  Description of Artificial Sequence: Synthetic peptide
MGRTFFEEF

SEQ ID NO: 15795 - protein, 9 aa, Artificial Sequence
  Description of Artificial Sequence: Synthetic peptide
MGRWENIWC

SEQ ID NO: 15796 - protein, 9 aa, Artificial Sequence
  Description of Artificial Sequence: Synthetic peptide
MHDMLMGQM

SEQ ID NO: 15797 - protein, 9 aa, Artificial Sequence
  Description of Artificial Sequence: Synthetic peptide
MHFQAWSGA

SEQ ID NO: 15798 - protein, 9 aa, Artificial Sequence
  Description of Artificial Sequence: Synthetic peptide
MHIGVFTQA

SEQ ID NO: 15799 - protein, 9 aa, Artificial Sequence
  Description of Artificial Sequence: Synthetic peptide
MIAFWSTWR

SEQ ID NO: 15800 - protein, 9 aa, Artificial Sequence
  Description of Artificial Sequence: Synthetic peptide
MIAWWGSPG

SEQ ID NO: 15801 - protein, 9 aa, Artificial Sequence
  Description of Artificial Sequence: Synthetic peptide
MIKPLTCNK

SEQ ID NO: 15802 - protein, 9 aa, Artificial Sequence
  Description of Artificial Sequence: Synthetic peptide
MIKQTGAEW

SEQ ID NO: 15803 - protein, 9 aa, Artificial Sequence
  Description of Artificial Sequence: Synthetic peptide
MINNSKTPY

SEQ ID NO: 15804 - protein, 9 aa, Artificial Sequence
  Description of Artificial Sequence: Synthetic peptide
MIRTQCCWI

SEQ ID NO: 15805 - protein, 9 aa, Artificial Sequence
  Description of Artificial Sequence: Synthetic peptide
MISQMMSNA

SEQ ID NO: 15806 - protein, 9 aa, Artificial Sequence
  Description of Artificial Sequence: Synthetic peptide
MIYWTVDQQ

SEQ ID NO: 15807 - protein, 9 aa, Artificial Sequence
  Description of Artificial Sequence: Synthetic peptide
MKASKDGGK

SEQ ID NO: 15808 - protein, 9 aa, Artificial Sequence
  Description of Artificial Sequence: Synthetic peptide
MKEEWGHIP

SEQ ID NO: 15809 - protein, 9 aa, Artificial Sequence
  Description of Artificial Sequence: Synthetic peptide
MLSWVYPCM

SEQ ID NO: 15810 - protein, 9 aa, Artificial Sequence
  Description of Artificial Sequence: Synthetic peptide
MMAMKTDSH

SEQ ID NO: 15811 - protein, 9 aa, Artificial Sequence
  Description of Artificial Sequence: Synthetic peptide
MMCQIMHSC

SEQ ID NO: 15812 - protein, 9 aa, Artificial Sequence
  Description of Artificial Sequence: Synthetic peptide
MMNGMMGGN

SEQ ID NO: 15813 - protein, 9 aa, Artificial Sequence
  Description of Artificial Sequence: Synthetic peptide
MMQEIGAEA

SEQ ID NO: 15814 - protein, 9 aa, Artificial Sequence
  Description of Artificial Sequence: Synthetic peptide
MMRGPESDR

SEQ ID NO: 15815 - protein, 9 aa, Artificial Sequence
  Description of Artificial Sequence: Synthetic peptide
MMVQQMFFL

SEQ ID NO: 15816 - protein, 9 aa, Artificial Sequence
  Description of Artificial Sequence: Synthetic peptide
MNESTHIHP

SEQ ID NO: 15817 - protein, 9 aa, Artificial Sequence
  Description of Artificial Sequence: Synthetic peptide
MPCCWWVVT

SEQ ID NO: 15818 - protein, 9 aa, Artificial Sequence
  Description of Artificial Sequence: Synthetic peptide
MPCPLPKYR

SEQ ID NO: 15819 - protein, 9 aa, Artificial Sequence
  Description of Artificial Sequence: Synthetic peptide
MPGYQIHNA

SEQ ID NO: 15820 - protein, 9 aa, Artificial Sequence
  Description of Artificial Sequence: Synthetic peptide
MPKDWVPDA

SEQ ID NO: 15821 - protein, 9 aa, Artificial Sequence
  Description of Artificial Sequence: Synthetic peptide
MPLTHSMHN

SEQ ID NO: 15822 - protein, 9 aa, Artificial Sequence
  Description of Artificial Sequence: Synthetic peptide
MPNAFYQAC

SEQ ID NO: 15823 - protein, 9 aa, Artificial Sequence
  Description of Artificial Sequence: Synthetic peptide
MPSQNGTKH

SEQ ID NO: 15824 - protein, 9 aa, Artificial Sequence
  Description of Artificial Sequence: Synthetic peptide
MQLGEHSWY

SEQ ID NO: 15825 - protein, 9 aa, Artificial Sequence
  Description of Artificial Sequence: Synthetic peptide
MQLLGDSEY

SEQ ID NO: 15826 - protein, 9 aa, Artificial Sequence
  Description of Artificial Sequence: Synthetic peptide
MQSQEDHSP

SEQ ID NO: 15827 - protein, 9 aa, Artificial Sequence
  Description of Artificial Sequence: Synthetic peptide
MRVWRYCDR

SEQ ID NO: 15828 - protein, 9 aa, Artificial Sequence
  Description of Artificial Sequence: Synthetic peptide
MSSCKKMDA

SEQ ID NO: 15829 - protein, 9 aa, Artificial Sequence
  Description of Artificial Sequence: Synthetic peptide
MTGEKTGNA

SEQ ID NO: 15830 - protein, 9 aa, Artificial Sequence
  Description of Artificial Sequence: Synthetic peptide
MTLSWWGIG

SEQ ID NO: 15831 - protein, 9 aa, Artificial Sequence
  Description of Artificial Sequence: Synthetic peptide
MTMLKMAGR

SEQ ID NO: 15832 - protein, 9 aa, Artificial Sequence
  Description of Artificial Sequence: Synthetic peptide
MTNGNTVGA

SEQ ID NO: 15833 - protein, 9 aa, Artificial Sequence
  Description of Artificial Sequence: Synthetic peptide
MTNIMQQGK

SEQ ID NO: 15834 - protein, 9 aa, Artificial Sequence
  Description of Artificial Sequence: Synthetic peptide
MVDGDLPMK

SEQ ID NO: 15835 - protein, 9 aa, Artificial Sequence
  Description of Artificial Sequence: Synthetic peptide
MVDKGFAGQ

SEQ ID NO: 15836 - protein, 9 aa, Artificial Sequence
  Description of Artificial Sequence: Synthetic peptide
MVESELMMC

SEQ ID NO: 15837 - protein, 9 aa, Artificial Sequence
  Description of Artificial Sequence: Synthetic peptide
MVGCCCHFG

SEQ ID NO: 15838 - protein, 9 aa, Artificial Sequence
  Description of Artificial Sequence: Synthetic peptide
MVGPAQIEL

SEQ ID NO: 15839 - protein, 9 aa, Artificial Sequence
  Description of Artificial Sequence: Synthetic peptide
MVHFTSHPI

SEQ ID NO: 15840 - protein, 9 aa, Artificial Sequence
  Description of Artificial Sequence: Synthetic peptide
MVLTDAHTA

SEQ ID NO: 15841 - protein, 9 aa, Artificial Sequence
  Description of Artificial Sequence: Synthetic peptide
MVQCMGQLA

SEQ ID NO: 15842 - protein, 9 aa, Artificial Sequence
  Description of Artificial Sequence: Synthetic peptide
MVQPGHFES

SEQ ID NO: 15843 - protein, 9 aa, Artificial Sequence
  Description of Artificial Sequence: Synthetic peptide
MVVASSASD

SEQ ID NO: 15844 - protein, 9 aa, Artificial Sequence
  Description of Artificial Sequence: Synthetic peptide
MWDSVYYPF

SEQ ID NO: 15845 - protein, 9 aa, Artificial Sequence
  Description of Artificial Sequence: Synthetic peptide
MYAPRCQTE

SEQ ID NO: 15846 - protein, 9 aa, Artificial Sequence
  Description of Artificial Sequence: Synthetic peptide
MYGYTMNSG

SEQ ID NO: 15847 - protein, 9 aa, Artificial Sequence
  Description of Artificial Sequence: Synthetic peptide
MYSCWTVNT

SEQ ID NO: 15848 - protein, 9 aa, Artificial Sequence
  Description of Artificial Sequence: Synthetic peptide
MYSNLVHWS

SEQ ID NO: 15849 - protein, 9 aa, Artificial Sequence
  Description of Artificial Sequence: Synthetic peptide
MYSYPHRRS

SEQ ID NO: 15850 - protein, 9 aa, Artificial Sequence
  Description of Artificial Sequence: Synthetic peptide
MYTTHCHGM

SEQ ID NO: 15851 - protein, 9 aa, Artificial Sequence
  Description of Artificial Sequence: Synthetic peptide
NAGLVNLGK

SEQ ID NO: 15852 - protein, 9 aa, Artificial Sequence
  Description of Artificial Sequence: Synthetic peptide
NAQEEPESW

SEQ ID NO: 15853 - protein, 9 aa, Artificial Sequence
  Description of Artificial Sequence: Synthetic peptide
NARYDKDNL

SEQ ID NO: 15854 - protein, 9 aa, Artificial Sequence
  Description of Artificial Sequence: Synthetic peptide
NAVEQYVHH

SEQ ID NO: 15855 - protein, 9 aa, Artificial Sequence
  Description of Artificial Sequence: Synthetic peptide
NCKEKEDCQ

SEQ ID NO: 15856 - protein, 9 aa, Artificial Sequence
  Description of Artificial Sequence: Synthetic peptide
NCMASGWRG

SEQ ID NO: 15857 - protein, 9 aa, Artificial Sequence
  Description of Artificial Sequence: Synthetic peptide
NCWINTRLP

SEQ ID NO: 15858 - protein, 9 aa, Artificial Sequence
  Description of Artificial Sequence: Synthetic peptide
NDAKNLEGW

SEQ ID NO: 15859 - protein, 9 aa, Artificial Sequence
  Description of Artificial Sequence: Synthetic peptide
NEKEYSWAA

SEQ ID NO: 15860 - protein, 9 aa, Artificial Sequence
  Description of Artificial Sequence: Synthetic peptide
NEKHMSYCF

SEQ ID NO: 15861 - protein, 9 aa, Artificial Sequence
  Description of Artificial Sequence: Synthetic peptide
NERHTFCVD

SEQ ID NO: 15862 - protein, 9 aa, Artificial Sequence
  Description of Artificial Sequence: Synthetic peptide
NEWLMYLLT

SEQ ID NO: 15863 - protein, 9 aa, Artificial Sequence
  Description of Artificial Sequence: Synthetic peptide
NFALATTTE

SEQ ID NO: 15864 - protein, 9 aa, Artificial Sequence
  Description of Artificial Sequence: Synthetic peptide
NFTHREKEC

SEQ ID NO: 15865 - protein, 9 aa, Artificial Sequence
  Description of Artificial Sequence: Synthetic peptide
NGKCCHPGP

SEQ ID NO: 15866 - protein, 9 aa, Artificial Sequence
  Description of Artificial Sequence: Synthetic peptide
NHALMHGFQ

SEQ ID NO: 15867 - protein, 9 aa, Artificial Sequence
  Description of Artificial Sequence: Synthetic peptide
NHCINSTEL

SEQ ID NO: 15868 - protein, 9 aa, Artificial Sequence
  Description of Artificial Sequence: Synthetic peptide
NHESKDASW

SEQ ID NO: 15869 - protein, 9 aa, Artificial Sequence
  Description of Artificial Sequence: Synthetic peptide
NIGFQMTMG

SEQ ID NO: 15870 - protein, 9 aa, Artificial Sequence
  Description of Artificial Sequence: Synthetic peptide
NIGYANLWC

SEQ ID NO: 15871 - protein, 9 aa, Artificial Sequence
  Description of Artificial Sequence: Synthetic peptide
NIQFQVGNY

SEQ ID NO: 15872 - protein, 9 aa, Artificial Sequence
  Description of Artificial Sequence: Synthetic peptide
NIQWITDVG

SEQ ID NO: 15873 - protein, 9 aa, Artificial Sequence
  Description of Artificial Sequence: Synthetic peptide
NIVHYCNPS

SEQ ID NO: 15874 - protein, 9 aa, Artificial Sequence
  Description of Artificial Sequence: Synthetic peptide
NKSDEQLVQ

SEQ ID NO: 15875 - protein, 9 aa, Artificial Sequence
  Description of Artificial Sequence: Synthetic peptide
NLTFCLFMG

SEQ ID NO: 15876 - protein, 9 aa, Artificial Sequence
  Description of Artificial Sequence: Synthetic peptide
NMGVYQFLG

SEQ ID NO: 15877 - protein, 9 aa, Artificial Sequence
  Description of Artificial Sequence: Synthetic peptide
NMVEYKQTA

SEQ ID NO: 15878 - protein, 9 aa, Artificial Sequence
  Description of Artificial Sequence: Synthetic peptide
NNDCENPPL

SEQ ID NO: 15879 - protein, 9 aa, Artificial Sequence
  Description of Artificial Sequence: Synthetic peptide
NNEFDVQHS

SEQ ID NO: 15880 - protein, 9 aa, Artificial Sequence
  Description of Artificial Sequence: Synthetic peptide
NNMEIMKTC

SEQ ID NO: 15881 - protein, 9 aa, Artificial Sequence
  Description of Artificial Sequence: Synthetic peptide
NPKQTHWDY

SEQ ID NO: 15882 - protein, 9 aa, Artificial Sequence
  Description of Artificial Sequence: Synthetic peptide
NPRGEFMAH

SEQ ID NO: 15883 - protein, 9 aa, Artificial Sequence
  Description of Artificial Sequence: Synthetic peptide
NQLQPICKP

SEQ ID NO: 15884 - protein, 9 aa, Artificial Sequence
  Description of Artificial Sequence: Synthetic peptide
NSAHELHSP

SEQ ID NO: 15885 - protein, 9 aa, Artificial Sequence
  Description of Artificial Sequence: Synthetic peptide
NSGTCPAPH

SEQ ID NO: 15886 - protein, 9 aa, Artificial Sequence
  Description of Artificial Sequence: Synthetic peptide
NSSTVCNNR

SEQ ID NO: 15887 - protein, 9 aa, Artificial Sequence
  Description of Artificial Sequence: Synthetic peptide
NSVMQMCVD

SEQ ID NO: 15888 - protein, 9 aa, Artificial Sequence
  Description of Artificial Sequence: Synthetic peptide
NTFMPNGAN

SEQ ID NO: 15889 - protein, 9 aa, Artificial Sequence
  Description of Artificial Sequence: Synthetic peptide
NTHMAHKSE

SEQ ID NO: 15890 - protein, 9 aa, Artificial Sequence
  Description of Artificial Sequence: Synthetic peptide
NTQTLMTNG

SEQ ID NO: 15891 - protein, 9 aa, Artificial Sequence
  Description of Artificial Sequence: Synthetic peptide
NTSLVRESE

SEQ ID NO: 15892 - protein, 9 aa, Artificial Sequence
  Description of Artificial Sequence: Synthetic peptide
NVECVQQQW

SEQ ID NO: 15893 - protein, 9 aa, Artificial Sequence
  Description of Artificial Sequence: Synthetic peptide
NVHDDHGAR

SEQ ID NO: 15894 - protein, 9 aa, Artificial Sequence
  Description of Artificial Sequence: Synthetic peptide
NVMAGHDHE

SEQ ID NO: 15895 - protein, 9 aa, Artificial Sequence
  Description of Artificial Sequence: Synthetic peptide
NVMFEQDDR

SEQ ID NO: 15896 - protein, 9 aa, Artificial Sequence
  Description of Artificial Sequence: Synthetic peptide
NVQMQTLSW

SEQ ID NO: 15897 - protein, 9 aa, Artificial Sequence
  Description of Artificial Sequence: Synthetic peptide
NVWTCDVCS

SEQ ID NO: 15898 - protein, 9 aa, Artificial Sequence
  Description of Artificial Sequence: Synthetic peptide
NWFKMQAGM

SEQ ID NO: 15899 - protein, 9 aa, Artificial Sequence
  Description of Artificial Sequence: Synthetic peptide
NYAETPCYS

SEQ ID NO: 15900 - protein, 9 aa, Artificial Sequence
  Description of Artificial Sequence: Synthetic peptide
NYNFYATHV

SEQ ID NO: 15901 - protein, 9 aa, Artificial Sequence
  Description of Artificial Sequence: Synthetic peptide
NYQNNMTFN

SEQ ID NO: 15902 - protein, 9 aa, Artificial Sequence
  Description of Artificial Sequence: Synthetic peptide
PDVLHPNND

SEQ ID NO: 15903 - protein, 9 aa, Artificial Sequence
  Description of Artificial Sequence: Synthetic peptide
PFRTDVRGS

SEQ ID NO: 15904 - protein, 9 aa, Artificial Sequence
  Description of Artificial Sequence: Synthetic peptide
PGGTPRPEY

SEQ ID NO: 15905 - protein, 9 aa, Artificial Sequence
  Description of Artificial Sequence: Synthetic peptide
PGKTWLWEL

SEQ ID NO: 15906 - protein, 9 aa, Artificial Sequence
  Description of Artificial Sequence: Synthetic peptide
PGLDSTMHY

SEQ ID NO: 15907 - protein, 9 aa, Artificial Sequence
  Description of Artificial Sequence: Synthetic peptide
PHPKSHKQH

SEQ ID NO: 15908 - protein, 9 aa, Artificial Sequence
  Description of Artificial Sequence: Synthetic peptide
PIKYKHRQP

SEQ ID NO: 15909 - protein, 9 aa, Artificial Sequence
  Description of Artificial Sequence: Synthetic peptide
PIRREWHLW

SEQ ID NO: 15910 - protein, 9 aa, Artificial Sequence
  Description of Artificial Sequence: Synthetic peptide
PKEQYEWKD

SEQ ID NO: 15911 - protein, 9 aa, Artificial Sequence
  Description of Artificial Sequence: Synthetic peptide
PKVDKRHKL

SEQ ID NO: 15912 - protein, 9 aa, Artificial Sequence
  Description of Artificial Sequence: Synthetic peptide
PLASMWQHD

SEQ ID NO: 15913 - protein, 9 aa, Artificial Sequence
  Description of Artificial Sequence: Synthetic peptide
PLMLLSKAM

SEQ ID NO: 15914 - protein, 9 aa, Artificial Sequence
  Description of Artificial Sequence: Synthetic peptide
PLTFRGHNH

SEQ ID NO: 15915 - protein, 9 aa, Artificial Sequence
  Description of Artificial Sequence: Synthetic peptide
PMEKFYCGC

SEQ ID NO: 15916 - protein, 9 aa, Artificial Sequence
  Description of Artificial Sequence: Synthetic peptide
PNTERTYEC

SEQ ID NO: 15917 - protein, 9 aa, Artificial Sequence
  Description of Artificial Sequence: Synthetic peptide
PQHAGRHHE

SEQ ID NO: 15918 - protein, 9 aa, Artificial Sequence
  Description of Artificial Sequence: Synthetic peptide
PTDFIWPMM

SEQ ID NO: 15919 - protein, 9 aa, Artificial Sequence
  Description of Artificial Sequence: Synthetic peptide
PTDQDQMLE

SEQ ID NO: 15920 - protein, 9 aa, Artificial Sequence
  Description of Artificial Sequence: Synthetic peptide
PTKMHNHPW

SEQ ID NO: 15921 - protein, 9 aa, Artificial Sequence
  Description of Artificial Sequence: Synthetic peptide
PVKLETHES

SEQ ID NO: 15922 - protein, 9 aa, Artificial Sequence
  Description of Artificial Sequence: Synthetic peptide
PWGRSLVHC

SEQ ID NO: 15923 - protein, 9 aa, Artificial Sequence
  Description of Artificial Sequence: Synthetic peptide
PWPSMACQK

SEQ ID NO: 15924 - protein, 9 aa, Artificial Sequence
  Description of Artificial Sequence: Synthetic peptide
PYAPKNCCV

SEQ ID NO: 15925 - protein, 9 aa, Artificial Sequence
  Description of Artificial Sequence: Synthetic peptide
QAIGRDQSF

SEQ ID NO: 15926 - protein, 9 aa, Artificial Sequence
  Description of Artificial Sequence: Synthetic peptide
QAMWGNGQG

SEQ ID NO: 15927 - protein, 9 aa, Artificial Sequence
  Description of Artificial Sequence: Synthetic peptide
QASVHVMAD

SEQ ID NO: 15928 - protein, 9 aa, Artificial Sequence
  Description of Artificial Sequence: Synthetic peptide
QDHALVYRN

SEQ ID NO: 15929 - protein, 9 aa, Artificial Sequence
  Description of Artificial Sequence: Synthetic peptide
QDYYSKPEW

SEQ ID NO: 15930 - protein, 9 aa, Artificial Sequence
  Description of Artificial Sequence: Synthetic peptide
QEGIRTDVS

SEQ ID NO: 15931 - protein, 9 aa, Artificial Sequence
  Description of Artificial Sequence: Synthetic peptide
QEMPLPMKS

SEQ ID NO: 15932 - protein, 9 aa, Artificial Sequence
  Description of Artificial Sequence: Synthetic peptide
QFAEWWTMA

SEQ ID NO: 15933 - protein, 9 aa, Artificial Sequence
  Description of Artificial Sequence: Synthetic peptide
QFILSHRRD

SEQ ID NO: 15934 - protein, 9 aa, Artificial Sequence
  Description of Artificial Sequence: Synthetic peptide
QFLPCNFRC

SEQ ID NO: 15935 - protein, 9 aa, Artificial Sequence
  Description of Artificial Sequence: Synthetic peptide
QFMTCQNYP

SEQ ID NO: 15936 - protein, 9 aa, Artificial Sequence
  Description of Artificial Sequence: Synthetic peptide
QFVSWYTYR

SEQ ID NO: 15937 - protein, 9 aa, Artificial Sequence
  Description of Artificial Sequence: Synthetic peptide
QGEMPDMFK

SEQ ID NO: 15938 - protein, 9 aa, Artificial Sequence
  Description of Artificial Sequence: Synthetic peptide
QGNSPYHEA

SEQ ID NO: 15939 - protein, 9 aa, Artificial Sequence
  Description of Artificial Sequence: Synthetic peptide
QGQPEVVVW

SEQ ID NO: 15940 - protein, 9 aa, Artificial Sequence
  Description of Artificial Sequence: Synthetic peptide
QGQPTDASG

SEQ ID NO: 15941 - protein, 9 aa, Artificial Sequence
  Description of Artificial Sequence: Synthetic peptide
QGYHFAWND

SEQ ID NO: 15942 - protein, 9 aa, Artificial Sequence
  Description of Artificial Sequence: Synthetic peptide
QHALNQAVA

SEQ ID NO: 15943 - protein, 9 aa, Artificial Sequence
  Description of Artificial Sequence: Synthetic peptide
QHIHEIGKK

SEQ ID NO: 15944 - protein, 9 aa, Artificial Sequence
  Description of Artificial Sequence: Synthetic peptide
QIAMATMFR

SEQ ID NO: 15945 - protein, 9 aa, Artificial Sequence
  Description of Artificial Sequence: Synthetic peptide
QIDNVRHHP

SEQ ID NO: 15946 - protein, 9 aa, Artificial Sequence
  Description of Artificial Sequence: Synthetic peptide
QIMANACQN

SEQ ID NO: 15947 - protein, 9 aa, Artificial Sequence
  Description of Artificial Sequence: Synthetic peptide
QITDMQDMQ

SEQ ID NO: 15948 - protein, 9 aa, Artificial Sequence
  Description of Artificial Sequence: Synthetic peptide
QLVEAQLPP

SEQ ID NO: 15949 - protein, 9 aa, Artificial Sequence
  Description of Artificial Sequence: Synthetic peptide
QLVEKEDMN

SEQ ID NO: 15950 - protein, 9 aa, Artificial Sequence
  Description of Artificial Sequence: Synthetic peptide
QMSPAGCTE

SEQ ID NO: 15951 - protein, 9 aa, Artificial Sequence
  Description of Artificial Sequence: Synthetic peptide
QNKVTQREC

SEQ ID NO: 15952 - protein, 9 aa, Artificial Sequence
  Description of Artificial Sequence: Synthetic peptide
QPSPGHAYP

SEQ ID NO: 15953 - protein, 9 aa, Artificial Sequence
  Description of Artificial Sequence: Synthetic peptide
QQDAAFHWT

SEQ ID NO: 15954 - protein, 9 aa, Artificial Sequence
  Description of Artificial Sequence: Synthetic peptide
QQGFIVYWH

SEQ ID NO: 15955 - protein, 9 aa, Artificial Sequence
  Description of Artificial Sequence: Synthetic peptide
QQIHMGHQA

SEQ ID NO: 15956 - protein, 9 aa, Artificial Sequence
  Description of Artificial Sequence: Synthetic peptide
QQTLFRTGS

SEQ ID NO: 15957 - protein, 9 aa, Artificial Sequence
  Description of Artificial Sequence: Synthetic peptide
QQYRASNFA

SEQ ID NO: 15958 - protein, 9 aa, Artificial Sequence
  Description of Artificial Sequence: Synthetic peptide
QSCVTLQTN

SEQ ID NO: 15959 - protein, 9 aa, Artificial Sequence
  Description of Artificial Sequence: Synthetic peptide
QSEFLVKHI

SEQ ID NO: 15960 - protein, 9 aa, Artificial Sequence
  Description of Artificial Sequence: Synthetic peptide
QSMDCNWDG

SEQ ID NO: 15961 - protein, 9 aa, Artificial Sequence
  Description of Artificial Sequence: Synthetic peptide
QSPSDIQCT

SEQ ID NO: 15962 - protein, 9 aa, Artificial Sequence
  Description of Artificial Sequence: Synthetic peptide
QTADHRKGM

SEQ ID NO: 15963 - protein, 9 aa, Artificial Sequence
  Description of Artificial Sequence: Synthetic peptide
QTATMAVWN

SEQ ID NO: 15964 - protein, 9 aa, Artificial Sequence
  Description of Artificial Sequence: Synthetic peptide
QTDHFDSCR

SEQ ID NO: 15965 - protein, 9 aa, Artificial Sequence
  Description of Artificial Sequence: Synthetic peptide
QTRAIVLLD

SEQ ID NO: 15966 - protein, 9 aa, Artificial Sequence
  Description of Artificial Sequence: Synthetic peptide
QTYAQTHRT

SEQ ID NO: 15967 - protein, 9 aa, Artificial Sequence
  Description of Artificial Sequence: Synthetic peptide
QVDWLKSSF

SEQ ID NO: 15968 - protein, 9 aa, Artificial Sequence
  Description of Artificial Sequence: Synthetic peptide
QVEDELANY

SEQ ID NO: 15969 - protein, 9 aa, Artificial Sequence
  Description of Artificial Sequence: Synthetic peptide
QVEMKDCDQ

SEQ ID NO: 15970 - protein, 9 aa, Artificial Sequence
  Description of Artificial Sequence: Synthetic peptide
QVFPCDYEN

SEQ ID NO: 15971 - protein, 9 aa, Artificial Sequence
  Description of Artificial Sequence: Synthetic peptide
QVMRCDFDD

SEQ ID NO: 15972 - protein, 9 aa, Artificial Sequence
  Description of Artificial Sequence: Synthetic peptide
QVNLENHSC

SEQ ID NO: 15973 - protein, 9 aa, Artificial Sequence
  Description of Artificial Sequence: Synthetic peptide
QVSVDCSQC

SEQ ID NO: 15974 - protein, 9 aa, Artificial Sequence
  Description of Artificial Sequence: Synthetic peptide
QVVVIVWQA

SEQ ID NO: 15975 - protein, 9 aa, Artificial Sequence
  Description of Artificial Sequence: Synthetic peptide
QVWINNVNI

SEQ ID NO: 15976 - protein, 9 aa, Artificial Sequence
  Description of Artificial Sequence: Synthetic peptide
QWGTMMKNQ

SEQ ID NO: 15977 - protein, 9 aa, Artificial Sequence
  Description of Artificial Sequence: Synthetic peptide
QWMTGMCWE

SEQ ID NO: 15978 - protein, 9 aa, Artificial Sequence
  Description of Artificial Sequence: Synthetic peptide
QYAHISAHS

SEQ ID NO: 15979 - protein, 9 aa, Artificial Sequence
  Description of Artificial Sequence: Synthetic peptide
QYQSVSNFS

SEQ ID NO: 15980 - protein, 9 aa, Artificial Sequence
  Description of Artificial Sequence: Synthetic peptide
RCAQYEVAG

SEQ ID NO: 15981 - protein, 9 aa, Artificial Sequence
  Description of Artificial Sequence: Synthetic peptide
RCLKRKTCF

SEQ ID NO: 15982 - protein, 9 aa, Artificial Sequence
  Description of Artificial Sequence: Synthetic peptide
RCTGFDDFE

SEQ ID NO: 15983 - protein, 9 aa, Artificial Sequence
  Description of Artificial Sequence: Synthetic peptide
RDETSFRHC

SEQ ID NO: 15984 - protein, 9 aa, Artificial Sequence
  Description of Artificial Sequence: Synthetic peptide
RDSDKERCK

SEQ ID NO: 15985 - protein, 9 aa, Artificial Sequence
  Description of Artificial Sequence: Synthetic peptide
RFHTDYRRH

SEQ ID NO: 15986 - protein, 9 aa, Artificial Sequence
  Description of Artificial Sequence: Synthetic peptide
RFVMRPKES

SEQ ID NO: 15987 - protein, 9 aa, Artificial Sequence
  Description of Artificial Sequence: Synthetic peptide
RGEQGVLTL

SEQ ID NO: 15988 - protein, 9 aa, Artificial Sequence
  Description of Artificial Sequence: Synthetic peptide
RGLFDNWIF

SEQ ID NO: 15989 - protein, 9 aa, Artificial Sequence
  Description of Artificial Sequence: Synthetic peptide
RGTYSYSAR

SEQ ID NO: 15990 - protein, 9 aa, Artificial Sequence
  Description of Artificial Sequence: Synthetic peptide
RHLDQIPWP

SEQ ID NO: 15991 - protein, 9 aa, Artificial Sequence
  Description of Artificial Sequence: Synthetic peptide
RHSWHPHFE

SEQ ID NO: 15992 - protein, 9 aa, Artificial Sequence
  Description of Artificial Sequence: Synthetic peptide
RHYFYQDDD

SEQ ID NO: 15993 - protein, 9 aa, Artificial Sequence
  Description of Artificial Sequence: Synthetic peptide
RIHEGSISG

SEQ ID NO: 15994 - protein, 9 aa, Artificial Sequence
  Description of Artificial Sequence: Synthetic peptide
RKKGELCSR

SEQ ID NO: 15995 - protein, 9 aa, Artificial Sequence
  Description of Artificial Sequence: Synthetic peptide
RKWCEFDAI

SEQ ID NO: 15996 - protein, 9 aa, Artificial Sequence
  Description of Artificial Sequence: Synthetic peptide
RMCCSDSGE

SEQ ID NO: 15997 - protein, 9 aa, Artificial Sequence
  Description of Artificial Sequence: Synthetic peptide
RMEQQGVMN

SEQ ID NO: 15998 - protein, 9 aa, Artificial Sequence
  Description of Artificial Sequence: Synthetic peptide
RMESHIAQT

SEQ ID NO: 15999 - protein, 9 aa, Artificial Sequence
  Description of Artificial Sequence: Synthetic peptide
RMHMPWCHG

SEQ ID NO: 16000 - protein, 9 aa, Artificial Sequence
  Description of Artificial Sequence: Synthetic peptide
RNPHMDQSM

SEQ ID NO: 16001 - protein, 9 aa, Artificial Sequence
  Description of Artificial Sequence: Synthetic peptide
RPIHDFGVY

SEQ ID NO: 16002 - protein, 9 aa, Artificial Sequence
  Description of Artificial Sequence: Synthetic peptide
RTDQMELAT

SEQ ID NO: 16003 - protein, 9 aa, Artificial Sequence
  Description of Artificial Sequence: Synthetic peptide
RTETKSTYF

SEQ ID NO: 16004 - protein, 9 aa, Artificial Sequence
  Description of Artificial Sequence: Synthetic peptide
RTYWLDDGK

SEQ ID NO: 16005 - protein, 9 aa, Artificial Sequence
  Description of Artificial Sequence: Synthetic peptide
RVDQEGGRD

SEQ ID NO: 16006 - protein, 9 aa, Artificial Sequence
  Description of Artificial Sequence: Synthetic peptide
RYECYRSPF

SEQ ID NO: 16007 - protein, 9 aa, Artificial Sequence
  Description of Artificial Sequence: Synthetic peptide
SAESRQGES

SEQ ID NO: 16008 - protein, 9 aa, Artificial Sequence
  Description of Artificial Sequence: Synthetic peptide
SATPVGKEY

SEQ ID NO: 16009 - protein, 9 aa, Artificial Sequence
  Description of Artificial Sequence: Synthetic peptide
SAVHRNDVA

SEQ ID NO: 16010 - protein, 9 aa, Artificial Sequence
  Description of Artificial Sequence: Synthetic peptide
SAVHYTYMD

SEQ ID NO: 16011 - protein, 9 aa, Artificial Sequence
  Description of Artificial Sequence: Synthetic peptide
SCAFVDEWS

SEQ ID NO: 16012 - protein, 9 aa, Artificial Sequence
  Description of Artificial Sequence: Synthetic peptide
SCDAVDGLW

SEQ ID NO: 16013 - protein, 9 aa, Artificial Sequence
  Description of Artificial Sequence: Synthetic peptide
SCDLKHDSG

SEQ ID NO: 16014 - protein, 9 aa, Artificial Sequence
  Description of Artificial Sequence: Synthetic peptide
SCTDFNSMG

SEQ ID NO: 16015 - protein, 9 aa, Artificial Sequence
  Description of Artificial Sequence: Synthetic peptide
SDHYNPEPY

SEQ ID NO: 16016 - protein, 9 aa, Artificial Sequence
  Description of Artificial Sequence: Synthetic peptide
SEEESKEGG

SEQ ID NO: 16017 - protein, 9 aa, Artificial Sequence
  Description of Artificial Sequence: Synthetic peptide
SEFCAWKCD

SEQ ID NO: 16018 - protein, 9 aa, Artificial Sequence
  Description of Artificial Sequence: Synthetic peptide
SELVRWKHS

SEQ ID NO: 16019 - protein, 9 aa, Artificial Sequence
  Description of Artificial Sequence: Synthetic peptide
SEQNRGSHT

SEQ ID NO: 16020 - protein, 9 aa, Artificial Sequence
  Description of Artificial Sequence: Synthetic peptide
SERKDQRMW

SEQ ID NO: 16021 - protein, 9 aa, Artificial Sequence
  Description of Artificial Sequence: Synthetic peptide
SEWQIFFFN

SEQ ID NO: 16022 - protein, 9 aa, Artificial Sequence
  Description of Artificial Sequence: Synthetic peptide
SFRIANQTN

SEQ ID NO: 16023 - protein, 9 aa, Artificial Sequence
  Description of Artificial Sequence: Synthetic peptide
SFYSTGIWG

SEQ ID NO: 16024 - protein, 9 aa, Artificial Sequence
  Description of Artificial Sequence: Synthetic peptide
SGPDMTAGN

SEQ ID NO: 16025 - protein, 9 aa, Artificial Sequence
  Description of Artificial Sequence: Synthetic peptide
SHRWVMKEH

SEQ ID NO: 16026 - protein, 9 aa, Artificial Sequence
  Description of Artificial Sequence: Synthetic peptide
SHSHQPSAS

SEQ ID NO: 16027 - protein, 9 aa, Artificial Sequence
  Description of Artificial Sequence: Synthetic peptide
SICGAVQNF

SEQ ID NO: 16028 - protein, 9 aa, Artificial Sequence
  Description of Artificial Sequence: Synthetic peptide
SIKGRDWGD

SEQ ID NO: 16029 - protein, 9 aa, Artificial Sequence
  Description of Artificial Sequence: Synthetic peptide
SIMVSTHNN

SEQ ID NO: 16030 - protein, 9 aa, Artificial Sequence
  Description of Artificial Sequence: Synthetic peptide
SIQPLAATT

SEQ ID NO: 16031 - protein, 9 aa, Artificial Sequence
  Description of Artificial Sequence: Synthetic peptide
SKMEEALRM

SEQ ID NO: 16032 - protein, 9 aa, Artificial Sequence
  Description of Artificial Sequence: Synthetic peptide
SLRLELRPQ

SEQ ID NO: 16033 - protein, 9 aa, Artificial Sequence
  Description of Artificial Sequence: Synthetic peptide
SMKHRMQAF

SEQ ID NO: 16034 - protein, 9 aa, Artificial Sequence
  Description of Artificial Sequence: Synthetic peptide
SMLQFLSDD

SEQ ID NO: 16035 - protein, 9 aa, Artificial Sequence
  Description of Artificial Sequence: Synthetic peptide
SMYFKPTQD

SEQ ID NO: 16036 - protein, 9 aa, Artificial Sequence
  Description of Artificial Sequence: Synthetic peptide
SNEMCGFAM

SEQ ID NO: 16037 - protein, 9 aa, Artificial Sequence
  Description of Artificial Sequence: Synthetic peptide
SNLQIQDAK

SEQ ID NO: 16038 - protein, 9 aa, Artificial Sequence
  Description of Artificial Sequence: Synthetic peptide
SNSPTCYAY

SEQ ID NO: 16039 - protein, 9 aa, Artificial Sequence
  Description of Artificial Sequence: Synthetic peptide
SNTMRLNAE

SEQ ID NO: 16040 - protein, 9 aa, Artificial Sequence
  Description of Artificial Sequence: Synthetic peptide
SNYAPFYCD

SEQ ID NO: 16041 - protein, 9 aa, Artificial Sequence
  Description of Artificial Sequence: Synthetic peptide
SPHCYESTP

SEQ ID NO: 16042 - protein, 9 aa, Artificial Sequence
  Description of Artificial Sequence: Synthetic peptide
SPMVKKSGT

SEQ ID NO: 16043 - protein, 9 aa, Artificial Sequence
  Description of Artificial Sequence: Synthetic peptide
SPMYEMSAF

SEQ ID NO: 16044 - protein, 9 aa, Artificial Sequence
  Description of Artificial Sequence: Synthetic peptide
SPNHDAGQN

SEQ ID NO: 16045 - protein, 9 aa, Artificial Sequence
  Description of Artificial Sequence: Synthetic peptide
SQDTEHCWA

SEQ ID NO: 16046 - protein, 9 aa, Artificial Sequence
  Description of Artificial Sequence: Synthetic peptide
SQGCQVKQC

SEQ ID NO: 16047 - protein, 9 aa, Artificial Sequence
  Description of Artificial Sequence: Synthetic peptide
SQMPHSKAA

SEQ ID NO: 16048 - protein, 9 aa, Artificial Sequence
  Description of Artificial Sequence: Synthetic peptide
SQSNFIIME

SEQ ID NO: 16049 - protein, 9 aa, Artificial Sequence
  Description of Artificial Sequence: Synthetic peptide
SRHWRPQSC

SEQ ID NO: 16050 - protein, 9 aa, Artificial Sequence
  Description of Artificial Sequence: Synthetic peptide
SSGLYWKKN

SEQ ID NO: 16051 - protein, 9 aa, Artificial Sequence
  Description of Artificial Sequence: Synthetic peptide
SSLNYSPGA

SEQ ID NO: 16052 - protein, 9 aa, Artificial Sequence
  Description of Artificial Sequence: Synthetic peptide
STAAYQFEE

SEQ ID NO: 16053 - protein, 9 aa, Artificial Sequence
  Description of Artificial Sequence: Synthetic peptide
STAEDQADH

SEQ ID NO: 16054 - protein, 9 aa, Artificial Sequence
  Description of Artificial Sequence: Synthetic peptide
STAPDNTAF

SEQ ID NO: 16055 - protein, 9 aa, Artificial Sequence
  Description of Artificial Sequence: Synthetic peptide
STDALWQEN

SEQ ID NO: 16056 - protein, 9 aa, Artificial Sequence
  Description of Artificial Sequence: Synthetic peptide
STDCIFFQH

SEQ ID NO: 16057 - protein, 9 aa, Artificial Sequence
  Description of Artificial Sequence: Synthetic peptide
STDSMDAEA

SEQ ID NO: 16058 - protein, 9 aa, Artificial Sequence
  Description of Artificial Sequence: Synthetic peptide
STEHLGRND

SEQ ID NO: 16059 - protein, 9 aa, Artificial Sequence
  Description of Artificial Sequence: Synthetic peptide
STEPSGIHQ

SEQ ID NO: 16060 - protein, 9 aa, Artificial Sequence
  Description of Artificial Sequence: Synthetic peptide
STGQDQEHT

SEQ ID NO: 16061 - protein, 9 aa, Artificial Sequence
  Description of Artificial Sequence: Synthetic peptide
STHGQASAI

SEQ ID NO: 16062 - protein, 9 aa, Artificial Sequence
  Description of Artificial Sequence: Synthetic peptide
STKQVEALG

SEQ ID NO: 16063 - protein, 9 aa, Artificial Sequence
  Description of Artificial Sequence: Synthetic peptide
STVNTSSPE

SEQ ID NO: 16064 - protein, 9 aa, Artificial Sequence
  Description of Artificial Sequence: Synthetic peptide
SVCLDIPCI

SEQ ID NO: 16065 - protein, 9 aa, Artificial Sequence
  Description of Artificial Sequence: Synthetic peptide
SVDYTNALT

SEQ ID NO: 16066 - protein, 9 aa, Artificial Sequence
  Description of Artificial Sequence: Synthetic peptide
SVENYERCQ

SEQ ID NO: 16067 - protein, 9 aa, Artificial Sequence
  Description of Artificial Sequence: Synthetic peptide
SVRFDGNDW

SEQ ID NO: 16068 - protein, 9 aa, Artificial Sequence
  Description of Artificial Sequence: Synthetic peptide
SVTVNNVHC

SEQ ID NO: 16069 - protein, 9 aa, Artificial Sequence
  Description of Artificial Sequence: Synthetic peptide
SWAVLHQAQ

SEQ ID NO: 16070 - protein, 9 aa, Artificial Sequence
  Description of Artificial Sequence: Synthetic peptide
SWDMEWDGP

SEQ ID NO: 16071 - protein, 9 aa, Artificial Sequence
  Description of Artificial Sequence: Synthetic peptide
SWDVPLYNP

SEQ ID NO: 16072 - protein, 9 aa, Artificial Sequence
  Description of Artificial Sequence: Synthetic peptide
SYCNLQFMR

SEQ ID NO: 16073 - protein, 9 aa, Artificial Sequence
  Description of Artificial Sequence: Synthetic peptide
SYEKSVNMG

SEQ ID NO: 16074 - protein, 9 aa, Artificial Sequence
  Description of Artificial Sequence: Synthetic peptide
SYQAVFGSI

SEQ ID NO: 16075 - protein, 9 aa, Artificial Sequence
  Description of Artificial Sequence: Synthetic peptide
SYVQRHCVF

SEQ ID NO: 16076 - protein, 9 aa, Artificial Sequence
  Description of Artificial Sequence: Synthetic peptide
TAFSGWKEQ

SEQ ID NO: 16077 - protein, 9 aa, Artificial Sequence
  Description of Artificial Sequence: Synthetic peptide
TAGLGIESV

SEQ ID NO: 16078 - protein, 9 aa, Artificial Sequence
  Description of Artificial Sequence: Synthetic peptide
TAMDCMCGT

SEQ ID NO: 16079 - protein, 9 aa, Artificial Sequence
  Description of Artificial Sequence: Synthetic peptide
TAMKFPGGI

SEQ ID NO: 16080 - protein, 9 aa, Artificial Sequence
  Description of Artificial Sequence: Synthetic peptide
TASPAFDES

SEQ ID NO: 16081 - protein, 9 aa, Artificial Sequence
  Description of Artificial Sequence: Synthetic peptide
TASSWLMHQ

SEQ ID NO: 16082 - protein, 9 aa, Artificial Sequence
  Description of Artificial Sequence: Synthetic peptide
TATGMNRCE

SEQ ID NO: 16083 - protein, 9 aa, Artificial Sequence
  Description of Artificial Sequence: Synthetic peptide
TATSWWAFK

SEQ ID NO: 16084 - protein, 9 aa, Artificial Sequence
  Description of Artificial Sequence: Synthetic peptide
TAVWMDKTS

SEQ ID NO: 16085 - protein, 9 aa, Artificial Sequence
  Description of Artificial Sequence: Synthetic peptide
TCFMGWRCL

SEQ ID NO: 16086 - protein, 9 aa, Artificial Sequence
  Description of Artificial Sequence: Synthetic peptide
TCRMGMEIG

SEQ ID NO: 16087 - protein, 9 aa, Artificial Sequence
  Description of Artificial Sequence: Synthetic peptide
TDQTCSKCI

SEQ ID NO: 16088 - protein, 9 aa, Artificial Sequence
  Description of Artificial Sequence: Synthetic peptide
TEEICQLRE

SEQ ID NO: 16089 - protein, 9 aa, Artificial Sequence
  Description of Artificial Sequence: Synthetic peptide
TEKDNEEHQ

SEQ ID NO: 16090 - protein, 9 aa, Artificial Sequence
  Description of Artificial Sequence: Synthetic peptide
TEKMSHCSE

SEQ ID NO: 16091 - protein, 9 aa, Artificial Sequence
  Description of Artificial Sequence: Synthetic peptide
TESQSGGQP

SEQ ID NO: 16092 - protein, 9 aa, Artificial Sequence
  Description of Artificial Sequence: Synthetic peptide
TFARRADYA

SEQ ID NO: 16093 - protein, 9 aa, Artificial Sequence
  Description of Artificial Sequence: Synthetic peptide
TFPVGYNYT

SEQ ID NO: 16094 - protein, 9 aa, Artificial Sequence
  Description of Artificial Sequence: Synthetic peptide
TGEWQQGKP

SEQ ID NO: 16095 - protein, 9 aa, Artificial Sequence
  Description of Artificial Sequence: Synthetic peptide
THMTIDDAS

SEQ ID NO: 16096 - protein, 9 aa, Artificial Sequence
  Description of Artificial Sequence: Synthetic peptide
TIGVDPSCQ

SEQ ID NO: 16097 - protein, 9 aa, Artificial Sequence
  Description of Artificial Sequence: Synthetic peptide
TIKHILNHK

SEQ ID NO: 16098 - protein, 9 aa, Artificial Sequence
  Description of Artificial Sequence: Synthetic peptide
TIKNYCQGR

SEQ ID NO: 16099 - protein, 9 aa, Artificial Sequence
  Description of Artificial Sequence: Synthetic peptide
TIKYDLHFA

SEQ ID NO: 16100 - protein, 9 aa, Artificial Sequence
  Description of Artificial Sequence: Synthetic peptide
TIMPRHRHA

SEQ ID NO: 16101 - protein, 9 aa, Artificial Sequence
  Description of Artificial Sequence: Synthetic peptide
TITTFWDFE

SEQ ID NO: 16102 - protein, 9 aa, Artificial Sequence
  Description of Artificial Sequence: Synthetic peptide
TKRPFKGQW

SEQ ID NO: 16103 - protein, 9 aa, Artificial Sequence
  Description of Artificial Sequence: Synthetic peptide
TLHHNSDAK

SEQ ID NO: 16104 - protein, 9 aa, Artificial Sequence
  Description of Artificial Sequence: Synthetic peptide
TLIYNAQVT

SEQ ID NO: 16105 - protein, 9 aa, Artificial Sequence
  Description of Artificial Sequence: Synthetic peptide
TMDQKNDMD

SEQ ID NO: 16106 - protein, 9 aa, Artificial Sequence
  Description of Artificial Sequence: Synthetic peptide
TMGTAAKSH

SEQ ID NO: 16107 - protein, 9 aa, Artificial Sequence
  Description of Artificial Sequence: Synthetic peptide
TMPVDVMIP

SEQ ID NO: 16108 - protein, 9 aa, Artificial Sequence
  Description of Artificial Sequence: Synthetic peptide
TMPWQGNHC

SEQ ID NO: 16109 - protein, 9 aa, Artificial Sequence
  Description of Artificial Sequence: Synthetic peptide
TMQNTEPGI

SEQ ID NO: 16110 - protein, 9 aa, Artificial Sequence
  Description of Artificial Sequence: Synthetic peptide
TMREFGEGD

SEQ ID NO: 16111 - protein, 9 aa, Artificial Sequence
  Description of Artificial Sequence: Synthetic peptide
TNADSWDQE

SEQ ID NO: 16112 - protein, 9 aa, Artificial Sequence
  Description of Artificial Sequence: Synthetic peptide
TNGVPPWWS

SEQ ID NO: 16113 - protein, 9 aa, Artificial Sequence
  Description of Artificial Sequence: Synthetic peptide
TNHINFGWI

SEQ ID NO: 16114 - protein, 9 aa, Artificial Sequence
  Description of Artificial Sequence: Synthetic peptide
TNHSFWIQG

SEQ ID NO: 16115 - protein, 9 aa, Artificial Sequence
  Description of Artificial Sequence: Synthetic peptide
TPDCYSMGA

SEQ ID NO: 16116 - protein, 9 aa, Artificial Sequence
  Description of Artificial Sequence: Synthetic peptide
TPNCGINHE

SEQ ID NO: 16117 - protein, 9 aa, Artificial Sequence
  Description of Artificial Sequence: Synthetic peptide
TQCNTDQRT

SEQ ID NO: 16118 - protein, 9 aa, Artificial Sequence
  Description of Artificial Sequence: Synthetic peptide
ETDYCYQCL

SEQ ID NO: 16119 - protein, 9 aa, Artificial Sequence
  Description of Artificial Sequence: Synthetic peptide
EHVFGLLRE

SEQ ID NO: 16120 - protein, 9 aa, Artificial Sequence
  Description of Artificial Sequence: Synthetic peptide
EDHISDSQL

SEQ ID NO: 16121 - protein, 9 aa, Artificial Sequence
  Description of Artificial Sequence: Synthetic peptide
ENTEGIGPS

SEQ ID NO: 16122 - protein, 9 aa, Artificial Sequence
  Description of Artificial Sequence: Synthetic peptide
EVTIHFVPQ

SEQ ID NO: 16123 - protein, 9 aa, Artificial Sequence
  Description of Artificial Sequence: Synthetic peptide
EPRMSDMGD

SEQ ID NO: 16124 - protein, 9 aa, Artificial Sequence
  Description of Artificial Sequence: Synthetic peptide
EPFCTQQLM

SEQ ID NO: 16125 - protein, 9 aa, Artificial Sequence
  Description of Artificial Sequence: Synthetic peptide
EHPRQQDSA

SEQ ID NO: 16126 - protein, 9 aa, Artificial Sequence
  Description of Artificial Sequence: Synthetic peptide
EVTRNHHFN

SEQ ID NO: 16127 - protein, 9 aa, Artificial Sequence
  Description of Artificial Sequence: Synthetic peptide
ETRSGIAWQ

SEQ ID NO: 16128 - protein, 9 aa, Artificial Sequence
  Description of Artificial Sequence: Synthetic peptide
EANLSHSWG

SEQ ID NO: 16129 - protein, 9 aa, Artificial Sequence
  Description of Artificial Sequence: Synthetic peptide
EFLGTRLPD

SEQ ID NO: 16130 - protein, 9 aa, Artificial Sequence
  Description of Artificial Sequence: Synthetic peptide
EGETVISQW

SEQ ID NO: 16131 - protein, 9 aa, Artificial Sequence
  Description of Artificial Sequence: Synthetic peptide
EGRLKRHDF

SEQ ID NO: 16132 - protein, 9 aa, Artificial Sequence
  Description of Artificial Sequence: Synthetic peptide
EGTEEGPTH

SEQ ID NO: 16133 - protein, 9 aa, Artificial Sequence
  Description of Artificial Sequence: Synthetic peptide
ELRFVKTQR

SEQ ID NO: 16134 - protein, 9 aa, Artificial Sequence
  Description of Artificial Sequence: Synthetic peptide
ENLARDAHY

SEQ ID NO: 16135 - protein, 9 aa, Artificial Sequence
  Description of Artificial Sequence: Synthetic peptide
ERTIQHGEA

SEQ ID NO: 16136 - protein, 9 aa, Artificial Sequence
  Description of Artificial Sequence: Synthetic peptide
ESTKAKKFP

SEQ ID NO: 16137 - protein, 9 aa, Artificial Sequence
  Description of Artificial Sequence: Synthetic peptide
EVKLFKRNH

SEQ ID NO: 16138 - protein, 9 aa, Artificial Sequence
  Description of Artificial Sequence: Synthetic peptide
EYKVYRHID

SEQ ID NO: 16139 - protein, 9 aa, Artificial Sequence
  Description of Artificial Sequence: Synthetic peptide
EQKIKNGGH

SEQ ID NO: 16140 - protein, 9 aa, Artificial Sequence
  Description of Artificial Sequence: Synthetic peptide
ERTCIATMW

SEQ ID NO: 16141 - protein, 9 aa, Artificial Sequence
  Description of Artificial Sequence: Synthetic peptide
EVQRNIYSP

SEQ ID NO: 16142 - protein, 9 aa, Artificial Sequence
  Description of Artificial Sequence: Synthetic peptide
EFSAMYSWY

SEQ ID NO: 16143 - protein, 9 aa, Artificial Sequence
  Description of Artificial Sequence: Synthetic peptide
EHITEQDLR

SEQ ID NO: 16144 - protein, 9 aa, Artificial Sequence
  Description of Artificial Sequence: Synthetic peptide
EACYAPSWA

SEQ ID NO: 16145 - protein, 9 aa, Artificial Sequence
  Description of Artificial Sequence: Synthetic peptide
EAEYWNCGR

SEQ ID NO: 16146 - protein, 9 aa, Artificial Sequence
  Description of Artificial Sequence: Synthetic peptide
EAGILMPAL

SEQ ID NO: 16147 - protein, 9 aa, Artificial Sequence
  Description of Artificial Sequence: Synthetic peptide
EANSCEGFQ

SEQ ID NO: 16148 - protein, 9 aa, Artificial Sequence
  Description of Artificial Sequence: Synthetic peptide
EANTWLNSA

SEQ ID NO: 16149 - protein, 9 aa, Artificial Sequence
  Description of Artificial Sequence: Synthetic peptide
EARYSCWWG

SEQ ID NO: 16150 - protein, 9 aa, Artificial Sequence
  Description of Artificial Sequence: Synthetic peptide
ECEQPNRWS

SEQ ID NO: 16151 - protein, 9 aa, Artificial Sequence
  Description of Artificial Sequence: Synthetic peptide
ECFGKRFYD

SEQ ID NO: 16152 - protein, 9 aa, Artificial Sequence
  Description of Artificial Sequence: Synthetic peptide
ECLPVLHND

SEQ ID NO: 16153 - protein, 9 aa, Artificial Sequence
  Description of Artificial Sequence: Synthetic peptide
ECMGPGVCG

SEQ ID NO: 16154 - protein, 9 aa, Artificial Sequence
  Description of Artificial Sequence: Synthetic peptide
ECQLCNWWP

SEQ ID NO: 16155 - protein, 9 aa, Artificial Sequence
  Description of Artificial Sequence: Synthetic peptide
EDFWVFHYK

SEQ ID NO: 16156 - protein, 9 aa, Artificial Sequence
  Description of Artificial Sequence: Synthetic peptide
EEEGQTAAG

SEQ ID NO: 16157 - protein, 9 aa, Artificial Sequence
  Description of Artificial Sequence: Synthetic peptide
EEEQWGHMY

SEQ ID NO: 16158 - protein, 9 aa, Artificial Sequence
  Description of Artificial Sequence: Synthetic peptide
EEVPCEKCF

SEQ ID NO: 16159 - protein, 9 aa, Artificial Sequence
  Description of Artificial Sequence: Synthetic peptide
EEVRPKFGV

SEQ ID NO: 16160 - protein, 9 aa, Artificial Sequence
  Description of Artificial Sequence: Synthetic peptide
EFCEMQNLC

SEQ ID NO: 16161 - protein, 9 aa, Artificial Sequence
  Description of Artificial Sequence: Synthetic peptide
EFCHAMVCQ

SEQ ID NO: 16162 - protein, 9 aa, Artificial Sequence
  Description of Artificial Sequence: Synthetic peptide
EFEDYGSWE

SEQ ID NO: 16163 - protein, 9 aa, Artificial Sequence
  Description of Artificial Sequence: Synthetic peptide
EFEWECVQA

SEQ ID NO: 16164 - protein, 9 aa, Artificial Sequence
  Description of Artificial Sequence: Synthetic peptide
EFFIIGAID

SEQ ID NO: 16165 - protein, 9 aa, Artificial Sequence
  Description of Artificial Sequence: Synthetic peptide
EFKMSVFSN

SEQ ID NO: 16166 - protein, 9 aa, Artificial Sequence
  Description of Artificial Sequence: Synthetic peptide
EFKQEFEAF

SEQ ID NO: 16167 - protein, 9 aa, Artificial Sequence
  Description of Artificial Sequence: Synthetic peptide
EFTRKSCKF

SEQ ID NO: 16168 - protein, 9 aa, Artificial Sequence
  Description of Artificial Sequence: Synthetic peptide
EGEVVDCDK

SEQ ID NO: 16169 - protein, 9 aa, Artificial Sequence
  Description of Artificial Sequence: Synthetic peptide
EGGSQTYQG

SEQ ID NO: 16170 - protein, 9 aa, Artificial Sequence
  Description of Artificial Sequence: Synthetic peptide
EGHQCQEGL

SEQ ID NO: 16171 - protein, 9 aa, Artificial Sequence
  Description of Artificial Sequence: Synthetic peptide
EGRIHAQWM

SEQ ID NO: 16172 - protein, 9 aa, Artificial Sequence
  Description of Artificial Sequence: Synthetic peptide
EGSPQESMS

SEQ ID NO: 16173 - protein, 9 aa, Artificial Sequence
  Description of Artificial Sequence: Synthetic peptide
EGTGMQQAF

SEQ ID NO: 16174 - protein, 9 aa, Artificial Sequence
  Description of Artificial Sequence: Synthetic peptide
EHADSWACP

SEQ ID NO: 16175 - protein, 9 aa, Artificial Sequence
  Description of Artificial Sequence: Synthetic peptide
EHEGLNNHL

SEQ ID NO: 16176 - protein, 9 aa, Artificial Sequence
  Description of Artificial Sequence: Synthetic peptide
EHFFKREDR

SEQ ID NO: 16177 - protein, 9 aa, Artificial Sequence
  Description of Artificial Sequence: Synthetic peptide
EHFTKITVE

SEQ ID NO: 16178 - protein, 9 aa, Artificial Sequence
  Description of Artificial Sequence: Synthetic peptide
EHFYICVHD

SEQ ID NO: 16179 - protein, 9 aa, Artificial Sequence
  Description of Artificial Sequence: Synthetic peptide
EHNKEVYYG

SEQ ID NO: 16180 - protein, 9 aa, Artificial Sequence
  Description of Artificial Sequence: Synthetic peptide
EHRQMHDSY

SEQ ID NO: 16181 - protein, 9 aa, Artificial Sequence
  Description of Artificial Sequence: Synthetic peptide
EHSCTHMGN

SEQ ID NO: 16182 - protein, 9 aa, Artificial Sequence
  Description of Artificial Sequence: Synthetic peptide
EHTRKDVCD

SEQ ID NO: 16183 - protein, 9 aa, Artificial Sequence
  Description of Artificial Sequence: Synthetic peptide
EIHSNIAAG

SEQ ID NO: 16184 - protein, 9 aa, Artificial Sequence
  Description of Artificial Sequence: Synthetic peptide
EILQGTVVQ

SEQ ID NO: 16185 - protein, 9 aa, Artificial Sequence
  Description of Artificial Sequence: Synthetic peptide
EISMRPVTQ

SEQ ID NO: 16186 - protein, 9 aa, Artificial Sequence
  Description of Artificial Sequence: Synthetic peptide
EIVYVDYPH

SEQ ID NO: 16187 - protein, 9 aa, Artificial Sequence
  Description of Artificial Sequence: Synthetic peptide
EKCFCEVCG

SEQ ID NO: 16188 - protein, 9 aa, Artificial Sequence
  Description of Artificial Sequence: Synthetic peptide
EKDHFDVMQ

SEQ ID NO: 16189 - protein, 9 aa, Artificial Sequence
  Description of Artificial Sequence: Synthetic peptide
EKLNHEAGY

SEQ ID NO: 16190 - protein, 9 aa, Artificial Sequence
  Description of Artificial Sequence: Synthetic peptide
EKMHQLATP

SEQ ID NO: 16191 - protein, 9 aa, Artificial Sequence
  Description of Artificial Sequence: Synthetic peptide
EKRMMIDTH

SEQ ID NO: 16192 - protein, 9 aa, Artificial Sequence
  Description of Artificial Sequence: Synthetic peptide
EKWMYDKDL

SEQ ID NO: 16193 - protein, 9 aa, Artificial Sequence
  Description of Artificial Sequence: Synthetic peptide
ELDDICGIL

SEQ ID NO: 16194 - protein, 9 aa, Artificial Sequence
  Description of Artificial Sequence: Synthetic peptide
ELEHYMSYQ

SEQ ID NO: 16195 - protein, 9 aa, Artificial Sequence
  Description of Artificial Sequence: Synthetic peptide
ELKWWWRIF

SEQ ID NO: 16196 - protein, 9 aa, Artificial Sequence
  Description of Artificial Sequence: Synthetic peptide
ELPTILKHR

SEQ ID NO: 16197 - protein, 9 aa, Artificial Sequence
  Description of Artificial Sequence: Synthetic peptide
ELQKWFRKS

SEQ ID NO: 16198 - protein, 9 aa, Artificial Sequence
  Description of Artificial Sequence: Synthetic peptide
EMEGYRAIQ

SEQ ID NO: 16199 - protein, 9 aa, Artificial Sequence
  Description of Artificial Sequence: Synthetic peptide
EMFWQVAGA

SEQ ID NO: 16200 - protein, 9 aa, Artificial Sequence
  Description of Artificial Sequence: Synthetic peptide
EMKFFAYAA

SEQ ID NO: 16201 - protein, 9 aa, Artificial Sequence
  Description of Artificial Sequence: Synthetic peptide
EMKNLKRTG

SEQ ID NO: 16202 - protein, 9 aa, Artificial Sequence
  Description of Artificial Sequence: Synthetic peptide
EMKVIGVDF

SEQ ID NO: 16203 - protein, 9 aa, Artificial Sequence
  Description of Artificial Sequence: Synthetic peptide
EMRQQKMSR

SEQ ID NO: 16204 - protein, 9 aa, Artificial Sequence
  Description of Artificial Sequence: Synthetic peptide
EMRTVMAGV

SEQ ID NO: 16205 - protein, 9 aa, Artificial Sequence
  Description of Artificial Sequence: Synthetic peptide
EMTTSWYMN

SEQ ID NO: 16206 - protein, 9 aa, Artificial Sequence
  Description of Artificial Sequence: Synthetic peptide
EMWSVKFGM

SEQ ID NO: 16207 - protein, 9 aa, Artificial Sequence
  Description of Artificial Sequence: Synthetic peptide
ENAQFLVWA

SEQ ID NO: 16208 - protein, 9 aa, Artificial Sequence
  Description of Artificial Sequence: Synthetic peptide
ENDSVSAIG

SEQ ID NO: 16209 - protein, 9 aa, Artificial Sequence
  Description of Artificial Sequence: Synthetic peptide
ENGHCVSCT

SEQ ID NO: 16210 - protein, 9 aa, Artificial Sequence
  Description of Artificial Sequence: Synthetic peptide
ENHRITGQS

SEQ ID NO: 16211 - protein, 9 aa, Artificial Sequence
  Description of Artificial Sequence: Synthetic peptide
ENRKWTLAF

SEQ ID NO: 16212 - protein, 9 aa, Artificial Sequence
  Description of Artificial Sequence: Synthetic peptide
ENSQTSAFG

SEQ ID NO: 16213 - protein, 9 aa, Artificial Sequence
  Description of Artificial Sequence: Synthetic peptide
EPGELSVHV

SEQ ID NO: 16214 - protein, 9 aa, Artificial Sequence
  Description of Artificial Sequence: Synthetic peptide
EPLTMDTGD

SEQ ID NO: 16215 - protein, 9 aa, Artificial Sequence
  Description of Artificial Sequence: Synthetic peptide
EPRSCNFWC

SEQ ID NO: 16216 - protein, 9 aa, Artificial Sequence
  Description of Artificial Sequence: Synthetic peptide
EQASSGERG

SEQ ID NO: 16217 - protein, 9 aa, Artificial Sequence
  Description of Artificial Sequence: Synthetic peptide
EQMGYVHKG

SEQ ID NO: 16218 - protein, 9 aa, Artificial Sequence
  Description of Artificial Sequence: Synthetic peptide
EQNTANLCD

SEQ ID NO: 16219 - protein, 9 aa, Artificial Sequence
  Description of Artificial Sequence: Synthetic peptide
EQQFWNRLS

SEQ ID NO: 16220 - protein, 9 aa, Artificial Sequence
  Description of Artificial Sequence: Synthetic peptide
EQQTGGYGP

SEQ ID NO: 16221 - protein, 9 aa, Artificial Sequence
  Description of Artificial Sequence: Synthetic peptide
EQRFWNRLS

SEQ ID NO: 16222 - protein, 9 aa, Artificial Sequence
  Description of Artificial Sequence: Synthetic peptide
EQVLMTYWF

SEQ ID NO: 16223 - protein, 9 aa, Artificial Sequence
  Description of Artificial Sequence: Synthetic peptide
ERAEFEMKE

SEQ ID NO: 16224 - protein, 9 aa, Artificial Sequence
  Description of Artificial Sequence: Synthetic peptide
ERAFSHNQS

SEQ ID NO: 16225 - protein, 9 aa, Artificial Sequence
  Description of Artificial Sequence: Synthetic peptide
ERDHIKGCI

SEQ ID NO: 16226 - protein, 9 aa, Artificial Sequence
  Description of Artificial Sequence: Synthetic peptide
ERSDFHWYM

SEQ ID NO: 16227 - protein, 9 aa, Artificial Sequence
  Description of Artificial Sequence: Synthetic peptide
ESDWMNVSM

SEQ ID NO: 16228 - protein, 9 aa, Artificial Sequence
  Description of Artificial Sequence: Synthetic peptide
ESFNYAHFK

SEQ ID NO: 16229 - protein, 9 aa, Artificial Sequence
  Description of Artificial Sequence: Synthetic peptide
ESHPFTNFS

SEQ ID NO: 16230 - protein, 9 aa, Artificial Sequence
  Description of Artificial Sequence: Synthetic peptide
ESISRDQSW

SEQ ID NO: 16231 - protein, 9 aa, Artificial Sequence
  Description of Artificial Sequence: Synthetic peptide
ESKMSHKEA

SEQ ID NO: 16232 - protein, 9 aa, Artificial Sequence
  Description of Artificial Sequence: Synthetic peptide
ESLHALAHM

SEQ ID NO: 16233 - protein, 9 aa, Artificial Sequence
  Description of Artificial Sequence: Synthetic peptide
ESMFWDSDK

SEQ ID NO: 16234 - protein, 9 aa, Artificial Sequence
  Description of Artificial Sequence: Synthetic peptide
ESMRRLGDT

SEQ ID NO: 16235 - protein, 9 aa, Artificial Sequence
  Description of Artificial Sequence: Synthetic peptide
ESNSNRWAY

SEQ ID NO: 16236 - protein, 9 aa, Artificial Sequence
  Description of Artificial Sequence: Synthetic peptide
ESRIMAPLW

SEQ ID NO: 16237 - protein, 9 aa, Artificial Sequence
  Description of Artificial Sequence: Synthetic peptide
ESWNILLTH

SEQ ID NO: 16238 - protein, 9 aa, Artificial Sequence
  Description of Artificial Sequence: Synthetic peptide
ETADRPSLD

SEQ ID NO: 16239 - protein, 9 aa, Artificial Sequence
  Description of Artificial Sequence: Synthetic peptide
ETAHCPLNA

SEQ ID NO: 16240 - protein, 9 aa, Artificial Sequence
  Description of Artificial Sequence: Synthetic peptide
ETCIANAWL

SEQ ID NO: 16241 - protein, 9 aa, Artificial Sequence
  Description of Artificial Sequence: Synthetic peptide
ETDDQMMPP

SEQ ID NO: 16242 - protein, 9 aa, Artificial Sequence
  Description of Artificial Sequence: Synthetic peptide
ETHTSEANM

SEQ ID NO: 16243 - protein, 9 aa, Artificial Sequence
  Description of Artificial Sequence: Synthetic peptide
ETKLLPDLG

SEQ ID NO: 16244 - protein, 9 aa, Artificial Sequence
  Description of Artificial Sequence: Synthetic peptide
ETMAQSCYG

SEQ ID NO: 16245 - protein, 9 aa, Artificial Sequence
  Description of Artificial Sequence: Synthetic peptide
ETMGICHNS

SEQ ID NO: 16246 - protein, 9 aa, Artificial Sequence
  Description of Artificial Sequence: Synthetic peptide
ETMHPVVDG

SEQ ID NO: 16247 - protein, 9 aa, Artificial Sequence
  Description of Artificial Sequence: Synthetic peptide
ETMSTVYGQ

SEQ ID NO: 16248 - protein, 9 aa, Artificial Sequence
  Description of Artificial Sequence: Synthetic peptide
ETNSCEGFQ

SEQ ID NO: 16249 - protein, 9 aa, Artificial Sequence
  Description of Artificial Sequence: Synthetic peptide
ETRQAHLYH

SEQ ID NO: 16250 - protein, 9 aa, Artificial Sequence
  Description of Artificial Sequence: Synthetic peptide
ETTAQKLKI

SEQ ID NO: 16251 - protein, 9 aa, Artificial Sequence
  Description of Artificial Sequence: Synthetic peptide
ETVEYLSYE

SEQ ID NO: 16252 - protein, 9 aa, Artificial Sequence
  Description of Artificial Sequence: Synthetic peptide
EVASKFFEH

SEQ ID NO: 16253 - protein, 9 aa, Artificial Sequence
  Description of Artificial Sequence: Synthetic peptide
EVCRIGWMS

SEQ ID NO: 16254 - protein, 9 aa, Artificial Sequence
  Description of Artificial Sequence: Synthetic peptide
EVCTIMEHP

SEQ ID NO: 16255 - protein, 9 aa, Artificial Sequence
  Description of Artificial Sequence: Synthetic peptide
EVGTSCRFE

SEQ ID NO: 16256 - protein, 9 aa, Artificial Sequence
  Description of Artificial Sequence: Synthetic peptide
EVNDQYREL

SEQ ID NO: 16257 - protein, 9 aa, Artificial Sequence
  Description of Artificial Sequence: Synthetic peptide
EVNMPTGQH

SEQ ID NO: 16258 - protein, 9 aa, Artificial Sequence
  Description of Artificial Sequence: Synthetic peptide
EVPHFDVSQ

SEQ ID NO: 16259 - protein, 9 aa, Artificial Sequence
  Description of Artificial Sequence: Synthetic peptide
EVQCCMAAM

SEQ ID NO: 16260 - protein, 9 aa, Artificial Sequence
  Description of Artificial Sequence: Synthetic peptide
EVQPVRRFT

SEQ ID NO: 16261 - protein, 9 aa, Artificial Sequence
  Description of Artificial Sequence: Synthetic peptide
EVSFKARCA

SEQ ID NO: 16262 - protein, 9 aa, Artificial Sequence
  Description of Artificial Sequence: Synthetic peptide
EVSMPEKTP

SEQ ID NO: 16263 - protein, 9 aa, Artificial Sequence
  Description of Artificial Sequence: Synthetic peptide
EVSMTGHIA

SEQ ID NO: 16264 - protein, 9 aa, Artificial Sequence
  Description of Artificial Sequence: Synthetic peptide
EVSPMRHIM

SEQ ID NO: 16265 - protein, 9 aa, Artificial Sequence
  Description of Artificial Sequence: Synthetic peptide
EVTNEHCCW

SEQ ID NO: 16266 - protein, 9 aa, Artificial Sequence
  Description of Artificial Sequence: Synthetic peptide
EVTQFDNPV

SEQ ID NO: 16267 - protein, 9 aa, Artificial Sequence
  Description of Artificial Sequence: Synthetic peptide
EVTQGECFY

SEQ ID NO: 16268 - protein, 9 aa, Artificial Sequence
  Description of Artificial Sequence: Synthetic peptide
EVVHDPGYA

SEQ ID NO: 16269 - protein, 9 aa, Artificial Sequence
  Description of Artificial Sequence: Synthetic peptide
EVVKCPNSI

SEQ ID NO: 16270 - protein, 9 aa, Artificial Sequence
  Description of Artificial Sequence: Synthetic peptide
EVVKIDMIP

SEQ ID NO: 16271 - protein, 9 aa, Artificial Sequence
  Description of Artificial Sequence: Synthetic peptide
EVYAPRHMC

SEQ ID NO: 16272 - protein, 9 aa, Artificial Sequence
  Description of Artificial Sequence: Synthetic peptide
EWDKMQKVP

SEQ ID NO: 16273 - protein, 9 aa, Artificial Sequence
  Description of Artificial Sequence: Synthetic peptide
EWGRRANKD

SEQ ID NO: 16274 - protein, 9 aa, Artificial Sequence
  Description of Artificial Sequence: Synthetic peptide
EWHAFMSHC

SEQ ID NO: 16275 - protein, 9 aa, Artificial Sequence
  Description of Artificial Sequence: Synthetic peptide
EWWRYMADY

SEQ ID NO: 16276 - protein, 9 aa, Artificial Sequence
  Description of Artificial Sequence: Synthetic peptide
EYCWANKNG

SEQ ID NO: 16277 - protein, 9 aa, Artificial Sequence
  Description of Artificial Sequence: Synthetic peptide
EYIREWAQD

SEQ ID NO: 16278 - protein, 9 aa, Artificial Sequence
  Description of Artificial Sequence: Synthetic peptide
EYKQQGVRR

SEQ ID NO: 16279 - protein, 9 aa, Artificial Sequence
  Description of Artificial Sequence: Synthetic peptide
EYQGNYMAT

SEQ ID NO: 16280 - protein, 9 aa, Artificial Sequence
  Description of Artificial Sequence: Synthetic peptide
EMMERQIHE

SEQ ID NO: 16281 - protein, 9 aa, Artificial Sequence
  Description of Artificial Sequence: Synthetic peptide
EFITSGQCS

SEQ ID NO: 16282 - protein, 9 aa, Artificial Sequence
  Description of Artificial Sequence: Synthetic peptide
EVVFMSGDI

SEQ ID NO: 16283 - protein, 9 aa, Artificial Sequence
  Description of Artificial Sequence: Synthetic peptide
EPGHPGYEM

SEQ ID NO: 16284 - protein, 9 aa, Artificial Sequence
  Description of Artificial Sequence: Synthetic peptide
EVMGLGCDG

SEQ ID NO: 16285 - protein, 9 aa, Artificial Sequence
  Description of Artificial Sequence: Synthetic peptide
EAQWGMDDT

SEQ ID NO: 16286 - protein, 9 aa, Artificial Sequence
  Description of Artificial Sequence: Synthetic peptide
ECKTHRDVY

SEQ ID NO: 16287 - protein, 9 aa, Artificial Sequence
  Description of Artificial Sequence: Synthetic peptide
ENIPQSIWT

SEQ ID NO: 16288 - protein, 9 aa, Artificial Sequence
  Description of Artificial Sequence: Synthetic peptide
ETCWTACDR

SEQ ID NO: 16289 - protein, 9 aa, Artificial Sequence
  Description of Artificial Sequence: Synthetic peptide
EAYTDMPKT

SEQ ID NO: 16290 - protein, 9 aa, Artificial Sequence
  Description of Artificial Sequence: Synthetic peptide
NTRPMRLHM

SEQ ID NO: 16291 - protein, 9 aa, Artificial Sequence
  Description of Artificial Sequence: Synthetic peptide
NTRPMRPHM

SEQ ID NO: 16292 - protein, 9 aa, Artificial Sequence
  Description of Artificial Sequence: Synthetic peptide
QTMQWMCKG

SEQ ID NO: 16293 - protein, 9 aa, Artificial Sequence
  Description of Artificial Sequence: Synthetic peptide
QTMWLKEHR

SEQ ID NO: 16294 - protein, 9 aa, Artificial Sequence
  Description of Artificial Sequence: Synthetic peptide
RTEIRYYGT

SEQ ID NO: 16295 - protein, 9 aa, Artificial Sequence
  Description of Artificial Sequence: Synthetic peptide
STRPAIQKS

SEQ ID NO: 16296 - protein, 9 aa, Artificial Sequence
  Description of Artificial Sequence: Synthetic peptide
STTVWAQCS

SEQ ID NO: 16297 - protein, 9 aa, Artificial Sequence
  Description of Artificial Sequence: Synthetic peptide
STVMESAMY

SEQ ID NO: 16298 - protein, 9 aa, Artificial Sequence
  Description of Artificial Sequence: Synthetic peptide
TTGTFPALP

SEQ ID NO: 16299 - protein, 9 aa, Artificial Sequence
  Description of Artificial Sequence: Synthetic peptide
TTMPKGGNL

SEQ ID NO: 16300 - protein, 9 aa, Artificial Sequence
  Description of Artificial Sequence: Synthetic peptide
VTESWSSWQ

SEQ ID NO: 16301 - protein, 9 aa, Artificial Sequence
  Description of Artificial Sequence: Synthetic peptide
WTCLCYKFM

SEQ ID NO: 16302 - protein, 9 aa, Artificial Sequence
  Description of Artificial Sequence: Synthetic peptide
YTEQEDNAA

SEQ ID NO: 16303 - protein, 9 aa, Artificial Sequence
  Description of Artificial Sequence: Synthetic peptide
KTYCQDGWT

SEQ ID NO: 16304 - protein, 9 aa, Artificial Sequence
  Description of Artificial Sequence: Synthetic peptide
LTTVYNWPH

SEQ ID NO: 16305 - protein, 9 aa, Artificial Sequence
  Description of Artificial Sequence: Synthetic peptide
ITPPYCDMV

SEQ ID NO: 16306 - protein, 9 aa, Artificial Sequence
  Description of Artificial Sequence: Synthetic peptide
LTMMAMCND

SEQ ID NO: 16307 - protein, 9 aa, Artificial Sequence
  Description of Artificial Sequence: Synthetic peptide
ATQTDPVAR

SEQ ID NO: 16308 - protein, 9 aa, Artificial Sequence
  Description of Artificial Sequence: Synthetic peptide
HTLHSHQNT

SEQ ID NO: 16309 - protein, 9 aa, Artificial Sequence
  Description of Artificial Sequence: Synthetic peptide
STERGTPQY

SEQ ID NO: 16310 - protein, 9 aa, Artificial Sequence
  Description of Artificial Sequence: Synthetic peptide
TTGTFPALQ

SEQ ID NO: 16311 - protein, 9 aa, Artificial Sequence
  Description of Artificial Sequence: Synthetic peptide
ATVMFIEIS

SEQ ID NO: 16312 - protein, 9 aa, Artificial Sequence
  Description of Artificial Sequence: Synthetic peptide
FTNQLPEAN

SEQ ID NO: 16313 - protein, 9 aa, Artificial Sequence
  Description of Artificial Sequence: Synthetic peptide
CTLRVEYVQ

SEQ ID NO: 16314 - protein, 9 aa, Artificial Sequence
  Description of Artificial Sequence: Synthetic peptide
VTWMVKTSN

SEQ ID NO: 16315 - protein, 9 aa, Artificial Sequence
  Description of Artificial Sequence: Synthetic peptide
ATQFSGENA

SEQ ID NO: 16316 - protein, 9 aa, Artificial Sequence
  Description of Artificial Sequence: Synthetic peptide
ATQLYAPIA

SEQ ID NO: 16317 - protein, 9 aa, Artificial Sequence
  Description of Artificial Sequence: Synthetic peptide
FTVYVGARE

SEQ ID NO: 16318 - protein, 9 aa, Artificial Sequence
  Description of Artificial Sequence: Synthetic peptide
KTKCCKTHD

SEQ ID NO: 16319 - protein, 9 aa, Artificial Sequence
  Description of Artificial Sequence: Synthetic peptide
KTQIHMGDE

SEQ ID NO: 16320 - protein, 9 aa, Artificial Sequence
  Description of Artificial Sequence: Synthetic peptide
RTEAHLPAP

SEQ ID NO: 16321 - protein, 9 aa, Artificial Sequence
  Description of Artificial Sequence: Synthetic peptide
TTERYEITP

SEQ ID NO: 16322 - protein, 9 aa, Artificial Sequence
  Description of Artificial Sequence: Synthetic peptide
VTVYVGARE

SEQ ID NO: 16323 - protein, 9 aa, Artificial Sequence
  Description of Artificial Sequence: Synthetic peptide
ITASIKDQW

SEQ ID NO: 16324 - protein, 9 aa, Artificial Sequence
  Description of Artificial Sequence: Synthetic peptide
DTAPNESDR

SEQ ID NO: 16325 - protein, 9 aa, Artificial Sequence
  Description of Artificial Sequence: Synthetic peptide
HTRKEGFNS

SEQ ID NO: 16326 - protein, 9 aa, Artificial Sequence
  Description of Artificial Sequence: Synthetic peptide
GTWMEENLH

SEQ ID NO: 16327 - protein, 9 aa, Artificial Sequence
  Description of Artificial Sequence: Synthetic peptide
RTDVMMKVM

SEQ ID NO: 16328 - protein, 9 aa, Artificial Sequence
  Description of Artificial Sequence: Synthetic peptide
ATEMFDCDV

SEQ ID NO: 16329 - protein, 9 aa, Artificial Sequence
  Description of Artificial Sequence: Synthetic peptide
ATNVLYLDC

SEQ ID NO: 16330 - protein, 9 aa, Artificial Sequence
  Description of Artificial Sequence: Synthetic peptide
ATQQVFWNL

SEQ ID NO: 16331 - protein, 9 aa, Artificial Sequence
  Description of Artificial Sequence: Synthetic peptide
ATSHYAKGL

SEQ ID NO: 16332 - protein, 9 aa, Artificial Sequence
  Description of Artificial Sequence: Synthetic peptide
ATSIFCVFR

SEQ ID NO: 16333 - protein, 9 aa, Artificial Sequence
  Description of Artificial Sequence: Synthetic peptide
ATTHWAGHH

SEQ ID NO: 16334 - protein, 9 aa, Artificial Sequence
  Description of Artificial Sequence: Synthetic peptide
ATTMSAFYG

SEQ ID NO: 16335 - protein, 9 aa, Artificial Sequence
  Description of Artificial Sequence: Synthetic peptide
ATTSYNLTR

SEQ ID NO: 16336 - protein, 9 aa, Artificial Sequence
  Description of Artificial Sequence: Synthetic peptide
ATVDISNVK

SEQ ID NO: 16337 - protein, 9 aa, Artificial Sequence
  Description of Artificial Sequence: Synthetic peptide
CTPPIVMDR

SEQ ID NO: 16338 - protein, 9 aa, Artificial Sequence
  Description of Artificial Sequence: Synthetic peptide
CTSFACKYF

SEQ ID NO: 16339 - protein, 9 aa, Artificial Sequence
  Description of Artificial Sequence: Synthetic peptide
DTAMMHKIA

SEQ ID NO: 16340 - protein, 9 aa, Artificial Sequence
  Description of Artificial Sequence: Synthetic peptide
DTGEIMTRS

SEQ ID NO: 16341 - protein, 9 aa, Artificial Sequence
  Description of Artificial Sequence: Synthetic peptide
DTIPYCRGC

SEQ ID NO: 16342 - protein, 9 aa, Artificial Sequence
  Description of Artificial Sequence: Synthetic peptide
DTKFWMQWN

SEQ ID NO: 16343 - protein, 9 aa, Artificial Sequence
  Description of Artificial Sequence: Synthetic peptide
DTKIQTIHT

SEQ ID NO: 16344 - protein, 9 aa, Artificial Sequence
  Description of Artificial Sequence: Synthetic peptide
DTLLPANWS

SEQ ID NO: 16345 - protein, 9 aa, Artificial Sequence
  Description of Artificial Sequence: Synthetic peptide
DTNKLNDLS

SEQ ID NO: 16346 - protein, 9 aa, Artificial Sequence
  Description of Artificial Sequence: Synthetic peptide
DTRQCLDTQ

SEQ ID NO: 16347 - protein, 9 aa, Artificial Sequence
  Description of Artificial Sequence: Synthetic peptide
DTTTSTMAL

SEQ ID NO: 16348 - protein, 9 aa, Artificial Sequence
  Description of Artificial Sequence: Synthetic peptide
DTVNTCGQM

SEQ ID NO: 16349 - protein, 9 aa, Artificial Sequence
  Description of Artificial Sequence: Synthetic peptide
FTELHCNGN

SEQ ID NO: 16350 - protein, 9 aa, Artificial Sequence
  Description of Artificial Sequence: Synthetic peptide
GTEYDRLSP

SEQ ID NO: 16351 - protein, 9 aa, Artificial Sequence
  Description of Artificial Sequence: Synthetic peptide
GTFMDQRPN

SEQ ID NO: 16352 - protein, 9 aa, Artificial Sequence
  Description of Artificial Sequence: Synthetic peptide
GTMPMDAGG

SEQ ID NO: 16353 - protein, 9 aa, Artificial Sequence
  Description of Artificial Sequence: Synthetic peptide
GTMTTLYAN

SEQ ID NO: 16354 - protein, 9 aa, Artificial Sequence
  Description of Artificial Sequence: Synthetic peptide
GTPHVVSQE

SEQ ID NO: 16355 - protein, 9 aa, Artificial Sequence
  Description of Artificial Sequence: Synthetic peptide
GTQVNRATE

SEQ ID NO: 16356 - protein, 9 aa, Artificial Sequence
  Description of Artificial Sequence: Synthetic peptide
GTSVNMKDQ

SEQ ID NO: 16357 - protein, 9 aa, Artificial Sequence
  Description of Artificial Sequence: Synthetic peptide
GTSYWPQWN

SEQ ID NO: 16358 - protein, 9 aa, Artificial Sequence
  Description of Artificial Sequence: Synthetic peptide
HTAICQDAS

SEQ ID NO: 16359 - protein, 9 aa, Artificial Sequence
  Description of Artificial Sequence: Synthetic peptide
HTAYPYQCP

SEQ ID NO: 16360 - protein, 9 aa, Artificial Sequence
  Description of Artificial Sequence: Synthetic peptide
HTDCLFTDD

SEQ ID NO: 16361 - protein, 9 aa, Artificial Sequence
  Description of Artificial Sequence: Synthetic peptide
HTIPFFEAE

SEQ ID NO: 16362 - protein, 9 aa, Artificial Sequence
  Description of Artificial Sequence: Synthetic peptide
HTKMTHGTS

SEQ ID NO: 16363 - protein, 9 aa, Artificial Sequence
  Description of Artificial Sequence: Synthetic peptide
HTMQREYME

SEQ ID NO: 16364 - protein, 9 aa, Artificial Sequence
  Description of Artificial Sequence: Synthetic peptide
HTNCLFTDD

SEQ ID NO: 16365 - protein, 9 aa, Artificial Sequence
  Description of Artificial Sequence: Synthetic peptide
HTTTQVKHP

SEQ ID NO: 16366 - protein, 9 aa, Artificial Sequence
  Description of Artificial Sequence: Synthetic peptide
HTVKIDQTC

SEQ ID NO: 16367 - protein, 9 aa, Artificial Sequence
  Description of Artificial Sequence: Synthetic peptide
ITDQRRRAC

SEQ ID NO: 16368 - protein, 9 aa, Artificial Sequence
  Description of Artificial Sequence: Synthetic peptide
ITELRPLIL

SEQ ID NO: 16369 - protein, 9 aa, Artificial Sequence
  Description of Artificial Sequence: Synthetic peptide
ITNKQQLAR

SEQ ID NO: 16370 - protein, 9 aa, Artificial Sequence
  Description of Artificial Sequence: Synthetic peptide
ITNQFMSKH

SEQ ID NO: 16371 - protein, 9 aa, Artificial Sequence
  Description of Artificial Sequence: Synthetic peptide
ITRVDCSHD

SEQ ID NO: 16372 - protein, 9 aa, Artificial Sequence
  Description of Artificial Sequence: Synthetic peptide
KTEPSVRIA

SEQ ID NO: 16373 - protein, 9 aa, Artificial Sequence
  Description of Artificial Sequence: Synthetic peptide
KTLMWDCQT

SEQ ID NO: 16374 - protein, 9 aa, Artificial Sequence
  Description of Artificial Sequence: Synthetic peptide
KTTILEDKA

SEQ ID NO: 16375 - protein, 9 aa, Artificial Sequence
  Description of Artificial Sequence: Synthetic peptide
KTYICASCF

SEQ ID NO: 16376 - protein, 9 aa, Artificial Sequence
  Description of Artificial Sequence: Synthetic peptide
LTAVSVFRR

SEQ ID NO: 16377 - protein, 9 aa, Artificial Sequence
  Description of Artificial Sequence: Synthetic peptide
LTHDGWFYS

SEQ ID NO: 16378 - protein, 9 aa, Artificial Sequence
  Description of Artificial Sequence: Synthetic peptide
LTKCNEKGN

SEQ ID NO: 16379 - protein, 9 aa, Artificial Sequence
  Description of Artificial Sequence: Synthetic peptide
LTMLHMHCQ

SEQ ID NO: 16380 - protein, 9 aa, Artificial Sequence
  Description of Artificial Sequence: Synthetic peptide
LTSGEGFEV

SEQ ID NO: 16381 - protein, 9 aa, Artificial Sequence
  Description of Artificial Sequence: Synthetic peptide
LTTGIWKTW

SEQ ID NO: 16382 - protein, 9 aa, Artificial Sequence
  Description of Artificial Sequence: Synthetic peptide
LTWMGLSME

SEQ ID NO: 16383 - protein, 9 aa, Artificial Sequence
  Description of Artificial Sequence: Synthetic peptide
LTYVQGDWR

SEQ ID NO: 16384 - protein, 9 aa, Artificial Sequence
  Description of Artificial Sequence: Synthetic peptide
MTEQSGRAY

SEQ ID NO: 16385 - protein, 9 aa, Artificial Sequence
  Description of Artificial Sequence: Synthetic peptide
MTETTDMAH

SEQ ID NO: 16386 - protein, 9 aa, Artificial Sequence
  Description of Artificial Sequence: Synthetic peptide
MTFFVNQAH

SEQ ID NO: 16387 - protein, 9 aa, Artificial Sequence
  Description of Artificial Sequence: Synthetic peptide
MTIGFHVNG

SEQ ID NO: 16388 - protein, 9 aa, Artificial Sequence
  Description of Artificial Sequence: Synthetic peptide
MTKQNKTHR

SEQ ID NO: 16389 - protein, 9 aa, Artificial Sequence
  Description of Artificial Sequence: Synthetic peptide
MTTSSHWAK

SEQ ID NO: 16390 - protein, 9 aa, Artificial Sequence
  Description of Artificial Sequence: Synthetic peptide
MTVQWAQYG

SEQ ID NO: 16391 - protein, 9 aa, Artificial Sequence
  Description of Artificial Sequence: Synthetic peptide
NTAPKMSCT

SEQ ID NO: 16392 - protein, 9 aa, Artificial Sequence
  Description of Artificial Sequence: Synthetic peptide
NTDVPQFMP

SEQ ID NO: 16393 - protein, 9 aa, Artificial Sequence
  Description of Artificial Sequence: Synthetic peptide
NTEPMWSCS

SEQ ID NO: 16394 - protein, 9 aa, Artificial Sequence
  Description of Artificial Sequence: Synthetic peptide
NTEVMDTGQ

SEQ ID NO: 16395 - protein, 9 aa, Artificial Sequence
  Description of Artificial Sequence: Synthetic peptide
NTLRPQHTF

SEQ ID NO: 16396 - protein, 9 aa, Artificial Sequence
  Description of Artificial Sequence: Synthetic peptide
NTMEDWECY

SEQ ID NO: 16397 - protein, 9 aa, Artificial Sequence
  Description of Artificial Sequence: Synthetic peptide
NTNFWNWSL

SEQ ID NO: 16398 - protein, 9 aa, Artificial Sequence
  Description of Artificial Sequence: Synthetic peptide
NTRSKDFWN

SEQ ID NO: 16399 - protein, 9 aa, Artificial Sequence
  Description of Artificial Sequence: Synthetic peptide
NTSAHGYNQ

SEQ ID NO: 16400 - protein, 9 aa, Artificial Sequence
  Description of Artificial Sequence: Synthetic peptide
NTTTFCHDE

SEQ ID NO: 16401 - protein, 9 aa, Artificial Sequence
  Description of Artificial Sequence: Synthetic peptide
NTVFMHEQT

SEQ ID NO: 16402 - protein, 9 aa, Artificial Sequence
  Description of Artificial Sequence: Synthetic peptide
NTVSHFAYD

SEQ ID NO: 16403 - protein, 9 aa, Artificial Sequence
  Description of Artificial Sequence: Synthetic peptide
QTAANFCFD

SEQ ID NO: 16404 - protein, 9 aa, Artificial Sequence
  Description of Artificial Sequence: Synthetic peptide
QTDAQGIGH

SEQ ID NO: 16405 - protein, 9 aa, Artificial Sequence
  Description of Artificial Sequence: Synthetic peptide
QTELDTGIS

SEQ ID NO: 16406 - protein, 9 aa, Artificial Sequence
  Description of Artificial Sequence: Synthetic peptide
QTFLAMDGK

SEQ ID NO: 16407 - protein, 9 aa, Artificial Sequence
  Description of Artificial Sequence: Synthetic peptide
QTHDEYECA

SEQ ID NO: 16408 - protein, 9 aa, Artificial Sequence
  Description of Artificial Sequence: Synthetic peptide
QTIRDMSGF

SEQ ID NO: 16409 - protein, 9 aa, Artificial Sequence
  Description of Artificial Sequence: Synthetic peptide
QTLLSNCCA

SEQ ID NO: 16410 - protein, 9 aa, Artificial Sequence
  Description of Artificial Sequence: Synthetic peptide
QTLWVHGTR

SEQ ID NO: 16411 - protein, 9 aa, Artificial Sequence
  Description of Artificial Sequence: Synthetic peptide
QTMPCMYVE

SEQ ID NO: 16412 - protein, 9 aa, Artificial Sequence
  Description of Artificial Sequence: Synthetic peptide
QTNVELHQE

SEQ ID NO: 16413 - protein, 9 aa, Artificial Sequence
  Description of Artificial Sequence: Synthetic peptide
QTPQYHVGG

SEQ ID NO: 16414 - protein, 9 aa, Artificial Sequence
  Description of Artificial Sequence: Synthetic peptide
QTQLNCAAC

SEQ ID NO: 16415 - protein, 9 aa, Artificial Sequence
  Description of Artificial Sequence: Synthetic peptide
QTSFAETDY

SEQ ID NO: 16416 - protein, 9 aa, Artificial Sequence
  Description of Artificial Sequence: Synthetic peptide
QTTVFQLEN

SEQ ID NO: 16417 - protein, 9 aa, Artificial Sequence
  Description of Artificial Sequence: Synthetic peptide
QTVQLGTPV

SEQ ID NO: 16418 - protein, 9 aa, Artificial Sequence
  Description of Artificial Sequence: Synthetic peptide
QTWAAHCSR

SEQ ID NO: 16419 - protein, 9 aa, Artificial Sequence
  Description of Artificial Sequence: Synthetic peptide
QTYHVYTCC

SEQ ID NO: 16420 - protein, 9 aa, Artificial Sequence
  Description of Artificial Sequence: Synthetic peptide
RTDRNTDFL

SEQ ID NO: 16421 - protein, 9 aa, Artificial Sequence
  Description of Artificial Sequence: Synthetic peptide
RTGFEVPTS

SEQ ID NO: 16422 - protein, 9 aa, Artificial Sequence
  Description of Artificial Sequence: Synthetic peptide
RTHLMEVTQ

SEQ ID NO: 16423 - protein, 9 aa, Artificial Sequence
  Description of Artificial Sequence: Synthetic peptide
STDLKFCAK

SEQ ID NO: 16424 - protein, 9 aa, Artificial Sequence
  Description of Artificial Sequence: Synthetic peptide
STDNKFWLG

SEQ ID NO: 16425 - protein, 9 aa, Artificial Sequence
  Description of Artificial Sequence: Synthetic peptide
STEAAYENP

SEQ ID NO: 16426 - protein, 9 aa, Artificial Sequence
  Description of Artificial Sequence: Synthetic peptide
STERMFKEA

SEQ ID NO: 16427 - protein, 9 aa, Artificial Sequence
  Description of Artificial Sequence: Synthetic peptide
STFTAGATM

SEQ ID NO: 16428 - protein, 9 aa, Artificial Sequence
  Description of Artificial Sequence: Synthetic peptide
STHGHISHN

SEQ ID NO: 16429 - protein, 9 aa, Artificial Sequence
  Description of Artificial Sequence: Synthetic peptide
STMNFLPCE

SEQ ID NO: 16430 - protein, 9 aa, Artificial Sequence
  Description of Artificial Sequence: Synthetic peptide
STMSCEILR

SEQ ID NO: 16431 - protein, 9 aa, Artificial Sequence
  Description of Artificial Sequence: Synthetic peptide
STMTCGEFA

SEQ ID NO: 16432 - protein, 9 aa, Artificial Sequence
  Description of Artificial Sequence: Synthetic peptide
STSDHHCHS

SEQ ID NO: 16433 - protein, 9 aa, Artificial Sequence
  Description of Artificial Sequence: Synthetic peptide
STSSLDKLI

SEQ ID NO: 16434 - protein, 9 aa, Artificial Sequence
  Description of Artificial Sequence: Synthetic peptide
STTNPYQLA

SEQ ID NO: 16435 - protein, 9 aa, Artificial Sequence
  Description of Artificial Sequence: Synthetic peptide
TTAMYPVHT

SEQ ID NO: 16436 - protein, 9 aa, Artificial Sequence
  Description of Artificial Sequence: Synthetic peptide
TTDCMWENH

SEQ ID NO: 16437 - protein, 9 aa, Artificial Sequence
  Description of Artificial Sequence: Synthetic peptide
TTDQKRHGS

SEQ ID NO: 16438 - protein, 9 aa, Artificial Sequence
  Description of Artificial Sequence: Synthetic peptide
TTEQWDFCR

SEQ ID NO: 16439 - protein, 9 aa, Artificial Sequence
  Description of Artificial Sequence: Synthetic peptide
TTERTRICN

SEQ ID NO: 16440 - protein, 9 aa, Artificial Sequence
  Description of Artificial Sequence: Synthetic peptide
TTMPHHEWQ

SEQ ID NO: 16441 - protein, 9 aa, Artificial Sequence
  Description of Artificial Sequence: Synthetic peptide
TTMQCNSYD

SEQ ID NO: 16442 - protein, 9 aa, Artificial Sequence
  Description of Artificial Sequence: Synthetic peptide
TTNPVEMFN

SEQ ID NO: 16443 - protein, 9 aa, Artificial Sequence
  Description of Artificial Sequence: Synthetic peptide
TTTHMLTRC

SEQ ID NO: 16444 - protein, 9 aa, Artificial Sequence
  Description of Artificial Sequence: Synthetic peptide
TTVPFQAWC

SEQ ID NO: 16445 - protein, 9 aa, Artificial Sequence
  Description of Artificial Sequence: Synthetic peptide
TTYCPPTVE

SEQ ID NO: 16446 - protein, 9 aa, Artificial Sequence
  Description of Artificial Sequence: Synthetic peptide
VTDLVRHFA

SEQ ID NO: 16447 - protein, 9 aa, Artificial Sequence
  Description of Artificial Sequence: Synthetic peptide
VTEHQQRSV

SEQ ID NO: 16448 - protein, 9 aa, Artificial Sequence
  Description of Artificial Sequence: Synthetic peptide
VTENLMMYH

SEQ ID NO: 16449 - protein, 9 aa, Artificial Sequence
  Description of Artificial Sequence: Synthetic peptide
VTEQDDGQW

SEQ ID NO: 16450 - protein, 9 aa, Artificial Sequence
  Description of Artificial Sequence: Synthetic peptide
VTKEMVWQC

SEQ ID NO: 16451 - protein, 9 aa, Artificial Sequence
  Description of Artificial Sequence: Synthetic peptide
VTNQCCKAM

SEQ ID NO: 16452 - protein, 9 aa, Artificial Sequence
  Description of Artificial Sequence: Synthetic peptide
VTTQSCKWM

SEQ ID NO: 16453 - protein, 9 aa, Artificial Sequence
  Description of Artificial Sequence: Synthetic peptide
WTDNYFHES

SEQ ID NO: 16454 - protein, 9 aa, Artificial Sequence
  Description of Artificial Sequence: Synthetic peptide
WTLHNQSLK

SEQ ID NO: 16455 - protein, 9 aa, Artificial Sequence
  Description of Artificial Sequence: Synthetic peptide
WTVHNKDEA

SEQ ID NO: 16456 - protein, 9 aa, Artificial Sequence
  Description of Artificial Sequence: Synthetic peptide
YTKAEDSIC

SEQ ID NO: 16457 - protein, 9 aa, Artificial Sequence
  Description of Artificial Sequence: Synthetic peptide
YTKQIDNIE

SEQ ID NO: 16458 - protein, 9 aa, Artificial Sequence
  Description of Artificial Sequence: Synthetic peptide
STMMVGRQC

SEQ ID NO: 16459 - protein, 9 aa, Artificial Sequence
  Description of Artificial Sequence: Synthetic peptide
ITNSERATY

SEQ ID NO: 16460 - protein, 9 aa, Artificial Sequence
  Description of Artificial Sequence: Synthetic peptide
PTDVITTDQ

SEQ ID NO: 16461 - protein, 9 aa, Artificial Sequence
  Description of Artificial Sequence: Synthetic peptide
DTITFKQQH

SEQ ID NO: 16462 - protein, 9 aa, Artificial Sequence
  Description of Artificial Sequence: Synthetic peptide
MTTEHITWW

SEQ ID NO: 16463 - protein, 9 aa, Artificial Sequence
  Description of Artificial Sequence: Synthetic peptide
ITAIMCRSS

SEQ ID NO: 16464 - protein, 9 aa, Artificial Sequence
  Description of Artificial Sequence: Synthetic peptide
CTESCQTGP

SEQ ID NO: 16465 - protein, 9 aa, Artificial Sequence
  Description of Artificial Sequence: Synthetic peptide
MTESVENPG

SEQ ID NO: 16466 - protein, 9 aa, Artificial Sequence
  Description of Artificial Sequence: Synthetic peptide
STTAYHQDY

SEQ ID NO: 16467 - protein, 9 aa, Artificial Sequence
  Description of Artificial Sequence: Synthetic peptide
CTEIRYYGT

SEQ ID NO: 16468 - protein, 9 aa, Artificial Sequence
  Description of Artificial Sequence: Synthetic peptide
QERGSLWYG

SEQ ID NO: 16469 - protein, 9 aa, Artificial Sequence
  Description of Artificial Sequence: Synthetic peptide
WWRAMEKDM

SEQ ID NO: 16470 - protein, 9 aa, Artificial Sequence
  Description of Artificial Sequence: Synthetic peptide
LDRNQSYHA

SEQ ID NO: 16471 - protein, 9 aa, Artificial Sequence
  Description of Artificial Sequence: Synthetic peptide
SLRTPECDC

SEQ ID NO: 16472 - protein, 9 aa, Artificial Sequence
  Description of Artificial Sequence: Synthetic peptide
CYRCALWTV

SEQ ID NO: 16473 - protein, 9 aa, Artificial Sequence
  Description of Artificial Sequence: Synthetic peptide
ANRFYDCSH

SEQ ID NO: 16474 - protein, 9 aa, Artificial Sequence
  Description of Artificial Sequence: Synthetic peptide
DRREKQLMK

SEQ ID NO: 16475 - protein, 9 aa, Artificial Sequence
  Description of Artificial Sequence: Synthetic peptide
DVRAMHSTC

SEQ ID NO: 16476 - protein, 9 aa, Artificial Sequence
  Description of Artificial Sequence: Synthetic peptide
FCRMYANAD

SEQ ID NO: 16477 - protein, 9 aa, Artificial Sequence
  Description of Artificial Sequence: Synthetic peptide
IGRLNASTP

SEQ ID NO: 16478 - protein, 9 aa, Artificial Sequence
  Description of Artificial Sequence: Synthetic peptide
IRRSMQQQN

SEQ ID NO: 16479 - protein, 9 aa, Artificial Sequence
  Description of Artificial Sequence: Synthetic peptide
PSRWYKLGI

SEQ ID NO: 16480 - protein, 9 aa, Artificial Sequence
  Description of Artificial Sequence: Synthetic peptide
TIRYIGMSG

SEQ ID NO: 16481 - protein, 9 aa, Artificial Sequence
  Description of Artificial Sequence: Synthetic peptide
ASRSCMTQE

SEQ ID NO: 16482 - protein, 9 aa, Artificial Sequence
  Description of Artificial Sequence: Synthetic peptide
AERQACTMG

SEQ ID NO: 16483 - protein, 9 aa, Artificial Sequence
  Description of Artificial Sequence: Synthetic peptide
VGRERVWDS

SEQ ID NO: 16484 - protein, 9 aa, Artificial Sequence
  Description of Artificial Sequence: Synthetic peptide
ALRPYMDDR

SEQ ID NO: 16485 - protein, 9 aa, Artificial Sequence
  Description of Artificial Sequence: Synthetic peptide
ASRYDYNHG

SEQ ID NO: 16486 - protein, 9 aa, Artificial Sequence
  Description of Artificial Sequence: Synthetic peptide
ASRYDYSHG

SEQ ID NO: 16487 - protein, 9 aa, Artificial Sequence
  Description of Artificial Sequence: Synthetic peptide
CERQALKMI

SEQ ID NO: 16488 - protein, 9 aa, Artificial Sequence
  Description of Artificial Sequence: Synthetic peptide
CLRQDRIIF

SEQ ID NO: 16489 - protein, 9 aa, Artificial Sequence
  Description of Artificial Sequence: Synthetic peptide
DARPSPISQ

SEQ ID NO: 16490 - protein, 9 aa, Artificial Sequence
  Description of Artificial Sequence: Synthetic peptide
DARVSNIQQ

SEQ ID NO: 16491 - protein, 9 aa, Artificial Sequence
  Description of Artificial Sequence: Synthetic peptide
DCRCYGNNS

SEQ ID NO: 16492 - protein, 9 aa, Artificial Sequence
  Description of Artificial Sequence: Synthetic peptide
DKRDHHYFA

SEQ ID NO: 16493 - protein, 9 aa, Artificial Sequence
  Description of Artificial Sequence: Synthetic peptide
DSRFYEVQL

SEQ ID NO: 16494 - protein, 9 aa, Artificial Sequence
  Description of Artificial Sequence: Synthetic peptide
DSRQLHHIG

SEQ ID NO: 16495 - protein, 9 aa, Artificial Sequence
  Description of Artificial Sequence: Synthetic peptide
DSRYTQCYI

SEQ ID NO: 16496 - protein, 9 aa, Artificial Sequence
  Description of Artificial Sequence: Synthetic peptide
DVRMNQDLY

SEQ ID NO: 16497 - protein, 9 aa, Artificial Sequence
  Description of Artificial Sequence: Synthetic peptide
FGRNYTDHL

SEQ ID NO: 16498 - protein, 9 aa, Artificial Sequence
  Description of Artificial Sequence: Synthetic peptide
FGRYRLWKG

SEQ ID NO: 16499 - protein, 9 aa, Artificial Sequence
  Description of Artificial Sequence: Synthetic peptide
GERWPHNML

SEQ ID NO: 16500 - protein, 9 aa, Artificial Sequence
  Description of Artificial Sequence: Synthetic peptide
GFRVGSLRH

SEQ ID NO: 16501 - protein, 9 aa, Artificial Sequence
  Description of Artificial Sequence: Synthetic peptide
GIRLKGNIM

SEQ ID NO: 16502 - protein, 9 aa, Artificial Sequence
  Description of Artificial Sequence: Synthetic peptide
GSRPRMKQP

SEQ ID NO: 16503 - protein, 9 aa, Artificial Sequence
  Description of Artificial Sequence: Synthetic peptide
HCRLKEDEG

SEQ ID NO: 16504 - protein, 9 aa, Artificial Sequence
  Description of Artificial Sequence: Synthetic peptide
HERTAKFRY

SEQ ID NO: 16505 - protein, 9 aa, Artificial Sequence
  Description of Artificial Sequence: Synthetic peptide
HRRLFNKMN

SEQ ID NO: 16506 - protein, 9 aa, Artificial Sequence
  Description of Artificial Sequence: Synthetic peptide
IERNSGQGS

SEQ ID NO: 16507 - protein, 9 aa, Artificial Sequence
  Description of Artificial Sequence: Synthetic peptide
IGRDIDTSF

SEQ ID NO: 16508 - protein, 9 aa, Artificial Sequence
  Description of Artificial Sequence: Synthetic peptide
INRENRRGG

SEQ ID NO: 16509 - protein, 9 aa, Artificial Sequence
  Description of Artificial Sequence: Synthetic peptide
ISRMCESAL

SEQ ID NO: 16510 - protein, 9 aa, Artificial Sequence
  Description of Artificial Sequence: Synthetic peptide
KLREVGRPC

SEQ ID NO: 16511 - protein, 9 aa, Artificial Sequence
  Description of Artificial Sequence: Synthetic peptide
KQRDYMRKR

SEQ ID NO: 16512 - protein, 9 aa, Artificial Sequence
  Description of Artificial Sequence: Synthetic peptide
LMRWPWDDT

SEQ ID NO: 16513 - protein, 9 aa, Artificial Sequence
  Description of Artificial Sequence: Synthetic peptide
LNRILDRMG

SEQ ID NO: 16514 - protein, 9 aa, Artificial Sequence
  Description of Artificial Sequence: Synthetic peptide
MGRTCADWT

SEQ ID NO: 16515 - protein, 9 aa, Artificial Sequence
  Description of Artificial Sequence: Synthetic peptide
MIRNETQWA

SEQ ID NO: 16516 - protein, 9 aa, Artificial Sequence
  Description of Artificial Sequence: Synthetic peptide
MVRFAPAYP

SEQ ID NO: 16517 - protein, 9 aa, Artificial Sequence
  Description of Artificial Sequence: Synthetic peptide
NMRYTEMGV

SEQ ID NO: 16518 - protein, 9 aa, Artificial Sequence
  Description of Artificial Sequence: Synthetic peptide
QCRNQDKSQ

SEQ ID NO: 16519 - protein, 9 aa, Artificial Sequence
  Description of Artificial Sequence: Synthetic peptide
QERWQIQTW

SEQ ID NO: 16520 - protein, 9 aa, Artificial Sequence
  Description of Artificial Sequence: Synthetic peptide
QSRLEHYGL

SEQ ID NO: 16521 - protein, 9 aa, Artificial Sequence
  Description of Artificial Sequence: Synthetic peptide
SHREMNRAR

SEQ ID NO: 16522 - protein, 9 aa, Artificial Sequence
  Description of Artificial Sequence: Synthetic peptide
SPREKNHYW

SEQ ID NO: 16523 - protein, 9 aa, Artificial Sequence
  Description of Artificial Sequence: Synthetic peptide
TAREDCQHA

SEQ ID NO: 16524 - protein, 9 aa, Artificial Sequence
  Description of Artificial Sequence: Synthetic peptide
TARLIEKYN

SEQ ID NO: 16525 - protein, 9 aa, Artificial Sequence
  Description of Artificial Sequence: Synthetic peptide
TVRWQADTM

SEQ ID NO: 16526 - protein, 9 aa, Artificial Sequence
  Description of Artificial Sequence: Synthetic peptide
VERHKMKWQ

SEQ ID NO: 16527 - protein, 9 aa, Artificial Sequence
  Description of Artificial Sequence: Synthetic peptide
VSRSLERQA

SEQ ID NO: 16528 - protein, 9 aa, Artificial Sequence
  Description of Artificial Sequence: Synthetic peptide
WCRQTMMDW

SEQ ID NO: 16529 - protein, 9 aa, Artificial Sequence
  Description of Artificial Sequence: Synthetic peptide
WFRRHNYFY

SEQ ID NO: 16530 - protein, 9 aa, Artificial Sequence
  Description of Artificial Sequence: Synthetic peptide
WNRDHNDWT

SEQ ID NO: 16531 - protein, 9 aa, Artificial Sequence
  Description of Artificial Sequence: Synthetic peptide
DVRSHDEMT

SEQ ID NO: 16532 - protein, 9 aa, Artificial Sequence
  Description of Artificial Sequence: Synthetic peptide
TERRMFRTA

SEQ ID NO: 16533 - protein, 9 aa, Artificial Sequence
  Description of Artificial Sequence: Synthetic peptide
QVRFEQNPA

SEQ ID NO: 16534 - protein, 9 aa, Artificial Sequence
  Description of Artificial Sequence: Synthetic peptide
MDRMHKSGI

SEQ ID NO: 16535 - protein, 9 aa, Artificial Sequence
  Description of Artificial Sequence: Synthetic peptide
KNRDFEGFD

SEQ ID NO: 16536 - protein, 9 aa, Artificial Sequence
  Description of Artificial Sequence: Synthetic peptide
NQDQARTEH

SEQ ID NO: 16537 - protein, 9 aa, Artificial Sequence
  Description of Artificial Sequence: Synthetic peptide
QAFQFECHD

SEQ ID NO: 16538 - protein, 9 aa, Artificial Sequence
  Description of Artificial Sequence: Synthetic peptide
QATQAGANQ

SEQ ID NO: 16539 - protein, 9 aa, Artificial Sequence
  Description of Artificial Sequence: Synthetic peptide
RMAQFFRAH

SEQ ID NO: 16540 - protein, 9 aa, Artificial Sequence
  Description of Artificial Sequence: Synthetic peptide
RNLQGGNHG

SEQ ID NO: 16541 - protein, 9 aa, Artificial Sequence
  Description of Artificial Sequence: Synthetic peptide
SCLQYKATE

SEQ ID NO: 16542 - protein, 9 aa, Artificial Sequence
  Description of Artificial Sequence: Synthetic peptide
SIEQKLTFT

SEQ ID NO: 16543 - protein, 9 aa, Artificial Sequence
  Description of Artificial Sequence: Synthetic peptide
VGWQYCEEG

SEQ ID NO: 16544 - protein, 9 aa, Artificial Sequence
  Description of Artificial Sequence: Synthetic peptide
TRKQGEGPY

SEQ ID NO: 16545 - protein, 9 aa, Artificial Sequence
  Description of Artificial Sequence: Synthetic peptide
TGHQLPYNK

SEQ ID NO: 16546 - protein, 9 aa, Artificial Sequence
  Description of Artificial Sequence: Synthetic peptide
LIDQNTKGN

SEQ ID NO: 16547 - protein, 9 aa, Artificial Sequence
  Description of Artificial Sequence: Synthetic peptide
CGYQFSETM

SEQ ID NO: 16548 - protein, 9 aa, Artificial Sequence
  Description of Artificial Sequence: Synthetic peptide
SGCQYEPRN

SEQ ID NO: 16549 - protein, 9 aa, Artificial Sequence
  Description of Artificial Sequence: Synthetic peptide
IQAQMDQQQ

SEQ ID NO: 16550 - protein, 9 aa, Artificial Sequence
  Description of Artificial Sequence: Synthetic peptide
CFNQRIQDS

SEQ ID NO: 16551 - protein, 9 aa, Artificial Sequence
  Description of Artificial Sequence: Synthetic peptide
MGLQNDPTS

SEQ ID NO: 16552 - protein, 9 aa, Artificial Sequence
  Description of Artificial Sequence: Synthetic peptide
TATQREAFV

SEQ ID NO: 16553 - protein, 9 aa, Artificial Sequence
  Description of Artificial Sequence: Synthetic peptide
IAEQRLVEV

SEQ ID NO: 16554 - protein, 9 aa, Artificial Sequence
  Description of Artificial Sequence: Synthetic peptide
QPSQQGRPG

SEQ ID NO: 16555 - protein, 9 aa, Artificial Sequence
  Description of Artificial Sequence: Synthetic peptide
AVDQLRMFL

SEQ ID NO: 16556 - protein, 9 aa, Artificial Sequence
  Description of Artificial Sequence: Synthetic peptide
CDHQRHQQP

SEQ ID NO: 16557 - protein, 9 aa, Artificial Sequence
  Description of Artificial Sequence: Synthetic peptide
FRKQGHGEK

SEQ ID NO: 16558 - protein, 9 aa, Artificial Sequence
  Description of Artificial Sequence: Synthetic peptide
IIGQWGQSD

SEQ ID NO: 16559 - protein, 9 aa, Artificial Sequence
  Description of Artificial Sequence: Synthetic peptide
IIGQWGRSD

SEQ ID NO: 16560 - protein, 9 aa, Artificial Sequence
  Description of Artificial Sequence: Synthetic peptide
NELQQGTSE

SEQ ID NO: 16561 - protein, 9 aa, Artificial Sequence
  Description of Artificial Sequence: Synthetic peptide
NVSQWMITY

SEQ ID NO: 16562 - protein, 9 aa, Artificial Sequence
  Description of Artificial Sequence: Synthetic peptide
QYVQCAAKD

SEQ ID NO: 16563 - protein, 9 aa, Artificial Sequence
  Description of Artificial Sequence: Synthetic peptide
SLTQYQWRG

SEQ ID NO: 16564 - protein, 9 aa, Artificial Sequence
  Description of Artificial Sequence: Synthetic peptide
VDMQKQTES

SEQ ID NO: 16565 - protein, 9 aa, Artificial Sequence
  Description of Artificial Sequence: Synthetic peptide
VNVQMPSAP

SEQ ID NO: 16566 - protein, 9 aa, Artificial Sequence
  Description of Artificial Sequence: Synthetic peptide
WAMQWWAKP

SEQ ID NO: 16567 - protein, 9 aa, Artificial Sequence
  Description of Artificial Sequence: Synthetic peptide
YESQKGRRA

SEQ ID NO: 16568 - protein, 9 aa, Artificial Sequence
  Description of Artificial Sequence: Synthetic peptide
MGMQQDTQV

SEQ ID NO: 16569 - protein, 9 aa, Artificial Sequence
  Description of Artificial Sequence: Synthetic peptide
AAQQGLNPC

SEQ ID NO: 16570 - protein, 9 aa, Artificial Sequence
  Description of Artificial Sequence: Synthetic peptide
ADIQISLCD

SEQ ID NO: 16571 - protein, 9 aa, Artificial Sequence
  Description of Artificial Sequence: Synthetic peptide
AFAQYSRGN

SEQ ID NO: 16572 - protein, 9 aa, Artificial Sequence
  Description of Artificial Sequence: Synthetic peptide
AFNQQEMWA

SEQ ID NO: 16573 - protein, 9 aa, Artificial Sequence
  Description of Artificial Sequence: Synthetic peptide
ANHQVTSHP

SEQ ID NO: 16574 - protein, 9 aa, Artificial Sequence
  Description of Artificial Sequence: Synthetic peptide
ANMQPNAIM

SEQ ID NO: 16575 - protein, 9 aa, Artificial Sequence
  Description of Artificial Sequence: Synthetic peptide
ASGQFPKEG

SEQ ID NO: 16576 - protein, 9 aa, Artificial Sequence
  Description of Artificial Sequence: Synthetic peptide
ASLQATCNH

SEQ ID NO: 16577 - protein, 9 aa, Artificial Sequence
  Description of Artificial Sequence: Synthetic peptide
AYAQKYRTA

SEQ ID NO: 16578 - protein, 9 aa, Artificial Sequence
  Description of Artificial Sequence: Synthetic peptide
CFSQTDCMS

SEQ ID NO: 16579 - protein, 9 aa, Artificial Sequence
  Description of Artificial Sequence: Synthetic peptide
CIWQHNITQ

SEQ ID NO: 16580 - protein, 9 aa, Artificial Sequence
  Description of Artificial Sequence: Synthetic peptide
CSQQVNCLS

SEQ ID NO: 16581 - protein, 9 aa, Artificial Sequence
  Description of Artificial Sequence: Synthetic peptide
CWMQSQENW

SEQ ID NO: 16582 - protein, 9 aa, Artificial Sequence
  Description of Artificial Sequence: Synthetic peptide
DCAQITYGG

SEQ ID NO: 16583 - protein, 9 aa, Artificial Sequence
  Description of Artificial Sequence: Synthetic peptide
DCAQLRQDG

SEQ ID NO: 16584 - protein, 9 aa, Artificial Sequence
  Description of Artificial Sequence: Synthetic peptide
DFVQSDTEF

SEQ ID NO: 16585 - protein, 9 aa, Artificial Sequence
  Description of Artificial Sequence: Synthetic peptide
DGLQIQIQE

SEQ ID NO: 16586 - protein, 9 aa, Artificial Sequence
  Description of Artificial Sequence: Synthetic peptide
DKMQCSSGG

SEQ ID NO: 16587 - protein, 9 aa, Artificial Sequence
  Description of Artificial Sequence: Synthetic peptide
DMAQQQKSH

SEQ ID NO: 16588 - protein, 9 aa, Artificial Sequence
  Description of Artificial Sequence: Synthetic peptide
DVMQGNRAF

SEQ ID NO: 16589 - protein, 9 aa, Artificial Sequence
  Description of Artificial Sequence: Synthetic peptide
DWAQFCNHT

SEQ ID NO: 16590 - protein, 9 aa, Artificial Sequence
  Description of Artificial Sequence: Synthetic peptide
DYAQFSVVP

SEQ ID NO: 16591 - protein, 9 aa, Artificial Sequence
  Description of Artificial Sequence: Synthetic peptide
DYAQGAAMP

SEQ ID NO: 16592 - protein, 9 aa, Artificial Sequence
  Description of Artificial Sequence: Synthetic peptide
FGMQRRHKE

SEQ ID NO: 16593 - protein, 9 aa, Artificial Sequence
  Description of Artificial Sequence: Synthetic peptide
FHKQFHSKF

SEQ ID NO: 16594 - protein, 9 aa, Artificial Sequence
  Description of Artificial Sequence: Synthetic peptide
GDEQTHCNG

SEQ ID NO: 16595 - protein, 9 aa, Artificial Sequence
  Description of Artificial Sequence: Synthetic peptide
GFTQFYHHE

SEQ ID NO: 16596 - protein, 9 aa, Artificial Sequence
  Description of Artificial Sequence: Synthetic peptide
GIHQETYCP

SEQ ID NO: 16597 - protein, 9 aa, Artificial Sequence
  Description of Artificial Sequence: Synthetic peptide
GITQMSQHA

SEQ ID NO: 16598 - protein, 9 aa, Artificial Sequence
  Description of Artificial Sequence: Synthetic peptide
GMVQDYVWL

SEQ ID NO: 16599 - protein, 9 aa, Artificial Sequence
  Description of Artificial Sequence: Synthetic peptide
GSMQVMKKC

SEQ ID NO: 16600 - protein, 9 aa, Artificial Sequence
  Description of Artificial Sequence: Synthetic peptide
GVCQMSEMR

SEQ ID NO: 16601 - protein, 9 aa, Artificial Sequence
  Description of Artificial Sequence: Synthetic peptide
GVFQEASHK

SEQ ID NO: 16602 - protein, 9 aa, Artificial Sequence
  Description of Artificial Sequence: Synthetic peptide
GVTQGHEIT

SEQ ID NO: 16603 - protein, 9 aa, Artificial Sequence
  Description of Artificial Sequence: Synthetic peptide
GWMQWHRQR

SEQ ID NO: 16604 - protein, 9 aa, Artificial Sequence
  Description of Artificial Sequence: Synthetic peptide
GYEQPVKCE

SEQ ID NO: 16605 - protein, 9 aa, Artificial Sequence
  Description of Artificial Sequence: Synthetic peptide
GYIQCQMHA

SEQ ID NO: 16606 - protein, 9 aa, Artificial Sequence
  Description of Artificial Sequence: Synthetic peptide
HASQEYTSL

SEQ ID NO: 16607 - protein, 9 aa, Artificial Sequence
  Description of Artificial Sequence: Synthetic peptide
HASQLGAMV

SEQ ID NO: 16608 - protein, 9 aa, Artificial Sequence
  Description of Artificial Sequence: Synthetic peptide
HDAQFLPDQ

SEQ ID NO: 16609 - protein, 9 aa, Artificial Sequence
  Description of Artificial Sequence: Synthetic peptide
HGLQVGQFY

SEQ ID NO: 16610 - protein, 9 aa, Artificial Sequence
  Description of Artificial Sequence: Synthetic peptide
HPEQFVACE

SEQ ID NO: 16611 - protein, 9 aa, Artificial Sequence
  Description of Artificial Sequence: Synthetic peptide
HSNQMWYCY

SEQ ID NO: 16612 - protein, 9 aa, Artificial Sequence
  Description of Artificial Sequence: Synthetic peptide
HWAQLKVTY

SEQ ID NO: 16613 - protein, 9 aa, Artificial Sequence
  Description of Artificial Sequence: Synthetic peptide
IHKQFEMES

SEQ ID NO: 16614 - protein, 9 aa, Artificial Sequence
  Description of Artificial Sequence: Synthetic peptide
IHQQTHYQF

SEQ ID NO: 16615 - protein, 9 aa, Artificial Sequence
  Description of Artificial Sequence: Synthetic peptide
IMMQRALMG

SEQ ID NO: 16616 - protein, 9 aa, Artificial Sequence
  Description of Artificial Sequence: Synthetic peptide
INQQYNSCW

SEQ ID NO: 16617 - protein, 9 aa, Artificial Sequence
  Description of Artificial Sequence: Synthetic peptide
ISTQMENTG

SEQ ID NO: 16618 - protein, 9 aa, Artificial Sequence
  Description of Artificial Sequence: Synthetic peptide
IVEQKPTVQ

SEQ ID NO: 16619 - protein, 9 aa, Artificial Sequence
  Description of Artificial Sequence: Synthetic peptide
KDAQQWNCA

SEQ ID NO: 16620 - protein, 9 aa, Artificial Sequence
  Description of Artificial Sequence: Synthetic peptide
KGNQQITSL

SEQ ID NO: 16621 - protein, 9 aa, Artificial Sequence
  Description of Artificial Sequence: Synthetic peptide
KMIQSTHDF

SEQ ID NO: 16622 - protein, 9 aa, Artificial Sequence
  Description of Artificial Sequence: Synthetic peptide
KPNQSNRQE

SEQ ID NO: 16623 - protein, 9 aa, Artificial Sequence
  Description of Artificial Sequence: Synthetic peptide
KSAQVYWNP

SEQ ID NO: 16624 - protein, 9 aa, Artificial Sequence
  Description of Artificial Sequence: Synthetic peptide
LAVQSIHSH

SEQ ID NO: 16625 - protein, 9 aa, Artificial Sequence
  Description of Artificial Sequence: Synthetic peptide
LHCQIWFQD

SEQ ID NO: 16626 - protein, 9 aa, Artificial Sequence
  Description of Artificial Sequence: Synthetic peptide
LIAQQMHIN

SEQ ID NO: 16627 - protein, 9 aa, Artificial Sequence
  Description of Artificial Sequence: Synthetic peptide
LICQSDCFP

SEQ ID NO: 16628 - protein, 9 aa, Artificial Sequence
  Description of Artificial Sequence: Synthetic peptide
LMTQEAQRA

SEQ ID NO: 16629 - protein, 9 aa, Artificial Sequence
  Description of Artificial Sequence: Synthetic peptide
LSVQAQWDV

SEQ ID NO: 16630 - protein, 9 aa, Artificial Sequence
  Description of Artificial Sequence: Synthetic peptide
LWMQHMCLD

SEQ ID NO: 16631 - protein, 9 aa, Artificial Sequence
  Description of Artificial Sequence: Synthetic peptide
LYCQSPKDC

SEQ ID NO: 16632 - protein, 9 aa, Artificial Sequence
  Description of Artificial Sequence: Synthetic peptide
MAHQSDIMH

SEQ ID NO: 16633 - protein, 9 aa, Artificial Sequence
  Description of Artificial Sequence: Synthetic peptide
MAQQYHDEM

SEQ ID NO: 16634 - protein, 9 aa, Artificial Sequence
  Description of Artificial Sequence: Synthetic peptide
MGHQWSGNK

SEQ ID NO: 16635 - protein, 9 aa, Artificial Sequence
  Description of Artificial Sequence: Synthetic peptide
NFEQYVHNY

SEQ ID NO: 16636 - protein, 9 aa, Artificial Sequence
  Description of Artificial Sequence: Synthetic peptide
NFKQPNHWD

SEQ ID NO: 16637 - protein, 9 aa, Artificial Sequence
  Description of Artificial Sequence: Synthetic peptide
NHQQQNLIG

SEQ ID NO: 16638 - protein, 9 aa, Artificial Sequence
  Description of Artificial Sequence: Synthetic peptide
QAEQENFDH

SEQ ID NO: 16639 - protein, 9 aa, Artificial Sequence
  Description of Artificial Sequence: Synthetic peptide
QMAQREDDY

SEQ ID NO: 16640 - protein, 9 aa, Artificial Sequence
  Description of Artificial Sequence: Synthetic peptide
QPAQMEDMG

SEQ ID NO: 16641 - protein, 9 aa, Artificial Sequence
  Description of Artificial Sequence: Synthetic peptide
QSAQQPAGS

SEQ ID NO: 16642 - protein, 9 aa, Artificial Sequence
  Description of Artificial Sequence: Synthetic peptide
QVFQLTMVK

SEQ ID NO: 16643 - protein, 9 aa, Artificial Sequence
  Description of Artificial Sequence: Synthetic peptide
QVGQYTLPE

SEQ ID NO: 16644 - protein, 9 aa, Artificial Sequence
  Description of Artificial Sequence: Synthetic peptide
RCWQADISG

SEQ ID NO: 16645 - protein, 9 aa, Artificial Sequence
  Description of Artificial Sequence: Synthetic peptide
RPAQIDPWY

SEQ ID NO: 16646 - protein, 9 aa, Artificial Sequence
  Description of Artificial Sequence: Synthetic peptide
SAVQIQVLH

SEQ ID NO: 16647 - protein, 9 aa, Artificial Sequence
  Description of Artificial Sequence: Synthetic peptide
SLAQDIACF

SEQ ID NO: 16648 - protein, 9 aa, Artificial Sequence
  Description of Artificial Sequence: Synthetic peptide
SNDQNIHNG

SEQ ID NO: 16649 - protein, 9 aa, Artificial Sequence
  Description of Artificial Sequence: Synthetic peptide
SNEQIPRVP

SEQ ID NO: 16650 - protein, 9 aa, Artificial Sequence
  Description of Artificial Sequence: Synthetic peptide
SQSQFCAQV

SEQ ID NO: 16651 - protein, 9 aa, Artificial Sequence
  Description of Artificial Sequence: Synthetic peptide
SQTQWDHMD

SEQ ID NO: 16652 - protein, 9 aa, Artificial Sequence
  Description of Artificial Sequence: Synthetic peptide
SSEQAGPHM

SEQ ID NO: 16653 - protein, 9 aa, Artificial Sequence
  Description of Artificial Sequence: Synthetic peptide
SVQQIQKQP

SEQ ID NO: 16654 - protein, 9 aa, Artificial Sequence
  Description of Artificial Sequence: Synthetic peptide
TFHQCERSD

SEQ ID NO: 16655 - protein, 9 aa, Artificial Sequence
  Description of Artificial Sequence: Synthetic peptide
THQQVALGN

SEQ ID NO: 16656 - protein, 9 aa, Artificial Sequence
  Description of Artificial Sequence: Synthetic peptide
THTQYWKYA

SEQ ID NO: 16657 - protein, 9 aa, Artificial Sequence
  Description of Artificial Sequence: Synthetic peptide
TISQMVYSK

SEQ ID NO: 16658 - protein, 9 aa, Artificial Sequence
  Description of Artificial Sequence: Synthetic peptide
TMGQICVHA

SEQ ID NO: 16659 - protein, 9 aa, Artificial Sequence
  Description of Artificial Sequence: Synthetic peptide
TQCQWNVAK

SEQ ID NO: 16660 - protein, 9 aa, Artificial Sequence
  Description of Artificial Sequence: Synthetic peptide
VEAQFMDNA

SEQ ID NO: 16661 - protein, 9 aa, Artificial Sequence
  Description of Artificial Sequence: Synthetic peptide
VLSQYTQHA

SEQ ID NO: 16662 - protein, 9 aa, Artificial Sequence
  Description of Artificial Sequence: Synthetic peptide
VVSQTYQNR

SEQ ID NO: 16663 - protein, 9 aa, Artificial Sequence
  Description of Artificial Sequence: Synthetic peptide
VWQQYILVI

SEQ ID NO: 16664 - protein, 9 aa, Artificial Sequence
  Description of Artificial Sequence: Synthetic peptide
WYIQVDRKG

SEQ ID NO: 16665 - protein, 9 aa, Artificial Sequence
  Description of Artificial Sequence: Synthetic peptide
YIKQIDNIE

SEQ ID NO: 16666 - protein, 9 aa, Artificial Sequence
  Description of Artificial Sequence: Synthetic peptide
YQTQYSFWH

SEQ ID NO: 16667 - protein, 9 aa, Artificial Sequence
  Description of Artificial Sequence: Synthetic peptide
LVGQCTSHW

SEQ ID NO: 16668 - protein, 9 aa, Artificial Sequence
  Description of Artificial Sequence: Synthetic peptide
GIKQTLVRQ

SEQ ID NO: 16669 - protein, 9 aa, Artificial Sequence
  Description of Artificial Sequence: Synthetic peptide
GCQQIQLQT

SEQ ID NO: 16670 - protein, 9 aa, Artificial Sequence
  Description of Artificial Sequence: Synthetic peptide
KYMQENVLS

SEQ ID NO: 16671 - protein, 9 aa, Artificial Sequence
  Description of Artificial Sequence: Synthetic peptide
NCHQLGDNM

SEQ ID NO: 16672 - protein, 9 aa, Artificial Sequence
  Description of Artificial Sequence: Synthetic peptide
MMVQWGAMA

SEQ ID NO: 16673 - protein, 9 aa, Artificial Sequence
  Description of Artificial Sequence: Synthetic peptide
FSEQNVSAA

SEQ ID NO: 16674 - protein, 9 aa, Artificial Sequence
  Description of Artificial Sequence: Synthetic peptide
TSGQVDHRT

SEQ ID NO: 16675 - protein, 9 aa, Artificial Sequence
  Description of Artificial Sequence: Synthetic peptide
YYEQMDGEF

SEQ ID NO: 16676 - protein, 9 aa, Artificial Sequence
  Description of Artificial Sequence: Synthetic peptide
QPVQAPHCA

SEQ ID NO: 16677 - protein, 9 aa, Artificial Sequence
  Description of Artificial Sequence: Synthetic peptide
SIAQDQVWS

SEQ ID NO: 16678 - protein, 9 aa, Artificial Sequence
  Description of Artificial Sequence: Synthetic peptide
PLKALIWEY

SEQ ID NO: 16679 - protein, 9 aa, Artificial Sequence
  Description of Artificial Sequence: Synthetic peptide
QMEALMDCE

SEQ ID NO: 16680 - protein, 9 aa, Artificial Sequence
  Description of Artificial Sequence: Synthetic peptide
QSKTLCYQC

SEQ ID NO: 16681 - protein, 9 aa, Artificial Sequence
  Description of Artificial Sequence: Synthetic peptide
QVSTLENVQ

SEQ ID NO: 16682 - protein, 9 aa, Artificial Sequence
  Description of Artificial Sequence: Synthetic peptide
RQAKLATLH

SEQ ID NO: 16683 - protein, 9 aa, Artificial Sequence
  Description of Artificial Sequence: Synthetic peptide
SKESLPQWQ

SEQ ID NO: 16684 - protein, 9 aa, Artificial Sequence
  Description of Artificial Sequence: Synthetic peptide
TGVSLVNYS

SEQ ID NO: 16685 - protein, 9 aa, Artificial Sequence
  Description of Artificial Sequence: Synthetic peptide
MLHNLWMQC

SEQ ID NO: 16686 - protein, 9 aa, Artificial Sequence
  Description of Artificial Sequence: Synthetic peptide
AAQTLECHK

SEQ ID NO: 16687 - protein, 9 aa, Artificial Sequence
  Description of Artificial Sequence: Synthetic peptide
YWFVLNPCV

SEQ ID NO: 16688 - protein, 9 aa, Artificial Sequence
  Description of Artificial Sequence: Synthetic peptide
CHVNLKAWW

SEQ ID NO: 16689 - protein, 9 aa, Artificial Sequence
  Description of Artificial Sequence: Synthetic peptide
DFGMLEWQW

SEQ ID NO: 16690 - protein, 9 aa, Artificial Sequence
  Description of Artificial Sequence: Synthetic peptide
KYEILNCNH

SEQ ID NO: 16691 - protein, 9 aa, Artificial Sequence
  Description of Artificial Sequence: Synthetic peptide
MQYTLPTWP

SEQ ID NO: 16692 - protein, 9 aa, Artificial Sequence
  Description of Artificial Sequence: Synthetic peptide
TMANLCWRT

SEQ ID NO: 16693 - protein, 9 aa, Artificial Sequence
  Description of Artificial Sequence: Synthetic peptide
TNIPLGTNM

SEQ ID NO: 16694 - protein, 9 aa, Artificial Sequence
  Description of Artificial Sequence: Synthetic peptide
TWMPLAPCH

SEQ ID NO: 16695 - protein, 9 aa, Artificial Sequence
  Description of Artificial Sequence: Synthetic peptide
TWMPLAPCY

SEQ ID NO: 16696 - protein, 9 aa, Artificial Sequence
  Description of Artificial Sequence: Synthetic peptide
HQNLLICNE

SEQ ID NO: 16697 - protein, 9 aa, Artificial Sequence
  Description of Artificial Sequence: Synthetic peptide
TGKWLVYQA

SEQ ID NO: 16698 - protein, 9 aa, Artificial Sequence
  Description of Artificial Sequence: Synthetic peptide
IPADLDVDH

SEQ ID NO: 16699 - protein, 9 aa, Artificial Sequence
  Description of Artificial Sequence: Synthetic peptide
FFLKLNDVP

SEQ ID NO: 16700 - protein, 9 aa, Artificial Sequence
  Description of Artificial Sequence: Synthetic peptide
AHYFLLEYP

SEQ ID NO: 16701 - protein, 9 aa, Artificial Sequence
  Description of Artificial Sequence: Synthetic peptide
AIIPLPMPT

SEQ ID NO: 16702 - protein, 9 aa, Artificial Sequence
  Description of Artificial Sequence: Synthetic peptide
AIVNLHTQQ

SEQ ID NO: 16703 - protein, 9 aa, Artificial Sequence
  Description of Artificial Sequence: Synthetic peptide
ANLPLQQQD

SEQ ID NO: 16704 - protein, 9 aa, Artificial Sequence
  Description of Artificial Sequence: Synthetic peptide
AVEFLAHRY

SEQ ID NO: 16705 - protein, 9 aa, Artificial Sequence
  Description of Artificial Sequence: Synthetic peptide
AVYPLFAPD

SEQ ID NO: 16706 - protein, 9 aa, Artificial Sequence
  Description of Artificial Sequence: Synthetic peptide
CHNLLHCVY

SEQ ID NO: 16707 - protein, 9 aa, Artificial Sequence
  Description of Artificial Sequence: Synthetic peptide
CNSTLQYGH

SEQ ID NO: 16708 - protein, 9 aa, Artificial Sequence
  Description of Artificial Sequence: Synthetic peptide
DFCMLQMGM

SEQ ID NO: 16709 - protein, 9 aa, Artificial Sequence
  Description of Artificial Sequence: Synthetic peptide
DHCILPQTC

SEQ ID NO: 16710 - protein, 9 aa, Artificial Sequence
  Description of Artificial Sequence: Synthetic peptide
DMFMLDEAP

SEQ ID NO: 16711 - protein, 9 aa, Artificial Sequence
  Description of Artificial Sequence: Synthetic peptide
DYFPLVVAP

SEQ ID NO: 16712 - protein, 9 aa, Artificial Sequence
  Description of Artificial Sequence: Synthetic peptide
GANFLVSQT

SEQ ID NO: 16713 - protein, 9 aa, Artificial Sequence
  Description of Artificial Sequence: Synthetic peptide
GKNPLMPSP

SEQ ID NO: 16714 - protein, 9 aa, Artificial Sequence
  Description of Artificial Sequence: Synthetic peptide
GLDKLMMLA

SEQ ID NO: 16715 - protein, 9 aa, Artificial Sequence
  Description of Artificial Sequence: Synthetic peptide
GVMMLGTAN

SEQ ID NO: 16716 - protein, 9 aa, Artificial Sequence
  Description of Artificial Sequence: Synthetic peptide
HIDHLNAAT

SEQ ID NO: 16717 - protein, 9 aa, Artificial Sequence
  Description of Artificial Sequence: Synthetic peptide
HPLPLSVMS

SEQ ID NO: 16718 - protein, 9 aa, Artificial Sequence
  Description of Artificial Sequence: Synthetic peptide
HSMLLQEYM

SEQ ID NO: 16719 - protein, 9 aa, Artificial Sequence
  Description of Artificial Sequence: Synthetic peptide
INTALFVNA

SEQ ID NO: 16720 - protein, 9 aa, Artificial Sequence
  Description of Artificial Sequence: Synthetic peptide
KEYDLSLTM

SEQ ID NO: 16721 - protein, 9 aa, Artificial Sequence
  Description of Artificial Sequence: Synthetic peptide
KNFELDQFE

SEQ ID NO: 16722 - protein, 9 aa, Artificial Sequence
  Description of Artificial Sequence: Synthetic peptide
KPYSLAMTI

SEQ ID NO: 16723 - protein, 9 aa, Artificial Sequence
  Description of Artificial Sequence: Synthetic peptide
LGTPLEAGL

SEQ ID NO: 16724 - protein, 9 aa, Artificial Sequence
  Description of Artificial Sequence: Synthetic peptide
LIDRLPACY

SEQ ID NO: 16725 - protein, 9 aa, Artificial Sequence
  Description of Artificial Sequence: Synthetic peptide
LRDCLHVLG

SEQ ID NO: 16726 - protein, 9 aa, Artificial Sequence
  Description of Artificial Sequence: Synthetic peptide
LVDELNQIK

SEQ ID NO: 16727 - protein, 9 aa, Artificial Sequence
  Description of Artificial Sequence: Synthetic peptide
MFDDLMVGR

SEQ ID NO: 16728 - protein, 9 aa, Artificial Sequence
  Description of Artificial Sequence: Synthetic peptide
MINNLDECC

SEQ ID NO: 16729 - protein, 9 aa, Artificial Sequence
  Description of Artificial Sequence: Synthetic peptide
MVDGLTKEY

SEQ ID NO: 16730 - protein, 9 aa, Artificial Sequence
  Description of Artificial Sequence: Synthetic peptide
NCQSLATNV

SEQ ID NO: 16731 - protein, 9 aa, Artificial Sequence
  Description of Artificial Sequence: Synthetic peptide
NEVHLEHNY

SEQ ID NO: 16732 - protein, 9 aa, Artificial Sequence
  Description of Artificial Sequence: Synthetic peptide
NLEMLAMFQ

SEQ ID NO: 16733 - protein, 9 aa, Artificial Sequence
  Description of Artificial Sequence: Synthetic peptide
NVMPLIQYR

SEQ ID NO: 16734 - protein, 9 aa, Artificial Sequence
  Description of Artificial Sequence: Synthetic peptide
PITILCCSQ

SEQ ID NO: 16735 - protein, 9 aa, Artificial Sequence
  Description of Artificial Sequence: Synthetic peptide
PRQLLHFSQ

SEQ ID NO: 16736 - protein, 9 aa, Artificial Sequence
  Description of Artificial Sequence: Synthetic peptide
QASLLDHYP

SEQ ID NO: 16737 - protein, 9 aa, Artificial Sequence
  Description of Artificial Sequence: Synthetic peptide
QGQPLMRYS

SEQ ID NO: 16738 - protein, 9 aa, Artificial Sequence
  Description of Artificial Sequence: Synthetic peptide
QQNRLNMNW

SEQ ID NO: 16739 - protein, 9 aa, Artificial Sequence
  Description of Artificial Sequence: Synthetic peptide
QQSPLLWER

SEQ ID NO: 16740 - protein, 9 aa, Artificial Sequence
  Description of Artificial Sequence: Synthetic peptide
QRHDLEVDH

SEQ ID NO: 16741 - protein, 9 aa, Artificial Sequence
  Description of Artificial Sequence: Synthetic peptide
QVVDLVDVY

SEQ ID NO: 16742 - protein, 9 aa, Artificial Sequence
  Description of Artificial Sequence: Synthetic peptide
RGEILQLQQ

SEQ ID NO: 16743 - protein, 9 aa, Artificial Sequence
  Description of Artificial Sequence: Synthetic peptide
SAQCLEMWP

SEQ ID NO: 16744 - protein, 9 aa, Artificial Sequence
  Description of Artificial Sequence: Synthetic peptide
SGLILQCNP

SEQ ID NO: 16745 - protein, 9 aa, Artificial Sequence
  Description of Artificial Sequence: Synthetic peptide
SINYLGEGH

SEQ ID NO: 16746 - protein, 9 aa, Artificial Sequence
  Description of Artificial Sequence: Synthetic peptide
SSKPLTNEC

SEQ ID NO: 16747 - protein, 9 aa, Artificial Sequence
  Description of Artificial Sequence: Synthetic peptide
SVAFLNQEW

SEQ ID NO: 16748 - protein, 9 aa, Artificial Sequence
  Description of Artificial Sequence: Synthetic peptide
SWNRLNWCL

SEQ ID NO: 16749 - protein, 9 aa, Artificial Sequence
  Description of Artificial Sequence: Synthetic peptide
TCESLYSRG

SEQ ID NO: 16750 - protein, 9 aa, Artificial Sequence
  Description of Artificial Sequence: Synthetic peptide
THDSLIAHW

SEQ ID NO: 16751 - protein, 9 aa, Artificial Sequence
  Description of Artificial Sequence: Synthetic peptide
TIGNLTKPI

SEQ ID NO: 16752 - protein, 9 aa, Artificial Sequence
  Description of Artificial Sequence: Synthetic peptide
TLMGLWNQG

SEQ ID NO: 16753 - protein, 9 aa, Artificial Sequence
  Description of Artificial Sequence: Synthetic peptide
TNDPLMRSD

SEQ ID NO: 16754 - protein, 9 aa, Artificial Sequence
  Description of Artificial Sequence: Synthetic peptide
TQCGLKMYP

SEQ ID NO: 16755 - protein, 9 aa, Artificial Sequence
  Description of Artificial Sequence: Synthetic peptide
TRMLLEWTY

SEQ ID NO: 16756 - protein, 9 aa, Artificial Sequence
  Description of Artificial Sequence: Synthetic peptide
TSEPLEGID

SEQ ID NO: 16757 - protein, 9 aa, Artificial Sequence
  Description of Artificial Sequence: Synthetic peptide
VDSWLSMRD

SEQ ID NO: 16758 - protein, 9 aa, Artificial Sequence
  Description of Artificial Sequence: Synthetic peptide
VIHYLTHEC

SEQ ID NO: 16759 - protein, 9 aa, Artificial Sequence
  Description of Artificial Sequence: Synthetic peptide
YCIHLKDDI

SEQ ID NO: 16760 - protein, 9 aa, Artificial Sequence
  Description of Artificial Sequence: Synthetic peptide
YCIPLQPMN

SEQ ID NO: 16761 - protein, 9 aa, Artificial Sequence
  Description of Artificial Sequence: Synthetic peptide
YSVPLHHCF

SEQ ID NO: 16762 - protein, 9 aa, Artificial Sequence
  Description of Artificial Sequence: Synthetic peptide
YVGNLCRWK

SEQ ID NO: 16763 - protein, 9 aa, Artificial Sequence
  Description of Artificial Sequence: Synthetic peptide
YVVKLEDYK

SEQ ID NO: 16764 - protein, 9 aa, Artificial Sequence
  Description of Artificial Sequence: Synthetic peptide
YYADLNAHD

SEQ ID NO: 16765 - protein, 9 aa, Artificial Sequence
  Description of Artificial Sequence: Synthetic peptide
RNMALHHPT

SEQ ID NO: 16766 - protein, 9 aa, Artificial Sequence
  Description of Artificial Sequence: Synthetic peptide
DGCSLYAFN

SEQ ID NO: 16767 - protein, 9 aa, Artificial Sequence
  Description of Artificial Sequence: Synthetic peptide
ACDRLMFQG

SEQ ID NO: 16768 - protein, 9 aa, Artificial Sequence
  Description of Artificial Sequence: Synthetic peptide
SLVDLYKTA

SEQ ID NO: 16769 - protein, 9 aa, Artificial Sequence
  Description of Artificial Sequence: Synthetic peptide
FCNKLTSVR

SEQ ID NO: 16770 - protein, 9 aa, Artificial Sequence
  Description of Artificial Sequence: Synthetic peptide
IDAFLANRG

SEQ ID NO: 16771 - protein, 9 aa, Artificial Sequence
  Description of Artificial Sequence: Synthetic peptide
NMMTLWSHL

SEQ ID NO: 16772 - protein, 9 aa, Artificial Sequence
  Description of Artificial Sequence: Synthetic peptide
QIVSKNSRQ

SEQ ID NO: 16773 - protein, 9 aa, Artificial Sequence
  Description of Artificial Sequence: Synthetic peptide
RGVHSNCAE

SEQ ID NO: 16774 - protein, 9 aa, Artificial Sequence
  Description of Artificial Sequence: Synthetic peptide
SAFLPNTVC

SEQ ID NO: 16775 - protein, 9 aa, Artificial Sequence
  Description of Artificial Sequence: Synthetic peptide
SEYDNNPCQ

SEQ ID NO: 16776 - protein, 9 aa, Artificial Sequence
  Description of Artificial Sequence: Synthetic peptide
SFTIYNHKW

SEQ ID NO: 16777 - protein, 9 aa, Artificial Sequence
  Description of Artificial Sequence: Synthetic peptide
SSMTRNNCK

SEQ ID NO: 16778 - protein, 9 aa, Artificial Sequence
  Description of Artificial Sequence: Synthetic peptide
THDYFNGDY

SEQ ID NO: 16779 - protein, 9 aa, Artificial Sequence
  Description of Artificial Sequence: Synthetic peptide
TWANGNGGP

SEQ ID NO: 16780 - protein, 9 aa, Artificial Sequence
  Description of Artificial Sequence: Synthetic peptide
VNHHENWKK

SEQ ID NO: 16781 - protein, 9 aa, Artificial Sequence
  Description of Artificial Sequence: Synthetic peptide
IEWPTNSDH

SEQ ID NO: 16782 - protein, 9 aa, Artificial Sequence
  Description of Artificial Sequence: Synthetic peptide
NAYVDNLRY

SEQ ID NO: 16783 - protein, 9 aa, Artificial Sequence
  Description of Artificial Sequence: Synthetic peptide
QQCMGNDMT

SEQ ID NO: 16784 - protein, 9 aa, Artificial Sequence
  Description of Artificial Sequence: Synthetic peptide
AFLHENMWG

SEQ ID NO: 16785 - protein, 9 aa, Artificial Sequence
  Description of Artificial Sequence: Synthetic peptide
ANGTYNLQE

SEQ ID NO: 16786 - protein, 9 aa, Artificial Sequence
  Description of Artificial Sequence: Synthetic peptide
ANMFRNGMQ

SEQ ID NO: 16787 - protein, 9 aa, Artificial Sequence
  Description of Artificial Sequence: Synthetic peptide
DSYFINELY

SEQ ID NO: 16788 - protein, 9 aa, Artificial Sequence
  Description of Artificial Sequence: Synthetic peptide
FFEMVNTEQ

SEQ ID NO: 16789 - protein, 9 aa, Artificial Sequence
  Description of Artificial Sequence: Synthetic peptide
HSWINNQEH

SEQ ID NO: 16790 - protein, 9 aa, Artificial Sequence
  Description of Artificial Sequence: Synthetic peptide
KSVTQNRTR

SEQ ID NO: 16791 - protein, 9 aa, Artificial Sequence
  Description of Artificial Sequence: Synthetic peptide
NSYFINELY

SEQ ID NO: 16792 - protein, 9 aa, Artificial Sequence
  Description of Artificial Sequence: Synthetic peptide
TFAAVNCCQ

SEQ ID NO: 16793 - protein, 9 aa, Artificial Sequence
  Description of Artificial Sequence: Synthetic peptide
TMKTFNYVF

SEQ ID NO: 16794 - protein, 9 aa, Artificial Sequence
  Description of Artificial Sequence: Synthetic peptide
YCQLGNHNA

SEQ ID NO: 16795 - protein, 9 aa, Artificial Sequence
  Description of Artificial Sequence: Synthetic peptide
YHENWNMPM

SEQ ID NO: 16796 - protein, 9 aa, Artificial Sequence
  Description of Artificial Sequence: Synthetic peptide
GWMRHNRIQ

SEQ ID NO: 16797 - protein, 9 aa, Artificial Sequence
  Description of Artificial Sequence: Synthetic peptide
QSGYMNKLW

SEQ ID NO: 16798 - protein, 9 aa, Artificial Sequence
  Description of Artificial Sequence: Synthetic peptide
VSMSSNYDK

SEQ ID NO: 16799 - protein, 9 aa, Artificial Sequence
  Description of Artificial Sequence: Synthetic peptide
KCAMFNAGE

SEQ ID NO: 16800 - protein, 9 aa, Artificial Sequence
  Description of Artificial Sequence: Synthetic peptide
AEYMTNASM

SEQ ID NO: 16801 - protein, 9 aa, Artificial Sequence
  Description of Artificial Sequence: Synthetic peptide
AGYASNWAD

SEQ ID NO: 16802 - protein, 9 aa, Artificial Sequence
  Description of Artificial Sequence: Synthetic peptide
AISPTNAER

SEQ ID NO: 16803 - protein, 9 aa, Artificial Sequence
  Description of Artificial Sequence: Synthetic peptide
AKGTYNQGN

SEQ ID NO: 16804 - protein, 9 aa, Artificial Sequence
  Description of Artificial Sequence: Synthetic peptide
ASETNNGGY

SEQ ID NO: 16805 - protein, 9 aa, Artificial Sequence
  Description of Artificial Sequence: Synthetic peptide
AYQMFNNVQ

SEQ ID NO: 16806 - protein, 9 aa, Artificial Sequence
  Description of Artificial Sequence: Synthetic peptide
DAEHKNAIR

SEQ ID NO: 16807 - protein, 9 aa, Artificial Sequence
  Description of Artificial Sequence: Synthetic peptide
DAHYTNECR

SEQ ID NO: 16808 - protein, 9 aa, Artificial Sequence
  Description of Artificial Sequence: Synthetic peptide
DCQPVNRIL

SEQ ID NO: 16809 - protein, 9 aa, Artificial Sequence
  Description of Artificial Sequence: Synthetic peptide
DINFDNHAG

SEQ ID NO: 16810 - protein, 9 aa, Artificial Sequence
  Description of Artificial Sequence: Synthetic peptide
DMNSRNVQD

SEQ ID NO: 16811 - protein, 9 aa, Artificial Sequence
  Description of Artificial Sequence: Synthetic peptide
DMVPCNLMH

SEQ ID NO: 16812 - protein, 9 aa, Artificial Sequence
  Description of Artificial Sequence: Synthetic peptide
DWAANNWWP

SEQ ID NO: 16813 - protein, 9 aa, Artificial Sequence
  Description of Artificial Sequence: Synthetic peptide
FEAPINLSF

SEQ ID NO: 16814 - protein, 9 aa, Artificial Sequence
  Description of Artificial Sequence: Synthetic peptide
FVHVINRCD

SEQ ID NO: 16815 - protein, 9 aa, Artificial Sequence
  Description of Artificial Sequence: Synthetic peptide
GAMPGNGCT

SEQ ID NO: 16816 - protein, 9 aa, Artificial Sequence
  Description of Artificial Sequence: Synthetic peptide
GHKVCNCWE

SEQ ID NO: 16817 - protein, 9 aa, Artificial Sequence
  Description of Artificial Sequence: Synthetic peptide
GVWPDNCPQ

SEQ ID NO: 16818 - protein, 9 aa, Artificial Sequence
  Description of Artificial Sequence: Synthetic peptide
GYCGCNHMG

SEQ ID NO: 16819 - protein, 9 aa, Artificial Sequence
  Description of Artificial Sequence: Synthetic peptide
HHVWPNRQV

SEQ ID NO: 16820 - protein, 9 aa, Artificial Sequence
  Description of Artificial Sequence: Synthetic peptide
HIEMRNAHM

SEQ ID NO: 16821 - protein, 9 aa, Artificial Sequence
  Description of Artificial Sequence: Synthetic peptide
HMYVTNHDG

SEQ ID NO: 16822 - protein, 9 aa, Artificial Sequence
  Description of Artificial Sequence: Synthetic peptide
ICSYYNQTQ

SEQ ID NO: 16823 - protein, 9 aa, Artificial Sequence
  Description of Artificial Sequence: Synthetic peptide
IFYATNHSW

SEQ ID NO: 16824 - protein, 9 aa, Artificial Sequence
  Description of Artificial Sequence: Synthetic peptide
IKHDFNSAF

SEQ ID NO: 16825 - protein, 9 aa, Artificial Sequence
  Description of Artificial Sequence: Synthetic peptide
INAPPNLRT

SEQ ID NO: 16826 - protein, 9 aa, Artificial Sequence
  Description of Artificial Sequence: Synthetic peptide
KGDEQNCYC

SEQ ID NO: 16827 - protein, 9 aa, Artificial Sequence
  Description of Artificial Sequence: Synthetic peptide
KIDVENCCC

SEQ ID NO: 16828 - protein, 9 aa, Artificial Sequence
  Description of Artificial Sequence: Synthetic peptide
KPGTVNPAA

SEQ ID NO: 16829 - protein, 9 aa, Artificial Sequence
  Description of Artificial Sequence: Synthetic peptide
KQEPCNSGH

SEQ ID NO: 16830 - protein, 9 aa, Artificial Sequence
  Description of Artificial Sequence: Synthetic peptide
LCAGTNLTP

SEQ ID NO: 16831 - protein, 9 aa, Artificial Sequence
  Description of Artificial Sequence: Synthetic peptide
LEADNNDAD

SEQ ID NO: 16832 - protein, 9 aa, Artificial Sequence
  Description of Artificial Sequence: Synthetic peptide
LKIPFNMTC

SEQ ID NO: 16833 - protein, 9 aa, Artificial Sequence
  Description of Artificial Sequence: Synthetic peptide
LMAYANTDD

SEQ ID NO: 16834 - protein, 9 aa, Artificial Sequence
  Description of Artificial Sequence: Synthetic peptide
LRTPYNFWW

SEQ ID NO: 16835 - protein, 9 aa, Artificial Sequence
  Description of Artificial Sequence: Synthetic peptide
LVKVINERQ

SEQ ID NO: 16836 - protein, 9 aa, Artificial Sequence
  Description of Artificial Sequence: Synthetic peptide
MCTPRNEQE

SEQ ID NO: 16837 - protein, 9 aa, Artificial Sequence
  Description of Artificial Sequence: Synthetic peptide
MKGFDNYSP

SEQ ID NO: 16838 - protein, 9 aa, Artificial Sequence
  Description of Artificial Sequence: Synthetic peptide
MLSYHNESW

SEQ ID NO: 16839 - protein, 9 aa, Artificial Sequence
  Description of Artificial Sequence: Synthetic peptide
MQNEKNDNP

SEQ ID NO: 16840 - protein, 9 aa, Artificial Sequence
  Description of Artificial Sequence: Synthetic peptide
MRKDYNDTW

SEQ ID NO: 16841 - protein, 9 aa, Artificial Sequence
  Description of Artificial Sequence: Synthetic peptide
MYQDANQIT

SEQ ID NO: 16842 - protein, 9 aa, Artificial Sequence
  Description of Artificial Sequence: Synthetic peptide
NVHTFNYAF

SEQ ID NO: 16843 - protein, 9 aa, Artificial Sequence
  Description of Artificial Sequence: Synthetic peptide
QFSGYNYHY

SEQ ID NO: 16844 - protein, 9 aa, Artificial Sequence
  Description of Artificial Sequence: Synthetic peptide
QLHWPNNFG

SEQ ID NO: 16845 - protein, 9 aa, Artificial Sequence
  Description of Artificial Sequence: Synthetic peptide
QMHVANINL

SEQ ID NO: 16846 - protein, 9 aa, Artificial Sequence
  Description of Artificial Sequence: Synthetic peptide
QSNEFNPVA

SEQ ID NO: 16847 - protein, 9 aa, Artificial Sequence
  Description of Artificial Sequence: Synthetic peptide
QVAPKNCWQ

SEQ ID NO: 16848 - protein, 9 aa, Artificial Sequence
  Description of Artificial Sequence: Synthetic peptide
QYICFNCYH

SEQ ID NO: 16849 - protein, 9 aa, Artificial Sequence
  Description of Artificial Sequence: Synthetic peptide
SACEPNVSP

SEQ ID NO: 16850 - protein, 9 aa, Artificial Sequence
  Description of Artificial Sequence: Synthetic peptide
SANKMNAER

SEQ ID NO: 16851 - protein, 9 aa, Artificial Sequence
  Description of Artificial Sequence: Synthetic peptide
SFGTCNTCG

SEQ ID NO: 16852 - protein, 9 aa, Artificial Sequence
  Description of Artificial Sequence: Synthetic peptide
SIAMYNNMH

SEQ ID NO: 16853 - protein, 9 aa, Artificial Sequence
  Description of Artificial Sequence: Synthetic peptide
SREAQNRET

SEQ ID NO: 16854 - protein, 9 aa, Artificial Sequence
  Description of Artificial Sequence: Synthetic peptide
SVKDNNRRL

SEQ ID NO: 16855 - protein, 9 aa, Artificial Sequence
  Description of Artificial Sequence: Synthetic peptide
SWTASNWRD

SEQ ID NO: 16856 - protein, 9 aa, Artificial Sequence
  Description of Artificial Sequence: Synthetic peptide
SWTSRNAHH

SEQ ID NO: 16857 - protein, 9 aa, Artificial Sequence
  Description of Artificial Sequence: Synthetic peptide
TAQYVNREI

SEQ ID NO: 16858 - protein, 9 aa, Artificial Sequence
  Description of Artificial Sequence: Synthetic peptide
TQDVQNMYV

SEQ ID NO: 16859 - protein, 9 aa, Artificial Sequence
  Description of Artificial Sequence: Synthetic peptide
TSMLHNEEN

SEQ ID NO: 16860 - protein, 9 aa, Artificial Sequence
  Description of Artificial Sequence: Synthetic peptide
TVKEENAAC

SEQ ID NO: 16861 - protein, 9 aa, Artificial Sequence
  Description of Artificial Sequence: Synthetic peptide
VFIAQNEGN

SEQ ID NO: 16862 - protein, 9 aa, Artificial Sequence
  Description of Artificial Sequence: Synthetic peptide
VGVGVNRFD

SEQ ID NO: 16863 - protein, 9 aa, Artificial Sequence
  Description of Artificial Sequence: Synthetic peptide
VHANANMSH

SEQ ID NO: 16864 - protein, 9 aa, Artificial Sequence
  Description of Artificial Sequence: Synthetic peptide
VPELGNGAY

SEQ ID NO: 16865 - protein, 9 aa, Artificial Sequence
  Description of Artificial Sequence: Synthetic peptide
VQLPTNKQW

SEQ ID NO: 16866 - protein, 9 aa, Artificial Sequence
  Description of Artificial Sequence: Synthetic peptide
VSINTNEPG

SEQ ID NO: 16867 - protein, 9 aa, Artificial Sequence
  Description of Artificial Sequence: Synthetic peptide
VVQYKNHAT

SEQ ID NO: 16868 - protein, 9 aa, Artificial Sequence
  Description of Artificial Sequence: Synthetic peptide
YGTEVNSMI

SEQ ID NO: 16869 - protein, 9 aa, Artificial Sequence
  Description of Artificial Sequence: Synthetic peptide
YQVANNQQG

SEQ ID NO: 16870 - protein, 9 aa, Artificial Sequence
  Description of Artificial Sequence: Synthetic peptide
YYADMNAHD

SEQ ID NO: 16871 - protein, 9 aa, Artificial Sequence
  Description of Artificial Sequence: Synthetic peptide
HMWMYNKCT

SEQ ID NO: 16872 - protein, 9 aa, Artificial Sequence
  Description of Artificial Sequence: Synthetic peptide
ARTIANDTQ

SEQ ID NO: 16873 - protein, 9 aa, Artificial Sequence
  Description of Artificial Sequence: Synthetic peptide
FREDMNATM

SEQ ID NO: 16874 - protein, 9 aa, Artificial Sequence
  Description of Artificial Sequence: Synthetic peptide
SLWVGYRTD

SEQ ID NO: 16875 - protein, 9 aa, Artificial Sequence
  Description of Artificial Sequence: Synthetic peptide
TPKNDQRAE

SEQ ID NO: 16876 - protein, 9 aa, Artificial Sequence
  Description of Artificial Sequence: Synthetic peptide
LNARTMRSA

SEQ ID NO: 16877 - protein, 9 aa, Artificial Sequence
  Description of Artificial Sequence: Synthetic peptide
MEDFSDRWP

SEQ ID NO: 16878 - protein, 9 aa, Artificial Sequence
  Description of Artificial Sequence: Synthetic peptide
RMVIMERDR

SEQ ID NO: 16879 - protein, 9 aa, Artificial Sequence
  Description of Artificial Sequence: Synthetic peptide
DGQLVERYD

SEQ ID NO: 16880 - protein, 9 aa, Artificial Sequence
  Description of Artificial Sequence: Synthetic peptide
APKNDQRAE

SEQ ID NO: 16881 - protein, 9 aa, Artificial Sequence
  Description of Artificial Sequence: Synthetic peptide
TYYWDCRHV

SEQ ID NO: 16882 - protein, 9 aa, Artificial Sequence
  Description of Artificial Sequence: Synthetic peptide
LMEAASRSY

SEQ ID NO: 16883 - protein, 9 aa, Artificial Sequence
  Description of Artificial Sequence: Synthetic peptide
TQQTADRWA

SEQ ID NO: 16884 - protein, 9 aa, Artificial Sequence
  Description of Artificial Sequence: Synthetic peptide
IVTCNGRWD

SEQ ID NO: 16885 - protein, 9 aa, Artificial Sequence
  Description of Artificial Sequence: Synthetic peptide
YDYYKMREG

SEQ ID NO: 16886 - protein, 9 aa, Artificial Sequence
  Description of Artificial Sequence: Synthetic peptide
ASKAKQRVA

SEQ ID NO: 16887 - protein, 9 aa, Artificial Sequence
  Description of Artificial Sequence: Synthetic peptide
FQATTKRLP

SEQ ID NO: 16888 - protein, 9 aa, Artificial Sequence
  Description of Artificial Sequence: Synthetic peptide
NAQLGKRGH

SEQ ID NO: 16889 - protein, 9 aa, Artificial Sequence
  Description of Artificial Sequence: Synthetic peptide
YLWMIARPD

SEQ ID NO: 16890 - protein, 9 aa, Artificial Sequence
  Description of Artificial Sequence: Synthetic peptide
YLWMITRPD

SEQ ID NO: 16891 - protein, 9 aa, Artificial Sequence
  Description of Artificial Sequence: Synthetic peptide
KQNPSMRQD

SEQ ID NO: 16892 - protein, 9 aa, Artificial Sequence
  Description of Artificial Sequence: Synthetic peptide
SATARFRDN

SEQ ID NO: 16893 - protein, 9 aa, Artificial Sequence
  Description of Artificial Sequence: Synthetic peptide
AAEMHQRGE

SEQ ID NO: 16894 - protein, 9 aa, Artificial Sequence
  Description of Artificial Sequence: Synthetic peptide
AAEMHQRGV

SEQ ID NO: 16895 - protein, 9 aa, Artificial Sequence
  Description of Artificial Sequence: Synthetic peptide
AFKATRRGV

SEQ ID NO: 16896 - protein, 9 aa, Artificial Sequence
  Description of Artificial Sequence: Synthetic peptide
ASGSHQREN

SEQ ID NO: 16897 - protein, 9 aa, Artificial Sequence
  Description of Artificial Sequence: Synthetic peptide
ASGSHQRKN

SEQ ID NO: 16898 - protein, 9 aa, Artificial Sequence
  Description of Artificial Sequence: Synthetic peptide
ASHIYCRHE

SEQ ID NO: 16899 - protein, 9 aa, Artificial Sequence
  Description of Artificial Sequence: Synthetic peptide
DIKMQKRGV

SEQ ID NO: 16900 - protein, 9 aa, Artificial Sequence
  Description of Artificial Sequence: Synthetic peptide
DVGLALRNH

SEQ ID NO: 16901 - protein, 9 aa, Artificial Sequence
  Description of Artificial Sequence: Synthetic peptide
FQADYKRHE

SEQ ID NO: 16902 - protein, 9 aa, Artificial Sequence
  Description of Artificial Sequence: Synthetic peptide
FVKMKQRYG

SEQ ID NO: 16903 - protein, 9 aa, Artificial Sequence
  Description of Artificial Sequence: Synthetic peptide
GAGYRMRVN

SEQ ID NO: 16904 - protein, 9 aa, Artificial Sequence
  Description of Artificial Sequence: Synthetic peptide
GVSVEGRDE

SEQ ID NO: 16905 - protein, 9 aa, Artificial Sequence
  Description of Artificial Sequence: Synthetic peptide
GYKNCHRHG

SEQ ID NO: 16906 - protein, 9 aa, Artificial Sequence
  Description of Artificial Sequence: Synthetic peptide
HIDLQTRKE

SEQ ID NO: 16907 - protein, 9 aa, Artificial Sequence
  Description of Artificial Sequence: Synthetic peptide
HVEWTMREH

SEQ ID NO: 16908 - protein, 9 aa, Artificial Sequence
  Description of Artificial Sequence: Synthetic peptide
IGGMFSRHA

SEQ ID NO: 16909 - protein, 9 aa, Artificial Sequence
  Description of Artificial Sequence: Synthetic peptide
IQKLMRRMH

SEQ ID NO: 16910 - protein, 9 aa, Artificial Sequence
  Description of Artificial Sequence: Synthetic peptide
KAISHERGQ

SEQ ID NO: 16911 - protein, 9 aa, Artificial Sequence
  Description of Artificial Sequence: Synthetic peptide
LAYTCHRGD

SEQ ID NO: 16912 - protein, 9 aa, Artificial Sequence
  Description of Artificial Sequence: Synthetic peptide
LHWYWCRNW

SEQ ID NO: 16913 - protein, 9 aa, Artificial Sequence
  Description of Artificial Sequence: Synthetic peptide
LKKKRGRAC

SEQ ID NO: 16914 - protein, 9 aa, Artificial Sequence
  Description of Artificial Sequence: Synthetic peptide
LQEPRMRYE

SEQ ID NO: 16915 - protein, 9 aa, Artificial Sequence
  Description of Artificial Sequence: Synthetic peptide
MCQSYERGA

SEQ ID NO: 16916 - protein, 9 aa, Artificial Sequence
  Description of Artificial Sequence: Synthetic peptide
MFNRIPRFS

SEQ ID NO: 16917 - protein, 9 aa, Artificial Sequence
  Description of Artificial Sequence: Synthetic peptide
MICRMDRMK

SEQ ID NO: 16918 - protein, 9 aa, Artificial Sequence
  Description of Artificial Sequence: Synthetic peptide
MQKAHDRSA

SEQ ID NO: 16919 - protein, 9 aa, Artificial Sequence
  Description of Artificial Sequence: Synthetic peptide
MSGFHIRCA

SEQ ID NO: 16920 - protein, 9 aa, Artificial Sequence
  Description of Artificial Sequence: Synthetic peptide
MSSFHIRCA

SEQ ID NO: 16921 - protein, 9 aa, Artificial Sequence
  Description of Artificial Sequence: Synthetic peptide
NLIYQPRKS

SEQ ID NO: 16922 - protein, 9 aa, Artificial Sequence
  Description of Artificial Sequence: Synthetic peptide
QATFTTRLV

SEQ ID NO: 16923 - protein, 9 aa, Artificial Sequence
  Description of Artificial Sequence: Synthetic peptide
QGDHFDRNS

SEQ ID NO: 16924 - protein, 9 aa, Artificial Sequence
  Description of Artificial Sequence: Synthetic peptide
QGGMMKRGQ

SEQ ID NO: 16925 - protein, 9 aa, Artificial Sequence
  Description of Artificial Sequence: Synthetic peptide
QIDEVTRNL

SEQ ID NO: 16926 - protein, 9 aa, Artificial Sequence
  Description of Artificial Sequence: Synthetic peptide
QVEPVEREY

SEQ ID NO: 16927 - protein, 9 aa, Artificial Sequence
  Description of Artificial Sequence: Synthetic peptide
RCDGVMRSQ

SEQ ID NO: 16928 - protein, 9 aa, Artificial Sequence
  Description of Artificial Sequence: Synthetic peptide
SAELVQREA

SEQ ID NO: 16929 - protein, 9 aa, Artificial Sequence
  Description of Artificial Sequence: Synthetic peptide
SGSHCGRMA

SEQ ID NO: 16930 - protein, 9 aa, Artificial Sequence
  Description of Artificial Sequence: Synthetic peptide
SLKMRPRQI

SEQ ID NO: 16931 - protein, 9 aa, Artificial Sequence
  Description of Artificial Sequence: Synthetic peptide
SRGDYLRVG

SEQ ID NO: 16932 - protein, 9 aa, Artificial Sequence
  Description of Artificial Sequence: Synthetic peptide
SWEWQMRYP

SEQ ID NO: 16933 - protein, 9 aa, Artificial Sequence
  Description of Artificial Sequence: Synthetic peptide
TAIHEHRGL

SEQ ID NO: 16934 - protein, 9 aa, Artificial Sequence
  Description of Artificial Sequence: Synthetic peptide
TIEPFWRSW

SEQ ID NO: 16935 - protein, 9 aa, Artificial Sequence
  Description of Artificial Sequence: Synthetic peptide
TKYVDDRPG

SEQ ID NO: 16936 - protein, 9 aa, Artificial Sequence
  Description of Artificial Sequence: Synthetic peptide
TSIPITRQE

SEQ ID NO: 16937 - protein, 9 aa, Artificial Sequence
  Description of Artificial Sequence: Synthetic peptide
VINMNRRWG

SEQ ID NO: 16938 - protein, 9 aa, Artificial Sequence
  Description of Artificial Sequence: Synthetic peptide
VSINMWRAQ

SEQ ID NO: 16939 - protein, 9 aa, Artificial Sequence
  Description of Artificial Sequence: Synthetic peptide
WDNLMQRTC

SEQ ID NO: 16940 - protein, 9 aa, Artificial Sequence
  Description of Artificial Sequence: Synthetic peptide
WIQPISRTG

SEQ ID NO: 16941 - protein, 9 aa, Artificial Sequence
  Description of Artificial Sequence: Synthetic peptide
YGSYYMRGW

SEQ ID NO: 16942 - protein, 9 aa, Artificial Sequence
  Description of Artificial Sequence: Synthetic peptide
YMHEWMRLT

SEQ ID NO: 16943 - protein, 9 aa, Artificial Sequence
  Description of Artificial Sequence: Synthetic peptide
YSAPRIRDA

SEQ ID NO: 16944 - protein, 9 aa, Artificial Sequence
  Description of Artificial Sequence: Synthetic peptide
SMNLWCRGN

SEQ ID NO: 16945 - protein, 9 aa, Artificial Sequence
  Description of Artificial Sequence: Synthetic peptide
CDLFPIRWP

SEQ ID NO: 16946 - protein, 9 aa, Artificial Sequence
  Description of Artificial Sequence: Synthetic peptide
TEGPMHRAW

SEQ ID NO: 16947 - protein, 9 aa, Artificial Sequence
  Description of Artificial Sequence: Synthetic peptide
QGTGHSLFL

SEQ ID NO: 16948 - protein, 9 aa, Artificial Sequence
  Description of Artificial Sequence: Synthetic peptide
RHWRHTMFL

SEQ ID NO: 16949 - protein, 9 aa, Artificial Sequence
  Description of Artificial Sequence: Synthetic peptide
RMETWCGFS

SEQ ID NO: 16950 - protein, 9 aa, Artificial Sequence
  Description of Artificial Sequence: Synthetic peptide
PMWTQMPFP

SEQ ID NO: 16951 - protein, 9 aa, Artificial Sequence
  Description of Artificial Sequence: Synthetic peptide
DINASEWFC

SEQ ID NO: 16952 - protein, 9 aa, Artificial Sequence
  Description of Artificial Sequence: Synthetic peptide
MIVMGPHFT

SEQ ID NO: 16953 - protein, 9 aa, Artificial Sequence
  Description of Artificial Sequence: Synthetic peptide
SLYNCMFFL

SEQ ID NO: 16954 - protein, 9 aa, Artificial Sequence
  Description of Artificial Sequence: Synthetic peptide
WMKVRQGFG

SEQ ID NO: 16955 - protein, 9 aa, Artificial Sequence
  Description of Artificial Sequence: Synthetic peptide
ILEAIVNFW

SEQ ID NO: 16956 - protein, 9 aa, Artificial Sequence
  Description of Artificial Sequence: Synthetic peptide
KISPWDGFY

SEQ ID NO: 16957 - protein, 9 aa, Artificial Sequence
  Description of Artificial Sequence: Synthetic peptide
AALENGWFN

SEQ ID NO: 16958 - protein, 9 aa, Artificial Sequence
  Description of Artificial Sequence: Synthetic peptide
ACMVNPGFW

SEQ ID NO: 16959 - protein, 9 aa, Artificial Sequence
  Description of Artificial Sequence: Synthetic peptide
ACSTVMDFN

SEQ ID NO: 16960 - protein, 9 aa, Artificial Sequence
  Description of Artificial Sequence: Synthetic peptide
ASIWRKLFD

SEQ ID NO: 16961 - protein, 9 aa, Artificial Sequence
  Description of Artificial Sequence: Synthetic peptide
AVHAEDIFM

SEQ ID NO: 16962 - protein, 9 aa, Artificial Sequence
  Description of Artificial Sequence: Synthetic peptide
DASVPGVFE

SEQ ID NO: 16963 - protein, 9 aa, Artificial Sequence
  Description of Artificial Sequence: Synthetic peptide
DCNWHWPFT

SEQ ID NO: 16964 - protein, 9 aa, Artificial Sequence
  Description of Artificial Sequence: Synthetic peptide
DKHFYQKFH

SEQ ID NO: 16965 - protein, 9 aa, Artificial Sequence
  Description of Artificial Sequence: Synthetic peptide
DSSLHGAFM

SEQ ID NO: 16966 - protein, 9 aa, Artificial Sequence
  Description of Artificial Sequence: Synthetic peptide
DSVNTSAFH

SEQ ID NO: 16967 - protein, 9 aa, Artificial Sequence
  Description of Artificial Sequence: Synthetic peptide
DVIRDDSFQ

SEQ ID NO: 16968 - protein, 9 aa, Artificial Sequence
  Description of Artificial Sequence: Synthetic peptide
FGMVHHGFF

SEQ ID NO: 16969 - protein, 9 aa, Artificial Sequence
  Description of Artificial Sequence: Synthetic peptide
FKYYIPEFC

SEQ ID NO: 16970 - protein, 9 aa, Artificial Sequence
  Description of Artificial Sequence: Synthetic peptide
FPGWCASFP

SEQ ID NO: 16971 - protein, 9 aa, Artificial Sequence
  Description of Artificial Sequence: Synthetic peptide
HICDMDMFL

SEQ ID NO: 16972 - protein, 9 aa, Artificial Sequence
  Description of Artificial Sequence: Synthetic peptide
HYFYTQQFG

SEQ ID NO: 16973 - protein, 9 aa, Artificial Sequence
  Description of Artificial Sequence: Synthetic peptide
IAIPCASFY

SEQ ID NO: 16974 - protein, 9 aa, Artificial Sequence
  Description of Artificial Sequence: Synthetic peptide
KNVMHSEFR

SEQ ID NO: 16975 - protein, 9 aa, Artificial Sequence
  Description of Artificial Sequence: Synthetic peptide
KYDREWPFL

SEQ ID NO: 16976 - protein, 9 aa, Artificial Sequence
  Description of Artificial Sequence: Synthetic peptide
LCCDVCMFL

SEQ ID NO: 16977 - protein, 9 aa, Artificial Sequence
  Description of Artificial Sequence: Synthetic peptide
LGDTGLMFG

SEQ ID NO: 16978 - protein, 9 aa, Artificial Sequence
  Description of Artificial Sequence: Synthetic peptide
LMSICAAFP

SEQ ID NO: 16979 - protein, 9 aa, Artificial Sequence
  Description of Artificial Sequence: Synthetic peptide
LQGWRWWFA

SEQ ID NO: 16980 - protein, 9 aa, Artificial Sequence
  Description of Artificial Sequence: Synthetic peptide
LVSDHIEFG

SEQ ID NO: 16981 - protein, 9 aa, Artificial Sequence
  Description of Artificial Sequence: Synthetic peptide
MASSEHCFF

SEQ ID NO: 16982 - protein, 9 aa, Artificial Sequence
  Description of Artificial Sequence: Synthetic peptide
MHIEHVMFQ

SEQ ID NO: 16983 - protein, 9 aa, Artificial Sequence
  Description of Artificial Sequence: Synthetic peptide
MIWYNRKFM

SEQ ID NO: 16984 - protein, 9 aa, Artificial Sequence
  Description of Artificial Sequence: Synthetic peptide
MNEIFVEFP

SEQ ID NO: 16985 - protein, 9 aa, Artificial Sequence
  Description of Artificial Sequence: Synthetic peptide
MWTAQQTFM

SEQ ID NO: 16986 - protein, 9 aa, Artificial Sequence
  Description of Artificial Sequence: Synthetic peptide
MYIPVYTFN

SEQ ID NO: 16987 - protein, 9 aa, Artificial Sequence
  Description of Artificial Sequence: Synthetic peptide
NVQPESTFF

SEQ ID NO: 16988 - protein, 9 aa, Artificial Sequence
  Description of Artificial Sequence: Synthetic peptide
PAMPFYWFE

SEQ ID NO: 16989 - protein, 9 aa, Artificial Sequence
  Description of Artificial Sequence: Synthetic peptide
QHQPFSMFS

SEQ ID NO: 16990 - protein, 9 aa, Artificial Sequence
  Description of Artificial Sequence: Synthetic peptide
QNSHGPVFG

SEQ ID NO: 16991 - protein, 9 aa, Artificial Sequence
  Description of Artificial Sequence: Synthetic peptide
QNVMHSEFR

SEQ ID NO: 16992 - protein, 9 aa, Artificial Sequence
  Description of Artificial Sequence: Synthetic peptide
QQAPATIFP

SEQ ID NO: 16993 - protein, 9 aa, Artificial Sequence
  Description of Artificial Sequence: Synthetic peptide
QQVEWSVFQ

SEQ ID NO: 16994 - protein, 9 aa, Artificial Sequence
  Description of Artificial Sequence: Synthetic peptide
QSISDMPFP

SEQ ID NO: 16995 - protein, 9 aa, Artificial Sequence
  Description of Artificial Sequence: Synthetic peptide
QVTPSMIFK

SEQ ID NO: 16996 - protein, 9 aa, Artificial Sequence
  Description of Artificial Sequence: Synthetic peptide
RDSCYINFP

SEQ ID NO: 16997 - protein, 9 aa, Artificial Sequence
  Description of Artificial Sequence: Synthetic peptide
SATCWLWFG

SEQ ID NO: 16998 - protein, 9 aa, Artificial Sequence
  Description of Artificial Sequence: Synthetic peptide
SCMGFTSFP

SEQ ID NO: 16999 - protein, 9 aa, Artificial Sequence
  Description of Artificial Sequence: Synthetic peptide
SDEWEDVFG

SEQ ID NO: 17000 - protein, 9 aa, Artificial Sequence
  Description of Artificial Sequence: Synthetic peptide
SGCHWGIFH

SEQ ID NO: 17001 - protein, 9 aa, Artificial Sequence
  Description of Artificial Sequence: Synthetic peptide
SMYSTHCFC

SEQ ID NO: 17002 - protein, 9 aa, Artificial Sequence
  Description of Artificial Sequence: Synthetic peptide
SYPGHHWFY

SEQ ID NO: 17003 - protein, 9 aa, Artificial Sequence
  Description of Artificial Sequence: Synthetic peptide
TASGNTYFV

SEQ ID NO: 17004 - protein, 9 aa, Artificial Sequence
  Description of Artificial Sequence: Synthetic peptide
TILEGDNFA

SEQ ID NO: 17005 - protein, 9 aa, Artificial Sequence
  Description of Artificial Sequence: Synthetic peptide
TITFIDLFN

SEQ ID NO: 17006 - protein, 9 aa, Artificial Sequence
  Description of Artificial Sequence: Synthetic peptide
TKNAMHNFF

SEQ ID NO: 17007 - protein, 9 aa, Artificial Sequence
  Description of Artificial Sequence: Synthetic peptide
TVSRASYFD

SEQ ID NO: 17008 - protein, 9 aa, Artificial Sequence
  Description of Artificial Sequence: Synthetic peptide
VAVTVTDFD

SEQ ID NO: 17009 - protein, 9 aa, Artificial Sequence
  Description of Artificial Sequence: Synthetic peptide
VMEKYAHFP

SEQ ID NO: 17010 - protein, 9 aa, Artificial Sequence
  Description of Artificial Sequence: Synthetic peptide
WGDRYGLFV

SEQ ID NO: 17011 - protein, 9 aa, Artificial Sequence
  Description of Artificial Sequence: Synthetic peptide
YSQWFTFFE

SEQ ID NO: 17012 - protein, 9 aa, Artificial Sequence
  Description of Artificial Sequence: Synthetic peptide
QVHAKLGFM

SEQ ID NO: 17013 - protein, 9 aa, Artificial Sequence
  Description of Artificial Sequence: Synthetic peptide
SATIRFYFN

SEQ ID NO: 17014 - protein, 9 aa, Artificial Sequence
  Description of Artificial Sequence: Synthetic peptide
QHQAFFVFT

SEQ ID NO: 17015 - protein, 9 aa, Artificial Sequence
  Description of Artificial Sequence: Synthetic peptide
QMKGATEFC

SEQ ID NO: 17016 - protein, 9 aa, Artificial Sequence
  Description of Artificial Sequence: Synthetic peptide
LVNMFQCFW

SEQ ID NO: 17017 - protein, 9 aa, Artificial Sequence
  Description of Artificial Sequence: Synthetic peptide
ASTERAKFG

SEQ ID NO: 17018 - protein, 9 aa, Artificial Sequence
  Description of Artificial Sequence: Synthetic peptide
NVKWHCDGG

SEQ ID NO: 17019 - protein, 9 aa, Artificial Sequence
  Description of Artificial Sequence: Synthetic peptide
PYFRFFPHG

SEQ ID NO: 17020 - protein, 9 aa, Artificial Sequence
  Description of Artificial Sequence: Synthetic peptide
QCGAIYQTG

SEQ ID NO: 17021 - protein, 9 aa, Artificial Sequence
  Description of Artificial Sequence: Synthetic peptide
QQNLADQAG

SEQ ID NO: 17022 - protein, 9 aa, Artificial Sequence
  Description of Artificial Sequence: Synthetic peptide
RQGKAMSMG

SEQ ID NO: 17023 - protein, 9 aa, Artificial Sequence
  Description of Artificial Sequence: Synthetic peptide
SCTHIKVPG

SEQ ID NO: 17024 - protein, 9 aa, Artificial Sequence
  Description of Artificial Sequence: Synthetic peptide
SCTMKDWWG

SEQ ID NO: 17025 - protein, 9 aa, Artificial Sequence
  Description of Artificial Sequence: Synthetic peptide
SCTPIKVPG

SEQ ID NO: 17026 - protein, 9 aa, Artificial Sequence
  Description of Artificial Sequence: Synthetic peptide
FLNNEELKG

SEQ ID NO: 17027 - protein, 9 aa, Artificial Sequence
  Description of Artificial Sequence: Synthetic peptide
WDNMDQTQG

SEQ ID NO: 17028 - protein, 9 aa, Artificial Sequence
  Description of Artificial Sequence: Synthetic peptide
AMLRQEKTG

SEQ ID NO: 17029 - protein, 9 aa, Artificial Sequence
  Description of Artificial Sequence: Synthetic peptide
DSQNNWPTG

SEQ ID NO: 17030 - protein, 9 aa, Artificial Sequence
  Description of Artificial Sequence: Synthetic peptide
KCGWHGEHG

SEQ ID NO: 17031 - protein, 9 aa, Artificial Sequence
  Description of Artificial Sequence: Synthetic peptide
VQQNNLKAG

SEQ ID NO: 17032 - protein, 9 aa, Artificial Sequence
  Description of Artificial Sequence: Synthetic peptide
VAANTYCYG

SEQ ID NO: 17033 - protein, 9 aa, Artificial Sequence
  Description of Artificial Sequence: Synthetic peptide
GEPWFQTHG

SEQ ID NO: 17034 - protein, 9 aa, Artificial Sequence
  Description of Artificial Sequence: Synthetic peptide
GEPWFRTHG

SEQ ID NO: 17035 - protein, 9 aa, Artificial Sequence
  Description of Artificial Sequence: Synthetic peptide
GMASMEHCG

SEQ ID NO: 17036 - protein, 9 aa, Artificial Sequence
  Description of Artificial Sequence: Synthetic peptide
GQGTSRLMG

SEQ ID NO: 17037 - protein, 9 aa, Artificial Sequence
  Description of Artificial Sequence: Synthetic peptide
ICHLRHIAG

SEQ ID NO: 17038 - protein, 9 aa, Artificial Sequence
  Description of Artificial Sequence: Synthetic peptide
MMLGYMEQG

SEQ ID NO: 17039 - protein, 9 aa, Artificial Sequence
  Description of Artificial Sequence: Synthetic peptide
NAKPKQVQG

SEQ ID NO: 17040 - protein, 9 aa, Artificial Sequence
  Description of Artificial Sequence: Synthetic peptide
PCYNAMNRG

SEQ ID NO: 17041 - protein, 9 aa, Artificial Sequence
  Description of Artificial Sequence: Synthetic peptide
QIHPYLEAG

SEQ ID NO: 17042 - protein, 9 aa, Artificial Sequence
  Description of Artificial Sequence: Synthetic peptide
SRDCVVHDG

SEQ ID NO: 17043 - protein, 9 aa, Artificial Sequence
  Description of Artificial Sequence: Synthetic peptide
VCPSCRDYG

SEQ ID NO: 17044 - protein, 9 aa, Artificial Sequence
  Description of Artificial Sequence: Synthetic peptide
WIKWKCSEG

SEQ ID NO: 17045 - protein, 9 aa, Artificial Sequence
  Description of Artificial Sequence: Synthetic peptide
CLNNSTCRG

SEQ ID NO: 17046 - protein, 9 aa, Artificial Sequence
  Description of Artificial Sequence: Synthetic peptide
QHSKCHMHG

SEQ ID NO: 17047 - protein, 9 aa, Artificial Sequence
  Description of Artificial Sequence: Synthetic peptide
AADFSGYYG

SEQ ID NO: 17048 - protein, 9 aa, Artificial Sequence
  Description of Artificial Sequence: Synthetic peptide
AAGATMLRG

SEQ ID NO: 17049 - protein, 9 aa, Artificial Sequence
  Description of Artificial Sequence: Synthetic peptide
AEIPIMFMG

SEQ ID NO: 17050 - protein, 9 aa, Artificial Sequence
  Description of Artificial Sequence: Synthetic peptide
AFVNWPIHG

SEQ ID NO: 17051 - protein, 9 aa, Artificial Sequence
  Description of Artificial Sequence: Synthetic peptide
ANQPKHGAG

SEQ ID NO: 17052 - protein, 9 aa, Artificial Sequence
  Description of Artificial Sequence: Synthetic peptide
APLIKASWG

SEQ ID NO: 17053 - protein, 9 aa, Artificial Sequence
  Description of Artificial Sequence: Synthetic peptide
AWDWCDMRG

SEQ ID NO: 17054 - protein, 9 aa, Artificial Sequence
  Description of Artificial Sequence: Synthetic peptide
AYNSRANGG

SEQ ID NO: 17055 - protein, 9 aa, Artificial Sequence
  Description of Artificial Sequence: Synthetic peptide
CHGHFQHIG

SEQ ID NO: 17056 - protein, 9 aa, Artificial Sequence
  Description of Artificial Sequence: Synthetic peptide
DAKTCHSRG

SEQ ID NO: 17057 - protein, 9 aa, Artificial Sequence
  Description of Artificial Sequence: Synthetic peptide
DCKLMRHQG

SEQ ID NO: 17058 - protein, 9 aa, Artificial Sequence
  Description of Artificial Sequence: Synthetic peptide
DIMLRTCCG

SEQ ID NO: 17059 - protein, 9 aa, Artificial Sequence
  Description of Artificial Sequence: Synthetic peptide
DRCMQTKHG

SEQ ID NO: 17060 - protein, 9 aa, Artificial Sequence
  Description of Artificial Sequence: Synthetic peptide
DSATQHMEG

SEQ ID NO: 17061 - protein, 9 aa, Artificial Sequence
  Description of Artificial Sequence: Synthetic peptide
DWTTISHEG

SEQ ID NO: 17062 - protein, 9 aa, Artificial Sequence
  Description of Artificial Sequence: Synthetic peptide
FEGSRQLWG

SEQ ID NO: 17063 - protein, 9 aa, Artificial Sequence
  Description of Artificial Sequence: Synthetic peptide
FREWRAMDG

SEQ ID NO: 17064 - protein, 9 aa, Artificial Sequence
  Description of Artificial Sequence: Synthetic peptide
GCTPSVCSG

SEQ ID NO: 17065 - protein, 9 aa, Artificial Sequence
  Description of Artificial Sequence: Synthetic peptide
GVMLKMAGG

SEQ ID NO: 17066 - protein, 9 aa, Artificial Sequence
  Description of Artificial Sequence: Synthetic peptide
GYVPWLMEG

SEQ ID NO: 17067 - protein, 9 aa, Artificial Sequence
  Description of Artificial Sequence: Synthetic peptide
HCHMIFKDG

SEQ ID NO: 17068 - protein, 9 aa, Artificial Sequence
  Description of Artificial Sequence: Synthetic peptide
HKDDYVQTG

SEQ ID NO: 17069 - protein, 9 aa, Artificial Sequence
  Description of Artificial Sequence: Synthetic peptide
ISEDIKENG

SEQ ID NO: 17070 - protein, 9 aa, Artificial Sequence
  Description of Artificial Sequence: Synthetic peptide
ISWLCEMNG

SEQ ID NO: 17071 - protein, 9 aa, Artificial Sequence
  Description of Artificial Sequence: Synthetic peptide
KNEWTYHQG

SEQ ID NO: 17072 - protein, 9 aa, Artificial Sequence
  Description of Artificial Sequence: Synthetic peptide
LEDMMSVEG

SEQ ID NO: 17073 - protein, 9 aa, Artificial Sequence
  Description of Artificial Sequence: Synthetic peptide
LIMEQPLAG

SEQ ID NO: 17074 - protein, 9 aa, Artificial Sequence
  Description of Artificial Sequence: Synthetic peptide
LNAECTSTG

SEQ ID NO: 17075 - protein, 9 aa, Artificial Sequence
  Description of Artificial Sequence: Synthetic peptide
LSTCWAIAG

SEQ ID NO: 17076 - protein, 9 aa, Artificial Sequence
  Description of Artificial Sequence: Synthetic peptide
LVVNQYTLG

SEQ ID NO: 17077 - protein, 9 aa, Artificial Sequence
  Description of Artificial Sequence: Synthetic peptide
MAAPTALNG

SEQ ID NO: 17078 - protein, 9 aa, Artificial Sequence
  Description of Artificial Sequence: Synthetic peptide
MIGTTQSDG

SEQ ID NO: 17079 - protein, 9 aa, Artificial Sequence
  Description of Artificial Sequence: Synthetic peptide
MKASTMELG

SEQ ID NO: 17080 - protein, 9 aa, Artificial Sequence
  Description of Artificial Sequence: Synthetic peptide
MKVYHEMVG

SEQ ID NO: 17081 - protein, 9 aa, Artificial Sequence
  Description of Artificial Sequence: Synthetic peptide
MQVSADHHG

SEQ ID NO: 17082 - protein, 9 aa, Artificial Sequence
  Description of Artificial Sequence: Synthetic peptide
NAAWQSITG

SEQ ID NO: 17083 - protein, 9 aa, Artificial Sequence
  Description of Artificial Sequence: Synthetic peptide
NCSHYDSRG

SEQ ID NO: 17084 - protein, 9 aa, Artificial Sequence
  Description of Artificial Sequence: Synthetic peptide
NGMVSGQYG

SEQ ID NO: 17085 - protein, 9 aa, Artificial Sequence
  Description of Artificial Sequence: Synthetic peptide
NHPYQHIEG

SEQ ID NO: 17086 - protein, 9 aa, Artificial Sequence
  Description of Artificial Sequence: Synthetic peptide
NKMHCDTMG

SEQ ID NO: 17087 - protein, 9 aa, Artificial Sequence
  Description of Artificial Sequence: Synthetic peptide
NKVMCLWQG

SEQ ID NO: 17088 - protein, 9 aa, Artificial Sequence
  Description of Artificial Sequence: Synthetic peptide
NNAPVWLHG

SEQ ID NO: 17089 - protein, 9 aa, Artificial Sequence
  Description of Artificial Sequence: Synthetic peptide
NSVSCGGQG

SEQ ID NO: 17090 - protein, 9 aa, Artificial Sequence
  Description of Artificial Sequence: Synthetic peptide
PGDFTSGYG

SEQ ID NO: 17091 - protein, 9 aa, Artificial Sequence
  Description of Artificial Sequence: Synthetic peptide
QCDEQQEAG

SEQ ID NO: 17092 - protein, 9 aa, Artificial Sequence
  Description of Artificial Sequence: Synthetic peptide
QFGSFWPTG

SEQ ID NO: 17093 - protein, 9 aa, Artificial Sequence
  Description of Artificial Sequence: Synthetic peptide
QNARSSMVG

SEQ ID NO: 17094 - protein, 9 aa, Artificial Sequence
  Description of Artificial Sequence: Synthetic peptide
QYDTIQLNG

SEQ ID NO: 17095 - protein, 9 aa, Artificial Sequence
  Description of Artificial Sequence: Synthetic peptide
SCHHVGMCG

SEQ ID NO: 17096 - protein, 9 aa, Artificial Sequence
  Description of Artificial Sequence: Synthetic peptide
SFKWTIVNG

SEQ ID NO: 17097 - protein, 9 aa, Artificial Sequence
  Description of Artificial Sequence: Synthetic peptide
SIMKYDQMG

SEQ ID NO: 17098 - protein, 9 aa, Artificial Sequence
  Description of Artificial Sequence: Synthetic peptide
SMHHTQFTG

SEQ ID NO: 17099 - protein, 9 aa, Artificial Sequence
  Description of Artificial Sequence: Synthetic peptide
SVGFPYESG

SEQ ID NO: 17100 - protein, 9 aa, Artificial Sequence
  Description of Artificial Sequence: Synthetic peptide
TAQYDVWHG

SEQ ID NO: 17101 - protein, 9 aa, Artificial Sequence
  Description of Artificial Sequence: Synthetic peptide
TGYPKLKDG

SEQ ID NO: 17102 - protein, 9 aa, Artificial Sequence
  Description of Artificial Sequence: Synthetic peptide
TQEPWGCAG

SEQ ID NO: 17103 - protein, 9 aa, Artificial Sequence
  Description of Artificial Sequence: Synthetic peptide
TQGLPRGRG

SEQ ID NO: 17104 - protein, 9 aa, Artificial Sequence
  Description of Artificial Sequence: Synthetic peptide
TRLYNWPMG

SEQ ID NO: 17105 - protein, 9 aa, Artificial Sequence
  Description of Artificial Sequence: Synthetic peptide
TSHHWAAQG

SEQ ID NO: 17106 - protein, 9 aa, Artificial Sequence
  Description of Artificial Sequence: Synthetic peptide
TWWKDPQEG

SEQ ID NO: 17107 - protein, 9 aa, Artificial Sequence
  Description of Artificial Sequence: Synthetic peptide
VAHYYCWEG

SEQ ID NO: 17108 - protein, 9 aa, Artificial Sequence
  Description of Artificial Sequence: Synthetic peptide
VLMNWQPRG

SEQ ID NO: 17109 - protein, 9 aa, Artificial Sequence
  Description of Artificial Sequence: Synthetic peptide
VLNHWEPIG

SEQ ID NO: 17110 - protein, 9 aa, Artificial Sequence
  Description of Artificial Sequence: Synthetic peptide
VVMHPYAAG

SEQ ID NO: 17111 - protein, 9 aa, Artificial Sequence
  Description of Artificial Sequence: Synthetic peptide
VVSHYDMIG

SEQ ID NO: 17112 - protein, 9 aa, Artificial Sequence
  Description of Artificial Sequence: Synthetic peptide
WHTVHYMGG

SEQ ID NO: 17113 - protein, 9 aa, Artificial Sequence
  Description of Artificial Sequence: Synthetic peptide
WLTFDRFEG

SEQ ID NO: 17114 - protein, 9 aa, Artificial Sequence
  Description of Artificial Sequence: Synthetic peptide
AKCPWHHTG

SEQ ID NO: 17115 - protein, 9 aa, Artificial Sequence
  Description of Artificial Sequence: Synthetic peptide
VNPWYVKHG

SEQ ID NO: 17116 - protein, 9 aa, Artificial Sequence
  Description of Artificial Sequence: Synthetic peptide
DVASRCWVG

SEQ ID NO: 17117 - protein, 9 aa, Artificial Sequence
  Description of Artificial Sequence: Synthetic peptide
SGTPHQQSG

SEQ ID NO: 17118 - protein, 9 aa, Artificial Sequence
  Description of Artificial Sequence: Synthetic peptide
AAKAIHYWM

SEQ ID NO: 17119 - protein, 9 aa, Artificial Sequence
  Description of Artificial Sequence: Synthetic peptide
AAMPFYWFE

SEQ ID NO: 17120 - protein, 9 aa, Artificial Sequence
  Description of Artificial Sequence: Synthetic peptide
AANKMNAER

SEQ ID NO: 17121 - protein, 9 aa, Artificial Sequence
  Description of Artificial Sequence: Synthetic peptide
ACSTVMDFS

SEQ ID NO: 17122 - protein, 9 aa, Artificial Sequence
  Description of Artificial Sequence: Synthetic peptide
ACSTVTDFN

SEQ ID NO: 17123 - protein, 9 aa, Artificial Sequence
  Description of Artificial Sequence: Synthetic peptide
ADADMMWMA

SEQ ID NO: 17124 - protein, 9 aa, Artificial Sequence
  Description of Artificial Sequence: Synthetic peptide
ADCSSSDWS

SEQ ID NO: 17125 - protein, 9 aa, Artificial Sequence
  Description of Artificial Sequence: Synthetic peptide
AEKAIHYWM

SEQ ID NO: 17126 - protein, 9 aa, Artificial Sequence
  Description of Artificial Sequence: Synthetic peptide
AFCCDHNAA

SEQ ID NO: 17127 - protein, 9 aa, Artificial Sequence
  Description of Artificial Sequence: Synthetic peptide
AFEDYGSWE

SEQ ID NO: 17128 - protein, 9 aa, Artificial Sequence
  Description of Artificial Sequence: Synthetic peptide
AFKAPRRGV

SEQ ID NO: 17129 - protein, 9 aa, Artificial Sequence
  Description of Artificial Sequence: Synthetic peptide
AFKATHRGV

SEQ ID NO: 17130 - protein, 9 aa, Artificial Sequence
  Description of Artificial Sequence: Synthetic peptide
AFKATRGGV

SEQ ID NO: 17131 - protein, 9 aa, Artificial Sequence
  Description of Artificial Sequence: Synthetic peptide
AFKATRLGV

SEQ ID NO: 17132 - protein, 9 aa, Artificial Sequence
  Description of Artificial Sequence: Synthetic peptide
AFKATRQGV

SEQ ID NO: 17133 - protein, 9 aa, Artificial Sequence
  Description of Artificial Sequence: Synthetic peptide
AFKATRRAV

SEQ ID NO: 17134 - protein, 9 aa, Artificial Sequence
  Description of Artificial Sequence: Synthetic peptide
AFKATRRGA

SEQ ID NO: 17135 - protein, 9 aa, Artificial Sequence
  Description of Artificial Sequence: Synthetic peptide
AFKATRRGM

SEQ ID NO: 17136 - protein, 9 aa, Artificial Sequence
  Description of Artificial Sequence: Synthetic peptide
AFKATRRSV

SEQ ID NO: 17137 - protein, 9 aa, Artificial Sequence
  Description of Artificial Sequence: Synthetic peptide
AFKSTRRGV

SEQ ID NO: 17138 - protein, 9 aa, Artificial Sequence
  Description of Artificial Sequence: Synthetic peptide
AFKTTRRGV

SEQ ID NO: 17139 - protein, 9 aa, Artificial Sequence
  Description of Artificial Sequence: Synthetic peptide
AFMPKESKE

SEQ ID NO: 17140 - protein, 9 aa, Artificial Sequence
  Description of Artificial Sequence: Synthetic peptide
AFNPQEMWA

SEQ ID NO: 17141 - protein, 9 aa, Artificial Sequence
  Description of Artificial Sequence: Synthetic peptide
AFNQQEVWA

SEQ ID NO: 17142 - protein, 9 aa, Artificial Sequence
  Description of Artificial Sequence: Synthetic peptide
AFQSTDWGW

SEQ ID NO: 17143 - protein, 9 aa, Artificial Sequence
  Description of Artificial Sequence: Synthetic peptide
AFVHWPIHG

SEQ ID NO: 17144 - protein, 9 aa, Artificial Sequence
  Description of Artificial Sequence: Synthetic peptide
AFVNWPLHG

SEQ ID NO: 17145 - protein, 9 aa, Artificial Sequence
  Description of Artificial Sequence: Synthetic peptide
AFVNWTIHG

SEQ ID NO: 17146 - protein, 9 aa, Artificial Sequence
  Description of Artificial Sequence: Synthetic peptide
AFVTWPIHG

SEQ ID NO: 17147 - protein, 9 aa, Artificial Sequence
  Description of Artificial Sequence: Synthetic peptide
AGDFSGYYG

SEQ ID NO: 17148 - protein, 9 aa, Artificial Sequence
  Description of Artificial Sequence: Synthetic peptide
AGETNNGGY

SEQ ID NO: 17149 - protein, 9 aa, Artificial Sequence
  Description of Artificial Sequence: Synthetic peptide
AGSASNWAD

SEQ ID NO: 17150 - protein, 9 aa, Artificial Sequence
  Description of Artificial Sequence: Synthetic peptide
AGVFRKITM

SEQ ID NO: 17151 - protein, 9 aa, Artificial Sequence
  Description of Artificial Sequence: Synthetic peptide
AGYASHWAD

SEQ ID NO: 17152 - protein, 9 aa, Artificial Sequence
  Description of Artificial Sequence: Synthetic peptide
AGYASNWGD

SEQ ID NO: 17153 - protein, 9 aa, Artificial Sequence
  Description of Artificial Sequence: Synthetic peptide
AHCHFSNMQ

SEQ ID NO: 17154 - protein, 9 aa, Artificial Sequence
  Description of Artificial Sequence: Synthetic peptide
AHMVENDTP

SEQ ID NO: 17155 - protein, 9 aa, Artificial Sequence
  Description of Artificial Sequence: Synthetic peptide
AHWDFSNMQ

SEQ ID NO: 17156 - protein, 9 aa, Artificial Sequence
  Description of Artificial Sequence: Synthetic peptide
AIHDQLEAM

SEQ ID NO: 17157 - protein, 9 aa, Artificial Sequence
  Description of Artificial Sequence: Synthetic peptide
AKAFIEHTY

SEQ ID NO: 17158 - protein, 9 aa, Artificial Sequence
  Description of Artificial Sequence: Synthetic peptide
AKEQGAVGR

SEQ ID NO: 17159 - protein, 9 aa, Artificial Sequence
  Description of Artificial Sequence: Synthetic peptide
AKGAYNQGN

SEQ ID NO: 17160 - protein, 9 aa, Artificial Sequence
  Description of Artificial Sequence: Synthetic peptide
AKGFLEHTY

SEQ ID NO: 17161 - protein, 9 aa, Artificial Sequence
  Description of Artificial Sequence: Synthetic peptide
AKGSYNQGN

SEQ ID NO: 17162 - protein, 9 aa, Artificial Sequence
  Description of Artificial Sequence: Synthetic peptide
AKGTYNHGN

SEQ ID NO: 17163 - protein, 9 aa, Artificial Sequence
  Description of Artificial Sequence: Synthetic peptide
AKHFYQKFH

SEQ ID NO: 17164 - protein, 9 aa, Artificial Sequence
  Description of Artificial Sequence: Synthetic peptide
AKISAAWDR

SEQ ID NO: 17165 - protein, 9 aa, Artificial Sequence
  Description of Artificial Sequence: Synthetic peptide
AKNAMHNFF

SEQ ID NO: 17166 - protein, 9 aa, Artificial Sequence
  Description of Artificial Sequence: Synthetic peptide
AKNYMHCYW

SEQ ID NO: 17167 - protein, 9 aa, Artificial Sequence
  Description of Artificial Sequence: Synthetic peptide
AKRDHHYFA

SEQ ID NO: 17168 - protein, 9 aa, Artificial Sequence
  Description of Artificial Sequence: Synthetic peptide
AKTDNHVLH

SEQ ID NO: 17169 - protein, 9 aa, Artificial Sequence
  Description of Artificial Sequence: Synthetic peptide
ALTYCHWTD

SEQ ID NO: 17170 - protein, 9 aa, Artificial Sequence
  Description of Artificial Sequence: Synthetic peptide
ALTYCNWAD

SEQ ID NO: 17171 - protein, 9 aa, Artificial Sequence
  Description of Artificial Sequence: Synthetic peptide
AMKNLKRTG

SEQ ID NO: 17172 - protein, 9 aa, Artificial Sequence
  Description of Artificial Sequence: Synthetic peptide
AMVCQAIVF

SEQ ID NO: 17173 - protein, 9 aa, Artificial Sequence
  Description of Artificial Sequence: Synthetic peptide
AMVCQIIVF

SEQ ID NO: 17174 - protein, 9 aa, Artificial Sequence
  Description of Artificial Sequence: Synthetic peptide
AMVCRVIVF

SEQ ID NO: 17175 - protein, 9 aa, Artificial Sequence
  Description of Artificial Sequence: Synthetic peptide
ANSSNHSQE

SEQ ID NO: 17176 - protein, 9 aa, Artificial Sequence
  Description of Artificial Sequence: Synthetic peptide
AQHNSESNI

SEQ ID NO: 17177 - protein, 9 aa, Artificial Sequence
  Description of Artificial Sequence: Synthetic peptide
ARHVNFEMS

SEQ ID NO: 17178 - protein, 9 aa, Artificial Sequence
  Description of Artificial Sequence: Synthetic peptide
ASKMSHKEA

SEQ ID NO: 17179 - protein, 9 aa, Artificial Sequence
  Description of Artificial Sequence: Synthetic peptide
ASKRSGKQP

SEQ ID NO: 17180 - protein, 9 aa, Artificial Sequence
  Description of Artificial Sequence: Synthetic peptide
ASMEHMKKA

SEQ ID NO: 17181 - protein, 9 aa, Artificial Sequence
  Description of Artificial Sequence: Synthetic peptide
ASRIYCRHE

SEQ ID NO: 17182 - protein, 9 aa, Artificial Sequence
  Description of Artificial Sequence: Synthetic peptide
ASRSLERQA

SEQ ID NO: 17183 - protein, 9 aa, Artificial Sequence
  Description of Artificial Sequence: Synthetic peptide
ASYFMEITR

SEQ ID NO: 17184 - protein, 9 aa, Artificial Sequence
  Description of Artificial Sequence: Synthetic peptide
ATEQWDFCR

SEQ ID NO: 17185 - protein, 9 aa, Artificial Sequence
  Description of Artificial Sequence: Synthetic peptide
ATSVFCVFR

SEQ ID NO: 17186 - protein, 9 aa, Artificial Sequence
  Description of Artificial Sequence: Synthetic peptide
ATTSNNLTR

SEQ ID NO: 17187 - protein, 9 aa, Artificial Sequence
  Description of Artificial Sequence: Synthetic peptide
ATTSSNLTR

SEQ ID NO: 17188 - protein, 9 aa, Artificial Sequence
  Description of Artificial Sequence: Synthetic peptide
ATTSYNLAR

SEQ ID NO: 17189 - protein, 9 aa, Artificial Sequence
  Description of Artificial Sequence: Synthetic peptide
AVDPTFKPH

SEQ ID NO: 17190 - protein, 9 aa, Artificial Sequence
  Description of Artificial Sequence: Synthetic peptide
AVEFLAHQY

SEQ ID NO: 17191 - protein, 9 aa, Artificial Sequence
  Description of Artificial Sequence: Synthetic peptide
AVKCTEYSA

SEQ ID NO: 17192 - protein, 9 aa, Artificial Sequence
  Description of Artificial Sequence: Synthetic peptide
AVNPAFKPH

SEQ ID NO: 17193 - protein, 9 aa, Artificial Sequence
  Description of Artificial Sequence: Synthetic peptide
AVYPLFAPE

SEQ ID NO: 17194 - protein, 9 aa, Artificial Sequence
  Description of Artificial Sequence: Synthetic peptide
AWKMMHCDI

SEQ ID NO: 17195 - protein, 9 aa, Artificial Sequence
  Description of Artificial Sequence: Synthetic peptide
AWKMMHCHN

SEQ ID NO: 17196 - protein, 9 aa, Artificial Sequence
  Description of Artificial Sequence: Synthetic peptide
AWKMMHFDN

SEQ ID NO: 17197 - protein, 9 aa, Artificial Sequence
  Description of Artificial Sequence: Synthetic peptide
AWKMMHGDN

SEQ ID NO: 17198 - protein, 9 aa, Artificial Sequence
  Description of Artificial Sequence: Synthetic peptide
AWKMMNCDN

SEQ ID NO: 17199 - protein, 9 aa, Artificial Sequence
  Description of Artificial Sequence: Synthetic peptide
AWQMMHCDN

SEQ ID NO: 17200 - protein, 9 aa, Artificial Sequence
  Description of Artificial Sequence: Synthetic peptide
AWRMMHCDN

SEQ ID NO: 17201 - protein, 9 aa, Artificial Sequence
  Description of Artificial Sequence: Synthetic peptide
AWYASNWAD

SEQ ID NO: 17202 - protein, 9 aa, Artificial Sequence
  Description of Artificial Sequence: Synthetic peptide
AYKNCHRHG

SEQ ID NO: 17203 - protein, 9 aa, Artificial Sequence
  Description of Artificial Sequence: Synthetic peptide
AYRMFNNVQ

SEQ ID NO: 17204 - protein, 9 aa, Artificial Sequence
  Description of Artificial Sequence: Synthetic peptide
CAKACDTSS

SEQ ID NO: 17205 - protein, 9 aa, Artificial Sequence
  Description of Artificial Sequence: Synthetic peptide
CAKDCDASS

SEQ ID NO: 17206 - protein, 9 aa, Artificial Sequence
  Description of Artificial Sequence: Synthetic peptide
CAKNCDTSS

SEQ ID NO: 17207 - protein, 9 aa, Artificial Sequence
  Description of Artificial Sequence: Synthetic peptide
CARDCDTSS

SEQ ID NO: 17208 - protein, 9 aa, Artificial Sequence
  Description of Artificial Sequence: Synthetic peptide
CDYVQREWD

SEQ ID NO: 17209 - protein, 9 aa, Artificial Sequence
  Description of Artificial Sequence: Synthetic peptide
CDYVQRKWD

SEQ ID NO: 17210 - protein, 9 aa, Artificial Sequence
  Description of Artificial Sequence: Synthetic peptide
CDYVQRRWD

SEQ ID NO: 17211 - protein, 9 aa, Artificial Sequence
  Description of Artificial Sequence: Synthetic peptide
CERRALKMI

SEQ ID NO: 17212 - protein, 9 aa, Artificial Sequence
  Description of Artificial Sequence: Synthetic peptide
CESIMHPDQ

SEQ ID NO: 17213 - protein, 9 aa, Artificial Sequence
  Description of Artificial Sequence: Synthetic peptide
CFKWTIVNG

SEQ ID NO: 17214 - protein, 9 aa, Artificial Sequence
  Description of Artificial Sequence: Synthetic peptide
CFRQDRIIF

SEQ ID NO: 17215 - protein, 9 aa, Artificial Sequence
  Description of Artificial Sequence: Synthetic peptide
CIESFIENH

SEQ ID NO: 17216 - protein, 9 aa, Artificial Sequence
  Description of Artificial Sequence: Synthetic peptide
CIWQHNVTQ

SEQ ID NO: 17217 - protein, 9 aa, Artificial Sequence
  Description of Artificial Sequence: Synthetic peptide
CKAHFGFME

SEQ ID NO: 17218 - protein, 9 aa, Artificial Sequence
  Description of Artificial Sequence: Synthetic peptide
CKDHFGFMV

SEQ ID NO: 17219 - protein, 9 aa, Artificial Sequence
  Description of Artificial Sequence: Synthetic peptide
CKDHFGVME

SEQ ID NO: 17220 - protein, 9 aa, Artificial Sequence
  Description of Artificial Sequence: Synthetic peptide
CKEAFDVNE

SEQ ID NO: 17221 - protein, 9 aa, Artificial Sequence
  Description of Artificial Sequence: Synthetic peptide
CLRQDRIIS

SEQ ID NO: 17222 - protein, 9 aa, Artificial Sequence
  Description of Artificial Sequence: Synthetic peptide
CPEAFDVNE

SEQ ID NO: 17223 - protein, 9 aa, Artificial Sequence
  Description of Artificial Sequence: Synthetic peptide
CQDHFGFME

SEQ ID NO: 17224 - protein, 9 aa, Artificial Sequence
  Description of Artificial Sequence: Synthetic peptide
CSKDCDTSS

SEQ ID NO: 17225 - protein, 9 aa, Artificial Sequence
  Description of Artificial Sequence: Synthetic peptide
CSPPIVMDR

SEQ ID NO: 17226 - protein, 9 aa, Artificial Sequence
  Description of Artificial Sequence: Synthetic peptide
CSYFMEITR

SEQ ID NO: 17227 - protein, 9 aa, Artificial Sequence
  Description of Artificial Sequence: Synthetic peptide
CTAPIVMDR

SEQ ID NO: 17228 - protein, 9 aa, Artificial Sequence
  Description of Artificial Sequence: Synthetic peptide
CTKDCDTSS

SEQ ID NO: 17229 - protein, 9 aa, Artificial Sequence
  Description of Artificial Sequence: Synthetic peptide
CTPPIAMDR

SEQ ID NO: 17230 - protein, 9 aa, Artificial Sequence
  Description of Artificial Sequence: Synthetic peptide
CTPPIFMDR

SEQ ID NO: 17231 - protein, 9 aa, Artificial Sequence
  Description of Artificial Sequence: Synthetic peptide
CTPPIIMDR

SEQ ID NO: 17232 - protein, 9 aa, Artificial Sequence
  Description of Artificial Sequence: Synthetic peptide
CTPPILMDR

SEQ ID NO: 17233 - protein, 9 aa, Artificial Sequence
  Description of Artificial Sequence: Synthetic peptide
CTPPIVTDR

SEQ ID NO: 17234 - protein, 9 aa, Artificial Sequence
  Description of Artificial Sequence: Synthetic peptide
CTPPTVMDR

SEQ ID NO: 17235 - protein, 9 aa, Artificial Sequence
  Description of Artificial Sequence: Synthetic peptide
CTSFACKSF

SEQ ID NO: 17236 - protein, 9 aa, Artificial Sequence
  Description of Artificial Sequence: Synthetic peptide
CVKDCDTSS

SEQ ID NO: 17237 - protein, 9 aa, Artificial Sequence
  Description of Artificial Sequence: Synthetic peptide
DADNYMIYQ

SEQ ID NO: 17238 - protein, 9 aa, Artificial Sequence
  Description of Artificial Sequence: Synthetic peptide
DADYYMIYR

SEQ ID NO: 17239 - protein, 9 aa, Artificial Sequence
  Description of Artificial Sequence: Synthetic peptide
DARVSNIRQ

SEQ ID NO: 17240 - protein, 9 aa, Artificial Sequence
  Description of Artificial Sequence: Synthetic peptide
DCRWYGNNS

SEQ ID NO: 17241 - protein, 9 aa, Artificial Sequence
  Description of Artificial Sequence: Synthetic peptide
DCTNNELKR

SEQ ID NO: 17242 - protein, 9 aa, Artificial Sequence
  Description of Artificial Sequence: Synthetic peptide
DCTNNKVKR

SEQ ID NO: 17243 - protein, 9 aa, Artificial Sequence
  Description of Artificial Sequence: Synthetic peptide
DCTNTKLKR

SEQ ID NO: 17244 - protein, 9 aa, Artificial Sequence
  Description of Artificial Sequence: Synthetic peptide
DEPCEELAF

SEQ ID NO: 17245 - protein, 9 aa, Artificial Sequence
  Description of Artificial Sequence: Synthetic peptide
DFIQSDTEF

SEQ ID NO: 17246 - protein, 9 aa, Artificial Sequence
  Description of Artificial Sequence: Synthetic peptide
DFVQSDTGF

SEQ ID NO: 17247 - protein, 9 aa, Artificial Sequence
  Description of Artificial Sequence: Synthetic peptide
DGCSLYAFS

SEQ ID NO: 17248 - protein, 9 aa, Artificial Sequence
  Description of Artificial Sequence: Synthetic peptide
DGDYYMIYQ

SEQ ID NO: 17249 - protein, 9 aa, Artificial Sequence
  Description of Artificial Sequence: Synthetic peptide
DGTNNKLKR

SEQ ID NO: 17250 - protein, 9 aa, Artificial Sequence
  Description of Artificial Sequence: Synthetic peptide
DHCGPIAWP

SEQ ID NO: 17251 - protein, 9 aa, Artificial Sequence
  Description of Artificial Sequence: Synthetic peptide
DHPYQHIEG

SEQ ID NO: 17252 - protein, 9 aa, Artificial Sequence
  Description of Artificial Sequence: Synthetic peptide
DICCNYDAQ

SEQ ID NO: 17253 - protein, 9 aa, Artificial Sequence
  Description of Artificial Sequence: Synthetic peptide
DIGMRPSGW

SEQ ID NO: 17254 - protein, 9 aa, Artificial Sequence
  Description of Artificial Sequence: Synthetic peptide
DKHFYEKFH

SEQ ID NO: 17255 - protein, 9 aa, Artificial Sequence
  Description of Artificial Sequence: Synthetic peptide
DKNYMHCHW

SEQ ID NO: 17256 - protein, 9 aa, Artificial Sequence
  Description of Artificial Sequence: Synthetic peptide
DKNYMHWYW

SEQ ID NO: 17257 - protein, 9 aa, Artificial Sequence
  Description of Artificial Sequence: Synthetic peptide
DKNYMHYYW

SEQ ID NO: 17258 - protein, 9 aa, Artificial Sequence
  Description of Artificial Sequence: Synthetic peptide
DKNYTHCYW

SEQ ID NO: 17259 - protein, 9 aa, Artificial Sequence
  Description of Artificial Sequence: Synthetic peptide
DKRDNHYFA

SEQ ID NO: 17260 - protein, 9 aa, Artificial Sequence
  Description of Artificial Sequence: Synthetic peptide
DKRDYHYFA

SEQ ID NO: 17261 - protein, 9 aa, Artificial Sequence
  Description of Artificial Sequence: Synthetic peptide
DKRNHHYFA

SEQ ID NO: 17262 - protein, 9 aa, Artificial Sequence
  Description of Artificial Sequence: Synthetic peptide
DKRYHHYFA

SEQ ID NO: 17263 - protein, 9 aa, Artificial Sequence
  Description of Artificial Sequence: Synthetic peptide
DKSYMHCYW

SEQ ID NO: 17264 - protein, 9 aa, Artificial Sequence
  Description of Artificial Sequence: Synthetic peptide
DKTYMHCYW

SEQ ID NO: 17265 - protein, 9 aa, Artificial Sequence
  Description of Artificial Sequence: Synthetic peptide
DMSHTFVAA

SEQ ID NO: 17266 - protein, 9 aa, Artificial Sequence
  Description of Artificial Sequence: Synthetic peptide
DNAFVHCNQ

SEQ ID NO: 17267 - protein, 9 aa, Artificial Sequence
  Description of Artificial Sequence: Synthetic peptide
DNAIVHCDQ

SEQ ID NO: 17268 - protein, 9 aa, Artificial Sequence
  Description of Artificial Sequence: Synthetic peptide
DNAIVHCNE

SEQ ID NO: 17269 - protein, 9 aa, Artificial Sequence
  Description of Artificial Sequence: Synthetic peptide
DNAIVHCNL

SEQ ID NO: 17270 - protein, 9 aa, Artificial Sequence
  Description of Artificial Sequence: Synthetic peptide
DNAMVHCNQ

SEQ ID NO: 17271 - protein, 9 aa, Artificial Sequence
  Description of Artificial Sequence: Synthetic peptide
DNAVVHCNQ

SEQ ID NO: 17272 - protein, 9 aa, Artificial Sequence
  Description of Artificial Sequence: Synthetic peptide
DNGIVHCNQ

SEQ ID NO: 17273 - protein, 9 aa, Artificial Sequence
  Description of Artificial Sequence: Synthetic peptide
DRCMQAKHG

SEQ ID NO: 17274 - protein, 9 aa, Artificial Sequence
  Description of Artificial Sequence: Synthetic peptide
DRCMQTKHA

SEQ ID NO: 17275 - protein, 9 aa, Artificial Sequence
  Description of Artificial Sequence: Synthetic peptide
DRNYMHCYW

SEQ ID NO: 17276 - protein, 9 aa, Artificial Sequence
  Description of Artificial Sequence: Synthetic peptide
DSAIVHCNQ

SEQ ID NO: 17277 - protein, 9 aa, Artificial Sequence
  Description of Artificial Sequence: Synthetic peptide
DSKEEGLAF

SEQ ID NO: 17278 - protein, 9 aa, Artificial Sequence
  Description of Artificial Sequence: Synthetic peptide
DSMAMSARA

SEQ ID NO: 17279 - protein, 9 aa, Artificial Sequence
  Description of Artificial Sequence: Synthetic peptide
DSMGMTARA

SEQ ID NO: 17280 - protein, 9 aa, Artificial Sequence
  Description of Artificial Sequence: Synthetic peptide
DSREEGLTF

SEQ ID NO: 17281 - protein, 9 aa, Artificial Sequence
  Description of Artificial Sequence: Synthetic peptide
DSRQLHHLG

SEQ ID NO: 17282 - protein, 9 aa, Artificial Sequence
  Description of Artificial Sequence: Synthetic peptide
DSRQLHHTG

SEQ ID NO: 17283 - protein, 9 aa, Artificial Sequence
  Description of Artificial Sequence: Synthetic peptide
DSRQLHRIG

SEQ ID NO: 17284 - protein, 9 aa, Artificial Sequence
  Description of Artificial Sequence: Synthetic peptide
DSRQLHYIG

SEQ ID NO: 17285 - protein, 9 aa, Artificial Sequence
  Description of Artificial Sequence: Synthetic peptide
DSRRLHHIG

SEQ ID NO: 17286 - protein, 9 aa, Artificial Sequence
  Description of Artificial Sequence: Synthetic peptide
DTAIVHCNQ

SEQ ID NO: 17287 - protein, 9 aa, Artificial Sequence
  Description of Artificial Sequence: Synthetic peptide
DTNQLNDLS

SEQ ID NO: 17288 - protein, 9 aa, Artificial Sequence
  Description of Artificial Sequence: Synthetic peptide
DTTPNESDR

SEQ ID NO: 17289 - protein, 9 aa, Artificial Sequence
  Description of Artificial Sequence: Synthetic peptide
DVCTVFVTA

SEQ ID NO: 17290 - protein, 9 aa, Artificial Sequence
  Description of Artificial Sequence: Synthetic peptide
DVDYYMIYQ

SEQ ID NO: 17291 - protein, 9 aa, Artificial Sequence
  Description of Artificial Sequence: Synthetic peptide
DVVRVQKMA

SEQ ID NO: 17292 - protein, 9 aa, Artificial Sequence
  Description of Artificial Sequence: Synthetic peptide
DWASNNWWP

SEQ ID NO: 17293 - protein, 9 aa, Artificial Sequence
  Description of Artificial Sequence: Synthetic peptide
DWMTRHKVI

SEQ ID NO: 17294 - protein, 9 aa, Artificial Sequence
  Description of Artificial Sequence: Synthetic peptide
DWMTRNKVI

SEQ ID NO: 17295 - protein, 9 aa, Artificial Sequence
  Description of Artificial Sequence: Synthetic peptide
DWMTRYKLI

SEQ ID NO: 17296 - protein, 9 aa, Artificial Sequence
  Description of Artificial Sequence: Synthetic peptide
DWMTRYKVL

SEQ ID NO: 17297 - protein, 9 aa, Artificial Sequence
  Description of Artificial Sequence: Synthetic peptide
DWSANNWWP

SEQ ID NO: 17298 - protein, 9 aa, Artificial Sequence
  Description of Artificial Sequence: Synthetic peptide
EAEYWSCGR

SEQ ID NO: 17299 - protein, 9 aa, Artificial Sequence
  Description of Artificial Sequence: Synthetic peptide
EAEYWTCGR

SEQ ID NO: 17300 - protein, 9 aa, Artificial Sequence
  Description of Artificial Sequence: Synthetic peptide
EAHYTNECR

SEQ ID NO: 17301 - protein, 9 aa, Artificial Sequence
  Description of Artificial Sequence: Synthetic peptide
EARDSCWWG

SEQ ID NO: 17302 - protein, 9 aa, Artificial Sequence
  Description of Artificial Sequence: Synthetic peptide
EARYCCWWG

SEQ ID NO: 17303 - protein, 9 aa, Artificial Sequence
  Description of Artificial Sequence: Synthetic peptide
EARYSCWSG

SEQ ID NO: 17304 - protein, 9 aa, Artificial Sequence
  Description of Artificial Sequence: Synthetic peptide
EARYTCWWG

SEQ ID NO: 17305 - protein, 9 aa, Artificial Sequence
  Description of Artificial Sequence: Synthetic peptide
ECKQQGVRR

SEQ ID NO: 17306 - protein, 9 aa, Artificial Sequence
  Description of Artificial Sequence: Synthetic peptide
EFCEMQSLC

SEQ ID NO: 17307 - protein, 9 aa, Artificial Sequence
  Description of Artificial Sequence: Synthetic peptide
EFCHALVCQ

SEQ ID NO: 17308 - protein, 9 aa, Artificial Sequence
  Description of Artificial Sequence: Synthetic peptide
EFEDYGGWE

SEQ ID NO: 17309 - protein, 9 aa, Artificial Sequence
  Description of Artificial Sequence: Synthetic peptide
EFEMSVFSN

SEQ ID NO: 17310 - protein, 9 aa, Artificial Sequence
  Description of Artificial Sequence: Synthetic peptide
EFFIFGAID

SEQ ID NO: 17311 - protein, 9 aa, Artificial Sequence
  Description of Artificial Sequence: Synthetic peptide
EFFIIGAIG

SEQ ID NO: 17312 - protein, 9 aa, Artificial Sequence
  Description of Artificial Sequence: Synthetic peptide
EFFIIGAIV

SEQ ID NO: 17313 - protein, 9 aa, Artificial Sequence
  Description of Artificial Sequence: Synthetic peptide
EFFIIGAVD

SEQ ID NO: 17314 - protein, 9 aa, Artificial Sequence
  Description of Artificial Sequence: Synthetic peptide
EFFIIGTID

SEQ ID NO: 17315 - protein, 9 aa, Artificial Sequence
  Description of Artificial Sequence: Synthetic peptide
EFFIIVAID

SEQ ID NO: 17316 - protein, 9 aa, Artificial Sequence
  Description of Artificial Sequence: Synthetic peptide
EFFIVGAID

SEQ ID NO: 17317 - protein, 9 aa, Artificial Sequence
  Description of Artificial Sequence: Synthetic peptide
EFGHAMVCQ

SEQ ID NO: 17318 - protein, 9 aa, Artificial Sequence
  Description of Artificial Sequence: Synthetic peptide
EFITSVQCS

SEQ ID NO: 17319 - protein, 9 aa, Artificial Sequence
  Description of Artificial Sequence: Synthetic peptide
EFKKEFEAF

SEQ ID NO: 17320 - protein, 9 aa, Artificial Sequence
  Description of Artificial Sequence: Synthetic peptide
EFKMSGFSN

SEQ ID NO: 17321 - protein, 9 aa, Artificial Sequence
  Description of Artificial Sequence: Synthetic peptide
EFKMSVFSS

SEQ ID NO: 17322 - protein, 9 aa, Artificial Sequence
  Description of Artificial Sequence: Synthetic peptide
EFKMSVFTN

SEQ ID NO: 17323 - protein, 9 aa, Artificial Sequence
  Description of Artificial Sequence: Synthetic peptide
EFKMSVISN

SEQ ID NO: 17324 - protein, 9 aa, Artificial Sequence
  Description of Artificial Sequence: Synthetic peptide
EFKMSVVSN

SEQ ID NO: 17325 - protein, 9 aa, Artificial Sequence
  Description of Artificial Sequence: Synthetic peptide
EFKMTVFSN

SEQ ID NO: 17326 - protein, 9 aa, Artificial Sequence
  Description of Artificial Sequence: Synthetic peptide
EFKQEFVAF

SEQ ID NO: 17327 - protein, 9 aa, Artificial Sequence
  Description of Artificial Sequence: Synthetic peptide
EFKQEYEAF

SEQ ID NO: 17328 - protein, 9 aa, Artificial Sequence
  Description of Artificial Sequence: Synthetic peptide
EFRMSVFSN

SEQ ID NO: 17329 - protein, 9 aa, Artificial Sequence
  Description of Artificial Sequence: Synthetic peptide
EFTRKSGKF

SEQ ID NO: 17330 - protein, 9 aa, Artificial Sequence
  Description of Artificial Sequence: Synthetic peptide
EFTRRSCKF

SEQ ID NO: 17331 - protein, 9 aa, Artificial Sequence
  Description of Artificial Sequence: Synthetic peptide
EHGCTHMGN

SEQ ID NO: 17332 - protein, 9 aa, Artificial Sequence
  Description of Artificial Sequence: Synthetic peptide
EHKQQGVRR

SEQ ID NO: 17333 - protein, 9 aa, Artificial Sequence
  Description of Artificial Sequence: Synthetic peptide
EHQPFSMFS

SEQ ID NO: 17334 - protein, 9 aa, Artificial Sequence
  Description of Artificial Sequence: Synthetic peptide
EHRQMHDAY

SEQ ID NO: 17335 - protein, 9 aa, Artificial Sequence
  Description of Artificial Sequence: Synthetic peptide
EHRQMHDSF

SEQ ID NO: 17336 - protein, 9 aa, Artificial Sequence
  Description of Artificial Sequence: Synthetic peptide
EHRQMHDSS

SEQ ID NO: 17337 - protein, 9 aa, Artificial Sequence
  Description of Artificial Sequence: Synthetic peptide
EHSCNHMGN

SEQ ID NO: 17338 - protein, 9 aa, Artificial Sequence
  Description of Artificial Sequence: Synthetic peptide
EHSYTHMGN

SEQ ID NO: 17339 - protein, 9 aa, Artificial Sequence
  Description of Artificial Sequence: Synthetic peptide
EHTRQDVCD

SEQ ID NO: 17340 - protein, 9 aa, Artificial Sequence
  Description of Artificial Sequence: Synthetic peptide
EKDHFGVMQ

SEQ ID NO: 17341 - protein, 9 aa, Artificial Sequence
  Description of Artificial Sequence: Synthetic peptide
EKHHFDVMQ

SEQ ID NO: 17342 - protein, 9 aa, Artificial Sequence
  Description of Artificial Sequence: Synthetic peptide
EKLMYDKDL

SEQ ID NO: 17343 - protein, 9 aa, Artificial Sequence
  Description of Artificial Sequence: Synthetic peptide
EKLNHETGY

SEQ ID NO: 17344 - protein, 9 aa, Artificial Sequence
  Description of Artificial Sequence: Synthetic peptide
EKLSHEAGY

SEQ ID NO: 17345 - protein, 9 aa, Artificial Sequence
  Description of Artificial Sequence: Synthetic peptide
EKLTHEAGY

SEQ ID NO: 17346 - protein, 9 aa, Artificial Sequence
  Description of Artificial Sequence: Synthetic peptide
EKMGYVHKG

SEQ ID NO: 17347 - protein, 9 aa, Artificial Sequence
  Description of Artificial Sequence: Synthetic peptide
EMKDLKRTG

SEQ ID NO: 17348 - protein, 9 aa, Artificial Sequence
  Description of Artificial Sequence: Synthetic peptide
EMKNLKRAG

SEQ ID NO: 17349 - protein, 9 aa, Artificial Sequence
  Description of Artificial Sequence: Synthetic peptide
EMKNLKRNG

SEQ ID NO: 17350 - protein, 9 aa, Artificial Sequence
  Description of Artificial Sequence: Synthetic peptide
EMKNLKRTC

SEQ ID NO: 17351 - protein, 9 aa, Artificial Sequence
  Description of Artificial Sequence: Synthetic peptide
EMKNLKRTS

SEQ ID NO: 17352 - protein, 9 aa, Artificial Sequence
  Description of Artificial Sequence: Synthetic peptide
EMKNLRRTG

SEQ ID NO: 17353 - protein, 9 aa, Artificial Sequence
  Description of Artificial Sequence: Synthetic peptide
EMRPQKMSR

SEQ ID NO: 17354 - protein, 9 aa, Artificial Sequence
  Description of Artificial Sequence: Synthetic peptide
ENAQFLVWP

SEQ ID NO: 17355 - protein, 9 aa, Artificial Sequence
  Description of Artificial Sequence: Synthetic peptide
ENAQILVWA

SEQ ID NO: 17356 - protein, 9 aa, Artificial Sequence
  Description of Artificial Sequence: Synthetic peptide
ENAQVLVWA

SEQ ID NO: 17357 - protein, 9 aa, Artificial Sequence
  Description of Artificial Sequence: Synthetic peptide
ENAQYLVWA

SEQ ID NO: 17358 - protein, 9 aa, Artificial Sequence
  Description of Artificial Sequence: Synthetic peptide
ENDSVSAIA

SEQ ID NO: 17359 - protein, 9 aa, Artificial Sequence
  Description of Artificial Sequence: Synthetic peptide
ENEFIYCHP

SEQ ID NO: 17360 - protein, 9 aa, Artificial Sequence
  Description of Artificial Sequence: Synthetic peptide
ENEWTYHQG

SEQ ID NO: 17361 - protein, 9 aa, Artificial Sequence
  Description of Artificial Sequence: Synthetic peptide
ENGQFLVWA

SEQ ID NO: 17362 - protein, 9 aa, Artificial Sequence
  Description of Artificial Sequence: Synthetic peptide
ENHRITGKS

SEQ ID NO: 17363 - protein, 9 aa, Artificial Sequence
  Description of Artificial Sequence: Synthetic peptide
ENHSVSAIG

SEQ ID NO: 17364 - protein, 9 aa, Artificial Sequence
  Description of Artificial Sequence: Synthetic peptide
ENSQASAFG

SEQ ID NO: 17365 - protein, 9 aa, Artificial Sequence
  Description of Artificial Sequence: Synthetic peptide
ENSQFLVWA

SEQ ID NO: 17366 - protein, 9 aa, Artificial Sequence
  Description of Artificial Sequence: Synthetic peptide
ENSQNSAFG

SEQ ID NO: 17367 - protein, 9 aa, Artificial Sequence
  Description of Artificial Sequence: Synthetic peptide
ENSQTSPFG

SEQ ID NO: 17368 - protein, 9 aa, Artificial Sequence
  Description of Artificial Sequence: Synthetic peptide
ENVMHSEFR

SEQ ID NO: 17369 - protein, 9 aa, Artificial Sequence
  Description of Artificial Sequence: Synthetic peptide
ENVQFLVWA

SEQ ID NO: 17370 - protein, 9 aa, Artificial Sequence
  Description of Artificial Sequence: Synthetic peptide
ENYRITGQS

SEQ ID NO: 17371 - protein, 9 aa, Artificial Sequence
  Description of Artificial Sequence: Synthetic peptide
EPRPCNFWC

SEQ ID NO: 17372 - protein, 9 aa, Artificial Sequence
  Description of Artificial Sequence: Synthetic peptide
EPRSCNFWG

SEQ ID NO: 17373 - protein, 9 aa, Artificial Sequence
  Description of Artificial Sequence: Synthetic peptide
EPRSCNFWW

SEQ ID NO: 17374 - protein, 9 aa, Artificial Sequence
  Description of Artificial Sequence: Synthetic peptide
EPRSCNYWC

SEQ ID NO: 17375 - protein, 9 aa, Artificial Sequence
  Description of Artificial Sequence: Synthetic peptide
EQMGYVHKA

SEQ ID NO: 17376 - protein, 9 aa, Artificial Sequence
  Description of Artificial Sequence: Synthetic peptide
ERAEFEMKQ

SEQ ID NO: 17377 - protein, 9 aa, Artificial Sequence
  Description of Artificial Sequence: Synthetic peptide
ERNDFHWYM

SEQ ID NO: 17378 - protein, 9 aa, Artificial Sequence
  Description of Artificial Sequence: Synthetic peptide
ERSCTHMGN

SEQ ID NO: 17379 - protein, 9 aa, Artificial Sequence
  Description of Artificial Sequence: Synthetic peptide
ERSDFHWCM

SEQ ID NO: 17380 - protein, 9 aa, Artificial Sequence
  Description of Artificial Sequence: Synthetic peptide
ERSEFEMKE

SEQ ID NO: 17381 - protein, 9 aa, Artificial Sequence
  Description of Artificial Sequence: Synthetic peptide
ERSGFHWYM

SEQ ID NO: 17382 - protein, 9 aa, Artificial Sequence
  Description of Artificial Sequence: Synthetic peptide
ESKMNHKEA

SEQ ID NO: 17383 - protein, 9 aa, Artificial Sequence
  Description of Artificial Sequence: Synthetic peptide
ESKMSHKQA

SEQ ID NO: 17384 - protein, 9 aa, Artificial Sequence
  Description of Artificial Sequence: Synthetic peptide
ESMFRDSDK

SEQ ID NO: 17385 - protein, 9 aa, Artificial Sequence
  Description of Artificial Sequence: Synthetic peptide
ESMGICHNS

SEQ ID NO: 17386 - protein, 9 aa, Artificial Sequence
  Description of Artificial Sequence: Synthetic peptide
ETIRDMSGF

SEQ ID NO: 17387 - protein, 9 aa, Artificial Sequence
  Description of Artificial Sequence: Synthetic peptide
ETMAQSCYR

SEQ ID NO: 17388 - protein, 9 aa, Artificial Sequence
  Description of Artificial Sequence: Synthetic peptide
ETRSCNFWC

SEQ ID NO: 17389 - protein, 9 aa, Artificial Sequence
  Description of Artificial Sequence: Synthetic peptide
EVASQFFEH

SEQ ID NO: 17390 - protein, 9 aa, Artificial Sequence
  Description of Artificial Sequence: Synthetic peptide
EVFKIDMIP

SEQ ID NO: 17391 - protein, 9 aa, Artificial Sequence
  Description of Artificial Sequence: Synthetic peptide
EVGEMGILR

SEQ ID NO: 17392 - protein, 9 aa, Artificial Sequence
  Description of Artificial Sequence: Synthetic peptide
EVGRIGWMS

SEQ ID NO: 17393 - protein, 9 aa, Artificial Sequence
  Description of Artificial Sequence: Synthetic peptide
EVQKWFRKS

SEQ ID NO: 17394 - protein, 9 aa, Artificial Sequence
  Description of Artificial Sequence: Synthetic peptide
EVRYSCWWG

SEQ ID NO: 17395 - protein, 9 aa, Artificial Sequence
  Description of Artificial Sequence: Synthetic peptide
EVTDEHCCW

SEQ ID NO: 17396 - protein, 9 aa, Artificial Sequence
  Description of Artificial Sequence: Synthetic peptide
EVTNEHCCL

SEQ ID NO: 17397 - protein, 9 aa, Artificial Sequence
  Description of Artificial Sequence: Synthetic peptide
EVTNEHGCW

SEQ ID NO: 17398 - protein, 9 aa, Artificial Sequence
  Description of Artificial Sequence: Synthetic peptide
EVVKIDMIS

SEQ ID NO: 17399 - protein, 9 aa, Artificial Sequence
  Description of Artificial Sequence: Synthetic peptide
EVVKIDMTP

SEQ ID NO: 17400 - protein, 9 aa, Artificial Sequence
  Description of Artificial Sequence: Synthetic peptide
EWKMMHCDN

SEQ ID NO: 17401 - protein, 9 aa, Artificial Sequence
  Description of Artificial Sequence: Synthetic peptide
EWWRYMAYY

SEQ ID NO: 17402 - protein, 9 aa, Artificial Sequence
  Description of Artificial Sequence: Synthetic peptide
EYICFNCYH

SEQ ID NO: 17403 - protein, 9 aa, Artificial Sequence
  Description of Artificial Sequence: Synthetic peptide
EYKEQGVRR

SEQ ID NO: 17404 - protein, 9 aa, Artificial Sequence
  Description of Artificial Sequence: Synthetic peptide
EYKKQGVRR

SEQ ID NO: 17405 - protein, 9 aa, Artificial Sequence
  Description of Artificial Sequence: Synthetic peptide
EYKMSHKEA

SEQ ID NO: 17406 - protein, 9 aa, Artificial Sequence
  Description of Artificial Sequence: Synthetic peptide
EYKPQGVRR

SEQ ID NO: 17407 - protein, 9 aa, Artificial Sequence
  Description of Artificial Sequence: Synthetic peptide
EYKQEGVRR

SEQ ID NO: 17408 - protein, 9 aa, Artificial Sequence
  Description of Artificial Sequence: Synthetic peptide
EYKQKGVRR

SEQ ID NO: 17409 - protein, 9 aa, Artificial Sequence
  Description of Artificial Sequence: Synthetic peptide
EYKQPGVRR

SEQ ID NO: 17410 - protein, 9 aa, Artificial Sequence
  Description of Artificial Sequence: Synthetic peptide
EYKQQCVRR

SEQ ID NO: 17411 - protein, 9 aa, Artificial Sequence
  Description of Artificial Sequence: Synthetic peptide
EYKQQGLRR

SEQ ID NO: 17412 - protein, 9 aa, Artificial Sequence
  Description of Artificial Sequence: Synthetic peptide
EYKQQSVRR

SEQ ID NO: 17413 - protein, 9 aa, Artificial Sequence
  Description of Artificial Sequence: Synthetic peptide
EYQQQGVRR

SEQ ID NO: 17414 - protein, 9 aa, Artificial Sequence
  Description of Artificial Sequence: Synthetic peptide
EYRQQGVRR

SEQ ID NO: 17415 - protein, 9 aa, Artificial Sequence
  Description of Artificial Sequence: Synthetic peptide
EYTKQGVRR

SEQ ID NO: 17416 - protein, 9 aa, Artificial Sequence
  Description of Artificial Sequence: Synthetic peptide
FARKKCDTW

SEQ ID NO: 17417 - protein, 9 aa, Artificial Sequence
  Description of Artificial Sequence: Synthetic peptide
FCKLQKLKA

SEQ ID NO: 17418 - protein, 9 aa, Artificial Sequence
  Description of Artificial Sequence: Synthetic peptide
FCKLRKLKG

SEQ ID NO: 17419 - protein, 9 aa, Artificial Sequence
  Description of Artificial Sequence: Synthetic peptide
FCKLRKLRA

SEQ ID NO: 17420 - protein, 9 aa, Artificial Sequence
  Description of Artificial Sequence: Synthetic peptide
FCKMRKLKA

SEQ ID NO: 17421 - protein, 9 aa, Artificial Sequence
  Description of Artificial Sequence: Synthetic peptide
FCKSRKLKA

SEQ ID NO: 17422 - protein, 9 aa, Artificial Sequence
  Description of Artificial Sequence: Synthetic peptide
FEAPFNLSF

SEQ ID NO: 17423 - protein, 9 aa, Artificial Sequence
  Description of Artificial Sequence: Synthetic peptide
FEAPINLGF

SEQ ID NO: 17424 - protein, 9 aa, Artificial Sequence
  Description of Artificial Sequence: Synthetic peptide
FEAPINMSF

SEQ ID NO: 17425 - protein, 9 aa, Artificial Sequence
  Description of Artificial Sequence: Synthetic peptide
FEVPINLSF

SEQ ID NO: 17426 - protein, 9 aa, Artificial Sequence
  Description of Artificial Sequence: Synthetic peptide
FFKLRKLKA

SEQ ID NO: 17427 - protein, 9 aa, Artificial Sequence
  Description of Artificial Sequence: Synthetic peptide
FGAPINLSF

SEQ ID NO: 17428 - protein, 9 aa, Artificial Sequence
  Description of Artificial Sequence: Synthetic peptide
FGKLRKLKA

SEQ ID NO: 17429 - protein, 9 aa, Artificial Sequence
  Description of Artificial Sequence: Synthetic peptide
FGRYRLLKG

SEQ ID NO: 17430 - protein, 9 aa, Artificial Sequence
  Description of Artificial Sequence: Synthetic peptide
FGRYRLWEG

SEQ ID NO: 17431 - protein, 9 aa, Artificial Sequence
  Description of Artificial Sequence: Synthetic peptide
FGRYRLWKA

SEQ ID NO: 17432 - protein, 9 aa, Artificial Sequence
  Description of Artificial Sequence: Synthetic peptide
FGRYRLWQV

SEQ ID NO: 17433 - protein, 9 aa, Artificial Sequence
  Description of Artificial Sequence: Synthetic peptide
FGRYRLWRG

SEQ ID NO: 17434 - protein, 9 aa, Artificial Sequence
  Description of Artificial Sequence: Synthetic peptide
FHKKFHSKF

SEQ ID NO: 17435 - protein, 9 aa, Artificial Sequence
  Description of Artificial Sequence: Synthetic peptide
FHKQFHSEF

SEQ ID NO: 17436 - protein, 9 aa, Artificial Sequence
  Description of Artificial Sequence: Synthetic peptide
FHKQFHSRF

SEQ ID NO: 17437 - protein, 9 aa, Artificial Sequence
  Description of Artificial Sequence: Synthetic peptide
FHKQYHSKF

SEQ ID NO: 17438 - protein, 9 aa, Artificial Sequence
  Description of Artificial Sequence: Synthetic peptide
FLKQFHSKF

SEQ ID NO: 17439 - protein, 9 aa, Artificial Sequence
  Description of Artificial Sequence: Synthetic peptide
FNIDCFNAA

SEQ ID NO: 17440 - protein, 9 aa, Artificial Sequence
  Description of Artificial Sequence: Synthetic peptide
FNKQFHSKF

SEQ ID NO: 17441 - protein, 9 aa, Artificial Sequence
  Description of Artificial Sequence: Synthetic peptide
FNVDCFSAA

SEQ ID NO: 17442 - protein, 9 aa, Artificial Sequence
  Description of Artificial Sequence: Synthetic peptide
FRKQFHSKF

SEQ ID NO: 17443 - protein, 9 aa, Artificial Sequence
  Description of Artificial Sequence: Synthetic peptide
GDYVQRQWD

SEQ ID NO: 17444 - protein, 9 aa, Artificial Sequence
  Description of Artificial Sequence: Synthetic peptide
GERWAHNML

SEQ ID NO: 17445 - protein, 9 aa, Artificial Sequence
  Description of Artificial Sequence: Synthetic peptide
GERWPHHML

SEQ ID NO: 17446 - protein, 9 aa, Artificial Sequence
  Description of Artificial Sequence: Synthetic peptide
GERWPHNMW

SEQ ID NO: 17447 - protein, 9 aa, Artificial Sequence
  Description of Artificial Sequence: Synthetic peptide
GERWPNNML

SEQ ID NO: 17448 - protein, 9 aa, Artificial Sequence
  Description of Artificial Sequence: Synthetic peptide
GERWTHNML

SEQ ID NO: 17449 - protein, 9 aa, Artificial Sequence
  Description of Artificial Sequence: Synthetic peptide
GFDAEHGYQ

SEQ ID NO: 17450 - protein, 9 aa, Artificial Sequence
  Description of Artificial Sequence: Synthetic peptide
GGNMRSSMI

SEQ ID NO: 17451 - protein, 9 aa, Artificial Sequence
  Description of Artificial Sequence: Synthetic peptide
GHIHARDGA

SEQ ID NO: 17452 - protein, 9 aa, Artificial Sequence
  Description of Artificial Sequence: Synthetic peptide
GIKQTLVRR

SEQ ID NO: 17453 - protein, 9 aa, Artificial Sequence
  Description of Artificial Sequence: Synthetic peptide
GIRLKGDIM

SEQ ID NO: 17454 - protein, 9 aa, Artificial Sequence
  Description of Artificial Sequence: Synthetic peptide
GIRLRGNIM

SEQ ID NO: 17455 - protein, 9 aa, Artificial Sequence
  Description of Artificial Sequence: Synthetic peptide
GKRWPHNML

SEQ ID NO: 17456 - protein, 9 aa, Artificial Sequence
  Description of Artificial Sequence: Synthetic peptide
GLRQDRIIF

SEQ ID NO: 17457 - protein, 9 aa, Artificial Sequence
  Description of Artificial Sequence: Synthetic peptide
GNQPTHSPR

SEQ ID NO: 17458 - protein, 9 aa, Artificial Sequence
  Description of Artificial Sequence: Synthetic peptide
GSETNNGGY

SEQ ID NO: 17459 - protein, 9 aa, Artificial Sequence
  Description of Artificial Sequence: Synthetic peptide
GSIIESSAR

SEQ ID NO: 17460 - protein, 9 aa, Artificial Sequence
  Description of Artificial Sequence: Synthetic peptide
GSIIKSSAR

SEQ ID NO: 17461 - protein, 9 aa, Artificial Sequence
  Description of Artificial Sequence: Synthetic peptide
GSIIQGSAR

SEQ ID NO: 17462 - protein, 9 aa, Artificial Sequence
  Description of Artificial Sequence: Synthetic peptide
GSISQSSAR

SEQ ID NO: 17463 - protein, 9 aa, Artificial Sequence
  Description of Artificial Sequence: Synthetic peptide
GSIVQSSAR

SEQ ID NO: 17464 - protein, 9 aa, Artificial Sequence
  Description of Artificial Sequence: Synthetic peptide
GSKMSHKEA

SEQ ID NO: 17465 - protein, 9 aa, Artificial Sequence
  Description of Artificial Sequence: Synthetic peptide
GSMIQSSAR

SEQ ID NO: 17466 - protein, 9 aa, Artificial Sequence
  Description of Artificial Sequence: Synthetic peptide
GSNIQSSAR

SEQ ID NO: 17467 - protein, 9 aa, Artificial Sequence
  Description of Artificial Sequence: Synthetic peptide
GSQPTHSPR

SEQ ID NO: 17468 - protein, 9 aa, Artificial Sequence
  Description of Artificial Sequence: Synthetic peptide
GTPPIVMDR

SEQ ID NO: 17469 - protein, 9 aa, Artificial Sequence
  Description of Artificial Sequence: Synthetic peptide
GTRLKGNIM

SEQ ID NO: 17470 - protein, 9 aa, Artificial Sequence
  Description of Artificial Sequence: Synthetic peptide
GVEFLAHRY

SEQ ID NO: 17471 - protein, 9 aa, Artificial Sequence
  Description of Artificial Sequence: Synthetic peptide
GVKDNNRRL

SEQ ID NO: 17472 - protein, 9 aa, Artificial Sequence
  Description of Artificial Sequence: Synthetic peptide
GWDKLMMLA

SEQ ID NO: 17473 - protein, 9 aa, Artificial Sequence
  Description of Artificial Sequence: Synthetic peptide
GWHCFSFVV

SEQ ID NO: 17474 - protein, 9 aa, Artificial Sequence
  Description of Artificial Sequence: Synthetic peptide
GWKMMHCDN

SEQ ID NO: 17475 - protein, 9 aa, Artificial Sequence
  Description of Artificial Sequence: Synthetic peptide
GWNCFSFVV

SEQ ID NO: 17476 - protein, 9 aa, Artificial Sequence
  Description of Artificial Sequence: Synthetic peptide
GYEPTHSPR

SEQ ID NO: 17477 - protein, 9 aa, Artificial Sequence
  Description of Artificial Sequence: Synthetic peptide
GYKDCHRHG

SEQ ID NO: 17478 - protein, 9 aa, Artificial Sequence
  Description of Artificial Sequence: Synthetic peptide
GYKPTHSPR

SEQ ID NO: 17479 - protein, 9 aa, Artificial Sequence
  Description of Artificial Sequence: Synthetic peptide
GYQMFNNVQ

SEQ ID NO: 17480 - protein, 9 aa, Artificial Sequence
  Description of Artificial Sequence: Synthetic peptide
GYQPTHSHR

SEQ ID NO: 17481 - protein, 9 aa, Artificial Sequence
  Description of Artificial Sequence: Synthetic peptide
GYQPTNSPR

SEQ ID NO: 17482 - protein, 9 aa, Artificial Sequence
  Description of Artificial Sequence: Synthetic peptide
GYRPTHSPR

SEQ ID NO: 17483 - protein, 9 aa, Artificial Sequence
  Description of Artificial Sequence: Synthetic peptide
HATGVGKDR

SEQ ID NO: 17484 - protein, 9 aa, Artificial Sequence
  Description of Artificial Sequence: Synthetic peptide
HAVTHGWHR

SEQ ID NO: 17485 - protein, 9 aa, Artificial Sequence
  Description of Artificial Sequence: Synthetic peptide
HDAQFLPDE

SEQ ID NO: 17486 - protein, 9 aa, Artificial Sequence
  Description of Artificial Sequence: Synthetic peptide
HGDHFDRNS

SEQ ID NO: 17487 - protein, 9 aa, Artificial Sequence
  Description of Artificial Sequence: Synthetic peptide
HIEMRNSHM

SEQ ID NO: 17488 - protein, 9 aa, Artificial Sequence
  Description of Artificial Sequence: Synthetic peptide
HIEMRNTHM

SEQ ID NO: 17489 - protein, 9 aa, Artificial Sequence
  Description of Artificial Sequence: Synthetic peptide
HIEMRNVHM

SEQ ID NO: 17490 - protein, 9 aa, Artificial Sequence
  Description of Artificial Sequence: Synthetic peptide
HIKCTHEDN

SEQ ID NO: 17491 - protein, 9 aa, Artificial Sequence
  Description of Artificial Sequence: Synthetic peptide
HIQCTHEDD

SEQ ID NO: 17492 - protein, 9 aa, Artificial Sequence
  Description of Artificial Sequence: Synthetic peptide
HIQCTHKDN

SEQ ID NO: 17493 - protein, 9 aa, Artificial Sequence
  Description of Artificial Sequence: Synthetic peptide
HIQCTHQDN

SEQ ID NO: 17494 - protein, 9 aa, Artificial Sequence
  Description of Artificial Sequence: Synthetic peptide
HMQCTHEDS

SEQ ID NO: 17495 - protein, 9 aa, Artificial Sequence
  Description of Artificial Sequence: Synthetic peptide
HRIYIMKKM

SEQ ID NO: 17496 - protein, 9 aa, Artificial Sequence
  Description of Artificial Sequence: Synthetic peptide
HRIYIMKQM

SEQ ID NO: 17497 - protein, 9 aa, Artificial Sequence
  Description of Artificial Sequence: Synthetic peptide
HRNYIMKEM

SEQ ID NO: 17498 - protein, 9 aa, Artificial Sequence
  Description of Artificial Sequence: Synthetic peptide
HSAGVGKDR

SEQ ID NO: 17499 - protein, 9 aa, Artificial Sequence
  Description of Artificial Sequence: Synthetic peptide
HSEVKCVER

SEQ ID NO: 17500 - protein, 9 aa, Artificial Sequence
  Description of Artificial Sequence: Synthetic peptide
HSNGVGKDR

SEQ ID NO: 17501 - protein, 9 aa, Artificial Sequence
  Description of Artificial Sequence: Synthetic peptide
HSPTYKWKR

SEQ ID NO: 17502 - protein, 9 aa, Artificial Sequence
  Description of Artificial Sequence: Synthetic peptide
HSTGIGKDR

SEQ ID NO: 17503 - protein, 9 aa, Artificial Sequence
  Description of Artificial Sequence: Synthetic peptide
HSTGLGKDR

SEQ ID NO: 17504 - protein, 9 aa, Artificial Sequence
  Description of Artificial Sequence: Synthetic peptide
HSTVVGKDR

SEQ ID NO: 17505 - protein, 9 aa, Artificial Sequence
  Description of Artificial Sequence: Synthetic peptide
HTDGLFTDD

SEQ ID NO: 17506 - protein, 9 aa, Artificial Sequence
  Description of Artificial Sequence: Synthetic peptide
HTKMTHGTA

SEQ ID NO: 17507 - protein, 9 aa, Artificial Sequence
  Description of Artificial Sequence: Synthetic peptide
HTNCLFTDD

SEQ ID NO: 17508 - protein, 9 aa, Artificial Sequence
  Description of Artificial Sequence: Synthetic peptide
HTRSKDFWN

SEQ ID NO: 17509 - protein, 9 aa, Artificial Sequence
  Description of Artificial Sequence: Synthetic peptide
HVAANYDTF

SEQ ID NO: 17510 - protein, 9 aa, Artificial Sequence
  Description of Artificial Sequence: Synthetic peptide
HVASNYDTS

SEQ ID NO: 17511 - protein, 9 aa, Artificial Sequence
  Description of Artificial Sequence: Synthetic peptide
HVGTHGWHR

SEQ ID NO: 17512 - protein, 9 aa, Artificial Sequence
  Description of Artificial Sequence: Synthetic peptide
HVITHGWHR

SEQ ID NO: 17513 - protein, 9 aa, Artificial Sequence
  Description of Artificial Sequence: Synthetic peptide
HVVHLDDYW

SEQ ID NO: 17514 - protein, 9 aa, Artificial Sequence
  Description of Artificial Sequence: Synthetic peptide
HVVTHGWQR

SEQ ID NO: 17515 - protein, 9 aa, Artificial Sequence
  Description of Artificial Sequence: Synthetic peptide
HVVTLGWHR

SEQ ID NO: 17516 - protein, 9 aa, Artificial Sequence
  Description of Artificial Sequence: Synthetic peptide
HVVTNGWHR

SEQ ID NO: 17517 - protein, 9 aa, Artificial Sequence
  Description of Artificial Sequence: Synthetic peptide
IAIKQRDGA

SEQ ID NO: 17518 - protein, 9 aa, Artificial Sequence
  Description of Artificial Sequence: Synthetic peptide
IANKQQLAR

SEQ ID NO: 17519 - protein, 9 aa, Artificial Sequence
  Description of Artificial Sequence: Synthetic peptide
IAVKQPDGA

SEQ ID NO: 17520 - protein, 9 aa, Artificial Sequence
  Description of Artificial Sequence: Synthetic peptide
IAVPCASFY

SEQ ID NO: 17521 - protein, 9 aa, Artificial Sequence
  Description of Artificial Sequence: Synthetic peptide
IAVPSCWAR

SEQ ID NO: 17522 - protein, 9 aa, Artificial Sequence
  Description of Artificial Sequence: Synthetic peptide
ICHDCMNYR

SEQ ID NO: 17523 - protein, 9 aa, Artificial Sequence
  Description of Artificial Sequence: Synthetic peptide
ICVPSCWAR

SEQ ID NO: 17524 - protein, 9 aa, Artificial Sequence
  Description of Artificial Sequence: Synthetic peptide
IEHDFNSAF

SEQ ID NO: 17525 - protein, 9 aa, Artificial Sequence
  Description of Artificial Sequence: Synthetic peptide
IFHDCMNSR

SEQ ID NO: 17526 - protein, 9 aa, Artificial Sequence
  Description of Artificial Sequence: Synthetic peptide
IFHDFMNYR

SEQ ID NO: 17527 - protein, 9 aa, Artificial Sequence
  Description of Artificial Sequence: Synthetic peptide
IFSPQQLGA

SEQ ID NO: 17528 - protein, 9 aa, Artificial Sequence
  Description of Artificial Sequence: Synthetic peptide
IGEKPVTDR

SEQ ID NO: 17529 - protein, 9 aa, Artificial Sequence
  Description of Artificial Sequence: Synthetic peptide
IGGMFSRNA

SEQ ID NO: 17530 - protein, 9 aa, Artificial Sequence
  Description of Artificial Sequence: Synthetic peptide
IGGMYSRHA

SEQ ID NO: 17531 - protein, 9 aa, Artificial Sequence
  Description of Artificial Sequence: Synthetic peptide
IGRDIDTAF

SEQ ID NO: 17532 - protein, 9 aa, Artificial Sequence
  Description of Artificial Sequence: Synthetic peptide
IGRDVDTSF

SEQ ID NO: 17533 - protein, 9 aa, Artificial Sequence
  Description of Artificial Sequence: Synthetic peptide
IHEWIANVE

SEQ ID NO: 17534 - protein, 9 aa, Artificial Sequence
  Description of Artificial Sequence: Synthetic peptide
IHEWLANVQ

SEQ ID NO: 17535 - protein, 9 aa, Artificial Sequence
  Description of Artificial Sequence: Synthetic peptide
IHGLIPMDS

SEQ ID NO: 17536 - protein, 9 aa, Artificial Sequence
  Description of Artificial Sequence: Synthetic peptide
IHKQFHSKF

SEQ ID NO: 17537 - protein, 9 aa, Artificial Sequence
  Description of Artificial Sequence: Synthetic peptide
IHQWIANVQ

SEQ ID NO: 17538 - protein, 9 aa, Artificial Sequence
  Description of Artificial Sequence: Synthetic peptide
IIANHSDMA

SEQ ID NO: 17539 - protein, 9 aa, Artificial Sequence
  Description of Artificial Sequence: Synthetic peptide
IIANHSHMS

SEQ ID NO: 17540 - protein, 9 aa, Artificial Sequence
  Description of Artificial Sequence: Synthetic peptide
IIANHSHMV

SEQ ID NO: 17541 - protein, 9 aa, Artificial Sequence
  Description of Artificial Sequence: Synthetic peptide
IIKPTRAPA

SEQ ID NO: 17542 - protein, 9 aa, Artificial Sequence
  Description of Artificial Sequence: Synthetic peptide
IIVNHSHMA

SEQ ID NO: 17543 - protein, 9 aa, Artificial Sequence
  Description of Artificial Sequence: Synthetic peptide
IKHDFHSAF

SEQ ID NO: 17544 - protein, 9 aa, Artificial Sequence
  Description of Artificial Sequence: Synthetic peptide
IKHDFNNAF

SEQ ID NO: 17545 - protein, 9 aa, Artificial Sequence
  Description of Artificial Sequence: Synthetic peptide
IKHDFNSAC

SEQ ID NO: 17546 - protein, 9 aa, Artificial Sequence
  Description of Artificial Sequence: Synthetic peptide
IKHDFNSDF

SEQ ID NO: 17547 - protein, 9 aa, Artificial Sequence
  Description of Artificial Sequence: Synthetic peptide
IKHDFNSGF

SEQ ID NO: 17548 - protein, 9 aa, Artificial Sequence
  Description of Artificial Sequence: Synthetic peptide
IKHDFNSPF

SEQ ID NO: 17549 - protein, 9 aa, Artificial Sequence
  Description of Artificial Sequence: Synthetic peptide
IKHDFNSSF

SEQ ID NO: 17550 - protein, 9 aa, Artificial Sequence
  Description of Artificial Sequence: Synthetic peptide
IKHDINSAF

SEQ ID NO: 17551 - protein, 9 aa, Artificial Sequence
  Description of Artificial Sequence: Synthetic peptide
IKHDYNSAF

SEQ ID NO: 17552 - protein, 9 aa, Artificial Sequence
  Description of Artificial Sequence: Synthetic peptide
IKHNFNSAF

SEQ ID NO: 17553 - protein, 9 aa, Artificial Sequence
  Description of Artificial Sequence: Synthetic peptide
IKNAMHNFF

SEQ ID NO: 17554 - protein, 9 aa, Artificial Sequence
  Description of Artificial Sequence: Synthetic peptide
IKNDFNSAF

SEQ ID NO: 17555 - protein, 9 aa, Artificial Sequence
  Description of Artificial Sequence: Synthetic peptide
IKRDFNSAF

SEQ ID NO: 17556 - protein, 9 aa, Artificial Sequence
  Description of Artificial Sequence: Synthetic peptide
IKYDFNSAF

SEQ ID NO: 17557 - protein, 9 aa, Artificial Sequence
  Description of Artificial Sequence: Synthetic peptide
ILLYSCVKD

SEQ ID NO: 17558 - protein, 9 aa, Artificial Sequence
  Description of Artificial Sequence: Synthetic peptide
IMLYSCVQD

SEQ ID NO: 17559 - protein, 9 aa, Artificial Sequence
  Description of Artificial Sequence: Synthetic peptide
INATPNLRT

SEQ ID NO: 17560 - protein, 9 aa, Artificial Sequence
  Description of Artificial Sequence: Synthetic peptide
INRENRRGC

SEQ ID NO: 17561 - protein, 9 aa, Artificial Sequence
  Description of Artificial Sequence: Synthetic peptide
INVDCFNAA

SEQ ID NO: 17562 - protein, 9 aa, Artificial Sequence
  Description of Artificial Sequence: Synthetic peptide
IQHDFNSAF

SEQ ID NO: 17563 - protein, 9 aa, Artificial Sequence
  Description of Artificial Sequence: Synthetic peptide
IRADLDVDH

SEQ ID NO: 17564 - protein, 9 aa, Artificial Sequence
  Description of Artificial Sequence: Synthetic peptide
IRHDFNSAF

SEQ ID NO: 17565 - protein, 9 aa, Artificial Sequence
  Description of Artificial Sequence: Synthetic peptide
ISAIADLDR

SEQ ID NO: 17566 - protein, 9 aa, Artificial Sequence
  Description of Artificial Sequence: Synthetic peptide
ISAIADMDQ

SEQ ID NO: 17567 - protein, 9 aa, Artificial Sequence
  Description of Artificial Sequence: Synthetic peptide
ISAPPNLRT

SEQ ID NO: 17568 - protein, 9 aa, Artificial Sequence
  Description of Artificial Sequence: Synthetic peptide
ISAPSCWAR

SEQ ID NO: 17569 - protein, 9 aa, Artificial Sequence
  Description of Artificial Sequence: Synthetic peptide
ISDPSCWAR

SEQ ID NO: 17570 - protein, 9 aa, Artificial Sequence
  Description of Artificial Sequence: Synthetic peptide
ISEDIKDNG

SEQ ID NO: 17571 - protein, 9 aa, Artificial Sequence
  Description of Artificial Sequence: Synthetic peptide
ISEDIKENA

SEQ ID NO: 17572 - protein, 9 aa, Artificial Sequence
  Description of Artificial Sequence: Synthetic peptide
ISEDIKENS

SEQ ID NO: 17573 - protein, 9 aa, Artificial Sequence
  Description of Artificial Sequence: Synthetic peptide
ISGPSCWAR

SEQ ID NO: 17574 - protein, 9 aa, Artificial Sequence
  Description of Artificial Sequence: Synthetic peptide
ISIPSCWAR

SEQ ID NO: 17575 - protein, 9 aa, Artificial Sequence
  Description of Artificial Sequence: Synthetic peptide
ISLPSCWAR

SEQ ID NO: 17576 - protein, 9 aa, Artificial Sequence
  Description of Artificial Sequence: Synthetic peptide
ISNKQQLAR

SEQ ID NO: 17577 - protein, 9 aa, Artificial Sequence
  Description of Artificial Sequence: Synthetic peptide
ISVHSCWAR

SEQ ID NO: 17578 - protein, 9 aa, Artificial Sequence
  Description of Artificial Sequence: Synthetic peptide
ISVPGCWAR

SEQ ID NO: 17579 - protein, 9 aa, Artificial Sequence
  Description of Artificial Sequence: Synthetic peptide
ISVPICWAR

SEQ ID NO: 17580 - protein, 9 aa, Artificial Sequence
  Description of Artificial Sequence: Synthetic peptide
ISVPRCWAR

SEQ ID NO: 17581 - protein, 9 aa, Artificial Sequence
  Description of Artificial Sequence: Synthetic peptide
ISVPSCWER

SEQ ID NO: 17582 - protein, 9 aa, Artificial Sequence
  Description of Artificial Sequence: Synthetic peptide
ISVPSCWGR

SEQ ID NO: 17583 - protein, 9 aa, Artificial Sequence
  Description of Artificial Sequence: Synthetic peptide
ISVPSCWSR

SEQ ID NO: 17584 - protein, 9 aa, Artificial Sequence
  Description of Artificial Sequence: Synthetic peptide
ISVPTCWAR

SEQ ID NO: 17585 - protein, 9 aa, Artificial Sequence
  Description of Artificial Sequence: Synthetic peptide
ISVSSCWAR

SEQ ID NO: 17586 - protein, 9 aa, Artificial Sequence
  Description of Artificial Sequence: Synthetic peptide
ISVTSCWAR

SEQ ID NO: 17587 - protein, 9 aa, Artificial Sequence
  Description of Artificial Sequence: Synthetic peptide
ITNKEQLAR

SEQ ID NO: 17588 - protein, 9 aa, Artificial Sequence
  Description of Artificial Sequence: Synthetic peptide
ITNKQELAR

SEQ ID NO: 17589 - protein, 9 aa, Artificial Sequence
  Description of Artificial Sequence: Synthetic peptide
ITNKQLLAR

SEQ ID NO: 17590 - protein, 9 aa, Artificial Sequence
  Description of Artificial Sequence: Synthetic peptide
ITNKQPLAR

SEQ ID NO: 17591 - protein, 9 aa, Artificial Sequence
  Description of Artificial Sequence: Synthetic peptide
ITNKQQLER

SEQ ID NO: 17592 - protein, 9 aa, Artificial Sequence
  Description of Artificial Sequence: Synthetic peptide
ITNKQQLGR

SEQ ID NO: 17593 - protein, 9 aa, Artificial Sequence
  Description of Artificial Sequence: Synthetic peptide
ITNKQQLPR

SEQ ID NO: 17594 - protein, 9 aa, Artificial Sequence
  Description of Artificial Sequence: Synthetic peptide
ITNKQQLSR

SEQ ID NO: 17595 - protein, 9 aa, Artificial Sequence
  Description of Artificial Sequence: Synthetic peptide
ITNKQQQAR

SEQ ID NO: 17596 - protein, 9 aa, Artificial Sequence
  Description of Artificial Sequence: Synthetic peptide
ITNKRQLAR

SEQ ID NO: 17597 - protein, 9 aa, Artificial Sequence
  Description of Artificial Sequence: Synthetic peptide
ITSKQQLAR

SEQ ID NO: 17598 - protein, 9 aa, Artificial Sequence
  Description of Artificial Sequence: Synthetic peptide
ITTKQQLSR

SEQ ID NO: 17599 - protein, 9 aa, Artificial Sequence
  Description of Artificial Sequence: Synthetic peptide
ITTQFMSKH

SEQ ID NO: 17600 - protein, 9 aa, Artificial Sequence
  Description of Artificial Sequence: Synthetic peptide
IVAISCYDN

SEQ ID NO: 17601 - protein, 9 aa, Artificial Sequence
  Description of Artificial Sequence: Synthetic peptide
IVGISCYDD

SEQ ID NO: 17602 - protein, 9 aa, Artificial Sequence
  Description of Artificial Sequence: Synthetic peptide
IVGNSCYDN

SEQ ID NO: 17603 - protein, 9 aa, Artificial Sequence
  Description of Artificial Sequence: Synthetic peptide
IVGTSCYDN

SEQ ID NO: 17604 - protein, 9 aa, Artificial Sequence
  Description of Artificial Sequence: Synthetic peptide
IVKDNNRRL

SEQ ID NO: 17605 - protein, 9 aa, Artificial Sequence
  Description of Artificial Sequence: Synthetic peptide
IWEKPATDR

SEQ ID NO: 17606 - protein, 9 aa, Artificial Sequence
  Description of Artificial Sequence: Synthetic peptide
IWEKPVADR

SEQ ID NO: 17607 - protein, 9 aa, Artificial Sequence
  Description of Artificial Sequence: Synthetic peptide
IWEKPVTAR

SEQ ID NO: 17608 - protein, 9 aa, Artificial Sequence
  Description of Artificial Sequence: Synthetic peptide
IWEKSVTDR

SEQ ID NO: 17609 - protein, 9 aa, Artificial Sequence
  Description of Artificial Sequence: Synthetic peptide
IWEKTVTDR

SEQ ID NO: 17610 - protein, 9 aa, Artificial Sequence
  Description of Artificial Sequence: Synthetic peptide
IYSPNRQDR

SEQ ID NO: 17611 - protein, 9 aa, Artificial Sequence
  Description of Artificial Sequence: Synthetic peptide
IYVPSCWAR

SEQ ID NO: 17612 - protein, 9 aa, Artificial Sequence
  Description of Artificial Sequence: Synthetic peptide
KAEYWNCGR

SEQ ID NO: 17613 - protein, 9 aa, Artificial Sequence
  Description of Artificial Sequence: Synthetic peptide
KCEMISLSR

SEQ ID NO: 17614 - protein, 9 aa, Artificial Sequence
  Description of Artificial Sequence: Synthetic peptide
KEFCCCCKA

SEQ ID NO: 17615 - protein, 9 aa, Artificial Sequence
  Description of Artificial Sequence: Synthetic peptide
KFGSFWPTG

SEQ ID NO: 17616 - protein, 9 aa, Artificial Sequence
  Description of Artificial Sequence: Synthetic peptide
KGDHFDRNS

SEQ ID NO: 17617 - protein, 9 aa, Artificial Sequence
  Description of Artificial Sequence: Synthetic peptide
KHFCCCCKA

SEQ ID NO: 17618 - protein, 9 aa, Artificial Sequence
  Description of Artificial Sequence: Synthetic peptide
KHVMHSEFR

SEQ ID NO: 17619 - protein, 9 aa, Artificial Sequence
  Description of Artificial Sequence: Synthetic peptide
KHWRHTMFL

SEQ ID NO: 17620 - protein, 9 aa, Artificial Sequence
  Description of Artificial Sequence: Synthetic peptide
KKDHFDVMQ

SEQ ID NO: 17621 - protein, 9 aa, Artificial Sequence
  Description of Artificial Sequence: Synthetic peptide
KKEPCNSGH

SEQ ID NO: 17622 - protein, 9 aa, Artificial Sequence
  Description of Artificial Sequence: Synthetic peptide
KLREVGRLC

SEQ ID NO: 17623 - protein, 9 aa, Artificial Sequence
  Description of Artificial Sequence: Synthetic peptide
KMEWFPHNS

SEQ ID NO: 17624 - protein, 9 aa, Artificial Sequence
  Description of Artificial Sequence: Synthetic peptide
KMKNLKRTG

SEQ ID NO: 17625 - protein, 9 aa, Artificial Sequence
  Description of Artificial Sequence: Synthetic peptide
KMRQQKMSR

SEQ ID NO: 17626 - protein, 9 aa, Artificial Sequence
  Description of Artificial Sequence: Synthetic peptide
KNAPTNQPC

SEQ ID NO: 17627 - protein, 9 aa, Artificial Sequence
  Description of Artificial Sequence: Synthetic peptide
KNEWIYHQG

SEQ ID NO: 17628 - protein, 9 aa, Artificial Sequence
  Description of Artificial Sequence: Synthetic peptide
KNEWNYHQG

SEQ ID NO: 17629 - protein, 9 aa, Artificial Sequence
  Description of Artificial Sequence: Synthetic peptide
KNEWTYHQA

SEQ ID NO: 17630 - protein, 9 aa, Artificial Sequence
  Description of Artificial Sequence: Synthetic peptide
KNEWTYHQC

SEQ ID NO: 17631 - protein, 9 aa, Artificial Sequence
  Description of Artificial Sequence: Synthetic peptide
KNVKHSEFR

SEQ ID NO: 17632 - protein, 9 aa, Artificial Sequence
  Description of Artificial Sequence: Synthetic peptide
KNVMHSAFR

SEQ ID NO: 17633 - protein, 9 aa, Artificial Sequence
  Description of Artificial Sequence: Synthetic peptide
KNVMHSQFR

SEQ ID NO: 17634 - protein, 9 aa, Artificial Sequence
  Description of Artificial Sequence: Synthetic peptide
KNVMHSVFR

SEQ ID NO: 17635 - protein, 9 aa, Artificial Sequence
  Description of Artificial Sequence: Synthetic peptide
KPLIMWPDF

SEQ ID NO: 17636 - protein, 9 aa, Artificial Sequence
  Description of Artificial Sequence: Synthetic peptide
KPLLMLPDF

SEQ ID NO: 17637 - protein, 9 aa, Artificial Sequence
  Description of Artificial Sequence: Synthetic peptide
KPMLMWPDF

SEQ ID NO: 17638 - protein, 9 aa, Artificial Sequence
  Description of Artificial Sequence: Synthetic peptide
KPRSCNFWC

SEQ ID NO: 17639 - protein, 9 aa, Artificial Sequence
  Description of Artificial Sequence: Synthetic peptide
KPVLMWPDF

SEQ ID NO: 17640 - protein, 9 aa, Artificial Sequence
  Description of Artificial Sequence: Synthetic peptide
KQAPCNSGH

SEQ ID NO: 17641 - protein, 9 aa, Artificial Sequence
  Description of Artificial Sequence: Synthetic peptide
KQFCCCCRA

SEQ ID NO: 17642 - protein, 9 aa, Artificial Sequence
  Description of Artificial Sequence: Synthetic peptide
KQFCCCRKA

SEQ ID NO: 17643 - protein, 9 aa, Artificial Sequence
  Description of Artificial Sequence: Synthetic peptide
KQFCCCWKA

SEQ ID NO: 17644 - protein, 9 aa, Artificial Sequence
  Description of Artificial Sequence: Synthetic peptide
KQFCFCCKA

SEQ ID NO: 17645 - protein, 9 aa, Artificial Sequence
  Description of Artificial Sequence: Synthetic peptide
KQFCWCCKA

SEQ ID NO: 17646 - protein, 9 aa, Artificial Sequence
  Description of Artificial Sequence: Synthetic peptide
KRFCCCCKA

SEQ ID NO: 17647 - protein, 9 aa, Artificial Sequence
  Description of Artificial Sequence: Synthetic peptide
KSESAASDN

SEQ ID NO: 17648 - protein, 9 aa, Artificial Sequence
  Description of Artificial Sequence: Synthetic peptide
KSEVKCVER

SEQ ID NO: 17649 - protein, 9 aa, Artificial Sequence
  Description of Artificial Sequence: Synthetic peptide
KSKMSHKEA

SEQ ID NO: 17650 - protein, 9 aa, Artificial Sequence
  Description of Artificial Sequence: Synthetic peptide
KSRIMAPLW

SEQ ID NO: 17651 - protein, 9 aa, Artificial Sequence
  Description of Artificial Sequence: Synthetic peptide
KTDYCYQCL

SEQ ID NO: 17652 - protein, 9 aa, Artificial Sequence
  Description of Artificial Sequence: Synthetic peptide
KTIRDMSGF

SEQ ID NO: 17653 - protein, 9 aa, Artificial Sequence
  Description of Artificial Sequence: Synthetic peptide
KVGEMGIIR

SEQ ID NO: 17654 - protein, 9 aa, Artificial Sequence
  Description of Artificial Sequence: Synthetic peptide
KVGEMGLLR

SEQ ID NO: 17655 - protein, 9 aa, Artificial Sequence
  Description of Artificial Sequence: Synthetic peptide
KVGEMSILR

SEQ ID NO: 17656 - protein, 9 aa, Artificial Sequence
  Description of Artificial Sequence: Synthetic peptide
KVGNEKSCI

SEQ ID NO: 17657 - protein, 9 aa, Artificial Sequence
  Description of Artificial Sequence: Synthetic peptide
KVHTFFANE

SEQ ID NO: 17658 - protein, 9 aa, Artificial Sequence
  Description of Artificial Sequence: Synthetic peptide
KVQPVRRFT

SEQ ID NO: 17659 - protein, 9 aa, Artificial Sequence
  Description of Artificial Sequence: Synthetic peptide
KWEKPVTDR

SEQ ID NO: 17660 - protein, 9 aa, Artificial Sequence
  Description of Artificial Sequence: Synthetic peptide
KYKQQGVRR

SEQ ID NO: 17661 - protein, 9 aa, Artificial Sequence
  Description of Artificial Sequence: Synthetic peptide
LAAVSVFRR

SEQ ID NO: 17662 - protein, 9 aa, Artificial Sequence
  Description of Artificial Sequence: Synthetic peptide
LACACQDAA

SEQ ID NO: 17663 - protein, 9 aa, Artificial Sequence
  Description of Artificial Sequence: Synthetic peptide
LAETEKLWN

SEQ ID NO: 17664 - protein, 9 aa, Artificial Sequence
  Description of Artificial Sequence: Synthetic peptide
LASANHGGN

SEQ ID NO: 17665 - protein, 9 aa, Artificial Sequence
  Description of Artificial Sequence: Synthetic peptide
LCMHTMWSR

SEQ ID NO: 17666 - protein, 9 aa, Artificial Sequence
  Description of Artificial Sequence: Synthetic peptide
LFDDVMVGR

SEQ ID NO: 17667 - protein, 9 aa, Artificial Sequence
  Description of Artificial Sequence: Synthetic peptide
LFGESMVGT

SEQ ID NO: 17668 - protein, 9 aa, Artificial Sequence
  Description of Artificial Sequence: Synthetic peptide
LGKVINERQ

SEQ ID NO: 17669 - protein, 9 aa, Artificial Sequence
  Description of Artificial Sequence: Synthetic peptide
LGNFIDMPA

SEQ ID NO: 17670 - protein, 9 aa, Artificial Sequence
  Description of Artificial Sequence: Synthetic peptide
LHYAFDQCM

SEQ ID NO: 17671 - protein, 9 aa, Artificial Sequence
  Description of Artificial Sequence: Synthetic peptide
LKIPFNMTF

SEQ ID NO: 17672 - protein, 9 aa, Artificial Sequence
  Description of Artificial Sequence: Synthetic peptide
LKKERGRAC

SEQ ID NO: 17673 - protein, 9 aa, Artificial Sequence
  Description of Artificial Sequence: Synthetic peptide
LKKKRGRSC

SEQ ID NO: 17674 - protein, 9 aa, Artificial Sequence
  Description of Artificial Sequence: Synthetic peptide
LQKKRGRAC

SEQ ID NO: 17675 - protein, 9 aa, Artificial Sequence
  Description of Artificial Sequence: Synthetic peptide
LQSFRSMMD

SEQ ID NO: 17676 - protein, 9 aa, Artificial Sequence
  Description of Artificial Sequence: Synthetic peptide
LQSPLLWER

SEQ ID NO: 17677 - protein, 9 aa, Artificial Sequence
  Description of Artificial Sequence: Synthetic peptide
LRAPYNFWW

SEQ ID NO: 17678 - protein, 9 aa, Artificial Sequence
  Description of Artificial Sequence: Synthetic peptide
LRIYIMKEM

SEQ ID NO: 17679 - protein, 9 aa, Artificial Sequence
  Description of Artificial Sequence: Synthetic peptide
LRKKRGRAC

SEQ ID NO: 17680 - protein, 9 aa, Artificial Sequence
  Description of Artificial Sequence: Synthetic peptide
LRTPFNFWW

SEQ ID NO: 17681 - protein, 9 aa, Artificial Sequence
  Description of Artificial Sequence: Synthetic peptide
LRTPYDFWW

SEQ ID NO: 17682 - protein, 9 aa, Artificial Sequence
  Description of Artificial Sequence: Synthetic peptide
LRTSYNFWW

SEQ ID NO: 17683 - protein, 9 aa, Artificial Sequence
  Description of Artificial Sequence: Synthetic peptide
LRTTYNFWW

SEQ ID NO: 17684 - protein, 9 aa, Artificial Sequence
  Description of Artificial Sequence: Synthetic peptide
LRYSFDQCM

SEQ ID NO: 17685 - protein, 9 aa, Artificial Sequence
  Description of Artificial Sequence: Synthetic peptide
LSTGVGKDR

SEQ ID NO: 17686 - protein, 9 aa, Artificial Sequence
  Description of Artificial Sequence: Synthetic peptide
LSYVQGDWR

SEQ ID NO: 17687 - protein, 9 aa, Artificial Sequence
  Description of Artificial Sequence: Synthetic peptide
LTAVSGFRR

SEQ ID NO: 17688 - protein, 9 aa, Artificial Sequence
  Description of Artificial Sequence: Synthetic peptide
LTFVQGDWR

SEQ ID NO: 17689 - protein, 9 aa, Artificial Sequence
  Description of Artificial Sequence: Synthetic peptide
LTPVSVFRR

SEQ ID NO: 17690 - protein, 9 aa, Artificial Sequence
  Description of Artificial Sequence: Synthetic peptide
LTRCNEKGN

SEQ ID NO: 17691 - protein, 9 aa, Artificial Sequence
  Description of Artificial Sequence: Synthetic peptide
LTTGIWKNW

SEQ ID NO: 17692 - protein, 9 aa, Artificial Sequence
  Description of Artificial Sequence: Synthetic peptide
LTYAQGDWR

SEQ ID NO: 17693 - protein, 9 aa, Artificial Sequence
  Description of Artificial Sequence: Synthetic peptide
LTYVEGDWR

SEQ ID NO: 17694 - protein, 9 aa, Artificial Sequence
  Description of Artificial Sequence: Synthetic peptide
LTYVKGDWR

SEQ ID NO: 17695 - protein, 9 aa, Artificial Sequence
  Description of Artificial Sequence: Synthetic peptide
LTYVQGNWR

SEQ ID NO: 17696 - protein, 9 aa, Artificial Sequence
  Description of Artificial Sequence: Synthetic peptide
LTYVQRDWR

SEQ ID NO: 17697 - protein, 9 aa, Artificial Sequence
  Description of Artificial Sequence: Synthetic peptide
LVEFYSENL

SEQ ID NO: 17698 - protein, 9 aa, Artificial Sequence
  Description of Artificial Sequence: Synthetic peptide
LVHELNQIK

SEQ ID NO: 17699 - protein, 9 aa, Artificial Sequence
  Description of Artificial Sequence: Synthetic peptide
LVHNSPFDF

SEQ ID NO: 17700 - protein, 9 aa, Artificial Sequence
  Description of Artificial Sequence: Synthetic peptide
LVKDEDNNC

SEQ ID NO: 17701 - protein, 9 aa, Artificial Sequence
  Description of Artificial Sequence: Synthetic peptide
LVKMDWKEA

SEQ ID NO: 17702 - protein, 9 aa, Artificial Sequence
  Description of Artificial Sequence: Synthetic peptide
LVNELNQIK

SEQ ID NO: 17703 - protein, 9 aa, Artificial Sequence
  Description of Artificial Sequence: Synthetic peptide
LVRVINERQ

SEQ ID NO: 17704 - protein, 9 aa, Artificial Sequence
  Description of Artificial Sequence: Synthetic peptide
LYCRMHNWA

SEQ ID NO: 17705 - protein, 9 aa, Artificial Sequence
  Description of Artificial Sequence: Synthetic peptide
LYCRMNDWA

SEQ ID NO: 17706 - protein, 9 aa, Artificial Sequence
  Description of Artificial Sequence: Synthetic peptide
MASIFQYPR

SEQ ID NO: 17707 - protein, 9 aa, Artificial Sequence
  Description of Artificial Sequence: Synthetic peptide
MCDDLMVGR

SEQ ID NO: 17708 - protein, 9 aa, Artificial Sequence
  Description of Artificial Sequence: Synthetic peptide
MCKSYERGA

SEQ ID NO: 17709 - protein, 9 aa, Artificial Sequence
  Description of Artificial Sequence: Synthetic peptide
MCMHKMWSR

SEQ ID NO: 17710 - protein, 9 aa, Artificial Sequence
  Description of Artificial Sequence: Synthetic peptide
MCYGFWCEI

SEQ ID NO: 17711 - protein, 9 aa, Artificial Sequence
  Description of Artificial Sequence: Synthetic peptide
MFDDLMVAR

SEQ ID NO: 17712 - protein, 9 aa, Artificial Sequence
  Description of Artificial Sequence: Synthetic peptide
MFDDLMVCR

SEQ ID NO: 17713 - protein, 9 aa, Artificial Sequence
  Description of Artificial Sequence: Synthetic peptide
MFDDLMVGH

SEQ ID NO: 17714 - protein, 9 aa, Artificial Sequence
  Description of Artificial Sequence: Synthetic peptide
MFDDLMVSR

SEQ ID NO: 17715 - protein, 9 aa, Artificial Sequence
  Description of Artificial Sequence: Synthetic peptide
MFDDVMVGR

SEQ ID NO: 17716 - protein, 9 aa, Artificial Sequence
  Description of Artificial Sequence: Synthetic peptide
MFDEVMVGR

SEQ ID NO: 17717 - protein, 9 aa, Artificial Sequence
  Description of Artificial Sequence: Synthetic peptide
MFDNLMVGR

SEQ ID NO: 17718 - protein, 9 aa, Artificial Sequence
  Description of Artificial Sequence: Synthetic peptide
MFDYLMVGR

SEQ ID NO: 17719 - protein, 9 aa, Artificial Sequence
  Description of Artificial Sequence: Synthetic peptide
MFGDLMVGR

SEQ ID NO: 17720 - protein, 9 aa, Artificial Sequence
  Description of Artificial Sequence: Synthetic peptide
MFHDCMNYR

SEQ ID NO: 17721 - protein, 9 aa, Artificial Sequence
  Description of Artificial Sequence: Synthetic peptide
MFNDLMVGR

SEQ ID NO: 17722 - protein, 9 aa, Artificial Sequence
  Description of Artificial Sequence: Synthetic peptide
MGIRDWKRV

SEQ ID NO: 17723 - protein, 9 aa, Artificial Sequence
  Description of Artificial Sequence: Synthetic peptide
MGIREWRRV

SEQ ID NO: 17724 - protein, 9 aa, Artificial Sequence
  Description of Artificial Sequence: Synthetic peptide
MGIWKSQRH

SEQ ID NO: 17725 - protein, 9 aa, Artificial Sequence
  Description of Artificial Sequence: Synthetic peptide
MGTREWKRV

SEQ ID NO: 17726 - protein, 9 aa, Artificial Sequence
  Description of Artificial Sequence: Synthetic peptide
MHNDKLMDE

SEQ ID NO: 17727 - protein, 9 aa, Artificial Sequence
  Description of Artificial Sequence: Synthetic peptide
MHNDKWMDA

SEQ ID NO: 17728 - protein, 9 aa, Artificial Sequence
  Description of Artificial Sequence: Synthetic peptide
MHSPNRQDR

SEQ ID NO: 17729 - protein, 9 aa, Artificial Sequence
  Description of Artificial Sequence: Synthetic peptide
MHYSFDQCM

SEQ ID NO: 17730 - protein, 9 aa, Artificial Sequence
  Description of Artificial Sequence: Synthetic peptide
MIHWDYHMK

SEQ ID NO: 17731 - protein, 9 aa, Artificial Sequence
  Description of Artificial Sequence: Synthetic peptide
MIHWDYNME

SEQ ID NO: 17732 - protein, 9 aa, Artificial Sequence
  Description of Artificial Sequence: Synthetic peptide
MIHWDYQME

SEQ ID NO: 17733 - protein, 9 aa, Artificial Sequence
  Description of Artificial Sequence: Synthetic peptide
MILWDYHME

SEQ ID NO: 17734 - protein, 9 aa, Artificial Sequence
  Description of Artificial Sequence: Synthetic peptide
MINWDYHME

SEQ ID NO: 17735 - protein, 9 aa, Artificial Sequence
  Description of Artificial Sequence: Synthetic peptide
MIRSETQWA

SEQ ID NO: 17736 - protein, 9 aa, Artificial Sequence
  Description of Artificial Sequence: Synthetic peptide
MIWSNRKFM

SEQ ID NO: 17737 - protein, 9 aa, Artificial Sequence
  Description of Artificial Sequence: Synthetic peptide
MIWYNRKCM

SEQ ID NO: 17738 - protein, 9 aa, Artificial Sequence
  Description of Artificial Sequence: Synthetic peptide
MIWYNRKVM

SEQ ID NO: 17739 - protein, 9 aa, Artificial Sequence
  Description of Artificial Sequence: Synthetic peptide
MIWYNRQFM

SEQ ID NO: 17740 - protein, 9 aa, Artificial Sequence
  Description of Artificial Sequence: Synthetic peptide
MIYWDYHME

SEQ ID NO: 17741 - protein, 9 aa, Artificial Sequence
  Description of Artificial Sequence: Synthetic peptide
MKDEHDDMP

SEQ ID NO: 17742 - protein, 9 aa, Artificial Sequence
  Description of Artificial Sequence: Synthetic peptide
MKDEQDDTP

SEQ ID NO: 17743 - protein, 9 aa, Artificial Sequence
  Description of Artificial Sequence: Synthetic peptide
MKETMDCSY

SEQ ID NO: 17744 - protein, 9 aa, Artificial Sequence
  Description of Artificial Sequence: Synthetic peptide
MKKAHDRSA

SEQ ID NO: 17745 - protein, 9 aa, Artificial Sequence
  Description of Artificial Sequence: Synthetic peptide
MKKKRGRAC

SEQ ID NO: 17746 - protein, 9 aa, Artificial Sequence
  Description of Artificial Sequence: Synthetic peptide
MKLDYDVGC

SEQ ID NO: 17747 - protein, 9 aa, Artificial Sequence
  Description of Artificial Sequence: Synthetic peptide
MKNEKNDNP

SEQ ID NO: 17748 - protein, 9 aa, Artificial Sequence
  Description of Artificial Sequence: Synthetic peptide
MKWDYDVGG

SEQ ID NO: 17749 - protein, 9 aa, Artificial Sequence
  Description of Artificial Sequence: Synthetic peptide
MMKPWACLE

SEQ ID NO: 17750 - protein, 9 aa, Artificial Sequence
  Description of Artificial Sequence: Synthetic peptide
MMKPWVFLE

SEQ ID NO: 17751 - protein, 9 aa, Artificial Sequence
  Description of Artificial Sequence: Synthetic peptide
MMKQWVCLE

SEQ ID NO: 17752 - protein, 9 aa, Artificial Sequence
  Description of Artificial Sequence: Synthetic peptide
MMMMRATMD

SEQ ID NO: 17753 - protein, 9 aa, Artificial Sequence
  Description of Artificial Sequence: Synthetic peptide
MMMMRVAMD

SEQ ID NO: 17754 - protein, 9 aa, Artificial Sequence
  Description of Artificial Sequence: Synthetic peptide
MNTALFVNA

SEQ ID NO: 17755 - protein, 9 aa, Artificial Sequence
  Description of Artificial Sequence: Synthetic peptide
MQIKVSWNR

SEQ ID NO: 17756 - protein, 9 aa, Artificial Sequence
  Description of Artificial Sequence: Synthetic peptide
MQKAHDRAA

SEQ ID NO: 17757 - protein, 9 aa, Artificial Sequence
  Description of Artificial Sequence: Synthetic peptide
MQKEHDRSA

SEQ ID NO: 17758 - protein, 9 aa, Artificial Sequence
  Description of Artificial Sequence: Synthetic peptide
MQKPHDRSA

SEQ ID NO: 17759 - protein, 9 aa, Artificial Sequence
  Description of Artificial Sequence: Synthetic peptide
MQKTHDRSA

SEQ ID NO: 17760 - protein, 9 aa, Artificial Sequence
  Description of Artificial Sequence: Synthetic peptide
MQKWTEIGC

SEQ ID NO: 17761 - protein, 9 aa, Artificial Sequence
  Description of Artificial Sequence: Synthetic peptide
MQLKGSWNR

SEQ ID NO: 17762 - protein, 9 aa, Artificial Sequence
  Description of Artificial Sequence: Synthetic peptide
MQNEKNDHP

SEQ ID NO: 17763 - protein, 9 aa, Artificial Sequence
  Description of Artificial Sequence: Synthetic peptide
MQNEKNDTP

SEQ ID NO: 17764 - protein, 9 aa, Artificial Sequence
  Description of Artificial Sequence: Synthetic peptide
MQNEKNENP

SEQ ID NO: 17765 - protein, 9 aa, Artificial Sequence
  Description of Artificial Sequence: Synthetic peptide
MQTKGSWNR

SEQ ID NO: 17766 - protein, 9 aa, Artificial Sequence
  Description of Artificial Sequence: Synthetic peptide
MRDEQDDMP

SEQ ID NO: 17767 - protein, 9 aa, Artificial Sequence
  Description of Artificial Sequence: Synthetic peptide
MRNDKWMDE

SEQ ID NO: 17768 - protein, 9 aa, Artificial Sequence
  Description of Artificial Sequence: Synthetic peptide
MRNEKNDNP

SEQ ID NO: 17769 - protein, 9 aa, Artificial Sequence
  Description of Artificial Sequence: Synthetic peptide
MRTPYNFWW

SEQ ID NO: 17770 - protein, 9 aa, Artificial Sequence
  Description of Artificial Sequence: Synthetic peptide
MSRTCADWT

SEQ ID NO: 17771 - protein, 9 aa, Artificial Sequence
  Description of Artificial Sequence: Synthetic peptide
MTAVSVFRR

SEQ ID NO: 17772 - protein, 9 aa, Artificial Sequence
  Description of Artificial Sequence: Synthetic peptide
MTKQNKIHR

SEQ ID NO: 17773 - protein, 9 aa, Artificial Sequence
  Description of Artificial Sequence: Synthetic peptide
MTSIFQHPR

SEQ ID NO: 17774 - protein, 9 aa, Artificial Sequence
  Description of Artificial Sequence: Synthetic peptide
MTYVQGDWR

SEQ ID NO: 17775 - protein, 9 aa, Artificial Sequence
  Description of Artificial Sequence: Synthetic peptide
MVDGLMKEY

SEQ ID NO: 17776 - protein, 9 aa, Artificial Sequence
  Description of Artificial Sequence: Synthetic peptide
MVIREWKRV

SEQ ID NO: 17777 - protein, 9 aa, Artificial Sequence
  Description of Artificial Sequence: Synthetic peptide
MVKCTEYSA

SEQ ID NO: 17778 - protein, 9 aa, Artificial Sequence
  Description of Artificial Sequence: Synthetic peptide
MVKVINERQ

SEQ ID NO: 17779 - protein, 9 aa, Artificial Sequence
  Description of Artificial Sequence: Synthetic peptide
MVWYNRKFM

SEQ ID NO: 17780 - protein, 9 aa, Artificial Sequence
  Description of Artificial Sequence: Synthetic peptide
MWKCKSTYA

SEQ ID NO: 17781 - protein, 9 aa, Artificial Sequence
  Description of Artificial Sequence: Synthetic peptide
MYNPNRQDR

SEQ ID NO: 17782 - protein, 9 aa, Artificial Sequence
  Description of Artificial Sequence: Synthetic peptide
MYSANRQDR

SEQ ID NO: 17783 - protein, 9 aa, Artificial Sequence
  Description of Artificial Sequence: Synthetic peptide
MYSPNHQDR

SEQ ID NO: 17784 - protein, 9 aa, Artificial Sequence
  Description of Artificial Sequence: Synthetic peptide
MYSPNREDR

SEQ ID NO: 17785 - protein, 9 aa, Artificial Sequence
  Description of Artificial Sequence: Synthetic peptide
MYSPNRHDR

SEQ ID NO: 17786 - protein, 9 aa, Artificial Sequence
  Description of Artificial Sequence: Synthetic peptide
MYSPNRKDR

SEQ ID NO: 17787 - protein, 9 aa, Artificial Sequence
  Description of Artificial Sequence: Synthetic peptide
MYSPNRQAR

SEQ ID NO: 17788 - protein, 9 aa, Artificial Sequence
  Description of Artificial Sequence: Synthetic peptide
MYSQNRQDR

SEQ ID NO: 17789 - protein, 9 aa, Artificial Sequence
  Description of Artificial Sequence: Synthetic peptide
MYSTNRQDR

SEQ ID NO: 17790 - protein, 9 aa, Artificial Sequence
  Description of Artificial Sequence: Synthetic peptide
MYTPNRQDR

SEQ ID NO: 17791 - protein, 9 aa, Artificial Sequence
  Description of Artificial Sequence: Synthetic peptide
NASNCFWCF

SEQ ID NO: 17792 - protein, 9 aa, Artificial Sequence
  Description of Artificial Sequence: Synthetic peptide
NASTCFWCC

SEQ ID NO: 17793 - protein, 9 aa, Artificial Sequence
  Description of Artificial Sequence: Synthetic peptide
NCRCYGNNS

SEQ ID NO: 17794 - protein, 9 aa, Artificial Sequence
  Description of Artificial Sequence: Synthetic peptide
NESPYHMCL

SEQ ID NO: 17795 - protein, 9 aa, Artificial Sequence
  Description of Artificial Sequence: Synthetic peptide
NFKTYRFCE

SEQ ID NO: 17796 - protein, 9 aa, Artificial Sequence
  Description of Artificial Sequence: Synthetic peptide
NFVQYVHNY

SEQ ID NO: 17797 - protein, 9 aa, Artificial Sequence
  Description of Artificial Sequence: Synthetic peptide
NGSNCFWCC

SEQ ID NO: 17798 - protein, 9 aa, Artificial Sequence
  Description of Artificial Sequence: Synthetic peptide
NHAPAKNKA

SEQ ID NO: 17799 - protein, 9 aa, Artificial Sequence
  Description of Artificial Sequence: Synthetic peptide
NICCNYDAK

SEQ ID NO: 17800 - protein, 9 aa, Artificial Sequence
  Description of Artificial Sequence: Synthetic peptide
NICCNYDAP

SEQ ID NO: 17801 - protein, 9 aa, Artificial Sequence
  Description of Artificial Sequence: Synthetic peptide
NKNAMHNFF

SEQ ID NO: 17802 - protein, 9 aa, Artificial Sequence
  Description of Artificial Sequence: Synthetic peptide
NKNYMHCYW

SEQ ID NO: 17803 - protein, 9 aa, Artificial Sequence
  Description of Artificial Sequence: Synthetic peptide
NLEMLAMFP

SEQ ID NO: 17804 - protein, 9 aa, Artificial Sequence
  Description of Artificial Sequence: Synthetic peptide
NLEMLAMFR

SEQ ID NO: 17805 - protein, 9 aa, Artificial Sequence
  Description of Artificial Sequence: Synthetic peptide
NMRSTEMGV

SEQ ID NO: 17806 - protein, 9 aa, Artificial Sequence
  Description of Artificial Sequence: Synthetic peptide
NNAPIWLHG

SEQ ID NO: 17807 - protein, 9 aa, Artificial Sequence
  Description of Artificial Sequence: Synthetic peptide
NNGVFHWKD

SEQ ID NO: 17808 - protein, 9 aa, Artificial Sequence
  Description of Artificial Sequence: Synthetic peptide
NNPYQHIEG

SEQ ID NO: 17809 - protein, 9 aa, Artificial Sequence
  Description of Artificial Sequence: Synthetic peptide
NNSVFHWKD

SEQ ID NO: 17810 - protein, 9 aa, Artificial Sequence
  Description of Artificial Sequence: Synthetic peptide
NNVKIQYMG

SEQ ID NO: 17811 - protein, 9 aa, Artificial Sequence
  Description of Artificial Sequence: Synthetic peptide
NNWAFHWKD

SEQ ID NO: 17812 - protein, 9 aa, Artificial Sequence
  Description of Artificial Sequence: Synthetic peptide
NNWGFHWKD

SEQ ID NO: 17813 - protein, 9 aa, Artificial Sequence
  Description of Artificial Sequence: Synthetic peptide
NNWVCHWKD

SEQ ID NO: 17814 - protein, 9 aa, Artificial Sequence
  Description of Artificial Sequence: Synthetic peptide
NNWVFHWKA

SEQ ID NO: 17815 - protein, 9 aa, Artificial Sequence
  Description of Artificial Sequence: Synthetic peptide
NNWVFHWKH

SEQ ID NO: 17816 - protein, 9 aa, Artificial Sequence
  Description of Artificial Sequence: Synthetic peptide
NNWVFPWKD

SEQ ID NO: 17817 - protein, 9 aa, Artificial Sequence
  Description of Artificial Sequence: Synthetic peptide
NNWVIHWKD

SEQ ID NO: 17818 - protein, 9 aa, Artificial Sequence
  Description of Artificial Sequence: Synthetic peptide
NPRSKDFWN

SEQ ID NO: 17819 - protein, 9 aa, Artificial Sequence
  Description of Artificial Sequence: Synthetic peptide
NQCGLKMYP

SEQ ID NO: 17820 - protein, 9 aa, Artificial Sequence
  Description of Artificial Sequence: Synthetic peptide
NSAIKEEMA

SEQ ID NO: 17821 - protein, 9 aa, Artificial Sequence
  Description of Artificial Sequence: Synthetic peptide
NSAIRQEMA

SEQ ID NO: 17822 - protein, 9 aa, Artificial Sequence
  Description of Artificial Sequence: Synthetic peptide
NSDMKETGD

SEQ ID NO: 17823 - protein, 9 aa, Artificial Sequence
  Description of Artificial Sequence: Synthetic peptide
NSRQLHHIG

SEQ ID NO: 17824 - protein, 9 aa, Artificial Sequence
  Description of Artificial Sequence: Synthetic peptide
NSRSKDFWN

SEQ ID NO: 17825 - protein, 9 aa, Artificial Sequence
  Description of Artificial Sequence: Synthetic peptide
NSSNCFWCC

SEQ ID NO: 17826 - protein, 9 aa, Artificial Sequence
  Description of Artificial Sequence: Synthetic peptide
NTEPMWSCS

SEQ ID NO: 17827 - protein, 9 aa, Artificial Sequence
  Description of Artificial Sequence: Synthetic peptide
NTRPRRLHM

SEQ ID NO: 17828 - protein, 9 aa, Artificial Sequence
  Description of Artificial Sequence: Synthetic peptide
NTRRMRLHM

SEQ ID NO: 17829 - protein, 9 aa, Artificial Sequence
  Description of Artificial Sequence: Synthetic peptide
NTRSKDFWY

SEQ ID NO: 17830 - protein, 9 aa, Artificial Sequence
  Description of Artificial Sequence: Synthetic peptide
NTSNCFWCC

SEQ ID NO: 17831 - protein, 9 aa, Artificial Sequence
  Description of Artificial Sequence: Synthetic peptide
NVMPLIEYR

SEQ ID NO: 17832 - protein, 9 aa, Artificial Sequence
  Description of Artificial Sequence: Synthetic peptide
NVMTLIQYR

SEQ ID NO: 17833 - protein, 9 aa, Artificial Sequence
  Description of Artificial Sequence: Synthetic peptide
PAEINKMHC

SEQ ID NO: 17834 - protein, 9 aa, Artificial Sequence
  Description of Artificial Sequence: Synthetic peptide
PQAKIDMEF

SEQ ID NO: 17835 - protein, 9 aa, Artificial Sequence
  Description of Artificial Sequence: Synthetic peptide
PQSPLLWER

SEQ ID NO: 17836 - protein, 9 aa, Artificial Sequence
  Description of Artificial Sequence: Synthetic peptide
PQVKVDMEF

SEQ ID NO: 17837 - protein, 9 aa, Artificial Sequence
  Description of Artificial Sequence: Synthetic peptide
PRRLLHFSQ

SEQ ID NO: 17838 - protein, 9 aa, Artificial Sequence
  Description of Artificial Sequence: Synthetic peptide
PRYMGTKDA

SEQ ID NO: 17839 - protein, 9 aa, Artificial Sequence
  Description of Artificial Sequence: Synthetic peptide
PSRLEHYGL

SEQ ID NO: 17840 - protein, 9 aa, Artificial Sequence
  Description of Artificial Sequence: Synthetic peptide
PTKMTHGTS

SEQ ID NO: 17841 - protein, 9 aa, Artificial Sequence
  Description of Artificial Sequence: Synthetic peptide
PTSFAETDY

SEQ ID NO: 17842 - protein, 9 aa, Artificial Sequence
  Description of Artificial Sequence: Synthetic peptide
PVHTFFANE

SEQ ID NO: 17843 - protein, 9 aa, Artificial Sequence
  Description of Artificial Sequence: Synthetic peptide
QAHTFFANE

SEQ ID NO: 17844 - protein, 9 aa, Artificial Sequence
  Description of Artificial Sequence: Synthetic peptide
QAISDMPFP

SEQ ID NO: 17845 - protein, 9 aa, Artificial Sequence
  Description of Artificial Sequence: Synthetic peptide
QFFWSLHAV

SEQ ID NO: 17846 - protein, 9 aa, Artificial Sequence
  Description of Artificial Sequence: Synthetic peptide
QFGTFWPTG

SEQ ID NO: 17847 - protein, 9 aa, Artificial Sequence
  Description of Artificial Sequence: Synthetic peptide
QGEPLMRYS

SEQ ID NO: 17848 - protein, 9 aa, Artificial Sequence
  Description of Artificial Sequence: Synthetic peptide
QHQAFSMFS

SEQ ID NO: 17849 - protein, 9 aa, Artificial Sequence
  Description of Artificial Sequence: Synthetic peptide
QHQPFTMFS

SEQ ID NO: 17850 - protein, 9 aa, Artificial Sequence
  Description of Artificial Sequence: Synthetic peptide
QHSCTHMGN

SEQ ID NO: 17851 - protein, 9 aa, Artificial Sequence
  Description of Artificial Sequence: Synthetic peptide
QICPSFDAD

SEQ ID NO: 17852 - protein, 9 aa, Artificial Sequence
  Description of Artificial Sequence: Synthetic peptide
QINPSFDAD

SEQ ID NO: 17853 - protein, 9 aa, Artificial Sequence
  Description of Artificial Sequence: Synthetic peptide
QIYPSFEAD

SEQ ID NO: 17854 - protein, 9 aa, Artificial Sequence
  Description of Artificial Sequence: Synthetic peptide
QIYTSFDAD

SEQ ID NO: 17855 - protein, 9 aa, Artificial Sequence
  Description of Artificial Sequence: Synthetic peptide
QKATTDMYW

SEQ ID NO: 17856 - protein, 9 aa, Artificial Sequence
  Description of Artificial Sequence: Synthetic peptide
QKSPLLWER

SEQ ID NO: 17857 - protein, 9 aa, Artificial Sequence
  Description of Artificial Sequence: Synthetic peptide
QKTPTDMYW

SEQ ID NO: 17858 - protein, 9 aa, Artificial Sequence
  Description of Artificial Sequence: Synthetic peptide
QMKNLKRTG

SEQ ID NO: 17859 - protein, 9 aa, Artificial Sequence
  Description of Artificial Sequence: Synthetic peptide
QMVYAQKNM

SEQ ID NO: 17860 - protein, 9 aa, Artificial Sequence
  Description of Artificial Sequence: Synthetic peptide
QNAWIECQL

SEQ ID NO: 17861 - protein, 9 aa, Artificial Sequence
  Description of Artificial Sequence: Synthetic peptide
QNTWIQCQL

SEQ ID NO: 17862 - protein, 9 aa, Artificial Sequence
  Description of Artificial Sequence: Synthetic peptide
QNVMHSEFR

SEQ ID NO: 17863 - protein, 9 aa, Artificial Sequence
  Description of Artificial Sequence: Synthetic peptide
QPRSCNFWC

SEQ ID NO: 17864 - protein, 9 aa, Artificial Sequence
  Description of Artificial Sequence: Synthetic peptide
QQIPLLWER

SEQ ID NO: 17865 - protein, 9 aa, Artificial Sequence
  Description of Artificial Sequence: Synthetic peptide
QQQPFSMFS

SEQ ID NO: 17866 - protein, 9 aa, Artificial Sequence
  Description of Artificial Sequence: Synthetic peptide
QQSPPLWER

SEQ ID NO: 17867 - protein, 9 aa, Artificial Sequence
  Description of Artificial Sequence: Synthetic peptide
QQSPQLWDR

SEQ ID NO: 17868 - protein, 9 aa, Artificial Sequence
  Description of Artificial Sequence: Synthetic peptide
QQSPQLWER

SEQ ID NO: 17869 - protein, 9 aa, Artificial Sequence
  Description of Artificial Sequence: Synthetic peptide
QQSTLLWER

SEQ ID NO: 17870 - protein, 9 aa, Artificial Sequence
  Description of Artificial Sequence: Synthetic peptide
QRHDLEVDL

SEQ ID NO: 17871 - protein, 9 aa, Artificial Sequence
  Description of Artificial Sequence: Synthetic peptide
QSIRDMSGF

SEQ ID NO: 17872 - protein, 9 aa, Artificial Sequence
  Description of Artificial Sequence: Synthetic peptide
QSQVKCVER

SEQ ID NO: 17873 - protein, 9 aa, Artificial Sequence
  Description of Artificial Sequence: Synthetic peptide
QSRIMAPLW

SEQ ID NO: 17874 - protein, 9 aa, Artificial Sequence
  Description of Artificial Sequence: Synthetic peptide
QSSFAETDY

SEQ ID NO: 17875 - protein, 9 aa, Artificial Sequence
  Description of Artificial Sequence: Synthetic peptide
QTIRDMGGF

SEQ ID NO: 17876 - protein, 9 aa, Artificial Sequence
  Description of Artificial Sequence: Synthetic peptide
QTIRDMNGF

SEQ ID NO: 17877 - protein, 9 aa, Artificial Sequence
  Description of Artificial Sequence: Synthetic peptide
QTTFAETDY

SEQ ID NO: 17878 - protein, 9 aa, Artificial Sequence
  Description of Artificial Sequence: Synthetic peptide
QTWAAHCTR

SEQ ID NO: 17879 - protein, 9 aa, Artificial Sequence
  Description of Artificial Sequence: Synthetic peptide
QTWSAHCSR

SEQ ID NO: 17880 - protein, 9 aa, Artificial Sequence
  Description of Artificial Sequence: Synthetic peptide
QTWTAHCSR

SEQ ID NO: 17881 - protein, 9 aa, Artificial Sequence
  Description of Artificial Sequence: Synthetic peptide
QYVCFNCYH

SEQ ID NO: 17882 - protein, 9 aa, Artificial Sequence
  Description of Artificial Sequence: Synthetic peptide
RACIPKFKE

SEQ ID NO: 17883 - protein, 9 aa, Artificial Sequence
  Description of Artificial Sequence: Synthetic peptide
RACVPKFKQ

SEQ ID NO: 17884 - protein, 9 aa, Artificial Sequence
  Description of Artificial Sequence: Synthetic peptide
RAEILQLQQ

SEQ ID NO: 17885 - protein, 9 aa, Artificial Sequence
  Description of Artificial Sequence: Synthetic peptide
RARIPKFKQ

SEQ ID NO: 17886 - protein, 9 aa, Artificial Sequence
  Description of Artificial Sequence: Synthetic peptide
RASIFQHPR

SEQ ID NO: 17887 - protein, 9 aa, Artificial Sequence
  Description of Artificial Sequence: Synthetic peptide
RCDEWAEDQ

SEQ ID NO: 17888 - protein, 9 aa, Artificial Sequence
  Description of Artificial Sequence: Synthetic peptide
RCDEWAKDK

SEQ ID NO: 17889 - protein, 9 aa, Artificial Sequence
  Description of Artificial Sequence: Synthetic peptide
RCDEWAKDR

SEQ ID NO: 17890 - protein, 9 aa, Artificial Sequence
  Description of Artificial Sequence: Synthetic peptide
RCDEWAKNQ

SEQ ID NO: 17891 - protein, 9 aa, Artificial Sequence
  Description of Artificial Sequence: Synthetic peptide
RCDEWARDQ

SEQ ID NO: 17892 - protein, 9 aa, Artificial Sequence
  Description of Artificial Sequence: Synthetic peptide
RCDEWVKDQ

SEQ ID NO: 17893 - protein, 9 aa, Artificial Sequence
  Description of Artificial Sequence: Synthetic peptide
RCVPWMNQW

SEQ ID NO: 17894 - protein, 9 aa, Artificial Sequence
  Description of Artificial Sequence: Synthetic peptide
RDAQFLPDQ

SEQ ID NO: 17895 - protein, 9 aa, Artificial Sequence
  Description of Artificial Sequence: Synthetic peptide
RFDDLMVGR

SEQ ID NO: 17896 - protein, 9 aa, Artificial Sequence
  Description of Artificial Sequence: Synthetic peptide
RGDEWAKDQ

SEQ ID NO: 17897 - protein, 9 aa, Artificial Sequence
  Description of Artificial Sequence: Synthetic peptide
RGEILELQQ

SEQ ID NO: 17898 - protein, 9 aa, Artificial Sequence
  Description of Artificial Sequence: Synthetic peptide
RGEILQLQR

SEQ ID NO: 17899 - protein, 9 aa, Artificial Sequence
  Description of Artificial Sequence: Synthetic peptide
RHQPCECYE

SEQ ID NO: 17900 - protein, 9 aa, Artificial Sequence
  Description of Artificial Sequence: Synthetic peptide
RHQPFSMFS

SEQ ID NO: 17901 - protein, 9 aa, Artificial Sequence
  Description of Artificial Sequence: Synthetic peptide
RHWRHAMFL

SEQ ID NO: 17902 - protein, 9 aa, Artificial Sequence
  Description of Artificial Sequence: Synthetic peptide
RHWRLTMFL

SEQ ID NO: 17903 - protein, 9 aa, Artificial Sequence
  Description of Artificial Sequence: Synthetic peptide
RIMVHEWGD

SEQ ID NO: 17904 - protein, 9 aa, Artificial Sequence
  Description of Artificial Sequence: Synthetic peptide
RLDHAETRA

SEQ ID NO: 17905 - protein, 9 aa, Artificial Sequence
  Description of Artificial Sequence: Synthetic peptide
RMLAYKQRH

SEQ ID NO: 17906 - protein, 9 aa, Artificial Sequence
  Description of Artificial Sequence: Synthetic peptide
RVDHAESRA

SEQ ID NO: 17907 - protein, 9 aa, Artificial Sequence
  Description of Artificial Sequence: Synthetic peptide
RVVDLVDVY

SEQ ID NO: 17908 - protein, 9 aa, Artificial Sequence
  Description of Artificial Sequence: Synthetic peptide
RWEKPVTDR

SEQ ID NO: 17909 - protein, 9 aa, Artificial Sequence
  Description of Artificial Sequence: Synthetic peptide
SAEAAYENP

SEQ ID NO: 17910 - protein, 9 aa, Artificial Sequence
  Description of Artificial Sequence: Synthetic peptide
SDCSYSDWS

SEQ ID NO: 17911 - protein, 9 aa, Artificial Sequence
  Description of Artificial Sequence: Synthetic peptide
SEVHLEHNY

SEQ ID NO: 17912 - protein, 9 aa, Artificial Sequence
  Description of Artificial Sequence: Synthetic peptide
SFCCDHNAG

SEQ ID NO: 17913 - protein, 9 aa, Artificial Sequence
  Description of Artificial Sequence: Synthetic peptide
SFCCDHNAS

SEQ ID NO: 17914 - protein, 9 aa, Artificial Sequence
  Description of Artificial Sequence: Synthetic peptide
SFCCDHNGA

SEQ ID NO: 17915 - protein, 9 aa, Artificial Sequence
  Description of Artificial Sequence: Synthetic peptide
SFDERGVWC

SEQ ID NO: 17916 - protein, 9 aa, Artificial Sequence
  Description of Artificial Sequence: Synthetic peptide
SFGSCNTCG

SEQ ID NO: 17917 - protein, 9 aa, Artificial Sequence
  Description of Artificial Sequence: Synthetic peptide
SFHDEEGLF

SEQ ID NO: 17918 - protein, 9 aa, Artificial Sequence
  Description of Artificial Sequence: Synthetic peptide
SFKATRRGV

SEQ ID NO: 17919 - protein, 9 aa, Artificial Sequence
  Description of Artificial Sequence: Synthetic peptide
SFKLTIVNG

SEQ ID NO: 17920 - protein, 9 aa, Artificial Sequence
  Description of Artificial Sequence: Synthetic peptide
SFKWPIVNG

SEQ ID NO: 17921 - protein, 9 aa, Artificial Sequence
  Description of Artificial Sequence: Synthetic peptide
SFKWTILNG

SEQ ID NO: 17922 - protein, 9 aa, Artificial Sequence
  Description of Artificial Sequence: Synthetic peptide
SFKWTIVDG

SEQ ID NO: 17923 - protein, 9 aa, Artificial Sequence
  Description of Artificial Sequence: Synthetic peptide
SFKWTIVNA

SEQ ID NO: 17924 - protein, 9 aa, Artificial Sequence
  Description of Artificial Sequence: Synthetic peptide
SFKWTIVND

SEQ ID NO: 17925 - protein, 9 aa, Artificial Sequence
  Description of Artificial Sequence: Synthetic peptide
SFKWTIVNV

SEQ ID NO: 17926 - protein, 9 aa, Artificial Sequence
  Description of Artificial Sequence: Synthetic peptide
SFKWTIVTG

SEQ ID NO: 17927 - protein, 9 aa, Artificial Sequence
  Description of Artificial Sequence: Synthetic peptide
SGKDNNRRL

SEQ ID NO: 17928 - protein, 9 aa, Artificial Sequence
  Description of Artificial Sequence: Synthetic peptide
SHIHKDSCW

SEQ ID NO: 17929 - protein, 9 aa, Artificial Sequence
  Description of Artificial Sequence: Synthetic peptide
SIMKYDEMG

SEQ ID NO: 17930 - protein, 9 aa, Artificial Sequence
  Description of Artificial Sequence: Synthetic peptide
SIMKYDQMV

SEQ ID NO: 17931 - protein, 9 aa, Artificial Sequence
  Description of Artificial Sequence: Synthetic peptide
SIMLNECNT

SEQ ID NO: 17932 - protein, 9 aa, Artificial Sequence
  Description of Artificial Sequence: Synthetic peptide
SIRLKGNIM

SEQ ID NO: 17933 - protein, 9 aa, Artificial Sequence
  Description of Artificial Sequence: Synthetic peptide
SKISATWDR

SEQ ID NO: 17934 - protein, 9 aa, Artificial Sequence
  Description of Artificial Sequence: Synthetic peptide
SKLHKQYCC

SEQ ID NO: 17935 - protein, 9 aa, Artificial Sequence
  Description of Artificial Sequence: Synthetic peptide
SKYDTDSAC

SEQ ID NO: 17936 - protein, 9 aa, Artificial Sequence
  Description of Artificial Sequence: Synthetic peptide
SLEMRPRQI

SEQ ID NO: 17937 - protein, 9 aa, Artificial Sequence
  Description of Artificial Sequence: Synthetic peptide
SLKDNNRRL

SEQ ID NO: 17938 - protein, 9 aa, Artificial Sequence
  Description of Artificial Sequence: Synthetic peptide
SLKMRPRKI

SEQ ID NO: 17939 - protein, 9 aa, Artificial Sequence
  Description of Artificial Sequence: Synthetic peptide
SLKMRPRQS

SEQ ID NO: 17940 - protein, 9 aa, Artificial Sequence
  Description of Artificial Sequence: Synthetic peptide
SLKMRPRQT

SEQ ID NO: 17941 - protein, 9 aa, Artificial Sequence
  Description of Artificial Sequence: Synthetic peptide
SLQMRPRQI

SEQ ID NO: 17942 - protein, 9 aa, Artificial Sequence
  Description of Artificial Sequence: Synthetic peptide
SLTASNWRD

SEQ ID NO: 17943 - protein, 9 aa, Artificial Sequence
  Description of Artificial Sequence: Synthetic peptide
SMVCQVIVF

SEQ ID NO: 17944 - protein, 9 aa, Artificial Sequence
  Description of Artificial Sequence: Synthetic peptide
SNDKNIHNG

SEQ ID NO: 17945 - protein, 9 aa, Artificial Sequence
  Description of Artificial Sequence: Synthetic peptide
SNWVFHWKD

SEQ ID NO: 17946 - protein, 9 aa, Artificial Sequence
  Description of Artificial Sequence: Synthetic peptide
SPREKNDYW

SEQ ID NO: 17947 - protein, 9 aa, Artificial Sequence
  Description of Artificial Sequence: Synthetic peptide
SPREKNRYW

SEQ ID NO: 17948 - protein, 9 aa, Artificial Sequence
  Description of Artificial Sequence: Synthetic peptide
SRIHKDICW

SEQ ID NO: 17949 - protein, 9 aa, Artificial Sequence
  Description of Artificial Sequence: Synthetic peptide
SRINKDSCW

SEQ ID NO: 17950 - protein, 9 aa, Artificial Sequence
  Description of Artificial Sequence: Synthetic peptide
SRLHKDSCW

SEQ ID NO: 17951 - protein, 9 aa, Artificial Sequence
  Description of Artificial Sequence: Synthetic peptide
SRTMKDWWG

SEQ ID NO: 17952 - protein, 9 aa, Artificial Sequence
  Description of Artificial Sequence: Synthetic peptide
SSAIKQEMA

SEQ ID NO: 17953 - protein, 9 aa, Artificial Sequence
  Description of Artificial Sequence: Synthetic peptide
SSEQTGPHM

SEQ ID NO: 17954 - protein, 9 aa, Artificial Sequence
  Description of Artificial Sequence: Synthetic peptide
SSHFMEITR

SEQ ID NO: 17955 - protein, 9 aa, Artificial Sequence
  Description of Artificial Sequence: Synthetic peptide
SSIIQSSAR

SEQ ID NO: 17956 - protein, 9 aa, Artificial Sequence
  Description of Artificial Sequence: Synthetic peptide
SSKQAGPHM

SEQ ID NO: 17957 - protein, 9 aa, Artificial Sequence
  Description of Artificial Sequence: Synthetic peptide
SSRPRMKQP

SEQ ID NO: 17958 - protein, 9 aa, Artificial Sequence
  Description of Artificial Sequence: Synthetic peptide
SSTASNWRD

SEQ ID NO: 17959 - protein, 9 aa, Artificial Sequence
  Description of Artificial Sequence: Synthetic peptide
SSYFMAITR

SEQ ID NO: 17960 - protein, 9 aa, Artificial Sequence
  Description of Artificial Sequence: Synthetic peptide
SSYFMEIAR

SEQ ID NO: 17961 - protein, 9 aa, Artificial Sequence
  Description of Artificial Sequence: Synthetic peptide
SSYFMEVTR

SEQ ID NO: 17962 - protein, 9 aa, Artificial Sequence
  Description of Artificial Sequence: Synthetic peptide
SSYFMKITR

SEQ ID NO: 17963 - protein, 9 aa, Artificial Sequence
  Description of Artificial Sequence: Synthetic peptide
SSYFTEITR

SEQ ID NO: 17964 - protein, 9 aa, Artificial Sequence
  Description of Artificial Sequence: Synthetic peptide
SSYIMEITR

SEQ ID NO: 17965 - protein, 9 aa, Artificial Sequence
  Description of Artificial Sequence: Synthetic peptide
SSYVMEITR

SEQ ID NO: 17966 - protein, 9 aa, Artificial Sequence
  Description of Artificial Sequence: Synthetic peptide
SSYYMEITR

SEQ ID NO: 17967 - protein, 9 aa, Artificial Sequence
  Description of Artificial Sequence: Synthetic peptide
STDDKFWLG

SEQ ID NO: 17968 - protein, 9 aa, Artificial Sequence
  Description of Artificial Sequence: Synthetic peptide
STDNRFWLG

SEQ ID NO: 17969 - protein, 9 aa, Artificial Sequence
  Description of Artificial Sequence: Synthetic peptide
STDTKFWLG

SEQ ID NO: 17970 - protein, 9 aa, Artificial Sequence
  Description of Artificial Sequence: Synthetic peptide
STEAAHENP

SEQ ID NO: 17971 - protein, 9 aa, Artificial Sequence
  Description of Artificial Sequence: Synthetic peptide
STEASYENP

SEQ ID NO: 17972 - protein, 9 aa, Artificial Sequence
  Description of Artificial Sequence: Synthetic peptide
STESAYENP

SEQ ID NO: 17973 - protein, 9 aa, Artificial Sequence
  Description of Artificial Sequence: Synthetic peptide
STQQVFWNL

SEQ ID NO: 17974 - protein, 9 aa, Artificial Sequence
  Description of Artificial Sequence: Synthetic peptide
STRPMRLHM

SEQ ID NO: 17975 - protein, 9 aa, Artificial Sequence
  Description of Artificial Sequence: Synthetic peptide
STSILDKLI

SEQ ID NO: 17976 - protein, 9 aa, Artificial Sequence
  Description of Artificial Sequence: Synthetic peptide
STSSLDKLV

SEQ ID NO: 17977 - protein, 9 aa, Artificial Sequence
  Description of Artificial Sequence: Synthetic peptide
STTAYNLTR

SEQ ID NO: 17978 - protein, 9 aa, Artificial Sequence
  Description of Artificial Sequence: Synthetic peptide
SVHAKMEGC

SEQ ID NO: 17979 - protein, 9 aa, Artificial Sequence
  Description of Artificial Sequence: Synthetic peptide
SVHSKMQGC

SEQ ID NO: 17980 - protein, 9 aa, Artificial Sequence
  Description of Artificial Sequence: Synthetic peptide
SVHSTMEGC

SEQ ID NO: 17981 - protein, 9 aa, Artificial Sequence
  Description of Artificial Sequence: Synthetic peptide
SVKDINRRL

SEQ ID NO: 17982 - protein, 9 aa, Artificial Sequence
  Description of Artificial Sequence: Synthetic peptide
SVKDNNGRL

SEQ ID NO: 17983 - protein, 9 aa, Artificial Sequence
  Description of Artificial Sequence: Synthetic peptide
SVKDNNQRL

SEQ ID NO: 17984 - protein, 9 aa, Artificial Sequence
  Description of Artificial Sequence: Synthetic peptide
SVKDNNRIL

SEQ ID NO: 17985 - protein, 9 aa, Artificial Sequence
  Description of Artificial Sequence: Synthetic peptide
SVKDNNRKL

SEQ ID NO: 17986 - protein, 9 aa, Artificial Sequence
  Description of Artificial Sequence: Synthetic peptide
SVKDNNRTL

SEQ ID NO: 17987 - protein, 9 aa, Artificial Sequence
  Description of Artificial Sequence: Synthetic peptide
SVKDTNRRL

SEQ ID NO: 17988 - protein, 9 aa, Artificial Sequence
  Description of Artificial Sequence: Synthetic peptide
SVKNNNRRL

SEQ ID NO: 17989 - protein, 9 aa, Artificial Sequence
  Description of Artificial Sequence: Synthetic peptide
SVMQSIDSS

SEQ ID NO: 17990 - protein, 9 aa, Artificial Sequence
  Description of Artificial Sequence: Synthetic peptide
SVNSKMEGC

SEQ ID NO: 17991 - protein, 9 aa, Artificial Sequence
  Description of Artificial Sequence: Synthetic peptide
SVRDNNRRL

SEQ ID NO: 17992 - protein, 9 aa, Artificial Sequence
  Description of Artificial Sequence: Synthetic peptide
SWAASNWRD

SEQ ID NO: 17993 - protein, 9 aa, Artificial Sequence
  Description of Artificial Sequence: Synthetic peptide
SWKMMHCDN

SEQ ID NO: 17994 - protein, 9 aa, Artificial Sequence
  Description of Artificial Sequence: Synthetic peptide
SWTSSNWRD

SEQ ID NO: 17995 - protein, 9 aa, Artificial Sequence
  Description of Artificial Sequence: Synthetic peptide
SWTTSNWRD

SEQ ID NO: 17996 - protein, 9 aa, Artificial Sequence
  Description of Artificial Sequence: Synthetic peptide
SWTVSNWRD

SEQ ID NO: 17997 - protein, 9 aa, Artificial Sequence
  Description of Artificial Sequence: Synthetic peptide
SYQMFNNVQ

SEQ ID NO: 17998 - protein, 9 aa, Artificial Sequence
  Description of Artificial Sequence: Synthetic peptide
TAQYLNREI

SEQ ID NO: 17999 - protein, 9 aa, Artificial Sequence
  Description of Artificial Sequence: Synthetic peptide
TAREDYQHA

SEQ ID NO: 18000 - protein, 9 aa, Artificial Sequence
  Description of Artificial Sequence: Synthetic peptide
TARLLEKYN

SEQ ID NO: 18001 - protein, 9 aa, Artificial Sequence
  Description of Artificial Sequence: Synthetic peptide
TCMGFTSFP

SEQ ID NO: 18002 - protein, 9 aa, Artificial Sequence
  Description of Artificial Sequence: Synthetic peptide
TFFVTASWS

SEQ ID NO: 18003 - protein, 9 aa, Artificial Sequence
  Description of Artificial Sequence: Synthetic peptide
TFHQCERSV

SEQ ID NO: 18004 - protein, 9 aa, Artificial Sequence
  Description of Artificial Sequence: Synthetic peptide
TFKNYRFCE

SEQ ID NO: 18005 - protein, 9 aa, Artificial Sequence
  Description of Artificial Sequence: Synthetic peptide
TFKTYRYCE

SEQ ID NO: 18006 - protein, 9 aa, Artificial Sequence
  Description of Artificial Sequence: Synthetic peptide
TFPNPVHRG

SEQ ID NO: 18007 - protein, 9 aa, Artificial Sequence
  Description of Artificial Sequence: Synthetic peptide
TFRTYRFCE

SEQ ID NO: 18008 - protein, 9 aa, Artificial Sequence
  Description of Artificial Sequence: Synthetic peptide
TFSNPVHRV

SEQ ID NO: 18009 - protein, 9 aa, Artificial Sequence
  Description of Artificial Sequence: Synthetic peptide
TFVNWPIHG

SEQ ID NO: 18010 - protein, 9 aa, Artificial Sequence
  Description of Artificial Sequence: Synthetic peptide
TKIFTENDQ

SEQ ID NO: 18011 - protein, 9 aa, Artificial Sequence
  Description of Artificial Sequence: Synthetic peptide
TKNAMHHFF

SEQ ID NO: 18012 - protein, 9 aa, Artificial Sequence
  Description of Artificial Sequence: Synthetic peptide
TKNDMHNFF

SEQ ID NO: 18013 - protein, 9 aa, Artificial Sequence
  Description of Artificial Sequence: Synthetic peptide
TKNGMHNFF

SEQ ID NO: 18014 - protein, 9 aa, Artificial Sequence
  Description of Artificial Sequence: Synthetic peptide
TKNPMHNFF

SEQ ID NO: 18015 - protein, 9 aa, Artificial Sequence
  Description of Artificial Sequence: Synthetic peptide
TKTAMHNFF

SEQ ID NO: 18016 - protein, 9 aa, Artificial Sequence
  Description of Artificial Sequence: Synthetic peptide
TLTTEMIWA

SEQ ID NO: 18017 - protein, 9 aa, Artificial Sequence
  Description of Artificial Sequence: Synthetic peptide
TNWVFHWKD

SEQ ID NO: 18018 - protein, 9 aa, Artificial Sequence
  Description of Artificial Sequence: Synthetic peptide
TPEAEHHKI

SEQ ID NO: 18019 - protein, 9 aa, Artificial Sequence
  Description of Artificial Sequence: Synthetic peptide
TRGMRDFCY

SEQ ID NO: 18020 - protein, 9 aa, Artificial Sequence
  Description of Artificial Sequence: Synthetic peptide
TRMVLEWTY

SEQ ID NO: 18021 - protein, 9 aa, Artificial Sequence
  Description of Artificial Sequence: Synthetic peptide
TSEVFTVNC

SEQ ID NO: 18022 - protein, 9 aa, Artificial Sequence
  Description of Artificial Sequence: Synthetic peptide
TSQYVNREI

SEQ ID NO: 18023 - protein, 9 aa, Artificial Sequence
  Description of Artificial Sequence: Synthetic peptide
TSVPSCWAR

SEQ ID NO: 18024 - protein, 9 aa, Artificial Sequence
  Description of Artificial Sequence: Synthetic peptide
TTEQWDVCR

SEQ ID NO: 18025 - protein, 9 aa, Artificial Sequence
  Description of Artificial Sequence: Synthetic peptide
TTEVEHHKI

SEQ ID NO: 18026 - protein, 9 aa, Artificial Sequence
  Description of Artificial Sequence: Synthetic peptide
TVKCTGYSA

SEQ ID NO: 18027 - protein, 9 aa, Artificial Sequence
  Description of Artificial Sequence: Synthetic peptide
TVKDENAAC

SEQ ID NO: 18028 - protein, 9 aa, Artificial Sequence
  Description of Artificial Sequence: Synthetic peptide
TVKEENAAF

SEQ ID NO: 18029 - protein, 9 aa, Artificial Sequence
  Description of Artificial Sequence: Synthetic peptide
TVKEENATC

SEQ ID NO: 18030 - protein, 9 aa, Artificial Sequence
  Description of Artificial Sequence: Synthetic peptide
TVKEENSAC

SEQ ID NO: 18031 - protein, 9 aa, Artificial Sequence
  Description of Artificial Sequence: Synthetic peptide
TVKEENTAC

SEQ ID NO: 18032 - protein, 9 aa, Artificial Sequence
  Description of Artificial Sequence: Synthetic peptide
TVRCTEYSA

SEQ ID NO: 18033 - protein, 9 aa, Artificial Sequence
  Description of Artificial Sequence: Synthetic peptide
TWKMMHCDN

SEQ ID NO: 18034 - protein, 9 aa, Artificial Sequence
  Description of Artificial Sequence: Synthetic peptide
VARPWAMNS

SEQ ID NO: 18035 - protein, 9 aa, Artificial Sequence
  Description of Artificial Sequence: Synthetic peptide
VATQSCKWM

SEQ ID NO: 18036 - protein, 9 aa, Artificial Sequence
  Description of Artificial Sequence: Synthetic peptide
VAVTITDFD

SEQ ID NO: 18037 - protein, 9 aa, Artificial Sequence
  Description of Artificial Sequence: Synthetic peptide
VAVTVRDFD

SEQ ID NO: 18038 - protein, 9 aa, Artificial Sequence
  Description of Artificial Sequence: Synthetic peptide
VCKWMGRQQ

SEQ ID NO: 18039 - protein, 9 aa, Artificial Sequence
  Description of Artificial Sequence: Synthetic peptide
VCSTVMDFN

SEQ ID NO: 18040 - protein, 9 aa, Artificial Sequence
  Description of Artificial Sequence: Synthetic peptide
VEADNNDAD

SEQ ID NO: 18041 - protein, 9 aa, Artificial Sequence
  Description of Artificial Sequence: Synthetic peptide
VFNQQEMWA

SEQ ID NO: 18042 - protein, 9 aa, Artificial Sequence
  Description of Artificial Sequence: Synthetic peptide
VGKWMGKQQ

SEQ ID NO: 18043 - protein, 9 aa, Artificial Sequence
  Description of Artificial Sequence: Synthetic peptide
VGVTVTDFD

SEQ ID NO: 18044 - protein, 9 aa, Artificial Sequence
  Description of Artificial Sequence: Synthetic peptide
VHALIPMDS

SEQ ID NO: 18045 - protein, 9 aa, Artificial Sequence
  Description of Artificial Sequence: Synthetic peptide
VHGLIPMDT

SEQ ID NO: 18046 - protein, 9 aa, Artificial Sequence
  Description of Artificial Sequence: Synthetic peptide
VHRQMHDSY

SEQ ID NO: 18047 - protein, 9 aa, Artificial Sequence
  Description of Artificial Sequence: Synthetic peptide
VICATQDAA

SEQ ID NO: 18048 - protein, 9 aa, Artificial Sequence
  Description of Artificial Sequence: Synthetic peptide
VICATQDPS

SEQ ID NO: 18049 - protein, 9 aa, Artificial Sequence
  Description of Artificial Sequence: Synthetic peptide
VICPTQDPA

SEQ ID NO: 18050 - protein, 9 aa, Artificial Sequence
  Description of Artificial Sequence: Synthetic peptide
VICTTQDPA

SEQ ID NO: 18051 - protein, 9 aa, Artificial Sequence
  Description of Artificial Sequence: Synthetic peptide
VIHDQLETM

SEQ ID NO: 18052 - protein, 9 aa, Artificial Sequence
  Description of Artificial Sequence: Synthetic peptide
VINMNRRWS

SEQ ID NO: 18053 - protein, 9 aa, Artificial Sequence
  Description of Artificial Sequence: Synthetic peptide
VKKKRGRAC

SEQ ID NO: 18054 - protein, 9 aa, Artificial Sequence
  Description of Artificial Sequence: Synthetic peptide
VKNYMHCYW

SEQ ID NO: 18055 - protein, 9 aa, Artificial Sequence
  Description of Artificial Sequence: Synthetic peptide
VKSFRSMMD

SEQ ID NO: 18056 - protein, 9 aa, Artificial Sequence
  Description of Artificial Sequence: Synthetic peptide
VMRWPWDDT

SEQ ID NO: 18057 - protein, 9 aa, Artificial Sequence
  Description of Artificial Sequence: Synthetic peptide
VPRSCNFWC

SEQ ID NO: 18058 - protein, 9 aa, Artificial Sequence
  Description of Artificial Sequence: Synthetic peptide
VRTPYNFWW

SEQ ID NO: 18059 - protein, 9 aa, Artificial Sequence
  Description of Artificial Sequence: Synthetic peptide
VSETNNGGY

SEQ ID NO: 18060 - protein, 9 aa, Artificial Sequence
  Description of Artificial Sequence: Synthetic peptide
VSINTNQPG

SEQ ID NO: 18061 - protein, 9 aa, Artificial Sequence
  Description of Artificial Sequence: Synthetic peptide
VSKMSHKEA

SEQ ID NO: 18062 - protein, 9 aa, Artificial Sequence
  Description of Artificial Sequence: Synthetic peptide
VSKPIEVGY

SEQ ID NO: 18063 - protein, 9 aa, Artificial Sequence
  Description of Artificial Sequence: Synthetic peptide
VSMSSIYDK

SEQ ID NO: 18064 - protein, 9 aa, Artificial Sequence
  Description of Artificial Sequence: Synthetic peptide
VSMSSNSDK

SEQ ID NO: 18065 - protein, 9 aa, Artificial Sequence
  Description of Artificial Sequence: Synthetic peptide
VSNQCCKAM

SEQ ID NO: 18066 - protein, 9 aa, Artificial Sequence
  Description of Artificial Sequence: Synthetic peptide
VSRALERQA

SEQ ID NO: 18067 - protein, 9 aa, Artificial Sequence
  Description of Artificial Sequence: Synthetic peptide
VSRSLERKA

SEQ ID NO: 18068 - protein, 9 aa, Artificial Sequence
  Description of Artificial Sequence: Synthetic peptide
VSRSLERQG

SEQ ID NO: 18069 - protein, 9 aa, Artificial Sequence
  Description of Artificial Sequence: Synthetic peptide
VSRSLERQT

SEQ ID NO: 18070 - protein, 9 aa, Artificial Sequence
  Description of Artificial Sequence: Synthetic peptide
VSRSLKRQA

SEQ ID NO: 18071 - protein, 9 aa, Artificial Sequence
  Description of Artificial Sequence: Synthetic peptide
VSRSLQRQA

SEQ ID NO: 18072 - protein, 9 aa, Artificial Sequence
  Description of Artificial Sequence: Synthetic peptide
VSRSQERQA

SEQ ID NO: 18073 - protein, 9 aa, Artificial Sequence
  Description of Artificial Sequence: Synthetic peptide
VSVPSCWAR

SEQ ID NO: 18074 - protein, 9 aa, Artificial Sequence
  Description of Artificial Sequence: Synthetic peptide
VSVTVTDFD

SEQ ID NO: 18075 - protein, 9 aa, Artificial Sequence
  Description of Artificial Sequence: Synthetic peptide
VTEHQQRGV

SEQ ID NO: 18076 - protein, 9 aa, Artificial Sequence
  Description of Artificial Sequence: Synthetic peptide
VTKCNEKGN

SEQ ID NO: 18077 - protein, 9 aa, Artificial Sequence
  Description of Artificial Sequence: Synthetic peptide
VTNKQQLAR

SEQ ID NO: 18078 - protein, 9 aa, Artificial Sequence
  Description of Artificial Sequence: Synthetic peptide
VTNQCCKTM

SEQ ID NO: 18079 - protein, 9 aa, Artificial Sequence
  Description of Artificial Sequence: Synthetic peptide
VTSQCCKAM

SEQ ID NO: 18080 - protein, 9 aa, Artificial Sequence
  Description of Artificial Sequence: Synthetic peptide
VTTGIWKTW

SEQ ID NO: 18081 - protein, 9 aa, Artificial Sequence
  Description of Artificial Sequence: Synthetic peptide
VVGGDKAAY

SEQ ID NO: 18082 - protein, 9 aa, Artificial Sequence
  Description of Artificial Sequence: Synthetic peptide
VVKVINERQ

SEQ ID NO: 18083 - protein, 9 aa, Artificial Sequence
  Description of Artificial Sequence: Synthetic peptide
VVSQTYRNR

SEQ ID NO: 18084 - protein, 9 aa, Artificial Sequence
  Description of Artificial Sequence: Synthetic peptide
VWKQYILVI

SEQ ID NO: 18085 - protein, 9 aa, Artificial Sequence
  Description of Artificial Sequence: Synthetic peptide
VWMQHMCLD

SEQ ID NO: 18086 - protein, 9 aa, Artificial Sequence
  Description of Artificial Sequence: Synthetic peptide
VWQQYILII

SEQ ID NO: 18087 - protein, 9 aa, Artificial Sequence
  Description of Artificial Sequence: Synthetic peptide
WCRQTMMDL

SEQ ID NO: 18088 - protein, 9 aa, Artificial Sequence
  Description of Artificial Sequence: Synthetic peptide
WDAMDDKKA

SEQ ID NO: 18089 - protein, 9 aa, Artificial Sequence
  Description of Artificial Sequence: Synthetic peptide
WETDMDMDA

SEQ ID NO: 18090 - protein, 9 aa, Artificial Sequence
  Description of Artificial Sequence: Synthetic peptide
WFRRHDYFY

SEQ ID NO: 18091 - protein, 9 aa, Artificial Sequence
  Description of Artificial Sequence: Synthetic peptide
WFRRHSYFY

SEQ ID NO: 18092 - protein, 9 aa, Artificial Sequence
  Description of Artificial Sequence: Synthetic peptide
WGDKKATDR

SEQ ID NO: 18093 - protein, 9 aa, Artificial Sequence
  Description of Artificial Sequence: Synthetic peptide
WGDKMAADA

SEQ ID NO: 18094 - protein, 9 aa, Artificial Sequence
  Description of Artificial Sequence: Synthetic peptide
WGDKPATDR

SEQ ID NO: 18095 - protein, 9 aa, Artificial Sequence
  Description of Artificial Sequence: Synthetic peptide
WGDKRATDR

SEQ ID NO: 18096 - protein, 9 aa, Artificial Sequence
  Description of Artificial Sequence: Synthetic peptide
WKNDMDMDA

SEQ ID NO: 18097 - protein, 9 aa, Artificial Sequence
  Description of Artificial Sequence: Synthetic peptide
WKTEMDMDA

SEQ ID NO: 18098 - protein, 9 aa, Artificial Sequence
  Description of Artificial Sequence: Synthetic peptide
WNCVMPDNA

SEQ ID NO: 18099 - protein, 9 aa, Artificial Sequence
  Description of Artificial Sequence: Synthetic peptide
WNTDMDMDA

SEQ ID NO: 18100 - protein, 9 aa, Artificial Sequence
  Description of Artificial Sequence: Synthetic peptide
WVDKQATDR

SEQ ID NO: 18101 - protein, 9 aa, Artificial Sequence
  Description of Artificial Sequence: Synthetic peptide
YCRCYGNNS

SEQ ID NO: 18102 - protein, 9 aa, Artificial Sequence
  Description of Artificial Sequence: Synthetic peptide
YIMVHEWGD

SEQ ID NO: 18103 - protein, 9 aa, Artificial Sequence
  Description of Artificial Sequence: Synthetic peptide
YMILQHDAL

SEQ ID NO: 18104 - protein, 9 aa, Artificial Sequence
  Description of Artificial Sequence: Synthetic peptide
YMTLEHDAL

SEQ ID NO: 18105 - protein, 9 aa, Artificial Sequence
  Description of Artificial Sequence: Synthetic peptide
YQSGGILRM

SEQ ID NO: 18106 - protein, 9 aa, Artificial Sequence
  Description of Artificial Sequence: Synthetic peptide
YQSGGIRRM

SEQ ID NO: 18107 - protein, 9 aa, Artificial Sequence
  Description of Artificial Sequence: Synthetic peptide
YQTGGIHRM

SEQ ID NO: 18108 - protein, 9 aa, Artificial Sequence
  Description of Artificial Sequence: Synthetic peptide
YSHTYKWKR

SEQ ID NO: 18109 - protein, 9 aa, Artificial Sequence
  Description of Artificial Sequence: Synthetic peptide
YSLTYKWKR

SEQ ID NO: 18110 - protein, 9 aa, Artificial Sequence
  Description of Artificial Sequence: Synthetic peptide
YSPTYMWKR

SEQ ID NO: 18111 - protein, 9 aa, Artificial Sequence
  Description of Artificial Sequence: Synthetic peptide
YSQLFTFFE

SEQ ID NO: 18112 - protein, 9 aa, Artificial Sequence
  Description of Artificial Sequence: Synthetic peptide
YSSTYKWKR

SEQ ID NO: 18113 - protein, 9 aa, Artificial Sequence
  Description of Artificial Sequence: Synthetic peptide
YSTTYGGRH

SEQ ID NO: 18114 - protein, 9 aa, Artificial Sequence
  Description of Artificial Sequence: Synthetic peptide
YVTEVNSMI

SEQ ID NO: 18115 - protein, 9 aa, Artificial Sequence
  Description of Artificial Sequence: Synthetic peptide
YWVDFVMPF

SEQ ID NO: 18116 - protein, 9 aa, Artificial Sequence
  Description of Artificial Sequence: Synthetic peptide
YWVNFVVPF

SEQ ID NO: 18117 - protein, 9 aa, Artificial Sequence
  Description of Artificial Sequence: Synthetic peptide
YWVTFVMPF

SEQ ID NO: 18118 - protein, 9 aa, Artificial Sequence
  Description of Artificial Sequence: Synthetic peptide
QTNTMQMLS

SEQ ID NO: 18119 - protein, 9 aa, Artificial Sequence
  Description of Artificial Sequence: Synthetic peptide
GPRHIEEDG

SEQ ID NO: 18120 - protein, 9 aa, Artificial Sequence
  Description of Artificial Sequence: Synthetic peptide
RKADVEYQG

SEQ ID NO: 18121 - protein, 9 aa, Artificial Sequence
  Description of Artificial Sequence: Synthetic peptide
SCDMQQAHQ

SEQ ID NO: 18122 - protein, 9 aa, Artificial Sequence
  Description of Artificial Sequence: Synthetic peptide
DILMFEWFD

SEQ ID NO: 18123 - protein, 9 aa, Artificial Sequence
  Description of Artificial Sequence: Synthetic peptide
DIRMFAWFD

SEQ ID NO: 18124 - protein, 9 aa, Artificial Sequence
  Description of Artificial Sequence: Synthetic peptide
DIRMFELFD

SEQ ID NO: 18125 - protein, 9 aa, Artificial Sequence
  Description of Artificial Sequence: Synthetic peptide
DIRMFEWFD

SEQ ID NO: 18126 - protein, 9 aa, Artificial Sequence
  Description of Artificial Sequence: Synthetic peptide
DIRMFEWFG

SEQ ID NO: 18127 - protein, 9 aa, Artificial Sequence
  Description of Artificial Sequence: Synthetic peptide
DIRMFEWFN

SEQ ID NO: 18128 - protein, 9 aa, Artificial Sequence
  Description of Artificial Sequence: Synthetic peptide
DIRMFEWFY

SEQ ID NO: 18129 - protein, 9 aa, Artificial Sequence
  Description of Artificial Sequence: Synthetic peptide
DIRMFEWVD

SEQ ID NO: 18130 - protein, 9 aa, Artificial Sequence
  Description of Artificial Sequence: Synthetic peptide
DIRMFKWFD

SEQ ID NO: 18131 - protein, 9 aa, Artificial Sequence
  Description of Artificial Sequence: Synthetic peptide
DIRMFVWFD

SEQ ID NO: 18132 - protein, 9 aa, Artificial Sequence
  Description of Artificial Sequence: Synthetic peptide
DIRMIEWFD

SEQ ID NO: 18133 - protein, 9 aa, Artificial Sequence
  Description of Artificial Sequence: Synthetic peptide
DIRMVEWFD

SEQ ID NO: 18134 - protein, 9 aa, Artificial Sequence
  Description of Artificial Sequence: Synthetic peptide
DIRVFEWFD

SEQ ID NO: 18135 - protein, 9 aa, Artificial Sequence
  Description of Artificial Sequence: Synthetic peptide
DMRMFEWFD

SEQ ID NO: 18136 - protein, 9 aa, Artificial Sequence
  Description of Artificial Sequence: Synthetic peptide
EGKQAYFFP

SEQ ID NO: 18137 - protein, 9 aa, Artificial Sequence
  Description of Artificial Sequence: Synthetic peptide
ELKQAYFFP

SEQ ID NO: 18138 - protein, 9 aa, Artificial Sequence
  Description of Artificial Sequence: Synthetic peptide
EPKRLLRTV

SEQ ID NO: 18139 - protein, 9 aa, Artificial Sequence
  Description of Artificial Sequence: Synthetic peptide
EPKRLLWTV

SEQ ID NO: 18140 - protein, 9 aa, Artificial Sequence
  Description of Artificial Sequence: Synthetic peptide
EWEQAYFFP

SEQ ID NO: 18141 - protein, 9 aa, Artificial Sequence
  Description of Artificial Sequence: Synthetic peptide
EWKPAYFFP

SEQ ID NO: 18142 - protein, 9 aa, Artificial Sequence
  Description of Artificial Sequence: Synthetic peptide
EWKQACFFP

SEQ ID NO: 18143 - protein, 9 aa, Artificial Sequence
  Description of Artificial Sequence: Synthetic peptide
EWKQASFFP

SEQ ID NO: 18144 - protein, 9 aa, Artificial Sequence
  Description of Artificial Sequence: Synthetic peptide
EWKQAYFFA

SEQ ID NO: 18145 - protein, 9 aa, Artificial Sequence
  Description of Artificial Sequence: Synthetic peptide
EWKQAYFFP

SEQ ID NO: 18146 - protein, 9 aa, Artificial Sequence
  Description of Artificial Sequence: Synthetic peptide
EWKRAYFFP

SEQ ID NO: 18147 - protein, 9 aa, Artificial Sequence
  Description of Artificial Sequence: Synthetic peptide
EWRQAYFFP

SEQ ID NO: 18148 - protein, 9 aa, Artificial Sequence
  Description of Artificial Sequence: Synthetic peptide
GIRMFEWFD

SEQ ID NO: 18149 - protein, 9 aa, Artificial Sequence
  Description of Artificial Sequence: Synthetic peptide
GMAHRFRGR

SEQ ID NO: 18150 - protein, 9 aa, Artificial Sequence
  Description of Artificial Sequence: Synthetic peptide
GMAHWFRGR

SEQ ID NO: 18151 - protein, 9 aa, Artificial Sequence
  Description of Artificial Sequence: Synthetic peptide
GMTHRFRGR

SEQ ID NO: 18152 - protein, 9 aa, Artificial Sequence
  Description of Artificial Sequence: Synthetic peptide
HIESFTYCN

SEQ ID NO: 18153 - protein, 9 aa, Artificial Sequence
  Description of Artificial Sequence: Synthetic peptide
HTESFAYCN

SEQ ID NO: 18154 - protein, 9 aa, Artificial Sequence
  Description of Artificial Sequence: Synthetic peptide
HTESFTYCN

SEQ ID NO: 18155 - protein, 9 aa, Artificial Sequence
  Description of Artificial Sequence: Synthetic peptide
HTESFTYCS

SEQ ID NO: 18156 - protein, 9 aa, Artificial Sequence
  Description of Artificial Sequence: Synthetic peptide
HTESFTYCT

SEQ ID NO: 18157 - protein, 9 aa, Artificial Sequence
  Description of Artificial Sequence: Synthetic peptide
HTKSFTYCN

SEQ ID NO: 18158 - protein, 9 aa, Artificial Sequence
  Description of Artificial Sequence: Synthetic peptide
HTQFINGRG

SEQ ID NO: 18159 - protein, 9 aa, Artificial Sequence
  Description of Artificial Sequence: Synthetic peptide
HTQFTDGRG

SEQ ID NO: 18160 - protein, 9 aa, Artificial Sequence
  Description of Artificial Sequence: Synthetic peptide
HTQFTNGRG

SEQ ID NO: 18161 - protein, 9 aa, Artificial Sequence
  Description of Artificial Sequence: Synthetic peptide
MSHSRIQEM

SEQ ID NO: 18162 - protein, 9 aa, Artificial Sequence
  Description of Artificial Sequence: Synthetic peptide
NIRMFEWFD

SEQ ID NO: 18163 - protein, 9 aa, Artificial Sequence
  Description of Artificial Sequence: Synthetic peptide
NISFPNQSE

SEQ ID NO: 18164 - protein, 9 aa, Artificial Sequence
  Description of Artificial Sequence: Synthetic peptide
NTESFTYCN

SEQ ID NO: 18165 - protein, 9 aa, Artificial Sequence
  Description of Artificial Sequence: Synthetic peptide
QLDARWYRC

SEQ ID NO: 18166 - protein, 9 aa, Artificial Sequence
  Description of Artificial Sequence: Synthetic peptide
QLNARWYRC

SEQ ID NO: 18167 - protein, 9 aa, Artificial Sequence
  Description of Artificial Sequence: Synthetic peptide
QLNARWYRW

SEQ ID NO: 18168 - protein, 9 aa, Artificial Sequence
  Description of Artificial Sequence: Synthetic peptide
QLNAWWYRC

SEQ ID NO: 18169 - protein, 9 aa, Artificial Sequence
  Description of Artificial Sequence: Synthetic peptide
QLSARWYRC

SEQ ID NO: 18170 - protein, 9 aa, Artificial Sequence
  Description of Artificial Sequence: Synthetic peptide
RLDYRHYSK

SEQ ID NO: 18171 - protein, 9 aa, Artificial Sequence
  Description of Artificial Sequence: Synthetic peptide
RLNYRHCSK

SEQ ID NO: 18172 - protein, 9 aa, Artificial Sequence
  Description of Artificial Sequence: Synthetic peptide
RLNYRHYSK

SEQ ID NO: 18173 - protein, 9 aa, Artificial Sequence
  Description of Artificial Sequence: Synthetic peptide
RLNYRHYSR

SEQ ID NO: 18174 - protein, 9 aa, Artificial Sequence
  Description of Artificial Sequence: Synthetic peptide
RLNYRHYST

SEQ ID NO: 18175 - protein, 9 aa, Artificial Sequence
  Description of Artificial Sequence: Synthetic peptide
RLNYRPYSK

SEQ ID NO: 18176 - protein, 9 aa, Artificial Sequence
  Description of Artificial Sequence: Synthetic peptide
RLNYWHYSK

SEQ ID NO: 18177 - protein, 9 aa, Artificial Sequence
  Description of Artificial Sequence: Synthetic peptide
SKNLCTMAG

SEQ ID NO: 18178 - protein, 9 aa, Artificial Sequence
  Description of Artificial Sequence: Synthetic peptide
SKNLYTMAC

SEQ ID NO: 18179 - protein, 9 aa, Artificial Sequence
  Description of Artificial Sequence: Synthetic peptide
SKNLYTMAD

SEQ ID NO: 18180 - protein, 9 aa, Artificial Sequence
  Description of Artificial Sequence: Synthetic peptide
SKNLYTMAG

SEQ ID NO: 18181 - protein, 9 aa, Artificial Sequence
  Description of Artificial Sequence: Synthetic peptide
SKNLYTMAV

SEQ ID NO: 18182 - protein, 9 aa, Artificial Sequence
  Description of Artificial Sequence: Synthetic peptide
SKNLYTMSG

SEQ ID NO: 18183 - protein, 9 aa, Artificial Sequence
  Description of Artificial Sequence: Synthetic peptide
SKNLYTMVG

SEQ ID NO: 18184 - protein, 9 aa, Artificial Sequence
  Description of Artificial Sequence: Synthetic peptide
SKNLYTVAG

SEQ ID NO: 18185 - protein, 9 aa, Artificial Sequence
  Description of Artificial Sequence: Synthetic peptide
TMTSTLQST

SEQ ID NO: 18186 - protein, 9 aa, Artificial Sequence
  Description of Artificial Sequence: Synthetic peptide
VWKQAYFFP

SEQ ID NO: 18187 - protein, 9 aa, Artificial Sequence
  Description of Artificial Sequence: Synthetic peptide
GTKLIWPYQ

SEQ ID NO: 18188 - protein, 9 aa, Artificial Sequence
  Description of Artificial Sequence: Synthetic peptide
CSTLAKHDE

SEQ ID NO: 18189 - protein, 9 aa, Artificial Sequence
  Description of Artificial Sequence: Synthetic peptide
DVIHTTHSG

SEQ ID NO: 18190 - protein, 9 aa, Artificial Sequence
  Description of Artificial Sequence: Synthetic peptide
DFMWYHICS

SEQ ID NO: 18191 - protein, 9 aa, Artificial Sequence
  Description of Artificial Sequence: Synthetic peptide
DVEFCMKQY

SEQ ID NO: 18192 - protein, 9 aa, Artificial Sequence
  Description of Artificial Sequence: Synthetic peptide
MMLGYMEQD

SEQ ID NO: 18193 - protein, 9 aa, Artificial Sequence
  Description of Artificial Sequence: Synthetic peptide
DFNGSNWLP

SEQ ID NO: 18194 - protein, 9 aa, Artificial Sequence
  Description of Artificial Sequence: Synthetic peptide
AGRFKFPQP

SEQ ID NO: 18195 - protein, 9 aa, Artificial Sequence
  Description of Artificial Sequence: Synthetic peptide
AMYQCPSMD

SEQ ID NO: 18196 - protein, 9 aa, Artificial Sequence
  Description of Artificial Sequence: Synthetic peptide
ANWKHWQWR

SEQ ID NO: 18197 - protein, 9 aa, Artificial Sequence
  Description of Artificial Sequence: Synthetic peptide
ATVNSDTLT

SEQ ID NO: 18198 - protein, 9 aa, Artificial Sequence
  Description of Artificial Sequence: Synthetic peptide
AVGHFEYVL

SEQ ID NO: 18199 - protein, 9 aa, Artificial Sequence
  Description of Artificial Sequence: Synthetic peptide
AVWTMLEHC

SEQ ID NO: 18200 - protein, 9 aa, Artificial Sequence
  Description of Artificial Sequence: Synthetic peptide
CQVWWENRD

SEQ ID NO: 18201 - protein, 9 aa, Artificial Sequence
  Description of Artificial Sequence: Synthetic peptide
CQYAVTKMG

SEQ ID NO: 18202 - protein, 9 aa, Artificial Sequence
  Description of Artificial Sequence: Synthetic peptide
CSGVDCTGA

SEQ ID NO: 18203 - protein, 9 aa, Artificial Sequence
  Description of Artificial Sequence: Synthetic peptide
DCSSCMKDL

SEQ ID NO: 18204 - protein, 9 aa, Artificial Sequence
  Description of Artificial Sequence: Synthetic peptide
DRKLGDAHG

SEQ ID NO: 18205 - protein, 9 aa, Artificial Sequence
  Description of Artificial Sequence: Synthetic peptide
DTARWDVMT

SEQ ID NO: 18206 - protein, 9 aa, Artificial Sequence
  Description of Artificial Sequence: Synthetic peptide
DVVNCTVHT

SEQ ID NO: 18207 - protein, 9 aa, Artificial Sequence
  Description of Artificial Sequence: Synthetic peptide
EICSRGRTI

SEQ ID NO: 18208 - protein, 9 aa, Artificial Sequence
  Description of Artificial Sequence: Synthetic peptide
ELGHCLLYE

SEQ ID NO: 18209 - protein, 9 aa, Artificial Sequence
  Description of Artificial Sequence: Synthetic peptide
ELQSFMQYG

SEQ ID NO: 18210 - protein, 9 aa, Artificial Sequence
  Description of Artificial Sequence: Synthetic peptide
ERFKTFCEE

SEQ ID NO: 18211 - protein, 9 aa, Artificial Sequence
  Description of Artificial Sequence: Synthetic peptide
FASSHWYQG

SEQ ID NO: 18212 - protein, 9 aa, Artificial Sequence
  Description of Artificial Sequence: Synthetic peptide
FYLWDTRET

SEQ ID NO: 18213 - protein, 9 aa, Artificial Sequence
  Description of Artificial Sequence: Synthetic peptide
GEANMAPSR

SEQ ID NO: 18214 - protein, 9 aa, Artificial Sequence
  Description of Artificial Sequence: Synthetic peptide
GMSEQIAIT

SEQ ID NO: 18215 - protein, 9 aa, Artificial Sequence
  Description of Artificial Sequence: Synthetic peptide
GWSTDWTET

SEQ ID NO: 18216 - protein, 9 aa, Artificial Sequence
  Description of Artificial Sequence: Synthetic peptide
IASKFNICC

SEQ ID NO: 18217 - protein, 9 aa, Artificial Sequence
  Description of Artificial Sequence: Synthetic peptide
IFVYCEKMP

SEQ ID NO: 18218 - protein, 9 aa, Artificial Sequence
  Description of Artificial Sequence: Synthetic peptide
ITSSPNHIF

SEQ ID NO: 18219 - protein, 9 aa, Artificial Sequence
  Description of Artificial Sequence: Synthetic peptide
IVDTSARYQ

SEQ ID NO: 18220 - protein, 9 aa, Artificial Sequence
  Description of Artificial Sequence: Synthetic peptide
KANWVESME

SEQ ID NO: 18221 - protein, 9 aa, Artificial Sequence
  Description of Artificial Sequence: Synthetic peptide
KTGWGGITG

SEQ ID NO: 18222 - protein, 9 aa, Artificial Sequence
  Description of Artificial Sequence: Synthetic peptide
KWKVITTCY

SEQ ID NO: 18223 - protein, 9 aa, Artificial Sequence
  Description of Artificial Sequence: Synthetic peptide
LLCTCGWCE

SEQ ID NO: 18224 - protein, 9 aa, Artificial Sequence
  Description of Artificial Sequence: Synthetic peptide
LSYENDAFQ

SEQ ID NO: 18225 - protein, 9 aa, Artificial Sequence
  Description of Artificial Sequence: Synthetic peptide
MCSHNLPKS

SEQ ID NO: 18226 - protein, 9 aa, Artificial Sequence
  Description of Artificial Sequence: Synthetic peptide
MHTMTNAMK

SEQ ID NO: 18227 - protein, 9 aa, Artificial Sequence
  Description of Artificial Sequence: Synthetic peptide
MNTHEQWGG

SEQ ID NO: 18228 - protein, 9 aa, Artificial Sequence
  Description of Artificial Sequence: Synthetic peptide
MSLMPHGWH

SEQ ID NO: 18229 - protein, 9 aa, Artificial Sequence
  Description of Artificial Sequence: Synthetic peptide
MTDLMYIQP

SEQ ID NO: 18230 - protein, 9 aa, Artificial Sequence
  Description of Artificial Sequence: Synthetic peptide
MVECLYYHG

SEQ ID NO: 18231 - protein, 9 aa, Artificial Sequence
  Description of Artificial Sequence: Synthetic peptide
MVFLQCQQN

SEQ ID NO: 18232 - protein, 9 aa, Artificial Sequence
  Description of Artificial Sequence: Synthetic peptide
MWNTSNLFH

SEQ ID NO: 18233 - protein, 9 aa, Artificial Sequence
  Description of Artificial Sequence: Synthetic peptide
NVNLQMMMT

SEQ ID NO: 18234 - protein, 9 aa, Artificial Sequence
  Description of Artificial Sequence: Synthetic peptide
NYNGYSDAQ

SEQ ID NO: 18235 - protein, 9 aa, Artificial Sequence
  Description of Artificial Sequence: Synthetic peptide
PSTKPPKCK

SEQ ID NO: 18236 - protein, 9 aa, Artificial Sequence
  Description of Artificial Sequence: Synthetic peptide
QDWSDFNDC

SEQ ID NO: 18237 - protein, 9 aa, Artificial Sequence
  Description of Artificial Sequence: Synthetic peptide
QNVQLENSQ

SEQ ID NO: 18238 - protein, 9 aa, Artificial Sequence
  Description of Artificial Sequence: Synthetic peptide
SKTKKRFAW

SEQ ID NO: 18239 - protein, 9 aa, Artificial Sequence
  Description of Artificial Sequence: Synthetic peptide
SRYDTNCWW

SEQ ID NO: 18240 - protein, 9 aa, Artificial Sequence
  Description of Artificial Sequence: Synthetic peptide
STHNRLDWQ

SEQ ID NO: 18241 - protein, 9 aa, Artificial Sequence
  Description of Artificial Sequence: Synthetic peptide
TGDEIVGTY

SEQ ID NO: 18242 - protein, 9 aa, Artificial Sequence
  Description of Artificial Sequence: Synthetic peptide
TSIPPRHNP

SEQ ID NO: 18243 - protein, 9 aa, Artificial Sequence
  Description of Artificial Sequence: Synthetic peptide
VAAYNFPTC

SEQ ID NO: 18244 - protein, 9 aa, Artificial Sequence
  Description of Artificial Sequence: Synthetic peptide
VMEGVRNME

SEQ ID NO: 18245 - protein, 9 aa, Artificial Sequence
  Description of Artificial Sequence: Synthetic peptide
WTHMYENID

SEQ ID NO: 18246 - protein, 9 aa, Artificial Sequence
  Description of Artificial Sequence: Synthetic peptide
WYNQGAEYH

SEQ ID NO: 18247 - protein, 9 aa, Artificial Sequence
  Description of Artificial Sequence: Synthetic peptide
WYWRLDCLW

SEQ ID NO: 18248 - protein, 9 aa, Artificial Sequence
  Description of Artificial Sequence: Synthetic peptide
YATIPGVFP

SEQ ID NO: 18249 - protein, 9 aa, Artificial Sequence
  Description of Artificial Sequence: Synthetic peptide
YCHRSDCDR

SEQ ID NO: 18250 - protein, 9 aa, Artificial Sequence
  Description of Artificial Sequence: Synthetic peptide
YMDEMITEL

SEQ ID NO: 18251 - protein, 9 aa, Artificial Sequence
  Description of Artificial Sequence: Synthetic peptide
AAMPTHHTM

SEQ ID NO: 18252 - protein, 9 aa, Artificial Sequence
  Description of Artificial Sequence: Synthetic peptide
AANIMISQA

SEQ ID NO: 18253 - protein, 9 aa, Artificial Sequence
  Description of Artificial Sequence: Synthetic peptide
AANVTQDTS

SEQ ID NO: 18254 - protein, 9 aa, Artificial Sequence
  Description of Artificial Sequence: Synthetic peptide
AAPKYSAHQ

SEQ ID NO: 18255 - protein, 9 aa, Artificial Sequence
  Description of Artificial Sequence: Synthetic peptide
AAQPHFVVA

SEQ ID NO: 18256 - protein, 9 aa, Artificial Sequence
  Description of Artificial Sequence: Synthetic peptide
AASDWCRYS

SEQ ID NO: 18257 - protein, 9 aa, Artificial Sequence
  Description of Artificial Sequence: Synthetic peptide
AASWQEFFP

SEQ ID NO: 18258 - protein, 9 aa, Artificial Sequence
  Description of Artificial Sequence: Synthetic peptide
AAYFVGENC

SEQ ID NO: 18259 - protein, 9 aa, Artificial Sequence
  Description of Artificial Sequence: Synthetic peptide
ACEWKQHWA

SEQ ID NO: 18260 - protein, 9 aa, Artificial Sequence
  Description of Artificial Sequence: Synthetic peptide
ACGKMHGPN

SEQ ID NO: 18261 - protein, 9 aa, Artificial Sequence
  Description of Artificial Sequence: Synthetic peptide
ACGVVLKAA

SEQ ID NO: 18262 - protein, 9 aa, Artificial Sequence
  Description of Artificial Sequence: Synthetic peptide
ACKQFKKHA

SEQ ID NO: 18263 - protein, 9 aa, Artificial Sequence
  Description of Artificial Sequence: Synthetic peptide
ACLQQDIAM

SEQ ID NO: 18264 - protein, 9 aa, Artificial Sequence
  Description of Artificial Sequence: Synthetic peptide
ADAHQRTVS

SEQ ID NO: 18265 - protein, 9 aa, Artificial Sequence
  Description of Artificial Sequence: Synthetic peptide
ADGQMLQAH

SEQ ID NO: 18266 - protein, 9 aa, Artificial Sequence
  Description of Artificial Sequence: Synthetic peptide
ADRQSQMHL

SEQ ID NO: 18267 - protein, 9 aa, Artificial Sequence
  Description of Artificial Sequence: Synthetic peptide
AFLELAMYP

SEQ ID NO: 18268 - protein, 9 aa, Artificial Sequence
  Description of Artificial Sequence: Synthetic peptide
AFTEGQLNE

SEQ ID NO: 18269 - protein, 9 aa, Artificial Sequence
  Description of Artificial Sequence: Synthetic peptide
AGNRWWWSI

SEQ ID NO: 18270 - protein, 9 aa, Artificial Sequence
  Description of Artificial Sequence: Synthetic peptide
AHASWKCWF

SEQ ID NO: 18271 - protein, 9 aa, Artificial Sequence
  Description of Artificial Sequence: Synthetic peptide
AIGTLAPNL

SEQ ID NO: 18272 - protein, 9 aa, Artificial Sequence
  Description of Artificial Sequence: Synthetic peptide
AILMQQGAG

SEQ ID NO: 18273 - protein, 9 aa, Artificial Sequence
  Description of Artificial Sequence: Synthetic peptide
AIMHPPYCE

SEQ ID NO: 18274 - protein, 9 aa, Artificial Sequence
  Description of Artificial Sequence: Synthetic peptide
AIQSGNWSS

SEQ ID NO: 18275 - protein, 9 aa, Artificial Sequence
  Description of Artificial Sequence: Synthetic peptide
AKLEQMDSA

SEQ ID NO: 18276 - protein, 9 aa, Artificial Sequence
  Description of Artificial Sequence: Synthetic peptide
AKTHCHCWW

SEQ ID NO: 18277 - protein, 9 aa, Artificial Sequence
  Description of Artificial Sequence: Synthetic peptide
ALHHCIKKA

SEQ ID NO: 18278 - protein, 9 aa, Artificial Sequence
  Description of Artificial Sequence: Synthetic peptide
ALIQFMMDQ

SEQ ID NO: 18279 - protein, 9 aa, Artificial Sequence
  Description of Artificial Sequence: Synthetic peptide
AMAYSWTMA

SEQ ID NO: 18280 - protein, 9 aa, Artificial Sequence
  Description of Artificial Sequence: Synthetic peptide
AMCFNKCWQ

SEQ ID NO: 18281 - protein, 9 aa, Artificial Sequence
  Description of Artificial Sequence: Synthetic peptide
AMSQQHDHQ

SEQ ID NO: 18282 - protein, 9 aa, Artificial Sequence
  Description of Artificial Sequence: Synthetic peptide
AMSTLGECP

SEQ ID NO: 18283 - protein, 9 aa, Artificial Sequence
  Description of Artificial Sequence: Synthetic peptide
APQFYVSYD

SEQ ID NO: 18284 - protein, 9 aa, Artificial Sequence
  Description of Artificial Sequence: Synthetic peptide
APTKVHCQG

SEQ ID NO: 18285 - protein, 9 aa, Artificial Sequence
  Description of Artificial Sequence: Synthetic peptide
AQNPFDIDA

SEQ ID NO: 18286 - protein, 9 aa, Artificial Sequence
  Description of Artificial Sequence: Synthetic peptide
AQNREGAKL

SEQ ID NO: 18287 - protein, 9 aa, Artificial Sequence
  Description of Artificial Sequence: Synthetic peptide
AQTFCSFDR

SEQ ID NO: 18288 - protein, 9 aa, Artificial Sequence
  Description of Artificial Sequence: Synthetic peptide
ARSGINGHE

SEQ ID NO: 18289 - protein, 9 aa, Artificial Sequence
  Description of Artificial Sequence: Synthetic peptide
ASGCLQQIS

SEQ ID NO: 18290 - protein, 9 aa, Artificial Sequence
  Description of Artificial Sequence: Synthetic peptide
ASIDVASWG

SEQ ID NO: 18291 - protein, 9 aa, Artificial Sequence
  Description of Artificial Sequence: Synthetic peptide
ASTPWCWFE

SEQ ID NO: 18292 - protein, 9 aa, Artificial Sequence
  Description of Artificial Sequence: Synthetic peptide
ATDNSDTLT

SEQ ID NO: 18293 - protein, 9 aa, Artificial Sequence
  Description of Artificial Sequence: Synthetic peptide
ATGIDPLGA

SEQ ID NO: 18294 - protein, 9 aa, Artificial Sequence
  Description of Artificial Sequence: Synthetic peptide
ATMIKFECT

SEQ ID NO: 18295 - protein, 9 aa, Artificial Sequence
  Description of Artificial Sequence: Synthetic peptide
ATYISAHDA

SEQ ID NO: 18296 - protein, 9 aa, Artificial Sequence
  Description of Artificial Sequence: Synthetic peptide
AVEHIERSF

SEQ ID NO: 18297 - protein, 9 aa, Artificial Sequence
  Description of Artificial Sequence: Synthetic peptide
AVISPERYH

SEQ ID NO: 18298 - protein, 9 aa, Artificial Sequence
  Description of Artificial Sequence: Synthetic peptide
AVNDWNNDW

SEQ ID NO: 18299 - protein, 9 aa, Artificial Sequence
  Description of Artificial Sequence: Synthetic peptide
AVTRPSNKM

SEQ ID NO: 18300 - protein, 9 aa, Artificial Sequence
  Description of Artificial Sequence: Synthetic peptide
AWDPMTSTF

SEQ ID NO: 18301 - protein, 9 aa, Artificial Sequence
  Description of Artificial Sequence: Synthetic peptide
AWGGFNAEM

SEQ ID NO: 18302 - protein, 9 aa, Artificial Sequence
  Description of Artificial Sequence: Synthetic peptide
AWILFWWFV

SEQ ID NO: 18303 - protein, 9 aa, Artificial Sequence
  Description of Artificial Sequence: Synthetic peptide
AYCSEERSP

SEQ ID NO: 18304 - protein, 9 aa, Artificial Sequence
  Description of Artificial Sequence: Synthetic peptide
AYENVQHPN

SEQ ID NO: 18305 - protein, 9 aa, Artificial Sequence
  Description of Artificial Sequence: Synthetic peptide
AYEPFASSF

SEQ ID NO: 18306 - protein, 9 aa, Artificial Sequence
  Description of Artificial Sequence: Synthetic peptide
AYNRMMLTC

SEQ ID NO: 18307 - protein, 9 aa, Artificial Sequence
  Description of Artificial Sequence: Synthetic peptide
CAFPVNITA

SEQ ID NO: 18308 - protein, 9 aa, Artificial Sequence
  Description of Artificial Sequence: Synthetic peptide
CAGVTSHGE

SEQ ID NO: 18309 - protein, 9 aa, Artificial Sequence
  Description of Artificial Sequence: Synthetic peptide
CAICNAQCP

SEQ ID NO: 18310 - protein, 9 aa, Artificial Sequence
  Description of Artificial Sequence: Synthetic peptide
CAQSVHFHK

SEQ ID NO: 18311 - protein, 9 aa, Artificial Sequence
  Description of Artificial Sequence: Synthetic peptide
CAYEVYDGK

SEQ ID NO: 18312 - protein, 9 aa, Artificial Sequence
  Description of Artificial Sequence: Synthetic peptide
CFCKNGTYL

SEQ ID NO: 18313 - protein, 9 aa, Artificial Sequence
  Description of Artificial Sequence: Synthetic peptide
CGEWLNECS

SEQ ID NO: 18314 - protein, 9 aa, Artificial Sequence
  Description of Artificial Sequence: Synthetic peptide
CHHFNMPSQ

SEQ ID NO: 18315 - protein, 9 aa, Artificial Sequence
  Description of Artificial Sequence: Synthetic peptide
CILHVTDNG

SEQ ID NO: 18316 - protein, 9 aa, Artificial Sequence
  Description of Artificial Sequence: Synthetic peptide
CKSNWHIFK

SEQ ID NO: 18317 - protein, 9 aa, Artificial Sequence
  Description of Artificial Sequence: Synthetic peptide
CLMSNITHI

SEQ ID NO: 18318 - protein, 9 aa, Artificial Sequence
  Description of Artificial Sequence: Synthetic peptide
CPFQHLGPK

SEQ ID NO: 18319 - protein, 9 aa, Artificial Sequence
  Description of Artificial Sequence: Synthetic peptide
CQQYWNAAW

SEQ ID NO: 18320 - protein, 9 aa, Artificial Sequence
  Description of Artificial Sequence: Synthetic peptide
CSAVYLANH

SEQ ID NO: 18321 - protein, 9 aa, Artificial Sequence
  Description of Artificial Sequence: Synthetic peptide
CVDEYYNSS

SEQ ID NO: 18322 - protein, 9 aa, Artificial Sequence
  Description of Artificial Sequence: Synthetic peptide
CVIDWKAMS

SEQ ID NO: 18323 - protein, 9 aa, Artificial Sequence
  Description of Artificial Sequence: Synthetic peptide
CVTKTMWTG

SEQ ID NO: 18324 - protein, 9 aa, Artificial Sequence
  Description of Artificial Sequence: Synthetic peptide
CWRSGSMNL

SEQ ID NO: 18325 - protein, 9 aa, Artificial Sequence
  Description of Artificial Sequence: Synthetic peptide
CWSITNQDH

SEQ ID NO: 18326 - protein, 9 aa, Artificial Sequence
  Description of Artificial Sequence: Synthetic peptide
CYASMSASY

SEQ ID NO: 18327 - protein, 9 aa, Artificial Sequence
  Description of Artificial Sequence: Synthetic peptide
CYDWYEGAE

SEQ ID NO: 18328 - protein, 9 aa, Artificial Sequence
  Description of Artificial Sequence: Synthetic peptide
CYSENDHQV

SEQ ID NO: 18329 - protein, 9 aa, Artificial Sequence
  Description of Artificial Sequence: Synthetic peptide
DAAHMGYEP

SEQ ID NO: 18330 - protein, 9 aa, Artificial Sequence
  Description of Artificial Sequence: Synthetic peptide
DAGHSFQIF

SEQ ID NO: 18331 - protein, 9 aa, Artificial Sequence
  Description of Artificial Sequence: Synthetic peptide
DAGPIWYSS

SEQ ID NO: 18332 - protein, 9 aa, Artificial Sequence
  Description of Artificial Sequence: Synthetic peptide
DANQRATNS

SEQ ID NO: 18333 - protein, 9 aa, Artificial Sequence
  Description of Artificial Sequence: Synthetic peptide
DANSLNSWP

SEQ ID NO: 18334 - protein, 9 aa, Artificial Sequence
  Description of Artificial Sequence: Synthetic peptide
DARSMAPVE

SEQ ID NO: 18335 - protein, 9 aa, Artificial Sequence
  Description of Artificial Sequence: Synthetic peptide
DAYSVHHYV

SEQ ID NO: 18336 - protein, 9 aa, Artificial Sequence
  Description of Artificial Sequence: Synthetic peptide
DCNSLINVA

SEQ ID NO: 18337 - protein, 9 aa, Artificial Sequence
  Description of Artificial Sequence: Synthetic peptide
DCRHTILYV

SEQ ID NO: 18338 - protein, 9 aa, Artificial Sequence
  Description of Artificial Sequence: Synthetic peptide
DDMLMQFQH

SEQ ID NO: 18339 - protein, 9 aa, Artificial Sequence
  Description of Artificial Sequence: Synthetic peptide
DFGCMDYGP

SEQ ID NO: 18340 - protein, 9 aa, Artificial Sequence
  Description of Artificial Sequence: Synthetic peptide
DFHSYLKQQ

SEQ ID NO: 18341 - protein, 9 aa, Artificial Sequence
  Description of Artificial Sequence: Synthetic peptide
DGFQQGEGI

SEQ ID NO: 18342 - protein, 9 aa, Artificial Sequence
  Description of Artificial Sequence: Synthetic peptide
DINRSGNQC

SEQ ID NO: 18343 - protein, 9 aa, Artificial Sequence
  Description of Artificial Sequence: Synthetic peptide
DKWCCEMTA

SEQ ID NO: 18344 - protein, 9 aa, Artificial Sequence
  Description of Artificial Sequence: Synthetic peptide
DLEYIWHWG

SEQ ID NO: 18345 - protein, 9 aa, Artificial Sequence
  Description of Artificial Sequence: Synthetic peptide
DLIGSGPWF

SEQ ID NO: 18346 - protein, 9 aa, Artificial Sequence
  Description of Artificial Sequence: Synthetic peptide
DMHECIGCS

SEQ ID NO: 18347 - protein, 9 aa, Artificial Sequence
  Description of Artificial Sequence: Synthetic peptide
DMHRQHLIE

SEQ ID NO: 18348 - protein, 9 aa, Artificial Sequence
  Description of Artificial Sequence: Synthetic peptide
DMLKFHFNY

SEQ ID NO: 18349 - protein, 9 aa, Artificial Sequence
  Description of Artificial Sequence: Synthetic peptide
DMMDNQIAS

SEQ ID NO: 18350 - protein, 9 aa, Artificial Sequence
  Description of Artificial Sequence: Synthetic peptide
DNIRYPCHS

SEQ ID NO: 18351 - protein, 9 aa, Artificial Sequence
  Description of Artificial Sequence: Synthetic peptide
DNQFFNGDY

SEQ ID NO: 18352 - protein, 9 aa, Artificial Sequence
  Description of Artificial Sequence: Synthetic peptide
DPVWLPFMF

SEQ ID NO: 18353 - protein, 9 aa, Artificial Sequence
  Description of Artificial Sequence: Synthetic peptide
DQFARHKKY

SEQ ID NO: 18354 - protein, 9 aa, Artificial Sequence
  Description of Artificial Sequence: Synthetic peptide
DRPKKNLCC

SEQ ID NO: 18355 - protein, 9 aa, Artificial Sequence
  Description of Artificial Sequence: Synthetic peptide
DRPSTGWYL

SEQ ID NO: 18356 - protein, 9 aa, Artificial Sequence
  Description of Artificial Sequence: Synthetic peptide
DSDIVNDYC

SEQ ID NO: 18357 - protein, 9 aa, Artificial Sequence
  Description of Artificial Sequence: Synthetic peptide
DTKVKKEFG

SEQ ID NO: 18358 - protein, 9 aa, Artificial Sequence
  Description of Artificial Sequence: Synthetic peptide
DTMLRLCYP

SEQ ID NO: 18359 - protein, 9 aa, Artificial Sequence
  Description of Artificial Sequence: Synthetic peptide
DTNWMQWNH

SEQ ID NO: 18360 - protein, 9 aa, Artificial Sequence
  Description of Artificial Sequence: Synthetic peptide
DTSLNDGWM

SEQ ID NO: 18361 - protein, 9 aa, Artificial Sequence
  Description of Artificial Sequence: Synthetic peptide
DVCCQFSAY

SEQ ID NO: 18362 - protein, 9 aa, Artificial Sequence
  Description of Artificial Sequence: Synthetic peptide
DVLVATQVQ

SEQ ID NO: 18363 - protein, 9 aa, Artificial Sequence
  Description of Artificial Sequence: Synthetic peptide
DYQRKTRYS

SEQ ID NO: 18364 - protein, 9 aa, Artificial Sequence
  Description of Artificial Sequence: Synthetic peptide
EACKCSVVP

SEQ ID NO: 18365 - protein, 9 aa, Artificial Sequence
  Description of Artificial Sequence: Synthetic peptide
EAFYLQKPG

SEQ ID NO: 18366 - protein, 9 aa, Artificial Sequence
  Description of Artificial Sequence: Synthetic peptide
EAIQDAHQM

SEQ ID NO: 18367 - protein, 9 aa, Artificial Sequence
  Description of Artificial Sequence: Synthetic peptide
EANKGASQD

SEQ ID NO: 18368 - protein, 9 aa, Artificial Sequence
  Description of Artificial Sequence: Synthetic peptide
ECCNMSPPG

SEQ ID NO: 18369 - protein, 9 aa, Artificial Sequence
  Description of Artificial Sequence: Synthetic peptide
ECGRFAPME

SEQ ID NO: 18370 - protein, 9 aa, Artificial Sequence
  Description of Artificial Sequence: Synthetic peptide
ECHKCEVCV

SEQ ID NO: 18371 - protein, 9 aa, Artificial Sequence
  Description of Artificial Sequence: Synthetic peptide
EDRPMAMME

SEQ ID NO: 18372 - protein, 9 aa, Artificial Sequence
  Description of Artificial Sequence: Synthetic peptide
EEDKYNVVQ

SEQ ID NO: 18373 - protein, 9 aa, Artificial Sequence
  Description of Artificial Sequence: Synthetic peptide
EEKKLTVIM

SEQ ID NO: 18374 - protein, 9 aa, Artificial Sequence
  Description of Artificial Sequence: Synthetic peptide
EFGTYDNIG

SEQ ID NO: 18375 - protein, 9 aa, Artificial Sequence
  Description of Artificial Sequence: Synthetic peptide
EFRYGPQYG

SEQ ID NO: 18376 - protein, 9 aa, Artificial Sequence
  Description of Artificial Sequence: Synthetic peptide
EFVIAEETS

SEQ ID NO: 18377 - protein, 9 aa, Artificial Sequence
  Description of Artificial Sequence: Synthetic peptide
EGANYHWDH

SEQ ID NO: 18378 - protein, 9 aa, Artificial Sequence
  Description of Artificial Sequence: Synthetic peptide
EGAQQESVG

SEQ ID NO: 18379 - protein, 9 aa, Artificial Sequence
  Description of Artificial Sequence: Synthetic peptide
EGARYTKFH

SEQ ID NO: 18380 - protein, 9 aa, Artificial Sequence
  Description of Artificial Sequence: Synthetic peptide
EGGMGPQQS

SEQ ID NO: 18381 - protein, 9 aa, Artificial Sequence
  Description of Artificial Sequence: Synthetic peptide
EGKWMSVHH

SEQ ID NO: 18382 - protein, 9 aa, Artificial Sequence
  Description of Artificial Sequence: Synthetic peptide
EGRPQYTDP

SEQ ID NO: 18383 - protein, 9 aa, Artificial Sequence
  Description of Artificial Sequence: Synthetic peptide
EGSFVLSTE

SEQ ID NO: 18384 - protein, 9 aa, Artificial Sequence
  Description of Artificial Sequence: Synthetic peptide
EHAPMVHAL

SEQ ID NO: 18385 - protein, 9 aa, Artificial Sequence
  Description of Artificial Sequence: Synthetic peptide
EHQRMKFRN

SEQ ID NO: 18386 - protein, 9 aa, Artificial Sequence
  Description of Artificial Sequence: Synthetic peptide
EHVQKVNYP

SEQ ID NO: 18387 - protein, 9 aa, Artificial Sequence
  Description of Artificial Sequence: Synthetic peptide
EHYCVTAWY

SEQ ID NO: 18388 - protein, 9 aa, Artificial Sequence
  Description of Artificial Sequence: Synthetic peptide
EIDLWRTPT

SEQ ID NO: 18389 - protein, 9 aa, Artificial Sequence
  Description of Artificial Sequence: Synthetic peptide
EIHDEASCY

SEQ ID NO: 18390 - protein, 9 aa, Artificial Sequence
  Description of Artificial Sequence: Synthetic peptide
EIHKEMGFG

SEQ ID NO: 18391 - protein, 9 aa, Artificial Sequence
  Description of Artificial Sequence: Synthetic peptide
EIMFYMRKQ

SEQ ID NO: 18392 - protein, 9 aa, Artificial Sequence
  Description of Artificial Sequence: Synthetic peptide
EINIKKKQM

SEQ ID NO: 18393 - protein, 9 aa, Artificial Sequence
  Description of Artificial Sequence: Synthetic peptide
EINKMAALG

SEQ ID NO: 18394 - protein, 9 aa, Artificial Sequence
  Description of Artificial Sequence: Synthetic peptide
EIRTVESAG

SEQ ID NO: 18395 - protein, 9 aa, Artificial Sequence
  Description of Artificial Sequence: Synthetic peptide
EISWIPREN

SEQ ID NO: 18396 - protein, 9 aa, Artificial Sequence
  Description of Artificial Sequence: Synthetic peptide
EKHSVENYG

SEQ ID NO: 18397 - protein, 9 aa, Artificial Sequence
  Description of Artificial Sequence: Synthetic peptide
EKIDWQSCV

SEQ ID NO: 18398 - protein, 9 aa, Artificial Sequence
  Description of Artificial Sequence: Synthetic peptide
EMAICAEHS

SEQ ID NO: 18399 - protein, 9 aa, Artificial Sequence
  Description of Artificial Sequence: Synthetic peptide
EMGRLPNHN

SEQ ID NO: 18400 - protein, 9 aa, Artificial Sequence
  Description of Artificial Sequence: Synthetic peptide
EMVDQIVDF

SEQ ID NO: 18401 - protein, 9 aa, Artificial Sequence
  Description of Artificial Sequence: Synthetic peptide
EMYPEAAAK

SEQ ID NO: 18402 - protein, 9 aa, Artificial Sequence
  Description of Artificial Sequence: Synthetic peptide
ENYPPSQCA

SEQ ID NO: 18403 - protein, 9 aa, Artificial Sequence
  Description of Artificial Sequence: Synthetic peptide
EPNHPESLA

SEQ ID NO: 18404 - protein, 9 aa, Artificial Sequence
  Description of Artificial Sequence: Synthetic peptide
EQKVGNQLS

SEQ ID NO: 18405 - protein, 9 aa, Artificial Sequence
  Description of Artificial Sequence: Synthetic peptide
ERCMSEWSF

SEQ ID NO: 18406 - protein, 9 aa, Artificial Sequence
  Description of Artificial Sequence: Synthetic peptide
ERWSGTRRG

SEQ ID NO: 18407 - protein, 9 aa, Artificial Sequence
  Description of Artificial Sequence: Synthetic peptide
ERYHFMTHQ

SEQ ID NO: 18408 - protein, 9 aa, Artificial Sequence
  Description of Artificial Sequence: Synthetic peptide
ESKYNRKYN

SEQ ID NO: 18409 - protein, 9 aa, Artificial Sequence
  Description of Artificial Sequence: Synthetic peptide
ESRDAVCPD

SEQ ID NO: 18410 - protein, 9 aa, Artificial Sequence
  Description of Artificial Sequence: Synthetic peptide
ETCHTYAQH

SEQ ID NO: 18411 - protein, 9 aa, Artificial Sequence
  Description of Artificial Sequence: Synthetic peptide
ETHGDRKSR

SEQ ID NO: 18412 - protein, 9 aa, Artificial Sequence
  Description of Artificial Sequence: Synthetic peptide
ETICCDSAH

SEQ ID NO: 18413 - protein, 9 aa, Artificial Sequence
  Description of Artificial Sequence: Synthetic peptide
ETMGVHYCE

SEQ ID NO: 18414 - protein, 9 aa, Artificial Sequence
  Description of Artificial Sequence: Synthetic peptide
ETRMQRRSQ

SEQ ID NO: 18415 - protein, 9 aa, Artificial Sequence
  Description of Artificial Sequence: Synthetic peptide
ETWPLIDDA

SEQ ID NO: 18416 - protein, 9 aa, Artificial Sequence
  Description of Artificial Sequence: Synthetic peptide
EVADCLKHF

SEQ ID NO: 18417 - protein, 9 aa, Artificial Sequence
  Description of Artificial Sequence: Synthetic peptide
EVCNEMPEP

SEQ ID NO: 18418 - protein, 9 aa, Artificial Sequence
  Description of Artificial Sequence: Synthetic peptide
EVELDERLS

SEQ ID NO: 18419 - protein, 9 aa, Artificial Sequence
  Description of Artificial Sequence: Synthetic peptide
EVELYGCIC

SEQ ID NO: 18420 - protein, 9 aa, Artificial Sequence
  Description of Artificial Sequence: Synthetic peptide
EVESQEHLH

SEQ ID NO: 18421 - protein, 9 aa, Artificial Sequence
  Description of Artificial Sequence: Synthetic peptide
EVTRETDYM

SEQ ID NO: 18422 - protein, 9 aa, Artificial Sequence
  Description of Artificial Sequence: Synthetic peptide
EYCMLEDYQ

SEQ ID NO: 18423 - protein, 9 aa, Artificial Sequence
  Description of Artificial Sequence: Synthetic peptide
EYNRRYLLE

SEQ ID NO: 18424 - protein, 9 aa, Artificial Sequence
  Description of Artificial Sequence: Synthetic peptide
EYQNYQLVT

SEQ ID NO: 18425 - protein, 9 aa, Artificial Sequence
  Description of Artificial Sequence: Synthetic peptide
EYTRTQWAH

SEQ ID NO: 18426 - protein, 9 aa, Artificial Sequence
  Description of Artificial Sequence: Synthetic peptide
FHHLNTPEM

SEQ ID NO: 18427 - protein, 9 aa, Artificial Sequence
  Description of Artificial Sequence: Synthetic peptide
FIFEEQRWA

SEQ ID NO: 18428 - protein, 9 aa, Artificial Sequence
  Description of Artificial Sequence: Synthetic peptide
FKETWLFPT

SEQ ID NO: 18429 - protein, 9 aa, Artificial Sequence
  Description of Artificial Sequence: Synthetic peptide
FLCCPKECP

SEQ ID NO: 18430 - protein, 9 aa, Artificial Sequence
  Description of Artificial Sequence: Synthetic peptide
FQRLEMKQH

SEQ ID NO: 18431 - protein, 9 aa, Artificial Sequence
  Description of Artificial Sequence: Synthetic peptide
FQRWEMKQH

SEQ ID NO: 18432 - protein, 9 aa, Artificial Sequence
  Description of Artificial Sequence: Synthetic peptide
FSGKYDQRG

SEQ ID NO: 18433 - protein, 9 aa, Artificial Sequence
  Description of Artificial Sequence: Synthetic peptide
FSQYPSAFA

SEQ ID NO: 18434 - protein, 9 aa, Artificial Sequence
  Description of Artificial Sequence: Synthetic peptide
FSRPFEQYH

SEQ ID NO: 18435 - protein, 9 aa, Artificial Sequence
  Description of Artificial Sequence: Synthetic peptide
FVAQMWDDH

SEQ ID NO: 18436 - protein, 9 aa, Artificial Sequence
  Description of Artificial Sequence: Synthetic peptide
FYRQLDEAG

SEQ ID NO: 18437 - protein, 9 aa, Artificial Sequence
  Description of Artificial Sequence: Synthetic peptide
GASSKSLDA

SEQ ID NO: 18438 - protein, 9 aa, Artificial Sequence
  Description of Artificial Sequence: Synthetic peptide
GDIYYKCWV

SEQ ID NO: 18439 - protein, 9 aa, Artificial Sequence
  Description of Artificial Sequence: Synthetic peptide
GDLWNNHLE

SEQ ID NO: 18440 - protein, 9 aa, Artificial Sequence
  Description of Artificial Sequence: Synthetic peptide
GFEDRGNQE

SEQ ID NO: 18441 - protein, 9 aa, Artificial Sequence
  Description of Artificial Sequence: Synthetic peptide
GFMLRMSTD

SEQ ID NO: 18442 - protein, 9 aa, Artificial Sequence
  Description of Artificial Sequence: Synthetic peptide
GFSLFMMNR

SEQ ID NO: 18443 - protein, 9 aa, Artificial Sequence
  Description of Artificial Sequence: Synthetic peptide
GGMTVLIEY

SEQ ID NO: 18444 - protein, 9 aa, Artificial Sequence
  Description of Artificial Sequence: Synthetic peptide
GHQLMFFKF

SEQ ID NO: 18445 - protein, 9 aa, Artificial Sequence
  Description of Artificial Sequence: Synthetic peptide
GIKEQRRFV

SEQ ID NO: 18446 - protein, 9 aa, Artificial Sequence
  Description of Artificial Sequence: Synthetic peptide
GIRMDLCTF

SEQ ID NO: 18447 - protein, 9 aa, Artificial Sequence
  Description of Artificial Sequence: Synthetic peptide
GITHDFMAG

SEQ ID NO: 18448 - protein, 9 aa, Artificial Sequence
  Description of Artificial Sequence: Synthetic peptide
GIVIKPHGE

SEQ ID NO: 18449 - protein, 9 aa, Artificial Sequence
  Description of Artificial Sequence: Synthetic peptide
GIYPQFTWQ

SEQ ID NO: 18450 - protein, 9 aa, Artificial Sequence
  Description of Artificial Sequence: Synthetic peptide
GKEFALSAF

SEQ ID NO: 18451 - protein, 9 aa, Artificial Sequence
  Description of Artificial Sequence: Synthetic peptide
GLATLGLSG

SEQ ID NO: 18452 - protein, 9 aa, Artificial Sequence
  Description of Artificial Sequence: Synthetic peptide
GLGMVHRMH

SEQ ID NO: 18453 - protein, 9 aa, Artificial Sequence
  Description of Artificial Sequence: Synthetic peptide
GMMWRSKWI

SEQ ID NO: 18454 - protein, 9 aa, Artificial Sequence
  Description of Artificial Sequence: Synthetic peptide
GMRCWRHRL

SEQ ID NO: 18455 - protein, 9 aa, Artificial Sequence
  Description of Artificial Sequence: Synthetic peptide
GMRYSEWHW

SEQ ID NO: 18456 - protein, 9 aa, Artificial Sequence
  Description of Artificial Sequence: Synthetic peptide
GMVDVCDCC

SEQ ID NO: 18457 - protein, 9 aa, Artificial Sequence
  Description of Artificial Sequence: Synthetic peptide
GQHTIHKNS

SEQ ID NO: 18458 - protein, 9 aa, Artificial Sequence
  Description of Artificial Sequence: Synthetic peptide
GQTVQPCST

SEQ ID NO: 18459 - protein, 9 aa, Artificial Sequence
  Description of Artificial Sequence: Synthetic peptide
GSCCLNNET

SEQ ID NO: 18460 - protein, 9 aa, Artificial Sequence
  Description of Artificial Sequence: Synthetic peptide
GSLTMPDAH

SEQ ID NO: 18461 - protein, 9 aa, Artificial Sequence
  Description of Artificial Sequence: Synthetic peptide
GSYYVNWDQ

SEQ ID NO: 18462 - protein, 9 aa, Artificial Sequence
  Description of Artificial Sequence: Synthetic peptide
GTCLQDNYN

SEQ ID NO: 18463 - protein, 9 aa, Artificial Sequence
  Description of Artificial Sequence: Synthetic peptide
GTGWEASAD

SEQ ID NO: 18464 - protein, 9 aa, Artificial Sequence
  Description of Artificial Sequence: Synthetic peptide
GTGWGASAD

SEQ ID NO: 18465 - protein, 9 aa, Artificial Sequence
  Description of Artificial Sequence: Synthetic peptide
GTLSSSIVE

SEQ ID NO: 18466 - protein, 9 aa, Artificial Sequence
  Description of Artificial Sequence: Synthetic peptide
GTNQVCLFT

SEQ ID NO: 18467 - protein, 9 aa, Artificial Sequence
  Description of Artificial Sequence: Synthetic peptide
GVDWRHQQN

SEQ ID NO: 18468 - protein, 9 aa, Artificial Sequence
  Description of Artificial Sequence: Synthetic peptide
GVISEGISA

SEQ ID NO: 18469 - protein, 9 aa, Artificial Sequence
  Description of Artificial Sequence: Synthetic peptide
GVMVIAGMG

SEQ ID NO: 18470 - protein, 9 aa, Artificial Sequence
  Description of Artificial Sequence: Synthetic peptide
GVNQYDEMI

SEQ ID NO: 18471 - protein, 9 aa, Artificial Sequence
  Description of Artificial Sequence: Synthetic peptide
GVVQMVIGD

SEQ ID NO: 18472 - protein, 9 aa, Artificial Sequence
  Description of Artificial Sequence: Synthetic peptide
GWMDLMSAR

SEQ ID NO: 18473 - protein, 9 aa, Artificial Sequence
  Description of Artificial Sequence: Synthetic peptide
GYDHHGTEH

SEQ ID NO: 18474 - protein, 9 aa, Artificial Sequence
  Description of Artificial Sequence: Synthetic peptide
HCMEYIHHA

SEQ ID NO: 18475 - protein, 9 aa, Artificial Sequence
  Description of Artificial Sequence: Synthetic peptide
HDCEFLKDE

SEQ ID NO: 18476 - protein, 9 aa, Artificial Sequence
  Description of Artificial Sequence: Synthetic peptide
HEVERRRAK

SEQ ID NO: 18477 - protein, 9 aa, Artificial Sequence
  Description of Artificial Sequence: Synthetic peptide
HGMQLEAFF

SEQ ID NO: 18478 - protein, 9 aa, Artificial Sequence
  Description of Artificial Sequence: Synthetic peptide
HHNIKEAWM

SEQ ID NO: 18479 - protein, 9 aa, Artificial Sequence
  Description of Artificial Sequence: Synthetic peptide
HIESYMCRD

SEQ ID NO: 18480 - protein, 9 aa, Artificial Sequence
  Description of Artificial Sequence: Synthetic peptide
HIRHRDENG

SEQ ID NO: 18481 - protein, 9 aa, Artificial Sequence
  Description of Artificial Sequence: Synthetic peptide
HKNRLLRSV

SEQ ID NO: 18482 - protein, 9 aa, Artificial Sequence
  Description of Artificial Sequence: Synthetic peptide
HKSRATHTG

SEQ ID NO: 18483 - protein, 9 aa, Artificial Sequence
  Description of Artificial Sequence: Synthetic peptide
HNHILIQTS

SEQ ID NO: 18484 - protein, 9 aa, Artificial Sequence
  Description of Artificial Sequence: Synthetic peptide
HPMDGLIQV

SEQ ID NO: 18485 - protein, 9 aa, Artificial Sequence
  Description of Artificial Sequence: Synthetic peptide
HSEHQGRMV

SEQ ID NO: 18486 - protein, 9 aa, Artificial Sequence
  Description of Artificial Sequence: Synthetic peptide
HSFWIAQMQ

SEQ ID NO: 18487 - protein, 9 aa, Artificial Sequence
  Description of Artificial Sequence: Synthetic peptide
HSGIGLTMQ

SEQ ID NO: 18488 - protein, 9 aa, Artificial Sequence
  Description of Artificial Sequence: Synthetic peptide
HSWLENSAC

SEQ ID NO: 18489 - protein, 9 aa, Artificial Sequence
  Description of Artificial Sequence: Synthetic peptide
HVEYVQKYE

SEQ ID NO: 18490 - protein, 9 aa, Artificial Sequence
  Description of Artificial Sequence: Synthetic peptide
HVFQVSDED

SEQ ID NO: 18491 - protein, 9 aa, Artificial Sequence
  Description of Artificial Sequence: Synthetic peptide
HWHNVISKD

SEQ ID NO: 18492 - protein, 9 aa, Artificial Sequence
  Description of Artificial Sequence: Synthetic peptide
IADTPDALQ

SEQ ID NO: 18493 - protein, 9 aa, Artificial Sequence
  Description of Artificial Sequence: Synthetic peptide
IEDISKKWA

SEQ ID NO: 18494 - protein, 9 aa, Artificial Sequence
  Description of Artificial Sequence: Synthetic peptide
IFQPCFRDW

SEQ ID NO: 18495 - protein, 9 aa, Artificial Sequence
  Description of Artificial Sequence: Synthetic peptide
IGQSTQYCA

SEQ ID NO: 18496 - protein, 9 aa, Artificial Sequence
  Description of Artificial Sequence: Synthetic peptide
IHQSVIQKG

SEQ ID NO: 18497 - protein, 9 aa, Artificial Sequence
  Description of Artificial Sequence: Synthetic peptide
IISRYDNDD

SEQ ID NO: 18498 - protein, 9 aa, Artificial Sequence
  Description of Artificial Sequence: Synthetic peptide
IKYSIDHFN

SEQ ID NO: 18499 - protein, 9 aa, Artificial Sequence
  Description of Artificial Sequence: Synthetic peptide
IMELTHHNA

SEQ ID NO: 18500 - protein, 9 aa, Artificial Sequence
  Description of Artificial Sequence: Synthetic peptide
INAVPWQLL

SEQ ID NO: 18501 - protein, 9 aa, Artificial Sequence
  Description of Artificial Sequence: Synthetic peptide
IPAGMTPWC

SEQ ID NO: 18502 - protein, 9 aa, Artificial Sequence
  Description of Artificial Sequence: Synthetic peptide
IQAPTENNN

SEQ ID NO: 18503 - protein, 9 aa, Artificial Sequence
  Description of Artificial Sequence: Synthetic peptide
IRPMYETEE

SEQ ID NO: 18504 - protein, 9 aa, Artificial Sequence
  Description of Artificial Sequence: Synthetic peptide
ISAPGCVFC

SEQ ID NO: 18505 - protein, 9 aa, Artificial Sequence
  Description of Artificial Sequence: Synthetic peptide
ISDRMNYMN

SEQ ID NO: 18506 - protein, 9 aa, Artificial Sequence
  Description of Artificial Sequence: Synthetic peptide
ISERVHQTE

SEQ ID NO: 18507 - protein, 9 aa, Artificial Sequence
  Description of Artificial Sequence: Synthetic peptide
ISQFGANVH

SEQ ID NO: 18508 - protein, 9 aa, Artificial Sequence
  Description of Artificial Sequence: Synthetic peptide
ISSDKKIMG

SEQ ID NO: 18509 - protein, 9 aa, Artificial Sequence
  Description of Artificial Sequence: Synthetic peptide
ITAPRMVET

SEQ ID NO: 18510 - protein, 9 aa, Artificial Sequence
  Description of Artificial Sequence: Synthetic peptide
ITGCIQKAK

SEQ ID NO: 18511 - protein, 9 aa, Artificial Sequence
  Description of Artificial Sequence: Synthetic peptide
ITKWSLGNP

SEQ ID NO: 18512 - protein, 9 aa, Artificial Sequence
  Description of Artificial Sequence: Synthetic peptide
IVRTMDNEQ

SEQ ID NO: 18513 - protein, 9 aa, Artificial Sequence
  Description of Artificial Sequence: Synthetic peptide
IYATNIAWP

SEQ ID NO: 18514 - protein, 9 aa, Artificial Sequence
  Description of Artificial Sequence: Synthetic peptide
IYMHKIALF

SEQ ID NO: 18515 - protein, 9 aa, Artificial Sequence
  Description of Artificial Sequence: Synthetic peptide
IYSQIGRFD

SEQ ID NO: 18516 - protein, 9 aa, Artificial Sequence
  Description of Artificial Sequence: Synthetic peptide
KCAGWMPSS

SEQ ID NO: 18517 - protein, 9 aa, Artificial Sequence
  Description of Artificial Sequence: Synthetic peptide
KDVEECNSL

SEQ ID NO: 18518 - protein, 9 aa, Artificial Sequence
  Description of Artificial Sequence: Synthetic peptide
KEYPRIGRM

SEQ ID NO: 18519 - protein, 9 aa, Artificial Sequence
  Description of Artificial Sequence: Synthetic peptide
KGSNDGADK

SEQ ID NO: 18520 - protein, 9 aa, Artificial Sequence
  Description of Artificial Sequence: Synthetic peptide
KHQSTCGQD

SEQ ID NO: 18521 - protein, 9 aa, Artificial Sequence
  Description of Artificial Sequence: Synthetic peptide
KMDFWAVPI

SEQ ID NO: 18522 - protein, 9 aa, Artificial Sequence
  Description of Artificial Sequence: Synthetic peptide
KQSELGIGC

SEQ ID NO: 18523 - protein, 9 aa, Artificial Sequence
  Description of Artificial Sequence: Synthetic peptide
KSSNYHSWP

SEQ ID NO: 18524 - protein, 9 aa, Artificial Sequence
  Description of Artificial Sequence: Synthetic peptide
KTEQGGDAE

SEQ ID NO: 18525 - protein, 9 aa, Artificial Sequence
  Description of Artificial Sequence: Synthetic peptide
KTTDECWHV

SEQ ID NO: 18526 - protein, 9 aa, Artificial Sequence
  Description of Artificial Sequence: Synthetic peptide
KVEDVGDYA

SEQ ID NO: 18527 - protein, 9 aa, Artificial Sequence
  Description of Artificial Sequence: Synthetic peptide
KVTEAAKTM

SEQ ID NO: 18528 - protein, 9 aa, Artificial Sequence
  Description of Artificial Sequence: Synthetic peptide
KWCMFFDQH

SEQ ID NO: 18529 - protein, 9 aa, Artificial Sequence
  Description of Artificial Sequence: Synthetic peptide
KYELSQCFG

SEQ ID NO: 18530 - protein, 9 aa, Artificial Sequence
  Description of Artificial Sequence: Synthetic peptide
KYHQAGQLC

SEQ ID NO: 18531 - protein, 9 aa, Artificial Sequence
  Description of Artificial Sequence: Synthetic peptide
LADSSMLWE

SEQ ID NO: 18532 - protein, 9 aa, Artificial Sequence
  Description of Artificial Sequence: Synthetic peptide
LADVQFLYV

SEQ ID NO: 18533 - protein, 9 aa, Artificial Sequence
  Description of Artificial Sequence: Synthetic peptide
LADWSYEAS

SEQ ID NO: 18534 - protein, 9 aa, Artificial Sequence
  Description of Artificial Sequence: Synthetic peptide
LATDVPVSE

SEQ ID NO: 18535 - protein, 9 aa, Artificial Sequence
  Description of Artificial Sequence: Synthetic peptide
LCFQSVHEE

SEQ ID NO: 18536 - protein, 9 aa, Artificial Sequence
  Description of Artificial Sequence: Synthetic peptide
LCTAVFRDQ

SEQ ID NO: 18537 - protein, 9 aa, Artificial Sequence
  Description of Artificial Sequence: Synthetic peptide
LFMHTMWGA

SEQ ID NO: 18538 - protein, 9 aa, Artificial Sequence
  Description of Artificial Sequence: Synthetic peptide
LFNCTVWLE

SEQ ID NO: 18539 - protein, 9 aa, Artificial Sequence
  Description of Artificial Sequence: Synthetic peptide
LFRYQRKTQ

SEQ ID NO: 18540 - protein, 9 aa, Artificial Sequence
  Description of Artificial Sequence: Synthetic peptide
LGDWAPASI

SEQ ID NO: 18541 - protein, 9 aa, Artificial Sequence
  Description of Artificial Sequence: Synthetic peptide
LGNSFKRAR

SEQ ID NO: 18542 - protein, 9 aa, Artificial Sequence
  Description of Artificial Sequence: Synthetic peptide
LGQQAMPLK

SEQ ID NO: 18543 - protein, 9 aa, Artificial Sequence
  Description of Artificial Sequence: Synthetic peptide
LHFKIEQVD

SEQ ID NO: 18544 - protein, 9 aa, Artificial Sequence
  Description of Artificial Sequence: Synthetic peptide
LHNNMNAFG

SEQ ID NO: 18545 - protein, 9 aa, Artificial Sequence
  Description of Artificial Sequence: Synthetic peptide
LIALDMCHP

SEQ ID NO: 18546 - protein, 9 aa, Artificial Sequence
  Description of Artificial Sequence: Synthetic peptide
LIQSYVNTG

SEQ ID NO: 18547 - protein, 9 aa, Artificial Sequence
  Description of Artificial Sequence: Synthetic peptide
LIRAKHRTM

SEQ ID NO: 18548 - protein, 9 aa, Artificial Sequence
  Description of Artificial Sequence: Synthetic peptide
LKKEVQRYQ

SEQ ID NO: 18549 - protein, 9 aa, Artificial Sequence
  Description of Artificial Sequence: Synthetic peptide
LKSEVSIME

SEQ ID NO: 18550 - protein, 9 aa, Artificial Sequence
  Description of Artificial Sequence: Synthetic peptide
LMYWKNGMS

SEQ ID NO: 18551 - protein, 9 aa, Artificial Sequence
  Description of Artificial Sequence: Synthetic peptide
LNAWVNRHS

SEQ ID NO: 18552 - protein, 9 aa, Artificial Sequence
  Description of Artificial Sequence: Synthetic peptide
LNHKYERMT

SEQ ID NO: 18553 - protein, 9 aa, Artificial Sequence
  Description of Artificial Sequence: Synthetic peptide
LNKYNPHKT

SEQ ID NO: 18554 - protein, 9 aa, Artificial Sequence
  Description of Artificial Sequence: Synthetic peptide
LQDLTQLCK

SEQ ID NO: 18555 - protein, 9 aa, Artificial Sequence
  Description of Artificial Sequence: Synthetic peptide
LRQCPLNKL

SEQ ID NO: 18556 - protein, 9 aa, Artificial Sequence
  Description of Artificial Sequence: Synthetic peptide
LSDQCLDLA

SEQ ID NO: 18557 - protein, 9 aa, Artificial Sequence
  Description of Artificial Sequence: Synthetic peptide
LSNQQWYAG

SEQ ID NO: 18558 - protein, 9 aa, Artificial Sequence
  Description of Artificial Sequence: Synthetic peptide
LSRSGHDQE

SEQ ID NO: 18559 - protein, 9 aa, Artificial Sequence
  Description of Artificial Sequence: Synthetic peptide
LSTDNNIQF

SEQ ID NO: 18560 - protein, 9 aa, Artificial Sequence
  Description of Artificial Sequence: Synthetic peptide
LSTMEWKTN

SEQ ID NO: 18561 - protein, 9 aa, Artificial Sequence
  Description of Artificial Sequence: Synthetic peptide
LSTNPQHCG

SEQ ID NO: 18562 - protein, 9 aa, Artificial Sequence
  Description of Artificial Sequence: Synthetic peptide
LTAMKKQNA

SEQ ID NO: 18563 - protein, 9 aa, Artificial Sequence
  Description of Artificial Sequence: Synthetic peptide
LTEVKWCNC

SEQ ID NO: 18564 - protein, 9 aa, Artificial Sequence
  Description of Artificial Sequence: Synthetic peptide
LTGYLNDMT

SEQ ID NO: 18565 - protein, 9 aa, Artificial Sequence
  Description of Artificial Sequence: Synthetic peptide
LVDKNMFIN

SEQ ID NO: 18566 - protein, 9 aa, Artificial Sequence
  Description of Artificial Sequence: Synthetic peptide
LVTQWVPAY

SEQ ID NO: 18567 - protein, 9 aa, Artificial Sequence
  Description of Artificial Sequence: Synthetic peptide
LWAWSGEPK

SEQ ID NO: 18568 - protein, 9 aa, Artificial Sequence
  Description of Artificial Sequence: Synthetic peptide
LWNDMHFHG

SEQ ID NO: 18569 - protein, 9 aa, Artificial Sequence
  Description of Artificial Sequence: Synthetic peptide
MAGRDDGRA

SEQ ID NO: 18570 - protein, 9 aa, Artificial Sequence
  Description of Artificial Sequence: Synthetic peptide
MAIIRLAEM

SEQ ID NO: 18571 - protein, 9 aa, Artificial Sequence
  Description of Artificial Sequence: Synthetic peptide
MAKSSRNDQ

SEQ ID NO: 18572 - protein, 9 aa, Artificial Sequence
  Description of Artificial Sequence: Synthetic peptide
MAPKFSSYG

SEQ ID NO: 18573 - protein, 9 aa, Artificial Sequence
  Description of Artificial Sequence: Synthetic peptide
MASFPMENK

SEQ ID NO: 18574 - protein, 9 aa, Artificial Sequence
  Description of Artificial Sequence: Synthetic peptide
MCQHEQATF

SEQ ID NO: 18575 - protein, 9 aa, Artificial Sequence
  Description of Artificial Sequence: Synthetic peptide
MCTSVTMNG

SEQ ID NO: 18576 - protein, 9 aa, Artificial Sequence
  Description of Artificial Sequence: Synthetic peptide
MEHSTHDDD

SEQ ID NO: 18577 - protein, 9 aa, Artificial Sequence
  Description of Artificial Sequence: Synthetic peptide
MENYQWLAP

SEQ ID NO: 18578 - protein, 9 aa, Artificial Sequence
  Description of Artificial Sequence: Synthetic peptide
MFGCIIGDF

SEQ ID NO: 18579 - protein, 9 aa, Artificial Sequence
  Description of Artificial Sequence: Synthetic peptide
MGSKRKPWT

SEQ ID NO: 18580 - protein, 9 aa, Artificial Sequence
  Description of Artificial Sequence: Synthetic peptide
MGVKVDGTN

SEQ ID NO: 18581 - protein, 9 aa, Artificial Sequence
  Description of Artificial Sequence: Synthetic peptide
MHDGYRGMQ

SEQ ID NO: 18582 - protein, 9 aa, Artificial Sequence
  Description of Artificial Sequence: Synthetic peptide
MHHCYQTFA

SEQ ID NO: 18583 - protein, 9 aa, Artificial Sequence
  Description of Artificial Sequence: Synthetic peptide
MHIAQMLGP

SEQ ID NO: 18584 - protein, 9 aa, Artificial Sequence
  Description of Artificial Sequence: Synthetic peptide
MHSNLHWYG

SEQ ID NO: 18585 - protein, 9 aa, Artificial Sequence
  Description of Artificial Sequence: Synthetic peptide
MHSPCSGPW

SEQ ID NO: 18586 - protein, 9 aa, Artificial Sequence
  Description of Artificial Sequence: Synthetic peptide
MIDVLSWLE

SEQ ID NO: 18587 - protein, 9 aa, Artificial Sequence
  Description of Artificial Sequence: Synthetic peptide
MIESQGDLQ

SEQ ID NO: 18588 - protein, 9 aa, Artificial Sequence
  Description of Artificial Sequence: Synthetic peptide
MILPSMAWC

SEQ ID NO: 18589 - protein, 9 aa, Artificial Sequence
  Description of Artificial Sequence: Synthetic peptide
MISCGGDDH

SEQ ID NO: 18590 - protein, 9 aa, Artificial Sequence
  Description of Artificial Sequence: Synthetic peptide
MKDHWDFYG

SEQ ID NO: 18591 - protein, 9 aa, Artificial Sequence
  Description of Artificial Sequence: Synthetic peptide
MMIGTYMGE

SEQ ID NO: 18592 - protein, 9 aa, Artificial Sequence
  Description of Artificial Sequence: Synthetic peptide
MMNQTCCHM

SEQ ID NO: 18593 - protein, 9 aa, Artificial Sequence
  Description of Artificial Sequence: Synthetic peptide
MMVVRGKVE

SEQ ID NO: 18594 - protein, 9 aa, Artificial Sequence
  Description of Artificial Sequence: Synthetic peptide
MNSCNNYCM

SEQ ID NO: 18595 - protein, 9 aa, Artificial Sequence
  Description of Artificial Sequence: Synthetic peptide
MPVERNVTP

SEQ ID NO: 18596 - protein, 9 aa, Artificial Sequence
  Description of Artificial Sequence: Synthetic peptide
MQEDCMSGE

SEQ ID NO: 18597 - protein, 9 aa, Artificial Sequence
  Description of Artificial Sequence: Synthetic peptide
MQNEDVPHT

SEQ ID NO: 18598 - protein, 9 aa, Artificial Sequence
  Description of Artificial Sequence: Synthetic peptide
MQQECVDMW

SEQ ID NO: 18599 - protein, 9 aa, Artificial Sequence
  Description of Artificial Sequence: Synthetic peptide
MQQGYGIFA

SEQ ID NO: 18600 - protein, 9 aa, Artificial Sequence
  Description of Artificial Sequence: Synthetic peptide
MRFILLADW

SEQ ID NO: 18601 - protein, 9 aa, Artificial Sequence
  Description of Artificial Sequence: Synthetic peptide
MSQCIVMHR

SEQ ID NO: 18602 - protein, 9 aa, Artificial Sequence
  Description of Artificial Sequence: Synthetic peptide
MTMQDINGQ

SEQ ID NO: 18603 - protein, 9 aa, Artificial Sequence
  Description of Artificial Sequence: Synthetic peptide
MVWNTSMDP

SEQ ID NO: 18604 - protein, 9 aa, Artificial Sequence
  Description of Artificial Sequence: Synthetic peptide
MYTMQQSGI

SEQ ID NO: 18605 - protein, 9 aa, Artificial Sequence
  Description of Artificial Sequence: Synthetic peptide
NAAPISHIF

SEQ ID NO: 18606 - protein, 9 aa, Artificial Sequence
  Description of Artificial Sequence: Synthetic peptide
NCENEWRLN

SEQ ID NO: 18607 - protein, 9 aa, Artificial Sequence
  Description of Artificial Sequence: Synthetic peptide
NCERRKSAG

SEQ ID NO: 18608 - protein, 9 aa, Artificial Sequence
  Description of Artificial Sequence: Synthetic peptide
NCGSLPVTE

SEQ ID NO: 18609 - protein, 9 aa, Artificial Sequence
  Description of Artificial Sequence: Synthetic peptide
NERPYEGMG

SEQ ID NO: 18610 - protein, 9 aa, Artificial Sequence
  Description of Artificial Sequence: Synthetic peptide
NFFSLHMMS

SEQ ID NO: 18611 - protein, 9 aa, Artificial Sequence
  Description of Artificial Sequence: Synthetic peptide
NGCECHECW

SEQ ID NO: 18612 - protein, 9 aa, Artificial Sequence
  Description of Artificial Sequence: Synthetic peptide
NGFQTRMRV

SEQ ID NO: 18613 - protein, 9 aa, Artificial Sequence
  Description of Artificial Sequence: Synthetic peptide
NGWMNQSAG

SEQ ID NO: 18614 - protein, 9 aa, Artificial Sequence
  Description of Artificial Sequence: Synthetic peptide
NIQWQWMTG

SEQ ID NO: 18615 - protein, 9 aa, Artificial Sequence
  Description of Artificial Sequence: Synthetic peptide
NLNVMFSME

SEQ ID NO: 18616 - protein, 9 aa, Artificial Sequence
  Description of Artificial Sequence: Synthetic peptide
NQEGQGMFT

SEQ ID NO: 18617 - protein, 9 aa, Artificial Sequence
  Description of Artificial Sequence: Synthetic peptide
NSAHIMKDG

SEQ ID NO: 18618 - protein, 9 aa, Artificial Sequence
  Description of Artificial Sequence: Synthetic peptide
NSMHGDCQW

SEQ ID NO: 18619 - protein, 9 aa, Artificial Sequence
  Description of Artificial Sequence: Synthetic peptide
NTCPVESAH

SEQ ID NO: 18620 - protein, 9 aa, Artificial Sequence
  Description of Artificial Sequence: Synthetic peptide
NTDNNWTSG

SEQ ID NO: 18621 - protein, 9 aa, Artificial Sequence
  Description of Artificial Sequence: Synthetic peptide
NTNLLEITH

SEQ ID NO: 18622 - protein, 9 aa, Artificial Sequence
  Description of Artificial Sequence: Synthetic peptide
NTTYRTEYF

SEQ ID NO: 18623 - protein, 9 aa, Artificial Sequence
  Description of Artificial Sequence: Synthetic peptide
NVVFKQSAH

SEQ ID NO: 18624 - protein, 9 aa, Artificial Sequence
  Description of Artificial Sequence: Synthetic peptide
NVWVIKDIC

SEQ ID NO: 18625 - protein, 9 aa, Artificial Sequence
  Description of Artificial Sequence: Synthetic peptide
NVYFSWMWT

SEQ ID NO: 18626 - protein, 9 aa, Artificial Sequence
  Description of Artificial Sequence: Synthetic peptide
NWTCLMSIP

SEQ ID NO: 18627 - protein, 9 aa, Artificial Sequence
  Description of Artificial Sequence: Synthetic peptide
NYPLQWGVE

SEQ ID NO: 18628 - protein, 9 aa, Artificial Sequence
  Description of Artificial Sequence: Synthetic peptide
PATDQIDEC

SEQ ID NO: 18629 - protein, 9 aa, Artificial Sequence
  Description of Artificial Sequence: Synthetic peptide
PATRVFADI

SEQ ID NO: 18630 - protein, 9 aa, Artificial Sequence
  Description of Artificial Sequence: Synthetic peptide
PDWMDWNHY

SEQ ID NO: 18631 - protein, 9 aa, Artificial Sequence
  Description of Artificial Sequence: Synthetic peptide
PFVKSNIAL

SEQ ID NO: 18632 - protein, 9 aa, Artificial Sequence
  Description of Artificial Sequence: Synthetic peptide
PKQLFWYWW

SEQ ID NO: 18633 - protein, 9 aa, Artificial Sequence
  Description of Artificial Sequence: Synthetic peptide
PLFAITTIE

SEQ ID NO: 18634 - protein, 9 aa, Artificial Sequence
  Description of Artificial Sequence: Synthetic peptide
PLTMGHGEC

SEQ ID NO: 18635 - protein, 9 aa, Artificial Sequence
  Description of Artificial Sequence: Synthetic peptide
PQHNCGYNN

SEQ ID NO: 18636 - protein, 9 aa, Artificial Sequence
  Description of Artificial Sequence: Synthetic peptide
PSENNKRKK

SEQ ID NO: 18637 - protein, 9 aa, Artificial Sequence
  Description of Artificial Sequence: Synthetic peptide
PVDWIIAAE

SEQ ID NO: 18638 - protein, 9 aa, Artificial Sequence
  Description of Artificial Sequence: Synthetic peptide
QAIFVRQLN

SEQ ID NO: 18639 - protein, 9 aa, Artificial Sequence
  Description of Artificial Sequence: Synthetic peptide
QCGHDHQYT

SEQ ID NO: 18640 - protein, 9 aa, Artificial Sequence
  Description of Artificial Sequence: Synthetic peptide
QCKYSERGT

SEQ ID NO: 18641 - protein, 9 aa, Artificial Sequence
  Description of Artificial Sequence: Synthetic peptide
QFAEKPGSW

SEQ ID NO: 18642 - protein, 9 aa, Artificial Sequence
  Description of Artificial Sequence: Synthetic peptide
QFEGGDSMG

SEQ ID NO: 18643 - protein, 9 aa, Artificial Sequence
  Description of Artificial Sequence: Synthetic peptide
QGTGRYAWG

SEQ ID NO: 18644 - protein, 9 aa, Artificial Sequence
  Description of Artificial Sequence: Synthetic peptide
QGYRKLMNQ

SEQ ID NO: 18645 - protein, 9 aa, Artificial Sequence
  Description of Artificial Sequence: Synthetic peptide
QHHTYMCIS

SEQ ID NO: 18646 - protein, 9 aa, Artificial Sequence
  Description of Artificial Sequence: Synthetic peptide
QIMFNHQNL

SEQ ID NO: 18647 - protein, 9 aa, Artificial Sequence
  Description of Artificial Sequence: Synthetic peptide
QIVGNQKRE

SEQ ID NO: 18648 - protein, 9 aa, Artificial Sequence
  Description of Artificial Sequence: Synthetic peptide
QKMEMFEGS

SEQ ID NO: 18649 - protein, 9 aa, Artificial Sequence
  Description of Artificial Sequence: Synthetic peptide
QLETFTVHN

SEQ ID NO: 18650 - protein, 9 aa, Artificial Sequence
  Description of Artificial Sequence: Synthetic peptide
QNDVMMGNH

SEQ ID NO: 18651 - protein, 9 aa, Artificial Sequence
  Description of Artificial Sequence: Synthetic peptide
QQSFFFGEQ

SEQ ID NO: 18652 - protein, 9 aa, Artificial Sequence
  Description of Artificial Sequence: Synthetic peptide
QQSSMATEY

SEQ ID NO: 18653 - protein, 9 aa, Artificial Sequence
  Description of Artificial Sequence: Synthetic peptide
QQWDVAMMC

SEQ ID NO: 18654 - protein, 9 aa, Artificial Sequence
  Description of Artificial Sequence: Synthetic peptide
QRVDQQSLG

SEQ ID NO: 18655 - protein, 9 aa, Artificial Sequence
  Description of Artificial Sequence: Synthetic peptide
QSEWWRRHA

SEQ ID NO: 18656 - protein, 9 aa, Artificial Sequence
  Description of Artificial Sequence: Synthetic peptide
QSHSMMYFG

SEQ ID NO: 18657 - protein, 9 aa, Artificial Sequence
  Description of Artificial Sequence: Synthetic peptide
QSHSTDYCS

SEQ ID NO: 18658 - protein, 9 aa, Artificial Sequence
  Description of Artificial Sequence: Synthetic peptide
QSQPDNKGM

SEQ ID NO: 18659 - protein, 9 aa, Artificial Sequence
  Description of Artificial Sequence: Synthetic peptide
QSQYKAECK

SEQ ID NO: 18660 - protein, 9 aa, Artificial Sequence
  Description of Artificial Sequence: Synthetic peptide
QSSGEERGT

SEQ ID NO: 18661 - protein, 9 aa, Artificial Sequence
  Description of Artificial Sequence: Synthetic peptide
QSSWDGQDD

SEQ ID NO: 18662 - protein, 9 aa, Artificial Sequence
  Description of Artificial Sequence: Synthetic peptide
QSTQTSYIS

SEQ ID NO: 18663 - protein, 9 aa, Artificial Sequence
  Description of Artificial Sequence: Synthetic peptide
QSTSDECNL

SEQ ID NO: 18664 - protein, 9 aa, Artificial Sequence
  Description of Artificial Sequence: Synthetic peptide
QTDIWMMWA

SEQ ID NO: 18665 - protein, 9 aa, Artificial Sequence
  Description of Artificial Sequence: Synthetic peptide
QTDSVMECT

SEQ ID NO: 18666 - protein, 9 aa, Artificial Sequence
  Description of Artificial Sequence: Synthetic peptide
QTTHFRYFH

SEQ ID NO: 18667 - protein, 9 aa, Artificial Sequence
  Description of Artificial Sequence: Synthetic peptide
QTTQKSEER

SEQ ID NO: 18668 - protein, 9 aa, Artificial Sequence
  Description of Artificial Sequence: Synthetic peptide
QVDTRYMNE

SEQ ID NO: 18669 - protein, 9 aa, Artificial Sequence
  Description of Artificial Sequence: Synthetic peptide
QVGMVAISQ

SEQ ID NO: 18670 - protein, 9 aa, Artificial Sequence
  Description of Artificial Sequence: Synthetic peptide
QVLWANNHD

SEQ ID NO: 18671 - protein, 9 aa, Artificial Sequence
  Description of Artificial Sequence: Synthetic peptide
QVSFEWYKC

SEQ ID NO: 18672 - protein, 9 aa, Artificial Sequence
  Description of Artificial Sequence: Synthetic peptide
QWPLNPYGK

SEQ ID NO: 18673 - protein, 9 aa, Artificial Sequence
  Description of Artificial Sequence: Synthetic peptide
QWRILDVVK

SEQ ID NO: 18674 - protein, 9 aa, Artificial Sequence
  Description of Artificial Sequence: Synthetic peptide
QYAMSYAGE

SEQ ID NO: 18675 - protein, 9 aa, Artificial Sequence
  Description of Artificial Sequence: Synthetic peptide
QYYEHEFLD

SEQ ID NO: 18676 - protein, 9 aa, Artificial Sequence
  Description of Artificial Sequence: Synthetic peptide
RADHTIDFS

SEQ ID NO: 18677 - protein, 9 aa, Artificial Sequence
  Description of Artificial Sequence: Synthetic peptide
RCDTSQWWQ

SEQ ID NO: 18678 - protein, 9 aa, Artificial Sequence
  Description of Artificial Sequence: Synthetic peptide
REGWPGHKY

SEQ ID NO: 18679 - protein, 9 aa, Artificial Sequence
  Description of Artificial Sequence: Synthetic peptide
RENLCNVPP

SEQ ID NO: 18680 - protein, 9 aa, Artificial Sequence
  Description of Artificial Sequence: Synthetic peptide
RGGLIHFST

SEQ ID NO: 18681 - protein, 9 aa, Artificial Sequence
  Description of Artificial Sequence: Synthetic peptide
RHLDIQNHD

SEQ ID NO: 18682 - protein, 9 aa, Artificial Sequence
  Description of Artificial Sequence: Synthetic peptide
RHMESLNSA

SEQ ID NO: 18683 - protein, 9 aa, Artificial Sequence
  Description of Artificial Sequence: Synthetic peptide
RIHLWENNP

SEQ ID NO: 18684 - protein, 9 aa, Artificial Sequence
  Description of Artificial Sequence: Synthetic peptide
RLCWMTPCC

SEQ ID NO: 18685 - protein, 9 aa, Artificial Sequence
  Description of Artificial Sequence: Synthetic peptide
RLENFHEAH

SEQ ID NO: 18686 - protein, 9 aa, Artificial Sequence
  Description of Artificial Sequence: Synthetic peptide
RMELRMIFP

SEQ ID NO: 18687 - protein, 9 aa, Artificial Sequence
  Description of Artificial Sequence: Synthetic peptide
RMEPLHCCE

SEQ ID NO: 18688 - protein, 9 aa, Artificial Sequence
  Description of Artificial Sequence: Synthetic peptide
RPYPAMFKG

SEQ ID NO: 18689 - protein, 9 aa, Artificial Sequence
  Description of Artificial Sequence: Synthetic peptide
RQHHVGNEV

SEQ ID NO: 18690 - protein, 9 aa, Artificial Sequence
  Description of Artificial Sequence: Synthetic peptide
RQPPLKWKR

SEQ ID NO: 18691 - protein, 9 aa, Artificial Sequence
  Description of Artificial Sequence: Synthetic peptide
RSNEKGMNG

SEQ ID NO: 18692 - protein, 9 aa, Artificial Sequence
  Description of Artificial Sequence: Synthetic peptide
RTDFLACHC

SEQ ID NO: 18693 - protein, 9 aa, Artificial Sequence
  Description of Artificial Sequence: Synthetic peptide
RTINFSLMI

SEQ ID NO: 18694 - protein, 9 aa, Artificial Sequence
  Description of Artificial Sequence: Synthetic peptide
RTMYWPSVN

SEQ ID NO: 18695 - protein, 9 aa, Artificial Sequence
  Description of Artificial Sequence: Synthetic peptide
RVDFTPIVH

SEQ ID NO: 18696 - protein, 9 aa, Artificial Sequence
  Description of Artificial Sequence: Synthetic peptide
RVGMDPRDG

SEQ ID NO: 18697 - protein, 9 aa, Artificial Sequence
  Description of Artificial Sequence: Synthetic peptide
RWAEMHFID

SEQ ID NO: 18698 - protein, 9 aa, Artificial Sequence
  Description of Artificial Sequence: Synthetic peptide
RWAYLEEFR

SEQ ID NO: 18699 - protein, 9 aa, Artificial Sequence
  Description of Artificial Sequence: Synthetic peptide
SAGWDGKVC

SEQ ID NO: 18700 - protein, 9 aa, Artificial Sequence
  Description of Artificial Sequence: Synthetic peptide
SAVNYFMFG

SEQ ID NO: 18701 - protein, 9 aa, Artificial Sequence
  Description of Artificial Sequence: Synthetic peptide
SAYVVCSHD

SEQ ID NO: 18702 - protein, 9 aa, Artificial Sequence
  Description of Artificial Sequence: Synthetic peptide
SCDPRHVDE

SEQ ID NO: 18703 - protein, 9 aa, Artificial Sequence
  Description of Artificial Sequence: Synthetic peptide
SEANMAPSR

SEQ ID NO: 18704 - protein, 9 aa, Artificial Sequence
  Description of Artificial Sequence: Synthetic peptide
SELDQYTMA

SEQ ID NO: 18705 - protein, 9 aa, Artificial Sequence
  Description of Artificial Sequence: Synthetic peptide
SFLTTAYEA

SEQ ID NO: 18706 - protein, 9 aa, Artificial Sequence
  Description of Artificial Sequence: Synthetic peptide
SGHPRHMCY

SEQ ID NO: 18707 - protein, 9 aa, Artificial Sequence
  Description of Artificial Sequence: Synthetic peptide
SHMPFSDMC

SEQ ID NO: 18708 - protein, 9 aa, Artificial Sequence
  Description of Artificial Sequence: Synthetic peptide
SHMQMNWVD

SEQ ID NO: 18709 - protein, 9 aa, Artificial Sequence
  Description of Artificial Sequence: Synthetic peptide
SHTECHTWG

SEQ ID NO: 18710 - protein, 9 aa, Artificial Sequence
  Description of Artificial Sequence: Synthetic peptide
SIISDEYFT

SEQ ID NO: 18711 - protein, 9 aa, Artificial Sequence
  Description of Artificial Sequence: Synthetic peptide
SITPRDEKP

SEQ ID NO: 18712 - protein, 9 aa, Artificial Sequence
  Description of Artificial Sequence: Synthetic peptide
SKIKPADPN

SEQ ID NO: 18713 - protein, 9 aa, Artificial Sequence
  Description of Artificial Sequence: Synthetic peptide
SLSVKFKTN

SEQ ID NO: 18714 - protein, 9 aa, Artificial Sequence
  Description of Artificial Sequence: Synthetic peptide
SMQQAHGWK

SEQ ID NO: 18715 - protein, 9 aa, Artificial Sequence
  Description of Artificial Sequence: Synthetic peptide
SPGSCQAFE

SEQ ID NO: 18716 - protein, 9 aa, Artificial Sequence
  Description of Artificial Sequence: Synthetic peptide
SQNQYIKAA

SEQ ID NO: 18717 - protein, 9 aa, Artificial Sequence
  Description of Artificial Sequence: Synthetic peptide
SREICQLEY

SEQ ID NO: 18718 - protein, 9 aa, Artificial Sequence
  Description of Artificial Sequence: Synthetic peptide
SSPWKDFRQ

SEQ ID NO: 18719 - protein, 9 aa, Artificial Sequence
  Description of Artificial Sequence: Synthetic peptide
SSQIKTSSF

SEQ ID NO: 18720 - protein, 9 aa, Artificial Sequence
  Description of Artificial Sequence: Synthetic peptide
STACAESGW

SEQ ID NO: 18721 - protein, 9 aa, Artificial Sequence
  Description of Artificial Sequence: Synthetic peptide
STHPYMLSK

SEQ ID NO: 18722 - protein, 9 aa, Artificial Sequence
  Description of Artificial Sequence: Synthetic peptide
STHQPDCFR

SEQ ID NO: 18723 - protein, 9 aa, Artificial Sequence
  Description of Artificial Sequence: Synthetic peptide
STMCMVRDS

SEQ ID NO: 18724 - protein, 9 aa, Artificial Sequence
  Description of Artificial Sequence: Synthetic peptide
STTHLQYYC

SEQ ID NO: 18725 - protein, 9 aa, Artificial Sequence
  Description of Artificial Sequence: Synthetic peptide
SVGPQLYLT

SEQ ID NO: 18726 - protein, 9 aa, Artificial Sequence
  Description of Artificial Sequence: Synthetic peptide
SVGTWQNMG

SEQ ID NO: 18727 - protein, 9 aa, Artificial Sequence
  Description of Artificial Sequence: Synthetic peptide
SVHKAENWW

SEQ ID NO: 18728 - protein, 9 aa, Artificial Sequence
  Description of Artificial Sequence: Synthetic peptide
SVLMQMGSE

SEQ ID NO: 18729 - protein, 9 aa, Artificial Sequence
  Description of Artificial Sequence: Synthetic peptide
SVTTCHMPL

SEQ ID NO: 18730 - protein, 9 aa, Artificial Sequence
  Description of Artificial Sequence: Synthetic peptide
TADHNLFDY

SEQ ID NO: 18731 - protein, 9 aa, Artificial Sequence
  Description of Artificial Sequence: Synthetic peptide
TADWEDQTP

SEQ ID NO: 18732 - protein, 9 aa, Artificial Sequence
  Description of Artificial Sequence: Synthetic peptide
TATEGVWGC

SEQ ID NO: 18733 - protein, 9 aa, Artificial Sequence
  Description of Artificial Sequence: Synthetic peptide
TCCYDQRGP

SEQ ID NO: 18734 - protein, 9 aa, Artificial Sequence
  Description of Artificial Sequence: Synthetic peptide
TCDSNATWY

SEQ ID NO: 18735 - protein, 9 aa, Artificial Sequence
  Description of Artificial Sequence: Synthetic peptide
TCEHRLMAT

SEQ ID NO: 18736 - protein, 9 aa, Artificial Sequence
  Description of Artificial Sequence: Synthetic peptide
TCGTTANFE

SEQ ID NO: 18737 - protein, 9 aa, Artificial Sequence
  Description of Artificial Sequence: Synthetic peptide
TFWYTGHWG

SEQ ID NO: 18738 - protein, 9 aa, Artificial Sequence
  Description of Artificial Sequence: Synthetic peptide
TGEYTNSWD

SEQ ID NO: 18739 - protein, 9 aa, Artificial Sequence
  Description of Artificial Sequence: Synthetic peptide
THGCGQIMP

SEQ ID NO: 18740 - protein, 9 aa, Artificial Sequence
  Description of Artificial Sequence: Synthetic peptide
THLSCRMWG

SEQ ID NO: 18741 - protein, 9 aa, Artificial Sequence
  Description of Artificial Sequence: Synthetic peptide
TIGIPYSHD

SEQ ID NO: 18742 - protein, 9 aa, Artificial Sequence
  Description of Artificial Sequence: Synthetic peptide
TKKDLDRQW

SEQ ID NO: 18743 - protein, 9 aa, Artificial Sequence
  Description of Artificial Sequence: Synthetic peptide
TLALDCKWP

SEQ ID NO: 18744 - protein, 9 aa, Artificial Sequence
  Description of Artificial Sequence: Synthetic peptide
TLCIREIMM

SEQ ID NO: 18745 - protein, 9 aa, Artificial Sequence
  Description of Artificial Sequence: Synthetic peptide
TLTMMQGCS

SEQ ID NO: 18746 - protein, 9 aa, Artificial Sequence
  Description of Artificial Sequence: Synthetic peptide
TMFAVTVKN

SEQ ID NO: 18747 - protein, 9 aa, Artificial Sequence
  Description of Artificial Sequence: Synthetic peptide
TMGFLWYEQ

SEQ ID NO: 18748 - protein, 9 aa, Artificial Sequence
  Description of Artificial Sequence: Synthetic peptide
TNKMLGRAP

SEQ ID NO: 18749 - protein, 9 aa, Artificial Sequence
  Description of Artificial Sequence: Synthetic peptide
TPGRNNQGM

SEQ ID NO: 18750 - protein, 9 aa, Artificial Sequence
  Description of Artificial Sequence: Synthetic peptide
TPIGVQKLA

SEQ ID NO: 18751 - protein, 9 aa, Artificial Sequence
  Description of Artificial Sequence: Synthetic peptide
TPSQQAEQC

SEQ ID NO: 18752 - protein, 9 aa, Artificial Sequence
  Description of Artificial Sequence: Synthetic peptide
TQAPIWENL

SEQ ID NO: 18753 - protein, 9 aa, Artificial Sequence
  Description of Artificial Sequence: Synthetic peptide
TQEHSHEVS

SEQ ID NO: 18754 - protein, 9 aa, Artificial Sequence
  Description of Artificial Sequence: Synthetic peptide
TSDVRLTEE

SEQ ID NO: 18755 - protein, 9 aa, Artificial Sequence
  Description of Artificial Sequence: Synthetic peptide
TSGHMRNMF

SEQ ID NO: 18756 - protein, 9 aa, Artificial Sequence
  Description of Artificial Sequence: Synthetic peptide
TSIDETELF

SEQ ID NO: 18757 - protein, 9 aa, Artificial Sequence
  Description of Artificial Sequence: Synthetic peptide
TSIWINAVK

SEQ ID NO: 18758 - protein, 9 aa, Artificial Sequence
  Description of Artificial Sequence: Synthetic peptide
TSQQFITAY

SEQ ID NO: 18759 - protein, 9 aa, Artificial Sequence
  Description of Artificial Sequence: Synthetic peptide
TSSWLQCYI

SEQ ID NO: 18760 - protein, 9 aa, Artificial Sequence
  Description of Artificial Sequence: Synthetic peptide
TSTWPGVIA

SEQ ID NO: 18761 - protein, 9 aa, Artificial Sequence
  Description of Artificial Sequence: Synthetic peptide
TTAISLIGE

SEQ ID NO: 18762 - protein, 9 aa, Artificial Sequence
  Description of Artificial Sequence: Synthetic peptide
TTAYSPNDR

SEQ ID NO: 18763 - protein, 9 aa, Artificial Sequence
  Description of Artificial Sequence: Synthetic peptide
TTNLEQMIP

SEQ ID NO: 18764 - protein, 9 aa, Artificial Sequence
  Description of Artificial Sequence: Synthetic peptide
TTQDGQMYS

SEQ ID NO: 18765 - protein, 9 aa, Artificial Sequence
  Description of Artificial Sequence: Synthetic peptide
TTQSMQSGS

SEQ ID NO: 18766 - protein, 9 aa, Artificial Sequence
  Description of Artificial Sequence: Synthetic peptide
TVCMFWVWC

SEQ ID NO: 18767 - protein, 9 aa, Artificial Sequence
  Description of Artificial Sequence: Synthetic peptide
TVDPFKRIW

SEQ ID NO: 18768 - protein, 9 aa, Artificial Sequence
  Description of Artificial Sequence: Synthetic peptide
TVEEAVWAN

SEQ ID NO: 18769 - protein, 9 aa, Artificial Sequence
  Description of Artificial Sequence: Synthetic peptide
TVMMPMRLD

SEQ ID NO: 18770 - protein, 9 aa, Artificial Sequence
  Description of Artificial Sequence: Synthetic peptide
TVNICLQHQ

SEQ ID NO: 18771 - protein, 9 aa, Artificial Sequence
  Description of Artificial Sequence: Synthetic peptide
TWNCTFTGG

SEQ ID NO: 18772 - protein, 9 aa, Artificial Sequence
  Description of Artificial Sequence: Synthetic peptide
VAHQSPNMM

SEQ ID NO: 18773 - protein, 9 aa, Artificial Sequence
  Description of Artificial Sequence: Synthetic peptide
VAQPCGQYF

SEQ ID NO: 18774 - protein, 9 aa, Artificial Sequence
  Description of Artificial Sequence: Synthetic peptide
VCIDHRAYS

SEQ ID NO: 18775 - protein, 9 aa, Artificial Sequence
  Description of Artificial Sequence: Synthetic peptide
VCQQWLTQN

SEQ ID NO: 18776 - protein, 9 aa, Artificial Sequence
  Description of Artificial Sequence: Synthetic peptide
VDYPRKCDK

SEQ ID NO: 18777 - protein, 9 aa, Artificial Sequence
  Description of Artificial Sequence: Synthetic peptide
VGEPLAMFM

SEQ ID NO: 18778 - protein, 9 aa, Artificial Sequence
  Description of Artificial Sequence: Synthetic peptide
VGQWFFKAG

SEQ ID NO: 18779 - protein, 9 aa, Artificial Sequence
  Description of Artificial Sequence: Synthetic peptide
VIDCCYSCG

SEQ ID NO: 18780 - protein, 9 aa, Artificial Sequence
  Description of Artificial Sequence: Synthetic peptide
VIEQHIQQF

SEQ ID NO: 18781 - protein, 9 aa, Artificial Sequence
  Description of Artificial Sequence: Synthetic peptide
VKWDKKTKQ

SEQ ID NO: 18782 - protein, 9 aa, Artificial Sequence
  Description of Artificial Sequence: Synthetic peptide
VLFTIGKDS

SEQ ID NO: 18783 - protein, 9 aa, Artificial Sequence
  Description of Artificial Sequence: Synthetic peptide
VLHRTSYKH

SEQ ID NO: 18784 - protein, 9 aa, Artificial Sequence
  Description of Artificial Sequence: Synthetic peptide
VMEFDKPSA

SEQ ID NO: 18785 - protein, 9 aa, Artificial Sequence
  Description of Artificial Sequence: Synthetic peptide
VMKGVDKFH

SEQ ID NO: 18786 - protein, 9 aa, Artificial Sequence
  Description of Artificial Sequence: Synthetic peptide
VNRCCYPNY

SEQ ID NO: 18787 - protein, 9 aa, Artificial Sequence
  Description of Artificial Sequence: Synthetic peptide
VPEHMDRDQ

SEQ ID NO: 18788 - protein, 9 aa, Artificial Sequence
  Description of Artificial Sequence: Synthetic peptide
VQGLLIFVS

SEQ ID NO: 18789 - protein, 9 aa, Artificial Sequence
  Description of Artificial Sequence: Synthetic peptide
VQHVRYWHS

SEQ ID NO: 18790 - protein, 9 aa, Artificial Sequence
  Description of Artificial Sequence: Synthetic peptide
VSFPTNTMQ

SEQ ID NO: 18791 - protein, 9 aa, Artificial Sequence
  Description of Artificial Sequence: Synthetic peptide
VSLPHSKHL

SEQ ID NO: 18792 - protein, 9 aa, Artificial Sequence
  Description of Artificial Sequence: Synthetic peptide
VSNHWMYHL

SEQ ID NO: 18793 - protein, 9 aa, Artificial Sequence
  Description of Artificial Sequence: Synthetic peptide
VTAWWDTAE

SEQ ID NO: 18794 - protein, 9 aa, Artificial Sequence
  Description of Artificial Sequence: Synthetic peptide
VTEVYERST

SEQ ID NO: 18795 - protein, 9 aa, Artificial Sequence
  Description of Artificial Sequence: Synthetic peptide
VTGFSFTPN

SEQ ID NO: 18796 - protein, 9 aa, Artificial Sequence
  Description of Artificial Sequence: Synthetic peptide
VTGTMLKDA

SEQ ID NO: 18797 - protein, 9 aa, Artificial Sequence
  Description of Artificial Sequence: Synthetic peptide
VTKMPDFAP

SEQ ID NO: 18798 - protein, 9 aa, Artificial Sequence
  Description of Artificial Sequence: Synthetic peptide
VTQYNPKMG

SEQ ID NO: 18799 - protein, 9 aa, Artificial Sequence
  Description of Artificial Sequence: Synthetic peptide
VTRQVIESQ

SEQ ID NO: 18800 - protein, 9 aa, Artificial Sequence
  Description of Artificial Sequence: Synthetic peptide
VTWSTHQWL

SEQ ID NO: 18801 - protein, 9 aa, Artificial Sequence
  Description of Artificial Sequence: Synthetic peptide
VVWDVDYYF

SEQ ID NO: 18802 - protein, 9 aa, Artificial Sequence
  Description of Artificial Sequence: Synthetic peptide
VWDALQNPM

SEQ ID NO: 18803 - protein, 9 aa, Artificial Sequence
  Description of Artificial Sequence: Synthetic peptide
VYVQEGNCS

SEQ ID NO: 18804 - protein, 9 aa, Artificial Sequence
  Description of Artificial Sequence: Synthetic peptide
WAHTNMVYT

SEQ ID NO: 18805 - protein, 9 aa, Artificial Sequence
  Description of Artificial Sequence: Synthetic peptide
WFCFEDSPS

SEQ ID NO: 18806 - protein, 9 aa, Artificial Sequence
  Description of Artificial Sequence: Synthetic peptide
WFMCDYNGD

SEQ ID NO: 18807 - protein, 9 aa, Artificial Sequence
  Description of Artificial Sequence: Synthetic peptide
WGWSPWKKI

SEQ ID NO: 18808 - protein, 9 aa, Artificial Sequence
  Description of Artificial Sequence: Synthetic peptide
WKTKVENPE

SEQ ID NO: 18809 - protein, 9 aa, Artificial Sequence
  Description of Artificial Sequence: Synthetic peptide
WWCWMAGPV

SEQ ID NO: 18810 - protein, 9 aa, Artificial Sequence
  Description of Artificial Sequence: Synthetic peptide
WWTHKYFYL

SEQ ID NO: 18811 - protein, 9 aa, Artificial Sequence
  Description of Artificial Sequence: Synthetic peptide
YAHEEDQNP

SEQ ID NO: 18812 - protein, 9 aa, Artificial Sequence
  Description of Artificial Sequence: Synthetic peptide
YAWISEYEA

SEQ ID NO: 18813 - protein, 9 aa, Artificial Sequence
  Description of Artificial Sequence: Synthetic peptide
YDVTKLGEQ

SEQ ID NO: 18814 - protein, 9 aa, Artificial Sequence
  Description of Artificial Sequence: Synthetic peptide
YEAWKVNID

SEQ ID NO: 18815 - protein, 9 aa, Artificial Sequence
  Description of Artificial Sequence: Synthetic peptide
YHCCWTSHP

SEQ ID NO: 18816 - protein, 9 aa, Artificial Sequence
  Description of Artificial Sequence: Synthetic peptide
YHNIATPIP

SEQ ID NO: 18817 - protein, 9 aa, Artificial Sequence
  Description of Artificial Sequence: Synthetic peptide
YPNTWCVVV

SEQ ID NO: 18818 - protein, 9 aa, Artificial Sequence
  Description of Artificial Sequence: Synthetic peptide
YQGPAVLCA

SEQ ID NO: 18819 - protein, 9 aa, Artificial Sequence
  Description of Artificial Sequence: Synthetic peptide
YRTHCFKGH

SEQ ID NO: 18820 - protein, 9 aa, Artificial Sequence
  Description of Artificial Sequence: Synthetic peptide
YSCHFNQKT

SEQ ID NO: 18821 - protein, 9 aa, Artificial Sequence
  Description of Artificial Sequence: Synthetic peptide
YWNGRLKWD

SEQ ID NO: 18822 - protein, 9 aa, Artificial Sequence
  Description of Artificial Sequence: Synthetic peptide
ITTSNVEND

SEQ ID NO: 18823 - protein, 9 aa, Artificial Sequence
  Description of Artificial Sequence: Synthetic peptide
CCFPHYFVG

SEQ ID NO: 18824 - protein, 9 aa, Artificial Sequence
  Description of Artificial Sequence: Synthetic peptide
MFELHDHQF

SEQ ID NO: 18825 - protein, 9 aa, Artificial Sequence
  Description of Artificial Sequence: Synthetic peptide
RLCDTHKCL

SEQ ID NO: 18826 - protein, 9 aa, Artificial Sequence
  Description of Artificial Sequence: Synthetic peptide
NNRALMSVE

SEQ ID NO: 18827 - protein, 9 aa, Artificial Sequence
  Description of Artificial Sequence: Synthetic peptide
DSCIKGLAC

SEQ ID NO: 18828 - protein, 9 aa, Artificial Sequence
  Description of Artificial Sequence: Synthetic peptide
MREKLVHDC

SEQ ID NO: 18829 - protein, 9 aa, Artificial Sequence
  Description of Artificial Sequence: Synthetic peptide
TTYHHRNTL

SEQ ID NO: 18830 - protein, 9 aa, Artificial Sequence
  Description of Artificial Sequence: Synthetic peptide
TWNTWQQDF

SEQ ID NO: 18831 - protein, 9 aa, Artificial Sequence
  Description of Artificial Sequence: Synthetic peptide
DSASPIMGM

SEQ ID NO: 18832 - protein, 9 aa, Artificial Sequence
  Description of Artificial Sequence: Synthetic peptide
MMAMKQGFY

SEQ ID NO: 18833 - protein, 9 aa, Artificial Sequence
  Description of Artificial Sequence: Synthetic peptide
KACMSHQGR

SEQ ID NO: 18834 - protein, 9 aa, Artificial Sequence
  Description of Artificial Sequence: Synthetic peptide
TIGEMVNPS

SEQ ID NO: 18835 - protein, 9 aa, Artificial Sequence
  Description of Artificial Sequence: Synthetic peptide
NWNHCHQWR

SEQ ID NO: 18836 - protein, 9 aa, Artificial Sequence
  Description of Artificial Sequence: Synthetic peptide
SEDKDQGAQ

SEQ ID NO: 18837 - protein, 9 aa, Artificial Sequence
  Description of Artificial Sequence: Synthetic peptide
CAVAGGEWM

SEQ ID NO: 18838 - protein, 9 aa, Artificial Sequence
  Description of Artificial Sequence: Synthetic peptide
NTMLSWGSP

SEQ ID NO: 18839 - protein, 9 aa, Artificial Sequence
  Description of Artificial Sequence: Synthetic peptide
CSIRGFSAF

SEQ ID NO: 18840 - protein, 9 aa, Artificial Sequence
  Description of Artificial Sequence: Synthetic peptide
TIDWCEPHC

SEQ ID NO: 18841 - protein, 9 aa, Artificial Sequence
  Description of Artificial Sequence: Synthetic peptide
SFSHTDLEA

SEQ ID NO: 18842 - protein, 9 aa, Artificial Sequence
  Description of Artificial Sequence: Synthetic peptide
AIEHGAWKC

SEQ ID NO: 18843 - protein, 9 aa, Artificial Sequence
  Description of Artificial Sequence: Synthetic peptide
TLTTDKTYS

SEQ ID NO: 18844 - protein, 9 aa, Artificial Sequence
  Description of Artificial Sequence: Synthetic peptide
KDGRNPHCL

SEQ ID NO: 18845 - protein, 9 aa, Artificial Sequence
  Description of Artificial Sequence: Synthetic peptide
WHCVAPNSF

SEQ ID NO: 18846 - protein, 9 aa, Artificial Sequence
  Description of Artificial Sequence: Synthetic peptide
ACIPQMHSA

SEQ ID NO: 18847 - protein, 9 aa, Artificial Sequence
  Description of Artificial Sequence: Synthetic peptide
NYAMRRDSY

SEQ ID NO: 18848 - protein, 9 aa, Artificial Sequence
  Description of Artificial Sequence: Synthetic peptide
IYMSTGNTP

SEQ ID NO: 18849 - protein, 9 aa, Artificial Sequence
  Description of Artificial Sequence: Synthetic peptide
GYRNYFIWP

SEQ ID NO: 18850 - protein, 9 aa, Artificial Sequence
  Description of Artificial Sequence: Synthetic peptide
MFTPCQEGL

SEQ ID NO: 18851 - protein, 9 aa, Artificial Sequence
  Description of Artificial Sequence: Synthetic peptide
GSTWGASWH

SEQ ID NO: 18852 - protein, 9 aa, Artificial Sequence
  Description of Artificial Sequence: Synthetic peptide
GQFRSGAYR

SEQ ID NO: 18853 - protein, 9 aa, Artificial Sequence
  Description of Artificial Sequence: Synthetic peptide
VYILEGGIH

SEQ ID NO: 18854 - protein, 9 aa, Artificial Sequence
  Description of Artificial Sequence: Synthetic peptide
NTQVISRWT

SEQ ID NO: 18855 - protein, 9 aa, Artificial Sequence
  Description of Artificial Sequence: Synthetic peptide
CYMNFIVDG

SEQ ID NO: 18856 - protein, 9 aa, Artificial Sequence
  Description of Artificial Sequence: Synthetic peptide
NHKMVQDAL

SEQ ID NO: 18857 - protein, 9 aa, Artificial Sequence
  Description of Artificial Sequence: Synthetic peptide
DVYMAVVGS

SEQ ID NO: 18858 - protein, 9 aa, Artificial Sequence
  Description of Artificial Sequence: Synthetic peptide
GITMHPMHH

SEQ ID NO: 18859 - protein, 9 aa, Artificial Sequence
  Description of Artificial Sequence: Synthetic peptide
QMTSSTNCA

SEQ ID NO: 18860 - protein, 9 aa, Artificial Sequence
  Description of Artificial Sequence: Synthetic peptide
MHGIARMQQ

SEQ ID NO: 18861 - protein, 9 aa, Artificial Sequence
  Description of Artificial Sequence: Synthetic peptide
RVWSLEWHL

SEQ ID NO: 18862 - protein, 9 aa, Artificial Sequence
  Description of Artificial Sequence: Synthetic peptide
EVYCYQLQS

SEQ ID NO: 18863 - protein, 9 aa, Artificial Sequence
  Description of Artificial Sequence: Synthetic peptide
QENDERIWY

SEQ ID NO: 18864 - protein, 9 aa, Artificial Sequence
  Description of Artificial Sequence: Synthetic peptide
AMTRCKAGH

SEQ ID NO: 18865 - protein, 9 aa, Artificial Sequence
  Description of Artificial Sequence: Synthetic peptide
KPLASIGQY

SEQ ID NO: 18866 - protein, 9 aa, Artificial Sequence
  Description of Artificial Sequence: Synthetic peptide
GAANRIQSW

SEQ ID NO: 18867 - protein, 9 aa, Artificial Sequence
  Description of Artificial Sequence: Synthetic peptide
GHMFETFWG

SEQ ID NO: 18868 - protein, 9 aa, Artificial Sequence
  Description of Artificial Sequence: Synthetic peptide
EAQPSEING

SEQ ID NO: 18869 - protein, 9 aa, Artificial Sequence
  Description of Artificial Sequence: Synthetic peptide
ECLEVKRTC

SEQ ID NO: 18870 - protein, 9 aa, Artificial Sequence
  Description of Artificial Sequence: Synthetic peptide
FGDHLRVMY

SEQ ID NO: 18871 - protein, 9 aa, Artificial Sequence
  Description of Artificial Sequence: Synthetic peptide
WTHCTNNQI

SEQ ID NO: 18872 - protein, 9 aa, Artificial Sequence
  Description of Artificial Sequence: Synthetic peptide
NAYYDSHCE

SEQ ID NO: 18873 - protein, 9 aa, Artificial Sequence
  Description of Artificial Sequence: Synthetic peptide
EKYQIHWDR

SEQ ID NO: 18874 - protein, 9 aa, Artificial Sequence
  Description of Artificial Sequence: Synthetic peptide
QALVGNAAE

SEQ ID NO: 18875 - protein, 9 aa, Artificial Sequence
  Description of Artificial Sequence: Synthetic peptide
QSSSSYLWG

SEQ ID NO: 18876 - protein, 9 aa, Artificial Sequence
  Description of Artificial Sequence: Synthetic peptide
LESVKMDCN

SEQ ID NO: 18877 - protein, 9 aa, Artificial Sequence
  Description of Artificial Sequence: Synthetic peptide
QRSVFHQRS

SEQ ID NO: 18878 - protein, 9 aa, Artificial Sequence
  Description of Artificial Sequence: Synthetic peptide
NDVWQPHPN

SEQ ID NO: 18879 - protein, 9 aa, Artificial Sequence
  Description of Artificial Sequence: Synthetic peptide
EDQWISNPF

SEQ ID NO: 18880 - protein, 9 aa, Artificial Sequence
  Description of Artificial Sequence: Synthetic peptide
DHLSNDAEM

SEQ ID NO: 18881 - protein, 9 aa, Artificial Sequence
  Description of Artificial Sequence: Synthetic peptide
LHKAYVTDS

SEQ ID NO: 18882 - protein, 9 aa, Artificial Sequence
  Description of Artificial Sequence: Synthetic peptide
AVDHYSNGA

SEQ ID NO: 18883 - protein, 9 aa, Artificial Sequence
  Description of Artificial Sequence: Synthetic peptide
DMKQKAEYT

SEQ ID NO: 18884 - protein, 9 aa, Artificial Sequence
  Description of Artificial Sequence: Synthetic peptide
IMYLKRCCT

SEQ ID NO: 18885 - protein, 9 aa, Artificial Sequence
  Description of Artificial Sequence: Synthetic peptide
DQRHGNVSP

SEQ ID NO: 18886 - protein, 9 aa, Artificial Sequence
  Description of Artificial Sequence: Synthetic peptide
RVTIMFTGT

SEQ ID NO: 18887 - protein, 9 aa, Artificial Sequence
  Description of Artificial Sequence: Synthetic peptide
TTYPHNTHG

SEQ ID NO: 18888 - protein, 9 aa, Artificial Sequence
  Description of Artificial Sequence: Synthetic peptide
PPRFLQTTG

SEQ ID NO: 18889 - protein, 9 aa, Artificial Sequence
  Description of Artificial Sequence: Synthetic peptide
YPTMTFPEE

SEQ ID NO: 18890 - protein, 9 aa, Artificial Sequence
  Description of Artificial Sequence: Synthetic peptide
GCEEVGRCQ

SEQ ID NO: 18891 - protein, 9 aa, Artificial Sequence
  Description of Artificial Sequence: Synthetic peptide
MAAITQNVA

SEQ ID NO: 18892 - protein, 9 aa, Artificial Sequence
  Description of Artificial Sequence: Synthetic peptide
WPTMLSAHM

SEQ ID NO: 18893 - protein, 9 aa, Artificial Sequence
  Description of Artificial Sequence: Synthetic peptide
KCLPYMEMF

SEQ ID NO: 18894 - protein, 9 aa, Artificial Sequence
  Description of Artificial Sequence: Synthetic peptide
AHAWLQHWA

SEQ ID NO: 18895 - protein, 9 aa, Artificial Sequence
  Description of Artificial Sequence: Synthetic peptide
PDLWYEKSS

SEQ ID NO: 18896 - protein, 9 aa, Artificial Sequence
  Description of Artificial Sequence: Synthetic peptide
DTRRNLCCD

SEQ ID NO: 18897 - protein, 9 aa, Artificial Sequence
  Description of Artificial Sequence: Synthetic peptide
LIEKQRWML

SEQ ID NO: 18898 - protein, 9 aa, Artificial Sequence
  Description of Artificial Sequence: Synthetic peptide
ENQSTMSHT

SEQ ID NO: 18899 - protein, 9 aa, Artificial Sequence
  Description of Artificial Sequence: Synthetic peptide
QWMHCQLSR

SEQ ID NO: 18900 - protein, 9 aa, Artificial Sequence
  Description of Artificial Sequence: Synthetic peptide
ICHIRTRGN

SEQ ID NO: 18901 - protein, 9 aa, Artificial Sequence
  Description of Artificial Sequence: Synthetic peptide
YISEYVMMV

SEQ ID NO: 18902 - protein, 9 aa, Artificial Sequence
  Description of Artificial Sequence: Synthetic peptide
QATGMHRWQ

SEQ ID NO: 18903 - protein, 9 aa, Artificial Sequence
  Description of Artificial Sequence: Synthetic peptide
MFMTNVNSF

SEQ ID NO: 18904 - protein, 9 aa, Artificial Sequence
  Description of Artificial Sequence: Synthetic peptide
KTVETYAAH

SEQ ID NO: 18905 - protein, 9 aa, Artificial Sequence
  Description of Artificial Sequence: Synthetic peptide
HIKVEHEEV

SEQ ID NO: 18906 - protein, 9 aa, Artificial Sequence
  Description of Artificial Sequence: Synthetic peptide
KMAGIGCWY

SEQ ID NO: 18907 - protein, 9 aa, Artificial Sequence
  Description of Artificial Sequence: Synthetic peptide
QCTAHNTCM

SEQ ID NO: 18908 - protein, 9 aa, Artificial Sequence
  Description of Artificial Sequence: Synthetic peptide
RTRISQMFG

SEQ ID NO: 18909 - protein, 9 aa, Artificial Sequence
  Description of Artificial Sequence: Synthetic peptide
MGYAKHDSH

SEQ ID NO: 18910 - protein, 9 aa, Artificial Sequence
  Description of Artificial Sequence: Synthetic peptide
PIWQGYWPW

SEQ ID NO: 18911 - protein, 9 aa, Artificial Sequence
  Description of Artificial Sequence: Synthetic peptide
RCGEIMGLD

SEQ ID NO: 18912 - protein, 9 aa, Artificial Sequence
  Description of Artificial Sequence: Synthetic peptide
LPSHCNLGS

SEQ ID NO: 18913 - protein, 9 aa, Artificial Sequence
  Description of Artificial Sequence: Synthetic peptide
PAHINDQYM

SEQ ID NO: 18914 - protein, 9 aa, Artificial Sequence
  Description of Artificial Sequence: Synthetic peptide
DRVNLMWKD

SEQ ID NO: 18915 - protein, 9 aa, Artificial Sequence
  Description of Artificial Sequence: Synthetic peptide
QCVDCPPYC

SEQ ID NO: 18916 - protein, 9 aa, Artificial Sequence
  Description of Artificial Sequence: Synthetic peptide
AVHTADVCC

SEQ ID NO: 18917 - protein, 9 aa, Artificial Sequence
  Description of Artificial Sequence: Synthetic peptide
NQREWHGLA

SEQ ID NO: 18918 - protein, 9 aa, Artificial Sequence
  Description of Artificial Sequence: Synthetic peptide
HIHMSDRGA

SEQ ID NO: 18919 - protein, 9 aa, Artificial Sequence
  Description of Artificial Sequence: Synthetic peptide
PCCWEQSTN

SEQ ID NO: 18920 - protein, 9 aa, Artificial Sequence
  Description of Artificial Sequence: Synthetic peptide
AFLHGQMWQ

SEQ ID NO: 18921 - protein, 9 aa, Artificial Sequence
  Description of Artificial Sequence: Synthetic peptide
PLTIEVNCT

SEQ ID NO: 18922 - protein, 9 aa, Artificial Sequence
  Description of Artificial Sequence: Synthetic peptide
IAKIGNCVW

SEQ ID NO: 18923 - protein, 9 aa, Artificial Sequence
  Description of Artificial Sequence: Synthetic peptide
YFPSIQCYE

SEQ ID NO: 18924 - protein, 9 aa, Artificial Sequence
  Description of Artificial Sequence: Synthetic peptide
NMPSLRTRI

SEQ ID NO: 18925 - protein, 9 aa, Artificial Sequence
  Description of Artificial Sequence: Synthetic peptide
CKNHYMMAA

SEQ ID NO: 18926 - protein, 9 aa, Artificial Sequence
  Description of Artificial Sequence: Synthetic peptide
SECEVLCSL

SEQ ID NO: 18927 - protein, 9 aa, Artificial Sequence
  Description of Artificial Sequence: Synthetic peptide
ERQAHNHYA

SEQ ID NO: 18928 - protein, 9 aa, Artificial Sequence
  Description of Artificial Sequence: Synthetic peptide
ERFHSYPLG

SEQ ID NO: 18929 - protein, 9 aa, Artificial Sequence
  Description of Artificial Sequence: Synthetic peptide
MAEQMERDF

SEQ ID NO: 18930 - protein, 9 aa, Artificial Sequence
  Description of Artificial Sequence: Synthetic peptide
DQEAQVVTG

SEQ ID NO: 18931 - protein, 9 aa, Artificial Sequence
  Description of Artificial Sequence: Synthetic peptide
ACVERLHHK

SEQ ID NO: 18932 - protein, 9 aa, Artificial Sequence
  Description of Artificial Sequence: Synthetic peptide
NHSLCWDSK

SEQ ID NO: 18933 - protein, 9 aa, Artificial Sequence
  Description of Artificial Sequence: Synthetic peptide
MYDTMGAWC

SEQ ID NO: 18934 - protein, 9 aa, Artificial Sequence
  Description of Artificial Sequence: Synthetic peptide
QRNEMSASR

SEQ ID NO: 18935 - protein, 9 aa, Artificial Sequence
  Description of Artificial Sequence: Synthetic peptide
GHLFNNNEW

SEQ ID NO: 18936 - protein, 9 aa, Artificial Sequence
  Description of Artificial Sequence: Synthetic peptide
MLPLEMKNL

SEQ ID NO: 18937 - protein, 9 aa, Artificial Sequence
  Description of Artificial Sequence: Synthetic peptide
ATGTYNLQE

SEQ ID NO: 18938 - protein, 9 aa, Artificial Sequence
  Description of Artificial Sequence: Synthetic peptide
YVDHWTLGD

SEQ ID NO: 18939 - protein, 9 aa, Artificial Sequence
  Description of Artificial Sequence: Synthetic peptide
IAQSEADYW

SEQ ID NO: 18940 - protein, 9 aa, Artificial Sequence
  Description of Artificial Sequence: Synthetic peptide
LINSIVCGD

SEQ ID NO: 18941 - protein, 9 aa, Artificial Sequence
  Description of Artificial Sequence: Synthetic peptide
LVQKWMRTC

SEQ ID NO: 18942 - protein, 9 aa, Artificial Sequence
  Description of Artificial Sequence: Synthetic peptide
AAMESCAEI

SEQ ID NO: 18943 - protein, 9 aa, Artificial Sequence
  Description of Artificial Sequence: Synthetic peptide
DMTLQSVSS

SEQ ID NO: 18944 - protein, 9 aa, Artificial Sequence
  Description of Artificial Sequence: Synthetic peptide
AEDTPYTIY

SEQ ID NO: 18945 - protein, 9 aa, Artificial Sequence
  Description of Artificial Sequence: Synthetic peptide
HFQPVFMQP

SEQ ID NO: 18946 - protein, 9 aa, Artificial Sequence
  Description of Artificial Sequence: Synthetic peptide
LSPWPQTDQ

SEQ ID NO: 18947 - protein, 9 aa, Artificial Sequence
  Description of Artificial Sequence: Synthetic peptide
AGMYKCQED

SEQ ID NO: 18948 - protein, 9 aa, Artificial Sequence
  Description of Artificial Sequence: Synthetic peptide
PHAETHWYT

SEQ ID NO: 18949 - protein, 9 aa, Artificial Sequence
  Description of Artificial Sequence: Synthetic peptide
YPDTADIFW

SEQ ID NO: 18950 - protein, 9 aa, Artificial Sequence
  Description of Artificial Sequence: Synthetic peptide
VTMIHNAFH

SEQ ID NO: 18951 - protein, 9 aa, Artificial Sequence
  Description of Artificial Sequence: Synthetic peptide
DLIVATEWF

SEQ ID NO: 18952 - protein, 9 aa, Artificial Sequence
  Description of Artificial Sequence: Synthetic peptide
HSMMPGWPS

SEQ ID NO: 18953 - protein, 9 aa, Artificial Sequence
  Description of Artificial Sequence: Synthetic peptide
IWITCPYAA

SEQ ID NO: 18954 - protein, 9 aa, Artificial Sequence
  Description of Artificial Sequence: Synthetic peptide
PYGPIEYDE

SEQ ID NO: 18955 - protein, 9 aa, Artificial Sequence
  Description of Artificial Sequence: Synthetic peptide
ATMNLSWGL

SEQ ID NO: 18956 - protein, 9 aa, Artificial Sequence
  Description of Artificial Sequence: Synthetic peptide
NGVGRSGDN

SEQ ID NO: 18957 - protein, 9 aa, Artificial Sequence
  Description of Artificial Sequence: Synthetic peptide
RCADNPYFR

SEQ ID NO: 18958 - protein, 9 aa, Artificial Sequence
  Description of Artificial Sequence: Synthetic peptide
WERCLELNQ

SEQ ID NO: 18959 - protein, 9 aa, Artificial Sequence
  Description of Artificial Sequence: Synthetic peptide
SNVACIQAF

SEQ ID NO: 18960 - protein, 9 aa, Artificial Sequence
  Description of Artificial Sequence: Synthetic peptide
INYISFVDR

SEQ ID NO: 18961 - protein, 9 aa, Artificial Sequence
  Description of Artificial Sequence: Synthetic peptide
LEIGGKTRT

SEQ ID NO: 18962 - protein, 9 aa, Artificial Sequence
  Description of Artificial Sequence: Synthetic peptide
YDYWMQAPT

SEQ ID NO: 18963 - protein, 9 aa, Artificial Sequence
  Description of Artificial Sequence: Synthetic peptide
QSAHPEPMC

SEQ ID NO: 18964 - protein, 9 aa, Artificial Sequence
  Description of Artificial Sequence: Synthetic peptide
ASMHEETCL

SEQ ID NO: 18965 - protein, 9 aa, Artificial Sequence
  Description of Artificial Sequence: Synthetic peptide
DMIDPVRHG

SEQ ID NO: 18966 - protein, 9 aa, Artificial Sequence
  Description of Artificial Sequence: Synthetic peptide
ADRSNSSCF

SEQ ID NO: 18967 - protein, 9 aa, Artificial Sequence
  Description of Artificial Sequence: Synthetic peptide
AEYSTNLHS

SEQ ID NO: 18968 - protein, 9 aa, Artificial Sequence
  Description of Artificial Sequence: Synthetic peptide
AFSYCMAHM

SEQ ID NO: 18969 - protein, 9 aa, Artificial Sequence
  Description of Artificial Sequence: Synthetic peptide
AIDYKTDWT

SEQ ID NO: 18970 - protein, 9 aa, Artificial Sequence
  Description of Artificial Sequence: Synthetic peptide
AKACHLWGK

SEQ ID NO: 18971 - protein, 9 aa, Artificial Sequence
  Description of Artificial Sequence: Synthetic peptide
ALQMAYEWS

SEQ ID NO: 18972 - protein, 9 aa, Artificial Sequence
  Description of Artificial Sequence: Synthetic peptide
ANDIAEHWG

SEQ ID NO: 18973 - protein, 9 aa, Artificial Sequence
  Description of Artificial Sequence: Synthetic peptide
ANVCIITHC

SEQ ID NO: 18974 - protein, 9 aa, Artificial Sequence
  Description of Artificial Sequence: Synthetic peptide
APFMMQCFS

SEQ ID NO: 18975 - protein, 9 aa, Artificial Sequence
  Description of Artificial Sequence: Synthetic peptide
APYPSWPTY

SEQ ID NO: 18976 - protein, 9 aa, Artificial Sequence
  Description of Artificial Sequence: Synthetic peptide
AQWRIMFIA

SEQ ID NO: 18977 - protein, 9 aa, Artificial Sequence
  Description of Artificial Sequence: Synthetic peptide
ARDCWWSDG

SEQ ID NO: 18978 - protein, 9 aa, Artificial Sequence
  Description of Artificial Sequence: Synthetic peptide
ARDRPHRGS

SEQ ID NO: 18979 - protein, 9 aa, Artificial Sequence
  Description of Artificial Sequence: Synthetic peptide
ASCRCLNWH

SEQ ID NO: 18980 - protein, 9 aa, Artificial Sequence
  Description of Artificial Sequence: Synthetic peptide
ASQRSGRQP

SEQ ID NO: 18981 - protein, 9 aa, Artificial Sequence
  Description of Artificial Sequence: Synthetic peptide
ATEHVRSWW

SEQ ID NO: 18982 - protein, 9 aa, Artificial Sequence
  Description of Artificial Sequence: Synthetic peptide
ATIMFIEIS

SEQ ID NO: 18983 - protein, 9 aa, Artificial Sequence
  Description of Artificial Sequence: Synthetic peptide
ATKCVLGLG

SEQ ID NO: 18984 - protein, 9 aa, Artificial Sequence
  Description of Artificial Sequence: Synthetic peptide
ATMYMERAD

SEQ ID NO: 18985 - protein, 9 aa, Artificial Sequence
  Description of Artificial Sequence: Synthetic peptide
ATYEHSCTK

SEQ ID NO: 18986 - protein, 9 aa, Artificial Sequence
  Description of Artificial Sequence: Synthetic peptide
AVNHAQCGF

SEQ ID NO: 18987 - protein, 9 aa, Artificial Sequence
  Description of Artificial Sequence: Synthetic peptide
CARLGGRGN

SEQ ID NO: 18988 - protein, 9 aa, Artificial Sequence
  Description of Artificial Sequence: Synthetic peptide
CCTILNMSG

SEQ ID NO: 18989 - protein, 9 aa, Artificial Sequence
  Description of Artificial Sequence: Synthetic peptide
CFEFLWEHE

SEQ ID NO: 18990 - protein, 9 aa, Artificial Sequence
  Description of Artificial Sequence: Synthetic peptide
CLVRIQKDH

SEQ ID NO: 18991 - protein, 9 aa, Artificial Sequence
  Description of Artificial Sequence: Synthetic peptide
CQAIINADT

SEQ ID NO: 18992 - protein, 9 aa, Artificial Sequence
  Description of Artificial Sequence: Synthetic peptide
CSTMPKLPE

SEQ ID NO: 18993 - protein, 9 aa, Artificial Sequence
  Description of Artificial Sequence: Synthetic peptide
CTMSPGYDQ

SEQ ID NO: 18994 - protein, 9 aa, Artificial Sequence
  Description of Artificial Sequence: Synthetic peptide
CVVMAVDNT

SEQ ID NO: 18995 - protein, 9 aa, Artificial Sequence
  Description of Artificial Sequence: Synthetic peptide
CWGWAPPDD

SEQ ID NO: 18996 - protein, 9 aa, Artificial Sequence
  Description of Artificial Sequence: Synthetic peptide
CWPQSCKPE

SEQ ID NO: 18997 - protein, 9 aa, Artificial Sequence
  Description of Artificial Sequence: Synthetic peptide
DGENMDEMA

SEQ ID NO: 18998 - protein, 9 aa, Artificial Sequence
  Description of Artificial Sequence: Synthetic peptide
DIGRFIAYY

SEQ ID NO: 18999 - protein, 9 aa, Artificial Sequence
  Description of Artificial Sequence: Synthetic peptide
DIKLVEAYA

SEQ ID NO: 19000 - protein, 9 aa, Artificial Sequence
  Description of Artificial Sequence: Synthetic peptide
DKDEFQMAP

SEQ ID NO: 19001 - protein, 9 aa, Artificial Sequence
  Description of Artificial Sequence: Synthetic peptide
DNDMYHSMQ

SEQ ID NO: 19002 - protein, 9 aa, Artificial Sequence
  Description of Artificial Sequence: Synthetic peptide
DNNFKDKEE

SEQ ID NO: 19003 - protein, 9 aa, Artificial Sequence
  Description of Artificial Sequence: Synthetic peptide
DSFYPQLQN

SEQ ID NO: 19004 - protein, 9 aa, Artificial Sequence
  Description of Artificial Sequence: Synthetic peptide
DSQLISTLA

SEQ ID NO: 19005 - protein, 9 aa, Artificial Sequence
  Description of Artificial Sequence: Synthetic peptide
DTINWIASQ

SEQ ID NO: 19006 - protein, 9 aa, Artificial Sequence
  Description of Artificial Sequence: Synthetic peptide
DTLKSDNYI

SEQ ID NO: 19007 - protein, 9 aa, Artificial Sequence
  Description of Artificial Sequence: Synthetic peptide
DTRGKAFFP

SEQ ID NO: 19008 - protein, 9 aa, Artificial Sequence
  Description of Artificial Sequence: Synthetic peptide
DVITVYWDS

SEQ ID NO: 19009 - protein, 9 aa, Artificial Sequence
  Description of Artificial Sequence: Synthetic peptide
DVTDDQIHM

SEQ ID NO: 19010 - protein, 9 aa, Artificial Sequence
  Description of Artificial Sequence: Synthetic peptide
DVVKSWQMG

SEQ ID NO: 19011 - protein, 9 aa, Artificial Sequence
  Description of Artificial Sequence: Synthetic peptide
DYSLLWMYE

SEQ ID NO: 19012 - protein, 9 aa, Artificial Sequence
  Description of Artificial Sequence: Synthetic peptide
ECAFIHVDE

SEQ ID NO: 19013 - protein, 9 aa, Artificial Sequence
  Description of Artificial Sequence: Synthetic peptide
ECMQYFPEW

SEQ ID NO: 19014 - protein, 9 aa, Artificial Sequence
  Description of Artificial Sequence: Synthetic peptide
EDRLIVRMD

SEQ ID NO: 19015 - protein, 9 aa, Artificial Sequence
  Description of Artificial Sequence: Synthetic peptide
EHITEQDLW

SEQ ID NO: 19016 - protein, 9 aa, Artificial Sequence
  Description of Artificial Sequence: Synthetic peptide
EIGMEYGHS

SEQ ID NO: 19017 - protein, 9 aa, Artificial Sequence
  Description of Artificial Sequence: Synthetic peptide
EINNAIASR

SEQ ID NO: 19018 - protein, 9 aa, Artificial Sequence
  Description of Artificial Sequence: Synthetic peptide
EIQQMCVKW

SEQ ID NO: 19019 - protein, 9 aa, Artificial Sequence
  Description of Artificial Sequence: Synthetic peptide
EIYMCKEGN

SEQ ID NO: 19020 - protein, 9 aa, Artificial Sequence
  Description of Artificial Sequence: Synthetic peptide
EMSWKMKPT

SEQ ID NO: 19021 - protein, 9 aa, Artificial Sequence
  Description of Artificial Sequence: Synthetic peptide
ENHPPWLHC

SEQ ID NO: 19022 - protein, 9 aa, Artificial Sequence
  Description of Artificial Sequence: Synthetic peptide
ERDSLWFGK

SEQ ID NO: 19023 - protein, 9 aa, Artificial Sequence
  Description of Artificial Sequence: Synthetic peptide
ESPQIHIYS

SEQ ID NO: 19024 - protein, 9 aa, Artificial Sequence
  Description of Artificial Sequence: Synthetic peptide
ETVQDVGLH

SEQ ID NO: 19025 - protein, 9 aa, Artificial Sequence
  Description of Artificial Sequence: Synthetic peptide
EVSWVPTTK

SEQ ID NO: 19026 - protein, 9 aa, Artificial Sequence
  Description of Artificial Sequence: Synthetic peptide
EVVNSQFNL

SEQ ID NO: 19027 - protein, 9 aa, Artificial Sequence
  Description of Artificial Sequence: Synthetic peptide
EYEWVDEPQ

SEQ ID NO: 19028 - protein, 9 aa, Artificial Sequence
  Description of Artificial Sequence: Synthetic peptide
EYFKLRQFG

SEQ ID NO: 19029 - protein, 9 aa, Artificial Sequence
  Description of Artificial Sequence: Synthetic peptide
EYSNETHQE

SEQ ID NO: 19030 - protein, 9 aa, Artificial Sequence
  Description of Artificial Sequence: Synthetic peptide
FEADNTMVH

SEQ ID NO: 19031 - protein, 9 aa, Artificial Sequence
  Description of Artificial Sequence: Synthetic peptide
FGHFITKKM

SEQ ID NO: 19032 - protein, 9 aa, Artificial Sequence
  Description of Artificial Sequence: Synthetic peptide
FIKLTTLPS

SEQ ID NO: 19033 - protein, 9 aa, Artificial Sequence
  Description of Artificial Sequence: Synthetic peptide
FLEAMQRTP

SEQ ID NO: 19034 - protein, 9 aa, Artificial Sequence
  Description of Artificial Sequence: Synthetic peptide
FLQYSMSGN

SEQ ID NO: 19035 - protein, 9 aa, Artificial Sequence
  Description of Artificial Sequence: Synthetic peptide
FMDECLRVD

SEQ ID NO: 19036 - protein, 9 aa, Artificial Sequence
  Description of Artificial Sequence: Synthetic peptide
FNSSEQQQM

SEQ ID NO: 19037 - protein, 9 aa, Artificial Sequence
  Description of Artificial Sequence: Synthetic peptide
FSHKISVWC

SEQ ID NO: 19038 - protein, 9 aa, Artificial Sequence
  Description of Artificial Sequence: Synthetic peptide
FTHWVNEQL

SEQ ID NO: 19039 - protein, 9 aa, Artificial Sequence
  Description of Artificial Sequence: Synthetic peptide
FVKVVWGHK

SEQ ID NO: 19040 - protein, 9 aa, Artificial Sequence
  Description of Artificial Sequence: Synthetic peptide
GDNMDQTQG

SEQ ID NO: 19041 - protein, 9 aa, Artificial Sequence
  Description of Artificial Sequence: Synthetic peptide
GFKKFHFTF

SEQ ID NO: 19042 - protein, 9 aa, Artificial Sequence
  Description of Artificial Sequence: Synthetic peptide
GKERFHRID

SEQ ID NO: 19043 - protein, 9 aa, Artificial Sequence
  Description of Artificial Sequence: Synthetic peptide
GMSLKNYEE

SEQ ID NO: 19044 - protein, 9 aa, Artificial Sequence
  Description of Artificial Sequence: Synthetic peptide
GNYHLDQDE

SEQ ID NO: 19045 - protein, 9 aa, Artificial Sequence
  Description of Artificial Sequence: Synthetic peptide
GPNGDVARY

SEQ ID NO: 19046 - protein, 9 aa, Artificial Sequence
  Description of Artificial Sequence: Synthetic peptide
GQQTMEMSY

SEQ ID NO: 19047 - protein, 9 aa, Artificial Sequence
  Description of Artificial Sequence: Synthetic peptide
GTMHALKDE

SEQ ID NO: 19048 - protein, 9 aa, Artificial Sequence
  Description of Artificial Sequence: Synthetic peptide
GTQSERDIQ

SEQ ID NO: 19049 - protein, 9 aa, Artificial Sequence
  Description of Artificial Sequence: Synthetic peptide
GVEFVPIGN

SEQ ID NO: 19050 - protein, 9 aa, Artificial Sequence
  Description of Artificial Sequence: Synthetic peptide
HCIFKDPKI

SEQ ID NO: 19051 - protein, 9 aa, Artificial Sequence
  Description of Artificial Sequence: Synthetic peptide
HEVDRPAPC

SEQ ID NO: 19052 - protein, 9 aa, Artificial Sequence
  Description of Artificial Sequence: Synthetic peptide
HITNYGYCG

SEQ ID NO: 19053 - protein, 9 aa, Artificial Sequence
  Description of Artificial Sequence: Synthetic peptide
HNPATECRC

SEQ ID NO: 19054 - protein, 9 aa, Artificial Sequence
  Description of Artificial Sequence: Synthetic peptide
HPLTQMVLE

SEQ ID NO: 19055 - protein, 9 aa, Artificial Sequence
  Description of Artificial Sequence: Synthetic peptide
HPLTQMVLG

SEQ ID NO: 19056 - protein, 9 aa, Artificial Sequence
  Description of Artificial Sequence: Synthetic peptide
HRRRAKVWV

SEQ ID NO: 19057 - protein, 9 aa, Artificial Sequence
  Description of Artificial Sequence: Synthetic peptide
HTRYWGFAL

SEQ ID NO: 19058 - protein, 9 aa, Artificial Sequence
  Description of Artificial Sequence: Synthetic peptide
IAGMHEFQQ

SEQ ID NO: 19059 - protein, 9 aa, Artificial Sequence
  Description of Artificial Sequence: Synthetic peptide
IFILIEWHH

SEQ ID NO: 19060 - protein, 9 aa, Artificial Sequence
  Description of Artificial Sequence: Synthetic peptide
IKTITYHST

SEQ ID NO: 19061 - protein, 9 aa, Artificial Sequence
  Description of Artificial Sequence: Synthetic peptide
ILWSQHEVL

SEQ ID NO: 19062 - protein, 9 aa, Artificial Sequence
  Description of Artificial Sequence: Synthetic peptide
INISTPVNC

SEQ ID NO: 19063 - protein, 9 aa, Artificial Sequence
  Description of Artificial Sequence: Synthetic peptide
ISHQCHQIH

SEQ ID NO: 19064 - protein, 9 aa, Artificial Sequence
  Description of Artificial Sequence: Synthetic peptide
ISTQMSWDG

SEQ ID NO: 19065 - protein, 9 aa, Artificial Sequence
  Description of Artificial Sequence: Synthetic peptide
ITFCCRAAK

SEQ ID NO: 19066 - protein, 9 aa, Artificial Sequence
  Description of Artificial Sequence: Synthetic peptide
ITQYTTYEG

SEQ ID NO: 19067 - protein, 9 aa, Artificial Sequence
  Description of Artificial Sequence: Synthetic peptide
IVAEHDPGF

SEQ ID NO: 19068 - protein, 9 aa, Artificial Sequence
  Description of Artificial Sequence: Synthetic peptide
IVMPALMCK

SEQ ID NO: 19069 - protein, 9 aa, Artificial Sequence
  Description of Artificial Sequence: Synthetic peptide
IYKLFQHGM

SEQ ID NO: 19070 - protein, 9 aa, Artificial Sequence
  Description of Artificial Sequence: Synthetic peptide
IYRLFQHGM

SEQ ID NO: 19071 - protein, 9 aa, Artificial Sequence
  Description of Artificial Sequence: Synthetic peptide
KADNRNWSC

SEQ ID NO: 19072 - protein, 9 aa, Artificial Sequence
  Description of Artificial Sequence: Synthetic peptide
KAQPSEING

SEQ ID NO: 19073 - protein, 9 aa, Artificial Sequence
  Description of Artificial Sequence: Synthetic peptide
KCLPYMKMF

SEQ ID NO: 19074 - protein, 9 aa, Artificial Sequence
  Description of Artificial Sequence: Synthetic peptide
KCTAEKAQC

SEQ ID NO: 19075 - protein, 9 aa, Artificial Sequence
  Description of Artificial Sequence: Synthetic peptide
KCTVEKAQC

SEQ ID NO: 19076 - protein, 9 aa, Artificial Sequence
  Description of Artificial Sequence: Synthetic peptide
KEREERRFW

SEQ ID NO: 19077 - protein, 9 aa, Artificial Sequence
  Description of Artificial Sequence: Synthetic peptide
KKYFPTGIG

SEQ ID NO: 19078 - protein, 9 aa, Artificial Sequence
  Description of Artificial Sequence: Synthetic peptide
KLDYHGVRQ

SEQ ID NO: 19079 - protein, 9 aa, Artificial Sequence
  Description of Artificial Sequence: Synthetic peptide
KMVQVEHYT

SEQ ID NO: 19080 - protein, 9 aa, Artificial Sequence
  Description of Artificial Sequence: Synthetic peptide
KVMTAEIAD

SEQ ID NO: 19081 - protein, 9 aa, Artificial Sequence
  Description of Artificial Sequence: Synthetic peptide
LACACQDAP

SEQ ID NO: 19082 - protein, 9 aa, Artificial Sequence
  Description of Artificial Sequence: Synthetic peptide
LDGSCYHWG

SEQ ID NO: 19083 - protein, 9 aa, Artificial Sequence
  Description of Artificial Sequence: Synthetic peptide
LKATCTAMD

SEQ ID NO: 19084 - protein, 9 aa, Artificial Sequence
  Description of Artificial Sequence: Synthetic peptide
LTTVYNWQH

SEQ ID NO: 19085 - protein, 9 aa, Artificial Sequence
  Description of Artificial Sequence: Synthetic peptide
LVEMGCEPR

SEQ ID NO: 19086 - protein, 9 aa, Artificial Sequence
  Description of Artificial Sequence: Synthetic peptide
LWTMDTVRP

SEQ ID NO: 19087 - protein, 9 aa, Artificial Sequence
  Description of Artificial Sequence: Synthetic peptide
LYVGWMNCL

SEQ ID NO: 19088 - protein, 9 aa, Artificial Sequence
  Description of Artificial Sequence: Synthetic peptide
MCYHTGHFA

SEQ ID NO: 19089 - protein, 9 aa, Artificial Sequence
  Description of Artificial Sequence: Synthetic peptide
MGGMIVMCQ

SEQ ID NO: 19090 - protein, 9 aa, Artificial Sequence
  Description of Artificial Sequence: Synthetic peptide
MHCRTFSHN

SEQ ID NO: 19091 - protein, 9 aa, Artificial Sequence
  Description of Artificial Sequence: Synthetic peptide
MHMRTNEGS

SEQ ID NO: 19092 - protein, 9 aa, Artificial Sequence
  Description of Artificial Sequence: Synthetic peptide
MILTEGIIE

SEQ ID NO: 19093 - protein, 9 aa, Artificial Sequence
  Description of Artificial Sequence: Synthetic peptide
MLHMMPWID

SEQ ID NO: 19094 - protein, 9 aa, Artificial Sequence
  Description of Artificial Sequence: Synthetic peptide
MMAMKQRFY

SEQ ID NO: 19095 - protein, 9 aa, Artificial Sequence
  Description of Artificial Sequence: Synthetic peptide
MMGGKFGTT

SEQ ID NO: 19096 - protein, 9 aa, Artificial Sequence
  Description of Artificial Sequence: Synthetic peptide
MNNEVWKAS

SEQ ID NO: 19097 - protein, 9 aa, Artificial Sequence
  Description of Artificial Sequence: Synthetic peptide
MNQHWPPQI

SEQ ID NO: 19098 - protein, 9 aa, Artificial Sequence
  Description of Artificial Sequence: Synthetic peptide
MPLSMKAKK

SEQ ID NO: 19099 - protein, 9 aa, Artificial Sequence
  Description of Artificial Sequence: Synthetic peptide
MSDTMDMGE

SEQ ID NO: 19100 - protein, 9 aa, Artificial Sequence
  Description of Artificial Sequence: Synthetic peptide
MSIMCCSDC

SEQ ID NO: 19101 - protein, 9 aa, Artificial Sequence
  Description of Artificial Sequence: Synthetic peptide
MSNVCICTG

SEQ ID NO: 19102 - protein, 9 aa, Artificial Sequence
  Description of Artificial Sequence: Synthetic peptide
MTGHNESFT

SEQ ID NO: 19103 - protein, 9 aa, Artificial Sequence
  Description of Artificial Sequence: Synthetic peptide
MTVAGQSRD

SEQ ID NO: 19104 - protein, 9 aa, Artificial Sequence
  Description of Artificial Sequence: Synthetic peptide
MTWTRNSGT

SEQ ID NO: 19105 - protein, 9 aa, Artificial Sequence
  Description of Artificial Sequence: Synthetic peptide
MVDREKKKE

SEQ ID NO: 19106 - protein, 9 aa, Artificial Sequence
  Description of Artificial Sequence: Synthetic peptide
MVSSETGSH

SEQ ID NO: 19107 - protein, 9 aa, Artificial Sequence
  Description of Artificial Sequence: Synthetic peptide
MWKRHCGMG

SEQ ID NO: 19108 - protein, 9 aa, Artificial Sequence
  Description of Artificial Sequence: Synthetic peptide
MWMQMLSAM

SEQ ID NO: 19109 - protein, 9 aa, Artificial Sequence
  Description of Artificial Sequence: Synthetic peptide
MYCLEFMND

SEQ ID NO: 19110 - protein, 9 aa, Artificial Sequence
  Description of Artificial Sequence: Synthetic peptide
MYTGMRCWH

SEQ ID NO: 19111 - protein, 9 aa, Artificial Sequence
  Description of Artificial Sequence: Synthetic peptide
NAPNDLKNY

SEQ ID NO: 19112 - protein, 9 aa, Artificial Sequence
  Description of Artificial Sequence: Synthetic peptide
NASCQYRGA

SEQ ID NO: 19113 - protein, 9 aa, Artificial Sequence
  Description of Artificial Sequence: Synthetic peptide
NASCQYRGV

SEQ ID NO: 19114 - protein, 9 aa, Artificial Sequence
  Description of Artificial Sequence: Synthetic peptide
NATHMYNAH

SEQ ID NO: 19115 - protein, 9 aa, Artificial Sequence
  Description of Artificial Sequence: Synthetic peptide
NGCIVAEAA

SEQ ID NO: 19116 - protein, 9 aa, Artificial Sequence
  Description of Artificial Sequence: Synthetic peptide
NGYIVHACQ

SEQ ID NO: 19117 - protein, 9 aa, Artificial Sequence
  Description of Artificial Sequence: Synthetic peptide
NGYQARTKS

SEQ ID NO: 19118 - protein, 9 aa, Artificial Sequence
  Description of Artificial Sequence: Synthetic peptide
ETTMWNSWA

SEQ ID NO: 19119 - protein, 9 aa, Artificial Sequence
  Description of Artificial Sequence: Synthetic peptide
ENTMWQSSQ

SEQ ID NO: 19120 - protein, 9 aa, Artificial Sequence
  Description of Artificial Sequence: Synthetic peptide
ERQAHNHYA

SEQ ID NO: 19121 - protein, 9 aa, Artificial Sequence
  Description of Artificial Sequence: Synthetic peptide
EAKSRPQYA

SEQ ID NO: 19122 - protein, 9 aa, Artificial Sequence
  Description of Artificial Sequence: Synthetic peptide
ECQQDDTDI

SEQ ID NO: 19123 - protein, 9 aa, Artificial Sequence
  Description of Artificial Sequence: Synthetic peptide
EDICHWHHT

SEQ ID NO: 19124 - protein, 9 aa, Artificial Sequence
  Description of Artificial Sequence: Synthetic peptide
EECIMQRSK

SEQ ID NO: 19125 - protein, 9 aa, Artificial Sequence
  Description of Artificial Sequence: Synthetic peptide
EEERTCKHC

SEQ ID NO: 19126 - protein, 9 aa, Artificial Sequence
  Description of Artificial Sequence: Synthetic peptide
EEFARIPGH

SEQ ID NO: 19127 - protein, 9 aa, Artificial Sequence
  Description of Artificial Sequence: Synthetic peptide
EEPRCVNPC

SEQ ID NO: 19128 - protein, 9 aa, Artificial Sequence
  Description of Artificial Sequence: Synthetic peptide
EFFCQADKA

SEQ ID NO: 19129 - protein, 9 aa, Artificial Sequence
  Description of Artificial Sequence: Synthetic peptide
EGAGLYEFA

SEQ ID NO: 19130 - protein, 9 aa, Artificial Sequence
  Description of Artificial Sequence: Synthetic peptide
EGPELTCDK

SEQ ID NO: 19131 - protein, 9 aa, Artificial Sequence
  Description of Artificial Sequence: Synthetic peptide
EGTLRYTMS

SEQ ID NO: 19132 - protein, 9 aa, Artificial Sequence
  Description of Artificial Sequence: Synthetic peptide
EHDTQDISV

SEQ ID NO: 19133 - protein, 9 aa, Artificial Sequence
  Description of Artificial Sequence: Synthetic peptide
EHHPLGVMG

SEQ ID NO: 19134 - protein, 9 aa, Artificial Sequence
  Description of Artificial Sequence: Synthetic peptide
EHHYCVPWS

SEQ ID NO: 19135 - protein, 9 aa, Artificial Sequence
  Description of Artificial Sequence: Synthetic peptide
EHILTAERI

SEQ ID NO: 19136 - protein, 9 aa, Artificial Sequence
  Description of Artificial Sequence: Synthetic peptide
EIAAKIFCR

SEQ ID NO: 19137 - protein, 9 aa, Artificial Sequence
  Description of Artificial Sequence: Synthetic peptide
EIILIWKQC

SEQ ID NO: 19138 - protein, 9 aa, Artificial Sequence
  Description of Artificial Sequence: Synthetic peptide
EIMSYPHTN

SEQ ID NO: 19139 - protein, 9 aa, Artificial Sequence
  Description of Artificial Sequence: Synthetic peptide
EIQHVSHEH

SEQ ID NO: 19140 - protein, 9 aa, Artificial Sequence
  Description of Artificial Sequence: Synthetic peptide
EKHGCDKAE

SEQ ID NO: 19141 - protein, 9 aa, Artificial Sequence
  Description of Artificial Sequence: Synthetic peptide
ELNHKWHSV

SEQ ID NO: 19142 - protein, 9 aa, Artificial Sequence
  Description of Artificial Sequence: Synthetic peptide
EMALVVSNQ

SEQ ID NO: 19143 - protein, 9 aa, Artificial Sequence
  Description of Artificial Sequence: Synthetic peptide
EMHQFMECQ

SEQ ID NO: 19144 - protein, 9 aa, Artificial Sequence
  Description of Artificial Sequence: Synthetic peptide
EMRFTNFCY

SEQ ID NO: 19145 - protein, 9 aa, Artificial Sequence
  Description of Artificial Sequence: Synthetic peptide
ENIHNNDCT

SEQ ID NO: 19146 - protein, 9 aa, Artificial Sequence
  Description of Artificial Sequence: Synthetic peptide
ENKEKEGQW

SEQ ID NO: 19147 - protein, 9 aa, Artificial Sequence
  Description of Artificial Sequence: Synthetic peptide
ENTMAIIEH

SEQ ID NO: 19148 - protein, 9 aa, Artificial Sequence
  Description of Artificial Sequence: Synthetic peptide
EPILYHEHK

SEQ ID NO: 19149 - protein, 9 aa, Artificial Sequence
  Description of Artificial Sequence: Synthetic peptide
EPIQIFNDA

SEQ ID NO: 19150 - protein, 9 aa, Artificial Sequence
  Description of Artificial Sequence: Synthetic peptide
EQHRDTMRP

SEQ ID NO: 19151 - protein, 9 aa, Artificial Sequence
  Description of Artificial Sequence: Synthetic peptide
EQNACDHYG

SEQ ID NO: 19152 - protein, 9 aa, Artificial Sequence
  Description of Artificial Sequence: Synthetic peptide
EQVFGFWNY

SEQ ID NO: 19153 - protein, 9 aa, Artificial Sequence
  Description of Artificial Sequence: Synthetic peptide
ERMETFDCP

SEQ ID NO: 19154 - protein, 9 aa, Artificial Sequence
  Description of Artificial Sequence: Synthetic peptide
ESCEDEGIL

SEQ ID NO: 19155 - protein, 9 aa, Artificial Sequence
  Description of Artificial Sequence: Synthetic peptide
ESKASGANG

SEQ ID NO: 19156 - protein, 9 aa, Artificial Sequence
  Description of Artificial Sequence: Synthetic peptide
ESMLPIMGR

SEQ ID NO: 19157 - protein, 9 aa, Artificial Sequence
  Description of Artificial Sequence: Synthetic peptide
ESVPLEYAN

SEQ ID NO: 19158 - protein, 9 aa, Artificial Sequence
  Description of Artificial Sequence: Synthetic peptide
ETCCFTNMG

SEQ ID NO: 19159 - protein, 9 aa, Artificial Sequence
  Description of Artificial Sequence: Synthetic peptide
ETCGQGGYT

SEQ ID NO: 19160 - protein, 9 aa, Artificial Sequence
  Description of Artificial Sequence: Synthetic peptide
ETDHCESWY

SEQ ID NO: 19161 - protein, 9 aa, Artificial Sequence
  Description of Artificial Sequence: Synthetic peptide
ETPIEWDEQ

SEQ ID NO: 19162 - protein, 9 aa, Artificial Sequence
  Description of Artificial Sequence: Synthetic peptide
EVEVHSTAL

SEQ ID NO: 19163 - protein, 9 aa, Artificial Sequence
  Description of Artificial Sequence: Synthetic peptide
EVHIAPSAC

SEQ ID NO: 19164 - protein, 9 aa, Artificial Sequence
  Description of Artificial Sequence: Synthetic peptide
EVKRITEQS

SEQ ID NO: 19165 - protein, 9 aa, Artificial Sequence
  Description of Artificial Sequence: Synthetic peptide
EVKRWMMVD

SEQ ID NO: 19166 - protein, 9 aa, Artificial Sequence
  Description of Artificial Sequence: Synthetic peptide
EVMAMVDVA

SEQ ID NO: 19167 - protein, 9 aa, Artificial Sequence
  Description of Artificial Sequence: Synthetic peptide
EVPQNELNV

SEQ ID NO: 19168 - protein, 9 aa, Artificial Sequence
  Description of Artificial Sequence: Synthetic peptide
EVRSIEYWN

SEQ ID NO: 19169 - protein, 9 aa, Artificial Sequence
  Description of Artificial Sequence: Synthetic peptide
EVWHTKILI

SEQ ID NO: 19170 - protein, 9 aa, Artificial Sequence
  Description of Artificial Sequence: Synthetic peptide
EWAFNYNQN

SEQ ID NO: 19171 - protein, 9 aa, Artificial Sequence
  Description of Artificial Sequence: Synthetic peptide
EYKMFEKYE

SEQ ID NO: 19172 - protein, 9 aa, Artificial Sequence
  Description of Artificial Sequence: Synthetic peptide
EDHWHGPGD

SEQ ID NO: 19173 - protein, 9 aa, Artificial Sequence
  Description of Artificial Sequence: Synthetic peptide
FVALKAVID

SEQ ID NO: 19174 - protein, 9 aa, Artificial Sequence
  Description of Artificial Sequence: Synthetic peptide
FVAPVDSFY

SEQ ID NO: 19175 - protein, 9 aa, Artificial Sequence
  Description of Artificial Sequence: Synthetic peptide
FVFEGPMHQ

SEQ ID NO: 19176 - protein, 9 aa, Artificial Sequence
  Description of Artificial Sequence: Synthetic peptide
FVKVRIWTQ

SEQ ID NO: 19177 - protein, 9 aa, Artificial Sequence
  Description of Artificial Sequence: Synthetic peptide
FVQPTFIRH

SEQ ID NO: 19178 - protein, 9 aa, Artificial Sequence
  Description of Artificial Sequence: Synthetic peptide
FVWYGPRNH

SEQ ID NO: 19179 - protein, 9 aa, Artificial Sequence
  Description of Artificial Sequence: Synthetic peptide
GVACVQETD

SEQ ID NO: 19180 - protein, 9 aa, Artificial Sequence
  Description of Artificial Sequence: Synthetic peptide
GVANFMLNN

SEQ ID NO: 19181 - protein, 9 aa, Artificial Sequence
  Description of Artificial Sequence: Synthetic peptide
GVCEENEWM

SEQ ID NO: 19182 - protein, 9 aa, Artificial Sequence
  Description of Artificial Sequence: Synthetic peptide
GVCQMCCWP

SEQ ID NO: 19183 - protein, 9 aa, Artificial Sequence
  Description of Artificial Sequence: Synthetic peptide
GVDARHAQR

SEQ ID NO: 19184 - protein, 9 aa, Artificial Sequence
  Description of Artificial Sequence: Synthetic peptide
GVEFCLTNG

SEQ ID NO: 19185 - protein, 9 aa, Artificial Sequence
  Description of Artificial Sequence: Synthetic peptide
GVEWPPFMQ

SEQ ID NO: 19186 - protein, 9 aa, Artificial Sequence
  Description of Artificial Sequence: Synthetic peptide
GVFMTWQWL

SEQ ID NO: 19187 - protein, 9 aa, Artificial Sequence
  Description of Artificial Sequence: Synthetic peptide
GVHGINVMM

SEQ ID NO: 19188 - protein, 9 aa, Artificial Sequence
  Description of Artificial Sequence: Synthetic peptide
GVHIMQCQF

SEQ ID NO: 19189 - protein, 9 aa, Artificial Sequence
  Description of Artificial Sequence: Synthetic peptide
GVHIYACHY

SEQ ID NO: 19190 - protein, 9 aa, Artificial Sequence
  Description of Artificial Sequence: Synthetic peptide
GVHQVPTWN

SEQ ID NO: 19191 - protein, 9 aa, Artificial Sequence
  Description of Artificial Sequence: Synthetic peptide
GVLQMDWQE

SEQ ID NO: 19192 - protein, 9 aa, Artificial Sequence
  Description of Artificial Sequence: Synthetic peptide
GVMQHWTCD

SEQ ID NO: 19193 - protein, 9 aa, Artificial Sequence
  Description of Artificial Sequence: Synthetic peptide
GVMWDGVAP

SEQ ID NO: 19194 - protein, 9 aa, Artificial Sequence
  Description of Artificial Sequence: Synthetic peptide
GVQMTVRQA

SEQ ID NO: 19195 - protein, 9 aa, Artificial Sequence
  Description of Artificial Sequence: Synthetic peptide
GVTYAQRIC

SEQ ID NO: 19196 - protein, 9 aa, Artificial Sequence
  Description of Artificial Sequence: Synthetic peptide
GVVFCDQKD

SEQ ID NO: 19197 - protein, 9 aa, Artificial Sequence
  Description of Artificial Sequence: Synthetic peptide
GVVLFQGGA

SEQ ID NO: 19198 - protein, 9 aa, Artificial Sequence
  Description of Artificial Sequence: Synthetic peptide
GVVNSMQTK

SEQ ID NO: 19199 - protein, 9 aa, Artificial Sequence
  Description of Artificial Sequence: Synthetic peptide
GVVQQGAMI

SEQ ID NO: 19200 - protein, 9 aa, Artificial Sequence
  Description of Artificial Sequence: Synthetic peptide
HVFVMDGPI

SEQ ID NO: 19201 - protein, 9 aa, Artificial Sequence
  Description of Artificial Sequence: Synthetic peptide
HVIWDSMKL

SEQ ID NO: 19202 - protein, 9 aa, Artificial Sequence
  Description of Artificial Sequence: Synthetic peptide
HVMDHVATS

SEQ ID NO: 19203 - protein, 9 aa, Artificial Sequence
  Description of Artificial Sequence: Synthetic peptide
IVDFENRHP

SEQ ID NO: 19204 - protein, 9 aa, Artificial Sequence
  Description of Artificial Sequence: Synthetic peptide
IVDPIFRQT

SEQ ID NO: 19205 - protein, 9 aa, Artificial Sequence
  Description of Artificial Sequence: Synthetic peptide
IVFEGGIAS

SEQ ID NO: 19206 - protein, 9 aa, Artificial Sequence
  Description of Artificial Sequence: Synthetic peptide
IVGAPCLVT

SEQ ID NO: 19207 - protein, 9 aa, Artificial Sequence
  Description of Artificial Sequence: Synthetic peptide
IVGDCQFHV

SEQ ID NO: 19208 - protein, 9 aa, Artificial Sequence
  Description of Artificial Sequence: Synthetic peptide
IVGSNTYGY

SEQ ID NO: 19209 - protein, 9 aa, Artificial Sequence
  Description of Artificial Sequence: Synthetic peptide
IVHNVEYSN

SEQ ID NO: 19210 - protein, 9 aa, Artificial Sequence
  Description of Artificial Sequence: Synthetic peptide
IVHSQPNSV

SEQ ID NO: 19211 - protein, 9 aa, Artificial Sequence
  Description of Artificial Sequence: Synthetic peptide
IVLQLQQAK

SEQ ID NO: 19212 - protein, 9 aa, Artificial Sequence
  Description of Artificial Sequence: Synthetic peptide
IVNALEFCK

SEQ ID NO: 19213 - protein, 9 aa, Artificial Sequence
  Description of Artificial Sequence: Synthetic peptide
IVNNAQMHE

SEQ ID NO: 19214 - protein, 9 aa, Artificial Sequence
  Description of Artificial Sequence: Synthetic peptide
IVQMHYINQ

SEQ ID NO: 19215 - protein, 9 aa, Artificial Sequence
  Description of Artificial Sequence: Synthetic peptide
IVQVESCQN

SEQ ID NO: 19216 - protein, 9 aa, Artificial Sequence
  Description of Artificial Sequence: Synthetic peptide
IVSARDTHN

SEQ ID NO: 19217 - protein, 9 aa, Artificial Sequence
  Description of Artificial Sequence: Synthetic peptide
KVDGMDIEG

SEQ ID NO: 19218 - protein, 9 aa, Artificial Sequence
  Description of Artificial Sequence: Synthetic peptide
KVDPPGIFW

SEQ ID NO: 19219 - protein, 9 aa, Artificial Sequence
  Description of Artificial Sequence: Synthetic peptide
KVDQGLCQP

SEQ ID NO: 19220 - protein, 9 aa, Artificial Sequence
  Description of Artificial Sequence: Synthetic peptide
KVDWDGNID

SEQ ID NO: 19221 - protein, 9 aa, Artificial Sequence
  Description of Artificial Sequence: Synthetic peptide
KVEPHHPAD

SEQ ID NO: 19222 - protein, 9 aa, Artificial Sequence
  Description of Artificial Sequence: Synthetic peptide
KVNPKEFQD

SEQ ID NO: 19223 - protein, 9 aa, Artificial Sequence
  Description of Artificial Sequence: Synthetic peptide
KVPICAHKQ

SEQ ID NO: 19224 - protein, 9 aa, Artificial Sequence
  Description of Artificial Sequence: Synthetic peptide
KVQICDFWC

SEQ ID NO: 19225 - protein, 9 aa, Artificial Sequence
  Description of Artificial Sequence: Synthetic peptide
LVCLCHSCA

SEQ ID NO: 19226 - protein, 9 aa, Artificial Sequence
  Description of Artificial Sequence: Synthetic peptide
LVDQYMWDN

SEQ ID NO: 19227 - protein, 9 aa, Artificial Sequence
  Description of Artificial Sequence: Synthetic peptide
LVDRVKHVD

SEQ ID NO: 19228 - protein, 9 aa, Artificial Sequence
  Description of Artificial Sequence: Synthetic peptide
LVDYWAWNG

SEQ ID NO: 19229 - protein, 9 aa, Artificial Sequence
  Description of Artificial Sequence: Synthetic peptide
LVEQERMGV

SEQ ID NO: 19230 - protein, 9 aa, Artificial Sequence
  Description of Artificial Sequence: Synthetic peptide
LVFAKLDQN

SEQ ID NO: 19231 - protein, 9 aa, Artificial Sequence
  Description of Artificial Sequence: Synthetic peptide
LVGICDLCP

SEQ ID NO: 19232 - protein, 9 aa, Artificial Sequence
  Description of Artificial Sequence: Synthetic peptide
LVGSTSHVT

SEQ ID NO: 19233 - protein, 9 aa, Artificial Sequence
  Description of Artificial Sequence: Synthetic peptide
LVMHQQRNY

SEQ ID NO: 19234 - protein, 9 aa, Artificial Sequence
  Description of Artificial Sequence: Synthetic peptide
LVYQHDTAP

SEQ ID NO: 19235 - protein, 9 aa, Artificial Sequence
  Description of Artificial Sequence: Synthetic peptide
LVYTELSGA

SEQ ID NO: 19236 - protein, 9 aa, Artificial Sequence
  Description of Artificial Sequence: Synthetic peptide
MVATESHDK

SEQ ID NO: 19237 - protein, 9 aa, Artificial Sequence
  Description of Artificial Sequence: Synthetic peptide
MVDDPGQQF

SEQ ID NO: 19238 - protein, 9 aa, Artificial Sequence
  Description of Artificial Sequence: Synthetic peptide
MVDHWGDWN

SEQ ID NO: 19239 - protein, 9 aa, Artificial Sequence
  Description of Artificial Sequence: Synthetic peptide
MVDHYICMY

SEQ ID NO: 19240 - protein, 9 aa, Artificial Sequence
  Description of Artificial Sequence: Synthetic peptide
MVDSFGKYL

SEQ ID NO: 19241 - protein, 9 aa, Artificial Sequence
  Description of Artificial Sequence: Synthetic peptide
MVECEGEQY

SEQ ID NO: 19242 - protein, 9 aa, Artificial Sequence
  Description of Artificial Sequence: Synthetic peptide
MVEDSTCHW

SEQ ID NO: 19243 - protein, 9 aa, Artificial Sequence
  Description of Artificial Sequence: Synthetic peptide
MVEEANVPC

SEQ ID NO: 19244 - protein, 9 aa, Artificial Sequence
  Description of Artificial Sequence: Synthetic peptide
MVEEGSWNI

SEQ ID NO: 19245 - protein, 9 aa, Artificial Sequence
  Description of Artificial Sequence: Synthetic peptide
MVEGRQDLT

SEQ ID NO: 19246 - protein, 9 aa, Artificial Sequence
  Description of Artificial Sequence: Synthetic peptide
MVENCDLPP

SEQ ID NO: 19247 - protein, 9 aa, Artificial Sequence
  Description of Artificial Sequence: Synthetic peptide
MVEWGGSNQ

SEQ ID NO: 19248 - protein, 9 aa, Artificial Sequence
  Description of Artificial Sequence: Synthetic peptide
MVGCFYTWT

SEQ ID NO: 19249 - protein, 9 aa, Artificial Sequence
  Description of Artificial Sequence: Synthetic peptide
MVGYQYPAA

SEQ ID NO: 19250 - protein, 9 aa, Artificial Sequence
  Description of Artificial Sequence: Synthetic peptide
MVHEAELYA

SEQ ID NO: 19251 - protein, 9 aa, Artificial Sequence
  Description of Artificial Sequence: Synthetic peptide
MVKEDITEH

SEQ ID NO: 19252 - protein, 9 aa, Artificial Sequence
  Description of Artificial Sequence: Synthetic peptide
MVKEQWQCT

SEQ ID NO: 19253 - protein, 9 aa, Artificial Sequence
  Description of Artificial Sequence: Synthetic peptide
MVLPANGFQ

SEQ ID NO: 19254 - protein, 9 aa, Artificial Sequence
  Description of Artificial Sequence: Synthetic peptide
MVNALTDYG

SEQ ID NO: 19255 - protein, 9 aa, Artificial Sequence
  Description of Artificial Sequence: Synthetic peptide
MVNPWVVFY

SEQ ID NO: 19256 - protein, 9 aa, Artificial Sequence
  Description of Artificial Sequence: Synthetic peptide
MVNQAWQTD

SEQ ID NO: 19257 - protein, 9 aa, Artificial Sequence
  Description of Artificial Sequence: Synthetic peptide
MVQPMPQHH

SEQ ID NO: 19258 - protein, 9 aa, Artificial Sequence
  Description of Artificial Sequence: Synthetic peptide
MVSFNYEIG

SEQ ID NO: 19259 - protein, 9 aa, Artificial Sequence
  Description of Artificial Sequence: Synthetic peptide
MVTKEYMCC

SEQ ID NO: 19260 - protein, 9 aa, Artificial Sequence
  Description of Artificial Sequence: Synthetic peptide
MVTMGYWSS

SEQ ID NO: 19261 - protein, 9 aa, Artificial Sequence
  Description of Artificial Sequence: Synthetic peptide
MVTPYWNQY

SEQ ID NO: 19262 - protein, 9 aa, Artificial Sequence
  Description of Artificial Sequence: Synthetic peptide
MVYPKRGEN

SEQ ID NO: 19263 - protein, 9 aa, Artificial Sequence
  Description of Artificial Sequence: Synthetic peptide
MVYSGQQEF

SEQ ID NO: 19264 - protein, 9 aa, Artificial Sequence
  Description of Artificial Sequence: Synthetic peptide
NVAFAHCGG

SEQ ID NO: 19265 - protein, 9 aa, Artificial Sequence
  Description of Artificial Sequence: Synthetic peptide
NVDDHPTMC

SEQ ID NO: 19266 - protein, 9 aa, Artificial Sequence
  Description of Artificial Sequence: Synthetic peptide
NVDMRNVES

SEQ ID NO: 19267 - protein, 9 aa, Artificial Sequence
  Description of Artificial Sequence: Synthetic peptide
NVDTPSGNQ

SEQ ID NO: 19268 - protein, 9 aa, Artificial Sequence
  Description of Artificial Sequence: Synthetic peptide
NVDWDSECS

SEQ ID NO: 19269 - protein, 9 aa, Artificial Sequence
  Description of Artificial Sequence: Synthetic peptide
NVECCLNRP

SEQ ID NO: 19270 - protein, 9 aa, Artificial Sequence
  Description of Artificial Sequence: Synthetic peptide
NVEEKWEWW

SEQ ID NO: 19271 - protein, 9 aa, Artificial Sequence
  Description of Artificial Sequence: Synthetic peptide
NVEFRYFYN

SEQ ID NO: 19272 - protein, 9 aa, Artificial Sequence
  Description of Artificial Sequence: Synthetic peptide
NVESFPHEQ

SEQ ID NO: 19273 - protein, 9 aa, Artificial Sequence
  Description of Artificial Sequence: Synthetic peptide
NVEWWGHCA

SEQ ID NO: 19274 - protein, 9 aa, Artificial Sequence
  Description of Artificial Sequence: Synthetic peptide
NVFATNCWV

SEQ ID NO: 19275 - protein, 9 aa, Artificial Sequence
  Description of Artificial Sequence: Synthetic peptide
NVGAHFAPF

SEQ ID NO: 19276 - protein, 9 aa, Artificial Sequence
  Description of Artificial Sequence: Synthetic peptide
NVGGPCYNL

SEQ ID NO: 19277 - protein, 9 aa, Artificial Sequence
  Description of Artificial Sequence: Synthetic peptide
NVGGQNMEH

SEQ ID NO: 19278 - protein, 9 aa, Artificial Sequence
  Description of Artificial Sequence: Synthetic peptide
NVGIGHGGN

SEQ ID NO: 19279 - protein, 9 aa, Artificial Sequence
  Description of Artificial Sequence: Synthetic peptide
NVGIHFAQQ

SEQ ID NO: 19280 - protein, 9 aa, Artificial Sequence
  Description of Artificial Sequence: Synthetic peptide
NVGNEHIAY

SEQ ID NO: 19281 - protein, 9 aa, Artificial Sequence
  Description of Artificial Sequence: Synthetic peptide
NVHIALEQH

SEQ ID NO: 19282 - protein, 9 aa, Artificial Sequence
  Description of Artificial Sequence: Synthetic peptide
NVIQHAIGG

SEQ ID NO: 19283 - protein, 9 aa, Artificial Sequence
  Description of Artificial Sequence: Synthetic peptide
NVKFSIEHT

SEQ ID NO: 19284 - protein, 9 aa, Artificial Sequence
  Description of Artificial Sequence: Synthetic peptide
NVLGTLVHV

SEQ ID NO: 19285 - protein, 9 aa, Artificial Sequence
  Description of Artificial Sequence: Synthetic peptide
NVMDCESCC

SEQ ID NO: 19286 - protein, 9 aa, Artificial Sequence
  Description of Artificial Sequence: Synthetic peptide
NVSYEQNFM

SEQ ID NO: 19287 - protein, 9 aa, Artificial Sequence
  Description of Artificial Sequence: Synthetic peptide
PVATALRMP

SEQ ID NO: 19288 - protein, 9 aa, Artificial Sequence
  Description of Artificial Sequence: Synthetic peptide
PVNLNCTVS

SEQ ID NO: 19289 - protein, 9 aa, Artificial Sequence
  Description of Artificial Sequence: Synthetic peptide
PVSLCRFGG

SEQ ID NO: 19290 - protein, 9 aa, Artificial Sequence
  Description of Artificial Sequence: Synthetic peptide
PVTGENHMN

SEQ ID NO: 19291 - protein, 9 aa, Artificial Sequence
  Description of Artificial Sequence: Synthetic peptide
QVALRGATC

SEQ ID NO: 19292 - protein, 9 aa, Artificial Sequence
  Description of Artificial Sequence: Synthetic peptide
QVDDCGHLF

SEQ ID NO: 19293 - protein, 9 aa, Artificial Sequence
  Description of Artificial Sequence: Synthetic peptide
QVDMELPCW

SEQ ID NO: 19294 - protein, 9 aa, Artificial Sequence
  Description of Artificial Sequence: Synthetic peptide
QVETTMIGH

SEQ ID NO: 19295 - protein, 9 aa, Artificial Sequence
  Description of Artificial Sequence: Synthetic peptide
QVIQNVWER

SEQ ID NO: 19296 - protein, 9 aa, Artificial Sequence
  Description of Artificial Sequence: Synthetic peptide
QVIQRRNVM

SEQ ID NO: 19297 - protein, 9 aa, Artificial Sequence
  Description of Artificial Sequence: Synthetic peptide
QVMIECRQS

SEQ ID NO: 19298 - protein, 9 aa, Artificial Sequence
  Description of Artificial Sequence: Synthetic peptide
QVMNGSPKT

SEQ ID NO: 19299 - protein, 9 aa, Artificial Sequence
  Description of Artificial Sequence: Synthetic peptide
QVQIGFEQG

SEQ ID NO: 19300 - protein, 9 aa, Artificial Sequence
  Description of Artificial Sequence: Synthetic peptide
QVVTWGYEY

SEQ ID NO: 19301 - protein, 9 aa, Artificial Sequence
  Description of Artificial Sequence: Synthetic peptide
QVYFWGTHS

SEQ ID NO: 19302 - protein, 9 aa, Artificial Sequence
  Description of Artificial Sequence: Synthetic peptide
RVCDKNLDL

SEQ ID NO: 19303 - protein, 9 aa, Artificial Sequence
  Description of Artificial Sequence: Synthetic peptide
RVDEKLDHD

SEQ ID NO: 19304 - protein, 9 aa, Artificial Sequence
  Description of Artificial Sequence: Synthetic peptide
RVDTNMRDR

SEQ ID NO: 19305 - protein, 9 aa, Artificial Sequence
  Description of Artificial Sequence: Synthetic peptide
RVEHWVNMS

SEQ ID NO: 19306 - protein, 9 aa, Artificial Sequence
  Description of Artificial Sequence: Synthetic peptide
RVNEWGAYG

SEQ ID NO: 19307 - protein, 9 aa, Artificial Sequence
  Description of Artificial Sequence: Synthetic peptide
RVPLYPYWT

SEQ ID NO: 19308 - protein, 9 aa, Artificial Sequence
  Description of Artificial Sequence: Synthetic peptide
RVSPWDQWF

SEQ ID NO: 19309 - protein, 9 aa, Artificial Sequence
  Description of Artificial Sequence: Synthetic peptide
RVVMPLGSL

SEQ ID NO: 19310 - protein, 9 aa, Artificial Sequence
  Description of Artificial Sequence: Synthetic peptide
SVAYKWDAF

SEQ ID NO: 19311 - protein, 9 aa, Artificial Sequence
  Description of Artificial Sequence: Synthetic peptide
SVDACDYDD

SEQ ID NO: 19312 - protein, 9 aa, Artificial Sequence
  Description of Artificial Sequence: Synthetic peptide
SVDDCMHSA

SEQ ID NO: 19313 - protein, 9 aa, Artificial Sequence
  Description of Artificial Sequence: Synthetic peptide
SVDNDRAWP

SEQ ID NO: 19314 - protein, 9 aa, Artificial Sequence
  Description of Artificial Sequence: Synthetic peptide
SVEAKSATC

SEQ ID NO: 19315 - protein, 9 aa, Artificial Sequence
  Description of Artificial Sequence: Synthetic peptide
SVEFHEDFS

SEQ ID NO: 19316 - protein, 9 aa, Artificial Sequence
  Description of Artificial Sequence: Synthetic peptide
SVEGANAEV

SEQ ID NO: 19317 - protein, 9 aa, Artificial Sequence
  Description of Artificial Sequence: Synthetic peptide
SVEGVIIDR

SEQ ID NO: 19318 - protein, 9 aa, Artificial Sequence
  Description of Artificial Sequence: Synthetic peptide
SVEYYSMPQ

SEQ ID NO: 19319 - protein, 9 aa, Artificial Sequence
  Description of Artificial Sequence: Synthetic peptide
SVFQTHCDW

SEQ ID NO: 19320 - protein, 9 aa, Artificial Sequence
  Description of Artificial Sequence: Synthetic peptide
SVGPLQYWK

SEQ ID NO: 19321 - protein, 9 aa, Artificial Sequence
  Description of Artificial Sequence: Synthetic peptide
SVGWGWMMG

SEQ ID NO: 19322 - protein, 9 aa, Artificial Sequence
  Description of Artificial Sequence: Synthetic peptide
SVHEWDPCT

SEQ ID NO: 19323 - protein, 9 aa, Artificial Sequence
  Description of Artificial Sequence: Synthetic peptide
SVHGKVSWF

SEQ ID NO: 19324 - protein, 9 aa, Artificial Sequence
  Description of Artificial Sequence: Synthetic peptide
SVHTIWPMA

SEQ ID NO: 19325 - protein, 9 aa, Artificial Sequence
  Description of Artificial Sequence: Synthetic peptide
SVICWTHMA

SEQ ID NO: 19326 - protein, 9 aa, Artificial Sequence
  Description of Artificial Sequence: Synthetic peptide
SVIYNEHVT

SEQ ID NO: 19327 - protein, 9 aa, Artificial Sequence
  Description of Artificial Sequence: Synthetic peptide
SVMKQELSV

SEQ ID NO: 19328 - protein, 9 aa, Artificial Sequence
  Description of Artificial Sequence: Synthetic peptide
SVNMYMLPD

SEQ ID NO: 19329 - protein, 9 aa, Artificial Sequence
  Description of Artificial Sequence: Synthetic peptide
SVSMASAHG

SEQ ID NO: 19330 - protein, 9 aa, Artificial Sequence
  Description of Artificial Sequence: Synthetic peptide
SVTACPNWN

SEQ ID NO: 19331 - protein, 9 aa, Artificial Sequence
  Description of Artificial Sequence: Synthetic peptide
SVTASYGFS

SEQ ID NO: 19332 - protein, 9 aa, Artificial Sequence
  Description of Artificial Sequence: Synthetic peptide
SVVEDAMRG

SEQ ID NO: 19333 - protein, 9 aa, Artificial Sequence
  Description of Artificial Sequence: Synthetic peptide
SVVPTNNDM

SEQ ID NO: 19334 - protein, 9 aa, Artificial Sequence
  Description of Artificial Sequence: Synthetic peptide
SVYAPTKWG

SEQ ID NO: 19335 - protein, 9 aa, Artificial Sequence
  Description of Artificial Sequence: Synthetic peptide
SVYWPTTEF

SEQ ID NO: 19336 - protein, 9 aa, Artificial Sequence
  Description of Artificial Sequence: Synthetic peptide
TVADMFFDG

SEQ ID NO: 19337 - protein, 9 aa, Artificial Sequence
  Description of Artificial Sequence: Synthetic peptide
TVAHVADCY

SEQ ID NO: 19338 - protein, 9 aa, Artificial Sequence
  Description of Artificial Sequence: Synthetic peptide
TVAPCNQGL

SEQ ID NO: 19339 - protein, 9 aa, Artificial Sequence
  Description of Artificial Sequence: Synthetic peptide
TVATHCFIH

SEQ ID NO: 19340 - protein, 9 aa, Artificial Sequence
  Description of Artificial Sequence: Synthetic peptide
TVAVWWRNA

SEQ ID NO: 19341 - protein, 9 aa, Artificial Sequence
  Description of Artificial Sequence: Synthetic peptide
TVDAIQGWQ

SEQ ID NO: 19342 - protein, 9 aa, Artificial Sequence
  Description of Artificial Sequence: Synthetic peptide
TVDMRHFFT

SEQ ID NO: 19343 - protein, 9 aa, Artificial Sequence
  Description of Artificial Sequence: Synthetic peptide
TVDSEHRLC

SEQ ID NO: 19344 - protein, 9 aa, Artificial Sequence
  Description of Artificial Sequence: Synthetic peptide
TVEAMHLGP

SEQ ID NO: 19345 - protein, 9 aa, Artificial Sequence
  Description of Artificial Sequence: Synthetic peptide
TVEDGQWSW

SEQ ID NO: 19346 - protein, 9 aa, Artificial Sequence
  Description of Artificial Sequence: Synthetic peptide
TVEFTYGWC

SEQ ID NO: 19347 - protein, 9 aa, Artificial Sequence
  Description of Artificial Sequence: Synthetic peptide
TVEPTNYDG

SEQ ID NO: 19348 - protein, 9 aa, Artificial Sequence
  Description of Artificial Sequence: Synthetic peptide
TVFHSTGVG

SEQ ID NO: 19349 - protein, 9 aa, Artificial Sequence
  Description of Artificial Sequence: Synthetic peptide
TVGICFCPV

SEQ ID NO: 19350 - protein, 9 aa, Artificial Sequence
  Description of Artificial Sequence: Synthetic peptide
TVGLLEMTR

SEQ ID NO: 19351 - protein, 9 aa, Artificial Sequence
  Description of Artificial Sequence: Synthetic peptide
TVGTGCDTC

SEQ ID NO: 19352 - protein, 9 aa, Artificial Sequence
  Description of Artificial Sequence: Synthetic peptide
TVGWYQHDW

SEQ ID NO: 19353 - protein, 9 aa, Artificial Sequence
  Description of Artificial Sequence: Synthetic peptide
TVHNCLTMG

SEQ ID NO: 19354 - protein, 9 aa, Artificial Sequence
  Description of Artificial Sequence: Synthetic peptide
TVLSTTQKD

SEQ ID NO: 19355 - protein, 9 aa, Artificial Sequence
  Description of Artificial Sequence: Synthetic peptide
TVMHHDGRL

SEQ ID NO: 19356 - protein, 9 aa, Artificial Sequence
  Description of Artificial Sequence: Synthetic peptide
TVMSWQQHE

SEQ ID NO: 19357 - protein, 9 aa, Artificial Sequence
  Description of Artificial Sequence: Synthetic peptide
TVMWQTQIG

SEQ ID NO: 19358 - protein, 9 aa, Artificial Sequence
  Description of Artificial Sequence: Synthetic peptide
TVNIILQGS

SEQ ID NO: 19359 - protein, 9 aa, Artificial Sequence
  Description of Artificial Sequence: Synthetic peptide
TVQMYQDLE

SEQ ID NO: 19360 - protein, 9 aa, Artificial Sequence
  Description of Artificial Sequence: Synthetic peptide
TVSESRKHN

SEQ ID NO: 19361 - protein, 9 aa, Artificial Sequence
  Description of Artificial Sequence: Synthetic peptide
TVTDEDDCN

SEQ ID NO: 19362 - protein, 9 aa, Artificial Sequence
  Description of Artificial Sequence: Synthetic peptide
TVTIAVQNM

SEQ ID NO: 19363 - protein, 9 aa, Artificial Sequence
  Description of Artificial Sequence: Synthetic peptide
TVVQWHAMI

SEQ ID NO: 19364 - protein, 9 aa, Artificial Sequence
  Description of Artificial Sequence: Synthetic peptide
TVWTEVSPP

SEQ ID NO: 19365 - protein, 9 aa, Artificial Sequence
  Description of Artificial Sequence: Synthetic peptide
VVDPRPDWF

SEQ ID NO: 19366 - protein, 9 aa, Artificial Sequence
  Description of Artificial Sequence: Synthetic peptide
VVDRWDHWM

SEQ ID NO: 19367 - protein, 9 aa, Artificial Sequence
  Description of Artificial Sequence: Synthetic peptide
VVDSNFCSM

SEQ ID NO: 19368 - protein, 9 aa, Artificial Sequence
  Description of Artificial Sequence: Synthetic peptide
VVGCDKSDA

SEQ ID NO: 19369 - protein, 9 aa, Artificial Sequence
  Description of Artificial Sequence: Synthetic peptide
VVHEAWCDT

SEQ ID NO: 19370 - protein, 9 aa, Artificial Sequence
  Description of Artificial Sequence: Synthetic peptide
VVHNFLDQS

SEQ ID NO: 19371 - protein, 9 aa, Artificial Sequence
  Description of Artificial Sequence: Synthetic peptide
VVKEFTGHY

SEQ ID NO: 19372 - protein, 9 aa, Artificial Sequence
  Description of Artificial Sequence: Synthetic peptide
VVKICGCCR

SEQ ID NO: 19373 - protein, 9 aa, Artificial Sequence
  Description of Artificial Sequence: Synthetic peptide
VVMLQSGMT

SEQ ID NO: 19374 - protein, 9 aa, Artificial Sequence
  Description of Artificial Sequence: Synthetic peptide
VVMREWRCF

SEQ ID NO: 19375 - protein, 9 aa, Artificial Sequence
  Description of Artificial Sequence: Synthetic peptide
VVNQGVACT

SEQ ID NO: 19376 - protein, 9 aa, Artificial Sequence
  Description of Artificial Sequence: Synthetic peptide
VVQHIWWGI

SEQ ID NO: 19377 - protein, 9 aa, Artificial Sequence
  Description of Artificial Sequence: Synthetic peptide
VVRWPGSEW

SEQ ID NO: 19378 - protein, 9 aa, Artificial Sequence
  Description of Artificial Sequence: Synthetic peptide
VVSRNEVGA

SEQ ID NO: 19379 - protein, 9 aa, Artificial Sequence
  Description of Artificial Sequence: Synthetic peptide
VVTFTNILQ

SEQ ID NO: 19380 - protein, 9 aa, Artificial Sequence
  Description of Artificial Sequence: Synthetic peptide
VVVCRPVAP

SEQ ID NO: 19381 - protein, 9 aa, Artificial Sequence
  Description of Artificial Sequence: Synthetic peptide
VVYEKQDHM

SEQ ID NO: 19382 - protein, 9 aa, Artificial Sequence
  Description of Artificial Sequence: Synthetic peptide
VVYPLAPYR

SEQ ID NO: 19383 - protein, 9 aa, Artificial Sequence
  Description of Artificial Sequence: Synthetic peptide
VVYSNICVE

SEQ ID NO: 19384 - protein, 9 aa, Artificial Sequence
  Description of Artificial Sequence: Synthetic peptide
WVASQGAQC

SEQ ID NO: 19385 - protein, 9 aa, Artificial Sequence
  Description of Artificial Sequence: Synthetic peptide
YVANVPVLW

SEQ ID NO: 19386 - protein, 9 aa, Artificial Sequence
  Description of Artificial Sequence: Synthetic peptide
YVLGRHCVF

SEQ ID NO: 19387 - protein, 9 aa, Artificial Sequence
  Description of Artificial Sequence: Synthetic peptide
YVQIKGLQL

SEQ ID NO: 19388 - protein, 9 aa, Artificial Sequence
  Description of Artificial Sequence: Synthetic peptide
YVTALATYD

SEQ ID NO: 19389 - protein, 9 aa, Artificial Sequence
  Description of Artificial Sequence: Synthetic peptide
SVTNGSTKH

SEQ ID NO: 19390 - protein, 9 aa, Artificial Sequence
  Description of Artificial Sequence: Synthetic peptide
LVCIRAGVE

SEQ ID NO: 19391 - protein, 9 aa, Artificial Sequence
  Description of Artificial Sequence: Synthetic peptide
KVNCRMIIM

SEQ ID NO: 19392 - protein, 9 aa, Artificial Sequence
  Description of Artificial Sequence: Synthetic peptide
GVWMQGFHP

SEQ ID NO: 19393 - protein, 9 aa, Artificial Sequence
  Description of Artificial Sequence: Synthetic peptide
AVHTADVCC

SEQ ID NO: 19394 - protein, 9 aa, Artificial Sequence
  Description of Artificial Sequence: Synthetic peptide
DVKSWAVCD

SEQ ID NO: 19395 - protein, 9 aa, Artificial Sequence
  Description of Artificial Sequence: Synthetic peptide
SVLHVQALA

SEQ ID NO: 19396 - protein, 9 aa, Artificial Sequence
  Description of Artificial Sequence: Synthetic peptide
AVSPHWGNY

SEQ ID NO: 19397 - protein, 9 aa, Artificial Sequence
  Description of Artificial Sequence: Synthetic peptide
CVVKRMAEF

SEQ ID NO: 19398 - protein, 9 aa, Artificial Sequence
  Description of Artificial Sequence: Synthetic peptide
CVVNMEYCL

SEQ ID NO: 19399 - protein, 9 aa, Artificial Sequence
  Description of Artificial Sequence: Synthetic peptide
CVWSRHQIC

SEQ ID NO: 19400 - protein, 9 aa, Artificial Sequence
  Description of Artificial Sequence: Synthetic peptide
DVRLIGHEA

SEQ ID NO: 19401 - protein, 9 aa, Artificial Sequence
  Description of Artificial Sequence: Synthetic peptide
DVVRQWQAP

SEQ ID NO: 19402 - protein, 9 aa, Artificial Sequence
  Description of Artificial Sequence: Synthetic peptide
FVEEDLYEE

SEQ ID NO: 19403 - protein, 9 aa, Artificial Sequence
  Description of Artificial Sequence: Synthetic peptide
FVHMWSRLC

SEQ ID NO: 19404 - protein, 9 aa, Artificial Sequence
  Description of Artificial Sequence: Synthetic peptide
FVRPLEEFY

SEQ ID NO: 19405 - protein, 9 aa, Artificial Sequence
  Description of Artificial Sequence: Synthetic peptide
HVFQGDYIA

SEQ ID NO: 19406 - protein, 9 aa, Artificial Sequence
  Description of Artificial Sequence: Synthetic peptide
HVGNLTAFN

SEQ ID NO: 19407 - protein, 9 aa, Artificial Sequence
  Description of Artificial Sequence: Synthetic peptide
IVANAQIPG

SEQ ID NO: 19408 - protein, 9 aa, Artificial Sequence
  Description of Artificial Sequence: Synthetic peptide
IVGYQNCQS

SEQ ID NO: 19409 - protein, 9 aa, Artificial Sequence
  Description of Artificial Sequence: Synthetic peptide
IVLGQMTCT

SEQ ID NO: 19410 - protein, 9 aa, Artificial Sequence
  Description of Artificial Sequence: Synthetic peptide
IVSEWEDWQ

SEQ ID NO: 19411 - protein, 9 aa, Artificial Sequence
  Description of Artificial Sequence: Synthetic peptide
IVSNSVCRV

SEQ ID NO: 19412 - protein, 9 aa, Artificial Sequence
  Description of Artificial Sequence: Synthetic peptide
KVCVVAGPM

SEQ ID NO: 19413 - protein, 9 aa, Artificial Sequence
  Description of Artificial Sequence: Synthetic peptide
KVEVKRDYW

SEQ ID NO: 19414 - protein, 9 aa, Artificial Sequence
  Description of Artificial Sequence: Synthetic peptide
KVVDRETYS

SEQ ID NO: 19415 - protein, 9 aa, Artificial Sequence
  Description of Artificial Sequence: Synthetic peptide
KVYEIGEAP

SEQ ID NO: 19416 - protein, 9 aa, Artificial Sequence
  Description of Artificial Sequence: Synthetic peptide
MVEWEEEWD

SEQ ID NO: 19417 - protein, 9 aa, Artificial Sequence
  Description of Artificial Sequence: Synthetic peptide
MVILRGMSF

SEQ ID NO: 19418 - protein, 9 aa, Artificial Sequence
  Description of Artificial Sequence: Synthetic peptide
MVLPTKLWD

SEQ ID NO: 19419 - protein, 9 aa, Artificial Sequence
  Description of Artificial Sequence: Synthetic peptide
MVSVVQEPN

SEQ ID NO: 19420 - protein, 9 aa, Artificial Sequence
  Description of Artificial Sequence: Synthetic peptide
NVLSEVYGH

SEQ ID NO: 19421 - protein, 9 aa, Artificial Sequence
  Description of Artificial Sequence: Synthetic peptide
PVKDCILWS

SEQ ID NO: 19422 - protein, 9 aa, Artificial Sequence
  Description of Artificial Sequence: Synthetic peptide
QVCSDWCEC

SEQ ID NO: 19423 - protein, 9 aa, Artificial Sequence
  Description of Artificial Sequence: Synthetic peptide
QVDTRCYGG

SEQ ID NO: 19424 - protein, 9 aa, Artificial Sequence
  Description of Artificial Sequence: Synthetic peptide
QVMMDDSNV

SEQ ID NO: 19425 - protein, 9 aa, Artificial Sequence
  Description of Artificial Sequence: Synthetic peptide
QVSCNVEPK

SEQ ID NO: 19426 - protein, 9 aa, Artificial Sequence
  Description of Artificial Sequence: Synthetic peptide
FPTQMKMCN

SEQ ID NO: 19427 - protein, 9 aa, Artificial Sequence
  Description of Artificial Sequence: Synthetic peptide
FPTWDKPPT

SEQ ID NO: 19428 - protein, 9 aa, Artificial Sequence
  Description of Artificial Sequence: Synthetic peptide
FTTCFSIMV

SEQ ID NO: 19429 - protein, 9 aa, Artificial Sequence
  Description of Artificial Sequence: Synthetic peptide
FTTFWVPQQ

SEQ ID NO: 19430 - protein, 9 aa, Artificial Sequence
  Description of Artificial Sequence: Synthetic peptide
FTTLHNMEN

SEQ ID NO: 19431 - protein, 9 aa, Artificial Sequence
  Description of Artificial Sequence: Synthetic peptide
FYTCELACV

SEQ ID NO: 19432 - protein, 9 aa, Artificial Sequence
  Description of Artificial Sequence: Synthetic peptide
GITTIWPDH

SEQ ID NO: 19433 - protein, 9 aa, Artificial Sequence
  Description of Artificial Sequence: Synthetic peptide
GLTADLWHY

SEQ ID NO: 19434 - protein, 9 aa, Artificial Sequence
  Description of Artificial Sequence: Synthetic peptide
GMTYVSGHH

SEQ ID NO: 19435 - protein, 9 aa, Artificial Sequence
  Description of Artificial Sequence: Synthetic peptide
GNTLIVTGP

SEQ ID NO: 19436 - protein, 9 aa, Artificial Sequence
  Description of Artificial Sequence: Synthetic peptide
GSTTQHDGT

SEQ ID NO: 19437 - protein, 9 aa, Artificial Sequence
  Description of Artificial Sequence: Synthetic peptide
GWTPHTLLR

SEQ ID NO: 19438 - protein, 9 aa, Artificial Sequence
  Description of Artificial Sequence: Synthetic peptide
GYTANFYTN

SEQ ID NO: 19439 - protein, 9 aa, Artificial Sequence
  Description of Artificial Sequence: Synthetic peptide
HGTTIASGP

SEQ ID NO: 19440 - protein, 9 aa, Artificial Sequence
  Description of Artificial Sequence: Synthetic peptide
HKTIDDIFT

SEQ ID NO: 19441 - protein, 9 aa, Artificial Sequence
  Description of Artificial Sequence: Synthetic peptide
HNTEPPGMP

SEQ ID NO: 19442 - protein, 9 aa, Artificial Sequence
  Description of Artificial Sequence: Synthetic peptide
HPTNMSACE

SEQ ID NO: 19443 - protein, 9 aa, Artificial Sequence
  Description of Artificial Sequence: Synthetic peptide
HSTGSGTFH

SEQ ID NO: 19444 - protein, 9 aa, Artificial Sequence
  Description of Artificial Sequence: Synthetic peptide
HSTPFVFNS

SEQ ID NO: 19445 - protein, 9 aa, Artificial Sequence
  Description of Artificial Sequence: Synthetic peptide
IATNQSAIL

SEQ ID NO: 19446 - protein, 9 aa, Artificial Sequence
  Description of Artificial Sequence: Synthetic peptide
IGTAYPQWR

SEQ ID NO: 19447 - protein, 9 aa, Artificial Sequence
  Description of Artificial Sequence: Synthetic peptide
IGTIHPQAQ

SEQ ID NO: 19448 - protein, 9 aa, Artificial Sequence
  Description of Artificial Sequence: Synthetic peptide
IGTVTVGAY

SEQ ID NO: 19449 - protein, 9 aa, Artificial Sequence
  Description of Artificial Sequence: Synthetic peptide
IITMMCRSD

SEQ ID NO: 19450 - protein, 9 aa, Artificial Sequence
  Description of Artificial Sequence: Synthetic peptide
IMTSVDSQR

SEQ ID NO: 19451 - protein, 9 aa, Artificial Sequence
  Description of Artificial Sequence: Synthetic peptide
IRTRELDQY

SEQ ID NO: 19452 - protein, 9 aa, Artificial Sequence
  Description of Artificial Sequence: Synthetic peptide
ISTEKNESY

SEQ ID NO: 19453 - protein, 9 aa, Artificial Sequence
  Description of Artificial Sequence: Synthetic peptide
ISTLFSSGD

SEQ ID NO: 19454 - protein, 9 aa, Artificial Sequence
  Description of Artificial Sequence: Synthetic peptide
ITTKYDCMG

SEQ ID NO: 19455 - protein, 9 aa, Artificial Sequence
  Description of Artificial Sequence: Synthetic peptide
ITTPFYKVG

SEQ ID NO: 19456 - protein, 9 aa, Artificial Sequence
  Description of Artificial Sequence: Synthetic peptide
IWTRADLGR

SEQ ID NO: 19457 - protein, 9 aa, Artificial Sequence
  Description of Artificial Sequence: Synthetic peptide
KMTVRQSDS

SEQ ID NO: 19458 - protein, 9 aa, Artificial Sequence
  Description of Artificial Sequence: Synthetic peptide
KTTDDTVGE

SEQ ID NO: 19459 - protein, 9 aa, Artificial Sequence
  Description of Artificial Sequence: Synthetic peptide
KWTQFGWMD

SEQ ID NO: 19460 - protein, 9 aa, Artificial Sequence
  Description of Artificial Sequence: Synthetic peptide
KWTRIGDSA

SEQ ID NO: 19461 - protein, 9 aa, Artificial Sequence
  Description of Artificial Sequence: Synthetic peptide
LGTQEQGMP

SEQ ID NO: 19462 - protein, 9 aa, Artificial Sequence
  Description of Artificial Sequence: Synthetic peptide
LHTRTQCEP

SEQ ID NO: 19463 - protein, 9 aa, Artificial Sequence
  Description of Artificial Sequence: Synthetic peptide
LNTGYMWNQ

SEQ ID NO: 19464 - protein, 9 aa, Artificial Sequence
  Description of Artificial Sequence: Synthetic peptide
LPTSVNMMH

SEQ ID NO: 19465 - protein, 9 aa, Artificial Sequence
  Description of Artificial Sequence: Synthetic peptide
LQTAIPFWP

SEQ ID NO: 19466 - protein, 9 aa, Artificial Sequence
  Description of Artificial Sequence: Synthetic peptide
LSTTIDKDP

SEQ ID NO: 19467 - protein, 9 aa, Artificial Sequence
  Description of Artificial Sequence: Synthetic peptide
LTTAVAIRE

SEQ ID NO: 19468 - protein, 9 aa, Artificial Sequence
  Description of Artificial Sequence: Synthetic peptide
LTTQLFLQE

SEQ ID NO: 19469 - protein, 9 aa, Artificial Sequence
  Description of Artificial Sequence: Synthetic peptide
LTTQYICGP

SEQ ID NO: 19470 - protein, 9 aa, Artificial Sequence
  Description of Artificial Sequence: Synthetic peptide
LTTWNTYVN

SEQ ID NO: 19471 - protein, 9 aa, Artificial Sequence
  Description of Artificial Sequence: Synthetic peptide
LWTQISEFA

SEQ ID NO: 19472 - protein, 9 aa, Artificial Sequence
  Description of Artificial Sequence: Synthetic peptide
MATEGACNP

SEQ ID NO: 19473 - protein, 9 aa, Artificial Sequence
  Description of Artificial Sequence: Synthetic peptide
MATMFTNWC

SEQ ID NO: 19474 - protein, 9 aa, Artificial Sequence
  Description of Artificial Sequence: Synthetic peptide
MITCIDGIF

SEQ ID NO: 19475 - protein, 9 aa, Artificial Sequence
  Description of Artificial Sequence: Synthetic peptide
MPTLCECGL

SEQ ID NO: 19476 - protein, 9 aa, Artificial Sequence
  Description of Artificial Sequence: Synthetic peptide
MSTMSMDSY

SEQ ID NO: 19477 - protein, 9 aa, Artificial Sequence
  Description of Artificial Sequence: Synthetic peptide
MSTTELVAE

SEQ ID NO: 19478 - protein, 9 aa, Artificial Sequence
  Description of Artificial Sequence: Synthetic peptide
MWTGQLRQC

SEQ ID NO: 19479 - protein, 9 aa, Artificial Sequence
  Description of Artificial Sequence: Synthetic peptide
MYTQWSKAP

SEQ ID NO: 19480 - protein, 9 aa, Artificial Sequence
  Description of Artificial Sequence: Synthetic peptide
NATNSQNMY

SEQ ID NO: 19481 - protein, 9 aa, Artificial Sequence
  Description of Artificial Sequence: Synthetic peptide
NATPYKAEY

SEQ ID NO: 19482 - protein, 9 aa, Artificial Sequence
  Description of Artificial Sequence: Synthetic peptide
NFTVTNLQM

SEQ ID NO: 19483 - protein, 9 aa, Artificial Sequence
  Description of Artificial Sequence: Synthetic peptide
NITLGAACE

SEQ ID NO: 19484 - protein, 9 aa, Artificial Sequence
  Description of Artificial Sequence: Synthetic peptide
NNTNQCQNC

SEQ ID NO: 19485 - protein, 9 aa, Artificial Sequence
  Description of Artificial Sequence: Synthetic peptide
NQTEMSSNG

SEQ ID NO: 19486 - protein, 9 aa, Artificial Sequence
  Description of Artificial Sequence: Synthetic peptide
NRTCNAGEW

SEQ ID NO: 19487 - protein, 9 aa, Artificial Sequence
  Description of Artificial Sequence: Synthetic peptide
NRTGPAAWA

SEQ ID NO: 19488 - protein, 9 aa, Artificial Sequence
  Description of Artificial Sequence: Synthetic peptide
NSTAFFRDQ

SEQ ID NO: 19489 - protein, 9 aa, Artificial Sequence
  Description of Artificial Sequence: Synthetic peptide
NSTIQGGAW

SEQ ID NO: 19490 - protein, 9 aa, Artificial Sequence
  Description of Artificial Sequence: Synthetic peptide
NTTEISRLP

SEQ ID NO: 19491 - protein, 9 aa, Artificial Sequence
  Description of Artificial Sequence: Synthetic peptide
NYTIRVQDL

SEQ ID NO: 19492 - protein, 9 aa, Artificial Sequence
  Description of Artificial Sequence: Synthetic peptide
NYTNCEFGN

SEQ ID NO: 19493 - protein, 9 aa, Artificial Sequence
  Description of Artificial Sequence: Synthetic peptide
PATTADMHY

SEQ ID NO: 19494 - protein, 9 aa, Artificial Sequence
  Description of Artificial Sequence: Synthetic peptide
PPTHQMWYC

SEQ ID NO: 19495 - protein, 9 aa, Artificial Sequence
  Description of Artificial Sequence: Synthetic peptide
QATSAMIPS

SEQ ID NO: 19496 - protein, 9 aa, Artificial Sequence
  Description of Artificial Sequence: Synthetic peptide
QCTCEGEAQ

SEQ ID NO: 19497 - protein, 9 aa, Artificial Sequence
  Description of Artificial Sequence: Synthetic peptide
QDTELYCCM

SEQ ID NO: 19498 - protein, 9 aa, Artificial Sequence
  Description of Artificial Sequence: Synthetic peptide
QITQMGRQE

SEQ ID NO: 19499 - protein, 9 aa, Artificial Sequence
  Description of Artificial Sequence: Synthetic peptide
QLTWQAHSW

SEQ ID NO: 19500 - protein, 9 aa, Artificial Sequence
  Description of Artificial Sequence: Synthetic peptide
QMTPGWWKT

SEQ ID NO: 19501 - protein, 9 aa, Artificial Sequence
  Description of Artificial Sequence: Synthetic peptide
QNTCLPVFY

SEQ ID NO: 19502 - protein, 9 aa, Artificial Sequence
  Description of Artificial Sequence: Synthetic peptide
QTTSAMING

SEQ ID NO: 19503 - protein, 9 aa, Artificial Sequence
  Description of Artificial Sequence: Synthetic peptide
QYTHGTCFS

SEQ ID NO: 19504 - protein, 9 aa, Artificial Sequence
  Description of Artificial Sequence: Synthetic peptide
RYTGTWQDC

SEQ ID NO: 19505 - protein, 9 aa, Artificial Sequence
  Description of Artificial Sequence: Synthetic peptide
SATYTEMQS

SEQ ID NO: 19506 - protein, 9 aa, Artificial Sequence
  Description of Artificial Sequence: Synthetic peptide
SITHNDHGW

SEQ ID NO: 19507 - protein, 9 aa, Artificial Sequence
  Description of Artificial Sequence: Synthetic peptide
SKTCEIGKT

SEQ ID NO: 19508 - protein, 9 aa, Artificial Sequence
  Description of Artificial Sequence: Synthetic peptide
SNTAYFNGS

SEQ ID NO: 19509 - protein, 9 aa, Artificial Sequence
  Description of Artificial Sequence: Synthetic peptide
SSTAEPNGR

SEQ ID NO: 19510 - protein, 9 aa, Artificial Sequence
  Description of Artificial Sequence: Synthetic peptide
STTAIDCMR

SEQ ID NO: 19511 - protein, 9 aa, Artificial Sequence
  Description of Artificial Sequence: Synthetic peptide
SWTACTPCH

SEQ ID NO: 19512 - protein, 9 aa, Artificial Sequence
  Description of Artificial Sequence: Synthetic peptide
SYTYRLTDQ

SEQ ID NO: 19513 - protein, 9 aa, Artificial Sequence
  Description of Artificial Sequence: Synthetic peptide
THTEFDVFN

SEQ ID NO: 19514 - protein, 9 aa, Artificial Sequence
  Description of Artificial Sequence: Synthetic peptide
TKTAFGDMG

SEQ ID NO: 19515 - protein, 9 aa, Artificial Sequence
  Description of Artificial Sequence: Synthetic peptide
TNTAFGCYG

SEQ ID NO: 19516 - protein, 9 aa, Artificial Sequence
  Description of Artificial Sequence: Synthetic peptide
TSTEYKMGL

SEQ ID NO: 19517 - protein, 9 aa, Artificial Sequence
  Description of Artificial Sequence: Synthetic peptide
TTTMLHRIN

SEQ ID NO: 19518 - protein, 9 aa, Artificial Sequence
  Description of Artificial Sequence: Synthetic peptide
TTTTQDSQR

SEQ ID NO: 19519 - protein, 9 aa, Artificial Sequence
  Description of Artificial Sequence: Synthetic peptide
TTTYQALNA

SEQ ID NO: 19520 - protein, 9 aa, Artificial Sequence
  Description of Artificial Sequence: Synthetic peptide
TYTCNKWFR

SEQ ID NO: 19521 - protein, 9 aa, Artificial Sequence
  Description of Artificial Sequence: Synthetic peptide
VATKFETNT

SEQ ID NO: 19522 - protein, 9 aa, Artificial Sequence
  Description of Artificial Sequence: Synthetic peptide
VATMAEDNP

SEQ ID NO: 19523 - protein, 9 aa, Artificial Sequence
  Description of Artificial Sequence: Synthetic peptide
VATTDGPVY

SEQ ID NO: 19524 - protein, 9 aa, Artificial Sequence
  Description of Artificial Sequence: Synthetic peptide
VCTNLAHGA

SEQ ID NO: 19525 - protein, 9 aa, Artificial Sequence
  Description of Artificial Sequence: Synthetic peptide
VDTIFTDLH

SEQ ID NO: 19526 - protein, 9 aa, Artificial Sequence
  Description of Artificial Sequence: Synthetic peptide
VGTPLDTSV

SEQ ID NO: 19527 - protein, 9 aa, Artificial Sequence
  Description of Artificial Sequence: Synthetic peptide
VITVFMEQN

SEQ ID NO: 19528 - protein, 9 aa, Artificial Sequence
  Description of Artificial Sequence: Synthetic peptide
VKTPGATDF

SEQ ID NO: 19529 - protein, 9 aa, Artificial Sequence
  Description of Artificial Sequence: Synthetic peptide
VPTNTFDTH

SEQ ID NO: 19530 - protein, 9 aa, Artificial Sequence
  Description of Artificial Sequence: Synthetic peptide
VSTAVMPEG

SEQ ID NO: 19531 - protein, 9 aa, Artificial Sequence
  Description of Artificial Sequence: Synthetic peptide
VSTGLQDAC

SEQ ID NO: 19532 - protein, 9 aa, Artificial Sequence
  Description of Artificial Sequence: Synthetic peptide
VSTTGPIDG

SEQ ID NO: 19533 - protein, 9 aa, Artificial Sequence
  Description of Artificial Sequence: Synthetic peptide
VTTEMPMME

SEQ ID NO: 19534 - protein, 9 aa, Artificial Sequence
  Description of Artificial Sequence: Synthetic peptide
VTTGYQCAS

SEQ ID NO: 19535 - protein, 9 aa, Artificial Sequence
  Description of Artificial Sequence: Synthetic peptide
VTTTTKVSN

SEQ ID NO: 19536 - protein, 9 aa, Artificial Sequence
  Description of Artificial Sequence: Synthetic peptide
VWTQEMWDA

SEQ ID NO: 19537 - protein, 9 aa, Artificial Sequence
  Description of Artificial Sequence: Synthetic peptide
WDTVPKIRD

SEQ ID NO: 19538 - protein, 9 aa, Artificial Sequence
  Description of Artificial Sequence: Synthetic peptide
WFTGPWAMH

SEQ ID NO: 19539 - protein, 9 aa, Artificial Sequence
  Description of Artificial Sequence: Synthetic peptide
WRTQCQSEK

SEQ ID NO: 19540 - protein, 9 aa, Artificial Sequence
  Description of Artificial Sequence: Synthetic peptide
WYTYNMCER

SEQ ID NO: 19541 - protein, 9 aa, Artificial Sequence
  Description of Artificial Sequence: Synthetic peptide
YATFQDCNA

SEQ ID NO: 19542 - protein, 9 aa, Artificial Sequence
  Description of Artificial Sequence: Synthetic peptide
YATNQCYNG

SEQ ID NO: 19543 - protein, 9 aa, Artificial Sequence
  Description of Artificial Sequence: Synthetic peptide
YCTDQSETS

SEQ ID NO: 19544 - protein, 9 aa, Artificial Sequence
  Description of Artificial Sequence: Synthetic peptide
YITKGNLAR

SEQ ID NO: 19545 - protein, 9 aa, Artificial Sequence
  Description of Artificial Sequence: Synthetic peptide
YMTFKGYHG

SEQ ID NO: 19546 - protein, 9 aa, Artificial Sequence
  Description of Artificial Sequence: Synthetic peptide
YPTKDPFKN

SEQ ID NO: 19547 - protein, 9 aa, Artificial Sequence
  Description of Artificial Sequence: Synthetic peptide
YSTQCNTMK

SEQ ID NO: 19548 - protein, 9 aa, Artificial Sequence
  Description of Artificial Sequence: Synthetic peptide
YTTDDGMSP

SEQ ID NO: 19549 - protein, 9 aa, Artificial Sequence
  Description of Artificial Sequence: Synthetic peptide
YTTHRDTVT

SEQ ID NO: 19550 - protein, 9 aa, Artificial Sequence
  Description of Artificial Sequence: Synthetic peptide
YTTVDNSLQ

SEQ ID NO: 19551 - protein, 9 aa, Artificial Sequence
  Description of Artificial Sequence: Synthetic peptide
KQTVFVDQE

SEQ ID NO: 19552 - protein, 9 aa, Artificial Sequence
  Description of Artificial Sequence: Synthetic peptide
RITQGESGM

SEQ ID NO: 19553 - protein, 9 aa, Artificial Sequence
  Description of Artificial Sequence: Synthetic peptide
ISTKWDYIA

SEQ ID NO: 19554 - protein, 9 aa, Artificial Sequence
  Description of Artificial Sequence: Synthetic peptide
QQTKNNSTD

SEQ ID NO: 19555 - protein, 9 aa, Artificial Sequence
  Description of Artificial Sequence: Synthetic peptide
WCTQFDEYT

SEQ ID NO: 19556 - protein, 9 aa, Artificial Sequence
  Description of Artificial Sequence: Synthetic peptide
KITVHDRIP

SEQ ID NO: 19557 - protein, 9 aa, Artificial Sequence
  Description of Artificial Sequence: Synthetic peptide
DMTLQSVSS

SEQ ID NO: 19558 - protein, 9 aa, Artificial Sequence
  Description of Artificial Sequence: Synthetic peptide
PLTIEVNCT

SEQ ID NO: 19559 - protein, 9 aa, Artificial Sequence
  Description of Artificial Sequence: Synthetic peptide
QCTAHNTCM

SEQ ID NO: 19560 - protein, 9 aa, Artificial Sequence
  Description of Artificial Sequence: Synthetic peptide
FNLEFSPTL

SEQ ID NO: 19561 - protein, 9 aa, Artificial Sequence
  Description of Artificial Sequence: Synthetic peptide
FPQESNHDG

SEQ ID NO: 19562 - protein, 9 aa, Artificial Sequence
  Description of Artificial Sequence: Synthetic peptide
GAVEIDCLY

SEQ ID NO: 19563 - protein, 9 aa, Artificial Sequence
  Description of Artificial Sequence: Synthetic peptide
GHAEQWFES

SEQ ID NO: 19564 - protein, 9 aa, Artificial Sequence
  Description of Artificial Sequence: Synthetic peptide
GHGEFMRDA

SEQ ID NO: 19565 - protein, 9 aa, Artificial Sequence
  Description of Artificial Sequence: Synthetic peptide
GHVEVCTLS

SEQ ID NO: 19566 - protein, 9 aa, Artificial Sequence
  Description of Artificial Sequence: Synthetic peptide
GIGEEMFWD

SEQ ID NO: 19567 - protein, 9 aa, Artificial Sequence
  Description of Artificial Sequence: Synthetic peptide
GSPEVSVAS

SEQ ID NO: 19568 - protein, 9 aa, Artificial Sequence
  Description of Artificial Sequence: Synthetic peptide
GWSEAHKSD

SEQ ID NO: 19569 - protein, 9 aa, Artificial Sequence
  Description of Artificial Sequence: Synthetic peptide
GYYEVVKMY

SEQ ID NO: 19570 - protein, 9 aa, Artificial Sequence
  Description of Artificial Sequence: Synthetic peptide
HGYEIQFFQ

SEQ ID NO: 19571 - protein, 9 aa, Artificial Sequence
  Description of Artificial Sequence: Synthetic peptide
HHDEKLKML

SEQ ID NO: 19572 - protein, 9 aa, Artificial Sequence
  Description of Artificial Sequence: Synthetic peptide
HMDELIYCG

SEQ ID NO: 19573 - protein, 9 aa, Artificial Sequence
  Description of Artificial Sequence: Synthetic peptide
HNKEKWPTE

SEQ ID NO: 19574 - protein, 9 aa, Artificial Sequence
  Description of Artificial Sequence: Synthetic peptide
IACESDESW

SEQ ID NO: 19575 - protein, 9 aa, Artificial Sequence
  Description of Artificial Sequence: Synthetic peptide
IHYEHGMQC

SEQ ID NO: 19576 - protein, 9 aa, Artificial Sequence
  Description of Artificial Sequence: Synthetic peptide
ILLEFQAPM

SEQ ID NO: 19577 - protein, 9 aa, Artificial Sequence
  Description of Artificial Sequence: Synthetic peptide
IQQERNRYH

SEQ ID NO: 19578 - protein, 9 aa, Artificial Sequence
  Description of Artificial Sequence: Synthetic peptide
ISAEHIFAG

SEQ ID NO: 19579 - protein, 9 aa, Artificial Sequence
  Description of Artificial Sequence: Synthetic peptide
ISFEWLELN

SEQ ID NO: 19580 - protein, 9 aa, Artificial Sequence
  Description of Artificial Sequence: Synthetic peptide
ISSEAIFYP

SEQ ID NO: 19581 - protein, 9 aa, Artificial Sequence
  Description of Artificial Sequence: Synthetic peptide
ITMEILGQN

SEQ ID NO: 19582 - protein, 9 aa, Artificial Sequence
  Description of Artificial Sequence: Synthetic peptide
KACESIQDL

SEQ ID NO: 19583 - protein, 9 aa, Artificial Sequence
  Description of Artificial Sequence: Synthetic peptide
KAEEIENMC

SEQ ID NO: 19584 - protein, 9 aa, Artificial Sequence
  Description of Artificial Sequence: Synthetic peptide
KAIESMLFM

SEQ ID NO: 19585 - protein, 9 aa, Artificial Sequence
  Description of Artificial Sequence: Synthetic peptide
KAMESHDCC

SEQ ID NO: 19586 - protein, 9 aa, Artificial Sequence
  Description of Artificial Sequence: Synthetic peptide
KFEEVHASG

SEQ ID NO: 19587 - protein, 9 aa, Artificial Sequence
  Description of Artificial Sequence: Synthetic peptide
KHPEQYRKY

SEQ ID NO: 19588 - protein, 9 aa, Artificial Sequence
  Description of Artificial Sequence: Synthetic peptide
KHVEALKAY

SEQ ID NO: 19589 - protein, 9 aa, Artificial Sequence
  Description of Artificial Sequence: Synthetic peptide
KKYEECPLA

SEQ ID NO: 19590 - protein, 9 aa, Artificial Sequence
  Description of Artificial Sequence: Synthetic peptide
KMVEDEPSA

SEQ ID NO: 19591 - protein, 9 aa, Artificial Sequence
  Description of Artificial Sequence: Synthetic peptide
KNEEDYALY

SEQ ID NO: 19592 - protein, 9 aa, Artificial Sequence
  Description of Artificial Sequence: Synthetic peptide
KPVEIDMEG

SEQ ID NO: 19593 - protein, 9 aa, Artificial Sequence
  Description of Artificial Sequence: Synthetic peptide
KQYELNNWC

SEQ ID NO: 19594 - protein, 9 aa, Artificial Sequence
  Description of Artificial Sequence: Synthetic peptide
KSSECGWAC

SEQ ID NO: 19595 - protein, 9 aa, Artificial Sequence
  Description of Artificial Sequence: Synthetic peptide
KTIEQTIPH

SEQ ID NO: 19596 - protein, 9 aa, Artificial Sequence
  Description of Artificial Sequence: Synthetic peptide
KTYERYQCA

SEQ ID NO: 19597 - protein, 9 aa, Artificial Sequence
  Description of Artificial Sequence: Synthetic peptide
LAKELCCIQ

SEQ ID NO: 19598 - protein, 9 aa, Artificial Sequence
  Description of Artificial Sequence: Synthetic peptide
LANEKDSMC

SEQ ID NO: 19599 - protein, 9 aa, Artificial Sequence
  Description of Artificial Sequence: Synthetic peptide
LFREKMFNP

SEQ ID NO: 19600 - protein, 9 aa, Artificial Sequence
  Description of Artificial Sequence: Synthetic peptide
LIVEHDCWF

SEQ ID NO: 19601 - protein, 9 aa, Artificial Sequence
  Description of Artificial Sequence: Synthetic peptide
LKCEYPPMS

SEQ ID NO: 19602 - protein, 9 aa, Artificial Sequence
  Description of Artificial Sequence: Synthetic peptide
LLDEVRQAG

SEQ ID NO: 19603 - protein, 9 aa, Artificial Sequence
  Description of Artificial Sequence: Synthetic peptide
LLWECEKGV

SEQ ID NO: 19604 - protein, 9 aa, Artificial Sequence
  Description of Artificial Sequence: Synthetic peptide
LTLEQSVPM

SEQ ID NO: 19605 - protein, 9 aa, Artificial Sequence
  Description of Artificial Sequence: Synthetic peptide
LWYEVMIWY

SEQ ID NO: 19606 - protein, 9 aa, Artificial Sequence
  Description of Artificial Sequence: Synthetic peptide
LYKENWQFP

SEQ ID NO: 19607 - protein, 9 aa, Artificial Sequence
  Description of Artificial Sequence: Synthetic peptide
LYQENQHEW

SEQ ID NO: 19608 - protein, 9 aa, Artificial Sequence
  Description of Artificial Sequence: Synthetic peptide
MFAEYSHIG

SEQ ID NO: 19609 - protein, 9 aa, Artificial Sequence
  Description of Artificial Sequence: Synthetic peptide
MFEEKNLHT

SEQ ID NO: 19610 - protein, 9 aa, Artificial Sequence
  Description of Artificial Sequence: Synthetic peptide
MHKECEACR

SEQ ID NO: 19611 - protein, 9 aa, Artificial Sequence
  Description of Artificial Sequence: Synthetic peptide
MHMEMNYSE

SEQ ID NO: 19612 - protein, 9 aa, Artificial Sequence
  Description of Artificial Sequence: Synthetic peptide
MIAEFVSNY

SEQ ID NO: 19613 - protein, 9 aa, Artificial Sequence
  Description of Artificial Sequence: Synthetic peptide
MNEEQEHGA

SEQ ID NO: 19614 - protein, 9 aa, Artificial Sequence
  Description of Artificial Sequence: Synthetic peptide
MPDEQQQMW

SEQ ID NO: 19615 - protein, 9 aa, Artificial Sequence
  Description of Artificial Sequence: Synthetic peptide
MQAELTMSA

SEQ ID NO: 19616 - protein, 9 aa, Artificial Sequence
  Description of Artificial Sequence: Synthetic peptide
MRHEEQRLK

SEQ ID NO: 19617 - protein, 9 aa, Artificial Sequence
  Description of Artificial Sequence: Synthetic peptide
MRHEIVAMY

SEQ ID NO: 19618 - protein, 9 aa, Artificial Sequence
  Description of Artificial Sequence: Synthetic peptide
MSAEVLLMT

SEQ ID NO: 19619 - protein, 9 aa, Artificial Sequence
  Description of Artificial Sequence: Synthetic peptide
MSCELTGMH

SEQ ID NO: 19620 - protein, 9 aa, Artificial Sequence
  Description of Artificial Sequence: Synthetic peptide
MYVEYTVGM

SEQ ID NO: 19621 - protein, 9 aa, Artificial Sequence
  Description of Artificial Sequence: Synthetic peptide
NAVEILLCG

SEQ ID NO: 19622 - protein, 9 aa, Artificial Sequence
  Description of Artificial Sequence: Synthetic peptide
NCNEPKYAA

SEQ ID NO: 19623 - protein, 9 aa, Artificial Sequence
  Description of Artificial Sequence: Synthetic peptide
NEYECMCWY

SEQ ID NO: 19624 - protein, 9 aa, Artificial Sequence
  Description of Artificial Sequence: Synthetic peptide
NGDEFTVHG

SEQ ID NO: 19625 - protein, 9 aa, Artificial Sequence
  Description of Artificial Sequence: Synthetic peptide
NHAEFLSGC

SEQ ID NO: 19626 - protein, 9 aa, Artificial Sequence
  Description of Artificial Sequence: Synthetic peptide
NHGEYFDWF

SEQ ID NO: 19627 - protein, 9 aa, Artificial Sequence
  Description of Artificial Sequence: Synthetic peptide
NHYEMQDWE

SEQ ID NO: 19628 - protein, 9 aa, Artificial Sequence
  Description of Artificial Sequence: Synthetic peptide
NKLENCIGM

SEQ ID NO: 19629 - protein, 9 aa, Artificial Sequence
  Description of Artificial Sequence: Synthetic peptide
NNHEQEWRN

SEQ ID NO: 19630 - protein, 9 aa, Artificial Sequence
  Description of Artificial Sequence: Synthetic peptide
NSREAEMLR

SEQ ID NO: 19631 - protein, 9 aa, Artificial Sequence
  Description of Artificial Sequence: Synthetic peptide
NTHEFKFQF

SEQ ID NO: 19632 - protein, 9 aa, Artificial Sequence
  Description of Artificial Sequence: Synthetic peptide
NTHEFMMQD

SEQ ID NO: 19633 - protein, 9 aa, Artificial Sequence
  Description of Artificial Sequence: Synthetic peptide
NYDEKHVCH

SEQ ID NO: 19634 - protein, 9 aa, Artificial Sequence
  Description of Artificial Sequence: Synthetic peptide
PFFERNIRE

SEQ ID NO: 19635 - protein, 9 aa, Artificial Sequence
  Description of Artificial Sequence: Synthetic peptide
PKFEFYEMI

SEQ ID NO: 19636 - protein, 9 aa, Artificial Sequence
  Description of Artificial Sequence: Synthetic peptide
PMEEMMHFC

SEQ ID NO: 19637 - protein, 9 aa, Artificial Sequence
  Description of Artificial Sequence: Synthetic peptide
PTNELYDNE

SEQ ID NO: 19638 - protein, 9 aa, Artificial Sequence
  Description of Artificial Sequence: Synthetic peptide
PYPEASVKM

SEQ ID NO: 19639 - protein, 9 aa, Artificial Sequence
  Description of Artificial Sequence: Synthetic peptide
PYREGFRSP

SEQ ID NO: 19640 - protein, 9 aa, Artificial Sequence
  Description of Artificial Sequence: Synthetic peptide
QALECTCQR

SEQ ID NO: 19641 - protein, 9 aa, Artificial Sequence
  Description of Artificial Sequence: Synthetic peptide
QARECEAMD

SEQ ID NO: 19642 - protein, 9 aa, Artificial Sequence
  Description of Artificial Sequence: Synthetic peptide
QASEHDTVV

SEQ ID NO: 19643 - protein, 9 aa, Artificial Sequence
  Description of Artificial Sequence: Synthetic peptide
QHNEKPMDA

SEQ ID NO: 19644 - protein, 9 aa, Artificial Sequence
  Description of Artificial Sequence: Synthetic peptide
QHYEFQKHC

SEQ ID NO: 19645 - protein, 9 aa, Artificial Sequence
  Description of Artificial Sequence: Synthetic peptide
QIDEGMYSE

SEQ ID NO: 19646 - protein, 9 aa, Artificial Sequence
  Description of Artificial Sequence: Synthetic peptide
QINEFAEHF

SEQ ID NO: 19647 - protein, 9 aa, Artificial Sequence
  Description of Artificial Sequence: Synthetic peptide
QMREIQAEQ

SEQ ID NO: 19648 - protein, 9 aa, Artificial Sequence
  Description of Artificial Sequence: Synthetic peptide
QNPEVHFSK

SEQ ID NO: 19649 - protein, 9 aa, Artificial Sequence
  Description of Artificial Sequence: Synthetic peptide
QSEECMECR

SEQ ID NO: 19650 - protein, 9 aa, Artificial Sequence
  Description of Artificial Sequence: Synthetic peptide
QSNEDLADI

SEQ ID NO: 19651 - protein, 9 aa, Artificial Sequence
  Description of Artificial Sequence: Synthetic peptide
RAMEMQDQG

SEQ ID NO: 19652 - protein, 9 aa, Artificial Sequence
  Description of Artificial Sequence: Synthetic peptide
RCNEYTGEK

SEQ ID NO: 19653 - protein, 9 aa, Artificial Sequence
  Description of Artificial Sequence: Synthetic peptide
RIIEQDEIT

SEQ ID NO: 19654 - protein, 9 aa, Artificial Sequence
  Description of Artificial Sequence: Synthetic peptide
RINEQDECM

SEQ ID NO: 19655 - protein, 9 aa, Artificial Sequence
  Description of Artificial Sequence: Synthetic peptide
RWMELENAT

SEQ ID NO: 19656 - protein, 9 aa, Artificial Sequence
  Description of Artificial Sequence: Synthetic peptide
SAGEWGQMW

SEQ ID NO: 19657 - protein, 9 aa, Artificial Sequence
  Description of Artificial Sequence: Synthetic peptide
SIDEFQENW

SEQ ID NO: 19658 - protein, 9 aa, Artificial Sequence
  Description of Artificial Sequence: Synthetic peptide
SPDEFGTFR

SEQ ID NO: 19659 - protein, 9 aa, Artificial Sequence
  Description of Artificial Sequence: Synthetic peptide
SPHEIFVWN

SEQ ID NO: 19660 - protein, 9 aa, Artificial Sequence
  Description of Artificial Sequence: Synthetic peptide
SSEEWCQCE

SEQ ID NO: 19661 - protein, 9 aa, Artificial Sequence
  Description of Artificial Sequence: Synthetic peptide
SSVEGIRER

SEQ ID NO: 19662 - protein, 9 aa, Artificial Sequence
  Description of Artificial Sequence: Synthetic peptide
SWAENKQSF

SEQ ID NO: 19663 - protein, 9 aa, Artificial Sequence
  Description of Artificial Sequence: Synthetic peptide
TAEEIWYER

SEQ ID NO: 19664 - protein, 9 aa, Artificial Sequence
  Description of Artificial Sequence: Synthetic peptide
TCCEPSWND

SEQ ID NO: 19665 - protein, 9 aa, Artificial Sequence
  Description of Artificial Sequence: Synthetic peptide
TGNELYCWT

SEQ ID NO: 19666 - protein, 9 aa, Artificial Sequence
  Description of Artificial Sequence: Synthetic peptide
THAEFEHMH

SEQ ID NO: 19667 - protein, 9 aa, Artificial Sequence
  Description of Artificial Sequence: Synthetic peptide
TKMEYQGAT

SEQ ID NO: 19668 - protein, 9 aa, Artificial Sequence
  Description of Artificial Sequence: Synthetic peptide
TMQEFVVKG

SEQ ID NO: 19669 - protein, 9 aa, Artificial Sequence
  Description of Artificial Sequence: Synthetic peptide
TMYETLLMG

SEQ ID NO: 19670 - protein, 9 aa, Artificial Sequence
  Description of Artificial Sequence: Synthetic peptide
TQNEHGKYD

SEQ ID NO: 19671 - protein, 9 aa, Artificial Sequence
  Description of Artificial Sequence: Synthetic peptide
TREEDDKVN

SEQ ID NO: 19672 - protein, 9 aa, Artificial Sequence
  Description of Artificial Sequence: Synthetic peptide
TRMEQPSGR

SEQ ID NO: 19673 - protein, 9 aa, Artificial Sequence
  Description of Artificial Sequence: Synthetic peptide
TSNEMKKHW

SEQ ID NO: 19674 - protein, 9 aa, Artificial Sequence
  Description of Artificial Sequence: Synthetic peptide
TTEEGQTFR

SEQ ID NO: 19675 - protein, 9 aa, Artificial Sequence
  Description of Artificial Sequence: Synthetic peptide
TWGENGAWC

SEQ ID NO: 19676 - protein, 9 aa, Artificial Sequence
  Description of Artificial Sequence: Synthetic peptide
VCEEYYQMR

SEQ ID NO: 19677 - protein, 9 aa, Artificial Sequence
  Description of Artificial Sequence: Synthetic peptide
VFEEDAYGL

SEQ ID NO: 19678 - protein, 9 aa, Artificial Sequence
  Description of Artificial Sequence: Synthetic peptide
VFLEGMHFP

SEQ ID NO: 19679 - protein, 9 aa, Artificial Sequence
  Description of Artificial Sequence: Synthetic peptide
VKNEQTVFF

SEQ ID NO: 19680 - protein, 9 aa, Artificial Sequence
  Description of Artificial Sequence: Synthetic peptide
VLGELGDMG

SEQ ID NO: 19681 - protein, 9 aa, Artificial Sequence
  Description of Artificial Sequence: Synthetic peptide
VSPECPSFT

SEQ ID NO: 19682 - protein, 9 aa, Artificial Sequence
  Description of Artificial Sequence: Synthetic peptide
WGAEKQWAF

SEQ ID NO: 19683 - protein, 9 aa, Artificial Sequence
  Description of Artificial Sequence: Synthetic peptide
WGHEIMTEW

SEQ ID NO: 19684 - protein, 9 aa, Artificial Sequence
  Description of Artificial Sequence: Synthetic peptide
WHDEKSRYL

SEQ ID NO: 19685 - protein, 9 aa, Artificial Sequence
  Description of Artificial Sequence: Synthetic peptide
WIMEENAGQ

SEQ ID NO: 19686 - protein, 9 aa, Artificial Sequence
  Description of Artificial Sequence: Synthetic peptide
WMIEMWNCM

SEQ ID NO: 19687 - protein, 9 aa, Artificial Sequence
  Description of Artificial Sequence: Synthetic peptide
YADECAYGR

SEQ ID NO: 19688 - protein, 9 aa, Artificial Sequence
  Description of Artificial Sequence: Synthetic peptide
YAGEHDMGQ

SEQ ID NO: 19689 - protein, 9 aa, Artificial Sequence
  Description of Artificial Sequence: Synthetic peptide
YANEPQHHF

SEQ ID NO: 19690 - protein, 9 aa, Artificial Sequence
  Description of Artificial Sequence: Synthetic peptide
YMVEYAKYG

SEQ ID NO: 19691 - protein, 9 aa, Artificial Sequence
  Description of Artificial Sequence: Synthetic peptide
YNEEEWFFA

SEQ ID NO: 19692 - protein, 9 aa, Artificial Sequence
  Description of Artificial Sequence: Synthetic peptide
YQVERGASA

SEQ ID NO: 19693 - protein, 9 aa, Artificial Sequence
  Description of Artificial Sequence: Synthetic peptide
MGKEYSQCF

SEQ ID NO: 19694 - protein, 9 aa, Artificial Sequence
  Description of Artificial Sequence: Synthetic peptide
TYEEENGFL

SEQ ID NO: 19695 - protein, 9 aa, Artificial Sequence
  Description of Artificial Sequence: Synthetic peptide
NTCEGWSHF

SEQ ID NO: 19696 - protein, 9 aa, Artificial Sequence
  Description of Artificial Sequence: Synthetic peptide
GLFEGSPGA

SEQ ID NO: 19697 - protein, 9 aa, Artificial Sequence
  Description of Artificial Sequence: Synthetic peptide
MWHELIADQ

SEQ ID NO: 19698 - protein, 9 aa, Artificial Sequence
  Description of Artificial Sequence: Synthetic peptide
NQREWHGLA

SEQ ID NO: 19699 - protein, 9 aa, Artificial Sequence
  Description of Artificial Sequence: Synthetic peptide
GDYQLLNSP

SEQ ID NO: 19700 - protein, 9 aa, Artificial Sequence
  Description of Artificial Sequence: Synthetic peptide
GFIDLNSRR

SEQ ID NO: 19701 - protein, 9 aa, Artificial Sequence
  Description of Artificial Sequence: Synthetic peptide
GIDWLDQYG

SEQ ID NO: 19702 - protein, 9 aa, Artificial Sequence
  Description of Artificial Sequence: Synthetic peptide
GIMLLPNGH

SEQ ID NO: 19703 - protein, 9 aa, Artificial Sequence
  Description of Artificial Sequence: Synthetic peptide
GSLTLLEQT

SEQ ID NO: 19704 - protein, 9 aa, Artificial Sequence
  Description of Artificial Sequence: Synthetic peptide
GYVSLWSMY

SEQ ID NO: 19705 - protein, 9 aa, Artificial Sequence
  Description of Artificial Sequence: Synthetic peptide
HCVALMMDR

SEQ ID NO: 19706 - protein, 9 aa, Artificial Sequence
  Description of Artificial Sequence: Synthetic peptide
HEEVLIAGS

SEQ ID NO: 19707 - protein, 9 aa, Artificial Sequence
  Description of Artificial Sequence: Synthetic peptide
HGLTLKWDC

SEQ ID NO: 19708 - protein, 9 aa, Artificial Sequence
  Description of Artificial Sequence: Synthetic peptide
HHESLGMHM

SEQ ID NO: 19709 - protein, 9 aa, Artificial Sequence
  Description of Artificial Sequence: Synthetic peptide
HMEALMTNV

SEQ ID NO: 19710 - protein, 9 aa, Artificial Sequence
  Description of Artificial Sequence: Synthetic peptide
HTGFLTKGM

SEQ ID NO: 19711 - protein, 9 aa, Artificial Sequence
  Description of Artificial Sequence: Synthetic peptide
HTICLAVTP

SEQ ID NO: 19712 - protein, 9 aa, Artificial Sequence
  Description of Artificial Sequence: Synthetic peptide
HTWQLHNWN

SEQ ID NO: 19713 - protein, 9 aa, Artificial Sequence
  Description of Artificial Sequence: Synthetic peptide
IDLNLNIQI

SEQ ID NO: 19714 - protein, 9 aa, Artificial Sequence
  Description of Artificial Sequence: Synthetic peptide
IHDTLGAVA

SEQ ID NO: 19715 - protein, 9 aa, Artificial Sequence
  Description of Artificial Sequence: Synthetic peptide
KCEVLEVQD

SEQ ID NO: 19716 - protein, 9 aa, Artificial Sequence
  Description of Artificial Sequence: Synthetic peptide
KEVYLSTAA

SEQ ID NO: 19717 - protein, 9 aa, Artificial Sequence
  Description of Artificial Sequence: Synthetic peptide
KHVDLSNIP

SEQ ID NO: 19718 - protein, 9 aa, Artificial Sequence
  Description of Artificial Sequence: Synthetic peptide
LGNQLAYGG

SEQ ID NO: 19719 - protein, 9 aa, Artificial Sequence
  Description of Artificial Sequence: Synthetic peptide
LHYPLVNDG

SEQ ID NO: 19720 - protein, 9 aa, Artificial Sequence
  Description of Artificial Sequence: Synthetic peptide
LMDHLCTPN

SEQ ID NO: 19721 - protein, 9 aa, Artificial Sequence
  Description of Artificial Sequence: Synthetic peptide
LRGCLHLEH

SEQ ID NO: 19722 - protein, 9 aa, Artificial Sequence
  Description of Artificial Sequence: Synthetic peptide
LTNFLQNDN

SEQ ID NO: 19723 - protein, 9 aa, Artificial Sequence
  Description of Artificial Sequence: Synthetic peptide
MFLPLHYKD

SEQ ID NO: 19724 - protein, 9 aa, Artificial Sequence
  Description of Artificial Sequence: Synthetic peptide
MHELLQSVH

SEQ ID NO: 19725 - protein, 9 aa, Artificial Sequence
  Description of Artificial Sequence: Synthetic peptide
MIAQLHTWA

SEQ ID NO: 19726 - protein, 9 aa, Artificial Sequence
  Description of Artificial Sequence: Synthetic peptide
MNRWLLTDG

SEQ ID NO: 19727 - protein, 9 aa, Artificial Sequence
  Description of Artificial Sequence: Synthetic peptide
MPQSLRVCS

SEQ ID NO: 19728 - protein, 9 aa, Artificial Sequence
  Description of Artificial Sequence: Synthetic peptide
MYEWLAHCW

SEQ ID NO: 19729 - protein, 9 aa, Artificial Sequence
  Description of Artificial Sequence: Synthetic peptide
NANLLTEQY

SEQ ID NO: 19730 - protein, 9 aa, Artificial Sequence
  Description of Artificial Sequence: Synthetic peptide
NEMRLECSY

SEQ ID NO: 19731 - protein, 9 aa, Artificial Sequence
  Description of Artificial Sequence: Synthetic peptide
NHKWLKCSL

SEQ ID NO: 19732 - protein, 9 aa, Artificial Sequence
  Description of Artificial Sequence: Synthetic peptide
NHVSLNCDP

SEQ ID NO: 19733 - protein, 9 aa, Artificial Sequence
  Description of Artificial Sequence: Synthetic peptide
NISWLHSFH

SEQ ID NO: 19734 - protein, 9 aa, Artificial Sequence
  Description of Artificial Sequence: Synthetic peptide
NTCYLYAFF

SEQ ID NO: 19735 - protein, 9 aa, Artificial Sequence
  Description of Artificial Sequence: Synthetic peptide
PDPVLSIKD

SEQ ID NO: 19736 - protein, 9 aa, Artificial Sequence
  Description of Artificial Sequence: Synthetic peptide
PHCTLSFIG

SEQ ID NO: 19737 - protein, 9 aa, Artificial Sequence
  Description of Artificial Sequence: Synthetic peptide
PRKSLWMEP

SEQ ID NO: 19738 - protein, 9 aa, Artificial Sequence
  Description of Artificial Sequence: Synthetic peptide
PWAVLNQEP

SEQ ID NO: 19739 - protein, 9 aa, Artificial Sequence
  Description of Artificial Sequence: Synthetic peptide
PYEQLGTTI

SEQ ID NO: 19740 - protein, 9 aa, Artificial Sequence
  Description of Artificial Sequence: Synthetic peptide
QFGSLVNSW

SEQ ID NO: 19741 - protein, 9 aa, Artificial Sequence
  Description of Artificial Sequence: Synthetic peptide
QGYKLDNQM

SEQ ID NO: 19742 - protein, 9 aa, Artificial Sequence
  Description of Artificial Sequence: Synthetic peptide
QKEYLMNSG

SEQ ID NO: 19743 - protein, 9 aa, Artificial Sequence
  Description of Artificial Sequence: Synthetic peptide
QMWTLPSHN

SEQ ID NO: 19744 - protein, 9 aa, Artificial Sequence
  Description of Artificial Sequence: Synthetic peptide
QPMVLNQDC

SEQ ID NO: 19745 - protein, 9 aa, Artificial Sequence
  Description of Artificial Sequence: Synthetic peptide
QQHRLTFMP

SEQ ID NO: 19746 - protein, 9 aa, Artificial Sequence
  Description of Artificial Sequence: Synthetic peptide
QSQSLTEEA

SEQ ID NO: 19747 - protein, 9 aa, Artificial Sequence
  Description of Artificial Sequence: Synthetic peptide
QTNALLNGE

SEQ ID NO: 19748 - protein, 9 aa, Artificial Sequence
  Description of Artificial Sequence: Synthetic peptide
QWNGLNSCL

SEQ ID NO: 19749 - protein, 9 aa, Artificial Sequence
  Description of Artificial Sequence: Synthetic peptide
RCLDLVNEP

SEQ ID NO: 19750 - protein, 9 aa, Artificial Sequence
  Description of Artificial Sequence: Synthetic peptide
SADQLHQFA

SEQ ID NO: 19751 - protein, 9 aa, Artificial Sequence
  Description of Artificial Sequence: Synthetic peptide
SAEDLYYHY

SEQ ID NO: 19752 - protein, 9 aa, Artificial Sequence
  Description of Artificial Sequence: Synthetic peptide
SCVCLEAHQ

SEQ ID NO: 19753 - protein, 9 aa, Artificial Sequence
  Description of Artificial Sequence: Synthetic peptide
SDWPLMRYQ

SEQ ID NO: 19754 - protein, 9 aa, Artificial Sequence
  Description of Artificial Sequence: Synthetic peptide
SEVGLPCYQ

SEQ ID NO: 19755 - protein, 9 aa, Artificial Sequence
  Description of Artificial Sequence: Synthetic peptide
SFNQLICGL

SEQ ID NO: 19756 - protein, 9 aa, Artificial Sequence
  Description of Artificial Sequence: Synthetic peptide
SHDDLRMQC

SEQ ID NO: 19757 - protein, 9 aa, Artificial Sequence
  Description of Artificial Sequence: Synthetic peptide
SPGILQMIG

SEQ ID NO: 19758 - protein, 9 aa, Artificial Sequence
  Description of Artificial Sequence: Synthetic peptide
SREILDVVA

SEQ ID NO: 19759 - protein, 9 aa, Artificial Sequence
  Description of Artificial Sequence: Synthetic peptide
SSQHLWHRD

SEQ ID NO: 19760 - protein, 9 aa, Artificial Sequence
  Description of Artificial Sequence: Synthetic peptide
STVTLHTHQ

SEQ ID NO: 19761 - protein, 9 aa, Artificial Sequence
  Description of Artificial Sequence: Synthetic peptide
SYDGLDQVA

SEQ ID NO: 19762 - protein, 9 aa, Artificial Sequence
  Description of Artificial Sequence: Synthetic peptide
SYEILGDWC

SEQ ID NO: 19763 - protein, 9 aa, Artificial Sequence
  Description of Artificial Sequence: Synthetic peptide
TCLNLSWYG

SEQ ID NO: 19764 - protein, 9 aa, Artificial Sequence
  Description of Artificial Sequence: Synthetic peptide
TFGFLSDPQ

SEQ ID NO: 19765 - protein, 9 aa, Artificial Sequence
  Description of Artificial Sequence: Synthetic peptide
THEHLANHN

SEQ ID NO: 19766 - protein, 9 aa, Artificial Sequence
  Description of Artificial Sequence: Synthetic peptide
TMEPLGWSF

SEQ ID NO: 19767 - protein, 9 aa, Artificial Sequence
  Description of Artificial Sequence: Synthetic peptide
TSEVLDHFC

SEQ ID NO: 19768 - protein, 9 aa, Artificial Sequence
  Description of Artificial Sequence: Synthetic peptide
TYMQLSKYC

SEQ ID NO: 19769 - protein, 9 aa, Artificial Sequence
  Description of Artificial Sequence: Synthetic peptide
VFHTLHTKG

SEQ ID NO: 19770 - protein, 9 aa, Artificial Sequence
  Description of Artificial Sequence: Synthetic peptide
VGMPLRKEE

SEQ ID NO: 19771 - protein, 9 aa, Artificial Sequence
  Description of Artificial Sequence: Synthetic peptide
VGNCLHNYW

SEQ ID NO: 19772 - protein, 9 aa, Artificial Sequence
  Description of Artificial Sequence: Synthetic peptide
VIYQLGEMV

SEQ ID NO: 19773 - protein, 9 aa, Artificial Sequence
  Description of Artificial Sequence: Synthetic peptide
VREFLNGLN

SEQ ID NO: 19774 - protein, 9 aa, Artificial Sequence
  Description of Artificial Sequence: Synthetic peptide
WCWQLHDQF

SEQ ID NO: 19775 - protein, 9 aa, Artificial Sequence
  Description of Artificial Sequence: Synthetic peptide
WDDLLSFWC

SEQ ID NO: 19776 - protein, 9 aa, Artificial Sequence
  Description of Artificial Sequence: Synthetic peptide
WTLMLHNFM

SEQ ID NO: 19777 - protein, 9 aa, Artificial Sequence
  Description of Artificial Sequence: Synthetic peptide
NMPSLRTRI

SEQ ID NO: 19778 - protein, 9 aa, Artificial Sequence
  Description of Artificial Sequence: Synthetic peptide
ASFFLNPLE

SEQ ID NO: 19779 - protein, 9 aa, Artificial Sequence
  Description of Artificial Sequence: Synthetic peptide
ATMNLSWGL

SEQ ID NO: 19780 - protein, 9 aa, Artificial Sequence
  Description of Artificial Sequence: Synthetic peptide
FQDPKDTVG

SEQ ID NO: 19781 - protein, 9 aa, Artificial Sequence
  Description of Artificial Sequence: Synthetic peptide
FTNSDDDVS

SEQ ID NO: 19782 - protein, 9 aa, Artificial Sequence
  Description of Artificial Sequence: Synthetic peptide
GCEACDFMG

SEQ ID NO: 19783 - protein, 9 aa, Artificial Sequence
  Description of Artificial Sequence: Synthetic peptide
GDNKIDMHN

SEQ ID NO: 19784 - protein, 9 aa, Artificial Sequence
  Description of Artificial Sequence: Synthetic peptide
GHMWTDSMA

SEQ ID NO: 19785 - protein, 9 aa, Artificial Sequence
  Description of Artificial Sequence: Synthetic peptide
GIHVTDLQE

SEQ ID NO: 19786 - protein, 9 aa, Artificial Sequence
  Description of Artificial Sequence: Synthetic peptide
GMQWPDSME

SEQ ID NO: 19787 - protein, 9 aa, Artificial Sequence
  Description of Artificial Sequence: Synthetic peptide
GNDIWDFMA

SEQ ID NO: 19788 - protein, 9 aa, Artificial Sequence
  Description of Artificial Sequence: Synthetic peptide
GQNVMDYHA

SEQ ID NO: 19789 - protein, 9 aa, Artificial Sequence
  Description of Artificial Sequence: Synthetic peptide
GSSVDDGVS

SEQ ID NO: 19790 - protein, 9 aa, Artificial Sequence
  Description of Artificial Sequence: Synthetic peptide
GTECIDWTA

SEQ ID NO: 19791 - protein, 9 aa, Artificial Sequence
  Description of Artificial Sequence: Synthetic peptide
GTNAKDGTP

SEQ ID NO: 19792 - protein, 9 aa, Artificial Sequence
  Description of Artificial Sequence: Synthetic peptide
GWDRHDGFV

SEQ ID NO: 19793 - protein, 9 aa, Artificial Sequence
  Description of Artificial Sequence: Synthetic peptide
HDKDFDWAN

SEQ ID NO: 19794 - protein, 9 aa, Artificial Sequence
  Description of Artificial Sequence: Synthetic peptide
HHDTSDMSC

SEQ ID NO: 19795 - protein, 9 aa, Artificial Sequence
  Description of Artificial Sequence: Synthetic peptide
HHGPMDWGA

SEQ ID NO: 19796 - protein, 9 aa, Artificial Sequence
  Description of Artificial Sequence: Synthetic peptide
HIMCYDEWY

SEQ ID NO: 19797 - protein, 9 aa, Artificial Sequence
  Description of Artificial Sequence: Synthetic peptide
HLYIKDMTD

SEQ ID NO: 19798 - protein, 9 aa, Artificial Sequence
  Description of Artificial Sequence: Synthetic peptide
HSMVHDCFN

SEQ ID NO: 19799 - protein, 9 aa, Artificial Sequence
  Description of Artificial Sequence: Synthetic peptide
HSWTRDRLE

SEQ ID NO: 19800 - protein, 9 aa, Artificial Sequence
  Description of Artificial Sequence: Synthetic peptide
HWVMGDVKL

SEQ ID NO: 19801 - protein, 9 aa, Artificial Sequence
  Description of Artificial Sequence: Synthetic peptide
HYDQRDEHQ

SEQ ID NO: 19802 - protein, 9 aa, Artificial Sequence
  Description of Artificial Sequence: Synthetic peptide
HYHQSDWMH

SEQ ID NO: 19803 - protein, 9 aa, Artificial Sequence
  Description of Artificial Sequence: Synthetic peptide
IAIPEDKQY

SEQ ID NO: 19804 - protein, 9 aa, Artificial Sequence
  Description of Artificial Sequence: Synthetic peptide
IASLEDMNG

SEQ ID NO: 19805 - protein, 9 aa, Artificial Sequence
  Description of Artificial Sequence: Synthetic peptide
IEMVRDCGY

SEQ ID NO: 19806 - protein, 9 aa, Artificial Sequence
  Description of Artificial Sequence: Synthetic peptide
IHLKSDYVW

SEQ ID NO: 19807 - protein, 9 aa, Artificial Sequence
  Description of Artificial Sequence: Synthetic peptide
IKDWVDGIQ

SEQ ID NO: 19808 - protein, 9 aa, Artificial Sequence
  Description of Artificial Sequence: Synthetic peptide
IQQTIDMVA

SEQ ID NO: 19809 - protein, 9 aa, Artificial Sequence
  Description of Artificial Sequence: Synthetic peptide
ITHMIDQDN

SEQ ID NO: 19810 - protein, 9 aa, Artificial Sequence
  Description of Artificial Sequence: Synthetic peptide
ITWPEDGSI

SEQ ID NO: 19811 - protein, 9 aa, Artificial Sequence
  Description of Artificial Sequence: Synthetic peptide
KDYASDIHK

SEQ ID NO: 19812 - protein, 9 aa, Artificial Sequence
  Description of Artificial Sequence: Synthetic peptide
KEFRMDSGS

SEQ ID NO: 19813 - protein, 9 aa, Artificial Sequence
  Description of Artificial Sequence: Synthetic peptide
KHHTSDTAV

SEQ ID NO: 19814 - protein, 9 aa, Artificial Sequence
  Description of Artificial Sequence: Synthetic peptide
KIYDHDAWT

SEQ ID NO: 19815 - protein, 9 aa, Artificial Sequence
  Description of Artificial Sequence: Synthetic peptide
KSLCYDDWM

SEQ ID NO: 19816 - protein, 9 aa, Artificial Sequence
  Description of Artificial Sequence: Synthetic peptide
KWVNVDDMR

SEQ ID NO: 19817 - protein, 9 aa, Artificial Sequence
  Description of Artificial Sequence: Synthetic peptide
LADSDDPMD

SEQ ID NO: 19818 - protein, 9 aa, Artificial Sequence
  Description of Artificial Sequence: Synthetic peptide
LIASRDEAH

SEQ ID NO: 19819 - protein, 9 aa, Artificial Sequence
  Description of Artificial Sequence: Synthetic peptide
LINMWDFWP

SEQ ID NO: 19820 - protein, 9 aa, Artificial Sequence
  Description of Artificial Sequence: Synthetic peptide
LQHFIDEGA

SEQ ID NO: 19821 - protein, 9 aa, Artificial Sequence
  Description of Artificial Sequence: Synthetic peptide
LQKVCDVYT

SEQ ID NO: 19822 - protein, 9 aa, Artificial Sequence
  Description of Artificial Sequence: Synthetic peptide
LTAKPDCCN

SEQ ID NO: 19823 - protein, 9 aa, Artificial Sequence
  Description of Artificial Sequence: Synthetic peptide
LTVVNDTVF

SEQ ID NO: 19824 - protein, 9 aa, Artificial Sequence
  Description of Artificial Sequence: Synthetic peptide
LWLARDLMC

SEQ ID NO: 19825 - protein, 9 aa, Artificial Sequence
  Description of Artificial Sequence: Synthetic peptide
MASFTDHPQ

SEQ ID NO: 19826 - protein, 9 aa, Artificial Sequence
  Description of Artificial Sequence: Synthetic peptide
MEVAQDVIN

SEQ ID NO: 19827 - protein, 9 aa, Artificial Sequence
  Description of Artificial Sequence: Synthetic peptide
MHCAVDAQC

SEQ ID NO: 19828 - protein, 9 aa, Artificial Sequence
  Description of Artificial Sequence: Synthetic peptide
MHRHMDHEG

SEQ ID NO: 19829 - protein, 9 aa, Artificial Sequence
  Description of Artificial Sequence: Synthetic peptide
MNCQQDCVR

SEQ ID NO: 19830 - protein, 9 aa, Artificial Sequence
  Description of Artificial Sequence: Synthetic peptide
MQHVRDQFN

SEQ ID NO: 19831 - protein, 9 aa, Artificial Sequence
  Description of Artificial Sequence: Synthetic peptide
MSHTTDGDE

SEQ ID NO: 19832 - protein, 9 aa, Artificial Sequence
  Description of Artificial Sequence: Synthetic peptide
MTGYWDVEY

SEQ ID NO: 19833 - protein, 9 aa, Artificial Sequence
  Description of Artificial Sequence: Synthetic peptide
MTIPIDEMA

SEQ ID NO: 19834 - protein, 9 aa, Artificial Sequence
  Description of Artificial Sequence: Synthetic peptide
MTVHRDAWY

SEQ ID NO: 19835 - protein, 9 aa, Artificial Sequence
  Description of Artificial Sequence: Synthetic peptide
MTYKWDCHV

SEQ ID NO: 19836 - protein, 9 aa, Artificial Sequence
  Description of Artificial Sequence: Synthetic peptide
MWNIIDRHN

SEQ ID NO: 19837 - protein, 9 aa, Artificial Sequence
  Description of Artificial Sequence: Synthetic peptide
NAPHADTPS

SEQ ID NO: 19838 - protein, 9 aa, Artificial Sequence
  Description of Artificial Sequence: Synthetic peptide
NCRHCDPNC

SEQ ID NO: 19839 - protein, 9 aa, Artificial Sequence
  Description of Artificial Sequence: Synthetic peptide
NCSYHDASP

SEQ ID NO: 19840 - protein, 9 aa, Artificial Sequence
  Description of Artificial Sequence: Synthetic peptide
NDGKDDTYQ

SEQ ID NO: 19841 - protein, 9 aa, Artificial Sequence
  Description of Artificial Sequence: Synthetic peptide
NEDMWDYNH

SEQ ID NO: 19842 - protein, 9 aa, Artificial Sequence
  Description of Artificial Sequence: Synthetic peptide
NFRTFDHSE

SEQ ID NO: 19843 - protein, 9 aa, Artificial Sequence
  Description of Artificial Sequence: Synthetic peptide
NHLTRDQWG

SEQ ID NO: 19844 - protein, 9 aa, Artificial Sequence
  Description of Artificial Sequence: Synthetic peptide
NMLNADAMY

SEQ ID NO: 19845 - protein, 9 aa, Artificial Sequence
  Description of Artificial Sequence: Synthetic peptide
NNSVCDKMS

SEQ ID NO: 19846 - protein, 9 aa, Artificial Sequence
  Description of Artificial Sequence: Synthetic peptide
NQVGRDVMD

SEQ ID NO: 19847 - protein, 9 aa, Artificial Sequence
  Description of Artificial Sequence: Synthetic peptide
NSDTGDMNP

SEQ ID NO: 19848 - protein, 9 aa, Artificial Sequence
  Description of Artificial Sequence: Synthetic peptide
NTMHTDTME

SEQ ID NO: 19849 - protein, 9 aa, Artificial Sequence
  Description of Artificial Sequence: Synthetic peptide
NTMLTDTGS

SEQ ID NO: 19850 - protein, 9 aa, Artificial Sequence
  Description of Artificial Sequence: Synthetic peptide
QCMHDDWSS

SEQ ID NO: 19851 - protein, 9 aa, Artificial Sequence
  Description of Artificial Sequence: Synthetic peptide
QCMWPDIAG

SEQ ID NO: 19852 - protein, 9 aa, Artificial Sequence
  Description of Artificial Sequence: Synthetic peptide
QEKLQDMYG

SEQ ID NO: 19853 - protein, 9 aa, Artificial Sequence
  Description of Artificial Sequence: Synthetic peptide
QFMDFDFHY

SEQ ID NO: 19854 - protein, 9 aa, Artificial Sequence
  Description of Artificial Sequence: Synthetic peptide
QLMPRDGLC

SEQ ID NO: 19855 - protein, 9 aa, Artificial Sequence
  Description of Artificial Sequence: Synthetic peptide
QQEHADWWR

SEQ ID NO: 19856 - protein, 9 aa, Artificial Sequence
  Description of Artificial Sequence: Synthetic peptide
QSENMDYWD

SEQ ID NO: 19857 - protein, 9 aa, Artificial Sequence
  Description of Artificial Sequence: Synthetic peptide
QTFDADGMH

SEQ ID NO: 19858 - protein, 9 aa, Artificial Sequence
  Description of Artificial Sequence: Synthetic peptide
QTQPHDRHH

SEQ ID NO: 19859 - protein, 9 aa, Artificial Sequence
  Description of Artificial Sequence: Synthetic peptide
QYHHIDYGK

SEQ ID NO: 19860 - protein, 9 aa, Artificial Sequence
  Description of Artificial Sequence: Synthetic peptide
QYQNDDRAS

SEQ ID NO: 19861 - protein, 9 aa, Artificial Sequence
  Description of Artificial Sequence: Synthetic peptide
QYYRADGAK

SEQ ID NO: 19862 - protein, 9 aa, Artificial Sequence
  Description of Artificial Sequence: Synthetic peptide
RQVMTDRIN

SEQ ID NO: 19863 - protein, 9 aa, Artificial Sequence
  Description of Artificial Sequence: Synthetic peptide
RSEFADHWW

SEQ ID NO: 19864 - protein, 9 aa, Artificial Sequence
  Description of Artificial Sequence: Synthetic peptide
SAEYWDMQD

SEQ ID NO: 19865 - protein, 9 aa, Artificial Sequence
  Description of Artificial Sequence: Synthetic peptide
SAIWGDNSM

SEQ ID NO: 19866 - protein, 9 aa, Artificial Sequence
  Description of Artificial Sequence: Synthetic peptide
SDETRDKHD

SEQ ID NO: 19867 - protein, 9 aa, Artificial Sequence
  Description of Artificial Sequence: Synthetic peptide
SFSFCDQRT

SEQ ID NO: 19868 - protein, 9 aa, Artificial Sequence
  Description of Artificial Sequence: Synthetic peptide
SIEDFDEDK

SEQ ID NO: 19869 - protein, 9 aa, Artificial Sequence
  Description of Artificial Sequence: Synthetic peptide
SMEPYDTFF

SEQ ID NO: 19870 - protein, 9 aa, Artificial Sequence
  Description of Artificial Sequence: Synthetic peptide
SNRWQDTYY

SEQ ID NO: 19871 - protein, 9 aa, Artificial Sequence
  Description of Artificial Sequence: Synthetic peptide
SPEIWDMGA

SEQ ID NO: 19872 - protein, 9 aa, Artificial Sequence
  Description of Artificial Sequence: Synthetic peptide
SSSQCDVYE

SEQ ID NO: 19873 - protein, 9 aa, Artificial Sequence
  Description of Artificial Sequence: Synthetic peptide
STLQSDPFE

SEQ ID NO: 19874 - protein, 9 aa, Artificial Sequence
  Description of Artificial Sequence: Synthetic peptide
STMFKDHFA

SEQ ID NO: 19875 - protein, 9 aa, Artificial Sequence
  Description of Artificial Sequence: Synthetic peptide
TARNHDHTA

SEQ ID NO: 19876 - protein, 9 aa, Artificial Sequence
  Description of Artificial Sequence: Synthetic peptide
TCHDVDFTM

SEQ ID NO: 19877 - protein, 9 aa, Artificial Sequence
  Description of Artificial Sequence: Synthetic peptide
TGGLWDWFE

SEQ ID NO: 19878 - protein, 9 aa, Artificial Sequence
  Description of Artificial Sequence: Synthetic peptide
THVGIDNIP

SEQ ID NO: 19879 - protein, 9 aa, Artificial Sequence
  Description of Artificial Sequence: Synthetic peptide
TIRYFDGCG

SEQ ID NO: 19880 - protein, 9 aa, Artificial Sequence
  Description of Artificial Sequence: Synthetic peptide
TLHDNDSAC

SEQ ID NO: 19881 - protein, 9 aa, Artificial Sequence
  Description of Artificial Sequence: Synthetic peptide
TMEVSDQHN

SEQ ID NO: 19882 - protein, 9 aa, Artificial Sequence
  Description of Artificial Sequence: Synthetic peptide
TMGIYDMNE

SEQ ID NO: 19883 - protein, 9 aa, Artificial Sequence
  Description of Artificial Sequence: Synthetic peptide
TMRTSDVYE

SEQ ID NO: 19884 - protein, 9 aa, Artificial Sequence
  Description of Artificial Sequence: Synthetic peptide
TNYQVDWDS

SEQ ID NO: 19885 - protein, 9 aa, Artificial Sequence
  Description of Artificial Sequence: Synthetic peptide
TQMMYDCMQ

SEQ ID NO: 19886 - protein, 9 aa, Artificial Sequence
  Description of Artificial Sequence: Synthetic peptide
TSKSYDGQC

SEQ ID NO: 19887 - protein, 9 aa, Artificial Sequence
  Description of Artificial Sequence: Synthetic peptide
TSSVVDLNA

SEQ ID NO: 19888 - protein, 9 aa, Artificial Sequence
  Description of Artificial Sequence: Synthetic peptide
VCALYDEQS

SEQ ID NO: 19889 - protein, 9 aa, Artificial Sequence
  Description of Artificial Sequence: Synthetic peptide
VCCYIDCVQ

SEQ ID NO: 19890 - protein, 9 aa, Artificial Sequence
  Description of Artificial Sequence: Synthetic peptide
VCSMNDSCF

SEQ ID NO: 19891 - protein, 9 aa, Artificial Sequence
  Description of Artificial Sequence: Synthetic peptide
VDCIIDPQA

SEQ ID NO: 19892 - protein, 9 aa, Artificial Sequence
  Description of Artificial Sequence: Synthetic peptide
VEKGQDMDN

SEQ ID NO: 19893 - protein, 9 aa, Artificial Sequence
  Description of Artificial Sequence: Synthetic peptide
VGDQPDAGP

SEQ ID NO: 19894 - protein, 9 aa, Artificial Sequence
  Description of Artificial Sequence: Synthetic peptide
VGVQDDFMY

SEQ ID NO: 19895 - protein, 9 aa, Artificial Sequence
  Description of Artificial Sequence: Synthetic peptide
VHYNVDQCA

SEQ ID NO: 19896 - protein, 9 aa, Artificial Sequence
  Description of Artificial Sequence: Synthetic peptide
VMVKRDVAR

SEQ ID NO: 19897 - protein, 9 aa, Artificial Sequence
  Description of Artificial Sequence: Synthetic peptide
VNGVTDMDD

SEQ ID NO: 19898 - protein, 9 aa, Artificial Sequence
  Description of Artificial Sequence: Synthetic peptide
VPPSADDPH

SEQ ID NO: 19899 - protein, 9 aa, Artificial Sequence
  Description of Artificial Sequence: Synthetic peptide
VPWVSDWRC

SEQ ID NO: 19900 - protein, 9 aa, Artificial Sequence
  Description of Artificial Sequence: Synthetic peptide
VQLIKDWDQ

SEQ ID NO: 19901 - protein, 9 aa, Artificial Sequence
  Description of Artificial Sequence: Synthetic peptide
VSMRCDADY

SEQ ID NO: 19902 - protein, 9 aa, Artificial Sequence
  Description of Artificial Sequence: Synthetic peptide
VSQPFDPYP

SEQ ID NO: 19903 - protein, 9 aa, Artificial Sequence
  Description of Artificial Sequence: Synthetic peptide
VSRIDDAAC

SEQ ID NO: 19904 - protein, 9 aa, Artificial Sequence
  Description of Artificial Sequence: Synthetic peptide
VTHWCDHSY

SEQ ID NO: 19905 - protein, 9 aa, Artificial Sequence
  Description of Artificial Sequence: Synthetic peptide
WDSCSDSWM

SEQ ID NO: 19906 - protein, 9 aa, Artificial Sequence
  Description of Artificial Sequence: Synthetic peptide
WFRMRDCCG

SEQ ID NO: 19907 - protein, 9 aa, Artificial Sequence
  Description of Artificial Sequence: Synthetic peptide
WLVIKDVNL

SEQ ID NO: 19908 - protein, 9 aa, Artificial Sequence
  Description of Artificial Sequence: Synthetic peptide
WMMQVDGYP

SEQ ID NO: 19909 - protein, 9 aa, Artificial Sequence
  Description of Artificial Sequence: Synthetic peptide
WRKMEDNCM

SEQ ID NO: 19910 - protein, 9 aa, Artificial Sequence
  Description of Artificial Sequence: Synthetic peptide
YEQGVDRTF

SEQ ID NO: 19911 - protein, 9 aa, Artificial Sequence
  Description of Artificial Sequence: Synthetic peptide
YGCKSDEGF

SEQ ID NO: 19912 - protein, 9 aa, Artificial Sequence
  Description of Artificial Sequence: Synthetic peptide
YQIQFDQII

SEQ ID NO: 19913 - protein, 9 aa, Artificial Sequence
  Description of Artificial Sequence: Synthetic peptide
YSEMGDFYG

SEQ ID NO: 19914 - protein, 9 aa, Artificial Sequence
  Description of Artificial Sequence: Synthetic peptide
YSSFTDQNV

SEQ ID NO: 19915 - protein, 9 aa, Artificial Sequence
  Description of Artificial Sequence: Synthetic peptide
YTFYKDCCC

SEQ ID NO: 19916 - protein, 9 aa, Artificial Sequence
  Description of Artificial Sequence: Synthetic peptide
DNILRDVMA

SEQ ID NO: 19917 - protein, 9 aa, Artificial Sequence
  Description of Artificial Sequence: Synthetic peptide
QISVYDTKY

SEQ ID NO: 19918 - protein, 9 aa, Artificial Sequence
  Description of Artificial Sequence: Synthetic peptide
STALMDANM

SEQ ID NO: 19919 - protein, 9 aa, Artificial Sequence
  Description of Artificial Sequence: Synthetic peptide
MSGPNDTEF

SEQ ID NO: 19920 - protein, 9 aa, Artificial Sequence
  Description of Artificial Sequence: Synthetic peptide
GIWVRDTYN

SEQ ID NO: 19921 - protein, 9 aa, Artificial Sequence
  Description of Artificial Sequence: Synthetic peptide
DHLSNDAEM

SEQ ID NO: 19922 - protein, 9 aa, Artificial Sequence
  Description of Artificial Sequence: Synthetic peptide
ATGLTDHQW

SEQ ID NO: 19923 - protein, 9 aa, Artificial Sequence
  Description of Artificial Sequence: Synthetic peptide
QSRCVDNTV

SEQ ID NO: 19924 - protein, 9 aa, Artificial Sequence
  Description of Artificial Sequence: Synthetic peptide
GCAVIEVSA

SEQ ID NO: 19925 - protein, 9 aa, Artificial Sequence
  Description of Artificial Sequence: Synthetic peptide
GKWYNGVEL

SEQ ID NO: 19926 - protein, 9 aa, Artificial Sequence
  Description of Artificial Sequence: Synthetic peptide
GRNNAWVHV

SEQ ID NO: 19927 - protein, 9 aa, Artificial Sequence
  Description of Artificial Sequence: Synthetic peptide
GSMMFGVAQ

SEQ ID NO: 19928 - protein, 9 aa, Artificial Sequence
  Description of Artificial Sequence: Synthetic peptide
GTSWVLVQY

SEQ ID NO: 19929 - protein, 9 aa, Artificial Sequence
  Description of Artificial Sequence: Synthetic peptide
GTYLHVVAD

SEQ ID NO: 19930 - protein, 9 aa, Artificial Sequence
  Description of Artificial Sequence: Synthetic peptide
GWSDMTVVF

SEQ ID NO: 19931 - protein, 9 aa, Artificial Sequence
  Description of Artificial Sequence: Synthetic peptide
HHSIKNVCH

SEQ ID NO: 19932 - protein, 9 aa, Artificial Sequence
  Description of Artificial Sequence: Synthetic peptide
IDFITTVHY

SEQ ID NO: 19933 - protein, 9 aa, Artificial Sequence
  Description of Artificial Sequence: Synthetic peptide
IDHHFVVIE

SEQ ID NO: 19934 - protein, 9 aa, Artificial Sequence
  Description of Artificial Sequence: Synthetic peptide
IHEHHPVIF

SEQ ID NO: 19935 - protein, 9 aa, Artificial Sequence
  Description of Artificial Sequence: Synthetic peptide
ILGVHNVEA

SEQ ID NO: 19936 - protein, 9 aa, Artificial Sequence
  Description of Artificial Sequence: Synthetic peptide
IPHHIFVQD

SEQ ID NO: 19937 - protein, 9 aa, Artificial Sequence
  Description of Artificial Sequence: Synthetic peptide
IYVMPVVER

SEQ ID NO: 19938 - protein, 9 aa, Artificial Sequence
  Description of Artificial Sequence: Synthetic peptide
KDENNPVAP

SEQ ID NO: 19939 - protein, 9 aa, Artificial Sequence
  Description of Artificial Sequence: Synthetic peptide
KEDMTSVGQ

SEQ ID NO: 19940 - protein, 9 aa, Artificial Sequence
  Description of Artificial Sequence: Synthetic peptide
KEVTSQVSY

SEQ ID NO: 19941 - protein, 9 aa, Artificial Sequence
  Description of Artificial Sequence: Synthetic peptide
KFVHTQVEC

SEQ ID NO: 19942 - protein, 9 aa, Artificial Sequence
  Description of Artificial Sequence: Synthetic peptide
KNGCITVQP

SEQ ID NO: 19943 - protein, 9 aa, Artificial Sequence
  Description of Artificial Sequence: Synthetic peptide
KQFNHMVTH

SEQ ID NO: 19944 - protein, 9 aa, Artificial Sequence
  Description of Artificial Sequence: Synthetic peptide
KSVDKYVVD

SEQ ID NO: 19945 - protein, 9 aa, Artificial Sequence
  Description of Artificial Sequence: Synthetic peptide
LCHDKIVHV

SEQ ID NO: 19946 - protein, 9 aa, Artificial Sequence
  Description of Artificial Sequence: Synthetic peptide
LEVVQVVGG

SEQ ID NO: 19947 - protein, 9 aa, Artificial Sequence
  Description of Artificial Sequence: Synthetic peptide
MLPTCMVVN

SEQ ID NO: 19948 - protein, 9 aa, Artificial Sequence
  Description of Artificial Sequence: Synthetic peptide
MMASKFVGR

SEQ ID NO: 19949 - protein, 9 aa, Artificial Sequence
  Description of Artificial Sequence: Synthetic peptide
MRMPDGVNT

SEQ ID NO: 19950 - protein, 9 aa, Artificial Sequence
  Description of Artificial Sequence: Synthetic peptide
MWEATCVRS

SEQ ID NO: 19951 - protein, 9 aa, Artificial Sequence
  Description of Artificial Sequence: Synthetic peptide
NAELYPVEW

SEQ ID NO: 19952 - protein, 9 aa, Artificial Sequence
  Description of Artificial Sequence: Synthetic peptide
NGEQAFVMV

SEQ ID NO: 19953 - protein, 9 aa, Artificial Sequence
  Description of Artificial Sequence: Synthetic peptide
NHCYVEVGG

SEQ ID NO: 19954 - protein, 9 aa, Artificial Sequence
  Description of Artificial Sequence: Synthetic peptide
NPQYGCVME

SEQ ID NO: 19955 - protein, 9 aa, Artificial Sequence
  Description of Artificial Sequence: Synthetic peptide
NYHDYQVCY

SEQ ID NO: 19956 - protein, 9 aa, Artificial Sequence
  Description of Artificial Sequence: Synthetic peptide
PGIFGCVGW

SEQ ID NO: 19957 - protein, 9 aa, Artificial Sequence
  Description of Artificial Sequence: Synthetic peptide
PSNNKCVWC

SEQ ID NO: 19958 - protein, 9 aa, Artificial Sequence
  Description of Artificial Sequence: Synthetic peptide
QKHCQCVSV

SEQ ID NO: 19959 - protein, 9 aa, Artificial Sequence
  Description of Artificial Sequence: Synthetic peptide
QTGTGWVGN

SEQ ID NO: 19960 - protein, 9 aa, Artificial Sequence
  Description of Artificial Sequence: Synthetic peptide
QWGTTNVIT

SEQ ID NO: 19961 - protein, 9 aa, Artificial Sequence
  Description of Artificial Sequence: Synthetic peptide
RADNTNVSW

SEQ ID NO: 19962 - protein, 9 aa, Artificial Sequence
  Description of Artificial Sequence: Synthetic peptide
RINHYHVWV

SEQ ID NO: 19963 - protein, 9 aa, Artificial Sequence
  Description of Artificial Sequence: Synthetic peptide
RSCGEVVFT

SEQ ID NO: 19964 - protein, 9 aa, Artificial Sequence
  Description of Artificial Sequence: Synthetic peptide
RWDGQEVWK

SEQ ID NO: 19965 - protein, 9 aa, Artificial Sequence
  Description of Artificial Sequence: Synthetic peptide
SGYYPWVLT

SEQ ID NO: 19966 - protein, 9 aa, Artificial Sequence
  Description of Artificial Sequence: Synthetic peptide
SHNFKQVMR

SEQ ID NO: 19967 - protein, 9 aa, Artificial Sequence
  Description of Artificial Sequence: Synthetic peptide
SLHPVFVNS

SEQ ID NO: 19968 - protein, 9 aa, Artificial Sequence
  Description of Artificial Sequence: Synthetic peptide
SQFWAHVCP

SEQ ID NO: 19969 - protein, 9 aa, Artificial Sequence
  Description of Artificial Sequence: Synthetic peptide
SRVNCFVIV

SEQ ID NO: 19970 - protein, 9 aa, Artificial Sequence
  Description of Artificial Sequence: Synthetic peptide
STILMPVHI

SEQ ID NO: 19971 - protein, 9 aa, Artificial Sequence
  Description of Artificial Sequence: Synthetic peptide
TAVAWCVSS

SEQ ID NO: 19972 - protein, 9 aa, Artificial Sequence
  Description of Artificial Sequence: Synthetic peptide
TAVLREVFM

SEQ ID NO: 19973 - protein, 9 aa, Artificial Sequence
  Description of Artificial Sequence: Synthetic peptide
TCYTCCVWY

SEQ ID NO: 19974 - protein, 9 aa, Artificial Sequence
  Description of Artificial Sequence: Synthetic peptide
THCTKVVDT

SEQ ID NO: 19975 - protein, 9 aa, Artificial Sequence
  Description of Artificial Sequence: Synthetic peptide
TIEVMSVWN

SEQ ID NO: 19976 - protein, 9 aa, Artificial Sequence
  Description of Artificial Sequence: Synthetic peptide
TMRTQCVAL

SEQ ID NO: 19977 - protein, 9 aa, Artificial Sequence
  Description of Artificial Sequence: Synthetic peptide
TPLTCMVCA

SEQ ID NO: 19978 - protein, 9 aa, Artificial Sequence
  Description of Artificial Sequence: Synthetic peptide
TQFHCPVVK

SEQ ID NO: 19979 - protein, 9 aa, Artificial Sequence
  Description of Artificial Sequence: Synthetic peptide
TQSSQTVAY

SEQ ID NO: 19980 - protein, 9 aa, Artificial Sequence
  Description of Artificial Sequence: Synthetic peptide
TSQQGIVSL

SEQ ID NO: 19981 - protein, 9 aa, Artificial Sequence
  Description of Artificial Sequence: Synthetic peptide
TYADMWVGC

SEQ ID NO: 19982 - protein, 9 aa, Artificial Sequence
  Description of Artificial Sequence: Synthetic peptide
TYHTVSVCD

SEQ ID NO: 19983 - protein, 9 aa, Artificial Sequence
  Description of Artificial Sequence: Synthetic peptide
VGSWVEVQN

SEQ ID NO: 19984 - protein, 9 aa, Artificial Sequence
  Description of Artificial Sequence: Synthetic peptide
VKQYWHVEE

SEQ ID NO: 19985 - protein, 9 aa, Artificial Sequence
  Description of Artificial Sequence: Synthetic peptide
VMETHWVWA

SEQ ID NO: 19986 - protein, 9 aa, Artificial Sequence
  Description of Artificial Sequence: Synthetic peptide
VNPTNKVHG

SEQ ID NO: 19987 - protein, 9 aa, Artificial Sequence
  Description of Artificial Sequence: Synthetic peptide
VTELRYVSH

SEQ ID NO: 19988 - protein, 9 aa, Artificial Sequence
  Description of Artificial Sequence: Synthetic peptide
YAEVNPVIG

SEQ ID NO: 19989 - protein, 9 aa, Artificial Sequence
  Description of Artificial Sequence: Synthetic peptide
YHQWPFVDM

SEQ ID NO: 19990 - protein, 9 aa, Artificial Sequence
  Description of Artificial Sequence: Synthetic peptide
YKKAWMVMQ

SEQ ID NO: 19991 - protein, 9 aa, Artificial Sequence
  Description of Artificial Sequence: Synthetic peptide
YNPSEEVDG

SEQ ID NO: 19992 - protein, 9 aa, Artificial Sequence
  Description of Artificial Sequence: Synthetic peptide
YQGTMIVGS

SEQ ID NO: 19993 - protein, 9 aa, Artificial Sequence
  Description of Artificial Sequence: Synthetic peptide
YSCKERVGV

SEQ ID NO: 19994 - protein, 9 aa, Artificial Sequence
  Description of Artificial Sequence: Synthetic peptide
SFSYDVVMN

SEQ ID NO: 19995 - protein, 9 aa, Artificial Sequence
  Description of Artificial Sequence: Synthetic peptide
MFSHGHVMF

SEQ ID NO: 19996 - protein, 9 aa, Artificial Sequence
  Description of Artificial Sequence: Synthetic peptide
DCVLTMVDK

SEQ ID NO: 19997 - protein, 9 aa, Artificial Sequence
  Description of Artificial Sequence: Synthetic peptide
QWFTKGVGE

SEQ ID NO: 19998 - protein, 9 aa, Artificial Sequence
  Description of Artificial Sequence: Synthetic peptide
FPGVFKNWV

SEQ ID NO: 19999 - protein, 9 aa, Artificial Sequence
  Description of Artificial Sequence: Synthetic peptide
GASWYCSWM

SEQ ID NO: 20000 - protein, 9 aa, Artificial Sequence
  Description of Artificial Sequence: Synthetic peptide
GFQWDAHWN

SEQ ID NO: 20001 - protein, 9 aa, Artificial Sequence
  Description of Artificial Sequence: Synthetic peptide
GFVSYHSWD

SEQ ID NO: 20002 - protein, 9 aa, Artificial Sequence
  Description of Artificial Sequence: Synthetic peptide
GIAVRSAWF

SEQ ID NO: 20003 - protein, 9 aa, Artificial Sequence
  Description of Artificial Sequence: Synthetic peptide
GISDDAYWW

SEQ ID NO: 20004 - protein, 9 aa, Artificial Sequence
  Description of Artificial Sequence: Synthetic peptide
GMMLMPSWC

SEQ ID NO: 20005 - protein, 9 aa, Artificial Sequence
  Description of Artificial Sequence: Synthetic peptide
GNAACNAWP

SEQ ID NO: 20006 - protein, 9 aa, Artificial Sequence
  Description of Artificial Sequence: Synthetic peptide
GTPRDEQWY

SEQ ID NO: 20007 - protein, 9 aa, Artificial Sequence
  Description of Artificial Sequence: Synthetic peptide
GYNTANSWQ

SEQ ID NO: 20008 - protein, 9 aa, Artificial Sequence
  Description of Artificial Sequence: Synthetic peptide
HLDWFNMWQ

SEQ ID NO: 20009 - protein, 9 aa, Artificial Sequence
  Description of Artificial Sequence: Synthetic peptide
ICEHRIFWD

SEQ ID NO: 20010 - protein, 9 aa, Artificial Sequence
  Description of Artificial Sequence: Synthetic peptide
IDQNFCMWG

SEQ ID NO: 20011 - protein, 9 aa, Artificial Sequence
  Description of Artificial Sequence: Synthetic peptide
IHHGCKMWI

SEQ ID NO: 20012 - protein, 9 aa, Artificial Sequence
  Description of Artificial Sequence: Synthetic peptide
IPMLCRIWM

SEQ ID NO: 20013 - protein, 9 aa, Artificial Sequence
  Description of Artificial Sequence: Synthetic peptide
IREPMPAWA

SEQ ID NO: 20014 - protein, 9 aa, Artificial Sequence
  Description of Artificial Sequence: Synthetic peptide
ISAIAGMWG

SEQ ID NO: 20015 - protein, 9 aa, Artificial Sequence
  Description of Artificial Sequence: Synthetic peptide
ITAATTTWK

SEQ ID NO: 20016 - protein, 9 aa, Artificial Sequence
  Description of Artificial Sequence: Synthetic peptide
IWYVRCWWA

SEQ ID NO: 20017 - protein, 9 aa, Artificial Sequence
  Description of Artificial Sequence: Synthetic peptide
KKKNCILWR

SEQ ID NO: 20018 - protein, 9 aa, Artificial Sequence
  Description of Artificial Sequence: Synthetic peptide
LADSQVFWT

SEQ ID NO: 20019 - protein, 9 aa, Artificial Sequence
  Description of Artificial Sequence: Synthetic peptide
LPDKAAHWS

SEQ ID NO: 20020 - protein, 9 aa, Artificial Sequence
  Description of Artificial Sequence: Synthetic peptide
LQPRTGPWK

SEQ ID NO: 20021 - protein, 9 aa, Artificial Sequence
  Description of Artificial Sequence: Synthetic peptide
LRPHIHAWE

SEQ ID NO: 20022 - protein, 9 aa, Artificial Sequence
  Description of Artificial Sequence: Synthetic peptide
LSENITGWW

SEQ ID NO: 20023 - protein, 9 aa, Artificial Sequence
  Description of Artificial Sequence: Synthetic peptide
LSPWNFGWD

SEQ ID NO: 20024 - protein, 9 aa, Artificial Sequence
  Description of Artificial Sequence: Synthetic peptide
LTVPHCSWQ

SEQ ID NO: 20025 - protein, 9 aa, Artificial Sequence
  Description of Artificial Sequence: Synthetic peptide
MASCKVAWS

SEQ ID NO: 20026 - protein, 9 aa, Artificial Sequence
  Description of Artificial Sequence: Synthetic peptide
MCDWREKWT

SEQ ID NO: 20027 - protein, 9 aa, Artificial Sequence
  Description of Artificial Sequence: Synthetic peptide
MFVCRQFWK

SEQ ID NO: 20028 - protein, 9 aa, Artificial Sequence
  Description of Artificial Sequence: Synthetic peptide
MGAANYSWY

SEQ ID NO: 20029 - protein, 9 aa, Artificial Sequence
  Description of Artificial Sequence: Synthetic peptide
MGSIWLEWH

SEQ ID NO: 20030 - protein, 9 aa, Artificial Sequence
  Description of Artificial Sequence: Synthetic peptide
MIESVSHWD

SEQ ID NO: 20031 - protein, 9 aa, Artificial Sequence
  Description of Artificial Sequence: Synthetic peptide
MIFPIYSWA

SEQ ID NO: 20032 - protein, 9 aa, Artificial Sequence
  Description of Artificial Sequence: Synthetic peptide
MPMCHCGWN

SEQ ID NO: 20033 - protein, 9 aa, Artificial Sequence
  Description of Artificial Sequence: Synthetic peptide
MREVHCTWM

SEQ ID NO: 20034 - protein, 9 aa, Artificial Sequence
  Description of Artificial Sequence: Synthetic peptide
MTAADVCWG

SEQ ID NO: 20035 - protein, 9 aa, Artificial Sequence
  Description of Artificial Sequence: Synthetic peptide
MTLDFSTWG

SEQ ID NO: 20036 - protein, 9 aa, Artificial Sequence
  Description of Artificial Sequence: Synthetic peptide
NGMQICCWY

SEQ ID NO: 20037 - protein, 9 aa, Artificial Sequence
  Description of Artificial Sequence: Synthetic peptide
NHVIYHDWE

SEQ ID NO: 20038 - protein, 9 aa, Artificial Sequence
  Description of Artificial Sequence: Synthetic peptide
NIDHQFHWW

SEQ ID NO: 20039 - protein, 9 aa, Artificial Sequence
  Description of Artificial Sequence: Synthetic peptide
NLKWHKRWT

SEQ ID NO: 20040 - protein, 9 aa, Artificial Sequence
  Description of Artificial Sequence: Synthetic peptide
NMIQDPYWN

SEQ ID NO: 20041 - protein, 9 aa, Artificial Sequence
  Description of Artificial Sequence: Synthetic peptide
NMVNAGGWS

SEQ ID NO: 20042 - protein, 9 aa, Artificial Sequence
  Description of Artificial Sequence: Synthetic peptide
NQMFWNIWG

SEQ ID NO: 20043 - protein, 9 aa, Artificial Sequence
  Description of Artificial Sequence: Synthetic peptide
NSGPFYCWT

SEQ ID NO: 20044 - protein, 9 aa, Artificial Sequence
  Description of Artificial Sequence: Synthetic peptide
PLRWDESWG

SEQ ID NO: 20045 - protein, 9 aa, Artificial Sequence
  Description of Artificial Sequence: Synthetic peptide
QANWTMMWD

SEQ ID NO: 20046 - protein, 9 aa, Artificial Sequence
  Description of Artificial Sequence: Synthetic peptide
QIKFVEYWG

SEQ ID NO: 20047 - protein, 9 aa, Artificial Sequence
  Description of Artificial Sequence: Synthetic peptide
QNRYSELWA

SEQ ID NO: 20048 - protein, 9 aa, Artificial Sequence
  Description of Artificial Sequence: Synthetic peptide
QSYWFQQWA

SEQ ID NO: 20049 - protein, 9 aa, Artificial Sequence
  Description of Artificial Sequence: Synthetic peptide
QTSSCEEWG

SEQ ID NO: 20050 - protein, 9 aa, Artificial Sequence
  Description of Artificial Sequence: Synthetic peptide
QYKQVLDWY

SEQ ID NO: 20051 - protein, 9 aa, Artificial Sequence
  Description of Artificial Sequence: Synthetic peptide
RIDAQQQWF

SEQ ID NO: 20052 - protein, 9 aa, Artificial Sequence
  Description of Artificial Sequence: Synthetic peptide
RSADSWEWT

SEQ ID NO: 20053 - protein, 9 aa, Artificial Sequence
  Description of Artificial Sequence: Synthetic peptide
RTIAWEKWQ

SEQ ID NO: 20054 - protein, 9 aa, Artificial Sequence
  Description of Artificial Sequence: Synthetic peptide
RWDAGRTWF

SEQ ID NO: 20055 - protein, 9 aa, Artificial Sequence
  Description of Artificial Sequence: Synthetic peptide
SEDQFHHWC

SEQ ID NO: 20056 - protein, 9 aa, Artificial Sequence
  Description of Artificial Sequence: Synthetic peptide
SIDNKWPWR

SEQ ID NO: 20057 - protein, 9 aa, Artificial Sequence
  Description of Artificial Sequence: Synthetic peptide
SKFVRYDWG

SEQ ID NO: 20058 - protein, 9 aa, Artificial Sequence
  Description of Artificial Sequence: Synthetic peptide
SLCADPDWP

SEQ ID NO: 20059 - protein, 9 aa, Artificial Sequence
  Description of Artificial Sequence: Synthetic peptide
SMWGPRAWT

SEQ ID NO: 20060 - protein, 9 aa, Artificial Sequence
  Description of Artificial Sequence: Synthetic peptide
SPYNECHWL

SEQ ID NO: 20061 - protein, 9 aa, Artificial Sequence
  Description of Artificial Sequence: Synthetic peptide
SQGITGRWV

SEQ ID NO: 20062 - protein, 9 aa, Artificial Sequence
  Description of Artificial Sequence: Synthetic peptide
STEDCVSWY

SEQ ID NO: 20063 - protein, 9 aa, Artificial Sequence
  Description of Artificial Sequence: Synthetic peptide
TADVEPPWN

SEQ ID NO: 20064 - protein, 9 aa, Artificial Sequence
  Description of Artificial Sequence: Synthetic peptide
TALRQMAWH

SEQ ID NO: 20065 - protein, 9 aa, Artificial Sequence
  Description of Artificial Sequence: Synthetic peptide
TFEPYSWWL

SEQ ID NO: 20066 - protein, 9 aa, Artificial Sequence
  Description of Artificial Sequence: Synthetic peptide
THGCMLTWT

SEQ ID NO: 20067 - protein, 9 aa, Artificial Sequence
  Description of Artificial Sequence: Synthetic peptide
THHQMFEWT

SEQ ID NO: 20068 - protein, 9 aa, Artificial Sequence
  Description of Artificial Sequence: Synthetic peptide
TIASFMQWD

SEQ ID NO: 20069 - protein, 9 aa, Artificial Sequence
  Description of Artificial Sequence: Synthetic peptide
TKAMIWHWG

SEQ ID NO: 20070 - protein, 9 aa, Artificial Sequence
  Description of Artificial Sequence: Synthetic peptide
TMRHWCRWP

SEQ ID NO: 20071 - protein, 9 aa, Artificial Sequence
  Description of Artificial Sequence: Synthetic peptide
TRMMMQEWP

SEQ ID NO: 20072 - protein, 9 aa, Artificial Sequence
  Description of Artificial Sequence: Synthetic peptide
VAVKEAQWH

SEQ ID NO: 20073 - protein, 9 aa, Artificial Sequence
  Description of Artificial Sequence: Synthetic peptide
VCHWSLCWL

SEQ ID NO: 20074 - protein, 9 aa, Artificial Sequence
  Description of Artificial Sequence: Synthetic peptide
VFHSTHWWY

SEQ ID NO: 20075 - protein, 9 aa, Artificial Sequence
  Description of Artificial Sequence: Synthetic peptide
VSEYYWEWN

SEQ ID NO: 20076 - protein, 9 aa, Artificial Sequence
  Description of Artificial Sequence: Synthetic peptide
VTSTILHWQ

SEQ ID NO: 20077 - protein, 9 aa, Artificial Sequence
  Description of Artificial Sequence: Synthetic peptide
WILNAPEWQ

SEQ ID NO: 20078 - protein, 9 aa, Artificial Sequence
  Description of Artificial Sequence: Synthetic peptide
WQCAMVMWI

SEQ ID NO: 20079 - protein, 9 aa, Artificial Sequence
  Description of Artificial Sequence: Synthetic peptide
YPWCYMDWV

SEQ ID NO: 20080 - protein, 9 aa, Artificial Sequence
  Description of Artificial Sequence: Synthetic peptide
YTHDTGLWM

SEQ ID NO: 20081 - protein, 9 aa, Artificial Sequence
  Description of Artificial Sequence: Synthetic peptide
LFRTIPIWQ

SEQ ID NO: 20082 - protein, 9 aa, Artificial Sequence
  Description of Artificial Sequence: Synthetic peptide
YWCPSQWWR

SEQ ID NO: 20083 - protein, 9 aa, Artificial Sequence
  Description of Artificial Sequence: Synthetic peptide
KMAGIGCWY

SEQ ID NO: 20084 - protein, 9 aa, Artificial Sequence
  Description of Artificial Sequence: Synthetic peptide
MYDTMGAWC

SEQ ID NO: 20085 - protein, 9 aa, Artificial Sequence
  Description of Artificial Sequence: Synthetic peptide
FTPMNRDRI

SEQ ID NO: 20086 - protein, 9 aa, Artificial Sequence
  Description of Artificial Sequence: Synthetic peptide
GHYWAHEAI

SEQ ID NO: 20087 - protein, 9 aa, Artificial Sequence
  Description of Artificial Sequence: Synthetic peptide
GIFTTNFEI

SEQ ID NO: 20088 - protein, 9 aa, Artificial Sequence
  Description of Artificial Sequence: Synthetic peptide
GMDVNHCGI

SEQ ID NO: 20089 - protein, 9 aa, Artificial Sequence
  Description of Artificial Sequence: Synthetic peptide
GSCITMGSI

SEQ ID NO: 20090 - protein, 9 aa, Artificial Sequence
  Description of Artificial Sequence: Synthetic peptide
HSDLMVCQI

SEQ ID NO: 20091 - protein, 9 aa, Artificial Sequence
  Description of Artificial Sequence: Synthetic peptide
HYCYGEFGI

SEQ ID NO: 20092 - protein, 9 aa, Artificial Sequence
  Description of Artificial Sequence: Synthetic peptide
IACTSLPII

SEQ ID NO: 20093 - protein, 9 aa, Artificial Sequence
  Description of Artificial Sequence: Synthetic peptide
IAENFQGCI

SEQ ID NO: 20094 - protein, 9 aa, Artificial Sequence
  Description of Artificial Sequence: Synthetic peptide
ICHAKATNI

SEQ ID NO: 20095 - protein, 9 aa, Artificial Sequence
  Description of Artificial Sequence: Synthetic peptide
ILKLPWLNI

SEQ ID NO: 20096 - protein, 9 aa, Artificial Sequence
  Description of Artificial Sequence: Synthetic peptide
MNMTYYTEI

SEQ ID NO: 20097 - protein, 9 aa, Artificial Sequence
  Description of Artificial Sequence: Synthetic peptide
MSEAIGHKI

SEQ ID NO: 20098 - protein, 9 aa, Artificial Sequence
  Description of Artificial Sequence: Synthetic peptide
MTDLARTYI

SEQ ID NO: 20099 - protein, 9 aa, Artificial Sequence
  Description of Artificial Sequence: Synthetic peptide
NCPSDQPSI

SEQ ID NO: 20100 - protein, 9 aa, Artificial Sequence
  Description of Artificial Sequence: Synthetic peptide
NEVHYEMAI

SEQ ID NO: 20101 - protein, 9 aa, Artificial Sequence
  Description of Artificial Sequence: Synthetic peptide
NRSKASGDI

SEQ ID NO: 20102 - protein, 9 aa, Artificial Sequence
  Description of Artificial Sequence: Synthetic peptide
NSWFKPEFI

SEQ ID NO: 20103 - protein, 9 aa, Artificial Sequence
  Description of Artificial Sequence: Synthetic peptide
NWYKDVIRI

SEQ ID NO: 20104 - protein, 9 aa, Artificial Sequence
  Description of Artificial Sequence: Synthetic peptide
PAESCNQKI

SEQ ID NO: 20105 - protein, 9 aa, Artificial Sequence
  Description of Artificial Sequence: Synthetic peptide
RYPHEVNGI

SEQ ID NO: 20106 - protein, 9 aa, Artificial Sequence
  Description of Artificial Sequence: Synthetic peptide
SCQAVWCGI

SEQ ID NO: 20107 - protein, 9 aa, Artificial Sequence
  Description of Artificial Sequence: Synthetic peptide
SRETFTKHI

SEQ ID NO: 20108 - protein, 9 aa, Artificial Sequence
  Description of Artificial Sequence: Synthetic peptide
TCADGMDHI

SEQ ID NO: 20109 - protein, 9 aa, Artificial Sequence
  Description of Artificial Sequence: Synthetic peptide
TKECSHEVI

SEQ ID NO: 20110 - protein, 9 aa, Artificial Sequence
  Description of Artificial Sequence: Synthetic peptide
TSRFEMHTI

SEQ ID NO: 20111 - protein, 9 aa, Artificial Sequence
  Description of Artificial Sequence: Synthetic peptide
VTAMFGQEI

SEQ ID NO: 20112 - protein, 9 aa, Artificial Sequence
  Description of Artificial Sequence: Synthetic peptide
VTNPKQEAI

SEQ ID NO: 20113 - protein, 9 aa, Artificial Sequence
  Description of Artificial Sequence: Synthetic peptide
WMGAMVHDI

SEQ ID NO: 20114 - protein, 9 aa, Artificial Sequence
  Description of Artificial Sequence: Synthetic peptide
YGPKFWIAI

SEQ ID NO: 20115 - protein, 9 aa, Artificial Sequence
  Description of Artificial Sequence: Synthetic peptide
YMDMRNLVI

SEQ ID NO: 20116 - protein, 9 aa, Artificial Sequence
  Description of Artificial Sequence: Synthetic peptide
WPNIKHQPI

SEQ ID NO: 20117 - protein, 9 aa, Artificial Sequence
  Description of Artificial Sequence: Synthetic peptide
YSDPKNMSI

SEQ ID NO: 20118 - protein, 9 aa, Artificial Sequence
  Description of Artificial Sequence: Synthetic peptide
ACKLDHMPP

SEQ ID NO: 20119 - protein, 9 aa, Artificial Sequence
  Description of Artificial Sequence: Synthetic peptide
ADCCSCKAN

SEQ ID NO: 20120 - protein, 9 aa, Artificial Sequence
  Description of Artificial Sequence: Synthetic peptide
ADDCTHKNH

SEQ ID NO: 20121 - protein, 9 aa, Artificial Sequence
  Description of Artificial Sequence: Synthetic peptide
ADSCTHKNH

SEQ ID NO: 20122 - protein, 9 aa, Artificial Sequence
  Description of Artificial Sequence: Synthetic peptide
ADYCAHKNH

SEQ ID NO: 20123 - protein, 9 aa, Artificial Sequence
  Description of Artificial Sequence: Synthetic peptide
ADYCPHKNH

SEQ ID NO: 20124 - protein, 9 aa, Artificial Sequence
  Description of Artificial Sequence: Synthetic peptide
ADYCTHKTH

SEQ ID NO: 20125 - protein, 9 aa, Artificial Sequence
  Description of Artificial Sequence: Synthetic peptide
ADYCTHRNH

SEQ ID NO: 20126 - protein, 9 aa, Artificial Sequence
  Description of Artificial Sequence: Synthetic peptide
ADYGTHKNH

SEQ ID NO: 20127 - protein, 9 aa, Artificial Sequence
  Description of Artificial Sequence: Synthetic peptide
ADYWTHKNH

SEQ ID NO: 20128 - protein, 9 aa, Artificial Sequence
  Description of Artificial Sequence: Synthetic peptide
AECCSIFSS

SEQ ID NO: 20129 - protein, 9 aa, Artificial Sequence
  Description of Artificial Sequence: Synthetic peptide
AERLCIEWD

SEQ ID NO: 20130 - protein, 9 aa, Artificial Sequence
  Description of Artificial Sequence: Synthetic peptide
AESKCDIGT

SEQ ID NO: 20131 - protein, 9 aa, Artificial Sequence
  Description of Artificial Sequence: Synthetic peptide
AESRCDVGT

SEQ ID NO: 20132 - protein, 9 aa, Artificial Sequence
  Description of Artificial Sequence: Synthetic peptide
AEWSWAEHS

SEQ ID NO: 20133 - protein, 9 aa, Artificial Sequence
  Description of Artificial Sequence: Synthetic peptide
AFWGTDVWG

SEQ ID NO: 20134 - protein, 9 aa, Artificial Sequence
  Description of Artificial Sequence: Synthetic peptide
AFWSPDVWG

SEQ ID NO: 20135 - protein, 9 aa, Artificial Sequence
  Description of Artificial Sequence: Synthetic peptide
AGFRIDFRC

SEQ ID NO: 20136 - protein, 9 aa, Artificial Sequence
  Description of Artificial Sequence: Synthetic peptide
AGGWLFFWH

SEQ ID NO: 20137 - protein, 9 aa, Artificial Sequence
  Description of Artificial Sequence: Synthetic peptide
AGNNEDTQL

SEQ ID NO: 20138 - protein, 9 aa, Artificial Sequence
  Description of Artificial Sequence: Synthetic peptide
AGQWGSLNP

SEQ ID NO: 20139 - protein, 9 aa, Artificial Sequence
  Description of Artificial Sequence: Synthetic peptide
AGSNEDKQL

SEQ ID NO: 20140 - protein, 9 aa, Artificial Sequence
  Description of Artificial Sequence: Synthetic peptide
AGTDQTMHM

SEQ ID NO: 20141 - protein, 9 aa, Artificial Sequence
  Description of Artificial Sequence: Synthetic peptide
AHRWSWSES

SEQ ID NO: 20142 - protein, 9 aa, Artificial Sequence
  Description of Artificial Sequence: Synthetic peptide
AISQDMFMQ

SEQ ID NO: 20143 - protein, 9 aa, Artificial Sequence
  Description of Artificial Sequence: Synthetic peptide
AISQDMLMQ

SEQ ID NO: 20144 - protein, 9 aa, Artificial Sequence
  Description of Artificial Sequence: Synthetic peptide
AMLCNRVCE

SEQ ID NO: 20145 - protein, 9 aa, Artificial Sequence
  Description of Artificial Sequence: Synthetic peptide
ANCCSCKAD

SEQ ID NO: 20146 - protein, 9 aa, Artificial Sequence
  Description of Artificial Sequence: Synthetic peptide
ANCCSCKDN

SEQ ID NO: 20147 - protein, 9 aa, Artificial Sequence
  Description of Artificial Sequence: Synthetic peptide
ANCCSCKPN

SEQ ID NO: 20148 - protein, 9 aa, Artificial Sequence
  Description of Artificial Sequence: Synthetic peptide
ANCCSCKTN

SEQ ID NO: 20149 - protein, 9 aa, Artificial Sequence
  Description of Artificial Sequence: Synthetic peptide
ANCCSCKTS

SEQ ID NO: 20150 - protein, 9 aa, Artificial Sequence
  Description of Artificial Sequence: Synthetic peptide
ANCCSGKAN

SEQ ID NO: 20151 - protein, 9 aa, Artificial Sequence
  Description of Artificial Sequence: Synthetic peptide
ANCYSCKAN

SEQ ID NO: 20152 - protein, 9 aa, Artificial Sequence
  Description of Artificial Sequence: Synthetic peptide
ASASHDFMG

SEQ ID NO: 20153 - protein, 9 aa, Artificial Sequence
  Description of Artificial Sequence: Synthetic peptide
ASCEDEGIL

SEQ ID NO: 20154 - protein, 9 aa, Artificial Sequence
  Description of Artificial Sequence: Synthetic peptide
ASGSNDFMG

SEQ ID NO: 20155 - protein, 9 aa, Artificial Sequence
  Description of Artificial Sequence: Synthetic peptide
ATDRVVVNF

SEQ ID NO: 20156 - protein, 9 aa, Artificial Sequence
  Description of Artificial Sequence: Synthetic peptide
ATSRCDVQT

SEQ ID NO: 20157 - protein, 9 aa, Artificial Sequence
  Description of Artificial Sequence: Synthetic peptide
AVPWEWQEG

SEQ ID NO: 20158 - protein, 9 aa, Artificial Sequence
  Description of Artificial Sequence: Synthetic peptide
CCAALIQSG

SEQ ID NO: 20159 - protein, 9 aa, Artificial Sequence
  Description of Artificial Sequence: Synthetic peptide
CCDALIQSS

SEQ ID NO: 20160 - protein, 9 aa, Artificial Sequence
  Description of Artificial Sequence: Synthetic peptide
CCDDLIQSG

SEQ ID NO: 20161 - protein, 9 aa, Artificial Sequence
  Description of Artificial Sequence: Synthetic peptide
CCDPLIQSG

SEQ ID NO: 20162 - protein, 9 aa, Artificial Sequence
  Description of Artificial Sequence: Synthetic peptide
CDMWWYQDP

SEQ ID NO: 20163 - protein, 9 aa, Artificial Sequence
  Description of Artificial Sequence: Synthetic peptide
CEKYNLPKI

SEQ ID NO: 20164 - protein, 9 aa, Artificial Sequence
  Description of Artificial Sequence: Synthetic peptide
CKDRPIIDC

SEQ ID NO: 20165 - protein, 9 aa, Artificial Sequence
  Description of Artificial Sequence: Synthetic peptide
CLREAVVGI

SEQ ID NO: 20166 - protein, 9 aa, Artificial Sequence
  Description of Artificial Sequence: Synthetic peptide
CVLNMEYCL

SEQ ID NO: 20167 - protein, 9 aa, Artificial Sequence
  Description of Artificial Sequence: Synthetic peptide
CVQRLLFKC

SEQ ID NO: 20168 - protein, 9 aa, Artificial Sequence
  Description of Artificial Sequence: Synthetic peptide
CVVNMEYYL

SEQ ID NO: 20169 - protein, 9 aa, Artificial Sequence
  Description of Artificial Sequence: Synthetic peptide
DAAIKMDES

SEQ ID NO: 20170 - protein, 9 aa, Artificial Sequence
  Description of Artificial Sequence: Synthetic peptide
DCIFFHCPK

SEQ ID NO: 20171 - protein, 9 aa, Artificial Sequence
  Description of Artificial Sequence: Synthetic peptide
DDFGPNHRH

SEQ ID NO: 20172 - protein, 9 aa, Artificial Sequence
  Description of Artificial Sequence: Synthetic peptide
DDHQPMQSR

SEQ ID NO: 20173 - protein, 9 aa, Artificial Sequence
  Description of Artificial Sequence: Synthetic peptide
DDRGFTRSM

SEQ ID NO: 20174 - protein, 9 aa, Artificial Sequence
  Description of Artificial Sequence: Synthetic peptide
DDWSWAEHS

SEQ ID NO: 20175 - protein, 9 aa, Artificial Sequence
  Description of Artificial Sequence: Synthetic peptide
DECIMQRSK

SEQ ID NO: 20176 - protein, 9 aa, Artificial Sequence
  Description of Artificial Sequence: Synthetic peptide
DEFDPNHRH

SEQ ID NO: 20177 - protein, 9 aa, Artificial Sequence
  Description of Artificial Sequence: Synthetic peptide
DEFGPNHGH

SEQ ID NO: 20178 - protein, 9 aa, Artificial Sequence
  Description of Artificial Sequence: Synthetic peptide
DEFGPNHIH

SEQ ID NO: 20179 - protein, 9 aa, Artificial Sequence
  Description of Artificial Sequence: Synthetic peptide
DEFGPNHKH

SEQ ID NO: 20180 - protein, 9 aa, Artificial Sequence
  Description of Artificial Sequence: Synthetic peptide
DEFGPNHRR

SEQ ID NO: 20181 - protein, 9 aa, Artificial Sequence
  Description of Artificial Sequence: Synthetic peptide
DEFGPNHRY

SEQ ID NO: 20182 - protein, 9 aa, Artificial Sequence
  Description of Artificial Sequence: Synthetic peptide
DEFGPNYRH

SEQ ID NO: 20183 - protein, 9 aa, Artificial Sequence
  Description of Artificial Sequence: Synthetic peptide
DEFGPSHRH

SEQ ID NO: 20184 - protein, 9 aa, Artificial Sequence
  Description of Artificial Sequence: Synthetic peptide
DEFGTNHRH

SEQ ID NO: 20185 - protein, 9 aa, Artificial Sequence
  Description of Artificial Sequence: Synthetic peptide
DEIGPNHRH

SEQ ID NO: 20186 - protein, 9 aa, Artificial Sequence
  Description of Artificial Sequence: Synthetic peptide
DEMGYDQLD

SEQ ID NO: 20187 - protein, 9 aa, Artificial Sequence
  Description of Artificial Sequence: Synthetic peptide
DERCYDQLD

SEQ ID NO: 20188 - protein, 9 aa, Artificial Sequence
  Description of Artificial Sequence: Synthetic peptide
DEWAWAEHS

SEQ ID NO: 20189 - protein, 9 aa, Artificial Sequence
  Description of Artificial Sequence: Synthetic peptide
DEWPWAEHS

SEQ ID NO: 20190 - protein, 9 aa, Artificial Sequence
  Description of Artificial Sequence: Synthetic peptide
DEWSGAEHS

SEQ ID NO: 20191 - protein, 9 aa, Artificial Sequence
  Description of Artificial Sequence: Synthetic peptide
DEWSLAEHS

SEQ ID NO: 20192 - protein, 9 aa, Artificial Sequence
  Description of Artificial Sequence: Synthetic peptide
DEWSWAAHS

SEQ ID NO: 20193 - protein, 9 aa, Artificial Sequence
  Description of Artificial Sequence: Synthetic peptide
DEWSWAEHA

SEQ ID NO: 20194 - protein, 9 aa, Artificial Sequence
  Description of Artificial Sequence: Synthetic peptide
DEWSWAERS

SEQ ID NO: 20195 - protein, 9 aa, Artificial Sequence
  Description of Artificial Sequence: Synthetic peptide
DEWSWAGHS

SEQ ID NO: 20196 - protein, 9 aa, Artificial Sequence
  Description of Artificial Sequence: Synthetic peptide
DEWSWAQHS

SEQ ID NO: 20197 - protein, 9 aa, Artificial Sequence
  Description of Artificial Sequence: Synthetic peptide
DEWSWSEHS

SEQ ID NO: 20198 - protein, 9 aa, Artificial Sequence
  Description of Artificial Sequence: Synthetic peptide
DEWSWTEHS

SEQ ID NO: 20199 - protein, 9 aa, Artificial Sequence
  Description of Artificial Sequence: Synthetic peptide
DEWSWVEHS

SEQ ID NO: 20200 - protein, 9 aa, Artificial Sequence
  Description of Artificial Sequence: Synthetic peptide
DEWTWAEHS

SEQ ID NO: 20201 - protein, 9 aa, Artificial Sequence
  Description of Artificial Sequence: Synthetic peptide
DEWWSGHAH

SEQ ID NO: 20202 - protein, 9 aa, Artificial Sequence
  Description of Artificial Sequence: Synthetic peptide
DEWWSGHAP

SEQ ID NO: 20203 - protein, 9 aa, Artificial Sequence
  Description of Artificial Sequence: Synthetic peptide
DEYGPNHRH

SEQ ID NO: 20204 - protein, 9 aa, Artificial Sequence
  Description of Artificial Sequence: Synthetic peptide
DFHSRTNIN

SEQ ID NO: 20205 - protein, 9 aa, Artificial Sequence
  Description of Artificial Sequence: Synthetic peptide
DFLDKSTFF

SEQ ID NO: 20206 - protein, 9 aa, Artificial Sequence
  Description of Artificial Sequence: Synthetic peptide
DFLHGTSIM

SEQ ID NO: 20207 - protein, 9 aa, Artificial Sequence
  Description of Artificial Sequence: Synthetic peptide
DFLHVTSTM

SEQ ID NO: 20208 - protein, 9 aa, Artificial Sequence
  Description of Artificial Sequence: Synthetic peptide
DFLPVTSIM

SEQ ID NO: 20209 - protein, 9 aa, Artificial Sequence
  Description of Artificial Sequence: Synthetic peptide
DFLYVTSIM

SEQ ID NO: 20210 - protein, 9 aa, Artificial Sequence
  Description of Artificial Sequence: Synthetic peptide
DGEWGSLNP

SEQ ID NO: 20211 - protein, 9 aa, Artificial Sequence
  Description of Artificial Sequence: Synthetic peptide
DGFRIEFRC

SEQ ID NO: 20212 - protein, 9 aa, Artificial Sequence
  Description of Artificial Sequence: Synthetic peptide
DGLKNDDRK

SEQ ID NO: 20213 - protein, 9 aa, Artificial Sequence
  Description of Artificial Sequence: Synthetic peptide
DGNDQTMHM

SEQ ID NO: 20214 - protein, 9 aa, Artificial Sequence
  Description of Artificial Sequence: Synthetic peptide
DGPDQTMHM

SEQ ID NO: 20215 - protein, 9 aa, Artificial Sequence
  Description of Artificial Sequence: Synthetic peptide
DGQWGSLNL

SEQ ID NO: 20216 - protein, 9 aa, Artificial Sequence
  Description of Artificial Sequence: Synthetic peptide
DGQWGSLNQ

SEQ ID NO: 20217 - protein, 9 aa, Artificial Sequence
  Description of Artificial Sequence: Synthetic peptide
DGQWGSLNS

SEQ ID NO: 20218 - protein, 9 aa, Artificial Sequence
  Description of Artificial Sequence: Synthetic peptide
DGTDPTMHM

SEQ ID NO: 20219 - protein, 9 aa, Artificial Sequence
  Description of Artificial Sequence: Synthetic peptide
DGTDQTMHV

SEQ ID NO: 20220 - protein, 9 aa, Artificial Sequence
  Description of Artificial Sequence: Synthetic peptide
DGTGQTMHM

SEQ ID NO: 20221 - protein, 9 aa, Artificial Sequence
  Description of Artificial Sequence: Synthetic peptide
DGTNQTMHM

SEQ ID NO: 20222 - protein, 9 aa, Artificial Sequence
  Description of Artificial Sequence: Synthetic peptide
DHQGPKLSK

SEQ ID NO: 20223 - protein, 9 aa, Artificial Sequence
  Description of Artificial Sequence: Synthetic peptide
DMYMQQIWR

SEQ ID NO: 20224 - protein, 9 aa, Artificial Sequence
  Description of Artificial Sequence: Synthetic peptide
DNNSPQEAS

SEQ ID NO: 20225 - protein, 9 aa, Artificial Sequence
  Description of Artificial Sequence: Synthetic peptide
DNRCYKYWN

SEQ ID NO: 20226 - protein, 9 aa, Artificial Sequence
  Description of Artificial Sequence: Synthetic peptide
DPICKVEDW

SEQ ID NO: 20227 - protein, 9 aa, Artificial Sequence
  Description of Artificial Sequence: Synthetic peptide
DPIWLIKEC

SEQ ID NO: 20228 - protein, 9 aa, Artificial Sequence
  Description of Artificial Sequence: Synthetic peptide
DPIWRVEDW

SEQ ID NO: 20229 - protein, 9 aa, Artificial Sequence
  Description of Artificial Sequence: Synthetic peptide
DPIWTVEDW

SEQ ID NO: 20230 - protein, 9 aa, Artificial Sequence
  Description of Artificial Sequence: Synthetic peptide
DPKWANCDC

SEQ ID NO: 20231 - protein, 9 aa, Artificial Sequence
  Description of Artificial Sequence: Synthetic peptide
DPMWEREMF

SEQ ID NO: 20232 - protein, 9 aa, Artificial Sequence
  Description of Artificial Sequence: Synthetic peptide
DPSWKVEDW

SEQ ID NO: 20233 - protein, 9 aa, Artificial Sequence
  Description of Artificial Sequence: Synthetic peptide
DPVWKVEDW

SEQ ID NO: 20234 - protein, 9 aa, Artificial Sequence
  Description of Artificial Sequence: Synthetic peptide
DQDAGGYDS

SEQ ID NO: 20235 - protein, 9 aa, Artificial Sequence
  Description of Artificial Sequence: Synthetic peptide
DQWSWAEHS

SEQ ID NO: 20236 - protein, 9 aa, Artificial Sequence
  Description of Artificial Sequence: Synthetic peptide
DRQWGSLNP

SEQ ID NO: 20237 - protein, 9 aa, Artificial Sequence
  Description of Artificial Sequence: Synthetic peptide
DSKNQNCFK

SEQ ID NO: 20238 - protein, 9 aa, Artificial Sequence
  Description of Artificial Sequence: Synthetic peptide
DSLHVTSIM

SEQ ID NO: 20239 - protein, 9 aa, Artificial Sequence
  Description of Artificial Sequence: Synthetic peptide
DSNYQGTKH

SEQ ID NO: 20240 - protein, 9 aa, Artificial Sequence
  Description of Artificial Sequence: Synthetic peptide
DSPNQNCFK

SEQ ID NO: 20241 - protein, 9 aa, Artificial Sequence
  Description of Artificial Sequence: Synthetic peptide
DSQNENCFK

SEQ ID NO: 20242 - protein, 9 aa, Artificial Sequence
  Description of Artificial Sequence: Synthetic peptide
DSQNQKCFK

SEQ ID NO: 20243 - protein, 9 aa, Artificial Sequence
  Description of Artificial Sequence: Synthetic peptide
DSQNQNRFK

SEQ ID NO: 20244 - protein, 9 aa, Artificial Sequence
  Description of Artificial Sequence: Synthetic peptide
DSRNQNCFK

SEQ ID NO: 20245 - protein, 9 aa, Artificial Sequence
  Description of Artificial Sequence: Synthetic peptide
DTFGLRFDD

SEQ ID NO: 20246 - protein, 9 aa, Artificial Sequence
  Description of Artificial Sequence: Synthetic peptide
DTFGLRIDD

SEQ ID NO: 20247 - protein, 9 aa, Artificial Sequence
  Description of Artificial Sequence: Synthetic peptide
DTFGQRVDD

SEQ ID NO: 20248 - protein, 9 aa, Artificial Sequence
  Description of Artificial Sequence: Synthetic peptide
DTFWLRVDD

SEQ ID NO: 20249 - protein, 9 aa, Artificial Sequence
  Description of Artificial Sequence: Synthetic peptide
DTQNQNCFK

SEQ ID NO: 20250 - protein, 9 aa, Artificial Sequence
  Description of Artificial Sequence: Synthetic peptide
DTRCDKYWN

SEQ ID NO: 20251 - protein, 9 aa, Artificial Sequence
  Description of Artificial Sequence: Synthetic peptide
DTRCSKYWN

SEQ ID NO: 20252 - protein, 9 aa, Artificial Sequence
  Description of Artificial Sequence: Synthetic peptide
DTRCYKYWT

SEQ ID NO: 20253 - protein, 9 aa, Artificial Sequence
  Description of Artificial Sequence: Synthetic peptide
DVQWGSLNP

SEQ ID NO: 20254 - protein, 9 aa, Artificial Sequence
  Description of Artificial Sequence: Synthetic peptide
DWTDQTMHM

SEQ ID NO: 20255 - protein, 9 aa, Artificial Sequence
  Description of Artificial Sequence: Synthetic peptide
EAHTNSIGK

SEQ ID NO: 20256 - protein, 9 aa, Artificial Sequence
  Description of Artificial Sequence: Synthetic peptide
EANWVYIEA

SEQ ID NO: 20257 - protein, 9 aa, Artificial Sequence
  Description of Artificial Sequence: Synthetic peptide
EARTNSICK

SEQ ID NO: 20258 - protein, 9 aa, Artificial Sequence
  Description of Artificial Sequence: Synthetic peptide
ECEQDDTDI

SEQ ID NO: 20259 - protein, 9 aa, Artificial Sequence
  Description of Artificial Sequence: Synthetic peptide
ECGLWNFSG

SEQ ID NO: 20260 - protein, 9 aa, Artificial Sequence
  Description of Artificial Sequence: Synthetic peptide
ECKITESLT

SEQ ID NO: 20261 - protein, 9 aa, Artificial Sequence
  Description of Artificial Sequence: Synthetic peptide
EDHLHGPGD

SEQ ID NO: 20262 - protein, 9 aa, Artificial Sequence
  Description of Artificial Sequence: Synthetic peptide
EDHWLGPGD

SEQ ID NO: 20263 - protein, 9 aa, Artificial Sequence
  Description of Artificial Sequence: Synthetic peptide
EDHWRGPGD

SEQ ID NO: 20264 - protein, 9 aa, Artificial Sequence
  Description of Artificial Sequence: Synthetic peptide
EDRWHGPGD

SEQ ID NO: 20265 - protein, 9 aa, Artificial Sequence
  Description of Artificial Sequence: Synthetic peptide
EDYWHGPGD

SEQ ID NO: 20266 - protein, 9 aa, Artificial Sequence
  Description of Artificial Sequence: Synthetic peptide
EEAHSVKFV

SEQ ID NO: 20267 - protein, 9 aa, Artificial Sequence
  Description of Artificial Sequence: Synthetic peptide
EEANSVKFA

SEQ ID NO: 20268 - protein, 9 aa, Artificial Sequence
  Description of Artificial Sequence: Synthetic peptide
EEARCVNPC

SEQ ID NO: 20269 - protein, 9 aa, Artificial Sequence
  Description of Artificial Sequence: Synthetic peptide
EEAYSVKFA

SEQ ID NO: 20270 - protein, 9 aa, Artificial Sequence
  Description of Artificial Sequence: Synthetic peptide
EEDHSVKFA

SEQ ID NO: 20271 - protein, 9 aa, Artificial Sequence
  Description of Artificial Sequence: Synthetic peptide
EEFARIPGN

SEQ ID NO: 20272 - protein, 9 aa, Artificial Sequence
  Description of Artificial Sequence: Synthetic peptide
EEFDRIPGH

SEQ ID NO: 20273 - protein, 9 aa, Artificial Sequence
  Description of Artificial Sequence: Synthetic peptide
EEFSRIPGH

SEQ ID NO: 20274 - protein, 9 aa, Artificial Sequence
  Description of Artificial Sequence: Synthetic peptide
EEPETYTQM

SEQ ID NO: 20275 - protein, 9 aa, Artificial Sequence
  Description of Artificial Sequence: Synthetic peptide
EEPRCGNPC

SEQ ID NO: 20276 - protein, 9 aa, Artificial Sequence
  Description of Artificial Sequence: Synthetic peptide
EEPRCVDPC

SEQ ID NO: 20277 - protein, 9 aa, Artificial Sequence
  Description of Artificial Sequence: Synthetic peptide
EEPRCVNPG

SEQ ID NO: 20278 - protein, 9 aa, Artificial Sequence
  Description of Artificial Sequence: Synthetic peptide
EEPRCVNPW

SEQ ID NO: 20279 - protein, 9 aa, Artificial Sequence
  Description of Artificial Sequence: Synthetic peptide
EEPRCVNPY

SEQ ID NO: 20280 - protein, 9 aa, Artificial Sequence
  Description of Artificial Sequence: Synthetic peptide
EEPRCVNTC

SEQ ID NO: 20281 - protein, 9 aa, Artificial Sequence
  Description of Artificial Sequence: Synthetic peptide
EEPRCVSPC

SEQ ID NO: 20282 - protein, 9 aa, Artificial Sequence
  Description of Artificial Sequence: Synthetic peptide
EEPRCVTPC

SEQ ID NO: 20283 - protein, 9 aa, Artificial Sequence
  Description of Artificial Sequence: Synthetic peptide
EFCENLTAI

SEQ ID NO: 20284 - protein, 9 aa, Artificial Sequence
  Description of Artificial Sequence: Synthetic peptide
EFCENMTSI

SEQ ID NO: 20285 - protein, 9 aa, Artificial Sequence
  Description of Artificial Sequence: Synthetic peptide
EFFCEADKA

SEQ ID NO: 20286 - protein, 9 aa, Artificial Sequence
  Description of Artificial Sequence: Synthetic peptide
EFFCPADKA

SEQ ID NO: 20287 - protein, 9 aa, Artificial Sequence
  Description of Artificial Sequence: Synthetic peptide
EFFCQADKT

SEQ ID NO: 20288 - protein, 9 aa, Artificial Sequence
  Description of Artificial Sequence: Synthetic peptide
EFFCQADKV

SEQ ID NO: 20289 - protein, 9 aa, Artificial Sequence
  Description of Artificial Sequence: Synthetic peptide
EFFCQANKA

SEQ ID NO: 20290 - protein, 9 aa, Artificial Sequence
  Description of Artificial Sequence: Synthetic peptide
EFFCQVDKA

SEQ ID NO: 20291 - protein, 9 aa, Artificial Sequence
  Description of Artificial Sequence: Synthetic peptide
EFFFQADKA

SEQ ID NO: 20292 - protein, 9 aa, Artificial Sequence
  Description of Artificial Sequence: Synthetic peptide
EFQQDDTDI

SEQ ID NO: 20293 - protein, 9 aa, Artificial Sequence
  Description of Artificial Sequence: Synthetic peptide
EGIKFQTEL

SEQ ID NO: 20294 - protein, 9 aa, Artificial Sequence
  Description of Artificial Sequence: Synthetic peptide
EGKYMDYFM

SEQ ID NO: 20295 - protein, 9 aa, Artificial Sequence
  Description of Artificial Sequence: Synthetic peptide
EGNSNWVFQ

SEQ ID NO: 20296 - protein, 9 aa, Artificial Sequence
  Description of Artificial Sequence: Synthetic peptide
EGPQNELNV

SEQ ID NO: 20297 - protein, 9 aa, Artificial Sequence
  Description of Artificial Sequence: Synthetic peptide
EGVGLYEFA

SEQ ID NO: 20298 - protein, 9 aa, Artificial Sequence
  Description of Artificial Sequence: Synthetic peptide
EHDNQDISV

SEQ ID NO: 20299 - protein, 9 aa, Artificial Sequence
  Description of Artificial Sequence: Synthetic peptide
EHDTQAISV

SEQ ID NO: 20300 - protein, 9 aa, Artificial Sequence
  Description of Artificial Sequence: Synthetic peptide
EHDTQDIIV

SEQ ID NO: 20301 - protein, 9 aa, Artificial Sequence
  Description of Artificial Sequence: Synthetic peptide
EHDTQDSSV

SEQ ID NO: 20302 - protein, 9 aa, Artificial Sequence
  Description of Artificial Sequence: Synthetic peptide
EHHALGVMG

SEQ ID NO: 20303 - protein, 9 aa, Artificial Sequence
  Description of Artificial Sequence: Synthetic peptide
EHHDCVPWS

SEQ ID NO: 20304 - protein, 9 aa, Artificial Sequence
  Description of Artificial Sequence: Synthetic peptide
EHHHSFGCP

SEQ ID NO: 20305 - protein, 9 aa, Artificial Sequence
  Description of Artificial Sequence: Synthetic peptide
EHHNLGYHK

SEQ ID NO: 20306 - protein, 9 aa, Artificial Sequence
  Description of Artificial Sequence: Synthetic peptide
EHHNVGYHT

SEQ ID NO: 20307 - protein, 9 aa, Artificial Sequence
  Description of Artificial Sequence: Synthetic peptide
EHHPLGAMG

SEQ ID NO: 20308 - protein, 9 aa, Artificial Sequence
  Description of Artificial Sequence: Synthetic peptide
EHHPVGVMG

SEQ ID NO: 20309 - protein, 9 aa, Artificial Sequence
  Description of Artificial Sequence: Synthetic peptide
EHHTLGVMG

SEQ ID NO: 20310 - protein, 9 aa, Artificial Sequence
  Description of Artificial Sequence: Synthetic peptide
EHLNLGYHT

SEQ ID NO: 20311 - protein, 9 aa, Artificial Sequence
  Description of Artificial Sequence: Synthetic peptide
EHRNLGYHT

SEQ ID NO: 20312 - protein, 9 aa, Artificial Sequence
  Description of Artificial Sequence: Synthetic peptide
EHVRGMEER

SEQ ID NO: 20313 - protein, 9 aa, Artificial Sequence
  Description of Artificial Sequence: Synthetic peptide
EHVRGMVDR

SEQ ID NO: 20314 - protein, 9 aa, Artificial Sequence
  Description of Artificial Sequence: Synthetic peptide
EHYTQDISV

SEQ ID NO: 20315 - protein, 9 aa, Artificial Sequence
  Description of Artificial Sequence: Synthetic peptide
EIAHKLDDI

SEQ ID NO: 20316 - protein, 9 aa, Artificial Sequence
  Description of Artificial Sequence: Synthetic peptide
EIALKLDDL

SEQ ID NO: 20317 - protein, 9 aa, Artificial Sequence
  Description of Artificial Sequence: Synthetic peptide
EINEDYAKI

SEQ ID NO: 20318 - protein, 9 aa, Artificial Sequence
  Description of Artificial Sequence: Synthetic peptide
EKDQRGIGS

SEQ ID NO: 20319 - protein, 9 aa, Artificial Sequence
  Description of Artificial Sequence: Synthetic peptide
EKRCHAIAL

SEQ ID NO: 20320 - protein, 9 aa, Artificial Sequence
  Description of Artificial Sequence: Synthetic peptide
ELAGKAFDH

SEQ ID NO: 20321 - protein, 9 aa, Artificial Sequence
  Description of Artificial Sequence: Synthetic peptide
ELYVILIWW

SEQ ID NO: 20322 - protein, 9 aa, Artificial Sequence
  Description of Artificial Sequence: Synthetic peptide
EMPIEWDEQ

SEQ ID NO: 20323 - protein, 9 aa, Artificial Sequence
  Description of Artificial Sequence: Synthetic peptide
EMRFNNFCY

SEQ ID NO: 20324 - protein, 9 aa, Artificial Sequence
  Description of Artificial Sequence: Synthetic peptide
ENDTQDISV

SEQ ID NO: 20325 - protein, 9 aa, Artificial Sequence
  Description of Artificial Sequence: Synthetic peptide
ENTMSIIEH

SEQ ID NO: 20326 - protein, 9 aa, Artificial Sequence
  Description of Artificial Sequence: Synthetic peptide
ENTMTIIEH

SEQ ID NO: 20327 - protein, 9 aa, Artificial Sequence
  Description of Artificial Sequence: Synthetic peptide
EPIKIFNDA

SEQ ID NO: 20328 - protein, 9 aa, Artificial Sequence
  Description of Artificial Sequence: Synthetic peptide
EPIQIFDDA

SEQ ID NO: 20329 - protein, 9 aa, Artificial Sequence
  Description of Artificial Sequence: Synthetic peptide
EPIQIFNDS

SEQ ID NO: 20330 - protein, 9 aa, Artificial Sequence
  Description of Artificial Sequence: Synthetic peptide
EPIQIFSDA

SEQ ID NO: 20331 - protein, 9 aa, Artificial Sequence
  Description of Artificial Sequence: Synthetic peptide
EPIQIVNDA

SEQ ID NO: 20332 - protein, 9 aa, Artificial Sequence
  Description of Artificial Sequence: Synthetic peptide
EPIQMFNDA

SEQ ID NO: 20333 - protein, 9 aa, Artificial Sequence
  Description of Artificial Sequence: Synthetic peptide
EPIQSFNDA

SEQ ID NO: 20334 - protein, 9 aa, Artificial Sequence
  Description of Artificial Sequence: Synthetic peptide
EPIWKVEDW

SEQ ID NO: 20335 - protein, 9 aa, Artificial Sequence
  Description of Artificial Sequence: Synthetic peptide
EPLQIFNDA

SEQ ID NO: 20336 - protein, 9 aa, Artificial Sequence
  Description of Artificial Sequence: Synthetic peptide
EPNIHAKCV

SEQ ID NO: 20337 - protein, 9 aa, Artificial Sequence
  Description of Artificial Sequence: Synthetic peptide
EPPLSPSAS

SEQ ID NO: 20338 - protein, 9 aa, Artificial Sequence
  Description of Artificial Sequence: Synthetic peptide
EPVFGFWNY

SEQ ID NO: 20339 - protein, 9 aa, Artificial Sequence
  Description of Artificial Sequence: Synthetic peptide
EQHNLGYHT

SEQ ID NO: 20340 - protein, 9 aa, Artificial Sequence
  Description of Artificial Sequence: Synthetic peptide
EQIASYDRV

SEQ ID NO: 20341 - protein, 9 aa, Artificial Sequence
  Description of Artificial Sequence: Synthetic peptide
ERDTQDISV

SEQ ID NO: 20342 - protein, 9 aa, Artificial Sequence
  Description of Artificial Sequence: Synthetic peptide
ESCEDEGLL

SEQ ID NO: 20343 - protein, 9 aa, Artificial Sequence
  Description of Artificial Sequence: Synthetic peptide
ESCEDEGML

SEQ ID NO: 20344 - protein, 9 aa, Artificial Sequence
  Description of Artificial Sequence: Synthetic peptide
ESCEDEGTL

SEQ ID NO: 20345 - protein, 9 aa, Artificial Sequence
  Description of Artificial Sequence: Synthetic peptide
ESCEDEGVL

SEQ ID NO: 20346 - protein, 9 aa, Artificial Sequence
  Description of Artificial Sequence: Synthetic peptide
ESCEDGGIL

SEQ ID NO: 20347 - protein, 9 aa, Artificial Sequence
  Description of Artificial Sequence: Synthetic peptide
ESCEDQGIL

SEQ ID NO: 20348 - protein, 9 aa, Artificial Sequence
  Description of Artificial Sequence: Synthetic peptide
ESCQDEGIL

SEQ ID NO: 20349 - protein, 9 aa, Artificial Sequence
  Description of Artificial Sequence: Synthetic peptide
ESKYVFPNQ

SEQ ID NO: 20350 - protein, 9 aa, Artificial Sequence
  Description of Artificial Sequence: Synthetic peptide
ESKYVIPNL

SEQ ID NO: 20351 - protein, 9 aa, Artificial Sequence
  Description of Artificial Sequence: Synthetic peptide
ESKYVIPYQ

SEQ ID NO: 20352 - protein, 9 aa, Artificial Sequence
  Description of Artificial Sequence: Synthetic peptide
ESKYVISNQ

SEQ ID NO: 20353 - protein, 9 aa, Artificial Sequence
  Description of Artificial Sequence: Synthetic peptide
ESKYVVPNQ

SEQ ID NO: 20354 - protein, 9 aa, Artificial Sequence
  Description of Artificial Sequence: Synthetic peptide
ESMERWGYD

SEQ ID NO: 20355 - protein, 9 aa, Artificial Sequence
  Description of Artificial Sequence: Synthetic peptide
ESTNDNITI

SEQ ID NO: 20356 - protein, 9 aa, Artificial Sequence
  Description of Artificial Sequence: Synthetic peptide
ESTTDNIAI

SEQ ID NO: 20357 - protein, 9 aa, Artificial Sequence
  Description of Artificial Sequence: Synthetic peptide
ETCGPGGYT

SEQ ID NO: 20358 - protein, 9 aa, Artificial Sequence
  Description of Artificial Sequence: Synthetic peptide
ETHYNEFCK

SEQ ID NO: 20359 - protein, 9 aa, Artificial Sequence
  Description of Artificial Sequence: Synthetic peptide
ETRCYKYWN

SEQ ID NO: 20360 - protein, 9 aa, Artificial Sequence
  Description of Artificial Sequence: Synthetic peptide
ETVETHRDR

SEQ ID NO: 20361 - protein, 9 aa, Artificial Sequence
  Description of Artificial Sequence: Synthetic peptide
EVGGVRIGL

SEQ ID NO: 20362 - protein, 9 aa, Artificial Sequence
  Description of Artificial Sequence: Synthetic peptide
EVKRWMMAD

SEQ ID NO: 20363 - protein, 9 aa, Artificial Sequence
  Description of Artificial Sequence: Synthetic peptide
EVKRWMMDD

SEQ ID NO: 20364 - protein, 9 aa, Artificial Sequence
  Description of Artificial Sequence: Synthetic peptide
EVKRWMMGD

SEQ ID NO: 20365 - protein, 9 aa, Artificial Sequence
  Description of Artificial Sequence: Synthetic peptide
EVKRWMMVG

SEQ ID NO: 20366 - protein, 9 aa, Artificial Sequence
  Description of Artificial Sequence: Synthetic peptide
EVKRWMTVD

SEQ ID NO: 20367 - protein, 9 aa, Artificial Sequence
  Description of Artificial Sequence: Synthetic peptide
EVPKNELNV

SEQ ID NO: 20368 - protein, 9 aa, Artificial Sequence
  Description of Artificial Sequence: Synthetic peptide
EVQRWMMVD

SEQ ID NO: 20369 - protein, 9 aa, Artificial Sequence
  Description of Artificial Sequence: Synthetic peptide
EVRRWMMVD

SEQ ID NO: 20370 - protein, 9 aa, Artificial Sequence
  Description of Artificial Sequence: Synthetic peptide
EWAQPMIMD

SEQ ID NO: 20371 - protein, 9 aa, Artificial Sequence
  Description of Artificial Sequence: Synthetic peptide
EWIQPMIMD

SEQ ID NO: 20372 - protein, 9 aa, Artificial Sequence
  Description of Artificial Sequence: Synthetic peptide
EWTQPLIMD

SEQ ID NO: 20373 - protein, 9 aa, Artificial Sequence
  Description of Artificial Sequence: Synthetic peptide
EWTQPMIMG

SEQ ID NO: 20374 - protein, 9 aa, Artificial Sequence
  Description of Artificial Sequence: Synthetic peptide
FATPKEGFD

SEQ ID NO: 20375 - protein, 9 aa, Artificial Sequence
  Description of Artificial Sequence: Synthetic peptide
FCDGCAPED

SEQ ID NO: 20376 - protein, 9 aa, Artificial Sequence
  Description of Artificial Sequence: Synthetic peptide
FCDRCAAED

SEQ ID NO: 20377 - protein, 9 aa, Artificial Sequence
  Description of Artificial Sequence: Synthetic peptide
FCDRCAPEG

SEQ ID NO: 20378 - protein, 9 aa, Artificial Sequence
  Description of Artificial Sequence: Synthetic peptide
FCDRCAPEV

SEQ ID NO: 20379 - protein, 9 aa, Artificial Sequence
  Description of Artificial Sequence: Synthetic peptide
FCDRCAPEY

SEQ ID NO: 20380 - protein, 9 aa, Artificial Sequence
  Description of Artificial Sequence: Synthetic peptide
FCDRCAPKD

SEQ ID NO: 20381 - protein, 9 aa, Artificial Sequence
  Description of Artificial Sequence: Synthetic peptide
FCDRCATED

SEQ ID NO: 20382 - protein, 9 aa, Artificial Sequence
  Description of Artificial Sequence: Synthetic peptide
FCDRCDPED

SEQ ID NO: 20383 - protein, 9 aa, Artificial Sequence
  Description of Artificial Sequence: Synthetic peptide
FCDRCTPED

SEQ ID NO: 20384 - protein, 9 aa, Artificial Sequence
  Description of Artificial Sequence: Synthetic peptide
FCGRCAPED

SEQ ID NO: 20385 - protein, 9 aa, Artificial Sequence
  Description of Artificial Sequence: Synthetic peptide
FFFFPENED

SEQ ID NO: 20386 - protein, 9 aa, Artificial Sequence
  Description of Artificial Sequence: Synthetic peptide
FFICPENED

SEQ ID NO: 20387 - protein, 9 aa, Artificial Sequence
  Description of Artificial Sequence: Synthetic peptide
FFIFAENED

SEQ ID NO: 20388 - protein, 9 aa, Artificial Sequence
  Description of Artificial Sequence: Synthetic peptide
FFIFHENED

SEQ ID NO: 20389 - protein, 9 aa, Artificial Sequence
  Description of Artificial Sequence: Synthetic peptide
FFIFLENED

SEQ ID NO: 20390 - protein, 9 aa, Artificial Sequence
  Description of Artificial Sequence: Synthetic peptide
FFIFPEDED

SEQ ID NO: 20391 - protein, 9 aa, Artificial Sequence
  Description of Artificial Sequence: Synthetic peptide
FFIFPEHED

SEQ ID NO: 20392 - protein, 9 aa, Artificial Sequence
  Description of Artificial Sequence: Synthetic peptide
FFIFPEIED

SEQ ID NO: 20393 - protein, 9 aa, Artificial Sequence
  Description of Artificial Sequence: Synthetic peptide
FFIFPENAD

SEQ ID NO: 20394 - protein, 9 aa, Artificial Sequence
  Description of Artificial Sequence: Synthetic peptide
FFIFPENEA

SEQ ID NO: 20395 - protein, 9 aa, Artificial Sequence
  Description of Artificial Sequence: Synthetic peptide
FFIFPENEV

SEQ ID NO: 20396 - protein, 9 aa, Artificial Sequence
  Description of Artificial Sequence: Synthetic peptide
FFIFPENGD

SEQ ID NO: 20397 - protein, 9 aa, Artificial Sequence
  Description of Artificial Sequence: Synthetic peptide
FFIFPENQD

SEQ ID NO: 20398 - protein, 9 aa, Artificial Sequence
  Description of Artificial Sequence: Synthetic peptide
FFIFPENVD

SEQ ID NO: 20399 - protein, 9 aa, Artificial Sequence
  Description of Artificial Sequence: Synthetic peptide
FFIFPETED

SEQ ID NO: 20400 - protein, 9 aa, Artificial Sequence
  Description of Artificial Sequence: Synthetic peptide
FFIFPEYED

SEQ ID NO: 20401 - protein, 9 aa, Artificial Sequence
  Description of Artificial Sequence: Synthetic peptide
FFIFRENED

SEQ ID NO: 20402 - protein, 9 aa, Artificial Sequence
  Description of Artificial Sequence: Synthetic peptide
FFIFSENED

SEQ ID NO: 20403 - protein, 9 aa, Artificial Sequence
  Description of Artificial Sequence: Synthetic peptide
FFIFTENED

SEQ ID NO: 20404 - protein, 9 aa, Artificial Sequence
  Description of Artificial Sequence: Synthetic peptide
FFIIPENED

SEQ ID NO: 20405 - protein, 9 aa, Artificial Sequence
  Description of Artificial Sequence: Synthetic peptide
FFIVPENED

SEQ ID NO: 20406 - protein, 9 aa, Artificial Sequence
  Description of Artificial Sequence: Synthetic peptide
FFIYPENED

SEQ ID NO: 20407 - protein, 9 aa, Artificial Sequence
  Description of Artificial Sequence: Synthetic peptide
FFLFPENED

SEQ ID NO: 20408 - protein, 9 aa, Artificial Sequence
  Description of Artificial Sequence: Synthetic peptide
FFNINGSVE

SEQ ID NO: 20409 - protein, 9 aa, Artificial Sequence
  Description of Artificial Sequence: Synthetic peptide
FFVFPENED

SEQ ID NO: 20410 - protein, 9 aa, Artificial Sequence
  Description of Artificial Sequence: Synthetic peptide
FGLKNDDRK

SEQ ID NO: 20411 - protein, 9 aa, Artificial Sequence
  Description of Artificial Sequence: Synthetic peptide
FHALWAECF

SEQ ID NO: 20412 - protein, 9 aa, Artificial Sequence
  Description of Artificial Sequence: Synthetic peptide
FIDAKIWDV

SEQ ID NO: 20413 - protein, 9 aa, Artificial Sequence
  Description of Artificial Sequence: Synthetic peptide
FIIFPENED

SEQ ID NO: 20414 - protein, 9 aa, Artificial Sequence
  Description of Artificial Sequence: Synthetic peptide
FIYKCLFGF

SEQ ID NO: 20415 - protein, 9 aa, Artificial Sequence
  Description of Artificial Sequence: Synthetic peptide
FLVFMIIEG

SEQ ID NO: 20416 - protein, 9 aa, Artificial Sequence
  Description of Artificial Sequence: Synthetic peptide
FLVFMLIEV

SEQ ID NO: 20417 - protein, 9 aa, Artificial Sequence
  Description of Artificial Sequence: Synthetic peptide
FNGNDMLMV

SEQ ID NO: 20418 - protein, 9 aa, Artificial Sequence
  Description of Artificial Sequence: Synthetic peptide
FPEHKDQGI

SEQ ID NO: 20419 - protein, 9 aa, Artificial Sequence
  Description of Artificial Sequence: Synthetic peptide
FQEHKDKGI

SEQ ID NO: 20420 - protein, 9 aa, Artificial Sequence
  Description of Artificial Sequence: Synthetic peptide
FQEHKDQGV

SEQ ID NO: 20421 - protein, 9 aa, Artificial Sequence
  Description of Artificial Sequence: Synthetic peptide
FTNAAPVQD

SEQ ID NO: 20422 - protein, 9 aa, Artificial Sequence
  Description of Artificial Sequence: Synthetic peptide
FWESDRVMM

SEQ ID NO: 20423 - protein, 9 aa, Artificial Sequence
  Description of Artificial Sequence: Synthetic peptide
FWKSDRVMV

SEQ ID NO: 20424 - protein, 9 aa, Artificial Sequence
  Description of Artificial Sequence: Synthetic peptide
FWKTDRVMM

SEQ ID NO: 20425 - protein, 9 aa, Artificial Sequence
  Description of Artificial Sequence: Synthetic peptide
FYGPNWEFH

SEQ ID NO: 20426 - protein, 9 aa, Artificial Sequence
  Description of Artificial Sequence: Synthetic peptide
FYIFPENED

SEQ ID NO: 20427 - protein, 9 aa, Artificial Sequence
  Description of Artificial Sequence: Synthetic peptide
FYLPNWEFH

SEQ ID NO: 20428 - protein, 9 aa, Artificial Sequence
  Description of Artificial Sequence: Synthetic peptide
FYQQFFEGI

SEQ ID NO: 20429 - protein, 9 aa, Artificial Sequence
  Description of Artificial Sequence: Synthetic peptide
FYREFFEGI

SEQ ID NO: 20430 - protein, 9 aa, Artificial Sequence
  Description of Artificial Sequence: Synthetic peptide
FYRKFFEGI

SEQ ID NO: 20431 - protein, 9 aa, Artificial Sequence
  Description of Artificial Sequence: Synthetic peptide
FYRPFFEGI

SEQ ID NO: 20432 - protein, 9 aa, Artificial Sequence
  Description of Artificial Sequence: Synthetic peptide
FYRPNWECH

SEQ ID NO: 20433 - protein, 9 aa, Artificial Sequence
  Description of Artificial Sequence: Synthetic peptide
FYRPNWEFD

SEQ ID NO: 20434 - protein, 9 aa, Artificial Sequence
  Description of Artificial Sequence: Synthetic peptide
FYRPNWEFL

SEQ ID NO: 20435 - protein, 9 aa, Artificial Sequence
  Description of Artificial Sequence: Synthetic peptide
FYRPNWEFY

SEQ ID NO: 20436 - protein, 9 aa, Artificial Sequence
  Description of Artificial Sequence: Synthetic peptide
FYRPNWEIH

SEQ ID NO: 20437 - protein, 9 aa, Artificial Sequence
  Description of Artificial Sequence: Synthetic peptide
FYRPNWEVH

SEQ ID NO: 20438 - protein, 9 aa, Artificial Sequence
  Description of Artificial Sequence: Synthetic peptide
FYRQFFAGI

SEQ ID NO: 20439 - protein, 9 aa, Artificial Sequence
  Description of Artificial Sequence: Synthetic peptide
FYRQFFEGF

SEQ ID NO: 20440 - protein, 9 aa, Artificial Sequence
  Description of Artificial Sequence: Synthetic peptide
FYRQFFEGL

SEQ ID NO: 20441 - protein, 9 aa, Artificial Sequence
  Description of Artificial Sequence: Synthetic peptide
FYRQFFEGV

SEQ ID NO: 20442 - protein, 9 aa, Artificial Sequence
  Description of Artificial Sequence: Synthetic peptide
FYRQFFQGI

SEQ ID NO: 20443 - protein, 9 aa, Artificial Sequence
  Description of Artificial Sequence: Synthetic peptide
FYRQYFEGI

SEQ ID NO: 20444 - protein, 9 aa, Artificial Sequence
  Description of Artificial Sequence: Synthetic peptide
GARKNGFMQ

SEQ ID NO: 20445 - protein, 9 aa, Artificial Sequence
  Description of Artificial Sequence: Synthetic peptide
GARMNGFMR

SEQ ID NO: 20446 - protein, 9 aa, Artificial Sequence
  Description of Artificial Sequence: Synthetic peptide
GARMNGFTQ

SEQ ID NO: 20447 - protein, 9 aa, Artificial Sequence
  Description of Artificial Sequence: Synthetic peptide
GARTNGFMQ

SEQ ID NO: 20448 - protein, 9 aa, Artificial Sequence
  Description of Artificial Sequence: Synthetic peptide
GCQQDDTDI

SEQ ID NO: 20449 - protein, 9 aa, Artificial Sequence
  Description of Artificial Sequence: Synthetic peptide
GDCACKFSA

SEQ ID NO: 20450 - protein, 9 aa, Artificial Sequence
  Description of Artificial Sequence: Synthetic peptide
GDCECKFAA

SEQ ID NO: 20451 - protein, 9 aa, Artificial Sequence
  Description of Artificial Sequence: Synthetic peptide
GDCECKFSS

SEQ ID NO: 20452 - protein, 9 aa, Artificial Sequence
  Description of Artificial Sequence: Synthetic peptide
GDCECTFSA

SEQ ID NO: 20453 - protein, 9 aa, Artificial Sequence
  Description of Artificial Sequence: Synthetic peptide
GDCGCKFSA

SEQ ID NO: 20454 - protein, 9 aa, Artificial Sequence
  Description of Artificial Sequence: Synthetic peptide
GDHLGNVWY

SEQ ID NO: 20455 - protein, 9 aa, Artificial Sequence
  Description of Artificial Sequence: Synthetic peptide
GDHWHGPGD

SEQ ID NO: 20456 - protein, 9 aa, Artificial Sequence
  Description of Artificial Sequence: Synthetic peptide
GDIPHRVAC

SEQ ID NO: 20457 - protein, 9 aa, Artificial Sequence
  Description of Artificial Sequence: Synthetic peptide
GDMWWYQDP

SEQ ID NO: 20458 - protein, 9 aa, Artificial Sequence
  Description of Artificial Sequence: Synthetic peptide
GDPADRNTC

SEQ ID NO: 20459 - protein, 9 aa, Artificial Sequence
  Description of Artificial Sequence: Synthetic peptide
GDPGDRNTC

SEQ ID NO: 20460 - protein, 9 aa, Artificial Sequence
  Description of Artificial Sequence: Synthetic peptide
GDPLDRNTC

SEQ ID NO: 20461 - protein, 9 aa, Artificial Sequence
  Description of Artificial Sequence: Synthetic peptide
GDPVDHNTC

SEQ ID NO: 20462 - protein, 9 aa, Artificial Sequence
  Description of Artificial Sequence: Synthetic peptide
GDPVDRNAC

SEQ ID NO: 20463 - protein, 9 aa, Artificial Sequence
  Description of Artificial Sequence: Synthetic peptide
GDRLDREVF

SEQ ID NO: 20464 - protein, 9 aa, Artificial Sequence
  Description of Artificial Sequence: Synthetic peptide
GDYCTHKNH

SEQ ID NO: 20465 - protein, 9 aa, Artificial Sequence
  Description of Artificial Sequence: Synthetic peptide
GDYECKFSA

SEQ ID NO: 20466 - protein, 9 aa, Artificial Sequence
  Description of Artificial Sequence: Synthetic peptide
GDYLGNIWY

SEQ ID NO: 20467 - protein, 9 aa, Artificial Sequence
  Description of Artificial Sequence: Synthetic peptide
GEAQQRVVK

SEQ ID NO: 20468 - protein, 9 aa, Artificial Sequence
  Description of Artificial Sequence: Synthetic peptide
GECECKFSA

SEQ ID NO: 20469 - protein, 9 aa, Artificial Sequence
  Description of Artificial Sequence: Synthetic peptide
GEFGPNHRH

SEQ ID NO: 20470 - protein, 9 aa, Artificial Sequence
  Description of Artificial Sequence: Synthetic peptide
GEFMEQGCG

SEQ ID NO: 20471 - protein, 9 aa, Artificial Sequence
  Description of Artificial Sequence: Synthetic peptide
GEFWNWSRP

SEQ ID NO: 20472 - protein, 9 aa, Artificial Sequence
  Description of Artificial Sequence: Synthetic peptide
GEFWTWSRT

SEQ ID NO: 20473 - protein, 9 aa, Artificial Sequence
  Description of Artificial Sequence: Synthetic peptide
GEIPDRVAC

SEQ ID NO: 20474 - protein, 9 aa, Artificial Sequence
  Description of Artificial Sequence: Synthetic peptide
GEIPHRVSC

SEQ ID NO: 20475 - protein, 9 aa, Artificial Sequence
  Description of Artificial Sequence: Synthetic peptide
GEIPNRVAC

SEQ ID NO: 20476 - protein, 9 aa, Artificial Sequence
  Description of Artificial Sequence: Synthetic peptide
GEIPPRVAC

SEQ ID NO: 20477 - protein, 9 aa, Artificial Sequence
  Description of Artificial Sequence: Synthetic peptide
GEPVDRNTC

SEQ ID NO: 20478 - protein, 9 aa, Artificial Sequence
  Description of Artificial Sequence: Synthetic peptide
GEWSWAEHS

SEQ ID NO: 20479 - protein, 9 aa, Artificial Sequence
  Description of Artificial Sequence: Synthetic peptide
GFLHVTSIM

SEQ ID NO: 20480 - protein, 9 aa, Artificial Sequence
  Description of Artificial Sequence: Synthetic peptide
GFPDEGSLQ

SEQ ID NO: 20481 - protein, 9 aa, Artificial Sequence
  Description of Artificial Sequence: Synthetic peptide
GFPDEKSLQ

SEQ ID NO: 20482 - protein, 9 aa, Artificial Sequence
  Description of Artificial Sequence: Synthetic peptide
GFPDERNLQ

SEQ ID NO: 20483 - protein, 9 aa, Artificial Sequence
  Description of Artificial Sequence: Synthetic peptide
GFPDERSLE

SEQ ID NO: 20484 - protein, 9 aa, Artificial Sequence
  Description of Artificial Sequence: Synthetic peptide
GFPDERSLK

SEQ ID NO: 20485 - protein, 9 aa, Artificial Sequence
  Description of Artificial Sequence: Synthetic peptide
GFTDERSLQ

SEQ ID NO: 20486 - protein, 9 aa, Artificial Sequence
  Description of Artificial Sequence: Synthetic peptide
GLELGHVWG

SEQ ID NO: 20487 - protein, 9 aa, Artificial Sequence
  Description of Artificial Sequence: Synthetic peptide
GPFHQDARA

SEQ ID NO: 20488 - protein, 9 aa, Artificial Sequence
  Description of Artificial Sequence: Synthetic peptide
GPFKQDARA

SEQ ID NO: 20489 - protein, 9 aa, Artificial Sequence
  Description of Artificial Sequence: Synthetic peptide
GPFLQDARA

SEQ ID NO: 20490 - protein, 9 aa, Artificial Sequence
  Description of Artificial Sequence: Synthetic peptide
GPFQEDARA

SEQ ID NO: 20491 - protein, 9 aa, Artificial Sequence
  Description of Artificial Sequence: Synthetic peptide
GPFQQDARS

SEQ ID NO: 20492 - protein, 9 aa, Artificial Sequence
  Description of Artificial Sequence: Synthetic peptide
GPFQQDDRA

SEQ ID NO: 20493 - protein, 9 aa, Artificial Sequence
  Description of Artificial Sequence: Synthetic peptide
GPFQQDGRA

SEQ ID NO: 20494 - protein, 9 aa, Artificial Sequence
  Description of Artificial Sequence: Synthetic peptide
GPVQQDARA

SEQ ID NO: 20495 - protein, 9 aa, Artificial Sequence
  Description of Artificial Sequence: Synthetic peptide
GSISNVKAN

SEQ ID NO: 20496 - protein, 9 aa, Artificial Sequence
  Description of Artificial Sequence: Synthetic peptide
GSQCGVPND

SEQ ID NO: 20497 - protein, 9 aa, Artificial Sequence
  Description of Artificial Sequence: Synthetic peptide
GTFSNVKAN

SEQ ID NO: 20498 - protein, 9 aa, Artificial Sequence
  Description of Artificial Sequence: Synthetic peptide
GTISNVKDN

SEQ ID NO: 20499 - protein, 9 aa, Artificial Sequence
  Description of Artificial Sequence: Synthetic peptide
GTISNVKPN

SEQ ID NO: 20500 - protein, 9 aa, Artificial Sequence
  Description of Artificial Sequence: Synthetic peptide
GTISNVKSN

SEQ ID NO: 20501 - protein, 9 aa, Artificial Sequence
  Description of Artificial Sequence: Synthetic peptide
GTISNVKTN

SEQ ID NO: 20502 - protein, 9 aa, Artificial Sequence
  Description of Artificial Sequence: Synthetic peptide
GTISNVNAN

SEQ ID NO: 20503 - protein, 9 aa, Artificial Sequence
  Description of Artificial Sequence: Synthetic peptide
GTISNVRAN

SEQ ID NO: 20504 - protein, 9 aa, Artificial Sequence
  Description of Artificial Sequence: Synthetic peptide
GTKPDTFHG

SEQ ID NO: 20505 - protein, 9 aa, Artificial Sequence
  Description of Artificial Sequence: Synthetic peptide
GTVSNVKAN

SEQ ID NO: 20506 - protein, 9 aa, Artificial Sequence
  Description of Artificial Sequence: Synthetic peptide
GVDMCGLAE

SEQ ID NO: 20507 - protein, 9 aa, Artificial Sequence
  Description of Artificial Sequence: Synthetic peptide
GVISCPDCI

SEQ ID NO: 20508 - protein, 9 aa, Artificial Sequence
  Description of Artificial Sequence: Synthetic peptide
GVISCPECL

SEQ ID NO: 20509 - protein, 9 aa, Artificial Sequence
  Description of Artificial Sequence: Synthetic peptide
GYAGVESLG

SEQ ID NO: 20510 - protein, 9 aa, Artificial Sequence
  Description of Artificial Sequence: Synthetic peptide
GYAGVGILG

SEQ ID NO: 20511 - protein, 9 aa, Artificial Sequence
  Description of Artificial Sequence: Synthetic peptide
HANQDPWDG

SEQ ID NO: 20512 - protein, 9 aa, Artificial Sequence
  Description of Artificial Sequence: Synthetic peptide
HATLDPWDG

SEQ ID NO: 20513 - protein, 9 aa, Artificial Sequence
  Description of Artificial Sequence: Synthetic peptide
HFCANRHIA

SEQ ID NO: 20514 - protein, 9 aa, Artificial Sequence
  Description of Artificial Sequence: Synthetic peptide
HFCDNRHIA

SEQ ID NO: 20515 - protein, 9 aa, Artificial Sequence
  Description of Artificial Sequence: Synthetic peptide
HFCFNRHIA

SEQ ID NO: 20516 - protein, 9 aa, Artificial Sequence
  Description of Artificial Sequence: Synthetic peptide
HFCLNRHIA

SEQ ID NO: 20517 - protein, 9 aa, Artificial Sequence
  Description of Artificial Sequence: Synthetic peptide
HFCVNRHIE

SEQ ID NO: 20518 - protein, 9 aa, Artificial Sequence
  Description of Artificial Sequence: Synthetic peptide
HFCVNRHNA

SEQ ID NO: 20519 - protein, 9 aa, Artificial Sequence
  Description of Artificial Sequence: Synthetic peptide
HFCVNRNIA

SEQ ID NO: 20520 - protein, 9 aa, Artificial Sequence
  Description of Artificial Sequence: Synthetic peptide
HFCVNRPIA

SEQ ID NO: 20521 - protein, 9 aa, Artificial Sequence
  Description of Artificial Sequence: Synthetic peptide
HFFVNRHIA

SEQ ID NO: 20522 - protein, 9 aa, Artificial Sequence
  Description of Artificial Sequence: Synthetic peptide
HFGVNRHIA

SEQ ID NO: 20523 - protein, 9 aa, Artificial Sequence
  Description of Artificial Sequence: Synthetic peptide
HGLDLGCAV

SEQ ID NO: 20524 - protein, 9 aa, Artificial Sequence
  Description of Artificial Sequence: Synthetic peptide
HGLKNDDRK

SEQ ID NO: 20525 - protein, 9 aa, Artificial Sequence
  Description of Artificial Sequence: Synthetic peptide
HGTDQTMHM

SEQ ID NO: 20526 - protein, 9 aa, Artificial Sequence
  Description of Artificial Sequence: Synthetic peptide
HIRLWPFEG

SEQ ID NO: 20527 - protein, 9 aa, Artificial Sequence
  Description of Artificial Sequence: Synthetic peptide
HPMDDACKQ

SEQ ID NO: 20528 - protein, 9 aa, Artificial Sequence
  Description of Artificial Sequence: Synthetic peptide
HSANRDHFV

SEQ ID NO: 20529 - protein, 9 aa, Artificial Sequence
  Description of Artificial Sequence: Synthetic peptide
HSEDRDHFV

SEQ ID NO: 20530 - protein, 9 aa, Artificial Sequence
  Description of Artificial Sequence: Synthetic peptide
HSEHRDHFV

SEQ ID NO: 20531 - protein, 9 aa, Artificial Sequence
  Description of Artificial Sequence: Synthetic peptide
HSENRDHFG

SEQ ID NO: 20532 - protein, 9 aa, Artificial Sequence
  Description of Artificial Sequence: Synthetic peptide
HSENRDHIV

SEQ ID NO: 20533 - protein, 9 aa, Artificial Sequence
  Description of Artificial Sequence: Synthetic peptide
HSENRDPFV

SEQ ID NO: 20534 - protein, 9 aa, Artificial Sequence
  Description of Artificial Sequence: Synthetic peptide
HSENRDYFV

SEQ ID NO: 20535 - protein, 9 aa, Artificial Sequence
  Description of Artificial Sequence: Synthetic peptide
HSGNRDHFV

SEQ ID NO: 20536 - protein, 9 aa, Artificial Sequence
  Description of Artificial Sequence: Synthetic peptide
HSKNRDHFV

SEQ ID NO: 20537 - protein, 9 aa, Artificial Sequence
  Description of Artificial Sequence: Synthetic peptide
HTHYNEFCK

SEQ ID NO: 20538 - protein, 9 aa, Artificial Sequence
  Description of Artificial Sequence: Synthetic peptide
HTKYECYRF

SEQ ID NO: 20539 - protein, 9 aa, Artificial Sequence
  Description of Artificial Sequence: Synthetic peptide
HTSLLHFDH

SEQ ID NO: 20540 - protein, 9 aa, Artificial Sequence
  Description of Artificial Sequence: Synthetic peptide
HVCVNRHIA

SEQ ID NO: 20541 - protein, 9 aa, Artificial Sequence
  Description of Artificial Sequence: Synthetic peptide
HWPTHWNIP

SEQ ID NO: 20542 - protein, 9 aa, Artificial Sequence
  Description of Artificial Sequence: Synthetic peptide
HWWFRKRWV

SEQ ID NO: 20543 - protein, 9 aa, Artificial Sequence
  Description of Artificial Sequence: Synthetic peptide
HWWYRKRWE

SEQ ID NO: 20544 - protein, 9 aa, Artificial Sequence
  Description of Artificial Sequence: Synthetic peptide
HYTKSISHS

SEQ ID NO: 20545 - protein, 9 aa, Artificial Sequence
  Description of Artificial Sequence: Synthetic peptide
IDMWWYQDP

SEQ ID NO: 20546 - protein, 9 aa, Artificial Sequence
  Description of Artificial Sequence: Synthetic peptide
IFDTRWSNV

SEQ ID NO: 20547 - protein, 9 aa, Artificial Sequence
  Description of Artificial Sequence: Synthetic peptide
IFNYSNHND

SEQ ID NO: 20548 - protein, 9 aa, Artificial Sequence
  Description of Artificial Sequence: Synthetic peptide
IFPYSNHND

SEQ ID NO: 20549 - protein, 9 aa, Artificial Sequence
  Description of Artificial Sequence: Synthetic peptide
IINCNGMNW

SEQ ID NO: 20550 - protein, 9 aa, Artificial Sequence
  Description of Artificial Sequence: Synthetic peptide
IINRTGMNW

SEQ ID NO: 20551 - protein, 9 aa, Artificial Sequence
  Description of Artificial Sequence: Synthetic peptide
IIRLWPFEG

SEQ ID NO: 20552 - protein, 9 aa, Artificial Sequence
  Description of Artificial Sequence: Synthetic peptide
ILGQWISYV

SEQ ID NO: 20553 - protein, 9 aa, Artificial Sequence
  Description of Artificial Sequence: Synthetic peptide
IPDWLWKHV

SEQ ID NO: 20554 - protein, 9 aa, Artificial Sequence
  Description of Artificial Sequence: Synthetic peptide
IPYKNQNNF

SEQ ID NO: 20555 - protein, 9 aa, Artificial Sequence
  Description of Artificial Sequence: Synthetic peptide
ISEWNFQDW

SEQ ID NO: 20556 - protein, 9 aa, Artificial Sequence
  Description of Artificial Sequence: Synthetic peptide
IVCQNNANS

SEQ ID NO: 20557 - protein, 9 aa, Artificial Sequence
  Description of Artificial Sequence: Synthetic peptide
IYRPNWEFH

SEQ ID NO: 20558 - protein, 9 aa, Artificial Sequence
  Description of Artificial Sequence: Synthetic peptide
KDHNREHII

SEQ ID NO: 20559 - protein, 9 aa, Artificial Sequence
  Description of Artificial Sequence: Synthetic peptide
KDNECVSHT

SEQ ID NO: 20560 - protein, 9 aa, Artificial Sequence
  Description of Artificial Sequence: Synthetic peptide
KDPETYTQM

SEQ ID NO: 20561 - protein, 9 aa, Artificial Sequence
  Description of Artificial Sequence: Synthetic peptide
KEPEAYTQM

SEQ ID NO: 20562 - protein, 9 aa, Artificial Sequence
  Description of Artificial Sequence: Synthetic peptide
KEPENYTQM

SEQ ID NO: 20563 - protein, 9 aa, Artificial Sequence
  Description of Artificial Sequence: Synthetic peptide
KEPETYIQM

SEQ ID NO: 20564 - protein, 9 aa, Artificial Sequence
  Description of Artificial Sequence: Synthetic peptide
KEPETYTKM

SEQ ID NO: 20565 - protein, 9 aa, Artificial Sequence
  Description of Artificial Sequence: Synthetic peptide
KEPGTYTQM

SEQ ID NO: 20566 - protein, 9 aa, Artificial Sequence
  Description of Artificial Sequence: Synthetic peptide
KEPKTYTQM

SEQ ID NO: 20567 - protein, 9 aa, Artificial Sequence
  Description of Artificial Sequence: Synthetic peptide
KERETYTQM

SEQ ID NO: 20568 - protein, 9 aa, Artificial Sequence
  Description of Artificial Sequence: Synthetic peptide
KESETYTQM

SEQ ID NO: 20569 - protein, 9 aa, Artificial Sequence
  Description of Artificial Sequence: Synthetic peptide
KETETYTQM

SEQ ID NO: 20570 - protein, 9 aa, Artificial Sequence
  Description of Artificial Sequence: Synthetic peptide
KGIDMAMEL

SEQ ID NO: 20571 - protein, 9 aa, Artificial Sequence
  Description of Artificial Sequence: Synthetic peptide
KILTDIFDS

SEQ ID NO: 20572 - protein, 9 aa, Artificial Sequence
  Description of Artificial Sequence: Synthetic peptide
KIWNFTKMM

SEQ ID NO: 20573 - protein, 9 aa, Artificial Sequence
  Description of Artificial Sequence: Synthetic peptide
KIWNVTKVM

SEQ ID NO: 20574 - protein, 9 aa, Artificial Sequence
  Description of Artificial Sequence: Synthetic peptide
KIWSVTKMM

SEQ ID NO: 20575 - protein, 9 aa, Artificial Sequence
  Description of Artificial Sequence: Synthetic peptide
KKPETYTQM

SEQ ID NO: 20576 - protein, 9 aa, Artificial Sequence
  Description of Artificial Sequence: Synthetic peptide
KMQCLTFCD

SEQ ID NO: 20577 - protein, 9 aa, Artificial Sequence
  Description of Artificial Sequence: Synthetic peptide
KNIDYLKWN

SEQ ID NO: 20578 - protein, 9 aa, Artificial Sequence
  Description of Artificial Sequence: Synthetic peptide
KNNEYLKWN

SEQ ID NO: 20579 - protein, 9 aa, Artificial Sequence
  Description of Artificial Sequence: Synthetic peptide
KPHHWNKKT

SEQ ID NO: 20580 - protein, 9 aa, Artificial Sequence
  Description of Artificial Sequence: Synthetic peptide
KPPHWNKET

SEQ ID NO: 20581 - protein, 9 aa, Artificial Sequence
  Description of Artificial Sequence: Synthetic peptide
KPPHWNNKT

SEQ ID NO: 20582 - protein, 9 aa, Artificial Sequence
  Description of Artificial Sequence: Synthetic peptide
KQPETYTQM

SEQ ID NO: 20583 - protein, 9 aa, Artificial Sequence
  Description of Artificial Sequence: Synthetic peptide
KRNEDVLEQ

SEQ ID NO: 20584 - protein, 9 aa, Artificial Sequence
  Description of Artificial Sequence: Synthetic peptide
KSMERWAYD

SEQ ID NO: 20585 - protein, 9 aa, Artificial Sequence
  Description of Artificial Sequence: Synthetic peptide
KSMGRWGYD

SEQ ID NO: 20586 - protein, 9 aa, Artificial Sequence
  Description of Artificial Sequence: Synthetic peptide
KTHYNEFCK

SEQ ID NO: 20587 - protein, 9 aa, Artificial Sequence
  Description of Artificial Sequence: Synthetic peptide
KTIWGWSDC

SEQ ID NO: 20588 - protein, 9 aa, Artificial Sequence
  Description of Artificial Sequence: Synthetic peptide
KTWNVTKMM

SEQ ID NO: 20589 - protein, 9 aa, Artificial Sequence
  Description of Artificial Sequence: Synthetic peptide
KYISEWMEL

SEQ ID NO: 20590 - protein, 9 aa, Artificial Sequence
  Description of Artificial Sequence: Synthetic peptide
LAMDCRPEH

SEQ ID NO: 20591 - protein, 9 aa, Artificial Sequence
  Description of Artificial Sequence: Synthetic peptide
LDDPDTSGQ

SEQ ID NO: 20592 - protein, 9 aa, Artificial Sequence
  Description of Artificial Sequence: Synthetic peptide
LFCVNRHIA

SEQ ID NO: 20593 - protein, 9 aa, Artificial Sequence
  Description of Artificial Sequence: Synthetic peptide
LGICCYRDP

SEQ ID NO: 20594 - protein, 9 aa, Artificial Sequence
  Description of Artificial Sequence: Synthetic peptide
LGMDWGMTD

SEQ ID NO: 20595 - protein, 9 aa, Artificial Sequence
  Description of Artificial Sequence: Synthetic peptide
LGSLNGAMA

SEQ ID NO: 20596 - protein, 9 aa, Artificial Sequence
  Description of Artificial Sequence: Synthetic peptide
LGSSNGAMD

SEQ ID NO: 20597 - protein, 9 aa, Artificial Sequence
  Description of Artificial Sequence: Synthetic peptide
LGSSNGAVA

SEQ ID NO: 20598 - protein, 9 aa, Artificial Sequence
  Description of Artificial Sequence: Synthetic peptide
LHCALGQHS

SEQ ID NO: 20599 - protein, 9 aa, Artificial Sequence
  Description of Artificial Sequence: Synthetic peptide
LHCELGEHS

SEQ ID NO: 20600 - protein, 9 aa, Artificial Sequence
  Description of Artificial Sequence: Synthetic peptide
LHCELGQHP

SEQ ID NO: 20601 - protein, 9 aa, Artificial Sequence
  Description of Artificial Sequence: Synthetic peptide
LHCGLGQHS

SEQ ID NO: 20602 - protein, 9 aa, Artificial Sequence
  Description of Artificial Sequence: Synthetic peptide
LHCKLGQHS

SEQ ID NO: 20603 - protein, 9 aa, Artificial Sequence
  Description of Artificial Sequence: Synthetic peptide
LHCVLGQHS

SEQ ID NO: 20604 - protein, 9 aa, Artificial Sequence
  Description of Artificial Sequence: Synthetic peptide
LHGKVSMHR

SEQ ID NO: 20605 - protein, 9 aa, Artificial Sequence
  Description of Artificial Sequence: Synthetic peptide
LHWELGQHS

SEQ ID NO: 20606 - protein, 9 aa, Artificial Sequence
  Description of Artificial Sequence: Synthetic peptide
LIFPNGDFQ

SEQ ID NO: 20607 - protein, 9 aa, Artificial Sequence
  Description of Artificial Sequence: Synthetic peptide
LIPLWPFEG

SEQ ID NO: 20608 - protein, 9 aa, Artificial Sequence
  Description of Artificial Sequence: Synthetic peptide
LIQLWPFEG

SEQ ID NO: 20609 - protein, 9 aa, Artificial Sequence
  Description of Artificial Sequence: Synthetic peptide
LIRLWQFEG

SEQ ID NO: 20610 - protein, 9 aa, Artificial Sequence
  Description of Artificial Sequence: Synthetic peptide
LIRLWRFEG

SEQ ID NO: 20611 - protein, 9 aa, Artificial Sequence
  Description of Artificial Sequence: Synthetic peptide
LKMDCRPEH

SEQ ID NO: 20612 - protein, 9 aa, Artificial Sequence
  Description of Artificial Sequence: Synthetic peptide
LLICCYRDP

SEQ ID NO: 20613 - protein, 9 aa, Artificial Sequence
  Description of Artificial Sequence: Synthetic peptide
LLINDWISP

SEQ ID NO: 20614 - protein, 9 aa, Artificial Sequence
  Description of Artificial Sequence: Synthetic peptide
LLVYFHVPN

SEQ ID NO: 20615 - protein, 9 aa, Artificial Sequence
  Description of Artificial Sequence: Synthetic peptide
LNVADLPIN

SEQ ID NO: 20616 - protein, 9 aa, Artificial Sequence
  Description of Artificial Sequence: Synthetic peptide
LNVDDMPIN

SEQ ID NO: 20617 - protein, 9 aa, Artificial Sequence
  Description of Artificial Sequence: Synthetic peptide
LNVHDLPIN

SEQ ID NO: 20618 - protein, 9 aa, Artificial Sequence
  Description of Artificial Sequence: Synthetic peptide
LNVVDLPIN

SEQ ID NO: 20619 - protein, 9 aa, Artificial Sequence
  Description of Artificial Sequence: Synthetic peptide
LPADLVDDW

SEQ ID NO: 20620 - protein, 9 aa, Artificial Sequence
  Description of Artificial Sequence: Synthetic peptide
LPADLVQDW

SEQ ID NO: 20621 - protein, 9 aa, Artificial Sequence
  Description of Artificial Sequence: Synthetic peptide
LPADLVYDW

SEQ ID NO: 20622 - protein, 9 aa, Artificial Sequence
  Description of Artificial Sequence: Synthetic peptide
LPDDLVHDW

SEQ ID NO: 20623 - protein, 9 aa, Artificial Sequence
  Description of Artificial Sequence: Synthetic peptide
LPPHWIGHY

SEQ ID NO: 20624 - protein, 9 aa, Artificial Sequence
  Description of Artificial Sequence: Synthetic peptide
LPSDLVHDW

SEQ ID NO: 20625 - protein, 9 aa, Artificial Sequence
  Description of Artificial Sequence: Synthetic peptide
LPVDLVHDW

SEQ ID NO: 20626 - protein, 9 aa, Artificial Sequence
  Description of Artificial Sequence: Synthetic peptide
LQMANRDPF

SEQ ID NO: 20627 - protein, 9 aa, Artificial Sequence
  Description of Artificial Sequence: Synthetic peptide
LQMANRDSC

SEQ ID NO: 20628 - protein, 9 aa, Artificial Sequence
  Description of Artificial Sequence: Synthetic peptide
LQMANRDTF

SEQ ID NO: 20629 - protein, 9 aa, Artificial Sequence
  Description of Artificial Sequence: Synthetic peptide
LQMDNRDSF

SEQ ID NO: 20630 - protein, 9 aa, Artificial Sequence
  Description of Artificial Sequence: Synthetic peptide
LQMPNRDSF

SEQ ID NO: 20631 - protein, 9 aa, Artificial Sequence
  Description of Artificial Sequence: Synthetic peptide
LQMSNRDSF

SEQ ID NO: 20632 - protein, 9 aa, Artificial Sequence
  Description of Artificial Sequence: Synthetic peptide
LQTHSICRD

SEQ ID NO: 20633 - protein, 9 aa, Artificial Sequence
  Description of Artificial Sequence: Synthetic peptide
LQTKSICRD

SEQ ID NO: 20634 - protein, 9 aa, Artificial Sequence
  Description of Artificial Sequence: Synthetic peptide
LRCELGQHS

SEQ ID NO: 20635 - protein, 9 aa, Artificial Sequence
  Description of Artificial Sequence: Synthetic peptide
LRMDCRPEH

SEQ ID NO: 20636 - protein, 9 aa, Artificial Sequence
  Description of Artificial Sequence: Synthetic peptide
LSEWNFHDW

SEQ ID NO: 20637 - protein, 9 aa, Artificial Sequence
  Description of Artificial Sequence: Synthetic peptide
LSICCYRDP

SEQ ID NO: 20638 - protein, 9 aa, Artificial Sequence
  Description of Artificial Sequence: Synthetic peptide
LSMDCRPEH

SEQ ID NO: 20639 - protein, 9 aa, Artificial Sequence
  Description of Artificial Sequence: Synthetic peptide
LTMDCGPEH

SEQ ID NO: 20640 - protein, 9 aa, Artificial Sequence
  Description of Artificial Sequence: Synthetic peptide
LTMDCRAEH

SEQ ID NO: 20641 - protein, 9 aa, Artificial Sequence
  Description of Artificial Sequence: Synthetic peptide
LTMDCRPED

SEQ ID NO: 20642 - protein, 9 aa, Artificial Sequence
  Description of Artificial Sequence: Synthetic peptide
LTMDCRPER

SEQ ID NO: 20643 - protein, 9 aa, Artificial Sequence
  Description of Artificial Sequence: Synthetic peptide
LTMDCRPEY

SEQ ID NO: 20644 - protein, 9 aa, Artificial Sequence
  Description of Artificial Sequence: Synthetic peptide
LTMDCRPGH

SEQ ID NO: 20645 - protein, 9 aa, Artificial Sequence
  Description of Artificial Sequence: Synthetic peptide
LTMDCRPKH

SEQ ID NO: 20646 - protein, 9 aa, Artificial Sequence
  Description of Artificial Sequence: Synthetic peptide
LTMDCRPKR

SEQ ID NO: 20647 - protein, 9 aa, Artificial Sequence
  Description of Artificial Sequence: Synthetic peptide
LTMDGRPEH

SEQ ID NO: 20648 - protein, 9 aa, Artificial Sequence
  Description of Artificial Sequence: Synthetic peptide
LTMGCRPEH

SEQ ID NO: 20649 - protein, 9 aa, Artificial Sequence
  Description of Artificial Sequence: Synthetic peptide
LTMPNSEGK

SEQ ID NO: 20650 - protein, 9 aa, Artificial Sequence
  Description of Artificial Sequence: Synthetic peptide
LTMPNSEQK

SEQ ID NO: 20651 - protein, 9 aa, Artificial Sequence
  Description of Artificial Sequence: Synthetic peptide
LTPDWIGHY

SEQ ID NO: 20652 - protein, 9 aa, Artificial Sequence
  Description of Artificial Sequence: Synthetic peptide
LTPHWIGHS

SEQ ID NO: 20653 - protein, 9 aa, Artificial Sequence
  Description of Artificial Sequence: Synthetic peptide
LTPHWIVHY

SEQ ID NO: 20654 - protein, 9 aa, Artificial Sequence
  Description of Artificial Sequence: Synthetic peptide
LWFCCYRDP

SEQ ID NO: 20655 - protein, 9 aa, Artificial Sequence
  Description of Artificial Sequence: Synthetic peptide
LWICCYQDP

SEQ ID NO: 20656 - protein, 9 aa, Artificial Sequence
  Description of Artificial Sequence: Synthetic peptide
LWICCYRDA

SEQ ID NO: 20657 - protein, 9 aa, Artificial Sequence
  Description of Artificial Sequence: Synthetic peptide
LWICFYRDP

SEQ ID NO: 20658 - protein, 9 aa, Artificial Sequence
  Description of Artificial Sequence: Synthetic peptide
LWMCCYRDP

SEQ ID NO: 20659 - protein, 9 aa, Artificial Sequence
  Description of Artificial Sequence: Synthetic peptide
LWNCCYRDP

SEQ ID NO: 20660 - protein, 9 aa, Artificial Sequence
  Description of Artificial Sequence: Synthetic peptide
LWVCCYRDP

SEQ ID NO: 20661 - protein, 9 aa, Artificial Sequence
  Description of Artificial Sequence: Synthetic peptide
MAGINGMAY

SEQ ID NO: 20662 - protein, 9 aa, Artificial Sequence
  Description of Artificial Sequence: Synthetic peptide
MAGLNGMAN

SEQ ID NO: 20663 - protein, 9 aa, Artificial Sequence
  Description of Artificial Sequence: Synthetic peptide
MAGLNGMAS

SEQ ID NO: 20664 - protein, 9 aa, Artificial Sequence
  Description of Artificial Sequence: Synthetic peptide
MAGLNGMEY

SEQ ID NO: 20665 - protein, 9 aa, Artificial Sequence
  Description of Artificial Sequence: Synthetic peptide
MAGLNGVAY

SEQ ID NO: 20666 - protein, 9 aa, Artificial Sequence
  Description of Artificial Sequence: Synthetic peptide
MAGVNGMAY

SEQ ID NO: 20667 - protein, 9 aa, Artificial Sequence
  Description of Artificial Sequence: Synthetic peptide
MAHNGNWNR

SEQ ID NO: 20668 - protein, 9 aa, Artificial Sequence
  Description of Artificial Sequence: Synthetic peptide
MDMSKAWMI

SEQ ID NO: 20669 - protein, 9 aa, Artificial Sequence
  Description of Artificial Sequence: Synthetic peptide
MELGKDWIQ

SEQ ID NO: 20670 - protein, 9 aa, Artificial Sequence
  Description of Artificial Sequence: Synthetic peptide
MFENWNLGV

SEQ ID NO: 20671 - protein, 9 aa, Artificial Sequence
  Description of Artificial Sequence: Synthetic peptide
MFETKKRVV

SEQ ID NO: 20672 - protein, 9 aa, Artificial Sequence
  Description of Artificial Sequence: Synthetic peptide
MGGLNGMAY

SEQ ID NO: 20673 - protein, 9 aa, Artificial Sequence
  Description of Artificial Sequence: Synthetic peptide
MGIDKAMEL

SEQ ID NO: 20674 - protein, 9 aa, Artificial Sequence
  Description of Artificial Sequence: Synthetic peptide
MGIDMAMEF

SEQ ID NO: 20675 - protein, 9 aa, Artificial Sequence
  Description of Artificial Sequence: Synthetic peptide
MHCELGQHS

SEQ ID NO: 20676 - protein, 9 aa, Artificial Sequence
  Description of Artificial Sequence: Synthetic peptide
MHDDNLNWN

SEQ ID NO: 20677 - protein, 9 aa, Artificial Sequence
  Description of Artificial Sequence: Synthetic peptide
MHSPLIQYG

SEQ ID NO: 20678 - protein, 9 aa, Artificial Sequence
  Description of Artificial Sequence: Synthetic peptide
MIEDRDYFI

SEQ ID NO: 20679 - protein, 9 aa, Artificial Sequence
  Description of Artificial Sequence: Synthetic peptide
MIETKKRVI

SEQ ID NO: 20680 - protein, 9 aa, Artificial Sequence
  Description of Artificial Sequence: Synthetic peptide
MISPLIQYG

SEQ ID NO: 20681 - protein, 9 aa, Artificial Sequence
  Description of Artificial Sequence: Synthetic peptide
MISWWKVDF

SEQ ID NO: 20682 - protein, 9 aa, Artificial Sequence
  Description of Artificial Sequence: Synthetic peptide
MKDAGEWLV

SEQ ID NO: 20683 - protein, 9 aa, Artificial Sequence
  Description of Artificial Sequence: Synthetic peptide
MKFIQMIWV

SEQ ID NO: 20684 - protein, 9 aa, Artificial Sequence
  Description of Artificial Sequence: Synthetic peptide
MLSALIQYG

SEQ ID NO: 20685 - protein, 9 aa, Artificial Sequence
  Description of Artificial Sequence: Synthetic peptide
MLSHLIQYG

SEQ ID NO: 20686 - protein, 9 aa, Artificial Sequence
  Description of Artificial Sequence: Synthetic peptide
MLSPLIQYC

SEQ ID NO: 20687 - protein, 9 aa, Artificial Sequence
  Description of Artificial Sequence: Synthetic peptide
MLSTLIQYG

SEQ ID NO: 20688 - protein, 9 aa, Artificial Sequence
  Description of Artificial Sequence: Synthetic peptide
MNFIQMILV

SEQ ID NO: 20689 - protein, 9 aa, Artificial Sequence
  Description of Artificial Sequence: Synthetic peptide
MNFIQMLWV

SEQ ID NO: 20690 - protein, 9 aa, Artificial Sequence
  Description of Artificial Sequence: Synthetic peptide
MNFISVHMC

SEQ ID NO: 20691 - protein, 9 aa, Artificial Sequence
  Description of Artificial Sequence: Synthetic peptide
MNICVLDGP

SEQ ID NO: 20692 - protein, 9 aa, Artificial Sequence
  Description of Artificial Sequence: Synthetic peptide
MNICVLDGT

SEQ ID NO: 20693 - protein, 9 aa, Artificial Sequence
  Description of Artificial Sequence: Synthetic peptide
MNSAQTMVY

SEQ ID NO: 20694 - protein, 9 aa, Artificial Sequence
  Description of Artificial Sequence: Synthetic peptide
MNSTQTMAY

SEQ ID NO: 20695 - protein, 9 aa, Artificial Sequence
  Description of Artificial Sequence: Synthetic peptide
MNVDDLPIN

SEQ ID NO: 20696 - protein, 9 aa, Artificial Sequence
  Description of Artificial Sequence: Synthetic peptide
MSHCLYVFG

SEQ ID NO: 20697 - protein, 9 aa, Artificial Sequence
  Description of Artificial Sequence: Synthetic peptide
MTCNDMAFY

SEQ ID NO: 20698 - protein, 9 aa, Artificial Sequence
  Description of Artificial Sequence: Synthetic peptide
MTIDSMAPC

SEQ ID NO: 20699 - protein, 9 aa, Artificial Sequence
  Description of Artificial Sequence: Synthetic peptide
MTKWDRLHD

SEQ ID NO: 20700 - protein, 9 aa, Artificial Sequence
  Description of Artificial Sequence: Synthetic peptide
MTKWDRWRD

SEQ ID NO: 20701 - protein, 9 aa, Artificial Sequence
  Description of Artificial Sequence: Synthetic peptide
MWICCYRDP

SEQ ID NO: 20702 - protein, 9 aa, Artificial Sequence
  Description of Artificial Sequence: Synthetic peptide
MWYLWWNCL

SEQ ID NO: 20703 - protein, 9 aa, Artificial Sequence
  Description of Artificial Sequence: Synthetic peptide
MYLDCCDFK

SEQ ID NO: 20704 - protein, 9 aa, Artificial Sequence
  Description of Artificial Sequence: Synthetic peptide
MYLDCRNFK

SEQ ID NO: 20705 - protein, 9 aa, Artificial Sequence
  Description of Artificial Sequence: Synthetic peptide
MYMDCCNFK

SEQ ID NO: 20706 - protein, 9 aa, Artificial Sequence
  Description of Artificial Sequence: Synthetic peptide
MYVDCCNFK

SEQ ID NO: 20707 - protein, 9 aa, Artificial Sequence
  Description of Artificial Sequence: Synthetic peptide
NATEGLGWV

SEQ ID NO: 20708 - protein, 9 aa, Artificial Sequence
  Description of Artificial Sequence: Synthetic peptide
NCVLFECCG

SEQ ID NO: 20709 - protein, 9 aa, Artificial Sequence
  Description of Artificial Sequence: Synthetic peptide
NCVLYEFCG

SEQ ID NO: 20710 - protein, 9 aa, Artificial Sequence
  Description of Artificial Sequence: Synthetic peptide
NCVVYECCG

SEQ ID NO: 20711 - protein, 9 aa, Artificial Sequence
  Description of Artificial Sequence: Synthetic peptide
NEWSWAEHS

SEQ ID NO: 20712 - protein, 9 aa, Artificial Sequence
  Description of Artificial Sequence: Synthetic peptide
NGARADAKK

SEQ ID NO: 20713 - protein, 9 aa, Artificial Sequence
  Description of Artificial Sequence: Synthetic peptide
NGLDLGCGV

SEQ ID NO: 20714 - protein, 9 aa, Artificial Sequence
  Description of Artificial Sequence: Synthetic peptide
NGTDQTMHM

SEQ ID NO: 20715 - protein, 9 aa, Artificial Sequence
  Description of Artificial Sequence: Synthetic peptide
NGTRVDAKK

SEQ ID NO: 20716 - protein, 9 aa, Artificial Sequence
  Description of Artificial Sequence: Synthetic peptide
NKVNWNHSS

SEQ ID NO: 20717 - protein, 9 aa, Artificial Sequence
  Description of Artificial Sequence: Synthetic peptide
NNGFDRYID

SEQ ID NO: 20718 - protein, 9 aa, Artificial Sequence
  Description of Artificial Sequence: Synthetic peptide
NRILDVEHD

SEQ ID NO: 20719 - protein, 9 aa, Artificial Sequence
  Description of Artificial Sequence: Synthetic peptide
NSENRDHFV

SEQ ID NO: 20720 - protein, 9 aa, Artificial Sequence
  Description of Artificial Sequence: Synthetic peptide
NTAEGLGWV

SEQ ID NO: 20721 - protein, 9 aa, Artificial Sequence
  Description of Artificial Sequence: Synthetic peptide
NTIEGLGWV

SEQ ID NO: 20722 - protein, 9 aa, Artificial Sequence
  Description of Artificial Sequence: Synthetic peptide
NTTEGLGWG

SEQ ID NO: 20723 - protein, 9 aa, Artificial Sequence
  Description of Artificial Sequence: Synthetic peptide
NTTQGLGWV

SEQ ID NO: 20724 - protein, 9 aa, Artificial Sequence
  Description of Artificial Sequence: Synthetic peptide
NVMEKYECR

SEQ ID NO: 20725 - protein, 9 aa, Artificial Sequence
  Description of Artificial Sequence: Synthetic peptide
NVMEKYECS

SEQ ID NO: 20726 - protein, 9 aa, Artificial Sequence
  Description of Artificial Sequence: Synthetic peptide
NWSAPQFSD

SEQ ID NO: 20727 - protein, 9 aa, Artificial Sequence
  Description of Artificial Sequence: Synthetic peptide
NWSGPQFTD

SEQ ID NO: 20728 - protein, 9 aa, Artificial Sequence
  Description of Artificial Sequence: Synthetic peptide
NWSTPQFTD

SEQ ID NO: 20729 - protein, 9 aa, Artificial Sequence
  Description of Artificial Sequence: Synthetic peptide
PECCGIFSS

SEQ ID NO: 20730 - protein, 9 aa, Artificial Sequence
  Description of Artificial Sequence: Synthetic peptide
PECCSICSS

SEQ ID NO: 20731 - protein, 9 aa, Artificial Sequence
  Description of Artificial Sequence: Synthetic peptide
PECCSIFAS

SEQ ID NO: 20732 - protein, 9 aa, Artificial Sequence
  Description of Artificial Sequence: Synthetic peptide
PECCSIFCS

SEQ ID NO: 20733 - protein, 9 aa, Artificial Sequence
  Description of Artificial Sequence: Synthetic peptide
PECCSIFSA

SEQ ID NO: 20734 - protein, 9 aa, Artificial Sequence
  Description of Artificial Sequence: Synthetic peptide
PECCSIFST

SEQ ID NO: 20735 - protein, 9 aa, Artificial Sequence
  Description of Artificial Sequence: Synthetic peptide
PECCSIFYS

SEQ ID NO: 20736 - protein, 9 aa, Artificial Sequence
  Description of Artificial Sequence: Synthetic peptide
PECCSIVSS

SEQ ID NO: 20737 - protein, 9 aa, Artificial Sequence
  Description of Artificial Sequence: Synthetic peptide
PECCSIYSS

SEQ ID NO: 20738 - protein, 9 aa, Artificial Sequence
  Description of Artificial Sequence: Synthetic peptide
PECCSLFSS

SEQ ID NO: 20739 - protein, 9 aa, Artificial Sequence
  Description of Artificial Sequence: Synthetic peptide
PECCSSFSS

SEQ ID NO: 20740 - protein, 9 aa, Artificial Sequence
  Description of Artificial Sequence: Synthetic peptide
PECCSTFSS

SEQ ID NO: 20741 - protein, 9 aa, Artificial Sequence
  Description of Artificial Sequence: Synthetic peptide
PECCSVFSS

SEQ ID NO: 20742 - protein, 9 aa, Artificial Sequence
  Description of Artificial Sequence: Synthetic peptide
PECCTIFSS

SEQ ID NO: 20743 - protein, 9 aa, Artificial Sequence
  Description of Artificial Sequence: Synthetic peptide
PECWSIFSS

SEQ ID NO: 20744 - protein, 9 aa, Artificial Sequence
  Description of Artificial Sequence: Synthetic peptide
PECYSIFSS

SEQ ID NO: 20745 - protein, 9 aa, Artificial Sequence
  Description of Artificial Sequence: Synthetic peptide
PEELGYCYV

SEQ ID NO: 20746 - protein, 9 aa, Artificial Sequence
  Description of Artificial Sequence: Synthetic peptide
PEELLYCYV

SEQ ID NO: 20747 - protein, 9 aa, Artificial Sequence
  Description of Artificial Sequence: Synthetic peptide
PEELWYCHV

SEQ ID NO: 20748 - protein, 9 aa, Artificial Sequence
  Description of Artificial Sequence: Synthetic peptide
PEEQWYCYV

SEQ ID NO: 20749 - protein, 9 aa, Artificial Sequence
  Description of Artificial Sequence: Synthetic peptide
PEFCSIFSS

SEQ ID NO: 20750 - protein, 9 aa, Artificial Sequence
  Description of Artificial Sequence: Synthetic peptide
PEKGMVEHQ

SEQ ID NO: 20751 - protein, 9 aa, Artificial Sequence
  Description of Artificial Sequence: Synthetic peptide
PERENLERC

SEQ ID NO: 20752 - protein, 9 aa, Artificial Sequence
  Description of Artificial Sequence: Synthetic peptide
PEWCSIFSS

SEQ ID NO: 20753 - protein, 9 aa, Artificial Sequence
  Description of Artificial Sequence: Synthetic peptide
PFAHMESDA

SEQ ID NO: 20754 - protein, 9 aa, Artificial Sequence
  Description of Artificial Sequence: Synthetic peptide
PFEHMASDA

SEQ ID NO: 20755 - protein, 9 aa, Artificial Sequence
  Description of Artificial Sequence: Synthetic peptide
PFEHMDSDA

SEQ ID NO: 20756 - protein, 9 aa, Artificial Sequence
  Description of Artificial Sequence: Synthetic peptide
PHQWSWSES

SEQ ID NO: 20757 - protein, 9 aa, Artificial Sequence
  Description of Artificial Sequence: Synthetic peptide
PHRWSWIES

SEQ ID NO: 20758 - protein, 9 aa, Artificial Sequence
  Description of Artificial Sequence: Synthetic peptide
PHRWSWSEP

SEQ ID NO: 20759 - protein, 9 aa, Artificial Sequence
  Description of Artificial Sequence: Synthetic peptide
PILWTNHSN

SEQ ID NO: 20760 - protein, 9 aa, Artificial Sequence
  Description of Artificial Sequence: Synthetic peptide
PIPWTNHSN

SEQ ID NO: 20761 - protein, 9 aa, Artificial Sequence
  Description of Artificial Sequence: Synthetic peptide
PIQWTNHIN

SEQ ID NO: 20762 - protein, 9 aa, Artificial Sequence
  Description of Artificial Sequence: Synthetic peptide
PIQWTNHNN

SEQ ID NO: 20763 - protein, 9 aa, Artificial Sequence
  Description of Artificial Sequence: Synthetic peptide
PIQWTNPSN

SEQ ID NO: 20764 - protein, 9 aa, Artificial Sequence
  Description of Artificial Sequence: Synthetic peptide
PISWCTQDL

SEQ ID NO: 20765 - protein, 9 aa, Artificial Sequence
  Description of Artificial Sequence: Synthetic peptide
PISWCTQHV

SEQ ID NO: 20766 - protein, 9 aa, Artificial Sequence
  Description of Artificial Sequence: Synthetic peptide
PLINQCREL

SEQ ID NO: 20767 - protein, 9 aa, Artificial Sequence
  Description of Artificial Sequence: Synthetic peptide
PMLCNRGCE

SEQ ID NO: 20768 - protein, 9 aa, Artificial Sequence
  Description of Artificial Sequence: Synthetic peptide
PMLCNRLCE

SEQ ID NO: 20769 - protein, 9 aa, Artificial Sequence
  Description of Artificial Sequence: Synthetic peptide
PMLCNRVGE

SEQ ID NO: 20770 - protein, 9 aa, Artificial Sequence
  Description of Artificial Sequence: Synthetic peptide
PMLWNRVCE

SEQ ID NO: 20771 - protein, 9 aa, Artificial Sequence
  Description of Artificial Sequence: Synthetic peptide
PMMCNRVCE

SEQ ID NO: 20772 - protein, 9 aa, Artificial Sequence
  Description of Artificial Sequence: Synthetic peptide
PPLGAWWYG

SEQ ID NO: 20773 - protein, 9 aa, Artificial Sequence
  Description of Artificial Sequence: Synthetic peptide
PPPNTFHDS

SEQ ID NO: 20774 - protein, 9 aa, Artificial Sequence
  Description of Artificial Sequence: Synthetic peptide
PQCCSIFSS

SEQ ID NO: 20775 - protein, 9 aa, Artificial Sequence
  Description of Artificial Sequence: Synthetic peptide
PRNNDDWRT

SEQ ID NO: 20776 - protein, 9 aa, Artificial Sequence
  Description of Artificial Sequence: Synthetic peptide
PRQLWEVWQ

SEQ ID NO: 20777 - protein, 9 aa, Artificial Sequence
  Description of Artificial Sequence: Synthetic peptide
PSRDCDSWE

SEQ ID NO: 20778 - protein, 9 aa, Artificial Sequence
  Description of Artificial Sequence: Synthetic peptide
PTIWGWSDC

SEQ ID NO: 20779 - protein, 9 aa, Artificial Sequence
  Description of Artificial Sequence: Synthetic peptide
PTMDCRPEH

SEQ ID NO: 20780 - protein, 9 aa, Artificial Sequence
  Description of Artificial Sequence: Synthetic peptide
PTRCLPLWT

SEQ ID NO: 20781 - protein, 9 aa, Artificial Sequence
  Description of Artificial Sequence: Synthetic peptide
PVEWAYWHM

SEQ ID NO: 20782 - protein, 9 aa, Artificial Sequence
  Description of Artificial Sequence: Synthetic peptide
QAMRCLFDH

SEQ ID NO: 20783 - protein, 9 aa, Artificial Sequence
  Description of Artificial Sequence: Synthetic peptide
QARENLERC

SEQ ID NO: 20784 - protein, 9 aa, Artificial Sequence
  Description of Artificial Sequence: Synthetic peptide
QECCSIFSS

SEQ ID NO: 20785 - protein, 9 aa, Artificial Sequence
  Description of Artificial Sequence: Synthetic peptide
QEGENLERC

SEQ ID NO: 20786 - protein, 9 aa, Artificial Sequence
  Description of Artificial Sequence: Synthetic peptide
QEPETYTQM

SEQ ID NO: 20787 - protein, 9 aa, Artificial Sequence
  Description of Artificial Sequence: Synthetic peptide
QEPHPFSEQ

SEQ ID NO: 20788 - protein, 9 aa, Artificial Sequence
  Description of Artificial Sequence: Synthetic peptide
QERENFERC

SEQ ID NO: 20789 - protein, 9 aa, Artificial Sequence
  Description of Artificial Sequence: Synthetic peptide
QERENLDRC

SEQ ID NO: 20790 - protein, 9 aa, Artificial Sequence
  Description of Artificial Sequence: Synthetic peptide
QERENVERC

SEQ ID NO: 20791 - protein, 9 aa, Artificial Sequence
  Description of Artificial Sequence: Synthetic peptide
QIGCCMLMW

SEQ ID NO: 20792 - protein, 9 aa, Artificial Sequence
  Description of Artificial Sequence: Synthetic peptide
QIIEFEERV

SEQ ID NO: 20793 - protein, 9 aa, Artificial Sequence
  Description of Artificial Sequence: Synthetic peptide
QITCCMLMW

SEQ ID NO: 20794 - protein, 9 aa, Artificial Sequence
  Description of Artificial Sequence: Synthetic peptide
QIWNVTKMM

SEQ ID NO: 20795 - protein, 9 aa, Artificial Sequence
  Description of Artificial Sequence: Synthetic peptide
QLTCPLLDD

SEQ ID NO: 20796 - protein, 9 aa, Artificial Sequence
  Description of Artificial Sequence: Synthetic peptide
QMLCNRVCE

SEQ ID NO: 20797 - protein, 9 aa, Artificial Sequence
  Description of Artificial Sequence: Synthetic peptide
QMPMPPVAD

SEQ ID NO: 20798 - protein, 9 aa, Artificial Sequence
  Description of Artificial Sequence: Synthetic peptide
QNHYNEFCK

SEQ ID NO: 20799 - protein, 9 aa, Artificial Sequence
  Description of Artificial Sequence: Synthetic peptide
QNIEYLKWN

SEQ ID NO: 20800 - protein, 9 aa, Artificial Sequence
  Description of Artificial Sequence: Synthetic peptide
QSDKNWYGM

SEQ ID NO: 20801 - protein, 9 aa, Artificial Sequence
  Description of Artificial Sequence: Synthetic peptide
QSDQNWYSM

SEQ ID NO: 20802 - protein, 9 aa, Artificial Sequence
  Description of Artificial Sequence: Synthetic peptide
QSKRCLFDH

SEQ ID NO: 20803 - protein, 9 aa, Artificial Sequence
  Description of Artificial Sequence: Synthetic peptide
QTDYNEFCK

SEQ ID NO: 20804 - protein, 9 aa, Artificial Sequence
  Description of Artificial Sequence: Synthetic peptide
QTHNNEFCK

SEQ ID NO: 20805 - protein, 9 aa, Artificial Sequence
  Description of Artificial Sequence: Synthetic peptide
QTHYNEFCE

SEQ ID NO: 20806 - protein, 9 aa, Artificial Sequence
  Description of Artificial Sequence: Synthetic peptide
QTHYNEFCR

SEQ ID NO: 20807 - protein, 9 aa, Artificial Sequence
  Description of Artificial Sequence: Synthetic peptide
QTIGGWSDC

SEQ ID NO: 20808 - protein, 9 aa, Artificial Sequence
  Description of Artificial Sequence: Synthetic peptide
QTIWGWGDC

SEQ ID NO: 20809 - protein, 9 aa, Artificial Sequence
  Description of Artificial Sequence: Synthetic peptide
QTIWGWIDC

SEQ ID NO: 20810 - protein, 9 aa, Artificial Sequence
  Description of Artificial Sequence: Synthetic peptide
QTIWGWNDC

SEQ ID NO: 20811 - protein, 9 aa, Artificial Sequence
  Description of Artificial Sequence: Synthetic peptide
QTIWGWSDF

SEQ ID NO: 20812 - protein, 9 aa, Artificial Sequence
  Description of Artificial Sequence: Synthetic peptide
QTIWVWSDC

SEQ ID NO: 20813 - protein, 9 aa, Artificial Sequence
  Description of Artificial Sequence: Synthetic peptide
QTNYNEFCK

SEQ ID NO: 20814 - protein, 9 aa, Artificial Sequence
  Description of Artificial Sequence: Synthetic peptide
QVCSDWCEG

SEQ ID NO: 20815 - protein, 9 aa, Artificial Sequence
  Description of Artificial Sequence: Synthetic peptide
RAHECHQCD

SEQ ID NO: 20816 - protein, 9 aa, Artificial Sequence
  Description of Artificial Sequence: Synthetic peptide
RAHVCDQCD

SEQ ID NO: 20817 - protein, 9 aa, Artificial Sequence
  Description of Artificial Sequence: Synthetic peptide
RAHVCHHCD

SEQ ID NO: 20818 - protein, 9 aa, Artificial Sequence
  Description of Artificial Sequence: Synthetic peptide
RAHVCHPCD

SEQ ID NO: 20819 - protein, 9 aa, Artificial Sequence
  Description of Artificial Sequence: Synthetic peptide
RAHVCHQCA

SEQ ID NO: 20820 - protein, 9 aa, Artificial Sequence
  Description of Artificial Sequence: Synthetic peptide
RAHVCNQCD

SEQ ID NO: 20821 - protein, 9 aa, Artificial Sequence
  Description of Artificial Sequence: Synthetic peptide
RAHVCQQCD

SEQ ID NO: 20822 - protein, 9 aa, Artificial Sequence
  Description of Artificial Sequence: Synthetic peptide
RARPHQGQQ

SEQ ID NO: 20823 - protein, 9 aa, Artificial Sequence
  Description of Artificial Sequence: Synthetic peptide
RDQLDREVF

SEQ ID NO: 20824 - protein, 9 aa, Artificial Sequence
  Description of Artificial Sequence: Synthetic peptide
RDRLDRAVF

SEQ ID NO: 20825 - protein, 9 aa, Artificial Sequence
  Description of Artificial Sequence: Synthetic peptide
RDRLDREAF

SEQ ID NO: 20826 - protein, 9 aa, Artificial Sequence
  Description of Artificial Sequence: Synthetic peptide
RDRLDREGF

SEQ ID NO: 20827 - protein, 9 aa, Artificial Sequence
  Description of Artificial Sequence: Synthetic peptide
RDRLDRELF

SEQ ID NO: 20828 - protein, 9 aa, Artificial Sequence
  Description of Artificial Sequence: Synthetic peptide
RDRLDREVC

SEQ ID NO: 20829 - protein, 9 aa, Artificial Sequence
  Description of Artificial Sequence: Synthetic peptide
RDRLDREVS

SEQ ID NO: 20830 - protein, 9 aa, Artificial Sequence
  Description of Artificial Sequence: Synthetic peptide
RDRLDREVV

SEQ ID NO: 20831 - protein, 9 aa, Artificial Sequence
  Description of Artificial Sequence: Synthetic peptide
RDRLDREVY

SEQ ID NO: 20832 - protein, 9 aa, Artificial Sequence
  Description of Artificial Sequence: Synthetic peptide
RDRLDRQVF

SEQ ID NO: 20833 - protein, 9 aa, Artificial Sequence
  Description of Artificial Sequence: Synthetic peptide
RDRLDWEVF

SEQ ID NO: 20834 - protein, 9 aa, Artificial Sequence
  Description of Artificial Sequence: Synthetic peptide
RDRLGREGF

SEQ ID NO: 20835 - protein, 9 aa, Artificial Sequence
  Description of Artificial Sequence: Synthetic peptide
RDRLGREVF

SEQ ID NO: 20836 - protein, 9 aa, Artificial Sequence
  Description of Artificial Sequence: Synthetic peptide
RDRMDREVF

SEQ ID NO: 20837 - protein, 9 aa, Artificial Sequence
  Description of Artificial Sequence: Synthetic peptide
RDRRDREVF

SEQ ID NO: 20838 - protein, 9 aa, Artificial Sequence
  Description of Artificial Sequence: Synthetic peptide
RDRSYEQMD

SEQ ID NO: 20839 - protein, 9 aa, Artificial Sequence
  Description of Artificial Sequence: Synthetic peptide
RDRVDREVF

SEQ ID NO: 20840 - protein, 9 aa, Artificial Sequence
  Description of Artificial Sequence: Synthetic peptide
RECIPMNSA

SEQ ID NO: 20841 - protein, 9 aa, Artificial Sequence
  Description of Artificial Sequence: Synthetic peptide
REFWTWSRP

SEQ ID NO: 20842 - protein, 9 aa, Artificial Sequence
  Description of Artificial Sequence: Synthetic peptide
REPETYTQM

SEQ ID NO: 20843 - protein, 9 aa, Artificial Sequence
  Description of Artificial Sequence: Synthetic peptide
RERPQQGQQ

SEQ ID NO: 20844 - protein, 9 aa, Artificial Sequence
  Description of Artificial Sequence: Synthetic peptide
RFCVNRHIA

SEQ ID NO: 20845 - protein, 9 aa, Artificial Sequence
  Description of Artificial Sequence: Synthetic peptide
RFPDERSLQ

SEQ ID NO: 20846 - protein, 9 aa, Artificial Sequence
  Description of Artificial Sequence: Synthetic peptide
RGGPQQGQQ

SEQ ID NO: 20847 - protein, 9 aa, Artificial Sequence
  Description of Artificial Sequence: Synthetic peptide
RGHVCHQCD

SEQ ID NO: 20848 - protein, 9 aa, Artificial Sequence
  Description of Artificial Sequence: Synthetic peptide
RGRPEQGQQ

SEQ ID NO: 20849 - protein, 9 aa, Artificial Sequence
  Description of Artificial Sequence: Synthetic peptide
RGRPQEGQQ

SEQ ID NO: 20850 - protein, 9 aa, Artificial Sequence
  Description of Artificial Sequence: Synthetic peptide
RGRPQQGEQ

SEQ ID NO: 20851 - protein, 9 aa, Artificial Sequence
  Description of Artificial Sequence: Synthetic peptide
RGRPQQGKQ

SEQ ID NO: 20852 - protein, 9 aa, Artificial Sequence
  Description of Artificial Sequence: Synthetic peptide
RGRPQQGQR

SEQ ID NO: 20853 - protein, 9 aa, Artificial Sequence
  Description of Artificial Sequence: Synthetic peptide
RGRSQQGQQ

SEQ ID NO: 20854 - protein, 9 aa, Artificial Sequence
  Description of Artificial Sequence: Synthetic peptide
RHFLAWSEI

SEQ ID NO: 20855 - protein, 9 aa, Artificial Sequence
  Description of Artificial Sequence: Synthetic peptide
RHIDFFFGG

SEQ ID NO: 20856 - protein, 9 aa, Artificial Sequence
  Description of Artificial Sequence: Synthetic peptide
RHNDYETHN

SEQ ID NO: 20857 - protein, 9 aa, Artificial Sequence
  Description of Artificial Sequence: Synthetic peptide
RHRWSWSES

SEQ ID NO: 20858 - protein, 9 aa, Artificial Sequence
  Description of Artificial Sequence: Synthetic peptide
RHSDYETHN

SEQ ID NO: 20859 - protein, 9 aa, Artificial Sequence
  Description of Artificial Sequence: Synthetic peptide
RHTDYETHT

SEQ ID NO: 20860 - protein, 9 aa, Artificial Sequence
  Description of Artificial Sequence: Synthetic peptide
RHWWGAACV

SEQ ID NO: 20861 - protein, 9 aa, Artificial Sequence
  Description of Artificial Sequence: Synthetic peptide
RIDHNGGWF

SEQ ID NO: 20862 - protein, 9 aa, Artificial Sequence
  Description of Artificial Sequence: Synthetic peptide
RIGHNGGGF

SEQ ID NO: 20863 - protein, 9 aa, Artificial Sequence
  Description of Artificial Sequence: Synthetic peptide
RIRLWPFEG

SEQ ID NO: 20864 - protein, 9 aa, Artificial Sequence
  Description of Artificial Sequence: Synthetic peptide
RIWNVTKMM

SEQ ID NO: 20865 - protein, 9 aa, Artificial Sequence
  Description of Artificial Sequence: Synthetic peptide
RKPVEWHWE

SEQ ID NO: 20866 - protein, 9 aa, Artificial Sequence
  Description of Artificial Sequence: Synthetic peptide
RLDLFIGRT

SEQ ID NO: 20867 - protein, 9 aa, Artificial Sequence
  Description of Artificial Sequence: Synthetic peptide
RLGLFMGRT

SEQ ID NO: 20868 - protein, 9 aa, Artificial Sequence
  Description of Artificial Sequence: Synthetic peptide
RLINDWIAP

SEQ ID NO: 20869 - protein, 9 aa, Artificial Sequence
  Description of Artificial Sequence: Synthetic peptide
RLINDWIFP

SEQ ID NO: 20870 - protein, 9 aa, Artificial Sequence
  Description of Artificial Sequence: Synthetic peptide
RLINDWIST

SEQ ID NO: 20871 - protein, 9 aa, Artificial Sequence
  Description of Artificial Sequence: Synthetic peptide
RLNCLENHS

SEQ ID NO: 20872 - protein, 9 aa, Artificial Sequence
  Description of Artificial Sequence: Synthetic peptide
RLNNDWISP

SEQ ID NO: 20873 - protein, 9 aa, Artificial Sequence
  Description of Artificial Sequence: Synthetic peptide
RLNSLDNHS

SEQ ID NO: 20874 - protein, 9 aa, Artificial Sequence
  Description of Artificial Sequence: Synthetic peptide
RLSNDWISP

SEQ ID NO: 20875 - protein, 9 aa, Artificial Sequence
  Description of Artificial Sequence: Synthetic peptide
RLVNDWISP

SEQ ID NO: 20876 - protein, 9 aa, Artificial Sequence
  Description of Artificial Sequence: Synthetic peptide
RMGSKEQED

SEQ ID NO: 20877 - protein, 9 aa, Artificial Sequence
  Description of Artificial Sequence: Synthetic peptide
RMQCLTYCD

SEQ ID NO: 20878 - protein, 9 aa, Artificial Sequence
  Description of Artificial Sequence: Synthetic peptide
RNPISVCSV

SEQ ID NO: 20879 - protein, 9 aa, Artificial Sequence
  Description of Artificial Sequence: Synthetic peptide
RNPVDWHWE

SEQ ID NO: 20880 - protein, 9 aa, Artificial Sequence
  Description of Artificial Sequence: Synthetic peptide
RNPVEWHWK

SEQ ID NO: 20881 - protein, 9 aa, Artificial Sequence
  Description of Artificial Sequence: Synthetic peptide
RNPVEWNWE

SEQ ID NO: 20882 - protein, 9 aa, Artificial Sequence
  Description of Artificial Sequence: Synthetic peptide
RPHVCHQCD

SEQ ID NO: 20883 - protein, 9 aa, Artificial Sequence
  Description of Artificial Sequence: Synthetic peptide
RPWYHENDG

SEQ ID NO: 20884 - protein, 9 aa, Artificial Sequence
  Description of Artificial Sequence: Synthetic peptide
RPWYHEYGG

SEQ ID NO: 20885 - protein, 9 aa, Artificial Sequence
  Description of Artificial Sequence: Synthetic peptide
RRPNAHVDC

SEQ ID NO: 20886 - protein, 9 aa, Artificial Sequence
  Description of Artificial Sequence: Synthetic peptide
RSDVCDNYD

SEQ ID NO: 20887 - protein, 9 aa, Artificial Sequence
  Description of Artificial Sequence: Synthetic peptide
RSHVCHQCD

SEQ ID NO: 20888 - protein, 9 aa, Artificial Sequence
  Description of Artificial Sequence: Synthetic peptide
RSMERWGYD

SEQ ID NO: 20889 - protein, 9 aa, Artificial Sequence
  Description of Artificial Sequence: Synthetic peptide
RTDAQIGWQ

SEQ ID NO: 20890 - protein, 9 aa, Artificial Sequence
  Description of Artificial Sequence: Synthetic peptide
RTDELIGWQ

SEQ ID NO: 20891 - protein, 9 aa, Artificial Sequence
  Description of Artificial Sequence: Synthetic peptide
RTDEQIGWR

SEQ ID NO: 20892 - protein, 9 aa, Artificial Sequence
  Description of Artificial Sequence: Synthetic peptide
RTDQQIGWQ

SEQ ID NO: 20893 - protein, 9 aa, Artificial Sequence
  Description of Artificial Sequence: Synthetic peptide
RVGCLNVWG

SEQ ID NO: 20894 - protein, 9 aa, Artificial Sequence
  Description of Artificial Sequence: Synthetic peptide
RVHVCHQCD

SEQ ID NO: 20895 - protein, 9 aa, Artificial Sequence
  Description of Artificial Sequence: Synthetic peptide
RVMMDWQPD

SEQ ID NO: 20896 - protein, 9 aa, Artificial Sequence
  Description of Artificial Sequence: Synthetic peptide
RWICCYRDP

SEQ ID NO: 20897 - protein, 9 aa, Artificial Sequence
  Description of Artificial Sequence: Synthetic peptide
RYADMMSEY

SEQ ID NO: 20898 - protein, 9 aa, Artificial Sequence
  Description of Artificial Sequence: Synthetic peptide
RYCLAWSEI

SEQ ID NO: 20899 - protein, 9 aa, Artificial Sequence
  Description of Artificial Sequence: Synthetic peptide
RYFFAWSEI

SEQ ID NO: 20900 - protein, 9 aa, Artificial Sequence
  Description of Artificial Sequence: Synthetic peptide
RYFLAWIEI

SEQ ID NO: 20901 - protein, 9 aa, Artificial Sequence
  Description of Artificial Sequence: Synthetic peptide
RYFLAWSAI

SEQ ID NO: 20902 - protein, 9 aa, Artificial Sequence
  Description of Artificial Sequence: Synthetic peptide
RYFLAWSES

SEQ ID NO: 20903 - protein, 9 aa, Artificial Sequence
  Description of Artificial Sequence: Synthetic peptide
RYFLAWTEI

SEQ ID NO: 20904 - protein, 9 aa, Artificial Sequence
  Description of Artificial Sequence: Synthetic peptide
RYFLDWSEI

SEQ ID NO: 20905 - protein, 9 aa, Artificial Sequence
  Description of Artificial Sequence: Synthetic peptide
RYFSAWSEI

SEQ ID NO: 20906 - protein, 9 aa, Artificial Sequence
  Description of Artificial Sequence: Synthetic peptide
RYFWAWSEI

SEQ ID NO: 20907 - protein, 9 aa, Artificial Sequence
  Description of Artificial Sequence: Synthetic peptide
RYILAWSEI

SEQ ID NO: 20908 - protein, 9 aa, Artificial Sequence
  Description of Artificial Sequence: Synthetic peptide
RYVLAWSEI

SEQ ID NO: 20909 - protein, 9 aa, Artificial Sequence
  Description of Artificial Sequence: Synthetic peptide
SAPRLIEDR

SEQ ID NO: 20910 - protein, 9 aa, Artificial Sequence
  Description of Artificial Sequence: Synthetic peptide
SCDRCAPED

SEQ ID NO: 20911 - protein, 9 aa, Artificial Sequence
  Description of Artificial Sequence: Synthetic peptide
SCHTDDAKP

SEQ ID NO: 20912 - protein, 9 aa, Artificial Sequence
  Description of Artificial Sequence: Synthetic peptide
SCKFDHMPP

SEQ ID NO: 20913 - protein, 9 aa, Artificial Sequence
  Description of Artificial Sequence: Synthetic peptide
SCKLAHMPP

SEQ ID NO: 20914 - protein, 9 aa, Artificial Sequence
  Description of Artificial Sequence: Synthetic peptide
SCKLDHMAP

SEQ ID NO: 20915 - protein, 9 aa, Artificial Sequence
  Description of Artificial Sequence: Synthetic peptide
SCKLDHMSP

SEQ ID NO: 20916 - protein, 9 aa, Artificial Sequence
  Description of Artificial Sequence: Synthetic peptide
SCKWDHMPP

SEQ ID NO: 20917 - protein, 9 aa, Artificial Sequence
  Description of Artificial Sequence: Synthetic peptide
SCNPEDSIV

SEQ ID NO: 20918 - protein, 9 aa, Artificial Sequence
  Description of Artificial Sequence: Synthetic peptide
SCNPEGSIG

SEQ ID NO: 20919 - protein, 9 aa, Artificial Sequence
  Description of Artificial Sequence: Synthetic peptide
SDDGDHCTI

SEQ ID NO: 20920 - protein, 9 aa, Artificial Sequence
  Description of Artificial Sequence: Synthetic peptide
SDDGYDIFG

SEQ ID NO: 20921 - protein, 9 aa, Artificial Sequence
  Description of Artificial Sequence: Synthetic peptide
SDHGMHRDG

SEQ ID NO: 20922 - protein, 9 aa, Artificial Sequence
  Description of Artificial Sequence: Synthetic peptide
SDMCWYQDP

SEQ ID NO: 20923 - protein, 9 aa, Artificial Sequence
  Description of Artificial Sequence: Synthetic peptide
SDMGWYQDP

SEQ ID NO: 20924 - protein, 9 aa, Artificial Sequence
  Description of Artificial Sequence: Synthetic peptide
SDMSWYQDP

SEQ ID NO: 20925 - protein, 9 aa, Artificial Sequence
  Description of Artificial Sequence: Synthetic peptide
SDMWCYQDP

SEQ ID NO: 20926 - protein, 9 aa, Artificial Sequence
  Description of Artificial Sequence: Synthetic peptide
SDMWGYQDP

SEQ ID NO: 20927 - protein, 9 aa, Artificial Sequence
  Description of Artificial Sequence: Synthetic peptide
SDMWLYQDP

SEQ ID NO: 20928 - protein, 9 aa, Artificial Sequence
  Description of Artificial Sequence: Synthetic peptide
SDMWWHQDP

SEQ ID NO: 20929 - protein, 9 aa, Artificial Sequence
  Description of Artificial Sequence: Synthetic peptide
SDMWWYEDP

SEQ ID NO: 20930 - protein, 9 aa, Artificial Sequence
  Description of Artificial Sequence: Synthetic peptide
SDMWWYKDP

SEQ ID NO: 20931 - protein, 9 aa, Artificial Sequence
  Description of Artificial Sequence: Synthetic peptide
SDMWWYPDP

SEQ ID NO: 20932 - protein, 9 aa, Artificial Sequence
  Description of Artificial Sequence: Synthetic peptide
SDMWWYQAP

SEQ ID NO: 20933 - protein, 9 aa, Artificial Sequence
  Description of Artificial Sequence: Synthetic peptide
SDMWWYQDA

SEQ ID NO: 20934 - protein, 9 aa, Artificial Sequence
  Description of Artificial Sequence: Synthetic peptide
SDMWWYQDH

SEQ ID NO: 20935 - protein, 9 aa, Artificial Sequence
  Description of Artificial Sequence: Synthetic peptide
SDMWWYQDR

SEQ ID NO: 20936 - protein, 9 aa, Artificial Sequence
  Description of Artificial Sequence: Synthetic peptide
SDMWWYQDT

SEQ ID NO: 20937 - protein, 9 aa, Artificial Sequence
  Description of Artificial Sequence: Synthetic peptide
SDMWWYQHP

SEQ ID NO: 20938 - protein, 9 aa, Artificial Sequence
  Description of Artificial Sequence: Synthetic peptide
SDMWWYQVP

SEQ ID NO: 20939 - protein, 9 aa, Artificial Sequence
  Description of Artificial Sequence: Synthetic peptide
SDMWWYQYP

SEQ ID NO: 20940 - protein, 9 aa, Artificial Sequence
  Description of Artificial Sequence: Synthetic peptide
SDMWWYRDP

SEQ ID NO: 20941 - protein, 9 aa, Artificial Sequence
  Description of Artificial Sequence: Synthetic peptide
SDTWWYQDP

SEQ ID NO: 20942 - protein, 9 aa, Artificial Sequence
  Description of Artificial Sequence: Synthetic peptide
SECCSIFSS

SEQ ID NO: 20943 - protein, 9 aa, Artificial Sequence
  Description of Artificial Sequence: Synthetic peptide
SEGEHQCKA

SEQ ID NO: 20944 - protein, 9 aa, Artificial Sequence
  Description of Artificial Sequence: Synthetic peptide
SEMWWYQDP

SEQ ID NO: 20945 - protein, 9 aa, Artificial Sequence
  Description of Artificial Sequence: Synthetic peptide
SFWGPDVWG

SEQ ID NO: 20946 - protein, 9 aa, Artificial Sequence
  Description of Artificial Sequence: Synthetic peptide
SGLKNDDRK

SEQ ID NO: 20947 - protein, 9 aa, Artificial Sequence
  Description of Artificial Sequence: Synthetic peptide
SGMWWYQDP

SEQ ID NO: 20948 - protein, 9 aa, Artificial Sequence
  Description of Artificial Sequence: Synthetic peptide
SMLCNRVCE

SEQ ID NO: 20949 - protein, 9 aa, Artificial Sequence
  Description of Artificial Sequence: Synthetic peptide
SNCCSCKAN

SEQ ID NO: 20950 - protein, 9 aa, Artificial Sequence
  Description of Artificial Sequence: Synthetic peptide
SNDCNLFDL

SEQ ID NO: 20951 - protein, 9 aa, Artificial Sequence
  Description of Artificial Sequence: Synthetic peptide
SNDCSLCDL

SEQ ID NO: 20952 - protein, 9 aa, Artificial Sequence
  Description of Artificial Sequence: Synthetic peptide
SNMWWYQDP

SEQ ID NO: 20953 - protein, 9 aa, Artificial Sequence
  Description of Artificial Sequence: Synthetic peptide
SNNCNLCDL

SEQ ID NO: 20954 - protein, 9 aa, Artificial Sequence
  Description of Artificial Sequence: Synthetic peptide
SPFQQDARA

SEQ ID NO: 20955 - protein, 9 aa, Artificial Sequence
  Description of Artificial Sequence: Synthetic peptide
SSGSHDFMG

SEQ ID NO: 20956 - protein, 9 aa, Artificial Sequence
  Description of Artificial Sequence: Synthetic peptide
SVFDNAFNN

SEQ ID NO: 20957 - protein, 9 aa, Artificial Sequence
  Description of Artificial Sequence: Synthetic peptide
SVFDNGFDN

SEQ ID NO: 20958 - protein, 9 aa, Artificial Sequence
  Description of Artificial Sequence: Synthetic peptide
SVLPDWGDS

SEQ ID NO: 20959 - protein, 9 aa, Artificial Sequence
  Description of Artificial Sequence: Synthetic peptide
SVPRLIEDG

SEQ ID NO: 20960 - protein, 9 aa, Artificial Sequence
  Description of Artificial Sequence: Synthetic peptide
SWKLDHMPP

SEQ ID NO: 20961 - protein, 9 aa, Artificial Sequence
  Description of Artificial Sequence: Synthetic peptide
TCKLDHMPP

SEQ ID NO: 20962 - protein, 9 aa, Artificial Sequence
  Description of Artificial Sequence: Synthetic peptide
TCNPEDSIG

SEQ ID NO: 20963 - protein, 9 aa, Artificial Sequence
  Description of Artificial Sequence: Synthetic peptide
TCSELPERI

SEQ ID NO: 20964 - protein, 9 aa, Artificial Sequence
  Description of Artificial Sequence: Synthetic peptide
TCVELPERI

SEQ ID NO: 20965 - protein, 9 aa, Artificial Sequence
  Description of Artificial Sequence: Synthetic peptide
TDHNREHIS

SEQ ID NO: 20966 - protein, 9 aa, Artificial Sequence
  Description of Artificial Sequence: Synthetic peptide
TDHNREHMI

SEQ ID NO: 20967 - protein, 9 aa, Artificial Sequence
  Description of Artificial Sequence: Synthetic peptide
TDIDKQRDK

SEQ ID NO: 20968 - protein, 9 aa, Artificial Sequence
  Description of Artificial Sequence: Synthetic peptide
TDVGDYWHA

SEQ ID NO: 20969 - protein, 9 aa, Artificial Sequence
  Description of Artificial Sequence: Synthetic peptide
TDVMLAEWT

SEQ ID NO: 20970 - protein, 9 aa, Artificial Sequence
  Description of Artificial Sequence: Synthetic peptide
TENDIGCAT

SEQ ID NO: 20971 - protein, 9 aa, Artificial Sequence
  Description of Artificial Sequence: Synthetic peptide
TGGWMFFWH

SEQ ID NO: 20972 - protein, 9 aa, Artificial Sequence
  Description of Artificial Sequence: Synthetic peptide
TGIDMAMEL

SEQ ID NO: 20973 - protein, 9 aa, Artificial Sequence
  Description of Artificial Sequence: Synthetic peptide
TGLDFYRWF

SEQ ID NO: 20974 - protein, 9 aa, Artificial Sequence
  Description of Artificial Sequence: Synthetic peptide
THNDIGCAT

SEQ ID NO: 20975 - protein, 9 aa, Artificial Sequence
  Description of Artificial Sequence: Synthetic peptide
TKLNIRDRW

SEQ ID NO: 20976 - protein, 9 aa, Artificial Sequence
  Description of Artificial Sequence: Synthetic peptide
TKTGNNVMH

SEQ ID NO: 20977 - protein, 9 aa, Artificial Sequence
  Description of Artificial Sequence: Synthetic peptide
TKWNNLHIS

SEQ ID NO: 20978 - protein, 9 aa, Artificial Sequence
  Description of Artificial Sequence: Synthetic peptide
TMLCNRVCE

SEQ ID NO: 20979 - protein, 9 aa, Artificial Sequence
  Description of Artificial Sequence: Synthetic peptide
TMPMPPVAD

SEQ ID NO: 20980 - protein, 9 aa, Artificial Sequence
  Description of Artificial Sequence: Synthetic peptide
TNCCSCKAN

SEQ ID NO: 20981 - protein, 9 aa, Artificial Sequence
  Description of Artificial Sequence: Synthetic peptide
TNGFDKYID

SEQ ID NO: 20982 - protein, 9 aa, Artificial Sequence
  Description of Artificial Sequence: Synthetic peptide
TNIDGLWPI

SEQ ID NO: 20983 - protein, 9 aa, Artificial Sequence
  Description of Artificial Sequence: Synthetic peptide
TNNNDRFQV

SEQ ID NO: 20984 - protein, 9 aa, Artificial Sequence
  Description of Artificial Sequence: Synthetic peptide
TNNVSEFMP

SEQ ID NO: 20985 - protein, 9 aa, Artificial Sequence
  Description of Artificial Sequence: Synthetic peptide
TRLNDEDRG

SEQ ID NO: 20986 - protein, 9 aa, Artificial Sequence
  Description of Artificial Sequence: Synthetic peptide
TSGSHDFMG

SEQ ID NO: 20987 - protein, 9 aa, Artificial Sequence
  Description of Artificial Sequence: Synthetic peptide
TSMERWGYD

SEQ ID NO: 20988 - protein, 9 aa, Artificial Sequence
  Description of Artificial Sequence: Synthetic peptide
TSPADHKWR

SEQ ID NO: 20989 - protein, 9 aa, Artificial Sequence
  Description of Artificial Sequence: Synthetic peptide
TSSADHKWR

SEQ ID NO: 20990 - protein, 9 aa, Artificial Sequence
  Description of Artificial Sequence: Synthetic peptide
TSTNDRFQV

SEQ ID NO: 20991 - protein, 9 aa, Artificial Sequence
  Description of Artificial Sequence: Synthetic peptide
TTLNLRDRW

SEQ ID NO: 20992 - protein, 9 aa, Artificial Sequence
  Description of Artificial Sequence: Synthetic peptide
TTMNIRDRW

SEQ ID NO: 20993 - protein, 9 aa, Artificial Sequence
  Description of Artificial Sequence: Synthetic peptide
TTMRGFYHC

SEQ ID NO: 20994 - protein, 9 aa, Artificial Sequence
  Description of Artificial Sequence: Synthetic peptide
TTTGNNVLH

SEQ ID NO: 20995 - protein, 9 aa, Artificial Sequence
  Description of Artificial Sequence: Synthetic peptide
TTWNNLHII

SEQ ID NO: 20996 - protein, 9 aa, Artificial Sequence
  Description of Artificial Sequence: Synthetic peptide
TYITKMDLV

SEQ ID NO: 20997 - protein, 9 aa, Artificial Sequence
  Description of Artificial Sequence: Synthetic peptide
VCDRCAPED

SEQ ID NO: 20998 - protein, 9 aa, Artificial Sequence
  Description of Artificial Sequence: Synthetic peptide
VEQLCIEWD

SEQ ID NO: 20999 - protein, 9 aa, Artificial Sequence
  Description of Artificial Sequence: Synthetic peptide
VERLCIEWV

SEQ ID NO: 21000 - protein, 9 aa, Artificial Sequence
  Description of Artificial Sequence: Synthetic peptide
VESNCIDDV

SEQ ID NO: 21001 - protein, 9 aa, Artificial Sequence
  Description of Artificial Sequence: Synthetic peptide
VFQWINYYM

SEQ ID NO: 21002 - protein, 9 aa, Artificial Sequence
  Description of Artificial Sequence: Synthetic peptide
VGTDQTMHM

SEQ ID NO: 21003 - protein, 9 aa, Artificial Sequence
  Description of Artificial Sequence: Synthetic peptide
VHCELGQHS

SEQ ID NO: 21004 - protein, 9 aa, Artificial Sequence
  Description of Artificial Sequence: Synthetic peptide
VHISNMEGD

SEQ ID NO: 21005 - protein, 9 aa, Artificial Sequence
  Description of Artificial Sequence: Synthetic peptide
VLGQWIGYV

SEQ ID NO: 21006 - protein, 9 aa, Artificial Sequence
  Description of Artificial Sequence: Synthetic peptide
VLGRWISYV

SEQ ID NO: 21007 - protein, 9 aa, Artificial Sequence
  Description of Artificial Sequence: Synthetic peptide
VMEITNLWH

SEQ ID NO: 21008 - protein, 9 aa, Artificial Sequence
  Description of Artificial Sequence: Synthetic peptide
VMGITHLWH

SEQ ID NO: 21009 - protein, 9 aa, Artificial Sequence
  Description of Artificial Sequence: Synthetic peptide
VNCCSCKAN

SEQ ID NO: 21010 - protein, 9 aa, Artificial Sequence
  Description of Artificial Sequence: Synthetic peptide
VNVHNWRCS

SEQ ID NO: 21011 - protein, 9 aa, Artificial Sequence
  Description of Artificial Sequence: Synthetic peptide
VPHNFEFYT

SEQ ID NO: 21012 - protein, 9 aa, Artificial Sequence
  Description of Artificial Sequence: Synthetic peptide
VSADKCNLN

SEQ ID NO: 21013 - protein, 9 aa, Artificial Sequence
  Description of Artificial Sequence: Synthetic peptide
VSAGKCNVN

SEQ ID NO: 21014 - protein, 9 aa, Artificial Sequence
  Description of Artificial Sequence: Synthetic peptide
VSCEDEGIL

SEQ ID NO: 21015 - protein, 9 aa, Artificial Sequence
  Description of Artificial Sequence: Synthetic peptide
VSQNQNCFK

SEQ ID NO: 21016 - protein, 9 aa, Artificial Sequence
  Description of Artificial Sequence: Synthetic peptide
VTKWDRWHD

SEQ ID NO: 21017 - protein, 9 aa, Artificial Sequence
  Description of Artificial Sequence: Synthetic peptide
VWKSDRVMM

SEQ ID NO: 21018 - protein, 9 aa, Artificial Sequence
  Description of Artificial Sequence: Synthetic peptide
VYRPNWEFH

SEQ ID NO: 21019 - protein, 9 aa, Artificial Sequence
  Description of Artificial Sequence: Synthetic peptide
VYRQFFEGI

SEQ ID NO: 21020 - protein, 9 aa, Artificial Sequence
  Description of Artificial Sequence: Synthetic peptide
VYTVNDGCV

SEQ ID NO: 21021 - protein, 9 aa, Artificial Sequence
  Description of Artificial Sequence: Synthetic peptide
WEDSMFCQY

SEQ ID NO: 21022 - protein, 9 aa, Artificial Sequence
  Description of Artificial Sequence: Synthetic peptide
WEHSMFCKY

SEQ ID NO: 21023 - protein, 9 aa, Artificial Sequence
  Description of Artificial Sequence: Synthetic peptide
WEHSMFCRY

SEQ ID NO: 21024 - protein, 9 aa, Artificial Sequence
  Description of Artificial Sequence: Synthetic peptide
WELSMFCQY

SEQ ID NO: 21025 - protein, 9 aa, Artificial Sequence
  Description of Artificial Sequence: Synthetic peptide
WLYIWEKWP

SEQ ID NO: 21026 - protein, 9 aa, Artificial Sequence
  Description of Artificial Sequence: Synthetic peptide
WLYTWEKWT

SEQ ID NO: 21027 - protein, 9 aa, Artificial Sequence
  Description of Artificial Sequence: Synthetic peptide
WLYTWGKWP

SEQ ID NO: 21028 - protein, 9 aa, Artificial Sequence
  Description of Artificial Sequence: Synthetic peptide
WLYTWVKWP

SEQ ID NO: 21029 - protein, 9 aa, Artificial Sequence
  Description of Artificial Sequence: Synthetic peptide
WNPSNMFNI

SEQ ID NO: 21030 - protein, 9 aa, Artificial Sequence
  Description of Artificial Sequence: Synthetic peptide
WRKAIPYVM

SEQ ID NO: 21031 - protein, 9 aa, Artificial Sequence
  Description of Artificial Sequence: Synthetic peptide
WRKGITYVM

SEQ ID NO: 21032 - protein, 9 aa, Artificial Sequence
  Description of Artificial Sequence: Synthetic peptide
WRKGTPYVM

SEQ ID NO: 21033 - protein, 9 aa, Artificial Sequence
  Description of Artificial Sequence: Synthetic peptide
WRKGVPYVM

SEQ ID NO: 21034 - protein, 9 aa, Artificial Sequence
  Description of Artificial Sequence: Synthetic peptide
WRKVIPYVM

SEQ ID NO: 21035 - protein, 9 aa, Artificial Sequence
  Description of Artificial Sequence: Synthetic peptide
WRQGIPYVM

SEQ ID NO: 21036 - protein, 9 aa, Artificial Sequence
  Description of Artificial Sequence: Synthetic peptide
WRRGIPYVM

SEQ ID NO: 21037 - protein, 9 aa, Artificial Sequence
  Description of Artificial Sequence: Synthetic peptide
WVVNFIRQV

SEQ ID NO: 21038 - protein, 9 aa, Artificial Sequence
  Description of Artificial Sequence: Synthetic peptide
WWIIEEHFK

SEQ ID NO: 21039 - protein, 9 aa, Artificial Sequence
  Description of Artificial Sequence: Synthetic peptide
WWIIEEHGK

SEQ ID NO: 21040 - protein, 9 aa, Artificial Sequence
  Description of Artificial Sequence: Synthetic peptide
WWVIEEHCK

SEQ ID NO: 21041 - protein, 9 aa, Artificial Sequence
  Description of Artificial Sequence: Synthetic peptide
WYFLAWSEI

SEQ ID NO: 21042 - protein, 9 aa, Artificial Sequence
  Description of Artificial Sequence: Synthetic peptide
YALKNDDRK

SEQ ID NO: 21043 - protein, 9 aa, Artificial Sequence
  Description of Artificial Sequence: Synthetic peptide
YCHEYDEIV

SEQ ID NO: 21044 - protein, 9 aa, Artificial Sequence
  Description of Artificial Sequence: Synthetic peptide
YCIFEYNGR

SEQ ID NO: 21045 - protein, 9 aa, Artificial Sequence
  Description of Artificial Sequence: Synthetic peptide
YCIGCVDAI

SEQ ID NO: 21046 - protein, 9 aa, Artificial Sequence
  Description of Artificial Sequence: Synthetic peptide
YCLKNDDRK

SEQ ID NO: 21047 - protein, 9 aa, Artificial Sequence
  Description of Artificial Sequence: Synthetic peptide
YCNEFDEIV

SEQ ID NO: 21048 - protein, 9 aa, Artificial Sequence
  Description of Artificial Sequence: Synthetic peptide
YCNEYDEII

SEQ ID NO: 21049 - protein, 9 aa, Artificial Sequence
  Description of Artificial Sequence: Synthetic peptide
YCPAANWNW

SEQ ID NO: 21050 - protein, 9 aa, Artificial Sequence
  Description of Artificial Sequence: Synthetic peptide
YCPEANWNL

SEQ ID NO: 21051 - protein, 9 aa, Artificial Sequence
  Description of Artificial Sequence: Synthetic peptide
YCPEANWSW

SEQ ID NO: 21052 - protein, 9 aa, Artificial Sequence
  Description of Artificial Sequence: Synthetic peptide
YCPEASWNW

SEQ ID NO: 21053 - protein, 9 aa, Artificial Sequence
  Description of Artificial Sequence: Synthetic peptide
YCPETNWNW

SEQ ID NO: 21054 - protein, 9 aa, Artificial Sequence
  Description of Artificial Sequence: Synthetic peptide
YCPGCGLMW

SEQ ID NO: 21055 - protein, 9 aa, Artificial Sequence
  Description of Artificial Sequence: Synthetic peptide
YCPVANWNW

SEQ ID NO: 21056 - protein, 9 aa, Artificial Sequence
  Description of Artificial Sequence: Synthetic peptide
YCREANWNW

SEQ ID NO: 21057 - protein, 9 aa, Artificial Sequence
  Description of Artificial Sequence: Synthetic peptide
YCTEYDEIV

SEQ ID NO: 21058 - protein, 9 aa, Artificial Sequence
  Description of Artificial Sequence: Synthetic peptide
YDHGMHRAG

SEQ ID NO: 21059 - protein, 9 aa, Artificial Sequence
  Description of Artificial Sequence: Synthetic peptide
YDHGMHRDA

SEQ ID NO: 21060 - protein, 9 aa, Artificial Sequence
  Description of Artificial Sequence: Synthetic peptide
YDHGMHRYG

SEQ ID NO: 21061 - protein, 9 aa, Artificial Sequence
  Description of Artificial Sequence: Synthetic peptide
YDHGWKMAC

SEQ ID NO: 21062 - protein, 9 aa, Artificial Sequence
  Description of Artificial Sequence: Synthetic peptide
YDIHPRFFH

SEQ ID NO: 21063 - protein, 9 aa, Artificial Sequence
  Description of Artificial Sequence: Synthetic peptide
YDLCEHRWD

SEQ ID NO: 21064 - protein, 9 aa, Artificial Sequence
  Description of Artificial Sequence: Synthetic peptide
YDPGMHRDG

SEQ ID NO: 21065 - protein, 9 aa, Artificial Sequence
  Description of Artificial Sequence: Synthetic peptide
YEWSWAEHS

SEQ ID NO: 21066 - protein, 9 aa, Artificial Sequence
  Description of Artificial Sequence: Synthetic peptide
YFCVNRHIA

SEQ ID NO: 21067 - protein, 9 aa, Artificial Sequence
  Description of Artificial Sequence: Synthetic peptide
YFIFPENED

SEQ ID NO: 21068 - protein, 9 aa, Artificial Sequence
  Description of Artificial Sequence: Synthetic peptide
YGIIMKIDL

SEQ ID NO: 21069 - protein, 9 aa, Artificial Sequence
  Description of Artificial Sequence: Synthetic peptide
YGIRLKIDL

SEQ ID NO: 21070 - protein, 9 aa, Artificial Sequence
  Description of Artificial Sequence: Synthetic peptide
YGIRNGKIG

SEQ ID NO: 21071 - protein, 9 aa, Artificial Sequence
  Description of Artificial Sequence: Synthetic peptide
YGKISTIIN

SEQ ID NO: 21072 - protein, 9 aa, Artificial Sequence
  Description of Artificial Sequence: Synthetic peptide
YGLENDDRK

SEQ ID NO: 21073 - protein, 9 aa, Artificial Sequence
  Description of Artificial Sequence: Synthetic peptide
YGLKDDDRK

SEQ ID NO: 21074 - protein, 9 aa, Artificial Sequence
  Description of Artificial Sequence: Synthetic peptide
YGLKNDARK

SEQ ID NO: 21075 - protein, 9 aa, Artificial Sequence
  Description of Artificial Sequence: Synthetic peptide
YGLKNDDCK

SEQ ID NO: 21076 - protein, 9 aa, Artificial Sequence
  Description of Artificial Sequence: Synthetic peptide
YGLKNDDRE

SEQ ID NO: 21077 - protein, 9 aa, Artificial Sequence
  Description of Artificial Sequence: Synthetic peptide
YGLKNDDRR

SEQ ID NO: 21078 - protein, 9 aa, Artificial Sequence
  Description of Artificial Sequence: Synthetic peptide
YGLKNDDSK

SEQ ID NO: 21079 - protein, 9 aa, Artificial Sequence
  Description of Artificial Sequence: Synthetic peptide
YGLKNDGRK

SEQ ID NO: 21080 - protein, 9 aa, Artificial Sequence
  Description of Artificial Sequence: Synthetic peptide
YGLKNDNRK

SEQ ID NO: 21081 - protein, 9 aa, Artificial Sequence
  Description of Artificial Sequence: Synthetic peptide
YGLKNDYRK

SEQ ID NO: 21082 - protein, 9 aa, Artificial Sequence
  Description of Artificial Sequence: Synthetic peptide
YGLMNDDRK

SEQ ID NO: 21083 - protein, 9 aa, Artificial Sequence
  Description of Artificial Sequence: Synthetic peptide
YGLQNDDRK

SEQ ID NO: 21084 - protein, 9 aa, Artificial Sequence
  Description of Artificial Sequence: Synthetic peptide
YGMKNDDRK

SEQ ID NO: 21085 - protein, 9 aa, Artificial Sequence
  Description of Artificial Sequence: Synthetic peptide
YGMKNDDRR

SEQ ID NO: 21086 - protein, 9 aa, Artificial Sequence
  Description of Artificial Sequence: Synthetic peptide
YGRKNDDRK

SEQ ID NO: 21087 - protein, 9 aa, Artificial Sequence
  Description of Artificial Sequence: Synthetic peptide
YGVGYLMPA

SEQ ID NO: 21088 - protein, 9 aa, Artificial Sequence
  Description of Artificial Sequence: Synthetic peptide
YGVKNDDRK

SEQ ID NO: 21089 - protein, 9 aa, Artificial Sequence
  Description of Artificial Sequence: Synthetic peptide
YHLIAIGPS

SEQ ID NO: 21090 - protein, 9 aa, Artificial Sequence
  Description of Artificial Sequence: Synthetic peptide
YHLIAIWPP

SEQ ID NO: 21091 - protein, 9 aa, Artificial Sequence
  Description of Artificial Sequence: Synthetic peptide
YHLIAKWPS

SEQ ID NO: 21092 - protein, 9 aa, Artificial Sequence
  Description of Artificial Sequence: Synthetic peptide
YHLIDIWPS

SEQ ID NO: 21093 - protein, 9 aa, Artificial Sequence
  Description of Artificial Sequence: Synthetic peptide
YHPGCDCAC

SEQ ID NO: 21094 - protein, 9 aa, Artificial Sequence
  Description of Artificial Sequence: Synthetic peptide
YLVGYLMPA

SEQ ID NO: 21095 - protein, 9 aa, Artificial Sequence
  Description of Artificial Sequence: Synthetic peptide
YMKHFKNPS

SEQ ID NO: 21096 - protein, 9 aa, Artificial Sequence
  Description of Artificial Sequence: Synthetic peptide
YMKHFRDPS

SEQ ID NO: 21097 - protein, 9 aa, Artificial Sequence
  Description of Artificial Sequence: Synthetic peptide
YMKHFRNAS

SEQ ID NO: 21098 - protein, 9 aa, Artificial Sequence
  Description of Artificial Sequence: Synthetic peptide
YMKHFRNSS

SEQ ID NO: 21099 - protein, 9 aa, Artificial Sequence
  Description of Artificial Sequence: Synthetic peptide
YMKHIRNPS

SEQ ID NO: 21100 - protein, 9 aa, Artificial Sequence
  Description of Artificial Sequence: Synthetic peptide
YMKHVRNPS

SEQ ID NO: 21101 - protein, 9 aa, Artificial Sequence
  Description of Artificial Sequence: Synthetic peptide
YMKNFRNPS

SEQ ID NO: 21102 - protein, 9 aa, Artificial Sequence
  Description of Artificial Sequence: Synthetic peptide
YMKQFRNPS

SEQ ID NO: 21103 - protein, 9 aa, Artificial Sequence
  Description of Artificial Sequence: Synthetic peptide
YMKRFRNPS

SEQ ID NO: 21104 - protein, 9 aa, Artificial Sequence
  Description of Artificial Sequence: Synthetic peptide
YMMHFRNPS

SEQ ID NO: 21105 - protein, 9 aa, Artificial Sequence
  Description of Artificial Sequence: Synthetic peptide
YMRHFRNPS

SEQ ID NO: 21106 - protein, 9 aa, Artificial Sequence
  Description of Artificial Sequence: Synthetic peptide
YNISIMEAG

SEQ ID NO: 21107 - protein, 9 aa, Artificial Sequence
  Description of Artificial Sequence: Synthetic peptide
YQPGCDCSC

SEQ ID NO: 21108 - protein, 9 aa, Artificial Sequence
  Description of Artificial Sequence: Synthetic peptide
YQPGCDCTC

SEQ ID NO: 21109 - protein, 9 aa, Artificial Sequence
  Description of Artificial Sequence: Synthetic peptide
YSENRDHFV

SEQ ID NO: 21110 - protein, 9 aa, Artificial Sequence
  Description of Artificial Sequence: Synthetic peptide
YSERKGEYG

SEQ ID NO: 21111 - protein, 9 aa, Artificial Sequence
  Description of Artificial Sequence: Synthetic peptide
YTFGLRVDD

SEQ ID NO: 21112 - protein, 9 aa, Artificial Sequence
  Description of Artificial Sequence: Synthetic peptide
YTNVDGFPI

SEQ ID NO: 21113 - protein, 9 aa, Artificial Sequence
  Description of Artificial Sequence: Synthetic peptide
YTPGNNVTR

SEQ ID NO: 21114 - protein, 9 aa, Artificial Sequence
  Description of Artificial Sequence: Synthetic peptide
YVFDNAFDN

SEQ ID NO: 21115 - protein, 9 aa, Artificial Sequence
  Description of Artificial Sequence: Synthetic peptide
YVKISTVIN

SEQ ID NO: 21116 - protein, 9 aa, Artificial Sequence
  Description of Artificial Sequence: Synthetic peptide
YVLKNDDRK

SEQ ID NO: 21117 - protein, 9 aa, Artificial Sequence
  Description of Artificial Sequence: Synthetic peptide
YWNEYDEIV

SEQ ID NO: 21118 - protein, 9 aa, Artificial Sequence
  Description of Artificial Sequence: Synthetic peptide
AVDCHNSWI

SEQ ID NO: 21119 - protein, 9 aa, Artificial Sequence
  Description of Artificial Sequence: Synthetic peptide
VQQYHITQE

SEQ ID NO: 21120 - protein, 9 aa, Artificial Sequence
  Description of Artificial Sequence: Synthetic peptide
AAAKWDDVW

SEQ ID NO: 21121 - protein, 9 aa, Artificial Sequence
  Description of Artificial Sequence: Synthetic peptide
AACKEKRNN

SEQ ID NO: 21122 - protein, 9 aa, Artificial Sequence
  Description of Artificial Sequence: Synthetic peptide
AACTMAVAR

SEQ ID NO: 21123 - protein, 9 aa, Artificial Sequence
  Description of Artificial Sequence: Synthetic peptide
AACYDVNKA

SEQ ID NO: 21124 - protein, 9 aa, Artificial Sequence
  Description of Artificial Sequence: Synthetic peptide
AADLKGYIG

SEQ ID NO: 21125 - protein, 9 aa, Artificial Sequence
  Description of Artificial Sequence: Synthetic peptide
AAELNSSQS

SEQ ID NO: 21126 - protein, 9 aa, Artificial Sequence
  Description of Artificial Sequence: Synthetic peptide
AAENCQCPF

SEQ ID NO: 21127 - protein, 9 aa, Artificial Sequence
  Description of Artificial Sequence: Synthetic peptide
AAEWKVGQA

SEQ ID NO: 21128 - protein, 9 aa, Artificial Sequence
  Description of Artificial Sequence: Synthetic peptide
AAGEEWSAL

SEQ ID NO: 21129 - protein, 9 aa, Artificial Sequence
  Description of Artificial Sequence: Synthetic peptide
AAMSCADAS

SEQ ID NO: 21130 - protein, 9 aa, Artificial Sequence
  Description of Artificial Sequence: Synthetic peptide
AANESTHDC

SEQ ID NO: 21131 - protein, 9 aa, Artificial Sequence
  Description of Artificial Sequence: Synthetic peptide
AAPYLTGRD

SEQ ID NO: 21132 - protein, 9 aa, Artificial Sequence
  Description of Artificial Sequence: Synthetic peptide
AASPITVLK

SEQ ID NO: 21133 - protein, 9 aa, Artificial Sequence
  Description of Artificial Sequence: Synthetic peptide
AASQMMNHG

SEQ ID NO: 21134 - protein, 9 aa, Artificial Sequence
  Description of Artificial Sequence: Synthetic peptide
AATMNGQCM

SEQ ID NO: 21135 - protein, 9 aa, Artificial Sequence
  Description of Artificial Sequence: Synthetic peptide
AAVGYFHTS

SEQ ID NO: 21136 - protein, 9 aa, Artificial Sequence
  Description of Artificial Sequence: Synthetic peptide
AAVMESFWR

SEQ ID NO: 21137 - protein, 9 aa, Artificial Sequence
  Description of Artificial Sequence: Synthetic peptide
AAVMSLCTV

SEQ ID NO: 21138 - protein, 9 aa, Artificial Sequence
  Description of Artificial Sequence: Synthetic peptide
ACATTNFYD

SEQ ID NO: 21139 - protein, 9 aa, Artificial Sequence
  Description of Artificial Sequence: Synthetic peptide
ACDPSHKHQ

SEQ ID NO: 21140 - protein, 9 aa, Artificial Sequence
  Description of Artificial Sequence: Synthetic peptide
ACDPYSINF

SEQ ID NO: 21141 - protein, 9 aa, Artificial Sequence
  Description of Artificial Sequence: Synthetic peptide
ACETWQWRE

SEQ ID NO: 21142 - protein, 9 aa, Artificial Sequence
  Description of Artificial Sequence: Synthetic peptide
ACEWWFNKE

SEQ ID NO: 21143 - protein, 9 aa, Artificial Sequence
  Description of Artificial Sequence: Synthetic peptide
ACIMQMTQD

SEQ ID NO: 21144 - protein, 9 aa, Artificial Sequence
  Description of Artificial Sequence: Synthetic peptide
ACKLLDSHL

SEQ ID NO: 21145 - protein, 9 aa, Artificial Sequence
  Description of Artificial Sequence: Synthetic peptide
ACMPICMSA

SEQ ID NO: 21146 - protein, 9 aa, Artificial Sequence
  Description of Artificial Sequence: Synthetic peptide
ACTYRMTWH

SEQ ID NO: 21147 - protein, 9 aa, Artificial Sequence
  Description of Artificial Sequence: Synthetic peptide
ACVDLVVDK

SEQ ID NO: 21148 - protein, 9 aa, Artificial Sequence
  Description of Artificial Sequence: Synthetic peptide
ACVKHLYDW

SEQ ID NO: 21149 - protein, 9 aa, Artificial Sequence
  Description of Artificial Sequence: Synthetic peptide
ADAWETPYP

SEQ ID NO: 21150 - protein, 9 aa, Artificial Sequence
  Description of Artificial Sequence: Synthetic peptide
ADCHTQNVA

SEQ ID NO: 21151 - protein, 9 aa, Artificial Sequence
  Description of Artificial Sequence: Synthetic peptide
ADCRYNLAC

SEQ ID NO: 21152 - protein, 9 aa, Artificial Sequence
  Description of Artificial Sequence: Synthetic peptide
ADCSDQMSQ

SEQ ID NO: 21153 - protein, 9 aa, Artificial Sequence
  Description of Artificial Sequence: Synthetic peptide
ADFDGILWY

SEQ ID NO: 21154 - protein, 9 aa, Artificial Sequence
  Description of Artificial Sequence: Synthetic peptide
ADIQFARMP

SEQ ID NO: 21155 - protein, 9 aa, Artificial Sequence
  Description of Artificial Sequence: Synthetic peptide
ADLDINQYW

SEQ ID NO: 21156 - protein, 9 aa, Artificial Sequence
  Description of Artificial Sequence: Synthetic peptide
ADLHKRHNW

SEQ ID NO: 21157 - protein, 9 aa, Artificial Sequence
  Description of Artificial Sequence: Synthetic peptide
ADNLTPHQW

SEQ ID NO: 21158 - protein, 9 aa, Artificial Sequence
  Description of Artificial Sequence: Synthetic peptide
AEHKWPEEL

SEQ ID NO: 21159 - protein, 9 aa, Artificial Sequence
  Description of Artificial Sequence: Synthetic peptide
AEQFVDVAG

SEQ ID NO: 21160 - protein, 9 aa, Artificial Sequence
  Description of Artificial Sequence: Synthetic peptide
AESPVAYQQ

SEQ ID NO: 21161 - protein, 9 aa, Artificial Sequence
  Description of Artificial Sequence: Synthetic peptide
AEWVEQAVH

SEQ ID NO: 21162 - protein, 9 aa, Artificial Sequence
  Description of Artificial Sequence: Synthetic peptide
AFEHQYCHL

SEQ ID NO: 21163 - protein, 9 aa, Artificial Sequence
  Description of Artificial Sequence: Synthetic peptide
AFEIVHGAN

SEQ ID NO: 21164 - protein, 9 aa, Artificial Sequence
  Description of Artificial Sequence: Synthetic peptide
AFETLRNVK

SEQ ID NO: 21165 - protein, 9 aa, Artificial Sequence
  Description of Artificial Sequence: Synthetic peptide
AFGEFVILA

SEQ ID NO: 21166 - protein, 9 aa, Artificial Sequence
  Description of Artificial Sequence: Synthetic peptide
AFGHFPGIG

SEQ ID NO: 21167 - protein, 9 aa, Artificial Sequence
  Description of Artificial Sequence: Synthetic peptide
AFHMMEKWE

SEQ ID NO: 21168 - protein, 9 aa, Artificial Sequence
  Description of Artificial Sequence: Synthetic peptide
AFISKWVHP

SEQ ID NO: 21169 - protein, 9 aa, Artificial Sequence
  Description of Artificial Sequence: Synthetic peptide
AFITQVPWY

SEQ ID NO: 21170 - protein, 9 aa, Artificial Sequence
  Description of Artificial Sequence: Synthetic peptide
AFMNTYVAD

SEQ ID NO: 21171 - protein, 9 aa, Artificial Sequence
  Description of Artificial Sequence: Synthetic peptide
AFMPWMHTY

SEQ ID NO: 21172 - protein, 9 aa, Artificial Sequence
  Description of Artificial Sequence: Synthetic peptide
AFMQTICDM

SEQ ID NO: 21173 - protein, 9 aa, Artificial Sequence
  Description of Artificial Sequence: Synthetic peptide
AFQYSNQAH

SEQ ID NO: 21174 - protein, 9 aa, Artificial Sequence
  Description of Artificial Sequence: Synthetic peptide
AFRDISKMI

SEQ ID NO: 21175 - protein, 9 aa, Artificial Sequence
  Description of Artificial Sequence: Synthetic peptide
AFRLLGYSY

SEQ ID NO: 21176 - protein, 9 aa, Artificial Sequence
  Description of Artificial Sequence: Synthetic peptide
AFRNFTHCP

SEQ ID NO: 21177 - protein, 9 aa, Artificial Sequence
  Description of Artificial Sequence: Synthetic peptide
AFSLNNCTH

SEQ ID NO: 21178 - protein, 9 aa, Artificial Sequence
  Description of Artificial Sequence: Synthetic peptide
AFTCCGYEN

SEQ ID NO: 21179 - protein, 9 aa, Artificial Sequence
  Description of Artificial Sequence: Synthetic peptide
AGDQKYVGC

SEQ ID NO: 21180 - protein, 9 aa, Artificial Sequence
  Description of Artificial Sequence: Synthetic peptide
AGEEYTTDF

SEQ ID NO: 21181 - protein, 9 aa, Artificial Sequence
  Description of Artificial Sequence: Synthetic peptide
AGEITKSMF

SEQ ID NO: 21182 - protein, 9 aa, Artificial Sequence
  Description of Artificial Sequence: Synthetic peptide
AGHRDRAET

SEQ ID NO: 21183 - protein, 9 aa, Artificial Sequence
  Description of Artificial Sequence: Synthetic peptide
AGLYLTNED

SEQ ID NO: 21184 - protein, 9 aa, Artificial Sequence
  Description of Artificial Sequence: Synthetic peptide
AGNAMDFCF

SEQ ID NO: 21185 - protein, 9 aa, Artificial Sequence
  Description of Artificial Sequence: Synthetic peptide
AGNEVQTMP

SEQ ID NO: 21186 - protein, 9 aa, Artificial Sequence
  Description of Artificial Sequence: Synthetic peptide
AGQYKLIFW

SEQ ID NO: 21187 - protein, 9 aa, Artificial Sequence
  Description of Artificial Sequence: Synthetic peptide
AGYCSQWRF

SEQ ID NO: 21188 - protein, 9 aa, Artificial Sequence
  Description of Artificial Sequence: Synthetic peptide
AHAECKFWS

SEQ ID NO: 21189 - protein, 9 aa, Artificial Sequence
  Description of Artificial Sequence: Synthetic peptide
AHAKWWDYQ

SEQ ID NO: 21190 - protein, 9 aa, Artificial Sequence
  Description of Artificial Sequence: Synthetic peptide
AHALNEWYA

SEQ ID NO: 21191 - protein, 9 aa, Artificial Sequence
  Description of Artificial Sequence: Synthetic peptide
AHAMVVNQG

SEQ ID NO: 21192 - protein, 9 aa, Artificial Sequence
  Description of Artificial Sequence: Synthetic peptide
AHCYVLRHE

SEQ ID NO: 21193 - protein, 9 aa, Artificial Sequence
  Description of Artificial Sequence: Synthetic peptide
AHELSYSLP

SEQ ID NO: 21194 - protein, 9 aa, Artificial Sequence
  Description of Artificial Sequence: Synthetic peptide
AHFDYDIFW

SEQ ID NO: 21195 - protein, 9 aa, Artificial Sequence
  Description of Artificial Sequence: Synthetic peptide
AHGLFMCMN

SEQ ID NO: 21196 - protein, 9 aa, Artificial Sequence
  Description of Artificial Sequence: Synthetic peptide
AHHEVCWQH

SEQ ID NO: 21197 - protein, 9 aa, Artificial Sequence
  Description of Artificial Sequence: Synthetic peptide
AHHLQICHT

SEQ ID NO: 21198 - protein, 9 aa, Artificial Sequence
  Description of Artificial Sequence: Synthetic peptide
AHLWVQGSH

SEQ ID NO: 21199 - protein, 9 aa, Artificial Sequence
  Description of Artificial Sequence: Synthetic peptide
AHMHTHAIM

SEQ ID NO: 21200 - protein, 9 aa, Artificial Sequence
  Description of Artificial Sequence: Synthetic peptide
AHNQINDNL

SEQ ID NO: 21201 - protein, 9 aa, Artificial Sequence
  Description of Artificial Sequence: Synthetic peptide
AHPHFEENG

SEQ ID NO: 21202 - protein, 9 aa, Artificial Sequence
  Description of Artificial Sequence: Synthetic peptide
AHSWWHRAE

SEQ ID NO: 21203 - protein, 9 aa, Artificial Sequence
  Description of Artificial Sequence: Synthetic peptide
AIAECIGFT

SEQ ID NO: 21204 - protein, 9 aa, Artificial Sequence
  Description of Artificial Sequence: Synthetic peptide
AICQLLGDF

SEQ ID NO: 21205 - protein, 9 aa, Artificial Sequence
  Description of Artificial Sequence: Synthetic peptide
AIEPKEDWM

SEQ ID NO: 21206 - protein, 9 aa, Artificial Sequence
  Description of Artificial Sequence: Synthetic peptide
AIGHGENYR

SEQ ID NO: 21207 - protein, 9 aa, Artificial Sequence
  Description of Artificial Sequence: Synthetic peptide
AIHETIAGT

SEQ ID NO: 21208 - protein, 9 aa, Artificial Sequence
  Description of Artificial Sequence: Synthetic peptide
AIHYLWQDQ

SEQ ID NO: 21209 - protein, 9 aa, Artificial Sequence
  Description of Artificial Sequence: Synthetic peptide
AIMPVRDGQ

SEQ ID NO: 21210 - protein, 9 aa, Artificial Sequence
  Description of Artificial Sequence: Synthetic peptide
AIPCEMNAN

SEQ ID NO: 21211 - protein, 9 aa, Artificial Sequence
  Description of Artificial Sequence: Synthetic peptide
AIQLSQDLM

SEQ ID NO: 21212 - protein, 9 aa, Artificial Sequence
  Description of Artificial Sequence: Synthetic peptide
AISVMHYDM

SEQ ID NO: 21213 - protein, 9 aa, Artificial Sequence
  Description of Artificial Sequence: Synthetic peptide
AITDTSCCN

SEQ ID NO: 21214 - protein, 9 aa, Artificial Sequence
  Description of Artificial Sequence: Synthetic peptide
AITTQGDFY

SEQ ID NO: 21215 - protein, 9 aa, Artificial Sequence
  Description of Artificial Sequence: Synthetic peptide
AITYQGQGV

SEQ ID NO: 21216 - protein, 9 aa, Artificial Sequence
  Description of Artificial Sequence: Synthetic peptide
AIVPITFNM

SEQ ID NO: 21217 - protein, 9 aa, Artificial Sequence
  Description of Artificial Sequence: Synthetic peptide
AIVYKNWAK

SEQ ID NO: 21218 - protein, 9 aa, Artificial Sequence
  Description of Artificial Sequence: Synthetic peptide
AIWRANEST

SEQ ID NO: 21219 - protein, 9 aa, Artificial Sequence
  Description of Artificial Sequence: Synthetic peptide
AIYSLDFEQ

SEQ ID NO: 21220 - protein, 9 aa, Artificial Sequence
  Description of Artificial Sequence: Synthetic peptide
AKFFPHTNT

SEQ ID NO: 21221 - protein, 9 aa, Artificial Sequence
  Description of Artificial Sequence: Synthetic peptide
AKGLNLDIM

SEQ ID NO: 21222 - protein, 9 aa, Artificial Sequence
  Description of Artificial Sequence: Synthetic peptide
AKHLFDAAP

SEQ ID NO: 21223 - protein, 9 aa, Artificial Sequence
  Description of Artificial Sequence: Synthetic peptide
AKHRCMSEW

SEQ ID NO: 21224 - protein, 9 aa, Artificial Sequence
  Description of Artificial Sequence: Synthetic peptide
AKMWECNPK

SEQ ID NO: 21225 - protein, 9 aa, Artificial Sequence
  Description of Artificial Sequence: Synthetic peptide
AKNSLYNYH

SEQ ID NO: 21226 - protein, 9 aa, Artificial Sequence
  Description of Artificial Sequence: Synthetic peptide
AKYWNPELQ

SEQ ID NO: 21227 - protein, 9 aa, Artificial Sequence
  Description of Artificial Sequence: Synthetic peptide
ALHWWQCLT

SEQ ID NO: 21228 - protein, 9 aa, Artificial Sequence
  Description of Artificial Sequence: Synthetic peptide
ALINQPDSA

SEQ ID NO: 21229 - protein, 9 aa, Artificial Sequence
  Description of Artificial Sequence: Synthetic peptide
ALMMYFENQ

SEQ ID NO: 21230 - protein, 9 aa, Artificial Sequence
  Description of Artificial Sequence: Synthetic peptide
ALTEQCVYG

SEQ ID NO: 21231 - protein, 9 aa, Artificial Sequence
  Description of Artificial Sequence: Synthetic peptide
ALVLWDMLH

SEQ ID NO: 21232 - protein, 9 aa, Artificial Sequence
  Description of Artificial Sequence: Synthetic peptide
AMAGPQFSA

SEQ ID NO: 21233 - protein, 9 aa, Artificial Sequence
  Description of Artificial Sequence: Synthetic peptide
AMAHKGMDA

SEQ ID NO: 21234 - protein, 9 aa, Artificial Sequence
  Description of Artificial Sequence: Synthetic peptide
AMAQPVKCA

SEQ ID NO: 21235 - protein, 9 aa, Artificial Sequence
  Description of Artificial Sequence: Synthetic peptide
AMHITQYKT

SEQ ID NO: 21236 - protein, 9 aa, Artificial Sequence
  Description of Artificial Sequence: Synthetic peptide
AMHQNIFGI

SEQ ID NO: 21237 - protein, 9 aa, Artificial Sequence
  Description of Artificial Sequence: Synthetic peptide
AMIHIAMMP

SEQ ID NO: 21238 - protein, 9 aa, Artificial Sequence
  Description of Artificial Sequence: Synthetic peptide
AMQQWVSGC

SEQ ID NO: 21239 - protein, 9 aa, Artificial Sequence
  Description of Artificial Sequence: Synthetic peptide
AMSLQYKNE

SEQ ID NO: 21240 - protein, 9 aa, Artificial Sequence
  Description of Artificial Sequence: Synthetic peptide
AMTSRGSYP

SEQ ID NO: 21241 - protein, 9 aa, Artificial Sequence
  Description of Artificial Sequence: Synthetic peptide
AMVFNMQLG

SEQ ID NO: 21242 - protein, 9 aa, Artificial Sequence
  Description of Artificial Sequence: Synthetic peptide
AMVSSWLVG

SEQ ID NO: 21243 - protein, 9 aa, Artificial Sequence
  Description of Artificial Sequence: Synthetic peptide
AMYVMYHGM

SEQ ID NO: 21244 - protein, 9 aa, Artificial Sequence
  Description of Artificial Sequence: Synthetic peptide
ANDCRGMSE

SEQ ID NO: 21245 - protein, 9 aa, Artificial Sequence
  Description of Artificial Sequence: Synthetic peptide
ANDLLTMQF

SEQ ID NO: 21246 - protein, 9 aa, Artificial Sequence
  Description of Artificial Sequence: Synthetic peptide
ANFGSHAAM

SEQ ID NO: 21247 - protein, 9 aa, Artificial Sequence
  Description of Artificial Sequence: Synthetic peptide
ANHFESSRS

SEQ ID NO: 21248 - protein, 9 aa, Artificial Sequence
  Description of Artificial Sequence: Synthetic peptide
ANHPNMLIP

SEQ ID NO: 21249 - protein, 9 aa, Artificial Sequence
  Description of Artificial Sequence: Synthetic peptide
ANMIRKGYG

SEQ ID NO: 21250 - protein, 9 aa, Artificial Sequence
  Description of Artificial Sequence: Synthetic peptide
ANSFEVCGM

SEQ ID NO: 21251 - protein, 9 aa, Artificial Sequence
  Description of Artificial Sequence: Synthetic peptide
ANSYYHQYC

SEQ ID NO: 21252 - protein, 9 aa, Artificial Sequence
  Description of Artificial Sequence: Synthetic peptide
ANVEQAMCA

SEQ ID NO: 21253 - protein, 9 aa, Artificial Sequence
  Description of Artificial Sequence: Synthetic peptide
ANVPMFRMD

SEQ ID NO: 21254 - protein, 9 aa, Artificial Sequence
  Description of Artificial Sequence: Synthetic peptide
ANYFPTKFP

SEQ ID NO: 21255 - protein, 9 aa, Artificial Sequence
  Description of Artificial Sequence: Synthetic peptide
APGCVNQLH

SEQ ID NO: 21256 - protein, 9 aa, Artificial Sequence
  Description of Artificial Sequence: Synthetic peptide
APLTSYPTL

SEQ ID NO: 21257 - protein, 9 aa, Artificial Sequence
  Description of Artificial Sequence: Synthetic peptide
APPVFYMPQ

SEQ ID NO: 21258 - protein, 9 aa, Artificial Sequence
  Description of Artificial Sequence: Synthetic peptide
APTVINMLK

SEQ ID NO: 21259 - protein, 9 aa, Artificial Sequence
  Description of Artificial Sequence: Synthetic peptide
APWQFNHQW

SEQ ID NO: 21260 - protein, 9 aa, Artificial Sequence
  Description of Artificial Sequence: Synthetic peptide
AQCPMTWSL

SEQ ID NO: 21261 - protein, 9 aa, Artificial Sequence
  Description of Artificial Sequence: Synthetic peptide
AQEVTITHE

SEQ ID NO: 21262 - protein, 9 aa, Artificial Sequence
  Description of Artificial Sequence: Synthetic peptide
AQLLLIVMA

SEQ ID NO: 21263 - protein, 9 aa, Artificial Sequence
  Description of Artificial Sequence: Synthetic peptide
AQRADWTYL

SEQ ID NO: 21264 - protein, 9 aa, Artificial Sequence
  Description of Artificial Sequence: Synthetic peptide
AQWPLHRDT

SEQ ID NO: 21265 - protein, 9 aa, Artificial Sequence
  Description of Artificial Sequence: Synthetic peptide
AQYGRNFAG

SEQ ID NO: 21266 - protein, 9 aa, Artificial Sequence
  Description of Artificial Sequence: Synthetic peptide
ARMQEPIQV

SEQ ID NO: 21267 - protein, 9 aa, Artificial Sequence
  Description of Artificial Sequence: Synthetic peptide
ARNANCPRM

SEQ ID NO: 21268 - protein, 9 aa, Artificial Sequence
  Description of Artificial Sequence: Synthetic peptide
ARQINEHQI

SEQ ID NO: 21269 - protein, 9 aa, Artificial Sequence
  Description of Artificial Sequence: Synthetic peptide
ARVDDGQMT

SEQ ID NO: 21270 - protein, 9 aa, Artificial Sequence
  Description of Artificial Sequence: Synthetic peptide
ASANNPVFF

SEQ ID NO: 21271 - protein, 9 aa, Artificial Sequence
  Description of Artificial Sequence: Synthetic peptide
ASASYEGEQ

SEQ ID NO: 21272 - protein, 9 aa, Artificial Sequence
  Description of Artificial Sequence: Synthetic peptide
ASAVAKEWD

SEQ ID NO: 21273 - protein, 9 aa, Artificial Sequence
  Description of Artificial Sequence: Synthetic peptide
ASDGIEKPC

SEQ ID NO: 21274 - protein, 9 aa, Artificial Sequence
  Description of Artificial Sequence: Synthetic peptide
ASDHLNPFV

SEQ ID NO: 21275 - protein, 9 aa, Artificial Sequence
  Description of Artificial Sequence: Synthetic peptide
ASDPWNWWP

SEQ ID NO: 21276 - protein, 9 aa, Artificial Sequence
  Description of Artificial Sequence: Synthetic peptide
ASGWIQLMC

SEQ ID NO: 21277 - protein, 9 aa, Artificial Sequence
  Description of Artificial Sequence: Synthetic peptide
ASMAYLKGI

SEQ ID NO: 21278 - protein, 9 aa, Artificial Sequence
  Description of Artificial Sequence: Synthetic peptide
ASNFHSGLY

SEQ ID NO: 21279 - protein, 9 aa, Artificial Sequence
  Description of Artificial Sequence: Synthetic peptide
ASNFVMEFP

SEQ ID NO: 21280 - protein, 9 aa, Artificial Sequence
  Description of Artificial Sequence: Synthetic peptide
ASNKICNFK

SEQ ID NO: 21281 - protein, 9 aa, Artificial Sequence
  Description of Artificial Sequence: Synthetic peptide
ASREIVKHP

SEQ ID NO: 21282 - protein, 9 aa, Artificial Sequence
  Description of Artificial Sequence: Synthetic peptide
ASTHASESQ

SEQ ID NO: 21283 - protein, 9 aa, Artificial Sequence
  Description of Artificial Sequence: Synthetic peptide
ASTSQCQFQ

SEQ ID NO: 21284 - protein, 9 aa, Artificial Sequence
  Description of Artificial Sequence: Synthetic peptide
ASTTIGQEM

SEQ ID NO: 21285 - protein, 9 aa, Artificial Sequence
  Description of Artificial Sequence: Synthetic peptide
ASVELGGYS

SEQ ID NO: 21286 - protein, 9 aa, Artificial Sequence
  Description of Artificial Sequence: Synthetic peptide
ASVKDFTVQ

SEQ ID NO: 21287 - protein, 9 aa, Artificial Sequence
  Description of Artificial Sequence: Synthetic peptide
ASYGDGPMW

SEQ ID NO: 21288 - protein, 9 aa, Artificial Sequence
  Description of Artificial Sequence: Synthetic peptide
ATAEGEDCT

SEQ ID NO: 21289 - protein, 9 aa, Artificial Sequence
  Description of Artificial Sequence: Synthetic peptide
ATECAWYHG

SEQ ID NO: 21290 - protein, 9 aa, Artificial Sequence
  Description of Artificial Sequence: Synthetic peptide
ATFICLTSI

SEQ ID NO: 21291 - protein, 9 aa, Artificial Sequence
  Description of Artificial Sequence: Synthetic peptide
ATHEYASWD

SEQ ID NO: 21292 - protein, 9 aa, Artificial Sequence
  Description of Artificial Sequence: Synthetic peptide
ATHPVMLDA

SEQ ID NO: 21293 - protein, 9 aa, Artificial Sequence
  Description of Artificial Sequence: Synthetic peptide
ATICSGWDR

SEQ ID NO: 21294 - protein, 9 aa, Artificial Sequence
  Description of Artificial Sequence: Synthetic peptide
ATIGWERYN

SEQ ID NO: 21295 - protein, 9 aa, Artificial Sequence
  Description of Artificial Sequence: Synthetic peptide
ATIMVCRFE

SEQ ID NO: 21296 - protein, 9 aa, Artificial Sequence
  Description of Artificial Sequence: Synthetic peptide
ATKELAVQW

SEQ ID NO: 21297 - protein, 9 aa, Artificial Sequence
  Description of Artificial Sequence: Synthetic peptide
ATKLDFHPT

SEQ ID NO: 21298 - protein, 9 aa, Artificial Sequence
  Description of Artificial Sequence: Synthetic peptide
ATLTFQQHH

SEQ ID NO: 21299 - protein, 9 aa, Artificial Sequence
  Description of Artificial Sequence: Synthetic peptide
ATMLRKEVW

SEQ ID NO: 21300 - protein, 9 aa, Artificial Sequence
  Description of Artificial Sequence: Synthetic peptide
ATMSPECMR

SEQ ID NO: 21301 - protein, 9 aa, Artificial Sequence
  Description of Artificial Sequence: Synthetic peptide
ATNWEGIDS

SEQ ID NO: 21302 - protein, 9 aa, Artificial Sequence
  Description of Artificial Sequence: Synthetic peptide
ATNYVTNHD

SEQ ID NO: 21303 - protein, 9 aa, Artificial Sequence
  Description of Artificial Sequence: Synthetic peptide
ATRVGGSTW

SEQ ID NO: 21304 - protein, 9 aa, Artificial Sequence
  Description of Artificial Sequence: Synthetic peptide
ATSAHSCSS

SEQ ID NO: 21305 - protein, 9 aa, Artificial Sequence
  Description of Artificial Sequence: Synthetic peptide
ATSINCNAW

SEQ ID NO: 21306 - protein, 9 aa, Artificial Sequence
  Description of Artificial Sequence: Synthetic peptide
ATVDYWQAW

SEQ ID NO: 21307 - protein, 9 aa, Artificial Sequence
  Description of Artificial Sequence: Synthetic peptide
ATWTDSWKV

SEQ ID NO: 21308 - protein, 9 aa, Artificial Sequence
  Description of Artificial Sequence: Synthetic peptide
ATYCEQYMY

SEQ ID NO: 21309 - protein, 9 aa, Artificial Sequence
  Description of Artificial Sequence: Synthetic peptide
AVAGVVWDN

SEQ ID NO: 21310 - protein, 9 aa, Artificial Sequence
  Description of Artificial Sequence: Synthetic peptide
AVAMGGQDD

SEQ ID NO: 21311 - protein, 9 aa, Artificial Sequence
  Description of Artificial Sequence: Synthetic peptide
AVANWFQHM

SEQ ID NO: 21312 - protein, 9 aa, Artificial Sequence
  Description of Artificial Sequence: Synthetic peptide
AVCEGEITP

SEQ ID NO: 21313 - protein, 9 aa, Artificial Sequence
  Description of Artificial Sequence: Synthetic peptide
AVCSKELDH

SEQ ID NO: 21314 - protein, 9 aa, Artificial Sequence
  Description of Artificial Sequence: Synthetic peptide
AVDHMAMES

SEQ ID NO: 21315 - protein, 9 aa, Artificial Sequence
  Description of Artificial Sequence: Synthetic peptide
AVDQINMEQ

SEQ ID NO: 21316 - protein, 9 aa, Artificial Sequence
  Description of Artificial Sequence: Synthetic peptide
AVELSMRAV

SEQ ID NO: 21317 - protein, 9 aa, Artificial Sequence
  Description of Artificial Sequence: Synthetic peptide
AVEPYCSML

SEQ ID NO: 21318 - protein, 9 aa, Artificial Sequence
  Description of Artificial Sequence: Synthetic peptide
AVESTAIES

SEQ ID NO: 21319 - protein, 9 aa, Artificial Sequence
  Description of Artificial Sequence: Synthetic peptide
AVFHQGSGA

SEQ ID NO: 21320 - protein, 9 aa, Artificial Sequence
  Description of Artificial Sequence: Synthetic peptide
AVITWSQYH

SEQ ID NO: 21321 - protein, 9 aa, Artificial Sequence
  Description of Artificial Sequence: Synthetic peptide
AVKPSVEPW

SEQ ID NO: 21322 - protein, 9 aa, Artificial Sequence
  Description of Artificial Sequence: Synthetic peptide
AVMPQGHYG

SEQ ID NO: 21323 - protein, 9 aa, Artificial Sequence
  Description of Artificial Sequence: Synthetic peptide
AVMTAQGWV

SEQ ID NO: 21324 - protein, 9 aa, Artificial Sequence
  Description of Artificial Sequence: Synthetic peptide
AVNPFPCQT

SEQ ID NO: 21325 - protein, 9 aa, Artificial Sequence
  Description of Artificial Sequence: Synthetic peptide
AVQSGIETC

SEQ ID NO: 21326 - protein, 9 aa, Artificial Sequence
  Description of Artificial Sequence: Synthetic peptide
AVSAAMQMD

SEQ ID NO: 21327 - protein, 9 aa, Artificial Sequence
  Description of Artificial Sequence: Synthetic peptide
AVSDKPYQH

SEQ ID NO: 21328 - protein, 9 aa, Artificial Sequence
  Description of Artificial Sequence: Synthetic peptide
AVSFYQYGC

SEQ ID NO: 21329 - protein, 9 aa, Artificial Sequence
  Description of Artificial Sequence: Synthetic peptide
AVTHKWCEE

SEQ ID NO: 21330 - protein, 9 aa, Artificial Sequence
  Description of Artificial Sequence: Synthetic peptide
AVTTLLYPI

SEQ ID NO: 21331 - protein, 9 aa, Artificial Sequence
  Description of Artificial Sequence: Synthetic peptide
AWAKDVMQC

SEQ ID NO: 21332 - protein, 9 aa, Artificial Sequence
  Description of Artificial Sequence: Synthetic peptide
AWVISQNEN

SEQ ID NO: 21333 - protein, 9 aa, Artificial Sequence
  Description of Artificial Sequence: Synthetic peptide
AYASSQDSL

SEQ ID NO: 21334 - protein, 9 aa, Artificial Sequence
  Description of Artificial Sequence: Synthetic peptide
AYENTFPNP

SEQ ID NO: 21335 - protein, 9 aa, Artificial Sequence
  Description of Artificial Sequence: Synthetic peptide
AYEPFWCWG

SEQ ID NO: 21336 - protein, 9 aa, Artificial Sequence
  Description of Artificial Sequence: Synthetic peptide
AYHHVDYHW

SEQ ID NO: 21337 - protein, 9 aa, Artificial Sequence
  Description of Artificial Sequence: Synthetic peptide
AYNQNIGTG

SEQ ID NO: 21338 - protein, 9 aa, Artificial Sequence
  Description of Artificial Sequence: Synthetic peptide
AYTDLFNQC

SEQ ID NO: 21339 - protein, 9 aa, Artificial Sequence
  Description of Artificial Sequence: Synthetic peptide
CADFMVSWG

SEQ ID NO: 21340 - protein, 9 aa, Artificial Sequence
  Description of Artificial Sequence: Synthetic peptide
CADWCNTQP

SEQ ID NO: 21341 - protein, 9 aa, Artificial Sequence
  Description of Artificial Sequence: Synthetic peptide
CADYQYQQD

SEQ ID NO: 21342 - protein, 9 aa, Artificial Sequence
  Description of Artificial Sequence: Synthetic peptide
CAIGYWEHD

SEQ ID NO: 21343 - protein, 9 aa, Artificial Sequence
  Description of Artificial Sequence: Synthetic peptide
CAMMDDRGD

SEQ ID NO: 21344 - protein, 9 aa, Artificial Sequence
  Description of Artificial Sequence: Synthetic peptide
CAQLFWLPQ

SEQ ID NO: 21345 - protein, 9 aa, Artificial Sequence
  Description of Artificial Sequence: Synthetic peptide
CASDLMENR

SEQ ID NO: 21346 - protein, 9 aa, Artificial Sequence
  Description of Artificial Sequence: Synthetic peptide
CASDSLVNG

SEQ ID NO: 21347 - protein, 9 aa, Artificial Sequence
  Description of Artificial Sequence: Synthetic peptide
CAVNWNVKE

SEQ ID NO: 21348 - protein, 9 aa, Artificial Sequence
  Description of Artificial Sequence: Synthetic peptide
CAVQFNYCV

SEQ ID NO: 21349 - protein, 9 aa, Artificial Sequence
  Description of Artificial Sequence: Synthetic peptide
CAYQAMDFF

SEQ ID NO: 21350 - protein, 9 aa, Artificial Sequence
  Description of Artificial Sequence: Synthetic peptide
CCCNRCHIY

SEQ ID NO: 21351 - protein, 9 aa, Artificial Sequence
  Description of Artificial Sequence: Synthetic peptide
CCFSTFECY

SEQ ID NO: 21352 - protein, 9 aa, Artificial Sequence
  Description of Artificial Sequence: Synthetic peptide
CCGDTRCET

SEQ ID NO: 21353 - protein, 9 aa, Artificial Sequence
  Description of Artificial Sequence: Synthetic peptide
CCGLPARLL

SEQ ID NO: 21354 - protein, 9 aa, Artificial Sequence
  Description of Artificial Sequence: Synthetic peptide
CCIRSFVCA

SEQ ID NO: 21355 - protein, 9 aa, Artificial Sequence
  Description of Artificial Sequence: Synthetic peptide
CCKTYQRAG

SEQ ID NO: 21356 - protein, 9 aa, Artificial Sequence
  Description of Artificial Sequence: Synthetic peptide
CCMTYNNQG

SEQ ID NO: 21357 - protein, 9 aa, Artificial Sequence
  Description of Artificial Sequence: Synthetic peptide
CCPGNGDIW

SEQ ID NO: 21358 - protein, 9 aa, Artificial Sequence
  Description of Artificial Sequence: Synthetic peptide
CCPMRHANF

SEQ ID NO: 21359 - protein, 9 aa, Artificial Sequence
  Description of Artificial Sequence: Synthetic peptide
CCSGNTGMY

SEQ ID NO: 21360 - protein, 9 aa, Artificial Sequence
  Description of Artificial Sequence: Synthetic peptide
CDHGCWCKG

SEQ ID NO: 21361 - protein, 9 aa, Artificial Sequence
  Description of Artificial Sequence: Synthetic peptide
CDHVVCMAP

SEQ ID NO: 21362 - protein, 9 aa, Artificial Sequence
  Description of Artificial Sequence: Synthetic peptide
CDWAAYHCW

SEQ ID NO: 21363 - protein, 9 aa, Artificial Sequence
  Description of Artificial Sequence: Synthetic peptide
CEGIQVVDF

SEQ ID NO: 21364 - protein, 9 aa, Artificial Sequence
  Description of Artificial Sequence: Synthetic peptide
CEVTINGAE

SEQ ID NO: 21365 - protein, 9 aa, Artificial Sequence
  Description of Artificial Sequence: Synthetic peptide
CFAELSNVA

SEQ ID NO: 21366 - protein, 9 aa, Artificial Sequence
  Description of Artificial Sequence: Synthetic peptide
CGDHYRKGH

SEQ ID NO: 21367 - protein, 9 aa, Artificial Sequence
  Description of Artificial Sequence: Synthetic peptide
CGHLQQFIL

SEQ ID NO: 21368 - protein, 9 aa, Artificial Sequence
  Description of Artificial Sequence: Synthetic peptide
CGIGVNMHH

SEQ ID NO: 21369 - protein, 9 aa, Artificial Sequence
  Description of Artificial Sequence: Synthetic peptide
CGIWNNNAF

SEQ ID NO: 21370 - protein, 9 aa, Artificial Sequence
  Description of Artificial Sequence: Synthetic peptide
CGRQMEDAA

SEQ ID NO: 21371 - protein, 9 aa, Artificial Sequence
  Description of Artificial Sequence: Synthetic peptide
CGTQSFIWG

SEQ ID NO: 21372 - protein, 9 aa, Artificial Sequence
  Description of Artificial Sequence: Synthetic peptide
CGWCGLSKI

SEQ ID NO: 21373 - protein, 9 aa, Artificial Sequence
  Description of Artificial Sequence: Synthetic peptide
CHAIFCRCA

SEQ ID NO: 21374 - protein, 9 aa, Artificial Sequence
  Description of Artificial Sequence: Synthetic peptide
CHDGSFNPH

SEQ ID NO: 21375 - protein, 9 aa, Artificial Sequence
  Description of Artificial Sequence: Synthetic peptide
CHGQYVTWG

SEQ ID NO: 21376 - protein, 9 aa, Artificial Sequence
  Description of Artificial Sequence: Synthetic peptide
CHHRMHRAQ

SEQ ID NO: 21377 - protein, 9 aa, Artificial Sequence
  Description of Artificial Sequence: Synthetic peptide
CHMGINRLN

SEQ ID NO: 21378 - protein, 9 aa, Artificial Sequence
  Description of Artificial Sequence: Synthetic peptide
CHSPFNHWG

SEQ ID NO: 21379 - protein, 9 aa, Artificial Sequence
  Description of Artificial Sequence: Synthetic peptide
CHWYCSKVP

SEQ ID NO: 21380 - protein, 9 aa, Artificial Sequence
  Description of Artificial Sequence: Synthetic peptide
CIDEGVSPD

SEQ ID NO: 21381 - protein, 9 aa, Artificial Sequence
  Description of Artificial Sequence: Synthetic peptide
CIETSDQER

SEQ ID NO: 21382 - protein, 9 aa, Artificial Sequence
  Description of Artificial Sequence: Synthetic peptide
CIEYTPMGR

SEQ ID NO: 21383 - protein, 9 aa, Artificial Sequence
  Description of Artificial Sequence: Synthetic peptide
CIGFYMCAG

SEQ ID NO: 21384 - protein, 9 aa, Artificial Sequence
  Description of Artificial Sequence: Synthetic peptide
CIGVINGMN

SEQ ID NO: 21385 - protein, 9 aa, Artificial Sequence
  Description of Artificial Sequence: Synthetic peptide
CIHYVQHCQ

SEQ ID NO: 21386 - protein, 9 aa, Artificial Sequence
  Description of Artificial Sequence: Synthetic peptide
CIILRSNDG

SEQ ID NO: 21387 - protein, 9 aa, Artificial Sequence
  Description of Artificial Sequence: Synthetic peptide
CILCQPHKW

SEQ ID NO: 21388 - protein, 9 aa, Artificial Sequence
  Description of Artificial Sequence: Synthetic peptide
CIWKNVPPW

SEQ ID NO: 21389 - protein, 9 aa, Artificial Sequence
  Description of Artificial Sequence: Synthetic peptide
CKDAYRSHA

SEQ ID NO: 21390 - protein, 9 aa, Artificial Sequence
  Description of Artificial Sequence: Synthetic peptide
CKFMYLMKE

SEQ ID NO: 21391 - protein, 9 aa, Artificial Sequence
  Description of Artificial Sequence: Synthetic peptide
CKLTMKRQN

SEQ ID NO: 21392 - protein, 9 aa, Artificial Sequence
  Description of Artificial Sequence: Synthetic peptide
CKSTHDMAW

SEQ ID NO: 21393 - protein, 9 aa, Artificial Sequence
  Description of Artificial Sequence: Synthetic peptide
CLHCGTFST

SEQ ID NO: 21394 - protein, 9 aa, Artificial Sequence
  Description of Artificial Sequence: Synthetic peptide
CLHCHSLQC

SEQ ID NO: 21395 - protein, 9 aa, Artificial Sequence
  Description of Artificial Sequence: Synthetic peptide
CLMLQSHHT

SEQ ID NO: 21396 - protein, 9 aa, Artificial Sequence
  Description of Artificial Sequence: Synthetic peptide
CLRAVDNCF

SEQ ID NO: 21397 - protein, 9 aa, Artificial Sequence
  Description of Artificial Sequence: Synthetic peptide
CMQSESMYC

SEQ ID NO: 21398 - protein, 9 aa, Artificial Sequence
  Description of Artificial Sequence: Synthetic peptide
CNATWGVFA

SEQ ID NO: 21399 - protein, 9 aa, Artificial Sequence
  Description of Artificial Sequence: Synthetic peptide
CNAVKNNDM

SEQ ID NO: 21400 - protein, 9 aa, Artificial Sequence
  Description of Artificial Sequence: Synthetic peptide
CNEVYTLIH

SEQ ID NO: 21401 - protein, 9 aa, Artificial Sequence
  Description of Artificial Sequence: Synthetic peptide
CNNNYTNWA

SEQ ID NO: 21402 - protein, 9 aa, Artificial Sequence
  Description of Artificial Sequence: Synthetic peptide
CNNYSMVHR

SEQ ID NO: 21403 - protein, 9 aa, Artificial Sequence
  Description of Artificial Sequence: Synthetic peptide
CNRLHDTWT

SEQ ID NO: 21404 - protein, 9 aa, Artificial Sequence
  Description of Artificial Sequence: Synthetic peptide
CNRSEIQFR

SEQ ID NO: 21405 - protein, 9 aa, Artificial Sequence
  Description of Artificial Sequence: Synthetic peptide
CNVFRDPYL

SEQ ID NO: 21406 - protein, 9 aa, Artificial Sequence
  Description of Artificial Sequence: Synthetic peptide
CPCFYINYP

SEQ ID NO: 21407 - protein, 9 aa, Artificial Sequence
  Description of Artificial Sequence: Synthetic peptide
CPETRHVVH

SEQ ID NO: 21408 - protein, 9 aa, Artificial Sequence
  Description of Artificial Sequence: Synthetic peptide
CPKDCRIVI

SEQ ID NO: 21409 - protein, 9 aa, Artificial Sequence
  Description of Artificial Sequence: Synthetic peptide
CPLSWIQQE

SEQ ID NO: 21410 - protein, 9 aa, Artificial Sequence
  Description of Artificial Sequence: Synthetic peptide
CPQPSNRTW

SEQ ID NO: 21411 - protein, 9 aa, Artificial Sequence
  Description of Artificial Sequence: Synthetic peptide
CPQQIQHYN

SEQ ID NO: 21412 - protein, 9 aa, Artificial Sequence
  Description of Artificial Sequence: Synthetic peptide
CPTEVREKK

SEQ ID NO: 21413 - protein, 9 aa, Artificial Sequence
  Description of Artificial Sequence: Synthetic peptide
CQGFGVPWD

SEQ ID NO: 21414 - protein, 9 aa, Artificial Sequence
  Description of Artificial Sequence: Synthetic peptide
CQHLHTSYW

SEQ ID NO: 21415 - protein, 9 aa, Artificial Sequence
  Description of Artificial Sequence: Synthetic peptide
CQKALMQLG

SEQ ID NO: 21416 - protein, 9 aa, Artificial Sequence
  Description of Artificial Sequence: Synthetic peptide
CQTCLQFCD

SEQ ID NO: 21417 - protein, 9 aa, Artificial Sequence
  Description of Artificial Sequence: Synthetic peptide
CQVEFQMTT

SEQ ID NO: 21418 - protein, 9 aa, Artificial Sequence
  Description of Artificial Sequence: Synthetic peptide
CRDHYDRSC

SEQ ID NO: 21419 - protein, 9 aa, Artificial Sequence
  Description of Artificial Sequence: Synthetic peptide
CRFEHQYNC

SEQ ID NO: 21420 - protein, 9 aa, Artificial Sequence
  Description of Artificial Sequence: Synthetic peptide
CRKLQSIEA

SEQ ID NO: 21421 - protein, 9 aa, Artificial Sequence
  Description of Artificial Sequence: Synthetic peptide
CRTNGHYYM

SEQ ID NO: 21422 - protein, 9 aa, Artificial Sequence
  Description of Artificial Sequence: Synthetic peptide
CRVEPVDSD

SEQ ID NO: 21423 - protein, 9 aa, Artificial Sequence
  Description of Artificial Sequence: Synthetic peptide
CSACTPFSK

SEQ ID NO: 21424 - protein, 9 aa, Artificial Sequence
  Description of Artificial Sequence: Synthetic peptide
CSADMNSMP

SEQ ID NO: 21425 - protein, 9 aa, Artificial Sequence
  Description of Artificial Sequence: Synthetic peptide
CSADMQQDI

SEQ ID NO: 21426 - protein, 9 aa, Artificial Sequence
  Description of Artificial Sequence: Synthetic peptide
CSDASHHFG

SEQ ID NO: 21427 - protein, 9 aa, Artificial Sequence
  Description of Artificial Sequence: Synthetic peptide
CSEAEGDWY

SEQ ID NO: 21428 - protein, 9 aa, Artificial Sequence
  Description of Artificial Sequence: Synthetic peptide
CSFNVMNTA

SEQ ID NO: 21429 - protein, 9 aa, Artificial Sequence
  Description of Artificial Sequence: Synthetic peptide
CSKPDCQWD

SEQ ID NO: 21430 - protein, 9 aa, Artificial Sequence
  Description of Artificial Sequence: Synthetic peptide
CSMQNNRMY

SEQ ID NO: 21431 - protein, 9 aa, Artificial Sequence
  Description of Artificial Sequence: Synthetic peptide
CSMYYCWTG

SEQ ID NO: 21432 - protein, 9 aa, Artificial Sequence
  Description of Artificial Sequence: Synthetic peptide
CSNSQDFGA

SEQ ID NO: 21433 - protein, 9 aa, Artificial Sequence
  Description of Artificial Sequence: Synthetic peptide
CSTEMQMNC

SEQ ID NO: 21434 - protein, 9 aa, Artificial Sequence
  Description of Artificial Sequence: Synthetic peptide
CSYQRTEYF

SEQ ID NO: 21435 - protein, 9 aa, Artificial Sequence
  Description of Artificial Sequence: Synthetic peptide
CTATPEIIH

SEQ ID NO: 21436 - protein, 9 aa, Artificial Sequence
  Description of Artificial Sequence: Synthetic peptide
CTEININQG

SEQ ID NO: 21437 - protein, 9 aa, Artificial Sequence
  Description of Artificial Sequence: Synthetic peptide
CTFVRELQC

SEQ ID NO: 21438 - protein, 9 aa, Artificial Sequence
  Description of Artificial Sequence: Synthetic peptide
CTGDVDQSE

SEQ ID NO: 21439 - protein, 9 aa, Artificial Sequence
  Description of Artificial Sequence: Synthetic peptide
CTGLAQHWW

SEQ ID NO: 21440 - protein, 9 aa, Artificial Sequence
  Description of Artificial Sequence: Synthetic peptide
CTGQRHASP

SEQ ID NO: 21441 - protein, 9 aa, Artificial Sequence
  Description of Artificial Sequence: Synthetic peptide
CTHHYMEQH

SEQ ID NO: 21442 - protein, 9 aa, Artificial Sequence
  Description of Artificial Sequence: Synthetic peptide
CTKHMDGQA

SEQ ID NO: 21443 - protein, 9 aa, Artificial Sequence
  Description of Artificial Sequence: Synthetic peptide
CTNDWCRSD

SEQ ID NO: 21444 - protein, 9 aa, Artificial Sequence
  Description of Artificial Sequence: Synthetic peptide
CTNLISSYC

SEQ ID NO: 21445 - protein, 9 aa, Artificial Sequence
  Description of Artificial Sequence: Synthetic peptide
CTQVIEECP

SEQ ID NO: 21446 - protein, 9 aa, Artificial Sequence
  Description of Artificial Sequence: Synthetic peptide
CTTYQDEMN

SEQ ID NO: 21447 - protein, 9 aa, Artificial Sequence
  Description of Artificial Sequence: Synthetic peptide
CTWWIPLVY

SEQ ID NO: 21448 - protein, 9 aa, Artificial Sequence
  Description of Artificial Sequence: Synthetic peptide
CTYTELQYM

SEQ ID NO: 21449 - protein, 9 aa, Artificial Sequence
  Description of Artificial Sequence: Synthetic peptide
CVDQLSLGH

SEQ ID NO: 21450 - protein, 9 aa, Artificial Sequence
  Description of Artificial Sequence: Synthetic peptide
CVHAISCVG

SEQ ID NO: 21451 - protein, 9 aa, Artificial Sequence
  Description of Artificial Sequence: Synthetic peptide
CVIGRWLYM

SEQ ID NO: 21452 - protein, 9 aa, Artificial Sequence
  Description of Artificial Sequence: Synthetic peptide
CVISMAYQW

SEQ ID NO: 21453 - protein, 9 aa, Artificial Sequence
  Description of Artificial Sequence: Synthetic peptide
CVLKYNHHY

SEQ ID NO: 21454 - protein, 9 aa, Artificial Sequence
  Description of Artificial Sequence: Synthetic peptide
CVMMQAGGE

SEQ ID NO: 21455 - protein, 9 aa, Artificial Sequence
  Description of Artificial Sequence: Synthetic peptide
CVSYSGQHD

SEQ ID NO: 21456 - protein, 9 aa, Artificial Sequence
  Description of Artificial Sequence: Synthetic peptide
CVVNAHQMR

SEQ ID NO: 21457 - protein, 9 aa, Artificial Sequence
  Description of Artificial Sequence: Synthetic peptide
CVVRAQSAM

SEQ ID NO: 21458 - protein, 9 aa, Artificial Sequence
  Description of Artificial Sequence: Synthetic peptide
CVVTMSMSD

SEQ ID NO: 21459 - protein, 9 aa, Artificial Sequence
  Description of Artificial Sequence: Synthetic peptide
CWMFPDYWN

SEQ ID NO: 21460 - protein, 9 aa, Artificial Sequence
  Description of Artificial Sequence: Synthetic peptide
CWMSFSAYE

SEQ ID NO: 21461 - protein, 9 aa, Artificial Sequence
  Description of Artificial Sequence: Synthetic peptide
CYESTEGEH

SEQ ID NO: 21462 - protein, 9 aa, Artificial Sequence
  Description of Artificial Sequence: Synthetic peptide
CYHEYCCNM

SEQ ID NO: 21463 - protein, 9 aa, Artificial Sequence
  Description of Artificial Sequence: Synthetic peptide
CYKYGPPSQ

SEQ ID NO: 21464 - protein, 9 aa, Artificial Sequence
  Description of Artificial Sequence: Synthetic peptide
CYMVFMFKA

SEQ ID NO: 21465 - protein, 9 aa, Artificial Sequence
  Description of Artificial Sequence: Synthetic peptide
CYQDIEAGY

SEQ ID NO: 21466 - protein, 9 aa, Artificial Sequence
  Description of Artificial Sequence: Synthetic peptide
CYQFKKLTN

SEQ ID NO: 21467 - protein, 9 aa, Artificial Sequence
  Description of Artificial Sequence: Synthetic peptide
CYQSEKNGY

SEQ ID NO: 21468 - protein, 9 aa, Artificial Sequence
  Description of Artificial Sequence: Synthetic peptide
CYSGVAMAS

SEQ ID NO: 21469 - protein, 9 aa, Artificial Sequence
  Description of Artificial Sequence: Synthetic peptide
CYVTKSWDH

SEQ ID NO: 21470 - protein, 9 aa, Artificial Sequence
  Description of Artificial Sequence: Synthetic peptide
CYWFMYKPK

SEQ ID NO: 21471 - protein, 9 aa, Artificial Sequence
  Description of Artificial Sequence: Synthetic peptide
DAAQTIQYP

SEQ ID NO: 21472 - protein, 9 aa, Artificial Sequence
  Description of Artificial Sequence: Synthetic peptide
DAAYSNWFF

SEQ ID NO: 21473 - protein, 9 aa, Artificial Sequence
  Description of Artificial Sequence: Synthetic peptide
DACKFSSNI

SEQ ID NO: 21474 - protein, 9 aa, Artificial Sequence
  Description of Artificial Sequence: Synthetic peptide
DADEPWLDR

SEQ ID NO: 21475 - protein, 9 aa, Artificial Sequence
  Description of Artificial Sequence: Synthetic peptide
DADRAIMHE

SEQ ID NO: 21476 - protein, 9 aa, Artificial Sequence
  Description of Artificial Sequence: Synthetic peptide
DAEDCHTHK

SEQ ID NO: 21477 - protein, 9 aa, Artificial Sequence
  Description of Artificial Sequence: Synthetic peptide
DAEGQVCYM

SEQ ID NO: 21478 - protein, 9 aa, Artificial Sequence
  Description of Artificial Sequence: Synthetic peptide
DAETVDSQF

SEQ ID NO: 21479 - protein, 9 aa, Artificial Sequence
  Description of Artificial Sequence: Synthetic peptide
DAFLIQELC

SEQ ID NO: 21480 - protein, 9 aa, Artificial Sequence
  Description of Artificial Sequence: Synthetic peptide
DAGKPQYSI

SEQ ID NO: 21481 - protein, 9 aa, Artificial Sequence
  Description of Artificial Sequence: Synthetic peptide
DAHDYDSNF

SEQ ID NO: 21482 - protein, 9 aa, Artificial Sequence
  Description of Artificial Sequence: Synthetic peptide
DAHNYWGWQ

SEQ ID NO: 21483 - protein, 9 aa, Artificial Sequence
  Description of Artificial Sequence: Synthetic peptide
DAHWVFKTN

SEQ ID NO: 21484 - protein, 9 aa, Artificial Sequence
  Description of Artificial Sequence: Synthetic peptide
DAIPYKQPT

SEQ ID NO: 21485 - protein, 9 aa, Artificial Sequence
  Description of Artificial Sequence: Synthetic peptide
DAKFCGQGH

SEQ ID NO: 21486 - protein, 9 aa, Artificial Sequence
  Description of Artificial Sequence: Synthetic peptide
DALYEMGTT

SEQ ID NO: 21487 - protein, 9 aa, Artificial Sequence
  Description of Artificial Sequence: Synthetic peptide
DAMPSDRWW

SEQ ID NO: 21488 - protein, 9 aa, Artificial Sequence
  Description of Artificial Sequence: Synthetic peptide
DANFTMMTD

SEQ ID NO: 21489 - protein, 9 aa, Artificial Sequence
  Description of Artificial Sequence: Synthetic peptide
DANNKKYHV

SEQ ID NO: 21490 - protein, 9 aa, Artificial Sequence
  Description of Artificial Sequence: Synthetic peptide
DARHYFGLQ

SEQ ID NO: 21491 - protein, 9 aa, Artificial Sequence
  Description of Artificial Sequence: Synthetic peptide
DARPDYEMQ

SEQ ID NO: 21492 - protein, 9 aa, Artificial Sequence
  Description of Artificial Sequence: Synthetic peptide
DARTIVLTH

SEQ ID NO: 21493 - protein, 9 aa, Artificial Sequence
  Description of Artificial Sequence: Synthetic peptide
DASDCCYSY

SEQ ID NO: 21494 - protein, 9 aa, Artificial Sequence
  Description of Artificial Sequence: Synthetic peptide
DASLWSVPM

SEQ ID NO: 21495 - protein, 9 aa, Artificial Sequence
  Description of Artificial Sequence: Synthetic peptide
DASMHGTVP

SEQ ID NO: 21496 - protein, 9 aa, Artificial Sequence
  Description of Artificial Sequence: Synthetic peptide
DASPTRLVY

SEQ ID NO: 21497 - protein, 9 aa, Artificial Sequence
  Description of Artificial Sequence: Synthetic peptide
DASVNRVIE

SEQ ID NO: 21498 - protein, 9 aa, Artificial Sequence
  Description of Artificial Sequence: Synthetic peptide
DATKIPMQQ

SEQ ID NO: 21499 - protein, 9 aa, Artificial Sequence
  Description of Artificial Sequence: Synthetic peptide
DATQNHFQY

SEQ ID NO: 21500 - protein, 9 aa, Artificial Sequence
  Description of Artificial Sequence: Synthetic peptide
DAVDVAMAM

SEQ ID NO: 21501 - protein, 9 aa, Artificial Sequence
  Description of Artificial Sequence: Synthetic peptide
DAVYYLFQA

SEQ ID NO: 21502 - protein, 9 aa, Artificial Sequence
  Description of Artificial Sequence: Synthetic peptide
DAWHSTCNS

SEQ ID NO: 21503 - protein, 9 aa, Artificial Sequence
  Description of Artificial Sequence: Synthetic peptide
DAYYDHRGC

SEQ ID NO: 21504 - protein, 9 aa, Artificial Sequence
  Description of Artificial Sequence: Synthetic peptide
DCGWLAYEW

SEQ ID NO: 21505 - protein, 9 aa, Artificial Sequence
  Description of Artificial Sequence: Synthetic peptide
DCKCPQPDL

SEQ ID NO: 21506 - protein, 9 aa, Artificial Sequence
  Description of Artificial Sequence: Synthetic peptide
DCPWKAFHA

SEQ ID NO: 21507 - protein, 9 aa, Artificial Sequence
  Description of Artificial Sequence: Synthetic peptide
DCRGLSSIF

SEQ ID NO: 21508 - protein, 9 aa, Artificial Sequence
  Description of Artificial Sequence: Synthetic peptide
DCSVFWIGA

SEQ ID NO: 21509 - protein, 9 aa, Artificial Sequence
  Description of Artificial Sequence: Synthetic peptide
DCTFTQQQW

SEQ ID NO: 21510 - protein, 9 aa, Artificial Sequence
  Description of Artificial Sequence: Synthetic peptide
DDKPWVIMA

SEQ ID NO: 21511 - protein, 9 aa, Artificial Sequence
  Description of Artificial Sequence: Synthetic peptide
DDLQPMERT

SEQ ID NO: 21512 - protein, 9 aa, Artificial Sequence
  Description of Artificial Sequence: Synthetic peptide
DDVNGAVIM

SEQ ID NO: 21513 - protein, 9 aa, Artificial Sequence
  Description of Artificial Sequence: Synthetic peptide
DDVNKMRKE

SEQ ID NO: 21514 - protein, 9 aa, Artificial Sequence
  Description of Artificial Sequence: Synthetic peptide
DDVWMWQWV

SEQ ID NO: 21515 - protein, 9 aa, Artificial Sequence
  Description of Artificial Sequence: Synthetic peptide
DDYKKWRHP

SEQ ID NO: 21516 - protein, 9 aa, Artificial Sequence
  Description of Artificial Sequence: Synthetic peptide
DDYKPHCKF

SEQ ID NO: 21517 - protein, 9 aa, Artificial Sequence
  Description of Artificial Sequence: Synthetic peptide
DECYNLFTV

SEQ ID NO: 21518 - protein, 9 aa, Artificial Sequence
  Description of Artificial Sequence: Synthetic peptide
DEDDYNMPY

SEQ ID NO: 21519 - protein, 9 aa, Artificial Sequence
  Description of Artificial Sequence: Synthetic peptide
DEHLITMQT

SEQ ID NO: 21520 - protein, 9 aa, Artificial Sequence
  Description of Artificial Sequence: Synthetic peptide
DEQWSPTTI

SEQ ID NO: 21521 - protein, 9 aa, Artificial Sequence
  Description of Artificial Sequence: Synthetic peptide
DEYVPEAYF

SEQ ID NO: 21522 - protein, 9 aa, Artificial Sequence
  Description of Artificial Sequence: Synthetic peptide
DFAACQDYL

SEQ ID NO: 21523 - protein, 9 aa, Artificial Sequence
  Description of Artificial Sequence: Synthetic peptide
DFAFENWMG

SEQ ID NO: 21524 - protein, 9 aa, Artificial Sequence
  Description of Artificial Sequence: Synthetic peptide
DFAWQECWC

SEQ ID NO: 21525 - protein, 9 aa, Artificial Sequence
  Description of Artificial Sequence: Synthetic peptide
DFEKVSEQA

SEQ ID NO: 21526 - protein, 9 aa, Artificial Sequence
  Description of Artificial Sequence: Synthetic peptide
DFGCQEQMT

SEQ ID NO: 21527 - protein, 9 aa, Artificial Sequence
  Description of Artificial Sequence: Synthetic peptide
DFGPRCCFG

SEQ ID NO: 21528 - protein, 9 aa, Artificial Sequence
  Description of Artificial Sequence: Synthetic peptide
DFGVQKSNE

SEQ ID NO: 21529 - protein, 9 aa, Artificial Sequence
  Description of Artificial Sequence: Synthetic peptide
DFHDQYVID

SEQ ID NO: 21530 - protein, 9 aa, Artificial Sequence
  Description of Artificial Sequence: Synthetic peptide
DFIWQQCSN

SEQ ID NO: 21531 - protein, 9 aa, Artificial Sequence
  Description of Artificial Sequence: Synthetic peptide
DFRFGTRFG

SEQ ID NO: 21532 - protein, 9 aa, Artificial Sequence
  Description of Artificial Sequence: Synthetic peptide
DFSRMAGGP

SEQ ID NO: 21533 - protein, 9 aa, Artificial Sequence
  Description of Artificial Sequence: Synthetic peptide
DFTAFKNDM

SEQ ID NO: 21534 - protein, 9 aa, Artificial Sequence
  Description of Artificial Sequence: Synthetic peptide
DGCPSGNWP

SEQ ID NO: 21535 - protein, 9 aa, Artificial Sequence
  Description of Artificial Sequence: Synthetic peptide
DGELGKFDI

SEQ ID NO: 21536 - protein, 9 aa, Artificial Sequence
  Description of Artificial Sequence: Synthetic peptide
DGFDFEKIG

SEQ ID NO: 21537 - protein, 9 aa, Artificial Sequence
  Description of Artificial Sequence: Synthetic peptide
DGGFQQAEW

SEQ ID NO: 21538 - protein, 9 aa, Artificial Sequence
  Description of Artificial Sequence: Synthetic peptide
DGHSDLLLS

SEQ ID NO: 21539 - protein, 9 aa, Artificial Sequence
  Description of Artificial Sequence: Synthetic peptide
DGKHLDTDP

SEQ ID NO: 21540 - protein, 9 aa, Artificial Sequence
  Description of Artificial Sequence: Synthetic peptide
DGKKTMHET

SEQ ID NO: 21541 - protein, 9 aa, Artificial Sequence
  Description of Artificial Sequence: Synthetic peptide
DGQLHMFYA

SEQ ID NO: 21542 - protein, 9 aa, Artificial Sequence
  Description of Artificial Sequence: Synthetic peptide
DGSGSEWHR

SEQ ID NO: 21543 - protein, 9 aa, Artificial Sequence
  Description of Artificial Sequence: Synthetic peptide
DGTADDKRY

SEQ ID NO: 21544 - protein, 9 aa, Artificial Sequence
  Description of Artificial Sequence: Synthetic peptide
DGTETIYNM

SEQ ID NO: 21545 - protein, 9 aa, Artificial Sequence
  Description of Artificial Sequence: Synthetic peptide
DGTYANHMG

SEQ ID NO: 21546 - protein, 9 aa, Artificial Sequence
  Description of Artificial Sequence: Synthetic peptide
DGTYKCPEP

SEQ ID NO: 21547 - protein, 9 aa, Artificial Sequence
  Description of Artificial Sequence: Synthetic peptide
DHCNFMAPY

SEQ ID NO: 21548 - protein, 9 aa, Artificial Sequence
  Description of Artificial Sequence: Synthetic peptide
DHDWLQNMG

SEQ ID NO: 21549 - protein, 9 aa, Artificial Sequence
  Description of Artificial Sequence: Synthetic peptide
DHEVVQNMP

SEQ ID NO: 21550 - protein, 9 aa, Artificial Sequence
  Description of Artificial Sequence: Synthetic peptide
DHKLIQMHT

SEQ ID NO: 21551 - protein, 9 aa, Artificial Sequence
  Description of Artificial Sequence: Synthetic peptide
DHLICQNGP

SEQ ID NO: 21552 - protein, 9 aa, Artificial Sequence
  Description of Artificial Sequence: Synthetic peptide
DHMWVNWSQ

SEQ ID NO: 21553 - protein, 9 aa, Artificial Sequence
  Description of Artificial Sequence: Synthetic peptide
DHPFNVKQE

SEQ ID NO: 21554 - protein, 9 aa, Artificial Sequence
  Description of Artificial Sequence: Synthetic peptide
DHQLTMEGM

SEQ ID NO: 21555 - protein, 9 aa, Artificial Sequence
  Description of Artificial Sequence: Synthetic peptide
DHSMYATQE

SEQ ID NO: 21556 - protein, 9 aa, Artificial Sequence
  Description of Artificial Sequence: Synthetic peptide
DICDKNHEG

SEQ ID NO: 21557 - protein, 9 aa, Artificial Sequence
  Description of Artificial Sequence: Synthetic peptide
DIEFDITCD

SEQ ID NO: 21558 - protein, 9 aa, Artificial Sequence
  Description of Artificial Sequence: Synthetic peptide
DIGEFWTAH

SEQ ID NO: 21559 - protein, 9 aa, Artificial Sequence
  Description of Artificial Sequence: Synthetic peptide
DIHRFAEQF

SEQ ID NO: 21560 - protein, 9 aa, Artificial Sequence
  Description of Artificial Sequence: Synthetic peptide
DIHVITKGI

SEQ ID NO: 21561 - protein, 9 aa, Artificial Sequence
  Description of Artificial Sequence: Synthetic peptide
DIKQHQLWG

SEQ ID NO: 21562 - protein, 9 aa, Artificial Sequence
  Description of Artificial Sequence: Synthetic peptide
DILDVVKQG

SEQ ID NO: 21563 - protein, 9 aa, Artificial Sequence
  Description of Artificial Sequence: Synthetic peptide
DIMINDLYS

SEQ ID NO: 21564 - protein, 9 aa, Artificial Sequence
  Description of Artificial Sequence: Synthetic peptide
DIQHLTESG

SEQ ID NO: 21565 - protein, 9 aa, Artificial Sequence
  Description of Artificial Sequence: Synthetic peptide
DIQQHNIAA

SEQ ID NO: 21566 - protein, 9 aa, Artificial Sequence
  Description of Artificial Sequence: Synthetic peptide
DIQVPLAYR

SEQ ID NO: 21567 - protein, 9 aa, Artificial Sequence
  Description of Artificial Sequence: Synthetic peptide
DIRRMVASL

SEQ ID NO: 21568 - protein, 9 aa, Artificial Sequence
  Description of Artificial Sequence: Synthetic peptide
DISMESWMP

SEQ ID NO: 21569 - protein, 9 aa, Artificial Sequence
  Description of Artificial Sequence: Synthetic peptide
DITETQCGS

SEQ ID NO: 21570 - protein, 9 aa, Artificial Sequence
  Description of Artificial Sequence: Synthetic peptide
DIYYSMRGR

SEQ ID NO: 21571 - protein, 9 aa, Artificial Sequence
  Description of Artificial Sequence: Synthetic peptide
DKACMLWDS

SEQ ID NO: 21572 - protein, 9 aa, Artificial Sequence
  Description of Artificial Sequence: Synthetic peptide
DKCAIEFAS

SEQ ID NO: 21573 - protein, 9 aa, Artificial Sequence
  Description of Artificial Sequence: Synthetic peptide
DKGALEFWI

SEQ ID NO: 21574 - protein, 9 aa, Artificial Sequence
  Description of Artificial Sequence: Synthetic peptide
DKGEWQCYK

SEQ ID NO: 21575 - protein, 9 aa, Artificial Sequence
  Description of Artificial Sequence: Synthetic peptide
DKGFIQHVA

SEQ ID NO: 21576 - protein, 9 aa, Artificial Sequence
  Description of Artificial Sequence: Synthetic peptide
DKMTLPFSP

SEQ ID NO: 21577 - protein, 9 aa, Artificial Sequence
  Description of Artificial Sequence: Synthetic peptide
DKPCSICGC

SEQ ID NO: 21578 - protein, 9 aa, Artificial Sequence
  Description of Artificial Sequence: Synthetic peptide
DKRWSANQW

SEQ ID NO: 21579 - protein, 9 aa, Artificial Sequence
  Description of Artificial Sequence: Synthetic peptide
DKWPPLEPH

SEQ ID NO: 21580 - protein, 9 aa, Artificial Sequence
  Description of Artificial Sequence: Synthetic peptide
DLAWQYQPA

SEQ ID NO: 21581 - protein, 9 aa, Artificial Sequence
  Description of Artificial Sequence: Synthetic peptide
DLEDAHVGL

SEQ ID NO: 21582 - protein, 9 aa, Artificial Sequence
  Description of Artificial Sequence: Synthetic peptide
DLHGIGVLA

SEQ ID NO: 21583 - protein, 9 aa, Artificial Sequence
  Description of Artificial Sequence: Synthetic peptide
DLIAGNWPA

SEQ ID NO: 21584 - protein, 9 aa, Artificial Sequence
  Description of Artificial Sequence: Synthetic peptide
DLPSPRRID

SEQ ID NO: 21585 - protein, 9 aa, Artificial Sequence
  Description of Artificial Sequence: Synthetic peptide
DLRVMHWHH

SEQ ID NO: 21586 - protein, 9 aa, Artificial Sequence
  Description of Artificial Sequence: Synthetic peptide
DLVCAQWRE

SEQ ID NO: 21587 - protein, 9 aa, Artificial Sequence
  Description of Artificial Sequence: Synthetic peptide
DMAAFHYAG

SEQ ID NO: 21588 - protein, 9 aa, Artificial Sequence
  Description of Artificial Sequence: Synthetic peptide
DMAANHTFP

SEQ ID NO: 21589 - protein, 9 aa, Artificial Sequence
  Description of Artificial Sequence: Synthetic peptide
DMALYHSNV

SEQ ID NO: 21590 - protein, 9 aa, Artificial Sequence
  Description of Artificial Sequence: Synthetic peptide
DMDCYTMME

SEQ ID NO: 21591 - protein, 9 aa, Artificial Sequence
  Description of Artificial Sequence: Synthetic peptide
DMDSPFPWD

SEQ ID NO: 21592 - protein, 9 aa, Artificial Sequence
  Description of Artificial Sequence: Synthetic peptide
DMDTYYGHG

SEQ ID NO: 21593 - protein, 9 aa, Artificial Sequence
  Description of Artificial Sequence: Synthetic peptide
DMFTFAHNS

SEQ ID NO: 21594 - protein, 9 aa, Artificial Sequence
  Description of Artificial Sequence: Synthetic peptide
DMGFVNRHE

SEQ ID NO: 21595 - protein, 9 aa, Artificial Sequence
  Description of Artificial Sequence: Synthetic peptide
DMIHYPLYG

SEQ ID NO: 21596 - protein, 9 aa, Artificial Sequence
  Description of Artificial Sequence: Synthetic peptide
DMLMLVTHD

SEQ ID NO: 21597 - protein, 9 aa, Artificial Sequence
  Description of Artificial Sequence: Synthetic peptide
DMMGFWDKP

SEQ ID NO: 21598 - protein, 9 aa, Artificial Sequence
  Description of Artificial Sequence: Synthetic peptide
DMNELAWAY

SEQ ID NO: 21599 - protein, 9 aa, Artificial Sequence
  Description of Artificial Sequence: Synthetic peptide
DMRVGNGYF

SEQ ID NO: 21600 - protein, 9 aa, Artificial Sequence
  Description of Artificial Sequence: Synthetic peptide
DMSVIQDGA

SEQ ID NO: 21601 - protein, 9 aa, Artificial Sequence
  Description of Artificial Sequence: Synthetic peptide
DMTRNPEWE

SEQ ID NO: 21602 - protein, 9 aa, Artificial Sequence
  Description of Artificial Sequence: Synthetic peptide
DNAACIEMS

SEQ ID NO: 21603 - protein, 9 aa, Artificial Sequence
  Description of Artificial Sequence: Synthetic peptide
DNAEMNSFD

SEQ ID NO: 21604 - protein, 9 aa, Artificial Sequence
  Description of Artificial Sequence: Synthetic peptide
DNCYSCEAT

SEQ ID NO: 21605 - protein, 9 aa, Artificial Sequence
  Description of Artificial Sequence: Synthetic peptide
DNEGWLMAE

SEQ ID NO: 21606 - protein, 9 aa, Artificial Sequence
  Description of Artificial Sequence: Synthetic peptide
DNEVWLSAV

SEQ ID NO: 21607 - protein, 9 aa, Artificial Sequence
  Description of Artificial Sequence: Synthetic peptide
DNHALEFDC

SEQ ID NO: 21608 - protein, 9 aa, Artificial Sequence
  Description of Artificial Sequence: Synthetic peptide
DNMQRKWAG

SEQ ID NO: 21609 - protein, 9 aa, Artificial Sequence
  Description of Artificial Sequence: Synthetic peptide
DNQEPSIRS

SEQ ID NO: 21610 - protein, 9 aa, Artificial Sequence
  Description of Artificial Sequence: Synthetic peptide
DNQSKESQA

SEQ ID NO: 21611 - protein, 9 aa, Artificial Sequence
  Description of Artificial Sequence: Synthetic peptide
DNSDFKWHW

SEQ ID NO: 21612 - protein, 9 aa, Artificial Sequence
  Description of Artificial Sequence: Synthetic peptide
DNVPYCYYQ

SEQ ID NO: 21613 - protein, 9 aa, Artificial Sequence
  Description of Artificial Sequence: Synthetic peptide
DNYINQEAA

SEQ ID NO: 21614 - protein, 9 aa, Artificial Sequence
  Description of Artificial Sequence: Synthetic peptide
DPAHTTKIC

SEQ ID NO: 21615 - protein, 9 aa, Artificial Sequence
  Description of Artificial Sequence: Synthetic peptide
DPDRTPSQH

SEQ ID NO: 21616 - protein, 9 aa, Artificial Sequence
  Description of Artificial Sequence: Synthetic peptide
DPEEHNNYG

SEQ ID NO: 21617 - protein, 9 aa, Artificial Sequence
  Description of Artificial Sequence: Synthetic peptide
DPEFQQWTH

SEQ ID NO: 21618 - protein, 9 aa, Artificial Sequence
  Description of Artificial Sequence: Synthetic peptide
DPIDEVNAQ

SEQ ID NO: 21619 - protein, 9 aa, Artificial Sequence
  Description of Artificial Sequence: Synthetic peptide
DPNRIDNQY

SEQ ID NO: 21620 - protein, 9 aa, Artificial Sequence
  Description of Artificial Sequence: Synthetic peptide
DPSEVRARV

SEQ ID NO: 21621 - protein, 9 aa, Artificial Sequence
  Description of Artificial Sequence: Synthetic peptide
DQCFMTYDT

SEQ ID NO: 21622 - protein, 9 aa, Artificial Sequence
  Description of Artificial Sequence: Synthetic peptide
DQDNPSCWL

SEQ ID NO: 21623 - protein, 9 aa, Artificial Sequence
  Description of Artificial Sequence: Synthetic peptide
DQEPNWNGV

SEQ ID NO: 21624 - protein, 9 aa, Artificial Sequence
  Description of Artificial Sequence: Synthetic peptide
DQFDSHSQG

SEQ ID NO: 21625 - protein, 9 aa, Artificial Sequence
  Description of Artificial Sequence: Synthetic peptide
DQGCKLRRC

SEQ ID NO: 21626 - protein, 9 aa, Artificial Sequence
  Description of Artificial Sequence: Synthetic peptide
DQGMGSCKD

SEQ ID NO: 21627 - protein, 9 aa, Artificial Sequence
  Description of Artificial Sequence: Synthetic peptide
DQHGASTVF

SEQ ID NO: 21628 - protein, 9 aa, Artificial Sequence
  Description of Artificial Sequence: Synthetic peptide
DQIPMKSMM

SEQ ID NO: 21629 - protein, 9 aa, Artificial Sequence
  Description of Artificial Sequence: Synthetic peptide
DQKMYVDED

SEQ ID NO: 21630 - protein, 9 aa, Artificial Sequence
  Description of Artificial Sequence: Synthetic peptide
DQKSVQCYE

SEQ ID NO: 21631 - protein, 9 aa, Artificial Sequence
  Description of Artificial Sequence: Synthetic peptide
DQLEGGESN

SEQ ID NO: 21632 - protein, 9 aa, Artificial Sequence
  Description of Artificial Sequence: Synthetic peptide
DQLGLRDNT

SEQ ID NO: 21633 - protein, 9 aa, Artificial Sequence
  Description of Artificial Sequence: Synthetic peptide
DQQPALDAQ

SEQ ID NO: 21634 - protein, 9 aa, Artificial Sequence
  Description of Artificial Sequence: Synthetic peptide
DQWSILTFS

SEQ ID NO: 21635 - protein, 9 aa, Artificial Sequence
  Description of Artificial Sequence: Synthetic peptide
DRAKECQCE

SEQ ID NO: 21636 - protein, 9 aa, Artificial Sequence
  Description of Artificial Sequence: Synthetic peptide
DRLQCDECS

SEQ ID NO: 21637 - protein, 9 aa, Artificial Sequence
  Description of Artificial Sequence: Synthetic peptide
DRNTAMTGG

SEQ ID NO: 21638 - protein, 9 aa, Artificial Sequence
  Description of Artificial Sequence: Synthetic peptide
DRQINWQQE

SEQ ID NO: 21639 - protein, 9 aa, Artificial Sequence
  Description of Artificial Sequence: Synthetic peptide
DRSDKGCLY

SEQ ID NO: 21640 - protein, 9 aa, Artificial Sequence
  Description of Artificial Sequence: Synthetic peptide
DRSVHVRAS

SEQ ID NO: 21641 - protein, 9 aa, Artificial Sequence
  Description of Artificial Sequence: Synthetic peptide
DRVEERAYG

SEQ ID NO: 21642 - protein, 9 aa, Artificial Sequence
  Description of Artificial Sequence: Synthetic peptide
DRYLFTHWH

SEQ ID NO: 21643 - protein, 9 aa, Artificial Sequence
  Description of Artificial Sequence: Synthetic peptide
DRYQWAKRH

SEQ ID NO: 21644 - protein, 9 aa, Artificial Sequence
  Description of Artificial Sequence: Synthetic peptide
DSALQFIDR

SEQ ID NO: 21645 - protein, 9 aa, Artificial Sequence
  Description of Artificial Sequence: Synthetic peptide
DSAMFGQYK

SEQ ID NO: 21646 - protein, 9 aa, Artificial Sequence
  Description of Artificial Sequence: Synthetic peptide
DSANVGWCT

SEQ ID NO: 21647 - protein, 9 aa, Artificial Sequence
  Description of Artificial Sequence: Synthetic peptide
DSAPGKMWP

SEQ ID NO: 21648 - protein, 9 aa, Artificial Sequence
  Description of Artificial Sequence: Synthetic peptide
DSAPLQSQL

SEQ ID NO: 21649 - protein, 9 aa, Artificial Sequence
  Description of Artificial Sequence: Synthetic peptide
DSAPPPNVI

SEQ ID NO: 21650 - protein, 9 aa, Artificial Sequence
  Description of Artificial Sequence: Synthetic peptide
DSDEGSEHI

SEQ ID NO: 21651 - protein, 9 aa, Artificial Sequence
  Description of Artificial Sequence: Synthetic peptide
DSDLYEGWM

SEQ ID NO: 21652 - protein, 9 aa, Artificial Sequence
  Description of Artificial Sequence: Synthetic peptide
DSEWLHWHA

SEQ ID NO: 21653 - protein, 9 aa, Artificial Sequence
  Description of Artificial Sequence: Synthetic peptide
DSGFAMWTP

SEQ ID NO: 21654 - protein, 9 aa, Artificial Sequence
  Description of Artificial Sequence: Synthetic peptide
DSHFYDQWQ

SEQ ID NO: 21655 - protein, 9 aa, Artificial Sequence
  Description of Artificial Sequence: Synthetic peptide
DSHPIAHGF

SEQ ID NO: 21656 - protein, 9 aa, Artificial Sequence
  Description of Artificial Sequence: Synthetic peptide
DSMKGTMFQ

SEQ ID NO: 21657 - protein, 9 aa, Artificial Sequence
  Description of Artificial Sequence: Synthetic peptide
DSMMHDCHF

SEQ ID NO: 21658 - protein, 9 aa, Artificial Sequence
  Description of Artificial Sequence: Synthetic peptide
DSMNGVEAS

SEQ ID NO: 21659 - protein, 9 aa, Artificial Sequence
  Description of Artificial Sequence: Synthetic peptide
DSNEEQRQG

SEQ ID NO: 21660 - protein, 9 aa, Artificial Sequence
  Description of Artificial Sequence: Synthetic peptide
DSPEQFGLD

SEQ ID NO: 21661 - protein, 9 aa, Artificial Sequence
  Description of Artificial Sequence: Synthetic peptide
DSQHTAGWP

SEQ ID NO: 21662 - protein, 9 aa, Artificial Sequence
  Description of Artificial Sequence: Synthetic peptide
DSQLIKQWM

SEQ ID NO: 21663 - protein, 9 aa, Artificial Sequence
  Description of Artificial Sequence: Synthetic peptide
DSQPMFACV

SEQ ID NO: 21664 - protein, 9 aa, Artificial Sequence
  Description of Artificial Sequence: Synthetic peptide
DSREAVAVD

SEQ ID NO: 21665 - protein, 9 aa, Artificial Sequence
  Description of Artificial Sequence: Synthetic peptide
DSRQDHWFE

SEQ ID NO: 21666 - protein, 9 aa, Artificial Sequence
  Description of Artificial Sequence: Synthetic peptide
DSVHSYEQK

SEQ ID NO: 21667 - protein, 9 aa, Artificial Sequence
  Description of Artificial Sequence: Synthetic peptide
DSVPNLKAY

SEQ ID NO: 21668 - protein, 9 aa, Artificial Sequence
  Description of Artificial Sequence: Synthetic peptide
DSYPNQACT

SEQ ID NO: 21669 - protein, 9 aa, Artificial Sequence
  Description of Artificial Sequence: Synthetic peptide
DTCTTCVSL

SEQ ID NO: 21670 - protein, 9 aa, Artificial Sequence
  Description of Artificial Sequence: Synthetic peptide
DTCVTAANH

SEQ ID NO: 21671 - protein, 9 aa, Artificial Sequence
  Description of Artificial Sequence: Synthetic peptide
DTDTRCIPC

SEQ ID NO: 21672 - protein, 9 aa, Artificial Sequence
  Description of Artificial Sequence: Synthetic peptide
DTEGDHREG

SEQ ID NO: 21673 - protein, 9 aa, Artificial Sequence
  Description of Artificial Sequence: Synthetic peptide
DTELSMVEP

SEQ ID NO: 21674 - protein, 9 aa, Artificial Sequence
  Description of Artificial Sequence: Synthetic peptide
DTFFHGAFE

SEQ ID NO: 21675 - protein, 9 aa, Artificial Sequence
  Description of Artificial Sequence: Synthetic peptide
DTGIWAYVG

SEQ ID NO: 21676 - protein, 9 aa, Artificial Sequence
  Description of Artificial Sequence: Synthetic peptide
DTHRIIMDD

SEQ ID NO: 21677 - protein, 9 aa, Artificial Sequence
  Description of Artificial Sequence: Synthetic peptide
DTILEQYGP

SEQ ID NO: 21678 - protein, 9 aa, Artificial Sequence
  Description of Artificial Sequence: Synthetic peptide
DTIQWDQGI

SEQ ID NO: 21679 - protein, 9 aa, Artificial Sequence
  Description of Artificial Sequence: Synthetic peptide
DTKMVPYMP

SEQ ID NO: 21680 - protein, 9 aa, Artificial Sequence
  Description of Artificial Sequence: Synthetic peptide
DTKPENNWI

SEQ ID NO: 21681 - protein, 9 aa, Artificial Sequence
  Description of Artificial Sequence: Synthetic peptide
DTMHCLSCD

SEQ ID NO: 21682 - protein, 9 aa, Artificial Sequence
  Description of Artificial Sequence: Synthetic peptide
DTMPTMDLM

SEQ ID NO: 21683 - protein, 9 aa, Artificial Sequence
  Description of Artificial Sequence: Synthetic peptide
DTQWQEWCE

SEQ ID NO: 21684 - protein, 9 aa, Artificial Sequence
  Description of Artificial Sequence: Synthetic peptide
DTRDNWLIR

SEQ ID NO: 21685 - protein, 9 aa, Artificial Sequence
  Description of Artificial Sequence: Synthetic peptide
DTRTPAVWP

SEQ ID NO: 21686 - protein, 9 aa, Artificial Sequence
  Description of Artificial Sequence: Synthetic peptide
DTSQTSNNT

SEQ ID NO: 21687 - protein, 9 aa, Artificial Sequence
  Description of Artificial Sequence: Synthetic peptide
DTSRCLAYW

SEQ ID NO: 21688 - protein, 9 aa, Artificial Sequence
  Description of Artificial Sequence: Synthetic peptide
DTWTLDFEV

SEQ ID NO: 21689 - protein, 9 aa, Artificial Sequence
  Description of Artificial Sequence: Synthetic peptide
DTYAEIMYG

SEQ ID NO: 21690 - protein, 9 aa, Artificial Sequence
  Description of Artificial Sequence: Synthetic peptide
DTYPLVIGS

SEQ ID NO: 21691 - protein, 9 aa, Artificial Sequence
  Description of Artificial Sequence: Synthetic peptide
DVAMTSLIA

SEQ ID NO: 21692 - protein, 9 aa, Artificial Sequence
  Description of Artificial Sequence: Synthetic peptide
DVCDSIGYC

SEQ ID NO: 21693 - protein, 9 aa, Artificial Sequence
  Description of Artificial Sequence: Synthetic peptide
DVCEQRNWL

SEQ ID NO: 21694 - protein, 9 aa, Artificial Sequence
  Description of Artificial Sequence: Synthetic peptide
DVDDSQCEY

SEQ ID NO: 21695 - protein, 9 aa, Artificial Sequence
  Description of Artificial Sequence: Synthetic peptide
DVDDWFHQS

SEQ ID NO: 21696 - protein, 9 aa, Artificial Sequence
  Description of Artificial Sequence: Synthetic peptide
DVDHICEGH

SEQ ID NO: 21697 - protein, 9 aa, Artificial Sequence
  Description of Artificial Sequence: Synthetic peptide
DVDMDTNRG

SEQ ID NO: 21698 - protein, 9 aa, Artificial Sequence
  Description of Artificial Sequence: Synthetic peptide
DVENHYMGS

SEQ ID NO: 21699 - protein, 9 aa, Artificial Sequence
  Description of Artificial Sequence: Synthetic peptide
DVEPMKNDF

SEQ ID NO: 21700 - protein, 9 aa, Artificial Sequence
  Description of Artificial Sequence: Synthetic peptide
DVESRYDCG

SEQ ID NO: 21701 - protein, 9 aa, Artificial Sequence
  Description of Artificial Sequence: Synthetic peptide
DVFCMLASH

SEQ ID NO: 21702 - protein, 9 aa, Artificial Sequence
  Description of Artificial Sequence: Synthetic peptide
DVFIQQAYS

SEQ ID NO: 21703 - protein, 9 aa, Artificial Sequence
  Description of Artificial Sequence: Synthetic peptide
DVFMGARFE

SEQ ID NO: 21704 - protein, 9 aa, Artificial Sequence
  Description of Artificial Sequence: Synthetic peptide
DVFPCQKTE

SEQ ID NO: 21705 - protein, 9 aa, Artificial Sequence
  Description of Artificial Sequence: Synthetic peptide
DVFQCEELS

SEQ ID NO: 21706 - protein, 9 aa, Artificial Sequence
  Description of Artificial Sequence: Synthetic peptide
DVGFNRISR

SEQ ID NO: 21707 - protein, 9 aa, Artificial Sequence
  Description of Artificial Sequence: Synthetic peptide
DVGIQHRPL

SEQ ID NO: 21708 - protein, 9 aa, Artificial Sequence
  Description of Artificial Sequence: Synthetic peptide
DVGLFHGGF

SEQ ID NO: 21709 - protein, 9 aa, Artificial Sequence
  Description of Artificial Sequence: Synthetic peptide
DVGPQKNIV

SEQ ID NO: 21710 - protein, 9 aa, Artificial Sequence
  Description of Artificial Sequence: Synthetic peptide
DVHMADGNN

SEQ ID NO: 21711 - protein, 9 aa, Artificial Sequence
  Description of Artificial Sequence: Synthetic peptide
DVILTYDRA

SEQ ID NO: 21712 - protein, 9 aa, Artificial Sequence
  Description of Artificial Sequence: Synthetic peptide
DVIRTHDGV

SEQ ID NO: 21713 - protein, 9 aa, Artificial Sequence
  Description of Artificial Sequence: Synthetic peptide
DVKCMQNTF

SEQ ID NO: 21714 - protein, 9 aa, Artificial Sequence
  Description of Artificial Sequence: Synthetic peptide
DVKGNNGGG

SEQ ID NO: 21715 - protein, 9 aa, Artificial Sequence
  Description of Artificial Sequence: Synthetic peptide
DVKIVWSGE

SEQ ID NO: 21716 - protein, 9 aa, Artificial Sequence
  Description of Artificial Sequence: Synthetic peptide
DVKLAGMIH

SEQ ID NO: 21717 - protein, 9 aa, Artificial Sequence
  Description of Artificial Sequence: Synthetic peptide
DVKPAMNQA

SEQ ID NO: 21718 - protein, 9 aa, Artificial Sequence
  Description of Artificial Sequence: Synthetic peptide
DVKPGWMGD

SEQ ID NO: 21719 - protein, 9 aa, Artificial Sequence
  Description of Artificial Sequence: Synthetic peptide
DVKWMESWL

SEQ ID NO: 21720 - protein, 9 aa, Artificial Sequence
  Description of Artificial Sequence: Synthetic peptide
DVKYLTHQW

SEQ ID NO: 21721 - protein, 9 aa, Artificial Sequence
  Description of Artificial Sequence: Synthetic peptide
DVLLLEHER

SEQ ID NO: 21722 - protein, 9 aa, Artificial Sequence
  Description of Artificial Sequence: Synthetic peptide
DVLTNLNGF

SEQ ID NO: 21723 - protein, 9 aa, Artificial Sequence
  Description of Artificial Sequence: Synthetic peptide
DVNFVGEPE

SEQ ID NO: 21724 - protein, 9 aa, Artificial Sequence
  Description of Artificial Sequence: Synthetic peptide
DVNSYKLYG

SEQ ID NO: 21725 - protein, 9 aa, Artificial Sequence
  Description of Artificial Sequence: Synthetic peptide
DVQTIRMEH

SEQ ID NO: 21726 - protein, 9 aa, Artificial Sequence
  Description of Artificial Sequence: Synthetic peptide
DVRERDSDD

SEQ ID NO: 21727 - protein, 9 aa, Artificial Sequence
  Description of Artificial Sequence: Synthetic peptide
DVRTEPTIT

SEQ ID NO: 21728 - protein, 9 aa, Artificial Sequence
  Description of Artificial Sequence: Synthetic peptide
DVRTVTQHG

SEQ ID NO: 21729 - protein, 9 aa, Artificial Sequence
  Description of Artificial Sequence: Synthetic peptide
DVSQSDWQP

SEQ ID NO: 21730 - protein, 9 aa, Artificial Sequence
  Description of Artificial Sequence: Synthetic peptide
DVTAQRAWK

SEQ ID NO: 21731 - protein, 9 aa, Artificial Sequence
  Description of Artificial Sequence: Synthetic peptide
DVTAYSESI

SEQ ID NO: 21732 - protein, 9 aa, Artificial Sequence
  Description of Artificial Sequence: Synthetic peptide
DVTEDVVSP

SEQ ID NO: 21733 - protein, 9 aa, Artificial Sequence
  Description of Artificial Sequence: Synthetic peptide
DVTENREVW

SEQ ID NO: 21734 - protein, 9 aa, Artificial Sequence
  Description of Artificial Sequence: Synthetic peptide
DVTIYWNDY

SEQ ID NO: 21735 - protein, 9 aa, Artificial Sequence
  Description of Artificial Sequence: Synthetic peptide
DVTLNEGVV

SEQ ID NO: 21736 - protein, 9 aa, Artificial Sequence
  Description of Artificial Sequence: Synthetic peptide
DVTPEDACV

SEQ ID NO: 21737 - protein, 9 aa, Artificial Sequence
  Description of Artificial Sequence: Synthetic peptide
DVVALQASK

SEQ ID NO: 21738 - protein, 9 aa, Artificial Sequence
  Description of Artificial Sequence: Synthetic peptide
DVVANLTSS

SEQ ID NO: 21739 - protein, 9 aa, Artificial Sequence
  Description of Artificial Sequence: Synthetic peptide
DVVEQFHWT

SEQ ID NO: 21740 - protein, 9 aa, Artificial Sequence
  Description of Artificial Sequence: Synthetic peptide
DVVIVDCAN

SEQ ID NO: 21741 - protein, 9 aa, Artificial Sequence
  Description of Artificial Sequence: Synthetic peptide
DVVVSQMAM

SEQ ID NO: 21742 - protein, 9 aa, Artificial Sequence
  Description of Artificial Sequence: Synthetic peptide
DVWAQSQVL

SEQ ID NO: 21743 - protein, 9 aa, Artificial Sequence
  Description of Artificial Sequence: Synthetic peptide
DVWLQIDGQ

SEQ ID NO: 21744 - protein, 9 aa, Artificial Sequence
  Description of Artificial Sequence: Synthetic peptide
DVWWVEGEY

SEQ ID NO: 21745 - protein, 9 aa, Artificial Sequence
  Description of Artificial Sequence: Synthetic peptide
DWASPKSYV

SEQ ID NO: 21746 - protein, 9 aa, Artificial Sequence
  Description of Artificial Sequence: Synthetic peptide
DWCMSMVWT

SEQ ID NO: 21747 - protein, 9 aa, Artificial Sequence
  Description of Artificial Sequence: Synthetic peptide
DWDQQRQYF

SEQ ID NO: 21748 - protein, 9 aa, Artificial Sequence
  Description of Artificial Sequence: Synthetic peptide
DWGAMWVCG

SEQ ID NO: 21749 - protein, 9 aa, Artificial Sequence
  Description of Artificial Sequence: Synthetic peptide
DWGHRIFEH

SEQ ID NO: 21750 - protein, 9 aa, Artificial Sequence
  Description of Artificial Sequence: Synthetic peptide
DWHHPPVDH

SEQ ID NO: 21751 - protein, 9 aa, Artificial Sequence
  Description of Artificial Sequence: Synthetic peptide
DWKPIYEAS

SEQ ID NO: 21752 - protein, 9 aa, Artificial Sequence
  Description of Artificial Sequence: Synthetic peptide
DWPIRSAPI

SEQ ID NO: 21753 - protein, 9 aa, Artificial Sequence
  Description of Artificial Sequence: Synthetic peptide
DYCTGACDC

SEQ ID NO: 21754 - protein, 9 aa, Artificial Sequence
  Description of Artificial Sequence: Synthetic peptide
DYDVASFYH

SEQ ID NO: 21755 - protein, 9 aa, Artificial Sequence
  Description of Artificial Sequence: Synthetic peptide
DYEGPIRPN

SEQ ID NO: 21756 - protein, 9 aa, Artificial Sequence
  Description of Artificial Sequence: Synthetic peptide
DYEHYWHET

SEQ ID NO: 21757 - protein, 9 aa, Artificial Sequence
  Description of Artificial Sequence: Synthetic peptide
DYKLHPIGY

SEQ ID NO: 21758 - protein, 9 aa, Artificial Sequence
  Description of Artificial Sequence: Synthetic peptide
DYKMDVMPC

SEQ ID NO: 21759 - protein, 9 aa, Artificial Sequence
  Description of Artificial Sequence: Synthetic peptide
DYNMMHWAA

SEQ ID NO: 21760 - protein, 9 aa, Artificial Sequence
  Description of Artificial Sequence: Synthetic peptide
DYQRCTFLP

SEQ ID NO: 21761 - protein, 9 aa, Artificial Sequence
  Description of Artificial Sequence: Synthetic peptide
EACSNSHEK

SEQ ID NO: 21762 - protein, 9 aa, Artificial Sequence
  Description of Artificial Sequence: Synthetic peptide
EADCVHRVW

SEQ ID NO: 21763 - protein, 9 aa, Artificial Sequence
  Description of Artificial Sequence: Synthetic peptide
EADVSLMHC

SEQ ID NO: 21764 - protein, 9 aa, Artificial Sequence
  Description of Artificial Sequence: Synthetic peptide
EAEAEVIIR

SEQ ID NO: 21765 - protein, 9 aa, Artificial Sequence
  Description of Artificial Sequence: Synthetic peptide
EAECTWASL

SEQ ID NO: 21766 - protein, 9 aa, Artificial Sequence
  Description of Artificial Sequence: Synthetic peptide
EAELKTNFM

SEQ ID NO: 21767 - protein, 9 aa, Artificial Sequence
  Description of Artificial Sequence: Synthetic peptide
EAESGGAYK

SEQ ID NO: 21768 - protein, 9 aa, Artificial Sequence
  Description of Artificial Sequence: Synthetic peptide
EAEYRNWNP

SEQ ID NO: 21769 - protein, 9 aa, Artificial Sequence
  Description of Artificial Sequence: Synthetic peptide
EAGMFVHRA

SEQ ID NO: 21770 - protein, 9 aa, Artificial Sequence
  Description of Artificial Sequence: Synthetic peptide
EAGQWLGSP

SEQ ID NO: 21771 - protein, 9 aa, Artificial Sequence
  Description of Artificial Sequence: Synthetic peptide
EAHAWEKTE

SEQ ID NO: 21772 - protein, 9 aa, Artificial Sequence
  Description of Artificial Sequence: Synthetic peptide
EAHEEWSFD

SEQ ID NO: 21773 - protein, 9 aa, Artificial Sequence
  Description of Artificial Sequence: Synthetic peptide
EAHVNVYKY

SEQ ID NO: 21774 - protein, 9 aa, Artificial Sequence
  Description of Artificial Sequence: Synthetic peptide
EAKCMHDFS

SEQ ID NO: 21775 - protein, 9 aa, Artificial Sequence
  Description of Artificial Sequence: Synthetic peptide
EAMIWNNTM

SEQ ID NO: 21776 - protein, 9 aa, Artificial Sequence
  Description of Artificial Sequence: Synthetic peptide
EANQILSAH

SEQ ID NO: 21777 - protein, 9 aa, Artificial Sequence
  Description of Artificial Sequence: Synthetic peptide
EANSSQSQF

SEQ ID NO: 21778 - protein, 9 aa, Artificial Sequence
  Description of Artificial Sequence: Synthetic peptide
EANWEHSCI

SEQ ID NO: 21779 - protein, 9 aa, Artificial Sequence
  Description of Artificial Sequence: Synthetic peptide
EAQTTGSTW

SEQ ID NO: 21780 - protein, 9 aa, Artificial Sequence
  Description of Artificial Sequence: Synthetic peptide
EASLIKEDK

SEQ ID NO: 21781 - protein, 9 aa, Artificial Sequence
  Description of Artificial Sequence: Synthetic peptide
EASSLYSQQ

SEQ ID NO: 21782 - protein, 9 aa, Artificial Sequence
  Description of Artificial Sequence: Synthetic peptide
EASWSLHGQ

SEQ ID NO: 21783 - protein, 9 aa, Artificial Sequence
  Description of Artificial Sequence: Synthetic peptide
EATGESFWF

SEQ ID NO: 21784 - protein, 9 aa, Artificial Sequence
  Description of Artificial Sequence: Synthetic peptide
EAWHPGCCQ

SEQ ID NO: 21785 - protein, 9 aa, Artificial Sequence
  Description of Artificial Sequence: Synthetic peptide
EAWMCVEAQ

SEQ ID NO: 21786 - protein, 9 aa, Artificial Sequence
  Description of Artificial Sequence: Synthetic peptide
EAWSMNAPY

SEQ ID NO: 21787 - protein, 9 aa, Artificial Sequence
  Description of Artificial Sequence: Synthetic peptide
EAYFDTAEC

SEQ ID NO: 21788 - protein, 9 aa, Artificial Sequence
  Description of Artificial Sequence: Synthetic peptide
ECAPWVVLS

SEQ ID NO: 21789 - protein, 9 aa, Artificial Sequence
  Description of Artificial Sequence: Synthetic peptide
ECCIGDNMM

SEQ ID NO: 21790 - protein, 9 aa, Artificial Sequence
  Description of Artificial Sequence: Synthetic peptide
ECEMMDYSK

SEQ ID NO: 21791 - protein, 9 aa, Artificial Sequence
  Description of Artificial Sequence: Synthetic peptide
ECFATGEFM

SEQ ID NO: 21792 - protein, 9 aa, Artificial Sequence
  Description of Artificial Sequence: Synthetic peptide
ECHKCSKLN

SEQ ID NO: 21793 - protein, 9 aa, Artificial Sequence
  Description of Artificial Sequence: Synthetic peptide
ECKLSVCGY

SEQ ID NO: 21794 - protein, 9 aa, Artificial Sequence
  Description of Artificial Sequence: Synthetic peptide
ECMHAEWQA

SEQ ID NO: 21795 - protein, 9 aa, Artificial Sequence
  Description of Artificial Sequence: Synthetic peptide
ECMLIGTDG

SEQ ID NO: 21796 - protein, 9 aa, Artificial Sequence
  Description of Artificial Sequence: Synthetic peptide
ECPDYMRKD

SEQ ID NO: 21797 - protein, 9 aa, Artificial Sequence
  Description of Artificial Sequence: Synthetic peptide
ECQMHRTFA

SEQ ID NO: 21798 - protein, 9 aa, Artificial Sequence
  Description of Artificial Sequence: Synthetic peptide
ECRPWGMHE

SEQ ID NO: 21799 - protein, 9 aa, Artificial Sequence
  Description of Artificial Sequence: Synthetic peptide
ECSESAEAK

SEQ ID NO: 21800 - protein, 9 aa, Artificial Sequence
  Description of Artificial Sequence: Synthetic peptide
ECTVMQRGA

SEQ ID NO: 21801 - protein, 9 aa, Artificial Sequence
  Description of Artificial Sequence: Synthetic peptide
ECWFCDIWR

SEQ ID NO: 21802 - protein, 9 aa, Artificial Sequence
  Description of Artificial Sequence: Synthetic peptide
EDLHQWAQH

SEQ ID NO: 21803 - protein, 9 aa, Artificial Sequence
  Description of Artificial Sequence: Synthetic peptide
EDMFCPTKA

SEQ ID NO: 21804 - protein, 9 aa, Artificial Sequence
  Description of Artificial Sequence: Synthetic peptide
EEDFRNEAM

SEQ ID NO: 21805 - protein, 9 aa, Artificial Sequence
  Description of Artificial Sequence: Synthetic peptide
EEDMQRTVQ

SEQ ID NO: 21806 - protein, 9 aa, Artificial Sequence
  Description of Artificial Sequence: Synthetic peptide
EEEAGKWMC

SEQ ID NO: 21807 - protein, 9 aa, Artificial Sequence
  Description of Artificial Sequence: Synthetic peptide
EELEQIWHG

SEQ ID NO: 21808 - protein, 9 aa, Artificial Sequence
  Description of Artificial Sequence: Synthetic peptide
EESLDVVMK

SEQ ID NO: 21809 - protein, 9 aa, Artificial Sequence
  Description of Artificial Sequence: Synthetic peptide
EFCYEPDWD

SEQ ID NO: 21810 - protein, 9 aa, Artificial Sequence
  Description of Artificial Sequence: Synthetic peptide
EFETFWEVG

SEQ ID NO: 21811 - protein, 9 aa, Artificial Sequence
  Description of Artificial Sequence: Synthetic peptide
EFGTMHYAP

SEQ ID NO: 21812 - protein, 9 aa, Artificial Sequence
  Description of Artificial Sequence: Synthetic peptide
EFGTSQKDA

SEQ ID NO: 21813 - protein, 9 aa, Artificial Sequence
  Description of Artificial Sequence: Synthetic peptide
EFGYSPGVS

SEQ ID NO: 21814 - protein, 9 aa, Artificial Sequence
  Description of Artificial Sequence: Synthetic peptide
EFIHAENWY

SEQ ID NO: 21815 - protein, 9 aa, Artificial Sequence
  Description of Artificial Sequence: Synthetic peptide
EFKARMVTP

SEQ ID NO: 21816 - protein, 9 aa, Artificial Sequence
  Description of Artificial Sequence: Synthetic peptide
EFLVNTSWL

SEQ ID NO: 21817 - protein, 9 aa, Artificial Sequence
  Description of Artificial Sequence: Synthetic peptide
EFMCSCMLN

SEQ ID NO: 21818 - protein, 9 aa, Artificial Sequence
  Description of Artificial Sequence: Synthetic peptide
EFMTYETNV

SEQ ID NO: 21819 - protein, 9 aa, Artificial Sequence
  Description of Artificial Sequence: Synthetic peptide
EFNSIMHWW

SEQ ID NO: 21820 - protein, 9 aa, Artificial Sequence
  Description of Artificial Sequence: Synthetic peptide
EFQWRACFQ

SEQ ID NO: 21821 - protein, 9 aa, Artificial Sequence
  Description of Artificial Sequence: Synthetic peptide
EFRMASSDA

SEQ ID NO: 21822 - protein, 9 aa, Artificial Sequence
  Description of Artificial Sequence: Synthetic peptide
EFSDVQRTA

SEQ ID NO: 21823 - protein, 9 aa, Artificial Sequence
  Description of Artificial Sequence: Synthetic peptide
EFSITMAPW

SEQ ID NO: 21824 - protein, 9 aa, Artificial Sequence
  Description of Artificial Sequence: Synthetic peptide
EFSKMSGTA

SEQ ID NO: 21825 - protein, 9 aa, Artificial Sequence
  Description of Artificial Sequence: Synthetic peptide
EFVEKWLWG

SEQ ID NO: 21826 - protein, 9 aa, Artificial Sequence
  Description of Artificial Sequence: Synthetic peptide
EGAELEWDH

SEQ ID NO: 21827 - protein, 9 aa, Artificial Sequence
  Description of Artificial Sequence: Synthetic peptide
EGAQLDVMS

SEQ ID NO: 21828 - protein, 9 aa, Artificial Sequence
  Description of Artificial Sequence: Synthetic peptide
EGDMTTNQY

SEQ ID NO: 21829 - protein, 9 aa, Artificial Sequence
  Description of Artificial Sequence: Synthetic peptide
EGEELRVAY

SEQ ID NO: 21830 - protein, 9 aa, Artificial Sequence
  Description of Artificial Sequence: Synthetic peptide
EGEEYTLPS

SEQ ID NO: 21831 - protein, 9 aa, Artificial Sequence
  Description of Artificial Sequence: Synthetic peptide
EGFLGFGQN

SEQ ID NO: 21832 - protein, 9 aa, Artificial Sequence
  Description of Artificial Sequence: Synthetic peptide
EGFYLEGDP

SEQ ID NO: 21833 - protein, 9 aa, Artificial Sequence
  Description of Artificial Sequence: Synthetic peptide
EGKEWIFYE

SEQ ID NO: 21834 - protein, 9 aa, Artificial Sequence
  Description of Artificial Sequence: Synthetic peptide
EGMKTQQTF

SEQ ID NO: 21835 - protein, 9 aa, Artificial Sequence
  Description of Artificial Sequence: Synthetic peptide
EGMWPHSAF

SEQ ID NO: 21836 - protein, 9 aa, Artificial Sequence
  Description of Artificial Sequence: Synthetic peptide
EGQRLTWAQ

SEQ ID NO: 21837 - protein, 9 aa, Artificial Sequence
  Description of Artificial Sequence: Synthetic peptide
EGRQHFVYA

SEQ ID NO: 21838 - protein, 9 aa, Artificial Sequence
  Description of Artificial Sequence: Synthetic peptide
EGSQWRTSI

SEQ ID NO: 21839 - protein, 9 aa, Artificial Sequence
  Description of Artificial Sequence: Synthetic peptide
EGTMSNGWQ

SEQ ID NO: 21840 - protein, 9 aa, Artificial Sequence
  Description of Artificial Sequence: Synthetic peptide
EGVRLNLYG

SEQ ID NO: 21841 - protein, 9 aa, Artificial Sequence
  Description of Artificial Sequence: Synthetic peptide
EGWFMKKQD

SEQ ID NO: 21842 - protein, 9 aa, Artificial Sequence
  Description of Artificial Sequence: Synthetic peptide
EGYEYHTQR

SEQ ID NO: 21843 - protein, 9 aa, Artificial Sequence
  Description of Artificial Sequence: Synthetic peptide
EHATESWAG

SEQ ID NO: 21844 - protein, 9 aa, Artificial Sequence
  Description of Artificial Sequence: Synthetic peptide
EHATIENWP

SEQ ID NO: 21845 - protein, 9 aa, Artificial Sequence
  Description of Artificial Sequence: Synthetic peptide
EHDGVWMYQ

SEQ ID NO: 21846 - protein, 9 aa, Artificial Sequence
  Description of Artificial Sequence: Synthetic peptide
EHEDTIAHD

SEQ ID NO: 21847 - protein, 9 aa, Artificial Sequence
  Description of Artificial Sequence: Synthetic peptide
EHFPQQSGD

SEQ ID NO: 21848 - protein, 9 aa, Artificial Sequence
  Description of Artificial Sequence: Synthetic peptide
EHGPCMSGC

SEQ ID NO: 21849 - protein, 9 aa, Artificial Sequence
  Description of Artificial Sequence: Synthetic peptide
EHIGCGYWQ

SEQ ID NO: 21850 - protein, 9 aa, Artificial Sequence
  Description of Artificial Sequence: Synthetic peptide
EHIRFGHYW

SEQ ID NO: 21851 - protein, 9 aa, Artificial Sequence
  Description of Artificial Sequence: Synthetic peptide
EHKPDGANY

SEQ ID NO: 21852 - protein, 9 aa, Artificial Sequence
  Description of Artificial Sequence: Synthetic peptide
EHLKLLIAC

SEQ ID NO: 21853 - protein, 9 aa, Artificial Sequence
  Description of Artificial Sequence: Synthetic peptide
EHMSICDAP

SEQ ID NO: 21854 - protein, 9 aa, Artificial Sequence
  Description of Artificial Sequence: Synthetic peptide
EHNSEDCIC

SEQ ID NO: 21855 - protein, 9 aa, Artificial Sequence
  Description of Artificial Sequence: Synthetic peptide
EHPMENTYQ

SEQ ID NO: 21856 - protein, 9 aa, Artificial Sequence
  Description of Artificial Sequence: Synthetic peptide
EHQFMWQDH

SEQ ID NO: 21857 - protein, 9 aa, Artificial Sequence
  Description of Artificial Sequence: Synthetic peptide
EHRDHDAWA

SEQ ID NO: 21858 - protein, 9 aa, Artificial Sequence
  Description of Artificial Sequence: Synthetic peptide
EHVKCNHFF

SEQ ID NO: 21859 - protein, 9 aa, Artificial Sequence
  Description of Artificial Sequence: Synthetic peptide
EIAGSIMHL

SEQ ID NO: 21860 - protein, 9 aa, Artificial Sequence
  Description of Artificial Sequence: Synthetic peptide
EIAKWNCEL

SEQ ID NO: 21861 - protein, 9 aa, Artificial Sequence
  Description of Artificial Sequence: Synthetic peptide
EIAQLQFDQ

SEQ ID NO: 21862 - protein, 9 aa, Artificial Sequence
  Description of Artificial Sequence: Synthetic peptide
EICAFDVGW

SEQ ID NO: 21863 - protein, 9 aa, Artificial Sequence
  Description of Artificial Sequence: Synthetic peptide
EICVIECEQ

SEQ ID NO: 21864 - protein, 9 aa, Artificial Sequence
  Description of Artificial Sequence: Synthetic peptide
EIDYHICSG

SEQ ID NO: 21865 - protein, 9 aa, Artificial Sequence
  Description of Artificial Sequence: Synthetic peptide
EIEMAVAYA

SEQ ID NO: 21866 - protein, 9 aa, Artificial Sequence
  Description of Artificial Sequence: Synthetic peptide
EIETSAREQ

SEQ ID NO: 21867 - protein, 9 aa, Artificial Sequence
  Description of Artificial Sequence: Synthetic peptide
EIFQYMHHH

SEQ ID NO: 21868 - protein, 9 aa, Artificial Sequence
  Description of Artificial Sequence: Synthetic peptide
EIGIGAPDY

SEQ ID NO: 21869 - protein, 9 aa, Artificial Sequence
  Description of Artificial Sequence: Synthetic peptide
EIHHGHAVP

SEQ ID NO: 21870 - protein, 9 aa, Artificial Sequence
  Description of Artificial Sequence: Synthetic peptide
EIIAQKWTQ

SEQ ID NO: 21871 - protein, 9 aa, Artificial Sequence
  Description of Artificial Sequence: Synthetic peptide
EIIMYEQHM

SEQ ID NO: 21872 - protein, 9 aa, Artificial Sequence
  Description of Artificial Sequence: Synthetic peptide
EIIPTSMFG

SEQ ID NO: 21873 - protein, 9 aa, Artificial Sequence
  Description of Artificial Sequence: Synthetic peptide
EIITVRDDE

SEQ ID NO: 21874 - protein, 9 aa, Artificial Sequence
  Description of Artificial Sequence: Synthetic peptide
EIIYRFVDA

SEQ ID NO: 21875 - protein, 9 aa, Artificial Sequence
  Description of Artificial Sequence: Synthetic peptide
EILSDDDMP

SEQ ID NO: 21876 - protein, 9 aa, Artificial Sequence
  Description of Artificial Sequence: Synthetic peptide
EIMHRCHFW

SEQ ID NO: 21877 - protein, 9 aa, Artificial Sequence
  Description of Artificial Sequence: Synthetic peptide
EIMIQVIRD

SEQ ID NO: 21878 - protein, 9 aa, Artificial Sequence
  Description of Artificial Sequence: Synthetic peptide
EIMMEHDNK

SEQ ID NO: 21879 - protein, 9 aa, Artificial Sequence
  Description of Artificial Sequence: Synthetic peptide
EIMWPLAGN

SEQ ID NO: 21880 - protein, 9 aa, Artificial Sequence
  Description of Artificial Sequence: Synthetic peptide
EINLGHQHN

SEQ ID NO: 21881 - protein, 9 aa, Artificial Sequence
  Description of Artificial Sequence: Synthetic peptide
EIQMILTAV

SEQ ID NO: 21882 - protein, 9 aa, Artificial Sequence
  Description of Artificial Sequence: Synthetic peptide
EIRSHDTGH

SEQ ID NO: 21883 - protein, 9 aa, Artificial Sequence
  Description of Artificial Sequence: Synthetic peptide
EISWQDRDL

SEQ ID NO: 21884 - protein, 9 aa, Artificial Sequence
  Description of Artificial Sequence: Synthetic peptide
EITFNQYGH

SEQ ID NO: 21885 - protein, 9 aa, Artificial Sequence
  Description of Artificial Sequence: Synthetic peptide
EITWESNIA

SEQ ID NO: 21886 - protein, 9 aa, Artificial Sequence
  Description of Artificial Sequence: Synthetic peptide
EIVDLTVME

SEQ ID NO: 21887 - protein, 9 aa, Artificial Sequence
  Description of Artificial Sequence: Synthetic peptide
EIVEHDYRE

SEQ ID NO: 21888 - protein, 9 aa, Artificial Sequence
  Description of Artificial Sequence: Synthetic peptide
EIVYMMCPC

SEQ ID NO: 21889 - protein, 9 aa, Artificial Sequence
  Description of Artificial Sequence: Synthetic peptide
EKAGNLERK

SEQ ID NO: 21890 - protein, 9 aa, Artificial Sequence
  Description of Artificial Sequence: Synthetic peptide
EKDQYKMGS

SEQ ID NO: 21891 - protein, 9 aa, Artificial Sequence
  Description of Artificial Sequence: Synthetic peptide
EKEQFSHKG

SEQ ID NO: 21892 - protein, 9 aa, Artificial Sequence
  Description of Artificial Sequence: Synthetic peptide
EKGMIDLVY

SEQ ID NO: 21893 - protein, 9 aa, Artificial Sequence
  Description of Artificial Sequence: Synthetic peptide
EKGMNMHAG

SEQ ID NO: 21894 - protein, 9 aa, Artificial Sequence
  Description of Artificial Sequence: Synthetic peptide
EKHQLSVQQ

SEQ ID NO: 21895 - protein, 9 aa, Artificial Sequence
  Description of Artificial Sequence: Synthetic peptide
EKQWLSRQD

SEQ ID NO: 21896 - protein, 9 aa, Artificial Sequence
  Description of Artificial Sequence: Synthetic peptide
EKSGYHFSC

SEQ ID NO: 21897 - protein, 9 aa, Artificial Sequence
  Description of Artificial Sequence: Synthetic peptide
EKVICLYRG

SEQ ID NO: 21898 - protein, 9 aa, Artificial Sequence
  Description of Artificial Sequence: Synthetic peptide
EKVTLNMDM

SEQ ID NO: 21899 - protein, 9 aa, Artificial Sequence
  Description of Artificial Sequence: Synthetic peptide
EKYMNFMCP

SEQ ID NO: 21900 - protein, 9 aa, Artificial Sequence
  Description of Artificial Sequence: Synthetic peptide
ELADQNQIQ

SEQ ID NO: 21901 - protein, 9 aa, Artificial Sequence
  Description of Artificial Sequence: Synthetic peptide
ELAWIWQIH

SEQ ID NO: 21902 - protein, 9 aa, Artificial Sequence
  Description of Artificial Sequence: Synthetic peptide
ELCCNDMFK

SEQ ID NO: 21903 - protein, 9 aa, Artificial Sequence
  Description of Artificial Sequence: Synthetic peptide
ELERTVKEF

SEQ ID NO: 21904 - protein, 9 aa, Artificial Sequence
  Description of Artificial Sequence: Synthetic peptide
ELGYSEKVC

SEQ ID NO: 21905 - protein, 9 aa, Artificial Sequence
  Description of Artificial Sequence: Synthetic peptide
ELLTCIECG

SEQ ID NO: 21906 - protein, 9 aa, Artificial Sequence
  Description of Artificial Sequence: Synthetic peptide
ELNFCWQQR

SEQ ID NO: 21907 - protein, 9 aa, Artificial Sequence
  Description of Artificial Sequence: Synthetic peptide
ELYMNNHTE

SEQ ID NO: 21908 - protein, 9 aa, Artificial Sequence
  Description of Artificial Sequence: Synthetic peptide
EMAELNQHV

SEQ ID NO: 21909 - protein, 9 aa, Artificial Sequence
  Description of Artificial Sequence: Synthetic peptide
EMDQVPWGF

SEQ ID NO: 21910 - protein, 9 aa, Artificial Sequence
  Description of Artificial Sequence: Synthetic peptide
EMEFPDMCM

SEQ ID NO: 21911 - protein, 9 aa, Artificial Sequence
  Description of Artificial Sequence: Synthetic peptide
EMEWQDSWW

SEQ ID NO: 21912 - protein, 9 aa, Artificial Sequence
  Description of Artificial Sequence: Synthetic peptide
EMGFGKQGM

SEQ ID NO: 21913 - protein, 9 aa, Artificial Sequence
  Description of Artificial Sequence: Synthetic peptide
EMGMPSYMK

SEQ ID NO: 21914 - protein, 9 aa, Artificial Sequence
  Description of Artificial Sequence: Synthetic peptide
EMKEAWLSA

SEQ ID NO: 21915 - protein, 9 aa, Artificial Sequence
  Description of Artificial Sequence: Synthetic peptide
EMMVLCENE

SEQ ID NO: 21916 - protein, 9 aa, Artificial Sequence
  Description of Artificial Sequence: Synthetic peptide
EMPTTCKNC

SEQ ID NO: 21917 - protein, 9 aa, Artificial Sequence
  Description of Artificial Sequence: Synthetic peptide
EMQCYQTYH

SEQ ID NO: 21918 - protein, 9 aa, Artificial Sequence
  Description of Artificial Sequence: Synthetic peptide
EMSECSITA

SEQ ID NO: 21919 - protein, 9 aa, Artificial Sequence
  Description of Artificial Sequence: Synthetic peptide
EMTPQQFWH

SEQ ID NO: 21920 - protein, 9 aa, Artificial Sequence
  Description of Artificial Sequence: Synthetic peptide
EMWICHFGG

SEQ ID NO: 21921 - protein, 9 aa, Artificial Sequence
  Description of Artificial Sequence: Synthetic peptide
EMWSRGMVN

SEQ ID NO: 21922 - protein, 9 aa, Artificial Sequence
  Description of Artificial Sequence: Synthetic peptide
EMYPFSKQL

SEQ ID NO: 21923 - protein, 9 aa, Artificial Sequence
  Description of Artificial Sequence: Synthetic peptide
ENAEIKDHM

SEQ ID NO: 21924 - protein, 9 aa, Artificial Sequence
  Description of Artificial Sequence: Synthetic peptide
ENAIKHHDS

SEQ ID NO: 21925 - protein, 9 aa, Artificial Sequence
  Description of Artificial Sequence: Synthetic peptide
ENAQRHNYA

SEQ ID NO: 21926 - protein, 9 aa, Artificial Sequence
  Description of Artificial Sequence: Synthetic peptide
ENDAEVPDH

SEQ ID NO: 21927 - protein, 9 aa, Artificial Sequence
  Description of Artificial Sequence: Synthetic peptide
ENEAMAKWF

SEQ ID NO: 21928 - protein, 9 aa, Artificial Sequence
  Description of Artificial Sequence: Synthetic peptide
ENFMLRPCN

SEQ ID NO: 21929 - protein, 9 aa, Artificial Sequence
  Description of Artificial Sequence: Synthetic peptide
ENHASAHVR

SEQ ID NO: 21930 - protein, 9 aa, Artificial Sequence
  Description of Artificial Sequence: Synthetic peptide
ENHIEFWWP

SEQ ID NO: 21931 - protein, 9 aa, Artificial Sequence
  Description of Artificial Sequence: Synthetic peptide
ENLESRLQH

SEQ ID NO: 21932 - protein, 9 aa, Artificial Sequence
  Description of Artificial Sequence: Synthetic peptide
ENLHCDCLY

SEQ ID NO: 21933 - protein, 9 aa, Artificial Sequence
  Description of Artificial Sequence: Synthetic peptide
ENLRMGKWE

SEQ ID NO: 21934 - protein, 9 aa, Artificial Sequence
  Description of Artificial Sequence: Synthetic peptide
ENVKLDQCD

SEQ ID NO: 21935 - protein, 9 aa, Artificial Sequence
  Description of Artificial Sequence: Synthetic peptide
ENWHLVAHR

SEQ ID NO: 21936 - protein, 9 aa, Artificial Sequence
  Description of Artificial Sequence: Synthetic peptide
ENYCQCCLE

SEQ ID NO: 21937 - protein, 9 aa, Artificial Sequence
  Description of Artificial Sequence: Synthetic peptide
ENYRHHTGP

SEQ ID NO: 21938 - protein, 9 aa, Artificial Sequence
  Description of Artificial Sequence: Synthetic peptide
EPEWLGHEE

SEQ ID NO: 21939 - protein, 9 aa, Artificial Sequence
  Description of Artificial Sequence: Synthetic peptide
EPGPMQCWD

SEQ ID NO: 21940 - protein, 9 aa, Artificial Sequence
  Description of Artificial Sequence: Synthetic peptide
EPGQFFHDC

SEQ ID NO: 21941 - protein, 9 aa, Artificial Sequence
  Description of Artificial Sequence: Synthetic peptide
EPLDNVGCG

SEQ ID NO: 21942 - protein, 9 aa, Artificial Sequence
  Description of Artificial Sequence: Synthetic peptide
EPMNGKVME

SEQ ID NO: 21943 - protein, 9 aa, Artificial Sequence
  Description of Artificial Sequence: Synthetic peptide
EPNAQMTAA

SEQ ID NO: 21944 - protein, 9 aa, Artificial Sequence
  Description of Artificial Sequence: Synthetic peptide
EPQEVENMT

SEQ ID NO: 21945 - protein, 9 aa, Artificial Sequence
  Description of Artificial Sequence: Synthetic peptide
EPTLVGEVP

SEQ ID NO: 21946 - protein, 9 aa, Artificial Sequence
  Description of Artificial Sequence: Synthetic peptide
EPTNIWAVH

SEQ ID NO: 21947 - protein, 9 aa, Artificial Sequence
  Description of Artificial Sequence: Synthetic peptide
EPTSATWVY

SEQ ID NO: 21948 - protein, 9 aa, Artificial Sequence
  Description of Artificial Sequence: Synthetic peptide
EPVHLPEWM

SEQ ID NO: 21949 - protein, 9 aa, Artificial Sequence
  Description of Artificial Sequence: Synthetic peptide
EQFGCGQWL

SEQ ID NO: 21950 - protein, 9 aa, Artificial Sequence
  Description of Artificial Sequence: Synthetic peptide
EQKMKQIAQ

SEQ ID NO: 21951 - protein, 9 aa, Artificial Sequence
  Description of Artificial Sequence: Synthetic peptide
EQKSTQTFH

SEQ ID NO: 21952 - protein, 9 aa, Artificial Sequence
  Description of Artificial Sequence: Synthetic peptide
EQLDSHWWK

SEQ ID NO: 21953 - protein, 9 aa, Artificial Sequence
  Description of Artificial Sequence: Synthetic peptide
EQLDVKYWH

SEQ ID NO: 21954 - protein, 9 aa, Artificial Sequence
  Description of Artificial Sequence: Synthetic peptide
EQLIEWSSH

SEQ ID NO: 21955 - protein, 9 aa, Artificial Sequence
  Description of Artificial Sequence: Synthetic peptide
EQNMLDADC

SEQ ID NO: 21956 - protein, 9 aa, Artificial Sequence
  Description of Artificial Sequence: Synthetic peptide
EQQPMASFT

SEQ ID NO: 21957 - protein, 9 aa, Artificial Sequence
  Description of Artificial Sequence: Synthetic peptide
EQQYLAQGK

SEQ ID NO: 21958 - protein, 9 aa, Artificial Sequence
  Description of Artificial Sequence: Synthetic peptide
EQTATMRWD

SEQ ID NO: 21959 - protein, 9 aa, Artificial Sequence
  Description of Artificial Sequence: Synthetic peptide
EQVYYWNTP

SEQ ID NO: 21960 - protein, 9 aa, Artificial Sequence
  Description of Artificial Sequence: Synthetic peptide
EQWYDEIPH

SEQ ID NO: 21961 - protein, 9 aa, Artificial Sequence
  Description of Artificial Sequence: Synthetic peptide
EQYYFNQLR

SEQ ID NO: 21962 - protein, 9 aa, Artificial Sequence
  Description of Artificial Sequence: Synthetic peptide
ERFYQHAAK

SEQ ID NO: 21963 - protein, 9 aa, Artificial Sequence
  Description of Artificial Sequence: Synthetic peptide
ERGYNMAQH

SEQ ID NO: 21964 - protein, 9 aa, Artificial Sequence
  Description of Artificial Sequence: Synthetic peptide
ERIQWTHMG

SEQ ID NO: 21965 - protein, 9 aa, Artificial Sequence
  Description of Artificial Sequence: Synthetic peptide
ERTAPSSRG

SEQ ID NO: 21966 - protein, 9 aa, Artificial Sequence
  Description of Artificial Sequence: Synthetic peptide
ERTMVHQYW

SEQ ID NO: 21967 - protein, 9 aa, Artificial Sequence
  Description of Artificial Sequence: Synthetic peptide
ERVDQENCH

SEQ ID NO: 21968 - protein, 9 aa, Artificial Sequence
  Description of Artificial Sequence: Synthetic peptide
ERVTDEHEI

SEQ ID NO: 21969 - protein, 9 aa, Artificial Sequence
  Description of Artificial Sequence: Synthetic peptide
ERYHMRWEP

SEQ ID NO: 21970 - protein, 9 aa, Artificial Sequence
  Description of Artificial Sequence: Synthetic peptide
ESANYMNLF

SEQ ID NO: 21971 - protein, 9 aa, Artificial Sequence
  Description of Artificial Sequence: Synthetic peptide
ESCYMMMNW

SEQ ID NO: 21972 - protein, 9 aa, Artificial Sequence
  Description of Artificial Sequence: Synthetic peptide
ESGMLFYFM

SEQ ID NO: 21973 - protein, 9 aa, Artificial Sequence
  Description of Artificial Sequence: Synthetic peptide
ESKAHAQTP

SEQ ID NO: 21974 - protein, 9 aa, Artificial Sequence
  Description of Artificial Sequence: Synthetic peptide
ESKTTSCAF

SEQ ID NO: 21975 - protein, 9 aa, Artificial Sequence
  Description of Artificial Sequence: Synthetic peptide
ESLRAENMP

SEQ ID NO: 21976 - protein, 9 aa, Artificial Sequence
  Description of Artificial Sequence: Synthetic peptide
ESMGFEECG

SEQ ID NO: 21977 - protein, 9 aa, Artificial Sequence
  Description of Artificial Sequence: Synthetic peptide
ESMKLIQCD

SEQ ID NO: 21978 - protein, 9 aa, Artificial Sequence
  Description of Artificial Sequence: Synthetic peptide
ESMNIMTYK

SEQ ID NO: 21979 - protein, 9 aa, Artificial Sequence
  Description of Artificial Sequence: Synthetic peptide
ESNDNGNQW

SEQ ID NO: 21980 - protein, 9 aa, Artificial Sequence
  Description of Artificial Sequence: Synthetic peptide
ESNPVCVLK

SEQ ID NO: 21981 - protein, 9 aa, Artificial Sequence
  Description of Artificial Sequence: Synthetic peptide
ESRCAWLSD

SEQ ID NO: 21982 - protein, 9 aa, Artificial Sequence
  Description of Artificial Sequence: Synthetic peptide
ESRKEIGYA

SEQ ID NO: 21983 - protein, 9 aa, Artificial Sequence
  Description of Artificial Sequence: Synthetic peptide
ESRRHHWAH

SEQ ID NO: 21984 - protein, 9 aa, Artificial Sequence
  Description of Artificial Sequence: Synthetic peptide
ESSDISNYL

SEQ ID NO: 21985 - protein, 9 aa, Artificial Sequence
  Description of Artificial Sequence: Synthetic peptide
ESTLLLCHG

SEQ ID NO: 21986 - protein, 9 aa, Artificial Sequence
  Description of Artificial Sequence: Synthetic peptide
ESTNLQCVL

SEQ ID NO: 21987 - protein, 9 aa, Artificial Sequence
  Description of Artificial Sequence: Synthetic peptide
ESVTSLDQQ

SEQ ID NO: 21988 - protein, 9 aa, Artificial Sequence
  Description of Artificial Sequence: Synthetic peptide
ESYETQLAC

SEQ ID NO: 21989 - protein, 9 aa, Artificial Sequence
  Description of Artificial Sequence: Synthetic peptide
ESYFSETQP

SEQ ID NO: 21990 - protein, 9 aa, Artificial Sequence
  Description of Artificial Sequence: Synthetic peptide
ESYIVFDNT

SEQ ID NO: 21991 - protein, 9 aa, Artificial Sequence
  Description of Artificial Sequence: Synthetic peptide
ESYKCIRDC

SEQ ID NO: 21992 - protein, 9 aa, Artificial Sequence
  Description of Artificial Sequence: Synthetic peptide
ETAHYSMRE

SEQ ID NO: 21993 - protein, 9 aa, Artificial Sequence
  Description of Artificial Sequence: Synthetic peptide
ETANQEWER

SEQ ID NO: 21994 - protein, 9 aa, Artificial Sequence
  Description of Artificial Sequence: Synthetic peptide
ETASKNVQT

SEQ ID NO: 21995 - protein, 9 aa, Artificial Sequence
  Description of Artificial Sequence: Synthetic peptide
ETCILAVDG

SEQ ID NO: 21996 - protein, 9 aa, Artificial Sequence
  Description of Artificial Sequence: Synthetic peptide
ETDEIYIVG

SEQ ID NO: 21997 - protein, 9 aa, Artificial Sequence
  Description of Artificial Sequence: Synthetic peptide
ETDQQYDQY

SEQ ID NO: 21998 - protein, 9 aa, Artificial Sequence
  Description of Artificial Sequence: Synthetic peptide
ETEEIVNMA

SEQ ID NO: 21999 - protein, 9 aa, Artificial Sequence
  Description of Artificial Sequence: Synthetic peptide
ETEGYLFSP

SEQ ID NO: 22000 - protein, 9 aa, Artificial Sequence
  Description of Artificial Sequence: Synthetic peptide
ETEPPDTQG

SEQ ID NO: 22001 - protein, 9 aa, Artificial Sequence
  Description of Artificial Sequence: Synthetic peptide
ETESMMFCN

SEQ ID NO: 22002 - protein, 9 aa, Artificial Sequence
  Description of Artificial Sequence: Synthetic peptide
ETHTYDDCS

SEQ ID NO: 22003 - protein, 9 aa, Artificial Sequence
  Description of Artificial Sequence: Synthetic peptide
ETIAMQYRC

SEQ ID NO: 22004 - protein, 9 aa, Artificial Sequence
  Description of Artificial Sequence: Synthetic peptide
ETKCYAMLG

SEQ ID NO: 22005 - protein, 9 aa, Artificial Sequence
  Description of Artificial Sequence: Synthetic peptide
ETKIYDCNG

SEQ ID NO: 22006 - protein, 9 aa, Artificial Sequence
  Description of Artificial Sequence: Synthetic peptide
ETKLAIDEF

SEQ ID NO: 22007 - protein, 9 aa, Artificial Sequence
  Description of Artificial Sequence: Synthetic peptide
ETKSVLDEH

SEQ ID NO: 22008 - protein, 9 aa, Artificial Sequence
  Description of Artificial Sequence: Synthetic peptide
ETMCPKGPL

SEQ ID NO: 22009 - protein, 9 aa, Artificial Sequence
  Description of Artificial Sequence: Synthetic peptide
ETMNQIGSC

SEQ ID NO: 22010 - protein, 9 aa, Artificial Sequence
  Description of Artificial Sequence: Synthetic peptide
ETNLFEHST

SEQ ID NO: 22011 - protein, 9 aa, Artificial Sequence
  Description of Artificial Sequence: Synthetic peptide
ETPGTKQCS

SEQ ID NO: 22012 - protein, 9 aa, Artificial Sequence
  Description of Artificial Sequence: Synthetic peptide
ETQRDRHTN

SEQ ID NO: 22013 - protein, 9 aa, Artificial Sequence
  Description of Artificial Sequence: Synthetic peptide
ETRDYLEAD

SEQ ID NO: 22014 - protein, 9 aa, Artificial Sequence
  Description of Artificial Sequence: Synthetic peptide
ETRQMDGNN

SEQ ID NO: 22015 - protein, 9 aa, Artificial Sequence
  Description of Artificial Sequence: Synthetic peptide
ETSMRFESL

SEQ ID NO: 22016 - protein, 9 aa, Artificial Sequence
  Description of Artificial Sequence: Synthetic peptide
ETSRMNVDA

SEQ ID NO: 22017 - protein, 9 aa, Artificial Sequence
  Description of Artificial Sequence: Synthetic peptide
ETTCYAYME

SEQ ID NO: 22018 - protein, 9 aa, Artificial Sequence
  Description of Artificial Sequence: Synthetic peptide
ETVERQCEQ

SEQ ID NO: 22019 - protein, 9 aa, Artificial Sequence
  Description of Artificial Sequence: Synthetic peptide
EVAETSHSY

SEQ ID NO: 22020 - protein, 9 aa, Artificial Sequence
  Description of Artificial Sequence: Synthetic peptide
EVANGKGDH

SEQ ID NO: 22021 - protein, 9 aa, Artificial Sequence
  Description of Artificial Sequence: Synthetic peptide
EVCLGQRYA

SEQ ID NO: 22022 - protein, 9 aa, Artificial Sequence
  Description of Artificial Sequence: Synthetic peptide
EVDRHLGMQ

SEQ ID NO: 22023 - protein, 9 aa, Artificial Sequence
  Description of Artificial Sequence: Synthetic peptide
EVEACKYEY

SEQ ID NO: 22024 - protein, 9 aa, Artificial Sequence
  Description of Artificial Sequence: Synthetic peptide
EVECTHRGE

SEQ ID NO: 22025 - protein, 9 aa, Artificial Sequence
  Description of Artificial Sequence: Synthetic peptide
EVEVWSVYH

SEQ ID NO: 22026 - protein, 9 aa, Artificial Sequence
  Description of Artificial Sequence: Synthetic peptide
EVFPYGCQN

SEQ ID NO: 22027 - protein, 9 aa, Artificial Sequence
  Description of Artificial Sequence: Synthetic peptide
EVGMIVHPD

SEQ ID NO: 22028 - protein, 9 aa, Artificial Sequence
  Description of Artificial Sequence: Synthetic peptide
EVGTCYFSK

SEQ ID NO: 22029 - protein, 9 aa, Artificial Sequence
  Description of Artificial Sequence: Synthetic peptide
EVHKNDKMH

SEQ ID NO: 22030 - protein, 9 aa, Artificial Sequence
  Description of Artificial Sequence: Synthetic peptide
EVHSMDTQW

SEQ ID NO: 22031 - protein, 9 aa, Artificial Sequence
  Description of Artificial Sequence: Synthetic peptide
EVIQTSDNR

SEQ ID NO: 22032 - protein, 9 aa, Artificial Sequence
  Description of Artificial Sequence: Synthetic peptide
EVKFEMLCQ

SEQ ID NO: 22033 - protein, 9 aa, Artificial Sequence
  Description of Artificial Sequence: Synthetic peptide
EVKHKQDWA

SEQ ID NO: 22034 - protein, 9 aa, Artificial Sequence
  Description of Artificial Sequence: Synthetic peptide
EVKNKGGFC

SEQ ID NO: 22035 - protein, 9 aa, Artificial Sequence
  Description of Artificial Sequence: Synthetic peptide
EVKPCLVVQ

SEQ ID NO: 22036 - protein, 9 aa, Artificial Sequence
  Description of Artificial Sequence: Synthetic peptide
EVKTRMCAG

SEQ ID NO: 22037 - protein, 9 aa, Artificial Sequence
  Description of Artificial Sequence: Synthetic peptide
EVLKAQREV

SEQ ID NO: 22038 - protein, 9 aa, Artificial Sequence
  Description of Artificial Sequence: Synthetic peptide
EVLLSTDEA

SEQ ID NO: 22039 - protein, 9 aa, Artificial Sequence
  Description of Artificial Sequence: Synthetic peptide
EVLPYEWCE

SEQ ID NO: 22040 - protein, 9 aa, Artificial Sequence
  Description of Artificial Sequence: Synthetic peptide
EVMIRKLDM

SEQ ID NO: 22041 - protein, 9 aa, Artificial Sequence
  Description of Artificial Sequence: Synthetic peptide
EVMYSERTW

SEQ ID NO: 22042 - protein, 9 aa, Artificial Sequence
  Description of Artificial Sequence: Synthetic peptide
EVNMEMQLA

SEQ ID NO: 22043 - protein, 9 aa, Artificial Sequence
  Description of Artificial Sequence: Synthetic peptide
EVQGEKCLN

SEQ ID NO: 22044 - protein, 9 aa, Artificial Sequence
  Description of Artificial Sequence: Synthetic peptide
EVQQFHRDQ

SEQ ID NO: 22045 - protein, 9 aa, Artificial Sequence
  Description of Artificial Sequence: Synthetic peptide
EVQRWSGYH

SEQ ID NO: 22046 - protein, 9 aa, Artificial Sequence
  Description of Artificial Sequence: Synthetic peptide
EVRGAEANH

SEQ ID NO: 22047 - protein, 9 aa, Artificial Sequence
  Description of Artificial Sequence: Synthetic peptide
EVSKLATTY

SEQ ID NO: 22048 - protein, 9 aa, Artificial Sequence
  Description of Artificial Sequence: Synthetic peptide
EVSQFGIMN

SEQ ID NO: 22049 - protein, 9 aa, Artificial Sequence
  Description of Artificial Sequence: Synthetic peptide
EVTFWTCEG

SEQ ID NO: 22050 - protein, 9 aa, Artificial Sequence
  Description of Artificial Sequence: Synthetic peptide
EVTIRSHYQ

SEQ ID NO: 22051 - protein, 9 aa, Artificial Sequence
  Description of Artificial Sequence: Synthetic peptide
EVTLIPDSW

SEQ ID NO: 22052 - protein, 9 aa, Artificial Sequence
  Description of Artificial Sequence: Synthetic peptide
EVVHSMSDG

SEQ ID NO: 22053 - protein, 9 aa, Artificial Sequence
  Description of Artificial Sequence: Synthetic peptide
EVVNVPMRT

SEQ ID NO: 22054 - protein, 9 aa, Artificial Sequence
  Description of Artificial Sequence: Synthetic peptide
EVYRNTMKC

SEQ ID NO: 22055 - protein, 9 aa, Artificial Sequence
  Description of Artificial Sequence: Synthetic peptide
EWAGKQTDM

SEQ ID NO: 22056 - protein, 9 aa, Artificial Sequence
  Description of Artificial Sequence: Synthetic peptide
EWAYMGSYP

SEQ ID NO: 22057 - protein, 9 aa, Artificial Sequence
  Description of Artificial Sequence: Synthetic peptide
EWDDTSNSG

SEQ ID NO: 22058 - protein, 9 aa, Artificial Sequence
  Description of Artificial Sequence: Synthetic peptide
EWHFPKAMN

SEQ ID NO: 22059 - protein, 9 aa, Artificial Sequence
  Description of Artificial Sequence: Synthetic peptide
EWNDYPSWY

SEQ ID NO: 22060 - protein, 9 aa, Artificial Sequence
  Description of Artificial Sequence: Synthetic peptide
EWRHVELHY

SEQ ID NO: 22061 - protein, 9 aa, Artificial Sequence
  Description of Artificial Sequence: Synthetic peptide
EYAGHHCFY

SEQ ID NO: 22062 - protein, 9 aa, Artificial Sequence
  Description of Artificial Sequence: Synthetic peptide
EYCMCMWGA

SEQ ID NO: 22063 - protein, 9 aa, Artificial Sequence
  Description of Artificial Sequence: Synthetic peptide
EYCNVMIPC

SEQ ID NO: 22064 - protein, 9 aa, Artificial Sequence
  Description of Artificial Sequence: Synthetic peptide
EYDDVPEPQ

SEQ ID NO: 22065 - protein, 9 aa, Artificial Sequence
  Description of Artificial Sequence: Synthetic peptide
EYEQDCRFQ

SEQ ID NO: 22066 - protein, 9 aa, Artificial Sequence
  Description of Artificial Sequence: Synthetic peptide
EYHDKHWAG

SEQ ID NO: 22067 - protein, 9 aa, Artificial Sequence
  Description of Artificial Sequence: Synthetic peptide
EYHTEWIGM

SEQ ID NO: 22068 - protein, 9 aa, Artificial Sequence
  Description of Artificial Sequence: Synthetic peptide
EYIGEELHK

SEQ ID NO: 22069 - protein, 9 aa, Artificial Sequence
  Description of Artificial Sequence: Synthetic peptide
EYILWHWCT

SEQ ID NO: 22070 - protein, 9 aa, Artificial Sequence
  Description of Artificial Sequence: Synthetic peptide
EYISTQADA

SEQ ID NO: 22071 - protein, 9 aa, Artificial Sequence
  Description of Artificial Sequence: Synthetic peptide
EYKYYTYIF

SEQ ID NO: 22072 - protein, 9 aa, Artificial Sequence
  Description of Artificial Sequence: Synthetic peptide
EYMATEHGN

SEQ ID NO: 22073 - protein, 9 aa, Artificial Sequence
  Description of Artificial Sequence: Synthetic peptide
EYMHYYGSI

SEQ ID NO: 22074 - protein, 9 aa, Artificial Sequence
  Description of Artificial Sequence: Synthetic peptide
EYPLESTYK

SEQ ID NO: 22075 - protein, 9 aa, Artificial Sequence
  Description of Artificial Sequence: Synthetic peptide
EYPLPVTLQ

SEQ ID NO: 22076 - protein, 9 aa, Artificial Sequence
  Description of Artificial Sequence: Synthetic peptide
EYSQLHPSP

SEQ ID NO: 22077 - protein, 9 aa, Artificial Sequence
  Description of Artificial Sequence: Synthetic peptide
EYTCRLLYD

SEQ ID NO: 22078 - protein, 9 aa, Artificial Sequence
  Description of Artificial Sequence: Synthetic peptide
EYWIGQQSC

SEQ ID NO: 22079 - protein, 9 aa, Artificial Sequence
  Description of Artificial Sequence: Synthetic peptide
EYWQISAWS

SEQ ID NO: 22080 - protein, 9 aa, Artificial Sequence
  Description of Artificial Sequence: Synthetic peptide
FACEIQYSD

SEQ ID NO: 22081 - protein, 9 aa, Artificial Sequence
  Description of Artificial Sequence: Synthetic peptide
FAEDCQRFD

SEQ ID NO: 22082 - protein, 9 aa, Artificial Sequence
  Description of Artificial Sequence: Synthetic peptide
FALNGIEKW

SEQ ID NO: 22083 - protein, 9 aa, Artificial Sequence
  Description of Artificial Sequence: Synthetic peptide
FASRYDGHH

SEQ ID NO: 22084 - protein, 9 aa, Artificial Sequence
  Description of Artificial Sequence: Synthetic peptide
FAVFCWAER

SEQ ID NO: 22085 - protein, 9 aa, Artificial Sequence
  Description of Artificial Sequence: Synthetic peptide
FAYCESEEQ

SEQ ID NO: 22086 - protein, 9 aa, Artificial Sequence
  Description of Artificial Sequence: Synthetic peptide
FCDACLGGY

SEQ ID NO: 22087 - protein, 9 aa, Artificial Sequence
  Description of Artificial Sequence: Synthetic peptide
FCELYFHCA

SEQ ID NO: 22088 - protein, 9 aa, Artificial Sequence
  Description of Artificial Sequence: Synthetic peptide
FCLDPNFYY

SEQ ID NO: 22089 - protein, 9 aa, Artificial Sequence
  Description of Artificial Sequence: Synthetic peptide
FCTGASHAH

SEQ ID NO: 22090 - protein, 9 aa, Artificial Sequence
  Description of Artificial Sequence: Synthetic peptide
FDDCTWQGP

SEQ ID NO: 22091 - protein, 9 aa, Artificial Sequence
  Description of Artificial Sequence: Synthetic peptide
FDHATMQFG

SEQ ID NO: 22092 - protein, 9 aa, Artificial Sequence
  Description of Artificial Sequence: Synthetic peptide
FDRCNESYC

SEQ ID NO: 22093 - protein, 9 aa, Artificial Sequence
  Description of Artificial Sequence: Synthetic peptide
FEPHGCQIE

SEQ ID NO: 22094 - protein, 9 aa, Artificial Sequence
  Description of Artificial Sequence: Synthetic peptide
FEQADMMQM

SEQ ID NO: 22095 - protein, 9 aa, Artificial Sequence
  Description of Artificial Sequence: Synthetic peptide
FEQYIRNIK

SEQ ID NO: 22096 - protein, 9 aa, Artificial Sequence
  Description of Artificial Sequence: Synthetic peptide
FERLFMGWT

SEQ ID NO: 22097 - protein, 9 aa, Artificial Sequence
  Description of Artificial Sequence: Synthetic peptide
FEVMRAIRC

SEQ ID NO: 22098 - protein, 9 aa, Artificial Sequence
  Description of Artificial Sequence: Synthetic peptide
FFTKISWSW

SEQ ID NO: 22099 - protein, 9 aa, Artificial Sequence
  Description of Artificial Sequence: Synthetic peptide
FGTAVMVWE

SEQ ID NO: 22100 - protein, 9 aa, Artificial Sequence
  Description of Artificial Sequence: Synthetic peptide
FGWDAYCRV

SEQ ID NO: 22101 - protein, 9 aa, Artificial Sequence
  Description of Artificial Sequence: Synthetic peptide
FHQYHYQAM

SEQ ID NO: 22102 - protein, 9 aa, Artificial Sequence
  Description of Artificial Sequence: Synthetic peptide
FHWWGAVVK

SEQ ID NO: 22103 - protein, 9 aa, Artificial Sequence
  Description of Artificial Sequence: Synthetic peptide
FICDVQMGD

SEQ ID NO: 22104 - protein, 9 aa, Artificial Sequence
  Description of Artificial Sequence: Synthetic peptide
FIEFYMGEQ

SEQ ID NO: 22105 - protein, 9 aa, Artificial Sequence
  Description of Artificial Sequence: Synthetic peptide
FIEGEMHIR

SEQ ID NO: 22106 - protein, 9 aa, Artificial Sequence
  Description of Artificial Sequence: Synthetic peptide
FIGLQWSYP

SEQ ID NO: 22107 - protein, 9 aa, Artificial Sequence
  Description of Artificial Sequence: Synthetic peptide
FIPISHQHP

SEQ ID NO: 22108 - protein, 9 aa, Artificial Sequence
  Description of Artificial Sequence: Synthetic peptide
FIRSYNVEC

SEQ ID NO: 22109 - protein, 9 aa, Artificial Sequence
  Description of Artificial Sequence: Synthetic peptide
FIRVSWWLA

SEQ ID NO: 22110 - protein, 9 aa, Artificial Sequence
  Description of Artificial Sequence: Synthetic peptide
FIYTDFRMT

SEQ ID NO: 22111 - protein, 9 aa, Artificial Sequence
  Description of Artificial Sequence: Synthetic peptide
FKEELMKYQ

SEQ ID NO: 22112 - protein, 9 aa, Artificial Sequence
  Description of Artificial Sequence: Synthetic peptide
FKFEQENNS

SEQ ID NO: 22113 - protein, 9 aa, Artificial Sequence
  Description of Artificial Sequence: Synthetic peptide
FKKPMVCHV

SEQ ID NO: 22114 - protein, 9 aa, Artificial Sequence
  Description of Artificial Sequence: Synthetic peptide
FKLVSGDQW

SEQ ID NO: 22115 - protein, 9 aa, Artificial Sequence
  Description of Artificial Sequence: Synthetic peptide
FKQIDHYPR

SEQ ID NO: 22116 - protein, 9 aa, Artificial Sequence
  Description of Artificial Sequence: Synthetic peptide
FMAELKTDD

SEQ ID NO: 22117 - protein, 9 aa, Artificial Sequence
  Description of Artificial Sequence: Synthetic peptide
FMKSKLETV

SEQ ID NO: 22118 - protein, 9 aa, Artificial Sequence
  Description of Artificial Sequence: Synthetic peptide
CIKTDWQRI

SEQ ID NO: 22119 - protein, 9 aa, Artificial Sequence
  Description of Artificial Sequence: Synthetic peptide
CAVSGPECY

SEQ ID NO: 22120 - protein, 9 aa, Artificial Sequence
  Description of Artificial Sequence: Synthetic peptide
CCEIWLASS

SEQ ID NO: 22121 - protein, 9 aa, Artificial Sequence
  Description of Artificial Sequence: Synthetic peptide
CDYWLVVPW

SEQ ID NO: 22122 - protein, 9 aa, Artificial Sequence
  Description of Artificial Sequence: Synthetic peptide
CFTQKESAY

SEQ ID NO: 22123 - protein, 9 aa, Artificial Sequence
  Description of Artificial Sequence: Synthetic peptide
CGYWLAVPW

SEQ ID NO: 22124 - protein, 9 aa, Artificial Sequence
  Description of Artificial Sequence: Synthetic peptide
CIPTYHHFG

SEQ ID NO: 22125 - protein, 9 aa, Artificial Sequence
  Description of Artificial Sequence: Synthetic peptide
CIRGQTHYN

SEQ ID NO: 22126 - protein, 9 aa, Artificial Sequence
  Description of Artificial Sequence: Synthetic peptide
CNTPYEVWA

SEQ ID NO: 22127 - protein, 9 aa, Artificial Sequence
  Description of Artificial Sequence: Synthetic peptide
CQSTGAHME

SEQ ID NO: 22128 - protein, 9 aa, Artificial Sequence
  Description of Artificial Sequence: Synthetic peptide
CQSTGSHMA

SEQ ID NO: 22129 - protein, 9 aa, Artificial Sequence
  Description of Artificial Sequence: Synthetic peptide
CSKATGGAE

SEQ ID NO: 22130 - protein, 9 aa, Artificial Sequence
  Description of Artificial Sequence: Synthetic peptide
CSKTTWGAE

SEQ ID NO: 22131 - protein, 9 aa, Artificial Sequence
  Description of Artificial Sequence: Synthetic peptide
CYNSGDCGN

SEQ ID NO: 22132 - protein, 9 aa, Artificial Sequence
  Description of Artificial Sequence: Synthetic peptide
CIMSHCRQH

SEQ ID NO: 22133 - protein, 9 aa, Artificial Sequence
  Description of Artificial Sequence: Synthetic peptide
CSNKTCCKA

SEQ ID NO: 22134 - protein, 9 aa, Artificial Sequence
  Description of Artificial Sequence: Synthetic peptide
CGYWLVVPW

SEQ ID NO: 22135 - protein, 9 aa, Artificial Sequence
  Description of Artificial Sequence: Synthetic peptide
CHMLNDCMS

SEQ ID NO: 22136 - protein, 9 aa, Artificial Sequence
  Description of Artificial Sequence: Synthetic peptide
CSKATWGAE

SEQ ID NO: 22137 - protein, 9 aa, Artificial Sequence
  Description of Artificial Sequence: Synthetic peptide
CKNPSWYMD

SEQ ID NO: 22138 - protein, 9 aa, Artificial Sequence
  Description of Artificial Sequence: Synthetic peptide
CFEMYYAMW

SEQ ID NO: 22139 - protein, 9 aa, Artificial Sequence
  Description of Artificial Sequence: Synthetic peptide
CDPCMECGS

SEQ ID NO: 22140 - protein, 9 aa, Artificial Sequence
  Description of Artificial Sequence: Synthetic peptide
CTDGKHASW

SEQ ID NO: 22141 - protein, 9 aa, Artificial Sequence
  Description of Artificial Sequence: Synthetic peptide
CFCTYKIEH

SEQ ID NO: 22142 - protein, 9 aa, Artificial Sequence
  Description of Artificial Sequence: Synthetic peptide
CIGPHWHIP

SEQ ID NO: 22143 - protein, 9 aa, Artificial Sequence
  Description of Artificial Sequence: Synthetic peptide
CAHQQHNED

SEQ ID NO: 22144 - protein, 9 aa, Artificial Sequence
  Description of Artificial Sequence: Synthetic peptide
CAHSYQMSR

SEQ ID NO: 22145 - protein, 9 aa, Artificial Sequence
  Description of Artificial Sequence: Synthetic peptide
CAIHIFLQD

SEQ ID NO: 22146 - protein, 9 aa, Artificial Sequence
  Description of Artificial Sequence: Synthetic peptide
CAIQISDTS

SEQ ID NO: 22147 - protein, 9 aa, Artificial Sequence
  Description of Artificial Sequence: Synthetic peptide
CALSALTME

SEQ ID NO: 22148 - protein, 9 aa, Artificial Sequence
  Description of Artificial Sequence: Synthetic peptide
CALVSRSQD

SEQ ID NO: 22149 - protein, 9 aa, Artificial Sequence
  Description of Artificial Sequence: Synthetic peptide
CAMIHGKYD

SEQ ID NO: 22150 - protein, 9 aa, Artificial Sequence
  Description of Artificial Sequence: Synthetic peptide
CANFAMQQF

SEQ ID NO: 22151 - protein, 9 aa, Artificial Sequence
  Description of Artificial Sequence: Synthetic peptide
CASRSMLTE

SEQ ID NO: 22152 - protein, 9 aa, Artificial Sequence
  Description of Artificial Sequence: Synthetic peptide
CAVRTFMGS

SEQ ID NO: 22153 - protein, 9 aa, Artificial Sequence
  Description of Artificial Sequence: Synthetic peptide
CCDDCPPNR

SEQ ID NO: 22154 - protein, 9 aa, Artificial Sequence
  Description of Artificial Sequence: Synthetic peptide
CCGIFNGIY

SEQ ID NO: 22155 - protein, 9 aa, Artificial Sequence
  Description of Artificial Sequence: Synthetic peptide
CCHMQYRES

SEQ ID NO: 22156 - protein, 9 aa, Artificial Sequence
  Description of Artificial Sequence: Synthetic peptide
CEMYREYFI

SEQ ID NO: 22157 - protein, 9 aa, Artificial Sequence
  Description of Artificial Sequence: Synthetic peptide
CFAKMEKLQ

SEQ ID NO: 22158 - protein, 9 aa, Artificial Sequence
  Description of Artificial Sequence: Synthetic peptide
CFAPYMNVD

SEQ ID NO: 22159 - protein, 9 aa, Artificial Sequence
  Description of Artificial Sequence: Synthetic peptide
CFMHYGRIA

SEQ ID NO: 22160 - protein, 9 aa, Artificial Sequence
  Description of Artificial Sequence: Synthetic peptide
CFSQFASGS

SEQ ID NO: 22161 - protein, 9 aa, Artificial Sequence
  Description of Artificial Sequence: Synthetic peptide
CFYQKGAAY

SEQ ID NO: 22162 - protein, 9 aa, Artificial Sequence
  Description of Artificial Sequence: Synthetic peptide
CGFWLDQNE

SEQ ID NO: 22163 - protein, 9 aa, Artificial Sequence
  Description of Artificial Sequence: Synthetic peptide
CHRLVMGYH

SEQ ID NO: 22164 - protein, 9 aa, Artificial Sequence
  Description of Artificial Sequence: Synthetic peptide
CIAPRPEWP

SEQ ID NO: 22165 - protein, 9 aa, Artificial Sequence
  Description of Artificial Sequence: Synthetic peptide
CIKLKCSHS

SEQ ID NO: 22166 - protein, 9 aa, Artificial Sequence
  Description of Artificial Sequence: Synthetic peptide
CILWKHAMP

SEQ ID NO: 22167 - protein, 9 aa, Artificial Sequence
  Description of Artificial Sequence: Synthetic peptide
CISNTRFGV

SEQ ID NO: 22168 - protein, 9 aa, Artificial Sequence
  Description of Artificial Sequence: Synthetic peptide
CITMPMNFG

SEQ ID NO: 22169 - protein, 9 aa, Artificial Sequence
  Description of Artificial Sequence: Synthetic peptide
CIYIWFTRD

SEQ ID NO: 22170 - protein, 9 aa, Artificial Sequence
  Description of Artificial Sequence: Synthetic peptide
CKSGMVHHA

SEQ ID NO: 22171 - protein, 9 aa, Artificial Sequence
  Description of Artificial Sequence: Synthetic peptide
CKSMGLFLV

SEQ ID NO: 22172 - protein, 9 aa, Artificial Sequence
  Description of Artificial Sequence: Synthetic peptide
CKYDYHQNT

SEQ ID NO: 22173 - protein, 9 aa, Artificial Sequence
  Description of Artificial Sequence: Synthetic peptide
CLGYMWQNT

SEQ ID NO: 22174 - protein, 9 aa, Artificial Sequence
  Description of Artificial Sequence: Synthetic peptide
CMKADGMQR

SEQ ID NO: 22175 - protein, 9 aa, Artificial Sequence
  Description of Artificial Sequence: Synthetic peptide
CMSDRGLQS

SEQ ID NO: 22176 - protein, 9 aa, Artificial Sequence
  Description of Artificial Sequence: Synthetic peptide
CMYMQNAMG

SEQ ID NO: 22177 - protein, 9 aa, Artificial Sequence
  Description of Artificial Sequence: Synthetic peptide
CNNLSVCDE

SEQ ID NO: 22178 - protein, 9 aa, Artificial Sequence
  Description of Artificial Sequence: Synthetic peptide
CNSLFTNQQ

SEQ ID NO: 22179 - protein, 9 aa, Artificial Sequence
  Description of Artificial Sequence: Synthetic peptide
CPTMYKMQA

SEQ ID NO: 22180 - protein, 9 aa, Artificial Sequence
  Description of Artificial Sequence: Synthetic peptide
CQKCYDHYQ

SEQ ID NO: 22181 - protein, 9 aa, Artificial Sequence
  Description of Artificial Sequence: Synthetic peptide
CQYRTRMIT

SEQ ID NO: 22182 - protein, 9 aa, Artificial Sequence
  Description of Artificial Sequence: Synthetic peptide
CSAPTLSGN

SEQ ID NO: 22183 - protein, 9 aa, Artificial Sequence
  Description of Artificial Sequence: Synthetic peptide
CSFHIIMGE

SEQ ID NO: 22184 - protein, 9 aa, Artificial Sequence
  Description of Artificial Sequence: Synthetic peptide
CSFHNNEHA

SEQ ID NO: 22185 - protein, 9 aa, Artificial Sequence
  Description of Artificial Sequence: Synthetic peptide
CSICEHCMD

SEQ ID NO: 22186 - protein, 9 aa, Artificial Sequence
  Description of Artificial Sequence: Synthetic peptide
CSMAEQKSQ

SEQ ID NO: 22187 - protein, 9 aa, Artificial Sequence
  Description of Artificial Sequence: Synthetic peptide
CSMRYMAVH

SEQ ID NO: 22188 - protein, 9 aa, Artificial Sequence
  Description of Artificial Sequence: Synthetic peptide
CSRPLHDSY

SEQ ID NO: 22189 - protein, 9 aa, Artificial Sequence
  Description of Artificial Sequence: Synthetic peptide
CSTQYMKHM

SEQ ID NO: 22190 - protein, 9 aa, Artificial Sequence
  Description of Artificial Sequence: Synthetic peptide
CSVNFYTSF

SEQ ID NO: 22191 - protein, 9 aa, Artificial Sequence
  Description of Artificial Sequence: Synthetic peptide
CSWEWFRAE

SEQ ID NO: 22192 - protein, 9 aa, Artificial Sequence
  Description of Artificial Sequence: Synthetic peptide
CSWQLWQSC

SEQ ID NO: 22193 - protein, 9 aa, Artificial Sequence
  Description of Artificial Sequence: Synthetic peptide
CSYSTQIGH

SEQ ID NO: 22194 - protein, 9 aa, Artificial Sequence
  Description of Artificial Sequence: Synthetic peptide
CTAITLRYP

SEQ ID NO: 22195 - protein, 9 aa, Artificial Sequence
  Description of Artificial Sequence: Synthetic peptide
CTERTESNR

SEQ ID NO: 22196 - protein, 9 aa, Artificial Sequence
  Description of Artificial Sequence: Synthetic peptide
CTHDIWAQA

SEQ ID NO: 22197 - protein, 9 aa, Artificial Sequence
  Description of Artificial Sequence: Synthetic peptide
CTHQIHLPA

SEQ ID NO: 22198 - protein, 9 aa, Artificial Sequence
  Description of Artificial Sequence: Synthetic peptide
CTKTYMHDF

SEQ ID NO: 22199 - protein, 9 aa, Artificial Sequence
  Description of Artificial Sequence: Synthetic peptide
CTLNVQSDG

SEQ ID NO: 22200 - protein, 9 aa, Artificial Sequence
  Description of Artificial Sequence: Synthetic peptide
CTLQWSAGP

SEQ ID NO: 22201 - protein, 9 aa, Artificial Sequence
  Description of Artificial Sequence: Synthetic peptide
CTMRVQMKP

SEQ ID NO: 22202 - protein, 9 aa, Artificial Sequence
  Description of Artificial Sequence: Synthetic peptide
CTVLRFDHQ

SEQ ID NO: 22203 - protein, 9 aa, Artificial Sequence
  Description of Artificial Sequence: Synthetic peptide
CVAYSYNST

SEQ ID NO: 22204 - protein, 9 aa, Artificial Sequence
  Description of Artificial Sequence: Synthetic peptide
CVCGKKQMG

SEQ ID NO: 22205 - protein, 9 aa, Artificial Sequence
  Description of Artificial Sequence: Synthetic peptide
CVFAQSGSY

SEQ ID NO: 22206 - protein, 9 aa, Artificial Sequence
  Description of Artificial Sequence: Synthetic peptide
CVFYQRKVL

SEQ ID NO: 22207 - protein, 9 aa, Artificial Sequence
  Description of Artificial Sequence: Synthetic peptide
CVIAKYYQE

SEQ ID NO: 22208 - protein, 9 aa, Artificial Sequence
  Description of Artificial Sequence: Synthetic peptide
CVIHTPYQY

SEQ ID NO: 22209 - protein, 9 aa, Artificial Sequence
  Description of Artificial Sequence: Synthetic peptide
CVIRDGHYD

SEQ ID NO: 22210 - protein, 9 aa, Artificial Sequence
  Description of Artificial Sequence: Synthetic peptide
CVKMKQDFN

SEQ ID NO: 22211 - protein, 9 aa, Artificial Sequence
  Description of Artificial Sequence: Synthetic peptide
CVMEQQKER

SEQ ID NO: 22212 - protein, 9 aa, Artificial Sequence
  Description of Artificial Sequence: Synthetic peptide
CVNTTHDYQ

SEQ ID NO: 22213 - protein, 9 aa, Artificial Sequence
  Description of Artificial Sequence: Synthetic peptide
CVNVMAADR

SEQ ID NO: 22214 - protein, 9 aa, Artificial Sequence
  Description of Artificial Sequence: Synthetic peptide
CVQITLDGF

SEQ ID NO: 22215 - protein, 9 aa, Artificial Sequence
  Description of Artificial Sequence: Synthetic peptide
CVRMCVDHA

SEQ ID NO: 22216 - protein, 9 aa, Artificial Sequence
  Description of Artificial Sequence: Synthetic peptide
CVSMIVPMV

SEQ ID NO: 22217 - protein, 9 aa, Artificial Sequence
  Description of Artificial Sequence: Synthetic peptide
CVTCKFDEQ

SEQ ID NO: 22218 - protein, 9 aa, Artificial Sequence
  Description of Artificial Sequence: Synthetic peptide
CVTLTHRDK

SEQ ID NO: 22219 - protein, 9 aa, Artificial Sequence
  Description of Artificial Sequence: Synthetic peptide
CVTYSSAPK

SEQ ID NO: 22220 - protein, 9 aa, Artificial Sequence
  Description of Artificial Sequence: Synthetic peptide
CVYPTMKAD

SEQ ID NO: 22221 - protein, 9 aa, Artificial Sequence
  Description of Artificial Sequence: Synthetic peptide
CWICMCVSP

SEQ ID NO: 22222 - protein, 9 aa, Artificial Sequence
  Description of Artificial Sequence: Synthetic peptide
CWKFRDHDF

SEQ ID NO: 22223 - protein, 9 aa, Artificial Sequence
  Description of Artificial Sequence: Synthetic peptide
CWLHTRTHW

SEQ ID NO: 22224 - protein, 9 aa, Artificial Sequence
  Description of Artificial Sequence: Synthetic peptide
CWTTANTSN

SEQ ID NO: 22225 - protein, 9 aa, Artificial Sequence
  Description of Artificial Sequence: Synthetic peptide
CYAKVTANT

SEQ ID NO: 22226 - protein, 9 aa, Artificial Sequence
  Description of Artificial Sequence: Synthetic peptide
CYEQWNGLA

SEQ ID NO: 22227 - protein, 9 aa, Artificial Sequence
  Description of Artificial Sequence: Synthetic peptide
CYFLHNNHE

SEQ ID NO: 22228 - protein, 9 aa, Artificial Sequence
  Description of Artificial Sequence: Synthetic peptide
CYYTIEKAE

SEQ ID NO: 22229 - protein, 9 aa, Artificial Sequence
  Description of Artificial Sequence: Synthetic peptide
CAVGGPECY

SEQ ID NO: 22230 - protein, 9 aa, Artificial Sequence
  Description of Artificial Sequence: Synthetic peptide
CKTQERANS

SEQ ID NO: 22231 - protein, 9 aa, Artificial Sequence
  Description of Artificial Sequence: Synthetic peptide
CYNSGDCDN

SEQ ID NO: 22232 - protein, 9 aa, Artificial Sequence
  Description of Artificial Sequence: Synthetic peptide
CTSTDPIAP

SEQ ID NO: 22233 - protein, 9 aa, Artificial Sequence
  Description of Artificial Sequence: Synthetic peptide
CRGKSHDHT

SEQ ID NO: 22234 - protein, 9 aa, Artificial Sequence
  Description of Artificial Sequence: Synthetic peptide
CPALNYDCV

SEQ ID NO: 22235 - protein, 9 aa, Artificial Sequence
  Description of Artificial Sequence: Synthetic peptide
CMLTHIMEF

SEQ ID NO: 22236 - protein, 9 aa, Artificial Sequence
  Description of Artificial Sequence: Synthetic peptide
CTFPSADMC

SEQ ID NO: 22237 - protein, 9 aa, Artificial Sequence
  Description of Artificial Sequence: Synthetic peptide
CQSTGSHME

SEQ ID NO: 22238 - protein, 9 aa, Artificial Sequence
  Description of Artificial Sequence: Synthetic peptide
CSFHMNITS

SEQ ID NO: 22239 - protein, 9 aa, Artificial Sequence
  Description of Artificial Sequence: Synthetic peptide
CIPTYRHFG

SEQ ID NO: 22240 - protein, 9 aa, Artificial Sequence
  Description of Artificial Sequence: Synthetic peptide
CYGRVAHHE

SEQ ID NO: 22241 - protein, 9 aa, Artificial Sequence
  Description of Artificial Sequence: Synthetic peptide
CTEIRYYGT

SEQ ID NO: 22242 - protein, 9 aa, Artificial Sequence
  Description of Artificial Sequence: Synthetic peptide
CVKPFLTGW

SEQ ID NO: 22243 - protein, 9 aa, Artificial Sequence
  Description of Artificial Sequence: Synthetic peptide
CAWYMKQGN

SEQ ID NO: 22244 - protein, 9 aa, Artificial Sequence
  Description of Artificial Sequence: Synthetic peptide
CAEPVYMWK

SEQ ID NO: 22245 - protein, 9 aa, Artificial Sequence
  Description of Artificial Sequence: Synthetic peptide
CAGTSMAKE

SEQ ID NO: 22246 - protein, 9 aa, Artificial Sequence
  Description of Artificial Sequence: Synthetic peptide
CASHVKWGP

SEQ ID NO: 22247 - protein, 9 aa, Artificial Sequence
  Description of Artificial Sequence: Synthetic peptide
CAVAYMSCT

SEQ ID NO: 22248 - protein, 9 aa, Artificial Sequence
  Description of Artificial Sequence: Synthetic peptide
CAYKPHVAP

SEQ ID NO: 22249 - protein, 9 aa, Artificial Sequence
  Description of Artificial Sequence: Synthetic peptide
CCHNEHRHM

SEQ ID NO: 22250 - protein, 9 aa, Artificial Sequence
  Description of Artificial Sequence: Synthetic peptide
CCVSFAYSC

SEQ ID NO: 22251 - protein, 9 aa, Artificial Sequence
  Description of Artificial Sequence: Synthetic peptide
CDAVHNDAS

SEQ ID NO: 22252 - protein, 9 aa, Artificial Sequence
  Description of Artificial Sequence: Synthetic peptide
CEYLPDMHK

SEQ ID NO: 22253 - protein, 9 aa, Artificial Sequence
  Description of Artificial Sequence: Synthetic peptide
CFHWVNHMT

SEQ ID NO: 22254 - protein, 9 aa, Artificial Sequence
  Description of Artificial Sequence: Synthetic peptide
CFQTANIGG

SEQ ID NO: 22255 - protein, 9 aa, Artificial Sequence
  Description of Artificial Sequence: Synthetic peptide
CHDAQFKTD

SEQ ID NO: 22256 - protein, 9 aa, Artificial Sequence
  Description of Artificial Sequence: Synthetic peptide
CHKSWWRLD

SEQ ID NO: 22257 - protein, 9 aa, Artificial Sequence
  Description of Artificial Sequence: Synthetic peptide
CHYWVSTDG

SEQ ID NO: 22258 - protein, 9 aa, Artificial Sequence
  Description of Artificial Sequence: Synthetic peptide
CIAHRHAQP

SEQ ID NO: 22259 - protein, 9 aa, Artificial Sequence
  Description of Artificial Sequence: Synthetic peptide
CIFRLSALS

SEQ ID NO: 22260 - protein, 9 aa, Artificial Sequence
  Description of Artificial Sequence: Synthetic peptide
CIGSRQAIA

SEQ ID NO: 22261 - protein, 9 aa, Artificial Sequence
  Description of Artificial Sequence: Synthetic peptide
CIHIASRLG

SEQ ID NO: 22262 - protein, 9 aa, Artificial Sequence
  Description of Artificial Sequence: Synthetic peptide
CISFYTSAG

SEQ ID NO: 22263 - protein, 9 aa, Artificial Sequence
  Description of Artificial Sequence: Synthetic peptide
CITKLMVNA

SEQ ID NO: 22264 - protein, 9 aa, Artificial Sequence
  Description of Artificial Sequence: Synthetic peptide
CIVTDSMAP

SEQ ID NO: 22265 - protein, 9 aa, Artificial Sequence
  Description of Artificial Sequence: Synthetic peptide
CIYYPNFYN

SEQ ID NO: 22266 - protein, 9 aa, Artificial Sequence
  Description of Artificial Sequence: Synthetic peptide
CKQMYLATE

SEQ ID NO: 22267 - protein, 9 aa, Artificial Sequence
  Description of Artificial Sequence: Synthetic peptide
CKVPVFSLE

SEQ ID NO: 22268 - protein, 9 aa, Artificial Sequence
  Description of Artificial Sequence: Synthetic peptide
CLRVCNCSP

SEQ ID NO: 22269 - protein, 9 aa, Artificial Sequence
  Description of Artificial Sequence: Synthetic peptide
CLRVYNCSP

SEQ ID NO: 22270 - protein, 9 aa, Artificial Sequence
  Description of Artificial Sequence: Synthetic peptide
CMAISPSFE

SEQ ID NO: 22271 - protein, 9 aa, Artificial Sequence
  Description of Artificial Sequence: Synthetic peptide
CMLRYMLGR

SEQ ID NO: 22272 - protein, 9 aa, Artificial Sequence
  Description of Artificial Sequence: Synthetic peptide
CMPQKYHKD

SEQ ID NO: 22273 - protein, 9 aa, Artificial Sequence
  Description of Artificial Sequence: Synthetic peptide
CMSAMCMWS

SEQ ID NO: 22274 - protein, 9 aa, Artificial Sequence
  Description of Artificial Sequence: Synthetic peptide
CMSKIVWSS

SEQ ID NO: 22275 - protein, 9 aa, Artificial Sequence
  Description of Artificial Sequence: Synthetic peptide
CNDQAQYDW

SEQ ID NO: 22276 - protein, 9 aa, Artificial Sequence
  Description of Artificial Sequence: Synthetic peptide
CNTSMAIMG

SEQ ID NO: 22277 - protein, 9 aa, Artificial Sequence
  Description of Artificial Sequence: Synthetic peptide
CPWWSDNCM

SEQ ID NO: 22278 - protein, 9 aa, Artificial Sequence
  Description of Artificial Sequence: Synthetic peptide
CRVTITYPT

SEQ ID NO: 22279 - protein, 9 aa, Artificial Sequence
  Description of Artificial Sequence: Synthetic peptide
CSFQMQFMG

SEQ ID NO: 22280 - protein, 9 aa, Artificial Sequence
  Description of Artificial Sequence: Synthetic peptide
CSFVLDNAF

SEQ ID NO: 22281 - protein, 9 aa, Artificial Sequence
  Description of Artificial Sequence: Synthetic peptide
CSGPVSASA

SEQ ID NO: 22282 - protein, 9 aa, Artificial Sequence
  Description of Artificial Sequence: Synthetic peptide
CSKYFNDWG

SEQ ID NO: 22283 - protein, 9 aa, Artificial Sequence
  Description of Artificial Sequence: Synthetic peptide
CSKYSAEYP

SEQ ID NO: 22284 - protein, 9 aa, Artificial Sequence
  Description of Artificial Sequence: Synthetic peptide
CSTPHHLQL

SEQ ID NO: 22285 - protein, 9 aa, Artificial Sequence
  Description of Artificial Sequence: Synthetic peptide
CSVNIGQHA

SEQ ID NO: 22286 - protein, 9 aa, Artificial Sequence
  Description of Artificial Sequence: Synthetic peptide
CSYKDQSQQ

SEQ ID NO: 22287 - protein, 9 aa, Artificial Sequence
  Description of Artificial Sequence: Synthetic peptide
CSYTHWRSA

SEQ ID NO: 22288 - protein, 9 aa, Artificial Sequence
  Description of Artificial Sequence: Synthetic peptide
CTAHPMLQA

SEQ ID NO: 22289 - protein, 9 aa, Artificial Sequence
  Description of Artificial Sequence: Synthetic peptide
CTATKILHA

SEQ ID NO: 22290 - protein, 9 aa, Artificial Sequence
  Description of Artificial Sequence: Synthetic peptide
CTFVALSMQ

SEQ ID NO: 22291 - protein, 9 aa, Artificial Sequence
  Description of Artificial Sequence: Synthetic peptide
CTGSIVKQM

SEQ ID NO: 22292 - protein, 9 aa, Artificial Sequence
  Description of Artificial Sequence: Synthetic peptide
CTHPRITGA

SEQ ID NO: 22293 - protein, 9 aa, Artificial Sequence
  Description of Artificial Sequence: Synthetic peptide
CTIKQLCNG

SEQ ID NO: 22294 - protein, 9 aa, Artificial Sequence
  Description of Artificial Sequence: Synthetic peptide
CVANCQQCI

SEQ ID NO: 22295 - protein, 9 aa, Artificial Sequence
  Description of Artificial Sequence: Synthetic peptide
CVARNINAN

SEQ ID NO: 22296 - protein, 9 aa, Artificial Sequence
  Description of Artificial Sequence: Synthetic peptide
CVCMYQNMQ

SEQ ID NO: 22297 - protein, 9 aa, Artificial Sequence
  Description of Artificial Sequence: Synthetic peptide
CVFLAQKMK

SEQ ID NO: 22298 - protein, 9 aa, Artificial Sequence
  Description of Artificial Sequence: Synthetic peptide
CVFMRSHDK

SEQ ID NO: 22299 - protein, 9 aa, Artificial Sequence
  Description of Artificial Sequence: Synthetic peptide
CVFPVHSSN

SEQ ID NO: 22300 - protein, 9 aa, Artificial Sequence
  Description of Artificial Sequence: Synthetic peptide
CVHKICMHH

SEQ ID NO: 22301 - protein, 9 aa, Artificial Sequence
  Description of Artificial Sequence: Synthetic peptide
CVHQNSRAK

SEQ ID NO: 22302 - protein, 9 aa, Artificial Sequence
  Description of Artificial Sequence: Synthetic peptide
CVHRGLTYT

SEQ ID NO: 22303 - protein, 9 aa, Artificial Sequence
  Description of Artificial Sequence: Synthetic peptide
CVHVAMHYP

SEQ ID NO: 22304 - protein, 9 aa, Artificial Sequence
  Description of Artificial Sequence: Synthetic peptide
CVHYANMML

SEQ ID NO: 22305 - protein, 9 aa, Artificial Sequence
  Description of Artificial Sequence: Synthetic peptide
CVISKMWCH

SEQ ID NO: 22306 - protein, 9 aa, Artificial Sequence
  Description of Artificial Sequence: Synthetic peptide
CVLRSNVQL

SEQ ID NO: 22307 - protein, 9 aa, Artificial Sequence
  Description of Artificial Sequence: Synthetic peptide
CVNEFFTCF

SEQ ID NO: 22308 - protein, 9 aa, Artificial Sequence
  Description of Artificial Sequence: Synthetic peptide
CVNMKTDGN

SEQ ID NO: 22309 - protein, 9 aa, Artificial Sequence
  Description of Artificial Sequence: Synthetic peptide
CVNQLCDSQ

SEQ ID NO: 22310 - protein, 9 aa, Artificial Sequence
  Description of Artificial Sequence: Synthetic peptide
CVNVENLTA

SEQ ID NO: 22311 - protein, 9 aa, Artificial Sequence
  Description of Artificial Sequence: Synthetic peptide
CVPDTIDTE

SEQ ID NO: 22312 - protein, 9 aa, Artificial Sequence
  Description of Artificial Sequence: Synthetic peptide
CVQMIMKDW

SEQ ID NO: 22313 - protein, 9 aa, Artificial Sequence
  Description of Artificial Sequence: Synthetic peptide
CVQTDNRRP

SEQ ID NO: 22314 - protein, 9 aa, Artificial Sequence
  Description of Artificial Sequence: Synthetic peptide
CVRHYGEYW

SEQ ID NO: 22315 - protein, 9 aa, Artificial Sequence
  Description of Artificial Sequence: Synthetic peptide
CVVADQGRG

SEQ ID NO: 22316 - protein, 9 aa, Artificial Sequence
  Description of Artificial Sequence: Synthetic peptide
CVWHAPIQT

SEQ ID NO: 22317 - protein, 9 aa, Artificial Sequence
  Description of Artificial Sequence: Synthetic peptide
CVWHASIQT

SEQ ID NO: 22318 - protein, 9 aa, Artificial Sequence
  Description of Artificial Sequence: Synthetic peptide
CVYTKIIGH

SEQ ID NO: 22319 - protein, 9 aa, Artificial Sequence
  Description of Artificial Sequence: Synthetic peptide
CWEFMFWHG

SEQ ID NO: 22320 - protein, 9 aa, Artificial Sequence
  Description of Artificial Sequence: Synthetic peptide
CWGVISKAP

SEQ ID NO: 22321 - protein, 9 aa, Artificial Sequence
  Description of Artificial Sequence: Synthetic peptide
CWIRGTQDR

SEQ ID NO: 22322 - protein, 9 aa, Artificial Sequence
  Description of Artificial Sequence: Synthetic peptide
CYLITFREH

SEQ ID NO: 22323 - protein, 9 aa, Artificial Sequence
  Description of Artificial Sequence: Synthetic peptide
TVADSSRLM

SEQ ID NO: 22324 - protein, 9 aa, Artificial Sequence
  Description of Artificial Sequence: Synthetic peptide
TVCMFQVLP

SEQ ID NO: 22325 - protein, 9 aa, Artificial Sequence
  Description of Artificial Sequence: Synthetic peptide
TVFPMTVVP

SEQ ID NO: 22326 - protein, 9 aa, Artificial Sequence
  Description of Artificial Sequence: Synthetic peptide
TVGFSEQDA

SEQ ID NO: 22327 - protein, 9 aa, Artificial Sequence
  Description of Artificial Sequence: Synthetic peptide
TVIQWYWHH

SEQ ID NO: 22328 - protein, 9 aa, Artificial Sequence
  Description of Artificial Sequence: Synthetic peptide
TVLSWGLCN

SEQ ID NO: 22329 - protein, 9 aa, Artificial Sequence
  Description of Artificial Sequence: Synthetic peptide
TVNQECNCQ

SEQ ID NO: 22330 - protein, 9 aa, Artificial Sequence
  Description of Artificial Sequence: Synthetic peptide
TVRPQDNKN

SEQ ID NO: 22331 - protein, 9 aa, Artificial Sequence
  Description of Artificial Sequence: Synthetic peptide
VVDHSCSRV

SEQ ID NO: 22332 - protein, 9 aa, Artificial Sequence
  Description of Artificial Sequence: Synthetic peptide
VVDPFGHEQ

SEQ ID NO: 22333 - protein, 9 aa, Artificial Sequence
  Description of Artificial Sequence: Synthetic peptide
VVHENQLKP

SEQ ID NO: 22334 - protein, 9 aa, Artificial Sequence
  Description of Artificial Sequence: Synthetic peptide
WVTCRGTVF

SEQ ID NO: 22335 - protein, 9 aa, Artificial Sequence
  Description of Artificial Sequence: Synthetic peptide
YVEIHHAQK

SEQ ID NO: 22336 - protein, 9 aa, Artificial Sequence
  Description of Artificial Sequence: Synthetic peptide
YVHEGGENP

SEQ ID NO: 22337 - protein, 9 aa, Artificial Sequence
  Description of Artificial Sequence: Synthetic peptide
YVLESNYCQ

SEQ ID NO: 22338 - protein, 9 aa, Artificial Sequence
  Description of Artificial Sequence: Synthetic peptide
YVSASWMTP

SEQ ID NO: 22339 - protein, 9 aa, Artificial Sequence
  Description of Artificial Sequence: Synthetic peptide
YVTKFAECH

SEQ ID NO: 22340 - protein, 9 aa, Artificial Sequence
  Description of Artificial Sequence: Synthetic peptide
YVVTHVPWH

SEQ ID NO: 22341 - protein, 9 aa, Artificial Sequence
  Description of Artificial Sequence: Synthetic peptide
YVYDEFLWS

SEQ ID NO: 22342 - protein, 9 aa, Artificial Sequence
  Description of Artificial Sequence: Synthetic peptide
FVMCYNDCK

SEQ ID NO: 22343 - protein, 9 aa, Artificial Sequence
  Description of Artificial Sequence: Synthetic peptide
AVHWHRKWE

SEQ ID NO: 22344 - protein, 9 aa, Artificial Sequence
  Description of Artificial Sequence: Synthetic peptide
AVINPPCHP

SEQ ID NO: 22345 - protein, 9 aa, Artificial Sequence
  Description of Artificial Sequence: Synthetic peptide
AVSLQPQFG

SEQ ID NO: 22346 - protein, 9 aa, Artificial Sequence
  Description of Artificial Sequence: Synthetic peptide
DVKAFMGCV

SEQ ID NO: 22347 - protein, 9 aa, Artificial Sequence
  Description of Artificial Sequence: Synthetic peptide
GVEAYRNFK

SEQ ID NO: 22348 - protein, 9 aa, Artificial Sequence
  Description of Artificial Sequence: Synthetic peptide
GVIHRQYCP

SEQ ID NO: 22349 - protein, 9 aa, Artificial Sequence
  Description of Artificial Sequence: Synthetic peptide
KVEANPRVC

SEQ ID NO: 22350 - protein, 9 aa, Artificial Sequence
  Description of Artificial Sequence: Synthetic peptide
LVHAVSYIC

SEQ ID NO: 22351 - protein, 9 aa, Artificial Sequence
  Description of Artificial Sequence: Synthetic peptide
MVAPPNCCV

SEQ ID NO: 22352 - protein, 9 aa, Artificial Sequence
  Description of Artificial Sequence: Synthetic peptide
NVNVRESEW

SEQ ID NO: 22353 - protein, 9 aa, Artificial Sequence
  Description of Artificial Sequence: Synthetic peptide
PVHAVSYIC

SEQ ID NO: 22354 - protein, 9 aa, Artificial Sequence
  Description of Artificial Sequence: Synthetic peptide
RVTIMFTDT

SEQ ID NO: 22355 - protein, 9 aa, Artificial Sequence
  Description of Artificial Sequence: Synthetic peptide
SVHTADVCC

SEQ ID NO: 22356 - protein, 9 aa, Artificial Sequence
  Description of Artificial Sequence: Synthetic peptide
SVPQQKIDE

SEQ ID NO: 22357 - protein, 9 aa, Artificial Sequence
  Description of Artificial Sequence: Synthetic peptide
TVKINSISP

SEQ ID NO: 22358 - protein, 9 aa, Artificial Sequence
  Description of Artificial Sequence: Synthetic peptide
YVQCTHYAQ

SEQ ID NO: 22359 - protein, 9 aa, Artificial Sequence
  Description of Artificial Sequence: Synthetic peptide
GVIHRQYCQ

SEQ ID NO: 22360 - protein, 9 aa, Artificial Sequence
  Description of Artificial Sequence: Synthetic peptide
QVPRPSMWW

SEQ ID NO: 22361 - protein, 9 aa, Artificial Sequence
  Description of Artificial Sequence: Synthetic peptide
PVSPLRSYV

SEQ ID NO: 22362 - protein, 9 aa, Artificial Sequence
  Description of Artificial Sequence: Synthetic peptide
QVTSDGKII

SEQ ID NO: 22363 - protein, 9 aa, Artificial Sequence
  Description of Artificial Sequence: Synthetic peptide
VVGWDNYVA

SEQ ID NO: 22364 - protein, 9 aa, Artificial Sequence
  Description of Artificial Sequence: Synthetic peptide
NVHHEWCDW

SEQ ID NO: 22365 - protein, 9 aa, Artificial Sequence
  Description of Artificial Sequence: Synthetic peptide
MVDPMSVPF

SEQ ID NO: 22366 - protein, 9 aa, Artificial Sequence
  Description of Artificial Sequence: Synthetic peptide
DVDYRSEAW

SEQ ID NO: 22367 - protein, 9 aa, Artificial Sequence
  Description of Artificial Sequence: Synthetic peptide
IVPQQKIDE

SEQ ID NO: 22368 - protein, 9 aa, Artificial Sequence
  Description of Artificial Sequence: Synthetic peptide
VVHPMAYCF

SEQ ID NO: 22369 - protein, 9 aa, Artificial Sequence
  Description of Artificial Sequence: Synthetic peptide
LVVTKFTYV

SEQ ID NO: 22370 - protein, 9 aa, Artificial Sequence
  Description of Artificial Sequence: Synthetic peptide
AVKSRTTWV

SEQ ID NO: 22371 - protein, 9 aa, Artificial Sequence
  Description of Artificial Sequence: Synthetic peptide
AVQGDPGVA

SEQ ID NO: 22372 - protein, 9 aa, Artificial Sequence
  Description of Artificial Sequence: Synthetic peptide
AVSVETWWT

SEQ ID NO: 22373 - protein, 9 aa, Artificial Sequence
  Description of Artificial Sequence: Synthetic peptide
AVVDCPLNI

SEQ ID NO: 22374 - protein, 9 aa, Artificial Sequence
  Description of Artificial Sequence: Synthetic peptide
AVWNVVSDG

SEQ ID NO: 22375 - protein, 9 aa, Artificial Sequence
  Description of Artificial Sequence: Synthetic peptide
AVYQYVETP

SEQ ID NO: 22376 - protein, 9 aa, Artificial Sequence
  Description of Artificial Sequence: Synthetic peptide
DVDKLEHGQ

SEQ ID NO: 22377 - protein, 9 aa, Artificial Sequence
  Description of Artificial Sequence: Synthetic peptide
DVDNCYKGD

SEQ ID NO: 22378 - protein, 9 aa, Artificial Sequence
  Description of Artificial Sequence: Synthetic peptide
DVICFGKWE

SEQ ID NO: 22379 - protein, 9 aa, Artificial Sequence
  Description of Artificial Sequence: Synthetic peptide
DVQTRNLSK

SEQ ID NO: 22380 - protein, 9 aa, Artificial Sequence
  Description of Artificial Sequence: Synthetic peptide
DVYRDAMTP

SEQ ID NO: 22381 - protein, 9 aa, Artificial Sequence
  Description of Artificial Sequence: Synthetic peptide
EVALQWAST

SEQ ID NO: 22382 - protein, 9 aa, Artificial Sequence
  Description of Artificial Sequence: Synthetic peptide
EVDVRVLFD

SEQ ID NO: 22383 - protein, 9 aa, Artificial Sequence
  Description of Artificial Sequence: Synthetic peptide
EVESWMWVC

SEQ ID NO: 22384 - protein, 9 aa, Artificial Sequence
  Description of Artificial Sequence: Synthetic peptide
EVHRVASCP

SEQ ID NO: 22385 - protein, 9 aa, Artificial Sequence
  Description of Artificial Sequence: Synthetic peptide
EVSKFNHYF

SEQ ID NO: 22386 - protein, 9 aa, Artificial Sequence
  Description of Artificial Sequence: Synthetic peptide
EVSTITFWS

SEQ ID NO: 22387 - protein, 9 aa, Artificial Sequence
  Description of Artificial Sequence: Synthetic peptide
EVTPHWTGG

SEQ ID NO: 22388 - protein, 9 aa, Artificial Sequence
  Description of Artificial Sequence: Synthetic peptide
EVYYAMASW

SEQ ID NO: 22389 - protein, 9 aa, Artificial Sequence
  Description of Artificial Sequence: Synthetic peptide
FVNVMKVTC

SEQ ID NO: 22390 - protein, 9 aa, Artificial Sequence
  Description of Artificial Sequence: Synthetic peptide
GVKPGASCG

SEQ ID NO: 22391 - protein, 9 aa, Artificial Sequence
  Description of Artificial Sequence: Synthetic peptide
GVQQFYRYD

SEQ ID NO: 22392 - protein, 9 aa, Artificial Sequence
  Description of Artificial Sequence: Synthetic peptide
GVRLSSPWE

SEQ ID NO: 22393 - protein, 9 aa, Artificial Sequence
  Description of Artificial Sequence: Synthetic peptide
GVYPMHEAC

SEQ ID NO: 22394 - protein, 9 aa, Artificial Sequence
  Description of Artificial Sequence: Synthetic peptide
HVCMMASCD

SEQ ID NO: 22395 - protein, 9 aa, Artificial Sequence
  Description of Artificial Sequence: Synthetic peptide
IVCAYSNAS

SEQ ID NO: 22396 - protein, 9 aa, Artificial Sequence
  Description of Artificial Sequence: Synthetic peptide
IVEPAIVCA

SEQ ID NO: 22397 - protein, 9 aa, Artificial Sequence
  Description of Artificial Sequence: Synthetic peptide
IVNKWDGFA

SEQ ID NO: 22398 - protein, 9 aa, Artificial Sequence
  Description of Artificial Sequence: Synthetic peptide
IVYYCGKRK

SEQ ID NO: 22399 - protein, 9 aa, Artificial Sequence
  Description of Artificial Sequence: Synthetic peptide
KVICHEFTS

SEQ ID NO: 22400 - protein, 9 aa, Artificial Sequence
  Description of Artificial Sequence: Synthetic peptide
KVMHTGWHP

SEQ ID NO: 22401 - protein, 9 aa, Artificial Sequence
  Description of Artificial Sequence: Synthetic peptide
KVVQRIDHD

SEQ ID NO: 22402 - protein, 9 aa, Artificial Sequence
  Description of Artificial Sequence: Synthetic peptide
LVCRYWDDE

SEQ ID NO: 22403 - protein, 9 aa, Artificial Sequence
  Description of Artificial Sequence: Synthetic peptide
LVFMQEYAA

SEQ ID NO: 22404 - protein, 9 aa, Artificial Sequence
  Description of Artificial Sequence: Synthetic peptide
LVKCNTCME

SEQ ID NO: 22405 - protein, 9 aa, Artificial Sequence
  Description of Artificial Sequence: Synthetic peptide
LVNHCGQMG

SEQ ID NO: 22406 - protein, 9 aa, Artificial Sequence
  Description of Artificial Sequence: Synthetic peptide
LVTEQVNSP

SEQ ID NO: 22407 - protein, 9 aa, Artificial Sequence
  Description of Artificial Sequence: Synthetic peptide
MVDRMKWHK

SEQ ID NO: 22408 - protein, 9 aa, Artificial Sequence
  Description of Artificial Sequence: Synthetic peptide
MVYPIEWGA

SEQ ID NO: 22409 - protein, 9 aa, Artificial Sequence
  Description of Artificial Sequence: Synthetic peptide
NVGIITFQD

SEQ ID NO: 22410 - protein, 9 aa, Artificial Sequence
  Description of Artificial Sequence: Synthetic peptide
NVLQNSIMC

SEQ ID NO: 22411 - protein, 9 aa, Artificial Sequence
  Description of Artificial Sequence: Synthetic peptide
NVYTHHVLS

SEQ ID NO: 22412 - protein, 9 aa, Artificial Sequence
  Description of Artificial Sequence: Synthetic peptide
QVDNYFNRL

SEQ ID NO: 22413 - protein, 9 aa, Artificial Sequence
  Description of Artificial Sequence: Synthetic peptide
QVNFGLHAQ

SEQ ID NO: 22414 - protein, 9 aa, Artificial Sequence
  Description of Artificial Sequence: Synthetic peptide
RVNEATHDD

SEQ ID NO: 22415 - protein, 9 aa, Artificial Sequence
  Description of Artificial Sequence: Synthetic peptide
SVCPFSYNL

SEQ ID NO: 22416 - protein, 9 aa, Artificial Sequence
  Description of Artificial Sequence: Synthetic peptide
SVFSNQDGV

SEQ ID NO: 22417 - protein, 9 aa, Artificial Sequence
  Description of Artificial Sequence: Synthetic peptide
SVGFEQSWY

SEQ ID NO: 22418 - protein, 9 aa, Artificial Sequence
  Description of Artificial Sequence: Synthetic peptide
SVIPLPHGD

SEQ ID NO: 22419 - protein, 9 aa, Artificial Sequence
  Description of Artificial Sequence: Synthetic peptide
SVITTEFQD

SEQ ID NO: 22420 - protein, 9 aa, Artificial Sequence
  Description of Artificial Sequence: Synthetic peptide
SVVNHAGAC

SEQ ID NO: 22421 - protein, 9 aa, Artificial Sequence
  Description of Artificial Sequence: Synthetic peptide
TVAHERSFQ

SEQ ID NO: 22422 - protein, 9 aa, Artificial Sequence
  Description of Artificial Sequence: Synthetic peptide
TVDNTNWLK

SEQ ID NO: 22423 - protein, 9 aa, Artificial Sequence
  Description of Artificial Sequence: Synthetic peptide
TVHYSSQDP

SEQ ID NO: 22424 - protein, 9 aa, Artificial Sequence
  Description of Artificial Sequence: Synthetic peptide
TVSGLWQEL

SEQ ID NO: 22425 - protein, 9 aa, Artificial Sequence
  Description of Artificial Sequence: Synthetic peptide
VVGTYALTY

SEQ ID NO: 22426 - protein, 9 aa, Artificial Sequence
  Description of Artificial Sequence: Synthetic peptide
VVHTCAMCT

SEQ ID NO: 22427 - protein, 9 aa, Artificial Sequence
  Description of Artificial Sequence: Synthetic peptide
VVSAHMPGV

SEQ ID NO: 22428 - protein, 9 aa, Artificial Sequence
  Description of Artificial Sequence: Synthetic peptide
VVTVAWTPG

SEQ ID NO: 22429 - protein, 9 aa, Artificial Sequence
  Description of Artificial Sequence: Synthetic peptide
WVEKYLISY

SEQ ID NO: 22430 - protein, 9 aa, Artificial Sequence
  Description of Artificial Sequence: Synthetic peptide
YVLSAIPFG

SEQ ID NO: 22431 - protein, 9 aa, Artificial Sequence
  Description of Artificial Sequence: Synthetic peptide
YVWYRRTDL

SEQ ID NO: 22432 - protein, 9 aa, Artificial Sequence
  Description of Artificial Sequence: Synthetic peptide
KVCNSEYWD

SEQ ID NO: 22433 - protein, 9 aa, Artificial Sequence
  Description of Artificial Sequence: Synthetic peptide
QVHIKVTDH

SEQ ID NO: 22434 - protein, 9 aa, Artificial Sequence
  Description of Artificial Sequence: Synthetic peptide
KVDRNTNWC

SEQ ID NO: 22435 - protein, 9 aa, Artificial Sequence
  Description of Artificial Sequence: Synthetic peptide
GVEAYCNFK

SEQ ID NO: 22436 - protein, 9 aa, Artificial Sequence
  Description of Artificial Sequence: Synthetic peptide
HVWNDVFHM

SEQ ID NO: 22437 - protein, 9 aa, Artificial Sequence
  Description of Artificial Sequence: Synthetic peptide
EVQRNIYSP

SEQ ID NO: 22438 - protein, 9 aa, Artificial Sequence
  Description of Artificial Sequence: Synthetic peptide
GVAQYLHHC

SEQ ID NO: 22439 - protein, 9 aa, Artificial Sequence
  Description of Artificial Sequence: Synthetic peptide
DVPIHRVQL

SEQ ID NO: 22440 - protein, 9 aa, Artificial Sequence
  Description of Artificial Sequence: Synthetic peptide
SVNLNCTEH

SEQ ID NO: 22441 - protein, 9 aa, Artificial Sequence
  Description of Artificial Sequence: Synthetic peptide
FVFAMIPGF

SEQ ID NO: 22442 - protein, 9 aa, Artificial Sequence
  Description of Artificial Sequence: Synthetic peptide
AVHWHRKCE

SEQ ID NO: 22443 - protein, 9 aa, Artificial Sequence
  Description of Artificial Sequence: Synthetic peptide
GVMIYEADE

SEQ ID NO: 22444 - protein, 9 aa, Artificial Sequence
  Description of Artificial Sequence: Synthetic peptide
KVAGGHETT

SEQ ID NO: 22445 - protein, 9 aa, Artificial Sequence
  Description of Artificial Sequence: Synthetic peptide
FVPWCHSFG

SEQ ID NO: 22446 - protein, 9 aa, Artificial Sequence
  Description of Artificial Sequence: Synthetic peptide
NVTPGRTHS

SEQ ID NO: 22447 - protein, 9 aa, Artificial Sequence
  Description of Artificial Sequence: Synthetic peptide
LVSQWDYDM

SEQ ID NO: 22448 - protein, 9 aa, Artificial Sequence
  Description of Artificial Sequence: Synthetic peptide
RVDIGGFAQ

SEQ ID NO: 22449 - protein, 9 aa, Artificial Sequence
  Description of Artificial Sequence: Synthetic peptide
HVDQHRVQA

SEQ ID NO: 22450 - protein, 9 aa, Artificial Sequence
  Description of Artificial Sequence: Synthetic peptide
AVEACYHSP

SEQ ID NO: 22451 - protein, 9 aa, Artificial Sequence
  Description of Artificial Sequence: Synthetic peptide
AVFTFATCG

SEQ ID NO: 22452 - protein, 9 aa, Artificial Sequence
  Description of Artificial Sequence: Synthetic peptide
AVQWSAENM

SEQ ID NO: 22453 - protein, 9 aa, Artificial Sequence
  Description of Artificial Sequence: Synthetic peptide
DVDYRPDAQ

SEQ ID NO: 22454 - protein, 9 aa, Artificial Sequence
  Description of Artificial Sequence: Synthetic peptide
DVELGGSNF

SEQ ID NO: 22455 - protein, 9 aa, Artificial Sequence
  Description of Artificial Sequence: Synthetic peptide
DVFQYEMLA

SEQ ID NO: 22456 - protein, 9 aa, Artificial Sequence
  Description of Artificial Sequence: Synthetic peptide
DVGYASDPK

SEQ ID NO: 22457 - protein, 9 aa, Artificial Sequence
  Description of Artificial Sequence: Synthetic peptide
DVKVTEDAE

SEQ ID NO: 22458 - protein, 9 aa, Artificial Sequence
  Description of Artificial Sequence: Synthetic peptide
DVRLDDGAQ

SEQ ID NO: 22459 - protein, 9 aa, Artificial Sequence
  Description of Artificial Sequence: Synthetic peptide
DVRPDEFHN

SEQ ID NO: 22460 - protein, 9 aa, Artificial Sequence
  Description of Artificial Sequence: Synthetic peptide
DVRPDKFHN

SEQ ID NO: 22461 - protein, 9 aa, Artificial Sequence
  Description of Artificial Sequence: Synthetic peptide
DVVSTESTT

SEQ ID NO: 22462 - protein, 9 aa, Artificial Sequence
  Description of Artificial Sequence: Synthetic peptide
EVFREWMWM

SEQ ID NO: 22463 - protein, 9 aa, Artificial Sequence
  Description of Artificial Sequence: Synthetic peptide
EVGSDCHQG

SEQ ID NO: 22464 - protein, 9 aa, Artificial Sequence
  Description of Artificial Sequence: Synthetic peptide
EVKYMRHIC

SEQ ID NO: 22465 - protein, 9 aa, Artificial Sequence
  Description of Artificial Sequence: Synthetic peptide
EVRPSVGSD

SEQ ID NO: 22466 - protein, 9 aa, Artificial Sequence
  Description of Artificial Sequence: Synthetic peptide
EVTSAGFDF

SEQ ID NO: 22467 - protein, 9 aa, Artificial Sequence
  Description of Artificial Sequence: Synthetic peptide
FVIWRQESR

SEQ ID NO: 22468 - protein, 9 aa, Artificial Sequence
  Description of Artificial Sequence: Synthetic peptide
FVRCLSTHN

SEQ ID NO: 22469 - protein, 9 aa, Artificial Sequence
  Description of Artificial Sequence: Synthetic peptide
FVSEQMTAQ

SEQ ID NO: 22470 - protein, 9 aa, Artificial Sequence
  Description of Artificial Sequence: Synthetic peptide
GVDSSRPVQ

SEQ ID NO: 22471 - protein, 9 aa, Artificial Sequence
  Description of Artificial Sequence: Synthetic peptide
HVCQKTHSI

SEQ ID NO: 22472 - protein, 9 aa, Artificial Sequence
  Description of Artificial Sequence: Synthetic peptide
HVNTSCKQF

SEQ ID NO: 22473 - protein, 9 aa, Artificial Sequence
  Description of Artificial Sequence: Synthetic peptide
HVQHHDAAT

SEQ ID NO: 22474 - protein, 9 aa, Artificial Sequence
  Description of Artificial Sequence: Synthetic peptide
IVAYGTCGA

SEQ ID NO: 22475 - protein, 9 aa, Artificial Sequence
  Description of Artificial Sequence: Synthetic peptide
IVHQKQLAA

SEQ ID NO: 22476 - protein, 9 aa, Artificial Sequence
  Description of Artificial Sequence: Synthetic peptide
LVDEMFSQW

SEQ ID NO: 22477 - protein, 9 aa, Artificial Sequence
  Description of Artificial Sequence: Synthetic peptide
LVKGSFAPD

SEQ ID NO: 22478 - protein, 9 aa, Artificial Sequence
  Description of Artificial Sequence: Synthetic peptide
LVKPQSGEL

SEQ ID NO: 22479 - protein, 9 aa, Artificial Sequence
  Description of Artificial Sequence: Synthetic peptide
LVRQDSQIG

SEQ ID NO: 22480 - protein, 9 aa, Artificial Sequence
  Description of Artificial Sequence: Synthetic peptide
LVVCSCPFP

SEQ ID NO: 22481 - protein, 9 aa, Artificial Sequence
  Description of Artificial Sequence: Synthetic peptide
MVEFYCSDE

SEQ ID NO: 22482 - protein, 9 aa, Artificial Sequence
  Description of Artificial Sequence: Synthetic peptide
MVEFYYSDE

SEQ ID NO: 22483 - protein, 9 aa, Artificial Sequence
  Description of Artificial Sequence: Synthetic peptide
NVAYHMVNN

SEQ ID NO: 22484 - protein, 9 aa, Artificial Sequence
  Description of Artificial Sequence: Synthetic peptide
NVENAYDAM

SEQ ID NO: 22485 - protein, 9 aa, Artificial Sequence
  Description of Artificial Sequence: Synthetic peptide
NVFLNLDLA

SEQ ID NO: 22486 - protein, 9 aa, Artificial Sequence
  Description of Artificial Sequence: Synthetic peptide
NVHTIENSA

SEQ ID NO: 22487 - protein, 9 aa, Artificial Sequence
  Description of Artificial Sequence: Synthetic peptide
NVVDILAGS

SEQ ID NO: 22488 - protein, 9 aa, Artificial Sequence
  Description of Artificial Sequence: Synthetic peptide
NVYYKHAHP

SEQ ID NO: 22489 - protein, 9 aa, Artificial Sequence
  Description of Artificial Sequence: Synthetic peptide
PVIRTWVDI

SEQ ID NO: 22490 - protein, 9 aa, Artificial Sequence
  Description of Artificial Sequence: Synthetic peptide
QVASHTQPE

SEQ ID NO: 22491 - protein, 9 aa, Artificial Sequence
  Description of Artificial Sequence: Synthetic peptide
QVATWSMYH

SEQ ID NO: 22492 - protein, 9 aa, Artificial Sequence
  Description of Artificial Sequence: Synthetic peptide
QVFMASTGE

SEQ ID NO: 22493 - protein, 9 aa, Artificial Sequence
  Description of Artificial Sequence: Synthetic peptide
RVGVQEAVC

SEQ ID NO: 22494 - protein, 9 aa, Artificial Sequence
  Description of Artificial Sequence: Synthetic peptide
RVHISLLKG

SEQ ID NO: 22495 - protein, 9 aa, Artificial Sequence
  Description of Artificial Sequence: Synthetic peptide
RVNMKTDGN

SEQ ID NO: 22496 - protein, 9 aa, Artificial Sequence
  Description of Artificial Sequence: Synthetic peptide
SVCLHNLVG

SEQ ID NO: 22497 - protein, 9 aa, Artificial Sequence
  Description of Artificial Sequence: Synthetic peptide
SVHGFDQSM

SEQ ID NO: 22498 - protein, 9 aa, Artificial Sequence
  Description of Artificial Sequence: Synthetic peptide
SVIKVAFFF

SEQ ID NO: 22499 - protein, 9 aa, Artificial Sequence
  Description of Artificial Sequence: Synthetic peptide
SVRLHNLVG

SEQ ID NO: 22500 - protein, 9 aa, Artificial Sequence
  Description of Artificial Sequence: Synthetic peptide
TVDPNVRVD

SEQ ID NO: 22501 - protein, 9 aa, Artificial Sequence
  Description of Artificial Sequence: Synthetic peptide
TVVPQGFDR

SEQ ID NO: 22502 - protein, 9 aa, Artificial Sequence
  Description of Artificial Sequence: Synthetic peptide
YVCIPAHDR

SEQ ID NO: 22503 - protein, 9 aa, Artificial Sequence
  Description of Artificial Sequence: Synthetic peptide
YVCMIHMDD

SEQ ID NO: 22504 - protein, 9 aa, Artificial Sequence
  Description of Artificial Sequence: Synthetic peptide
YVDLIMSVD

SEQ ID NO: 22505 - protein, 9 aa, Artificial Sequence
  Description of Artificial Sequence: Synthetic peptide
YVISKCAGQ

SEQ ID NO: 22506 - protein, 9 aa, Artificial Sequence
  Description of Artificial Sequence: Synthetic peptide
TSFCQIASR

SEQ ID NO: 22507 - protein, 9 aa, Artificial Sequence
  Description of Artificial Sequence: Synthetic peptide
VCFKLFHVE

SEQ ID NO: 22508 - protein, 9 aa, Artificial Sequence
  Description of Artificial Sequence: Synthetic peptide
AFFKFMTQM

SEQ ID NO: 22509 - protein, 9 aa, Artificial Sequence
  Description of Artificial Sequence: Synthetic peptide
DKFPMPTHS

SEQ ID NO: 22510 - protein, 9 aa, Artificial Sequence
  Description of Artificial Sequence: Synthetic peptide
ETFGIRTFA

SEQ ID NO: 22511 - protein, 9 aa, Artificial Sequence
  Description of Artificial Sequence: Synthetic peptide
GIFWASYGF

SEQ ID NO: 22512 - protein, 9 aa, Artificial Sequence
  Description of Artificial Sequence: Synthetic peptide
GKFPMPTHS

SEQ ID NO: 22513 - protein, 9 aa, Artificial Sequence
  Description of Artificial Sequence: Synthetic peptide
GMFCASYGF

SEQ ID NO: 22514 - protein, 9 aa, Artificial Sequence
  Description of Artificial Sequence: Synthetic peptide
KDFWGHQCF

SEQ ID NO: 22515 - protein, 9 aa, Artificial Sequence
  Description of Artificial Sequence: Synthetic peptide
LLFTLMSSS

SEQ ID NO: 22516 - protein, 9 aa, Artificial Sequence
  Description of Artificial Sequence: Synthetic peptide
QTFYEGHAT

SEQ ID NO: 22517 - protein, 9 aa, Artificial Sequence
  Description of Artificial Sequence: Synthetic peptide
RDFRMNAGA

SEQ ID NO: 22518 - protein, 9 aa, Artificial Sequence
  Description of Artificial Sequence: Synthetic peptide
RTFYEGNAT

SEQ ID NO: 22519 - protein, 9 aa, Artificial Sequence
  Description of Artificial Sequence: Synthetic peptide
TTFQSLQQM

SEQ ID NO: 22520 - protein, 9 aa, Artificial Sequence
  Description of Artificial Sequence: Synthetic peptide
NQFHWVRYD

SEQ ID NO: 22521 - protein, 9 aa, Artificial Sequence
  Description of Artificial Sequence: Synthetic peptide
LWFFMKFAK

SEQ ID NO: 22522 - protein, 9 aa, Artificial Sequence
  Description of Artificial Sequence: Synthetic peptide
YTFWDYHRS

SEQ ID NO: 22523 - protein, 9 aa, Artificial Sequence
  Description of Artificial Sequence: Synthetic peptide
KDFWEHQCF

SEQ ID NO: 22524 - protein, 9 aa, Artificial Sequence
  Description of Artificial Sequence: Synthetic peptide
VHFTVLNWG

SEQ ID NO: 22525 - protein, 9 aa, Artificial Sequence
  Description of Artificial Sequence: Synthetic peptide
DYFQYNEAP

SEQ ID NO: 22526 - protein, 9 aa, Artificial Sequence
  Description of Artificial Sequence: Synthetic peptide
QEFLEERYV

SEQ ID NO: 22527 - protein, 9 aa, Artificial Sequence
  Description of Artificial Sequence: Synthetic peptide
GTFHCCAWE

SEQ ID NO: 22528 - protein, 9 aa, Artificial Sequence
  Description of Artificial Sequence: Synthetic peptide
ETFGIRTFD

SEQ ID NO: 22529 - protein, 9 aa, Artificial Sequence
  Description of Artificial Sequence: Synthetic peptide
EQFADRAPR

SEQ ID NO: 22530 - protein, 9 aa, Artificial Sequence
  Description of Artificial Sequence: Synthetic peptide
ARFMWNHTR

SEQ ID NO: 22531 - protein, 9 aa, Artificial Sequence
  Description of Artificial Sequence: Synthetic peptide
DTFLEMSMG

SEQ ID NO: 22532 - protein, 9 aa, Artificial Sequence
  Description of Artificial Sequence: Synthetic peptide
DTFPIAGSF

SEQ ID NO: 22533 - protein, 9 aa, Artificial Sequence
  Description of Artificial Sequence: Synthetic peptide
EAFRHDHFH

SEQ ID NO: 22534 - protein, 9 aa, Artificial Sequence
  Description of Artificial Sequence: Synthetic peptide
EGFFYHHGG

SEQ ID NO: 22535 - protein, 9 aa, Artificial Sequence
  Description of Artificial Sequence: Synthetic peptide
EGFQFSNQG

SEQ ID NO: 22536 - protein, 9 aa, Artificial Sequence
  Description of Artificial Sequence: Synthetic peptide
ERFMTASMQ

SEQ ID NO: 22537 - protein, 9 aa, Artificial Sequence
  Description of Artificial Sequence: Synthetic peptide
FEFTVHCTH

SEQ ID NO: 22538 - protein, 9 aa, Artificial Sequence
  Description of Artificial Sequence: Synthetic peptide
GKFEPPVNA

SEQ ID NO: 22539 - protein, 9 aa, Artificial Sequence
  Description of Artificial Sequence: Synthetic peptide
HAFPTVRWG

SEQ ID NO: 22540 - protein, 9 aa, Artificial Sequence
  Description of Artificial Sequence: Synthetic peptide
IMFDPNIPN

SEQ ID NO: 22541 - protein, 9 aa, Artificial Sequence
  Description of Artificial Sequence: Synthetic peptide
KAFHIQREK

SEQ ID NO: 22542 - protein, 9 aa, Artificial Sequence
  Description of Artificial Sequence: Synthetic peptide
LDFQIRFER

SEQ ID NO: 22543 - protein, 9 aa, Artificial Sequence
  Description of Artificial Sequence: Synthetic peptide
LPFHLQSDT

SEQ ID NO: 22544 - protein, 9 aa, Artificial Sequence
  Description of Artificial Sequence: Synthetic peptide
LPFTQMHGS

SEQ ID NO: 22545 - protein, 9 aa, Artificial Sequence
  Description of Artificial Sequence: Synthetic peptide
LSFPVVLTE

SEQ ID NO: 22546 - protein, 9 aa, Artificial Sequence
  Description of Artificial Sequence: Synthetic peptide
NAFEYEKIM

SEQ ID NO: 22547 - protein, 9 aa, Artificial Sequence
  Description of Artificial Sequence: Synthetic peptide
NAFTKTQDQ

SEQ ID NO: 22548 - protein, 9 aa, Artificial Sequence
  Description of Artificial Sequence: Synthetic peptide
NSFSTNWSY

SEQ ID NO: 22549 - protein, 9 aa, Artificial Sequence
  Description of Artificial Sequence: Synthetic peptide
NTFCETVTF

SEQ ID NO: 22550 - protein, 9 aa, Artificial Sequence
  Description of Artificial Sequence: Synthetic peptide
QKFEGEWFT

SEQ ID NO: 22551 - protein, 9 aa, Artificial Sequence
  Description of Artificial Sequence: Synthetic peptide
RAFVGCSPE

SEQ ID NO: 22552 - protein, 9 aa, Artificial Sequence
  Description of Artificial Sequence: Synthetic peptide
RQFAHRFKM

SEQ ID NO: 22553 - protein, 9 aa, Artificial Sequence
  Description of Artificial Sequence: Synthetic peptide
SCFAILSAN

SEQ ID NO: 22554 - protein, 9 aa, Artificial Sequence
  Description of Artificial Sequence: Synthetic peptide
TSFELNDER

SEQ ID NO: 22555 - protein, 9 aa, Artificial Sequence
  Description of Artificial Sequence: Synthetic peptide
TSFSPELFN

SEQ ID NO: 22556 - protein, 9 aa, Artificial Sequence
  Description of Artificial Sequence: Synthetic peptide
WNFNCIILH

SEQ ID NO: 22557 - protein, 9 aa, Artificial Sequence
  Description of Artificial Sequence: Synthetic peptide
STFISSGIQ

SEQ ID NO: 22558 - protein, 9 aa, Artificial Sequence
  Description of Artificial Sequence: Synthetic peptide
FKFWDMETR

SEQ ID NO: 22559 - protein, 9 aa, Artificial Sequence
  Description of Artificial Sequence: Synthetic peptide
KRFVDMPEM

SEQ ID NO: 22560 - protein, 9 aa, Artificial Sequence
  Description of Artificial Sequence: Synthetic peptide
VSFQRMNDM

SEQ ID NO: 22561 - protein, 9 aa, Artificial Sequence
  Description of Artificial Sequence: Synthetic peptide
ERFKTFCEA

SEQ ID NO: 22562 - protein, 9 aa, Artificial Sequence
  Description of Artificial Sequence: Synthetic peptide
LLFPLMSSS

SEQ ID NO: 22563 - protein, 9 aa, Artificial Sequence
  Description of Artificial Sequence: Synthetic peptide
EKFWFKTMN

SEQ ID NO: 22564 - protein, 9 aa, Artificial Sequence
  Description of Artificial Sequence: Synthetic peptide
NWFQAIEIG

SEQ ID NO: 22565 - protein, 9 aa, Artificial Sequence
  Description of Artificial Sequence: Synthetic peptide
GIFCASYGF

SEQ ID NO: 22566 - protein, 9 aa, Artificial Sequence
  Description of Artificial Sequence: Synthetic peptide
IWFWWEKAE

SEQ ID NO: 22567 - protein, 9 aa, Artificial Sequence
  Description of Artificial Sequence: Synthetic peptide
RTFYEGHAT

SEQ ID NO: 22568 - protein, 9 aa, Artificial Sequence
  Description of Artificial Sequence: Synthetic peptide
TTFPQVIMN

SEQ ID NO: 22569 - protein, 9 aa, Artificial Sequence
  Description of Artificial Sequence: Synthetic peptide
DAFINRLSG

SEQ ID NO: 22570 - protein, 9 aa, Artificial Sequence
  Description of Artificial Sequence: Synthetic peptide
DIFDRPSSD

SEQ ID NO: 22571 - protein, 9 aa, Artificial Sequence
  Description of Artificial Sequence: Synthetic peptide
ETFLPWVHT

SEQ ID NO: 22572 - protein, 9 aa, Artificial Sequence
  Description of Artificial Sequence: Synthetic peptide
ETFSKTWFG

SEQ ID NO: 22573 - protein, 9 aa, Artificial Sequence
  Description of Artificial Sequence: Synthetic peptide
KSFGSPFER

SEQ ID NO: 22574 - protein, 9 aa, Artificial Sequence
  Description of Artificial Sequence: Synthetic peptide
KSFGSPFEW

SEQ ID NO: 22575 - protein, 9 aa, Artificial Sequence
  Description of Artificial Sequence: Synthetic peptide
MAFYKSQFN

SEQ ID NO: 22576 - protein, 9 aa, Artificial Sequence
  Description of Artificial Sequence: Synthetic peptide
NAFGMEYNT

SEQ ID NO: 22577 - protein, 9 aa, Artificial Sequence
  Description of Artificial Sequence: Synthetic peptide
NSFKPSGVT

SEQ ID NO: 22578 - protein, 9 aa, Artificial Sequence
  Description of Artificial Sequence: Synthetic peptide
PWFMVIWWP

SEQ ID NO: 22579 - protein, 9 aa, Artificial Sequence
  Description of Artificial Sequence: Synthetic peptide
QCFFNHRCE

SEQ ID NO: 22580 - protein, 9 aa, Artificial Sequence
  Description of Artificial Sequence: Synthetic peptide
RAFQDHYAY

SEQ ID NO: 22581 - protein, 9 aa, Artificial Sequence
  Description of Artificial Sequence: Synthetic peptide
TIFSASDSK

SEQ ID NO: 22582 - protein, 9 aa, Artificial Sequence
  Description of Artificial Sequence: Synthetic peptide
VAFYQENTT

SEQ ID NO: 22583 - protein, 9 aa, Artificial Sequence
  Description of Artificial Sequence: Synthetic peptide
WHFSSKWMD

SEQ ID NO: 22584 - protein, 9 aa, Artificial Sequence
  Description of Artificial Sequence: Synthetic peptide
TPGITQQQW

SEQ ID NO: 22585 - protein, 9 aa, Artificial Sequence
  Description of Artificial Sequence: Synthetic peptide
TSHICVSSL

SEQ ID NO: 22586 - protein, 9 aa, Artificial Sequence
  Description of Artificial Sequence: Synthetic peptide
TWLIDADMA

SEQ ID NO: 22587 - protein, 9 aa, Artificial Sequence
  Description of Artificial Sequence: Synthetic peptide
VAMIMEGQF

SEQ ID NO: 22588 - protein, 9 aa, Artificial Sequence
  Description of Artificial Sequence: Synthetic peptide
VFKIREDDN

SEQ ID NO: 22589 - protein, 9 aa, Artificial Sequence
  Description of Artificial Sequence: Synthetic peptide
WADIEYSHD

SEQ ID NO: 22590 - protein, 9 aa, Artificial Sequence
  Description of Artificial Sequence: Synthetic peptide
WTGIKCQSS

SEQ ID NO: 22591 - protein, 9 aa, Artificial Sequence
  Description of Artificial Sequence: Synthetic peptide
YFCILEKMT

SEQ ID NO: 22592 - protein, 9 aa, Artificial Sequence
  Description of Artificial Sequence: Synthetic peptide
YMCIQMAGW

SEQ ID NO: 22593 - protein, 9 aa, Artificial Sequence
  Description of Artificial Sequence: Synthetic peptide
ESPIMLNQA

SEQ ID NO: 22594 - protein, 9 aa, Artificial Sequence
  Description of Artificial Sequence: Synthetic peptide
RTPIELMHG

SEQ ID NO: 22595 - protein, 9 aa, Artificial Sequence
  Description of Artificial Sequence: Synthetic peptide
AGQITTSVT

SEQ ID NO: 22596 - protein, 9 aa, Artificial Sequence
  Description of Artificial Sequence: Synthetic peptide
ESDIFDGRQ

SEQ ID NO: 22597 - protein, 9 aa, Artificial Sequence
  Description of Artificial Sequence: Synthetic peptide
HPSICKGGD

SEQ ID NO: 22598 - protein, 9 aa, Artificial Sequence
  Description of Artificial Sequence: Synthetic peptide
QCHIIVARE

SEQ ID NO: 22599 - protein, 9 aa, Artificial Sequence
  Description of Artificial Sequence: Synthetic peptide
QCHIIVARG

SEQ ID NO: 22600 - protein, 9 aa, Artificial Sequence
  Description of Artificial Sequence: Synthetic peptide
TAKIIMLAS

SEQ ID NO: 22601 - protein, 9 aa, Artificial Sequence
  Description of Artificial Sequence: Synthetic peptide
DMSIATWYP

SEQ ID NO: 22602 - protein, 9 aa, Artificial Sequence
  Description of Artificial Sequence: Synthetic peptide
ESDIFDGHQ

SEQ ID NO: 22603 - protein, 9 aa, Artificial Sequence
  Description of Artificial Sequence: Synthetic peptide
TCVIGKGRR

SEQ ID NO: 22604 - protein, 9 aa, Artificial Sequence
  Description of Artificial Sequence: Synthetic peptide
VACIEHAKC

SEQ ID NO: 22605 - protein, 9 aa, Artificial Sequence
  Description of Artificial Sequence: Synthetic peptide
QFDIDQCCT

SEQ ID NO: 22606 - protein, 9 aa, Artificial Sequence
  Description of Artificial Sequence: Synthetic peptide
HPSICQGGD

SEQ ID NO: 22607 - protein, 9 aa, Artificial Sequence
  Description of Artificial Sequence: Synthetic peptide
AWIISQEGR

SEQ ID NO: 22608 - protein, 9 aa, Artificial Sequence
  Description of Artificial Sequence: Synthetic peptide
DMWILKDAS

SEQ ID NO: 22609 - protein, 9 aa, Artificial Sequence
  Description of Artificial Sequence: Synthetic peptide
DYYIIDCFM

SEQ ID NO: 22610 - protein, 9 aa, Artificial Sequence
  Description of Artificial Sequence: Synthetic peptide
EHMIEFPHR

SEQ ID NO: 22611 - protein, 9 aa, Artificial Sequence
  Description of Artificial Sequence: Synthetic peptide
FREIKEYDM

SEQ ID NO: 22612 - protein, 9 aa, Artificial Sequence
  Description of Artificial Sequence: Synthetic peptide
GLYITHSME

SEQ ID NO: 22613 - protein, 9 aa, Artificial Sequence
  Description of Artificial Sequence: Synthetic peptide
HCNIFSREQ

SEQ ID NO: 22614 - protein, 9 aa, Artificial Sequence
  Description of Artificial Sequence: Synthetic peptide
IICICNRGH

SEQ ID NO: 22615 - protein, 9 aa, Artificial Sequence
  Description of Artificial Sequence: Synthetic peptide
KEVIMKRCV

SEQ ID NO: 22616 - protein, 9 aa, Artificial Sequence
  Description of Artificial Sequence: Synthetic peptide
KLEIMCQAK

SEQ ID NO: 22617 - protein, 9 aa, Artificial Sequence
  Description of Artificial Sequence: Synthetic peptide
KPGIMKFYN

SEQ ID NO: 22618 - protein, 9 aa, Artificial Sequence
  Description of Artificial Sequence: Synthetic peptide
LYNIPMGTT

SEQ ID NO: 22619 - protein, 9 aa, Artificial Sequence
  Description of Artificial Sequence: Synthetic peptide
MKDIRVTQR

SEQ ID NO: 22620 - protein, 9 aa, Artificial Sequence
  Description of Artificial Sequence: Synthetic peptide
MYTIGTCYG

SEQ ID NO: 22621 - protein, 9 aa, Artificial Sequence
  Description of Artificial Sequence: Synthetic peptide
NINIYWMID

SEQ ID NO: 22622 - protein, 9 aa, Artificial Sequence
  Description of Artificial Sequence: Synthetic peptide
NSAIMSNYM

SEQ ID NO: 22623 - protein, 9 aa, Artificial Sequence
  Description of Artificial Sequence: Synthetic peptide
QEDILQTQY

SEQ ID NO: 22624 - protein, 9 aa, Artificial Sequence
  Description of Artificial Sequence: Synthetic peptide
QFEICHSQE

SEQ ID NO: 22625 - protein, 9 aa, Artificial Sequence
  Description of Artificial Sequence: Synthetic peptide
QHLIMPEPH

SEQ ID NO: 22626 - protein, 9 aa, Artificial Sequence
  Description of Artificial Sequence: Synthetic peptide
QPLIQHAGG

SEQ ID NO: 22627 - protein, 9 aa, Artificial Sequence
  Description of Artificial Sequence: Synthetic peptide
QQTIDSYGH

SEQ ID NO: 22628 - protein, 9 aa, Artificial Sequence
  Description of Artificial Sequence: Synthetic peptide
QSGINDLYG

SEQ ID NO: 22629 - protein, 9 aa, Artificial Sequence
  Description of Artificial Sequence: Synthetic peptide
RCMIYHQNA

SEQ ID NO: 22630 - protein, 9 aa, Artificial Sequence
  Description of Artificial Sequence: Synthetic peptide
RGGIFPQRP

SEQ ID NO: 22631 - protein, 9 aa, Artificial Sequence
  Description of Artificial Sequence: Synthetic peptide
RMCIDYLRP

SEQ ID NO: 22632 - protein, 9 aa, Artificial Sequence
  Description of Artificial Sequence: Synthetic peptide
TACIQQKLL

SEQ ID NO: 22633 - protein, 9 aa, Artificial Sequence
  Description of Artificial Sequence: Synthetic peptide
TNRIVTRII

SEQ ID NO: 22634 - protein, 9 aa, Artificial Sequence
  Description of Artificial Sequence: Synthetic peptide
TQQILHDAF

SEQ ID NO: 22635 - protein, 9 aa, Artificial Sequence
  Description of Artificial Sequence: Synthetic peptide
TRIINVILG

SEQ ID NO: 22636 - protein, 9 aa, Artificial Sequence
  Description of Artificial Sequence: Synthetic peptide
TSLITGQLY

SEQ ID NO: 22637 - protein, 9 aa, Artificial Sequence
  Description of Artificial Sequence: Synthetic peptide
VEPIMFWPA

SEQ ID NO: 22638 - protein, 9 aa, Artificial Sequence
  Description of Artificial Sequence: Synthetic peptide
VNYIICKMD

SEQ ID NO: 22639 - protein, 9 aa, Artificial Sequence
  Description of Artificial Sequence: Synthetic peptide
VNYIICKMG

SEQ ID NO: 22640 - protein, 9 aa, Artificial Sequence
  Description of Artificial Sequence: Synthetic peptide
IKHITHNTY

SEQ ID NO: 22641 - protein, 9 aa, Artificial Sequence
  Description of Artificial Sequence: Synthetic peptide
MYAIADELD

SEQ ID NO: 22642 - protein, 9 aa, Artificial Sequence
  Description of Artificial Sequence: Synthetic peptide
NPSIQPKTM

SEQ ID NO: 22643 - protein, 9 aa, Artificial Sequence
  Description of Artificial Sequence: Synthetic peptide
PENIAEDHE

SEQ ID NO: 22644 - protein, 9 aa, Artificial Sequence
  Description of Artificial Sequence: Synthetic peptide
MRKIKIACM

SEQ ID NO: 22645 - protein, 9 aa, Artificial Sequence
  Description of Artificial Sequence: Synthetic peptide
LRAILDCGW

SEQ ID NO: 22646 - protein, 9 aa, Artificial Sequence
  Description of Artificial Sequence: Synthetic peptide
EIAIDQDIH

SEQ ID NO: 22647 - protein, 9 aa, Artificial Sequence
  Description of Artificial Sequence: Synthetic peptide
SRTICVHGN

SEQ ID NO: 22648 - protein, 9 aa, Artificial Sequence
  Description of Artificial Sequence: Synthetic peptide
IANITACAN

SEQ ID NO: 22649 - protein, 9 aa, Artificial Sequence
  Description of Artificial Sequence: Synthetic peptide
EISIRLLDE

SEQ ID NO: 22650 - protein, 9 aa, Artificial Sequence
  Description of Artificial Sequence: Synthetic peptide
EIYILPKFP

SEQ ID NO: 22651 - protein, 9 aa, Artificial Sequence
  Description of Artificial Sequence: Synthetic peptide
GSAIFVKEE

SEQ ID NO: 22652 - protein, 9 aa, Artificial Sequence
  Description of Artificial Sequence: Synthetic peptide
GYTIKNGYN

SEQ ID NO: 22653 - protein, 9 aa, Artificial Sequence
  Description of Artificial Sequence: Synthetic peptide
HHEIANLHQ

SEQ ID NO: 22654 - protein, 9 aa, Artificial Sequence
  Description of Artificial Sequence: Synthetic peptide
KHQINAVER

SEQ ID NO: 22655 - protein, 9 aa, Artificial Sequence
  Description of Artificial Sequence: Synthetic peptide
NGEIFSCMS

SEQ ID NO: 22656 - protein, 9 aa, Artificial Sequence
  Description of Artificial Sequence: Synthetic peptide
NGEIFSYMS

SEQ ID NO: 22657 - protein, 9 aa, Artificial Sequence
  Description of Artificial Sequence: Synthetic peptide
QFKIYDCVG

SEQ ID NO: 22658 - protein, 9 aa, Artificial Sequence
  Description of Artificial Sequence: Synthetic peptide
QIGITYYLP

SEQ ID NO: 22659 - protein, 9 aa, Artificial Sequence
  Description of Artificial Sequence: Synthetic peptide
QMGINHDDR

SEQ ID NO: 22660 - protein, 9 aa, Artificial Sequence
  Description of Artificial Sequence: Synthetic peptide
QPAINTQCA

SEQ ID NO: 22661 - protein, 9 aa, Artificial Sequence
  Description of Artificial Sequence: Synthetic peptide
SFKILNRGG

SEQ ID NO: 22662 - protein, 9 aa, Artificial Sequence
  Description of Artificial Sequence: Synthetic peptide
SPDIDLINH

SEQ ID NO: 22663 - protein, 9 aa, Artificial Sequence
  Description of Artificial Sequence: Synthetic peptide
STSITELAM

SEQ ID NO: 22664 - protein, 9 aa, Artificial Sequence
  Description of Artificial Sequence: Synthetic peptide
TTLIKMHVE

SEQ ID NO: 22665 - protein, 9 aa, Artificial Sequence
  Description of Artificial Sequence: Synthetic peptide
TWEIKHNQV

SEQ ID NO: 22666 - protein, 9 aa, Artificial Sequence
  Description of Artificial Sequence: Synthetic peptide
VACIANLWT

SEQ ID NO: 22667 - protein, 9 aa, Artificial Sequence
  Description of Artificial Sequence: Synthetic peptide
VFAIMTRTQ

SEQ ID NO: 22668 - protein, 9 aa, Artificial Sequence
  Description of Artificial Sequence: Synthetic peptide
WSNIYWRQD

SEQ ID NO: 22669 - protein, 9 aa, Artificial Sequence
  Description of Artificial Sequence: Synthetic peptide
THGHYTMSA

SEQ ID NO: 22670 - protein, 9 aa, Artificial Sequence
  Description of Artificial Sequence: Synthetic peptide
TRAGYNEQD

SEQ ID NO: 22671 - protein, 9 aa, Artificial Sequence
  Description of Artificial Sequence: Synthetic peptide
TSVKYSAWG

SEQ ID NO: 22672 - protein, 9 aa, Artificial Sequence
  Description of Artificial Sequence: Synthetic peptide
TYWNYAEAK

SEQ ID NO: 22673 - protein, 9 aa, Artificial Sequence
  Description of Artificial Sequence: Synthetic peptide
VFTDYWEQG

SEQ ID NO: 22674 - protein, 9 aa, Artificial Sequence
  Description of Artificial Sequence: Synthetic peptide
VFTDYWERG

SEQ ID NO: 22675 - protein, 9 aa, Artificial Sequence
  Description of Artificial Sequence: Synthetic peptide
VIDWYPHQQ

SEQ ID NO: 22676 - protein, 9 aa, Artificial Sequence
  Description of Artificial Sequence: Synthetic peptide
VSDEYVMEQ

SEQ ID NO: 22677 - protein, 9 aa, Artificial Sequence
  Description of Artificial Sequence: Synthetic peptide
WELTYDCLA

SEQ ID NO: 22678 - protein, 9 aa, Artificial Sequence
  Description of Artificial Sequence: Synthetic peptide
WIICYIALQ

SEQ ID NO: 22679 - protein, 9 aa, Artificial Sequence
  Description of Artificial Sequence: Synthetic peptide
WLIVYDHGN

SEQ ID NO: 22680 - protein, 9 aa, Artificial Sequence
  Description of Artificial Sequence: Synthetic peptide
YAHSYGHFD

SEQ ID NO: 22681 - protein, 9 aa, Artificial Sequence
  Description of Artificial Sequence: Synthetic peptide
MAEQYKYGH

SEQ ID NO: 22682 - protein, 9 aa, Artificial Sequence
  Description of Artificial Sequence: Synthetic peptide
TGAKYHDWL

SEQ ID NO: 22683 - protein, 9 aa, Artificial Sequence
  Description of Artificial Sequence: Synthetic peptide
EAENYFPRH

SEQ ID NO: 22684 - protein, 9 aa, Artificial Sequence
  Description of Artificial Sequence: Synthetic peptide
GLMDYSLCA

SEQ ID NO: 22685 - protein, 9 aa, Artificial Sequence
  Description of Artificial Sequence: Synthetic peptide
KEIQYHSYE

SEQ ID NO: 22686 - protein, 9 aa, Artificial Sequence
  Description of Artificial Sequence: Synthetic peptide
MDTCYMYAD

SEQ ID NO: 22687 - protein, 9 aa, Artificial Sequence
  Description of Artificial Sequence: Synthetic peptide
QPPKYFVHQ

SEQ ID NO: 22688 - protein, 9 aa, Artificial Sequence
  Description of Artificial Sequence: Synthetic peptide
RNTPYEFWA

SEQ ID NO: 22689 - protein, 9 aa, Artificial Sequence
  Description of Artificial Sequence: Synthetic peptide
SGNMYESGA

SEQ ID NO: 22690 - protein, 9 aa, Artificial Sequence
  Description of Artificial Sequence: Synthetic peptide
TEPHYWEWP

SEQ ID NO: 22691 - protein, 9 aa, Artificial Sequence
  Description of Artificial Sequence: Synthetic peptide
TTERYYWCQ

SEQ ID NO: 22692 - protein, 9 aa, Artificial Sequence
  Description of Artificial Sequence: Synthetic peptide
KEIPYHSYE

SEQ ID NO: 22693 - protein, 9 aa, Artificial Sequence
  Description of Artificial Sequence: Synthetic peptide
LMAWYENWY

SEQ ID NO: 22694 - protein, 9 aa, Artificial Sequence
  Description of Artificial Sequence: Synthetic peptide
ITRTYQEMQ

SEQ ID NO: 22695 - protein, 9 aa, Artificial Sequence
  Description of Artificial Sequence: Synthetic peptide
VREYYPKFH

SEQ ID NO: 22696 - protein, 9 aa, Artificial Sequence
  Description of Artificial Sequence: Synthetic peptide
QQEAYILRI

SEQ ID NO: 22697 - protein, 9 aa, Artificial Sequence
  Description of Artificial Sequence: Synthetic peptide
DMTFYLSRD

SEQ ID NO: 22698 - protein, 9 aa, Artificial Sequence
  Description of Artificial Sequence: Synthetic peptide
MMPEYFNKD

SEQ ID NO: 22699 - protein, 9 aa, Artificial Sequence
  Description of Artificial Sequence: Synthetic peptide
FITAYHPCL

SEQ ID NO: 22700 - protein, 9 aa, Artificial Sequence
  Description of Artificial Sequence: Synthetic peptide
GQKSYDGCH

SEQ ID NO: 22701 - protein, 9 aa, Artificial Sequence
  Description of Artificial Sequence: Synthetic peptide
MFEKYFQTM

SEQ ID NO: 22702 - protein, 9 aa, Artificial Sequence
  Description of Artificial Sequence: Synthetic peptide
NEAPYSTWQ

SEQ ID NO: 22703 - protein, 9 aa, Artificial Sequence
  Description of Artificial Sequence: Synthetic peptide
SMSEYHYDE

SEQ ID NO: 22704 - protein, 9 aa, Artificial Sequence
  Description of Artificial Sequence: Synthetic peptide
AAVQYSLMG

SEQ ID NO: 22705 - protein, 9 aa, Artificial Sequence
  Description of Artificial Sequence: Synthetic peptide
AEEVYGYHQ

SEQ ID NO: 22706 - protein, 9 aa, Artificial Sequence
  Description of Artificial Sequence: Synthetic peptide
AQMEYDCAM

SEQ ID NO: 22707 - protein, 9 aa, Artificial Sequence
  Description of Artificial Sequence: Synthetic peptide
DDALYAVFY

SEQ ID NO: 22708 - protein, 9 aa, Artificial Sequence
  Description of Artificial Sequence: Synthetic peptide
DSWMYHVQL

SEQ ID NO: 22709 - protein, 9 aa, Artificial Sequence
  Description of Artificial Sequence: Synthetic peptide
DYIHYKNGM

SEQ ID NO: 22710 - protein, 9 aa, Artificial Sequence
  Description of Artificial Sequence: Synthetic peptide
EFSYYHTHG

SEQ ID NO: 22711 - protein, 9 aa, Artificial Sequence
  Description of Artificial Sequence: Synthetic peptide
ESEKYTWSG

SEQ ID NO: 22712 - protein, 9 aa, Artificial Sequence
  Description of Artificial Sequence: Synthetic peptide
FGATYNQTI

SEQ ID NO: 22713 - protein, 9 aa, Artificial Sequence
  Description of Artificial Sequence: Synthetic peptide
FGLWYRDHK

SEQ ID NO: 22714 - protein, 9 aa, Artificial Sequence
  Description of Artificial Sequence: Synthetic peptide
FHITYLMDK

SEQ ID NO: 22715 - protein, 9 aa, Artificial Sequence
  Description of Artificial Sequence: Synthetic peptide
GAQQYADSI

SEQ ID NO: 22716 - protein, 9 aa, Artificial Sequence
  Description of Artificial Sequence: Synthetic peptide
GFCHYWKQG

SEQ ID NO: 22717 - protein, 9 aa, Artificial Sequence
  Description of Artificial Sequence: Synthetic peptide
GNCKYHVTQ

SEQ ID NO: 22718 - protein, 9 aa, Artificial Sequence
  Description of Artificial Sequence: Synthetic peptide
HIVTYEHHE

SEQ ID NO: 22719 - protein, 9 aa, Artificial Sequence
  Description of Artificial Sequence: Synthetic peptide
HPCYYSWAP

SEQ ID NO: 22720 - protein, 9 aa, Artificial Sequence
  Description of Artificial Sequence: Synthetic peptide
HWDNYWKMD

SEQ ID NO: 22721 - protein, 9 aa, Artificial Sequence
  Description of Artificial Sequence: Synthetic peptide
HWREYPSKG

SEQ ID NO: 22722 - protein, 9 aa, Artificial Sequence
  Description of Artificial Sequence: Synthetic peptide
ICHQYTRHG

SEQ ID NO: 22723 - protein, 9 aa, Artificial Sequence
  Description of Artificial Sequence: Synthetic peptide
IPLAYPEYQ

SEQ ID NO: 22724 - protein, 9 aa, Artificial Sequence
  Description of Artificial Sequence: Synthetic peptide
ISKAYVDWW

SEQ ID NO: 22725 - protein, 9 aa, Artificial Sequence
  Description of Artificial Sequence: Synthetic peptide
IYHPYDMLG

SEQ ID NO: 22726 - protein, 9 aa, Artificial Sequence
  Description of Artificial Sequence: Synthetic peptide
KQMEYDNFH

SEQ ID NO: 22727 - protein, 9 aa, Artificial Sequence
  Description of Artificial Sequence: Synthetic peptide
LMIQYVNKH

SEQ ID NO: 22728 - protein, 9 aa, Artificial Sequence
  Description of Artificial Sequence: Synthetic peptide
LMREYMSVP

SEQ ID NO: 22729 - protein, 9 aa, Artificial Sequence
  Description of Artificial Sequence: Synthetic peptide
MCQWYATNL

SEQ ID NO: 22730 - protein, 9 aa, Artificial Sequence
  Description of Artificial Sequence: Synthetic peptide
MSDYYKEDS

SEQ ID NO: 22731 - protein, 9 aa, Artificial Sequence
  Description of Artificial Sequence: Synthetic peptide
MYGGYAAGF

SEQ ID NO: 22732 - protein, 9 aa, Artificial Sequence
  Description of Artificial Sequence: Synthetic peptide
NFCGYQAMH

SEQ ID NO: 22733 - protein, 9 aa, Artificial Sequence
  Description of Artificial Sequence: Synthetic peptide
NGLQYMSSA

SEQ ID NO: 22734 - protein, 9 aa, Artificial Sequence
  Description of Artificial Sequence: Synthetic peptide
NYHYYDHAG

SEQ ID NO: 22735 - protein, 9 aa, Artificial Sequence
  Description of Artificial Sequence: Synthetic peptide
PTVAYENLD

SEQ ID NO: 22736 - protein, 9 aa, Artificial Sequence
  Description of Artificial Sequence: Synthetic peptide
QAIGYNYFW

SEQ ID NO: 22737 - protein, 9 aa, Artificial Sequence
  Description of Artificial Sequence: Synthetic peptide
QGQYYYECG

SEQ ID NO: 22738 - protein, 9 aa, Artificial Sequence
  Description of Artificial Sequence: Synthetic peptide
QWPLYVMDR

SEQ ID NO: 22739 - protein, 9 aa, Artificial Sequence
  Description of Artificial Sequence: Synthetic peptide
REELYQCAP

SEQ ID NO: 22740 - protein, 9 aa, Artificial Sequence
  Description of Artificial Sequence: Synthetic peptide
REKNYELSE

SEQ ID NO: 22741 - protein, 9 aa, Artificial Sequence
  Description of Artificial Sequence: Synthetic peptide
RWYWYESCN

SEQ ID NO: 22742 - protein, 9 aa, Artificial Sequence
  Description of Artificial Sequence: Synthetic peptide
SMTSYYRQQ

SEQ ID NO: 22743 - protein, 9 aa, Artificial Sequence
  Description of Artificial Sequence: Synthetic peptide
SWVWYPNLC

SEQ ID NO: 22744 - protein, 9 aa, Artificial Sequence
  Description of Artificial Sequence: Synthetic peptide
WATAYWQGI

SEQ ID NO: 22745 - protein, 9 aa, Artificial Sequence
  Description of Artificial Sequence: Synthetic peptide
WCGFYFLAA

SEQ ID NO: 22746 - protein, 9 aa, Artificial Sequence
  Description of Artificial Sequence: Synthetic peptide
WNSPYKKRY

SEQ ID NO: 22747 - protein, 9 aa, Artificial Sequence
  Description of Artificial Sequence: Synthetic peptide
YQVHYASHG

SEQ ID NO: 22748 - protein, 9 aa, Artificial Sequence
  Description of Artificial Sequence: Synthetic peptide
KCTEYVHTC

SEQ ID NO: 22749 - protein, 9 aa, Artificial Sequence
  Description of Artificial Sequence: Synthetic peptide
PIHTYKRHP

SEQ ID NO: 22750 - protein, 9 aa, Artificial Sequence
  Description of Artificial Sequence: Synthetic peptide
RMKWYLPCV

SEQ ID NO: 22751 - protein, 9 aa, Artificial Sequence
  Description of Artificial Sequence: Synthetic peptide
FAMSYQRQN

SEQ ID NO: 22752 - protein, 9 aa, Artificial Sequence
  Description of Artificial Sequence: Synthetic peptide
EASWYYPAI

SEQ ID NO: 22753 - protein, 9 aa, Artificial Sequence
  Description of Artificial Sequence: Synthetic peptide
MEPHYWEWP

SEQ ID NO: 22754 - protein, 9 aa, Artificial Sequence
  Description of Artificial Sequence: Synthetic peptide
MSTDYCKVN

SEQ ID NO: 22755 - protein, 9 aa, Artificial Sequence
  Description of Artificial Sequence: Synthetic peptide
TSKDYNEEI

SEQ ID NO: 22756 - protein, 9 aa, Artificial Sequence
  Description of Artificial Sequence: Synthetic peptide
MTERYYWCQ

SEQ ID NO: 22757 - protein, 9 aa, Artificial Sequence
  Description of Artificial Sequence: Synthetic peptide
QTPKYFVHQ

SEQ ID NO: 22758 - protein, 9 aa, Artificial Sequence
  Description of Artificial Sequence: Synthetic peptide
YSKQYAEYY

SEQ ID NO: 22759 - protein, 9 aa, Artificial Sequence
  Description of Artificial Sequence: Synthetic peptide
HSDWYMKYP

SEQ ID NO: 22760 - protein, 9 aa, Artificial Sequence
  Description of Artificial Sequence: Synthetic peptide
AEGYYVFQP

SEQ ID NO: 22761 - protein, 9 aa, Artificial Sequence
  Description of Artificial Sequence: Synthetic peptide
AWGCYQKGY

SEQ ID NO: 22762 - protein, 9 aa, Artificial Sequence
  Description of Artificial Sequence: Synthetic peptide
DIKMYWEGA

SEQ ID NO: 22763 - protein, 9 aa, Artificial Sequence
  Description of Artificial Sequence: Synthetic peptide
FGILYNNNE

SEQ ID NO: 22764 - protein, 9 aa, Artificial Sequence
  Description of Artificial Sequence: Synthetic peptide
FNQLYMTFH

SEQ ID NO: 22765 - protein, 9 aa, Artificial Sequence
  Description of Artificial Sequence: Synthetic peptide
GAEGYSKDQ

SEQ ID NO: 22766 - protein, 9 aa, Artificial Sequence
  Description of Artificial Sequence: Synthetic peptide
GAEGYSKGQ

SEQ ID NO: 22767 - protein, 9 aa, Artificial Sequence
  Description of Artificial Sequence: Synthetic peptide
GINDYKSGN

SEQ ID NO: 22768 - protein, 9 aa, Artificial Sequence
  Description of Artificial Sequence: Synthetic peptide
GMDFYFNLE

SEQ ID NO: 22769 - protein, 9 aa, Artificial Sequence
  Description of Artificial Sequence: Synthetic peptide
HKMAYGRDQ

SEQ ID NO: 22770 - protein, 9 aa, Artificial Sequence
  Description of Artificial Sequence: Synthetic peptide
IAYEYWDYW

SEQ ID NO: 22771 - protein, 9 aa, Artificial Sequence
  Description of Artificial Sequence: Synthetic peptide
IKEGYQLGG

SEQ ID NO: 22772 - protein, 9 aa, Artificial Sequence
  Description of Artificial Sequence: Synthetic peptide
ISQFYLLDQ

SEQ ID NO: 22773 - protein, 9 aa, Artificial Sequence
  Description of Artificial Sequence: Synthetic peptide
KECNYQARG

SEQ ID NO: 22774 - protein, 9 aa, Artificial Sequence
  Description of Artificial Sequence: Synthetic peptide
KPLQYEAIQ

SEQ ID NO: 22775 - protein, 9 aa, Artificial Sequence
  Description of Artificial Sequence: Synthetic peptide
LPNPYKTVV

SEQ ID NO: 22776 - protein, 9 aa, Artificial Sequence
  Description of Artificial Sequence: Synthetic peptide
LPVQYEDRD

SEQ ID NO: 22777 - protein, 9 aa, Artificial Sequence
  Description of Artificial Sequence: Synthetic peptide
MCDNYKSLA

SEQ ID NO: 22778 - protein, 9 aa, Artificial Sequence
  Description of Artificial Sequence: Synthetic peptide
NHGNYEIAW

SEQ ID NO: 22779 - protein, 9 aa, Artificial Sequence
  Description of Artificial Sequence: Synthetic peptide
NTMPYGHSY

SEQ ID NO: 22780 - protein, 9 aa, Artificial Sequence
  Description of Artificial Sequence: Synthetic peptide
NYIPYGRLA

SEQ ID NO: 22781 - protein, 9 aa, Artificial Sequence
  Description of Artificial Sequence: Synthetic peptide
QTQTYAYMD

SEQ ID NO: 22782 - protein, 9 aa, Artificial Sequence
  Description of Artificial Sequence: Synthetic peptide
RFDHYNNEQ

SEQ ID NO: 22783 - protein, 9 aa, Artificial Sequence
  Description of Artificial Sequence: Synthetic peptide
RKEYYPNVQ

SEQ ID NO: 22784 - protein, 9 aa, Artificial Sequence
  Description of Artificial Sequence: Synthetic peptide
SAYQYLGCH

SEQ ID NO: 22785 - protein, 9 aa, Artificial Sequence
  Description of Artificial Sequence: Synthetic peptide
SCGPYLWGT

SEQ ID NO: 22786 - protein, 9 aa, Artificial Sequence
  Description of Artificial Sequence: Synthetic peptide
SHGNYEIAW

SEQ ID NO: 22787 - protein, 9 aa, Artificial Sequence
  Description of Artificial Sequence: Synthetic peptide
SMNLYNRGV

SEQ ID NO: 22788 - protein, 9 aa, Artificial Sequence
  Description of Artificial Sequence: Synthetic peptide
SMPPYRMLS

SEQ ID NO: 22789 - protein, 9 aa, Artificial Sequence
  Description of Artificial Sequence: Synthetic peptide
SYQPYSKTV

SEQ ID NO: 22790 - protein, 9 aa, Artificial Sequence
  Description of Artificial Sequence: Synthetic peptide
TANCYPILG

SEQ ID NO: 22791 - protein, 9 aa, Artificial Sequence
  Description of Artificial Sequence: Synthetic peptide
TSWMYYDYG

SEQ ID NO: 22792 - protein, 9 aa, Artificial Sequence
  Description of Artificial Sequence: Synthetic peptide
TYCLYGISE

SEQ ID NO: 22793 - protein, 9 aa, Artificial Sequence
  Description of Artificial Sequence: Synthetic peptide
VALHYDHPN

SEQ ID NO: 22794 - protein, 9 aa, Artificial Sequence
  Description of Artificial Sequence: Synthetic peptide
YFQLYMKEG

SEQ ID NO: 22795 - protein, 9 aa, Artificial Sequence
  Description of Artificial Sequence: Synthetic peptide
YWAGYHMWP

SEQ ID NO: 22796 - protein, 9 aa, Artificial Sequence
  Description of Artificial Sequence: Synthetic peptide
YYTCYPPSM

SEQ ID NO: 22797 - protein, 9 aa, Artificial Sequence
  Description of Artificial Sequence: Synthetic peptide
TTHSDHHHA

SEQ ID NO: 22798 - protein, 9 aa, Artificial Sequence
  Description of Artificial Sequence: Synthetic peptide
TYNLEHQCS

SEQ ID NO: 22799 - protein, 9 aa, Artificial Sequence
  Description of Artificial Sequence: Synthetic peptide
TYRLEHECI

SEQ ID NO: 22800 - protein, 9 aa, Artificial Sequence
  Description of Artificial Sequence: Synthetic peptide
VCQKVHGLF

SEQ ID NO: 22801 - protein, 9 aa, Artificial Sequence
  Description of Artificial Sequence: Synthetic peptide
VLDVIHWHW

SEQ ID NO: 22802 - protein, 9 aa, Artificial Sequence
  Description of Artificial Sequence: Synthetic peptide
VSEETHNFR

SEQ ID NO: 22803 - protein, 9 aa, Artificial Sequence
  Description of Artificial Sequence: Synthetic peptide
VWNWEHKCT

SEQ ID NO: 22804 - protein, 9 aa, Artificial Sequence
  Description of Artificial Sequence: Synthetic peptide
WYQCLHYQN

SEQ ID NO: 22805 - protein, 9 aa, Artificial Sequence
  Description of Artificial Sequence: Synthetic peptide
YAWCQHCKN

SEQ ID NO: 22806 - protein, 9 aa, Artificial Sequence
  Description of Artificial Sequence: Synthetic peptide
YHMDVHDSM

SEQ ID NO: 22807 - protein, 9 aa, Artificial Sequence
  Description of Artificial Sequence: Synthetic peptide
YNMLTHVSM

SEQ ID NO: 22808 - protein, 9 aa, Artificial Sequence
  Description of Artificial Sequence: Synthetic peptide
ETTLAHRWE

SEQ ID NO: 22809 - protein, 9 aa, Artificial Sequence
  Description of Artificial Sequence: Synthetic peptide
HSAARHMFV

SEQ ID NO: 22810 - protein, 9 aa, Artificial Sequence
  Description of Artificial Sequence: Synthetic peptide
LAECKHSSA

SEQ ID NO: 22811 - protein, 9 aa, Artificial Sequence
  Description of Artificial Sequence: Synthetic peptide
MFMMMHDIW

SEQ ID NO: 22812 - protein, 9 aa, Artificial Sequence
  Description of Artificial Sequence: Synthetic peptide
MFMTMHDIW

SEQ ID NO: 22813 - protein, 9 aa, Artificial Sequence
  Description of Artificial Sequence: Synthetic peptide
NLNNWHTDM

SEQ ID NO: 22814 - protein, 9 aa, Artificial Sequence
  Description of Artificial Sequence: Synthetic peptide
QNNWGHYNK

SEQ ID NO: 22815 - protein, 9 aa, Artificial Sequence
  Description of Artificial Sequence: Synthetic peptide
QTLGGHMCT

SEQ ID NO: 22816 - protein, 9 aa, Artificial Sequence
  Description of Artificial Sequence: Synthetic peptide
SSNFNHHIY

SEQ ID NO: 22817 - protein, 9 aa, Artificial Sequence
  Description of Artificial Sequence: Synthetic peptide
MTAKEHAYL

SEQ ID NO: 22818 - protein, 9 aa, Artificial Sequence
  Description of Artificial Sequence: Synthetic peptide
HQVLDHQLQ

SEQ ID NO: 22819 - protein, 9 aa, Artificial Sequence
  Description of Artificial Sequence: Synthetic peptide
DMRRAHQEK

SEQ ID NO: 22820 - protein, 9 aa, Artificial Sequence
  Description of Artificial Sequence: Synthetic peptide
VNQMMHTQA

SEQ ID NO: 22821 - protein, 9 aa, Artificial Sequence
  Description of Artificial Sequence: Synthetic peptide
MFSFKHVHW

SEQ ID NO: 22822 - protein, 9 aa, Artificial Sequence
  Description of Artificial Sequence: Synthetic peptide
AQASAHIMS

SEQ ID NO: 22823 - protein, 9 aa, Artificial Sequence
  Description of Artificial Sequence: Synthetic peptide
DAIPRHICR

SEQ ID NO: 22824 - protein, 9 aa, Artificial Sequence
  Description of Artificial Sequence: Synthetic peptide
DCSQQHMTL

SEQ ID NO: 22825 - protein, 9 aa, Artificial Sequence
  Description of Artificial Sequence: Synthetic peptide
DEGVEHRPM

SEQ ID NO: 22826 - protein, 9 aa, Artificial Sequence
  Description of Artificial Sequence: Synthetic peptide
DEMLQHSIM

SEQ ID NO: 22827 - protein, 9 aa, Artificial Sequence
  Description of Artificial Sequence: Synthetic peptide
DFHNAHFGS

SEQ ID NO: 22828 - protein, 9 aa, Artificial Sequence
  Description of Artificial Sequence: Synthetic peptide
DHDTNHWSH

SEQ ID NO: 22829 - protein, 9 aa, Artificial Sequence
  Description of Artificial Sequence: Synthetic peptide
EASTFHRQG

SEQ ID NO: 22830 - protein, 9 aa, Artificial Sequence
  Description of Artificial Sequence: Synthetic peptide
ECAETHFMK

SEQ ID NO: 22831 - protein, 9 aa, Artificial Sequence
  Description of Artificial Sequence: Synthetic peptide
ECHVGHSGC

SEQ ID NO: 22832 - protein, 9 aa, Artificial Sequence
  Description of Artificial Sequence: Synthetic peptide
EMCSVHQAW

SEQ ID NO: 22833 - protein, 9 aa, Artificial Sequence
  Description of Artificial Sequence: Synthetic peptide
FCKFMHETH

SEQ ID NO: 22834 - protein, 9 aa, Artificial Sequence
  Description of Artificial Sequence: Synthetic peptide
GFCQLHTQE

SEQ ID NO: 22835 - protein, 9 aa, Artificial Sequence
  Description of Artificial Sequence: Synthetic peptide
GPSLIHQAA

SEQ ID NO: 22836 - protein, 9 aa, Artificial Sequence
  Description of Artificial Sequence: Synthetic peptide
HYETEHDGC

SEQ ID NO: 22837 - protein, 9 aa, Artificial Sequence
  Description of Artificial Sequence: Synthetic peptide
IAKASHKDR

SEQ ID NO: 22838 - protein, 9 aa, Artificial Sequence
  Description of Artificial Sequence: Synthetic peptide
IASGTHHCQ

SEQ ID NO: 22839 - protein, 9 aa, Artificial Sequence
  Description of Artificial Sequence: Synthetic peptide
IIEQSHTLE

SEQ ID NO: 22840 - protein, 9 aa, Artificial Sequence
  Description of Artificial Sequence: Synthetic peptide
KLDLTHRMQ

SEQ ID NO: 22841 - protein, 9 aa, Artificial Sequence
  Description of Artificial Sequence: Synthetic peptide
LFTKQHVYS

SEQ ID NO: 22842 - protein, 9 aa, Artificial Sequence
  Description of Artificial Sequence: Synthetic peptide
LKHFVHAAS

SEQ ID NO: 22843 - protein, 9 aa, Artificial Sequence
  Description of Artificial Sequence: Synthetic peptide
LTLGNHGEY

SEQ ID NO: 22844 - protein, 9 aa, Artificial Sequence
  Description of Artificial Sequence: Synthetic peptide
NAGCQHEYE

SEQ ID NO: 22845 - protein, 9 aa, Artificial Sequence
  Description of Artificial Sequence: Synthetic peptide
NQRVEHAFS

SEQ ID NO: 22846 - protein, 9 aa, Artificial Sequence
  Description of Artificial Sequence: Synthetic peptide
NTEREHRYN

SEQ ID NO: 22847 - protein, 9 aa, Artificial Sequence
  Description of Artificial Sequence: Synthetic peptide
QIVHDHRHR

SEQ ID NO: 22848 - protein, 9 aa, Artificial Sequence
  Description of Artificial Sequence: Synthetic peptide
RYDCMHCYA

SEQ ID NO: 22849 - protein, 9 aa, Artificial Sequence
  Description of Artificial Sequence: Synthetic peptide
SAGEIHEHF

SEQ ID NO: 22850 - protein, 9 aa, Artificial Sequence
  Description of Artificial Sequence: Synthetic peptide
SLDGVHDGF

SEQ ID NO: 22851 - protein, 9 aa, Artificial Sequence
  Description of Artificial Sequence: Synthetic peptide
SLHYWHSAN

SEQ ID NO: 22852 - protein, 9 aa, Artificial Sequence
  Description of Artificial Sequence: Synthetic peptide
SSNYWHASS

SEQ ID NO: 22853 - protein, 9 aa, Artificial Sequence
  Description of Artificial Sequence: Synthetic peptide
STKAHHWCQ

SEQ ID NO: 22854 - protein, 9 aa, Artificial Sequence
  Description of Artificial Sequence: Synthetic peptide
TEAATHWHR

SEQ ID NO: 22855 - protein, 9 aa, Artificial Sequence
  Description of Artificial Sequence: Synthetic peptide
TEDLSHLWW

SEQ ID NO: 22856 - protein, 9 aa, Artificial Sequence
  Description of Artificial Sequence: Synthetic peptide
TFQQSHAAV

SEQ ID NO: 22857 - protein, 9 aa, Artificial Sequence
  Description of Artificial Sequence: Synthetic peptide
TISLVHLSE

SEQ ID NO: 22858 - protein, 9 aa, Artificial Sequence
  Description of Artificial Sequence: Synthetic peptide
TMDVLHCDY

SEQ ID NO: 22859 - protein, 9 aa, Artificial Sequence
  Description of Artificial Sequence: Synthetic peptide
TWCYRHNVE

SEQ ID NO: 22860 - protein, 9 aa, Artificial Sequence
  Description of Artificial Sequence: Synthetic peptide
VSSQGHRFY

SEQ ID NO: 22861 - protein, 9 aa, Artificial Sequence
  Description of Artificial Sequence: Synthetic peptide
VWMTWHASY

SEQ ID NO: 22862 - protein, 9 aa, Artificial Sequence
  Description of Artificial Sequence: Synthetic peptide
YHAPQHHMG

SEQ ID NO: 22863 - protein, 9 aa, Artificial Sequence
  Description of Artificial Sequence: Synthetic peptide
TQKGNHCRW

SEQ ID NO: 22864 - protein, 9 aa, Artificial Sequence
  Description of Artificial Sequence: Synthetic peptide
APRNVHCGT

SEQ ID NO: 22865 - protein, 9 aa, Artificial Sequence
  Description of Artificial Sequence: Synthetic peptide
LMEYCHDRF

SEQ ID NO: 22866 - protein, 9 aa, Artificial Sequence
  Description of Artificial Sequence: Synthetic peptide
NYDFLHHVE

SEQ ID NO: 22867 - protein, 9 aa, Artificial Sequence
  Description of Artificial Sequence: Synthetic peptide
NCIAKHEVT

SEQ ID NO: 22868 - protein, 9 aa, Artificial Sequence
  Description of Artificial Sequence: Synthetic peptide
NSAHVHYFH

SEQ ID NO: 22869 - protein, 9 aa, Artificial Sequence
  Description of Artificial Sequence: Synthetic peptide
NGYLVHACQ

SEQ ID NO: 22870 - protein, 9 aa, Artificial Sequence
  Description of Artificial Sequence: Synthetic peptide
SDGMVHNCW

SEQ ID NO: 22871 - protein, 9 aa, Artificial Sequence
  Description of Artificial Sequence: Synthetic peptide
KCGVEHEHR

SEQ ID NO: 22872 - protein, 9 aa, Artificial Sequence
  Description of Artificial Sequence: Synthetic peptide
QATNEHIFW

SEQ ID NO: 22873 - protein, 9 aa, Artificial Sequence
  Description of Artificial Sequence: Synthetic peptide
DTHHTHWQY

SEQ ID NO: 22874 - protein, 9 aa, Artificial Sequence
  Description of Artificial Sequence: Synthetic peptide
FTQAIHHPD

SEQ ID NO: 22875 - protein, 9 aa, Artificial Sequence
  Description of Artificial Sequence: Synthetic peptide
LEIVMHSLP

SEQ ID NO: 22876 - protein, 9 aa, Artificial Sequence
  Description of Artificial Sequence: Synthetic peptide
GAKYRHYLQ

SEQ ID NO: 22877 - protein, 9 aa, Artificial Sequence
  Description of Artificial Sequence: Synthetic peptide
APNFCHCSF

SEQ ID NO: 22878 - protein, 9 aa, Artificial Sequence
  Description of Artificial Sequence: Synthetic peptide
ATHDMHRLC

SEQ ID NO: 22879 - protein, 9 aa, Artificial Sequence
  Description of Artificial Sequence: Synthetic peptide
DDKCDHLQH

SEQ ID NO: 22880 - protein, 9 aa, Artificial Sequence
  Description of Artificial Sequence: Synthetic peptide
DTKWMHQHC

SEQ ID NO: 22881 - protein, 9 aa, Artificial Sequence
  Description of Artificial Sequence: Synthetic peptide
DTLDWHMAY

SEQ ID NO: 22882 - protein, 9 aa, Artificial Sequence
  Description of Artificial Sequence: Synthetic peptide
EGVPLHRAF

SEQ ID NO: 22883 - protein, 9 aa, Artificial Sequence
  Description of Artificial Sequence: Synthetic peptide
VSMFNQNSC

SEQ ID NO: 22884 - protein, 9 aa, Artificial Sequence
  Description of Artificial Sequence: Synthetic peptide
WAHYTINQQ

SEQ ID NO: 22885 - protein, 9 aa, Artificial Sequence
  Description of Artificial Sequence: Synthetic peptide
YHRHIANNG

SEQ ID NO: 22886 - protein, 9 aa, Artificial Sequence
  Description of Artificial Sequence: Synthetic peptide
YLHNQGNGL

SEQ ID NO: 22887 - protein, 9 aa, Artificial Sequence
  Description of Artificial Sequence: Synthetic peptide
YRGAACNPH

SEQ ID NO: 22888 - protein, 9 aa, Artificial Sequence
  Description of Artificial Sequence: Synthetic peptide
DLGMINNME

SEQ ID NO: 22889 - protein, 9 aa, Artificial Sequence
  Description of Artificial Sequence: Synthetic peptide
DEKAEKNES

SEQ ID NO: 22890 - protein, 9 aa, Artificial Sequence
  Description of Artificial Sequence: Synthetic peptide
FASMQANDR

SEQ ID NO: 22891 - protein, 9 aa, Artificial Sequence
  Description of Artificial Sequence: Synthetic peptide
GGHLEGNWQ

SEQ ID NO: 22892 - protein, 9 aa, Artificial Sequence
  Description of Artificial Sequence: Synthetic peptide
HITMWYNGD

SEQ ID NO: 22893 - protein, 9 aa, Artificial Sequence
  Description of Artificial Sequence: Synthetic peptide
HRQESPNDK

SEQ ID NO: 22894 - protein, 9 aa, Artificial Sequence
  Description of Artificial Sequence: Synthetic peptide
NEIFNQNSY

SEQ ID NO: 22895 - protein, 9 aa, Artificial Sequence
  Description of Artificial Sequence: Synthetic peptide
NGVALENRG

SEQ ID NO: 22896 - protein, 9 aa, Artificial Sequence
  Description of Artificial Sequence: Synthetic peptide
NPWFLDNQF

SEQ ID NO: 22897 - protein, 9 aa, Artificial Sequence
  Description of Artificial Sequence: Synthetic peptide
QMTSSTNCV

SEQ ID NO: 22898 - protein, 9 aa, Artificial Sequence
  Description of Artificial Sequence: Synthetic peptide
TKQQLINSN

SEQ ID NO: 22899 - protein, 9 aa, Artificial Sequence
  Description of Artificial Sequence: Synthetic peptide
NEISNQNSY

SEQ ID NO: 22900 - protein, 9 aa, Artificial Sequence
  Description of Artificial Sequence: Synthetic peptide
VECTDTNDE

SEQ ID NO: 22901 - protein, 9 aa, Artificial Sequence
  Description of Artificial Sequence: Synthetic peptide
HITVWYNGD

SEQ ID NO: 22902 - protein, 9 aa, Artificial Sequence
  Description of Artificial Sequence: Synthetic peptide
RNNWKVNSQ

SEQ ID NO: 22903 - protein, 9 aa, Artificial Sequence
  Description of Artificial Sequence: Synthetic peptide
YCCSDTNTE

SEQ ID NO: 22904 - protein, 9 aa, Artificial Sequence
  Description of Artificial Sequence: Synthetic peptide
QMTSSTNCA

SEQ ID NO: 22905 - protein, 9 aa, Artificial Sequence
  Description of Artificial Sequence: Synthetic peptide
PACQKGNHA

SEQ ID NO: 22906 - protein, 9 aa, Artificial Sequence
  Description of Artificial Sequence: Synthetic peptide
ACLWQRNDE

SEQ ID NO: 22907 - protein, 9 aa, Artificial Sequence
  Description of Artificial Sequence: Synthetic peptide
ATVQFANDG

SEQ ID NO: 22908 - protein, 9 aa, Artificial Sequence
  Description of Artificial Sequence: Synthetic peptide
DALTHGNFE

SEQ ID NO: 22909 - protein, 9 aa, Artificial Sequence
  Description of Artificial Sequence: Synthetic peptide
DHAKLNNPS

SEQ ID NO: 22910 - protein, 9 aa, Artificial Sequence
  Description of Artificial Sequence: Synthetic peptide
DITGHCNPA

SEQ ID NO: 22911 - protein, 9 aa, Artificial Sequence
  Description of Artificial Sequence: Synthetic peptide
EAINRVNCQ

SEQ ID NO: 22912 - protein, 9 aa, Artificial Sequence
  Description of Artificial Sequence: Synthetic peptide
EHEHRINQC

SEQ ID NO: 22913 - protein, 9 aa, Artificial Sequence
  Description of Artificial Sequence: Synthetic peptide
EHRQLVNNN

SEQ ID NO: 22914 - protein, 9 aa, Artificial Sequence
  Description of Artificial Sequence: Synthetic peptide
EKIPHYNME

SEQ ID NO: 22915 - protein, 9 aa, Artificial Sequence
  Description of Artificial Sequence: Synthetic peptide
EKWDMFNTE

SEQ ID NO: 22916 - protein, 9 aa, Artificial Sequence
  Description of Artificial Sequence: Synthetic peptide
FTYCVNNYQ

SEQ ID NO: 22917 - protein, 9 aa, Artificial Sequence
  Description of Artificial Sequence: Synthetic peptide
GKTCAENWI

SEQ ID NO: 22918 - protein, 9 aa, Artificial Sequence
  Description of Artificial Sequence: Synthetic peptide
GYRPELNSA

SEQ ID NO: 22919 - protein, 9 aa, Artificial Sequence
  Description of Artificial Sequence: Synthetic peptide
HFDVICNCY

SEQ ID NO: 22920 - protein, 9 aa, Artificial Sequence
  Description of Artificial Sequence: Synthetic peptide
IMALDQNTN

SEQ ID NO: 22921 - protein, 9 aa, Artificial Sequence
  Description of Artificial Sequence: Synthetic peptide
IMEPMNNAF

SEQ ID NO: 22922 - protein, 9 aa, Artificial Sequence
  Description of Artificial Sequence: Synthetic peptide
IRMYAYNWL

SEQ ID NO: 22923 - protein, 9 aa, Artificial Sequence
  Description of Artificial Sequence: Synthetic peptide
LESQQSNYT

SEQ ID NO: 22924 - protein, 9 aa, Artificial Sequence
  Description of Artificial Sequence: Synthetic peptide
LIGPQANLY

SEQ ID NO: 22925 - protein, 9 aa, Artificial Sequence
  Description of Artificial Sequence: Synthetic peptide
LTSMQENHS

SEQ ID NO: 22926 - protein, 9 aa, Artificial Sequence
  Description of Artificial Sequence: Synthetic peptide
MIQYNKNMG

SEQ ID NO: 22927 - protein, 9 aa, Artificial Sequence
  Description of Artificial Sequence: Synthetic peptide
MSEPRYNDL

SEQ ID NO: 22928 - protein, 9 aa, Artificial Sequence
  Description of Artificial Sequence: Synthetic peptide
NCEWEMNDR

SEQ ID NO: 22929 - protein, 9 aa, Artificial Sequence
  Description of Artificial Sequence: Synthetic peptide
NRSMFKNVR

SEQ ID NO: 22930 - protein, 9 aa, Artificial Sequence
  Description of Artificial Sequence: Synthetic peptide
PTDFNENDC

SEQ ID NO: 22931 - protein, 9 aa, Artificial Sequence
  Description of Artificial Sequence: Synthetic peptide
QFYSMDNHD

SEQ ID NO: 22932 - protein, 9 aa, Artificial Sequence
  Description of Artificial Sequence: Synthetic peptide
QQEVKKNNA

SEQ ID NO: 22933 - protein, 9 aa, Artificial Sequence
  Description of Artificial Sequence: Synthetic peptide
RNCMDTNGM

SEQ ID NO: 22934 - protein, 9 aa, Artificial Sequence
  Description of Artificial Sequence: Synthetic peptide
RWADVTNMS

SEQ ID NO: 22935 - protein, 9 aa, Artificial Sequence
  Description of Artificial Sequence: Synthetic peptide
STIYAFNWA

SEQ ID NO: 22936 - protein, 9 aa, Artificial Sequence
  Description of Artificial Sequence: Synthetic peptide
TCMQCSNMP

SEQ ID NO: 22937 - protein, 9 aa, Artificial Sequence
  Description of Artificial Sequence: Synthetic peptide
TWAPHNNGM

SEQ ID NO: 22938 - protein, 9 aa, Artificial Sequence
  Description of Artificial Sequence: Synthetic peptide
VAKTSWNHC

SEQ ID NO: 22939 - protein, 9 aa, Artificial Sequence
  Description of Artificial Sequence: Synthetic peptide
WICPKINAP

SEQ ID NO: 22940 - protein, 9 aa, Artificial Sequence
  Description of Artificial Sequence: Synthetic peptide
WSILGTNWG

SEQ ID NO: 22941 - protein, 9 aa, Artificial Sequence
  Description of Artificial Sequence: Synthetic peptide
YDPHNNNGV

SEQ ID NO: 22942 - protein, 9 aa, Artificial Sequence
  Description of Artificial Sequence: Synthetic peptide
YSVARCNMD

SEQ ID NO: 22943 - protein, 9 aa, Artificial Sequence
  Description of Artificial Sequence: Synthetic peptide
YSVCHMNAY

SEQ ID NO: 22944 - protein, 9 aa, Artificial Sequence
  Description of Artificial Sequence: Synthetic peptide
YIRVGGNNE

SEQ ID NO: 22945 - protein, 9 aa, Artificial Sequence
  Description of Artificial Sequence: Synthetic peptide
FQIRQDNLA

SEQ ID NO: 22946 - protein, 9 aa, Artificial Sequence
  Description of Artificial Sequence: Synthetic peptide
KIDAHSNME

SEQ ID NO: 22947 - protein, 9 aa, Artificial Sequence
  Description of Artificial Sequence: Synthetic peptide
NSVALENRG

SEQ ID NO: 22948 - protein, 9 aa, Artificial Sequence
  Description of Artificial Sequence: Synthetic peptide
KNTMCDNDA

SEQ ID NO: 22949 - protein, 9 aa, Artificial Sequence
  Description of Artificial Sequence: Synthetic peptide
ALKSWMNGS

SEQ ID NO: 22950 - protein, 9 aa, Artificial Sequence
  Description of Artificial Sequence: Synthetic peptide
ILIFIQNCP

SEQ ID NO: 22951 - protein, 9 aa, Artificial Sequence
  Description of Artificial Sequence: Synthetic peptide
QMKPLINDE

SEQ ID NO: 22952 - protein, 9 aa, Artificial Sequence
  Description of Artificial Sequence: Synthetic peptide
TISHHLNRE

SEQ ID NO: 22953 - protein, 9 aa, Artificial Sequence
  Description of Artificial Sequence: Synthetic peptide
DHLFNNNEW

SEQ ID NO: 22954 - protein, 9 aa, Artificial Sequence
  Description of Artificial Sequence: Synthetic peptide
ETGYRENPC

SEQ ID NO: 22955 - protein, 9 aa, Artificial Sequence
  Description of Artificial Sequence: Synthetic peptide
TSDTMWEGD

SEQ ID NO: 22956 - protein, 9 aa, Artificial Sequence
  Description of Artificial Sequence: Synthetic peptide
TTVRKQFGY

SEQ ID NO: 22957 - protein, 9 aa, Artificial Sequence
  Description of Artificial Sequence: Synthetic peptide
VGGSVNRGG

SEQ ID NO: 22958 - protein, 9 aa, Artificial Sequence
  Description of Artificial Sequence: Synthetic peptide
VLYYSNYGH

SEQ ID NO: 22959 - protein, 9 aa, Artificial Sequence
  Description of Artificial Sequence: Synthetic peptide
WAMFMYEGA

SEQ ID NO: 22960 - protein, 9 aa, Artificial Sequence
  Description of Artificial Sequence: Synthetic peptide
YAQCFGQGI

SEQ ID NO: 22961 - protein, 9 aa, Artificial Sequence
  Description of Artificial Sequence: Synthetic peptide
YAQCFSQGI

SEQ ID NO: 22962 - protein, 9 aa, Artificial Sequence
  Description of Artificial Sequence: Synthetic peptide
YLRSLKCGN

SEQ ID NO: 22963 - protein, 9 aa, Artificial Sequence
  Description of Artificial Sequence: Synthetic peptide
NGCTTTKGE

SEQ ID NO: 22964 - protein, 9 aa, Artificial Sequence
  Description of Artificial Sequence: Synthetic peptide
DPKWEQYGM

SEQ ID NO: 22965 - protein, 9 aa, Artificial Sequence
  Description of Artificial Sequence: Synthetic peptide
EFVMGCQGI

SEQ ID NO: 22966 - protein, 9 aa, Artificial Sequence
  Description of Artificial Sequence: Synthetic peptide
FCQAINIGH

SEQ ID NO: 22967 - protein, 9 aa, Artificial Sequence
  Description of Artificial Sequence: Synthetic peptide
GCMTRLDGL

SEQ ID NO: 22968 - protein, 9 aa, Artificial Sequence
  Description of Artificial Sequence: Synthetic peptide
HFHEVAGGS

SEQ ID NO: 22969 - protein, 9 aa, Artificial Sequence
  Description of Artificial Sequence: Synthetic peptide
HHMHIWLGL

SEQ ID NO: 22970 - protein, 9 aa, Artificial Sequence
  Description of Artificial Sequence: Synthetic peptide
HTVGMAEGD

SEQ ID NO: 22971 - protein, 9 aa, Artificial Sequence
  Description of Artificial Sequence: Synthetic peptide
IQAVMVSGW

SEQ ID NO: 22972 - protein, 9 aa, Artificial Sequence
  Description of Artificial Sequence: Synthetic peptide
KSMPPGQGY

SEQ ID NO: 22973 - protein, 9 aa, Artificial Sequence
  Description of Artificial Sequence: Synthetic peptide
SRDTWQIGR

SEQ ID NO: 22974 - protein, 9 aa, Artificial Sequence
  Description of Artificial Sequence: Synthetic peptide
TIGVKRWGQ

SEQ ID NO: 22975 - protein, 9 aa, Artificial Sequence
  Description of Artificial Sequence: Synthetic peptide
VLMFNRGGS

SEQ ID NO: 22976 - protein, 9 aa, Artificial Sequence
  Description of Artificial Sequence: Synthetic peptide
VLMFNRWGS

SEQ ID NO: 22977 - protein, 9 aa, Artificial Sequence
  Description of Artificial Sequence: Synthetic peptide
DPKWEKYGM

SEQ ID NO: 22978 - protein, 9 aa, Artificial Sequence
  Description of Artificial Sequence: Synthetic peptide
TNHCRDAGT

SEQ ID NO: 22979 - protein, 9 aa, Artificial Sequence
  Description of Artificial Sequence: Synthetic peptide
KWTDCIIGY

SEQ ID NO: 22980 - protein, 9 aa, Artificial Sequence
  Description of Artificial Sequence: Synthetic peptide
DTDKQGQGI

SEQ ID NO: 22981 - protein, 9 aa, Artificial Sequence
  Description of Artificial Sequence: Synthetic peptide
MTRQPEDGF

SEQ ID NO: 22982 - protein, 9 aa, Artificial Sequence
  Description of Artificial Sequence: Synthetic peptide
ASDKMDVGS

SEQ ID NO: 22983 - protein, 9 aa, Artificial Sequence
  Description of Artificial Sequence: Synthetic peptide
QPEQGGWGT

SEQ ID NO: 22984 - protein, 9 aa, Artificial Sequence
  Description of Artificial Sequence: Synthetic peptide
KSMPPGQGD

SEQ ID NO: 22985 - protein, 9 aa, Artificial Sequence
  Description of Artificial Sequence: Synthetic peptide
AACHFTYGS

SEQ ID NO: 22986 - protein, 9 aa, Artificial Sequence
  Description of Artificial Sequence: Synthetic peptide
AATCSLKGH

SEQ ID NO: 22987 - protein, 9 aa, Artificial Sequence
  Description of Artificial Sequence: Synthetic peptide
AHADMTTGF

SEQ ID NO: 22988 - protein, 9 aa, Artificial Sequence
  Description of Artificial Sequence: Synthetic peptide
AMQRSVAGI

SEQ ID NO: 22989 - protein, 9 aa, Artificial Sequence
  Description of Artificial Sequence: Synthetic peptide
AYEHCEHGP

SEQ ID NO: 22990 - protein, 9 aa, Artificial Sequence
  Description of Artificial Sequence: Synthetic peptide
DIADRNVGH

SEQ ID NO: 22991 - protein, 9 aa, Artificial Sequence
  Description of Artificial Sequence: Synthetic peptide
DRMCMMCGV

SEQ ID NO: 22992 - protein, 9 aa, Artificial Sequence
  Description of Artificial Sequence: Synthetic peptide
DRSEFRQGT

SEQ ID NO: 22993 - protein, 9 aa, Artificial Sequence
  Description of Artificial Sequence: Synthetic peptide
DTPDFNTGI

SEQ ID NO: 22994 - protein, 9 aa, Artificial Sequence
  Description of Artificial Sequence: Synthetic peptide
ETEGQVAGA

SEQ ID NO: 22995 - protein, 9 aa, Artificial Sequence
  Description of Artificial Sequence: Synthetic peptide
ETNLHTKGH

SEQ ID NO: 22996 - protein, 9 aa, Artificial Sequence
  Description of Artificial Sequence: Synthetic peptide
HALSLTWGD

SEQ ID NO: 22997 - protein, 9 aa, Artificial Sequence
  Description of Artificial Sequence: Synthetic peptide
HSLPHTIGL

SEQ ID NO: 22998 - protein, 9 aa, Artificial Sequence
  Description of Artificial Sequence: Synthetic peptide
IHSRVNAGH

SEQ ID NO: 22999 - protein, 9 aa, Artificial Sequence
  Description of Artificial Sequence: Synthetic peptide
IQKVTKRGA

SEQ ID NO: 23000 - protein, 9 aa, Artificial Sequence
  Description of Artificial Sequence: Synthetic peptide
KEGPTPVGH

SEQ ID NO: 23001 - protein, 9 aa, Artificial Sequence
  Description of Artificial Sequence: Synthetic peptide
KFDFWVAGH

SEQ ID NO: 23002 - protein, 9 aa, Artificial Sequence
  Description of Artificial Sequence: Synthetic peptide
KHTQQDSGS

SEQ ID NO: 23003 - protein, 9 aa, Artificial Sequence
  Description of Artificial Sequence: Synthetic peptide
LATHQKDGR

SEQ ID NO: 23004 - protein, 9 aa, Artificial Sequence
  Description of Artificial Sequence: Synthetic peptide
LMELTNEGW

SEQ ID NO: 23005 - protein, 9 aa, Artificial Sequence
  Description of Artificial Sequence: Synthetic peptide
LSPKNDPGV

SEQ ID NO: 23006 - protein, 9 aa, Artificial Sequence
  Description of Artificial Sequence: Synthetic peptide
LSYSIVTGE

SEQ ID NO: 23007 - protein, 9 aa, Artificial Sequence
  Description of Artificial Sequence: Synthetic peptide
MAVTLMHGC

SEQ ID NO: 23008 - protein, 9 aa, Artificial Sequence
  Description of Artificial Sequence: Synthetic peptide
MCVRWSVGD

SEQ ID NO: 23009 - protein, 9 aa, Artificial Sequence
  Description of Artificial Sequence: Synthetic peptide
MDTHLQHGA

SEQ ID NO: 23010 - protein, 9 aa, Artificial Sequence
  Description of Artificial Sequence: Synthetic peptide
MGGSNVWGN

SEQ ID NO: 23011 - protein, 9 aa, Artificial Sequence
  Description of Artificial Sequence: Synthetic peptide
MKWDCLIGP

SEQ ID NO: 23012 - protein, 9 aa, Artificial Sequence
  Description of Artificial Sequence: Synthetic peptide
NFVCSDIGK

SEQ ID NO: 23013 - protein, 9 aa, Artificial Sequence
  Description of Artificial Sequence: Synthetic peptide
NLMRRDHGG

SEQ ID NO: 23014 - protein, 9 aa, Artificial Sequence
  Description of Artificial Sequence: Synthetic peptide
QAMYTTAGI

SEQ ID NO: 23015 - protein, 9 aa, Artificial Sequence
  Description of Artificial Sequence: Synthetic peptide
QLKNAFEGS

SEQ ID NO: 23016 - protein, 9 aa, Artificial Sequence
  Description of Artificial Sequence: Synthetic peptide
QQYAPVIGP

SEQ ID NO: 23017 - protein, 9 aa, Artificial Sequence
  Description of Artificial Sequence: Synthetic peptide
QSREPRGGK

SEQ ID NO: 23018 - protein, 9 aa, Artificial Sequence
  Description of Artificial Sequence: Synthetic peptide
SAVGWGVGQ

SEQ ID NO: 23019 - protein, 9 aa, Artificial Sequence
  Description of Artificial Sequence: Synthetic peptide
SYIFSEIGT

SEQ ID NO: 23020 - protein, 9 aa, Artificial Sequence
  Description of Artificial Sequence: Synthetic peptide
SYMVIGWGG

SEQ ID NO: 23021 - protein, 9 aa, Artificial Sequence
  Description of Artificial Sequence: Synthetic peptide
TFTYAYDGQ

SEQ ID NO: 23022 - protein, 9 aa, Artificial Sequence
  Description of Artificial Sequence: Synthetic peptide
TKKRNCFGM

SEQ ID NO: 23023 - protein, 9 aa, Artificial Sequence
  Description of Artificial Sequence: Synthetic peptide
TSIHDNQGM

SEQ ID NO: 23024 - protein, 9 aa, Artificial Sequence
  Description of Artificial Sequence: Synthetic peptide
VATSKDVGP

SEQ ID NO: 23025 - protein, 9 aa, Artificial Sequence
  Description of Artificial Sequence: Synthetic peptide
VNRPTNFGT

SEQ ID NO: 23026 - protein, 9 aa, Artificial Sequence
  Description of Artificial Sequence: Synthetic peptide
WPQRVPLGM

SEQ ID NO: 23027 - protein, 9 aa, Artificial Sequence
  Description of Artificial Sequence: Synthetic peptide
YFPFHMAGQ

SEQ ID NO: 23028 - protein, 9 aa, Artificial Sequence
  Description of Artificial Sequence: Synthetic peptide
EIRMIISGC

SEQ ID NO: 23029 - protein, 9 aa, Artificial Sequence
  Description of Artificial Sequence: Synthetic peptide
GRHYIAAGY

SEQ ID NO: 23030 - protein, 9 aa, Artificial Sequence
  Description of Artificial Sequence: Synthetic peptide
MLAFDPMGR

SEQ ID NO: 23031 - protein, 9 aa, Artificial Sequence
  Description of Artificial Sequence: Synthetic peptide
HHMPIWLGL

SEQ ID NO: 23032 - protein, 9 aa, Artificial Sequence
  Description of Artificial Sequence: Synthetic peptide
HFHEVAWGS

SEQ ID NO: 23033 - protein, 9 aa, Artificial Sequence
  Description of Artificial Sequence: Synthetic peptide
AGQFKSEGS

SEQ ID NO: 23034 - protein, 9 aa, Artificial Sequence
  Description of Artificial Sequence: Synthetic peptide
TGACMVEGL

SEQ ID NO: 23035 - protein, 9 aa, Artificial Sequence
  Description of Artificial Sequence: Synthetic peptide
TLVSCDQGN

SEQ ID NO: 23036 - protein, 9 aa, Artificial Sequence
  Description of Artificial Sequence: Synthetic peptide
DGGLRVQGM

SEQ ID NO: 23037 - protein, 9 aa, Artificial Sequence
  Description of Artificial Sequence: Synthetic peptide
WKVSPIQGF

SEQ ID NO: 23038 - protein, 9 aa, Artificial Sequence
  Description of Artificial Sequence: Synthetic peptide
EGGKNIFGM

SEQ ID NO: 23039 - protein, 9 aa, Artificial Sequence
  Description of Artificial Sequence: Synthetic peptide
LDGPIGMGT

SEQ ID NO: 23040 - protein, 9 aa, Artificial Sequence
  Description of Artificial Sequence: Synthetic peptide
EPLYSWVGI

SEQ ID NO: 23041 - protein, 9 aa, Artificial Sequence
  Description of Artificial Sequence: Synthetic peptide
TNIKERTGS

SEQ ID NO: 23042 - protein, 9 aa, Artificial Sequence
  Description of Artificial Sequence: Synthetic peptide
TIDVKRWGQ

SEQ ID NO: 23043 - protein, 9 aa, Artificial Sequence
  Description of Artificial Sequence: Synthetic peptide
TSHLAWCEA

SEQ ID NO: 23044 - protein, 9 aa, Artificial Sequence
  Description of Artificial Sequence: Synthetic peptide
VAMMGCMQA

SEQ ID NO: 23045 - protein, 9 aa, Artificial Sequence
  Description of Artificial Sequence: Synthetic peptide
VCENEAGVA

SEQ ID NO: 23046 - protein, 9 aa, Artificial Sequence
  Description of Artificial Sequence: Synthetic peptide
VMCQTLVKA

SEQ ID NO: 23047 - protein, 9 aa, Artificial Sequence
  Description of Artificial Sequence: Synthetic peptide
VSLVRYVDA

SEQ ID NO: 23048 - protein, 9 aa, Artificial Sequence
  Description of Artificial Sequence: Synthetic peptide
YPCFGTSLA

SEQ ID NO: 23049 - protein, 9 aa, Artificial Sequence
  Description of Artificial Sequence: Synthetic peptide
AHTWLQHWA

SEQ ID NO: 23050 - protein, 9 aa, Artificial Sequence
  Description of Artificial Sequence: Synthetic peptide
DAGWQQFAA

SEQ ID NO: 23051 - protein, 9 aa, Artificial Sequence
  Description of Artificial Sequence: Synthetic peptide
DTEQWEATA

SEQ ID NO: 23052 - protein, 9 aa, Artificial Sequence
  Description of Artificial Sequence: Synthetic peptide
HQYELQMHA

SEQ ID NO: 23053 - protein, 9 aa, Artificial Sequence
  Description of Artificial Sequence: Synthetic peptide
LGYHCCQAA

SEQ ID NO: 23054 - protein, 9 aa, Artificial Sequence
  Description of Artificial Sequence: Synthetic peptide
NSTPMACMA

SEQ ID NO: 23055 - protein, 9 aa, Artificial Sequence
  Description of Artificial Sequence: Synthetic peptide
QIEYCMFYA

SEQ ID NO: 23056 - protein, 9 aa, Artificial Sequence
  Description of Artificial Sequence: Synthetic peptide
SDDDREREA

SEQ ID NO: 23057 - protein, 9 aa, Artificial Sequence
  Description of Artificial Sequence: Synthetic peptide
SHDLVAAWA

SEQ ID NO: 23058 - protein, 9 aa, Artificial Sequence
  Description of Artificial Sequence: Synthetic peptide
THAWLQHWA

SEQ ID NO: 23059 - protein, 9 aa, Artificial Sequence
  Description of Artificial Sequence: Synthetic peptide
SAQCAGHNA

SEQ ID NO: 23060 - protein, 9 aa, Artificial Sequence
  Description of Artificial Sequence: Synthetic peptide
VLPEGTMTA

SEQ ID NO: 23061 - protein, 9 aa, Artificial Sequence
  Description of Artificial Sequence: Synthetic peptide
LGMQADRFA

SEQ ID NO: 23062 - protein, 9 aa, Artificial Sequence
  Description of Artificial Sequence: Synthetic peptide
LGYYCCQAA

SEQ ID NO: 23063 - protein, 9 aa, Artificial Sequence
  Description of Artificial Sequence: Synthetic peptide
KYAYSLDCA

SEQ ID NO: 23064 - protein, 9 aa, Artificial Sequence
  Description of Artificial Sequence: Synthetic peptide
GTEQWEATA

SEQ ID NO: 23065 - protein, 9 aa, Artificial Sequence
  Description of Artificial Sequence: Synthetic peptide
WSKGTMLEA

SEQ ID NO: 23066 - protein, 9 aa, Artificial Sequence
  Description of Artificial Sequence: Synthetic peptide
KGIWQGMDA

SEQ ID NO: 23067 - protein, 9 aa, Artificial Sequence
  Description of Artificial Sequence: Synthetic peptide
NIRTGACSA

SEQ ID NO: 23068 - protein, 9 aa, Artificial Sequence
  Description of Artificial Sequence: Synthetic peptide
KSEHHWINA

SEQ ID NO: 23069 - protein, 9 aa, Artificial Sequence
  Description of Artificial Sequence: Synthetic peptide
FSEQNVSAA

SEQ ID NO: 23070 - protein, 9 aa, Artificial Sequence
  Description of Artificial Sequence: Synthetic peptide
ASYYLVRNA

SEQ ID NO: 23071 - protein, 9 aa, Artificial Sequence
  Description of Artificial Sequence: Synthetic peptide
DGERFMMQA

SEQ ID NO: 23072 - protein, 9 aa, Artificial Sequence
  Description of Artificial Sequence: Synthetic peptide
DIGLRNMNA

SEQ ID NO: 23073 - protein, 9 aa, Artificial Sequence
  Description of Artificial Sequence: Synthetic peptide
DTIQFVQNA

SEQ ID NO: 23074 - protein, 9 aa, Artificial Sequence
  Description of Artificial Sequence: Synthetic peptide
DWKWKTMMA

SEQ ID NO: 23075 - protein, 9 aa, Artificial Sequence
  Description of Artificial Sequence: Synthetic peptide
DYRGQDHVA

SEQ ID NO: 23076 - protein, 9 aa, Artificial Sequence
  Description of Artificial Sequence: Synthetic peptide
EFTTCVELA

SEQ ID NO: 23077 - protein, 9 aa, Artificial Sequence
  Description of Artificial Sequence: Synthetic peptide
EICFKEYWA

SEQ ID NO: 23078 - protein, 9 aa, Artificial Sequence
  Description of Artificial Sequence: Synthetic peptide
EQIGVWWHA

SEQ ID NO: 23079 - protein, 9 aa, Artificial Sequence
  Description of Artificial Sequence: Synthetic peptide
ETMWNMWDA

SEQ ID NO: 23080 - protein, 9 aa, Artificial Sequence
  Description of Artificial Sequence: Synthetic peptide
IMITEVRSA

SEQ ID NO: 23081 - protein, 9 aa, Artificial Sequence
  Description of Artificial Sequence: Synthetic peptide
KQETRGSVA

SEQ ID NO: 23082 - protein, 9 aa, Artificial Sequence
  Description of Artificial Sequence: Synthetic peptide
KSCTTSHCA

SEQ ID NO: 23083 - protein, 9 aa, Artificial Sequence
  Description of Artificial Sequence: Synthetic peptide
LSHQECAAA

SEQ ID NO: 23084 - protein, 9 aa, Artificial Sequence
  Description of Artificial Sequence: Synthetic peptide
LTNDKSVTA

SEQ ID NO: 23085 - protein, 9 aa, Artificial Sequence
  Description of Artificial Sequence: Synthetic peptide
MCRKNKILA

SEQ ID NO: 23086 - protein, 9 aa, Artificial Sequence
  Description of Artificial Sequence: Synthetic peptide
MEGSDNLSA

SEQ ID NO: 23087 - protein, 9 aa, Artificial Sequence
  Description of Artificial Sequence: Synthetic peptide
MHEGVAGIA

SEQ ID NO: 23088 - protein, 9 aa, Artificial Sequence
  Description of Artificial Sequence: Synthetic peptide
MNEYMIKCA

SEQ ID NO: 23089 - protein, 9 aa, Artificial Sequence
  Description of Artificial Sequence: Synthetic peptide
MYGFVMWEA

SEQ ID NO: 23090 - protein, 9 aa, Artificial Sequence
  Description of Artificial Sequence: Synthetic peptide
NIYATGSQA

SEQ ID NO: 23091 - protein, 9 aa, Artificial Sequence
  Description of Artificial Sequence: Synthetic peptide
NQVHSVDLA

SEQ ID NO: 23092 - protein, 9 aa, Artificial Sequence
  Description of Artificial Sequence: Synthetic peptide
NYTPFYKRA

SEQ ID NO: 23093 - protein, 9 aa, Artificial Sequence
  Description of Artificial Sequence: Synthetic peptide
PEYWGQKIA

SEQ ID NO: 23094 - protein, 9 aa, Artificial Sequence
  Description of Artificial Sequence: Synthetic peptide
QFNFTESDA

SEQ ID NO: 23095 - protein, 9 aa, Artificial Sequence
  Description of Artificial Sequence: Synthetic peptide
QTDWKVVVA

SEQ ID NO: 23096 - protein, 9 aa, Artificial Sequence
  Description of Artificial Sequence: Synthetic peptide
SAHDTIRDA

SEQ ID NO: 23097 - protein, 9 aa, Artificial Sequence
  Description of Artificial Sequence: Synthetic peptide
SFMVMACYA

SEQ ID NO: 23098 - protein, 9 aa, Artificial Sequence
  Description of Artificial Sequence: Synthetic peptide
SICGTCQRA

SEQ ID NO: 23099 - protein, 9 aa, Artificial Sequence
  Description of Artificial Sequence: Synthetic peptide
SSSCVVIAA

SEQ ID NO: 23100 - protein, 9 aa, Artificial Sequence
  Description of Artificial Sequence: Synthetic peptide
SSTTVWEYA

SEQ ID NO: 23101 - protein, 9 aa, Artificial Sequence
  Description of Artificial Sequence: Synthetic peptide
STGTNAEHA

SEQ ID NO: 23102 - protein, 9 aa, Artificial Sequence
  Description of Artificial Sequence: Synthetic peptide
SYQWLCADA

SEQ ID NO: 23103 - protein, 9 aa, Artificial Sequence
  Description of Artificial Sequence: Synthetic peptide
TSEGITREA

SEQ ID NO: 23104 - protein, 9 aa, Artificial Sequence
  Description of Artificial Sequence: Synthetic peptide
TSSHQTVKA

SEQ ID NO: 23105 - protein, 9 aa, Artificial Sequence
  Description of Artificial Sequence: Synthetic peptide
VCNMTDLQA

SEQ ID NO: 23106 - protein, 9 aa, Artificial Sequence
  Description of Artificial Sequence: Synthetic peptide
VKESSDACA

SEQ ID NO: 23107 - protein, 9 aa, Artificial Sequence
  Description of Artificial Sequence: Synthetic peptide
VMEQLQHTA

SEQ ID NO: 23108 - protein, 9 aa, Artificial Sequence
  Description of Artificial Sequence: Synthetic peptide
WCTPMNRVA

SEQ ID NO: 23109 - protein, 9 aa, Artificial Sequence
  Description of Artificial Sequence: Synthetic peptide
YKQSHMVAA

SEQ ID NO: 23110 - protein, 9 aa, Artificial Sequence
  Description of Artificial Sequence: Synthetic peptide
MSWDMVEAA

SEQ ID NO: 23111 - protein, 9 aa, Artificial Sequence
  Description of Artificial Sequence: Synthetic peptide
QFRCMMDDA

SEQ ID NO: 23112 - protein, 9 aa, Artificial Sequence
  Description of Artificial Sequence: Synthetic peptide
EIVQPQCYA

SEQ ID NO: 23113 - protein, 9 aa, Artificial Sequence
  Description of Artificial Sequence: Synthetic peptide
ALQFVSSTA

SEQ ID NO: 23114 - protein, 9 aa, Artificial Sequence
  Description of Artificial Sequence: Synthetic peptide
TERRMFRTA

SEQ ID NO: 23115 - protein, 9 aa, Artificial Sequence
  Description of Artificial Sequence: Synthetic peptide
QTPKSLLDA

SEQ ID NO: 23116 - protein, 9 aa, Artificial Sequence
  Description of Artificial Sequence: Synthetic peptide
AEVMQWQAA

SEQ ID NO: 23117 - protein, 9 aa, Artificial Sequence
  Description of Artificial Sequence: Synthetic peptide
EADTFTLIA

SEQ ID NO: 23118 - protein, 9 aa, Artificial Sequence
  Description of Artificial Sequence: Synthetic peptide
AAAQFGKHT

SEQ ID NO: 23119 - protein, 9 aa, Artificial Sequence
  Description of Artificial Sequence: Synthetic peptide
AASKVKLHH

SEQ ID NO: 23120 - protein, 9 aa, Artificial Sequence
  Description of Artificial Sequence: Synthetic peptide
ACDRFLAMY

SEQ ID NO: 23121 - protein, 9 aa, Artificial Sequence
  Description of Artificial Sequence: Synthetic peptide
ACDRFMTMY

SEQ ID NO: 23122 - protein, 9 aa, Artificial Sequence
  Description of Artificial Sequence: Synthetic peptide
ACDRFMVMY

SEQ ID NO: 23123 - protein, 9 aa, Artificial Sequence
  Description of Artificial Sequence: Synthetic peptide
ACDRIMAMY

SEQ ID NO: 23124 - protein, 9 aa, Artificial Sequence
  Description of Artificial Sequence: Synthetic peptide
ACDRVMAMY

SEQ ID NO: 23125 - protein, 9 aa, Artificial Sequence
  Description of Artificial Sequence: Synthetic peptide
ACDRYIAEY

SEQ ID NO: 23126 - protein, 9 aa, Artificial Sequence
  Description of Artificial Sequence: Synthetic peptide
ACDRYMAMY

SEQ ID NO: 23127 - protein, 9 aa, Artificial Sequence
  Description of Artificial Sequence: Synthetic peptide
ADQCKWWCM

SEQ ID NO: 23128 - protein, 9 aa, Artificial Sequence
  Description of Artificial Sequence: Synthetic peptide
ADQCQWWCV

SEQ ID NO: 23129 - protein, 9 aa, Artificial Sequence
  Description of Artificial Sequence: Synthetic peptide
AELMALAPC

SEQ ID NO: 23130 - protein, 9 aa, Artificial Sequence
  Description of Artificial Sequence: Synthetic peptide
AELMVLAQC

SEQ ID NO: 23131 - protein, 9 aa, Artificial Sequence
  Description of Artificial Sequence: Synthetic peptide
AFDRFMAMY

SEQ ID NO: 23132 - protein, 9 aa, Artificial Sequence
  Description of Artificial Sequence: Synthetic peptide
AFTIKDDWW

SEQ ID NO: 23133 - protein, 9 aa, Artificial Sequence
  Description of Artificial Sequence: Synthetic peptide
AGAKYHDWL

SEQ ID NO: 23134 - protein, 9 aa, Artificial Sequence
  Description of Artificial Sequence: Synthetic peptide
AGGKLKTIG

SEQ ID NO: 23135 - protein, 9 aa, Artificial Sequence
  Description of Artificial Sequence: Synthetic peptide
AGGKLQTLV

SEQ ID NO: 23136 - protein, 9 aa, Artificial Sequence
  Description of Artificial Sequence: Synthetic peptide
AIGQFMMHL

SEQ ID NO: 23137 - protein, 9 aa, Artificial Sequence
  Description of Artificial Sequence: Synthetic peptide
AIQQFMMHL

SEQ ID NO: 23138 - protein, 9 aa, Artificial Sequence
  Description of Artificial Sequence: Synthetic peptide
AIRLFMMHL

SEQ ID NO: 23139 - protein, 9 aa, Artificial Sequence
  Description of Artificial Sequence: Synthetic peptide
AIRQFMMHR

SEQ ID NO: 23140 - protein, 9 aa, Artificial Sequence
  Description of Artificial Sequence: Synthetic peptide
AIRQFMMHV

SEQ ID NO: 23141 - protein, 9 aa, Artificial Sequence
  Description of Artificial Sequence: Synthetic peptide
AIRQFTMHL

SEQ ID NO: 23142 - protein, 9 aa, Artificial Sequence
  Description of Artificial Sequence: Synthetic peptide
AIRRFMMHL

SEQ ID NO: 23143 - protein, 9 aa, Artificial Sequence
  Description of Artificial Sequence: Synthetic peptide
AIWPAAWMD

SEQ ID NO: 23144 - protein, 9 aa, Artificial Sequence
  Description of Artificial Sequence: Synthetic peptide
AKLMALAQC

SEQ ID NO: 23145 - protein, 9 aa, Artificial Sequence
  Description of Artificial Sequence: Synthetic peptide
AKVNCVYYG

SEQ ID NO: 23146 - protein, 9 aa, Artificial Sequence
  Description of Artificial Sequence: Synthetic peptide
AKVSTLNGM

SEQ ID NO: 23147 - protein, 9 aa, Artificial Sequence
  Description of Artificial Sequence: Synthetic peptide
ALREFWTWW

SEQ ID NO: 23148 - protein, 9 aa, Artificial Sequence
  Description of Artificial Sequence: Synthetic peptide
ALRQFMMHL

SEQ ID NO: 23149 - protein, 9 aa, Artificial Sequence
  Description of Artificial Sequence: Synthetic peptide
ANCKHDHCH

SEQ ID NO: 23150 - protein, 9 aa, Artificial Sequence
  Description of Artificial Sequence: Synthetic peptide
ANCKPDHCH

SEQ ID NO: 23151 - protein, 9 aa, Artificial Sequence
  Description of Artificial Sequence: Synthetic peptide
ANCKQHHCH

SEQ ID NO: 23152 - protein, 9 aa, Artificial Sequence
  Description of Artificial Sequence: Synthetic peptide
ANCRQDHCH

SEQ ID NO: 23153 - protein, 9 aa, Artificial Sequence
  Description of Artificial Sequence: Synthetic peptide
ANRKQDHCH

SEQ ID NO: 23154 - protein, 9 aa, Artificial Sequence
  Description of Artificial Sequence: Synthetic peptide
ANRQFMMHL

SEQ ID NO: 23155 - protein, 9 aa, Artificial Sequence
  Description of Artificial Sequence: Synthetic peptide
ANWKQDHCH

SEQ ID NO: 23156 - protein, 9 aa, Artificial Sequence
  Description of Artificial Sequence: Synthetic peptide
ANYKQDHCH

SEQ ID NO: 23157 - protein, 9 aa, Artificial Sequence
  Description of Artificial Sequence: Synthetic peptide
AQISTLNGM

SEQ ID NO: 23158 - protein, 9 aa, Artificial Sequence
  Description of Artificial Sequence: Synthetic peptide
AQNGLGTVQ

SEQ ID NO: 23159 - protein, 9 aa, Artificial Sequence
  Description of Artificial Sequence: Synthetic peptide
ARGKLQTLG

SEQ ID NO: 23160 - protein, 9 aa, Artificial Sequence
  Description of Artificial Sequence: Synthetic peptide
ARGPMLAVK

SEQ ID NO: 23161 - protein, 9 aa, Artificial Sequence
  Description of Artificial Sequence: Synthetic peptide
ARVSTLNGM

SEQ ID NO: 23162 - protein, 9 aa, Artificial Sequence
  Description of Artificial Sequence: Synthetic peptide
ASARLYYCW

SEQ ID NO: 23163 - protein, 9 aa, Artificial Sequence
  Description of Artificial Sequence: Synthetic peptide
ASDIFDGHQ

SEQ ID NO: 23164 - protein, 9 aa, Artificial Sequence
  Description of Artificial Sequence: Synthetic peptide
ASDKMDGGS

SEQ ID NO: 23165 - protein, 9 aa, Artificial Sequence
  Description of Artificial Sequence: Synthetic peptide
ASDKMDIGS

SEQ ID NO: 23166 - protein, 9 aa, Artificial Sequence
  Description of Artificial Sequence: Synthetic peptide
ASERLHYCW

SEQ ID NO: 23167 - protein, 9 aa, Artificial Sequence
  Description of Artificial Sequence: Synthetic peptide
ASERLYYCL

SEQ ID NO: 23168 - protein, 9 aa, Artificial Sequence
  Description of Artificial Sequence: Synthetic peptide
ASKQWDHKH

SEQ ID NO: 23169 - protein, 9 aa, Artificial Sequence
  Description of Artificial Sequence: Synthetic peptide
ASNKMDVGS

SEQ ID NO: 23170 - protein, 9 aa, Artificial Sequence
  Description of Artificial Sequence: Synthetic peptide
ASQRLYYCW

SEQ ID NO: 23171 - protein, 9 aa, Artificial Sequence
  Description of Artificial Sequence: Synthetic peptide
ASRQFMMHL

SEQ ID NO: 23172 - protein, 9 aa, Artificial Sequence
  Description of Artificial Sequence: Synthetic peptide
ASVRLYYCW

SEQ ID NO: 23173 - protein, 9 aa, Artificial Sequence
  Description of Artificial Sequence: Synthetic peptide
ASYKDQRYY

SEQ ID NO: 23174 - protein, 9 aa, Artificial Sequence
  Description of Artificial Sequence: Synthetic peptide
ATQKITGTS

SEQ ID NO: 23175 - protein, 9 aa, Artificial Sequence
  Description of Artificial Sequence: Synthetic peptide
ATRQFMMHL

SEQ ID NO: 23176 - protein, 9 aa, Artificial Sequence
  Description of Artificial Sequence: Synthetic peptide
ATTQWGMCN

SEQ ID NO: 23177 - protein, 9 aa, Artificial Sequence
  Description of Artificial Sequence: Synthetic peptide
AVHPMAYCF

SEQ ID NO: 23178 - protein, 9 aa, Artificial Sequence
  Description of Artificial Sequence: Synthetic peptide
AWDRFMAMY

SEQ ID NO: 23179 - protein, 9 aa, Artificial Sequence
  Description of Artificial Sequence: Synthetic peptide
CAHKEHVCH

SEQ ID NO: 23180 - protein, 9 aa, Artificial Sequence
  Description of Artificial Sequence: Synthetic peptide
CAHWSYDCY

SEQ ID NO: 23181 - protein, 9 aa, Artificial Sequence
  Description of Artificial Sequence: Synthetic peptide
CAHWTYECY

SEQ ID NO: 23182 - protein, 9 aa, Artificial Sequence
  Description of Artificial Sequence: Synthetic peptide
CAHWTYNCY

SEQ ID NO: 23183 - protein, 9 aa, Artificial Sequence
  Description of Artificial Sequence: Synthetic peptide
CAHWTYYCY

SEQ ID NO: 23184 - protein, 9 aa, Artificial Sequence
  Description of Artificial Sequence: Synthetic peptide
CAHWYYDQR

SEQ ID NO: 23185 - protein, 9 aa, Artificial Sequence
  Description of Artificial Sequence: Synthetic peptide
CANKENVCH

SEQ ID NO: 23186 - protein, 9 aa, Artificial Sequence
  Description of Artificial Sequence: Synthetic peptide
CANKGHVCH

SEQ ID NO: 23187 - protein, 9 aa, Artificial Sequence
  Description of Artificial Sequence: Synthetic peptide
CANWTYDCY

SEQ ID NO: 23188 - protein, 9 aa, Artificial Sequence
  Description of Artificial Sequence: Synthetic peptide
CATKEHVCH

SEQ ID NO: 23189 - protein, 9 aa, Artificial Sequence
  Description of Artificial Sequence: Synthetic peptide
CEGWGTYCL

SEQ ID NO: 23190 - protein, 9 aa, Artificial Sequence
  Description of Artificial Sequence: Synthetic peptide
CEGWVTYCI

SEQ ID NO: 23191 - protein, 9 aa, Artificial Sequence
  Description of Artificial Sequence: Synthetic peptide
CFCILEKMT

SEQ ID NO: 23192 - protein, 9 aa, Artificial Sequence
  Description of Artificial Sequence: Synthetic peptide
CFCTYEIEH

SEQ ID NO: 23193 - protein, 9 aa, Artificial Sequence
  Description of Artificial Sequence: Synthetic peptide
CFCTYKIQH

SEQ ID NO: 23194 - protein, 9 aa, Artificial Sequence
  Description of Artificial Sequence: Synthetic peptide
CFCTYKNEH

SEQ ID NO: 23195 - protein, 9 aa, Artificial Sequence
  Description of Artificial Sequence: Synthetic peptide
CFGFVNSVT

SEQ ID NO: 23196 - protein, 9 aa, Artificial Sequence
  Description of Artificial Sequence: Synthetic peptide
CFGTYKIEH

SEQ ID NO: 23197 - protein, 9 aa, Artificial Sequence
  Description of Artificial Sequence: Synthetic peptide
CFGVVNSVN

SEQ ID NO: 23198 - protein, 9 aa, Artificial Sequence
  Description of Artificial Sequence: Synthetic peptide
CFRTYDLLS

SEQ ID NO: 23199 - protein, 9 aa, Artificial Sequence
  Description of Artificial Sequence: Synthetic peptide
CFWMYDLLS

SEQ ID NO: 23200 - protein, 9 aa, Artificial Sequence
  Description of Artificial Sequence: Synthetic peptide
CFYTYKIEH

SEQ ID NO: 23201 - protein, 9 aa, Artificial Sequence
  Description of Artificial Sequence: Synthetic peptide
CGHWTYDCY

SEQ ID NO: 23202 - protein, 9 aa, Artificial Sequence
  Description of Artificial Sequence: Synthetic peptide
CGLIMEMCC

SEQ ID NO: 23203 - protein, 9 aa, Artificial Sequence
  Description of Artificial Sequence: Synthetic peptide
CGLIMEMCL

SEQ ID NO: 23204 - protein, 9 aa, Artificial Sequence
  Description of Artificial Sequence: Synthetic peptide
CGLIMEMWW

SEQ ID NO: 23205 - protein, 9 aa, Artificial Sequence
  Description of Artificial Sequence: Synthetic peptide
CGLIMEVCW

SEQ ID NO: 23206 - protein, 9 aa, Artificial Sequence
  Description of Artificial Sequence: Synthetic peptide
CGLIMQMCW

SEQ ID NO: 23207 - protein, 9 aa, Artificial Sequence
  Description of Artificial Sequence: Synthetic peptide
CGLIMVMCW

SEQ ID NO: 23208 - protein, 9 aa, Artificial Sequence
  Description of Artificial Sequence: Synthetic peptide
CGLLMEMCW

SEQ ID NO: 23209 - protein, 9 aa, Artificial Sequence
  Description of Artificial Sequence: Synthetic peptide
CGMIMEMCW

SEQ ID NO: 23210 - protein, 9 aa, Artificial Sequence
  Description of Artificial Sequence: Synthetic peptide
CGPIMEMCW

SEQ ID NO: 23211 - protein, 9 aa, Artificial Sequence
  Description of Artificial Sequence: Synthetic peptide
CGVIMEMCW

SEQ ID NO: 23212 - protein, 9 aa, Artificial Sequence
  Description of Artificial Sequence: Synthetic peptide
CHFQYKNQA

SEQ ID NO: 23213 - protein, 9 aa, Artificial Sequence
  Description of Artificial Sequence: Synthetic peptide
CHFRYQNQA

SEQ ID NO: 23214 - protein, 9 aa, Artificial Sequence
  Description of Artificial Sequence: Synthetic peptide
CHMSFNQCY

SEQ ID NO: 23215 - protein, 9 aa, Artificial Sequence
  Description of Artificial Sequence: Synthetic peptide
CHRKWEKQE

SEQ ID NO: 23216 - protein, 9 aa, Artificial Sequence
  Description of Artificial Sequence: Synthetic peptide
CIALRLAWD

SEQ ID NO: 23217 - protein, 9 aa, Artificial Sequence
  Description of Artificial Sequence: Synthetic peptide
CICSSPDHP

SEQ ID NO: 23218 - protein, 9 aa, Artificial Sequence
  Description of Artificial Sequence: Synthetic peptide
CICSSPEQP

SEQ ID NO: 23219 - protein, 9 aa, Artificial Sequence
  Description of Artificial Sequence: Synthetic peptide
CIDLQLAWD

SEQ ID NO: 23220 - protein, 9 aa, Artificial Sequence
  Description of Artificial Sequence: Synthetic peptide
CIDLRLAWG

SEQ ID NO: 23221 - protein, 9 aa, Artificial Sequence
  Description of Artificial Sequence: Synthetic peptide
CIDLRLAWH

SEQ ID NO: 23222 - protein, 9 aa, Artificial Sequence
  Description of Artificial Sequence: Synthetic peptide
CIDLRLDWD

SEQ ID NO: 23223 - protein, 9 aa, Artificial Sequence
  Description of Artificial Sequence: Synthetic peptide
CIDLRLVWD

SEQ ID NO: 23224 - protein, 9 aa, Artificial Sequence
  Description of Artificial Sequence: Synthetic peptide
CIDLWLAWD

SEQ ID NO: 23225 - protein, 9 aa, Artificial Sequence
  Description of Artificial Sequence: Synthetic peptide
CIEWGGMMG

SEQ ID NO: 23226 - protein, 9 aa, Artificial Sequence
  Description of Artificial Sequence: Synthetic peptide
CIEWWDMMG

SEQ ID NO: 23227 - protein, 9 aa, Artificial Sequence
  Description of Artificial Sequence: Synthetic peptide
CIEWWGKMG

SEQ ID NO: 23228 - protein, 9 aa, Artificial Sequence
  Description of Artificial Sequence: Synthetic peptide
CIEWWGMMA

SEQ ID NO: 23229 - protein, 9 aa, Artificial Sequence
  Description of Artificial Sequence: Synthetic peptide
CIEWWGMVG

SEQ ID NO: 23230 - protein, 9 aa, Artificial Sequence
  Description of Artificial Sequence: Synthetic peptide
CIEWWSMMG

SEQ ID NO: 23231 - protein, 9 aa, Artificial Sequence
  Description of Artificial Sequence: Synthetic peptide
CIGAHWHIP

SEQ ID NO: 23232 - protein, 9 aa, Artificial Sequence
  Description of Artificial Sequence: Synthetic peptide
CIGINLDHH

SEQ ID NO: 23233 - protein, 9 aa, Artificial Sequence
  Description of Artificial Sequence: Synthetic peptide
CIGLRLAWD

SEQ ID NO: 23234 - protein, 9 aa, Artificial Sequence
  Description of Artificial Sequence: Synthetic peptide
CIGLRLDWD

SEQ ID NO: 23235 - protein, 9 aa, Artificial Sequence
  Description of Artificial Sequence: Synthetic peptide
CIGRFDHKQ

SEQ ID NO: 23236 - protein, 9 aa, Artificial Sequence
  Description of Artificial Sequence: Synthetic peptide
CIGWWGMMG

SEQ ID NO: 23237 - protein, 9 aa, Artificial Sequence
  Description of Artificial Sequence: Synthetic peptide
CIGYKWFPG

SEQ ID NO: 23238 - protein, 9 aa, Artificial Sequence
  Description of Artificial Sequence: Synthetic peptide
CIHADGKYS

SEQ ID NO: 23239 - protein, 9 aa, Artificial Sequence
  Description of Artificial Sequence: Synthetic peptide
CIIPKLKER

SEQ ID NO: 23240 - protein, 9 aa, Artificial Sequence
  Description of Artificial Sequence: Synthetic peptide
CIIPKMEER

SEQ ID NO: 23241 - protein, 9 aa, Artificial Sequence
  Description of Artificial Sequence: Synthetic peptide
CIIPKMKAR

SEQ ID NO: 23242 - protein, 9 aa, Artificial Sequence
  Description of Artificial Sequence: Synthetic peptide
CIIPKMKEK

SEQ ID NO: 23243 - protein, 9 aa, Artificial Sequence
  Description of Artificial Sequence: Synthetic peptide
CIIPKMKKR

SEQ ID NO: 23244 - protein, 9 aa, Artificial Sequence
  Description of Artificial Sequence: Synthetic peptide
CIIPKMMER

SEQ ID NO: 23245 - protein, 9 aa, Artificial Sequence
  Description of Artificial Sequence: Synthetic peptide
CIIPKMRER

SEQ ID NO: 23246 - protein, 9 aa, Artificial Sequence
  Description of Artificial Sequence: Synthetic peptide
CIIPKVKER

SEQ ID NO: 23247 - protein, 9 aa, Artificial Sequence
  Description of Artificial Sequence: Synthetic peptide
CIIPRMKER

SEQ ID NO: 23248 - protein, 9 aa, Artificial Sequence
  Description of Artificial Sequence: Synthetic peptide
CIIRKMKER

SEQ ID NO: 23249 - protein, 9 aa, Artificial Sequence
  Description of Artificial Sequence: Synthetic peptide
CIISKMKER

SEQ ID NO: 23250 - protein, 9 aa, Artificial Sequence
  Description of Artificial Sequence: Synthetic peptide
CIKNDWQRI

SEQ ID NO: 23251 - protein, 9 aa, Artificial Sequence
  Description of Artificial Sequence: Synthetic peptide
CIKPDWQRI

SEQ ID NO: 23252 - protein, 9 aa, Artificial Sequence
  Description of Artificial Sequence: Synthetic peptide
CIKTDWERI

SEQ ID NO: 23253 - protein, 9 aa, Artificial Sequence
  Description of Artificial Sequence: Synthetic peptide
CIKTDWQGI

SEQ ID NO: 23254 - protein, 9 aa, Artificial Sequence
  Description of Artificial Sequence: Synthetic peptide
CIKTDWQRN

SEQ ID NO: 23255 - protein, 9 aa, Artificial Sequence
  Description of Artificial Sequence: Synthetic peptide
CIKTDWRRI

SEQ ID NO: 23256 - protein, 9 aa, Artificial Sequence
  Description of Artificial Sequence: Synthetic peptide
CILPKMKER

SEQ ID NO: 23257 - protein, 9 aa, Artificial Sequence
  Description of Artificial Sequence: Synthetic peptide
CILSSPEQP

SEQ ID NO: 23258 - protein, 9 aa, Artificial Sequence
  Description of Artificial Sequence: Synthetic peptide
CIMGHCRQH

SEQ ID NO: 23259 - protein, 9 aa, Artificial Sequence
  Description of Artificial Sequence: Synthetic peptide
CIMPKMKER

SEQ ID NO: 23260 - protein, 9 aa, Artificial Sequence
  Description of Artificial Sequence: Synthetic peptide
CIMSDCRQH

SEQ ID NO: 23261 - protein, 9 aa, Artificial Sequence
  Description of Artificial Sequence: Synthetic peptide
CIMSHCREH

SEQ ID NO: 23262 - protein, 9 aa, Artificial Sequence
  Description of Artificial Sequence: Synthetic peptide
CIMSHCRKH

SEQ ID NO: 23263 - protein, 9 aa, Artificial Sequence
  Description of Artificial Sequence: Synthetic peptide
CIMSHCRQD

SEQ ID NO: 23264 - protein, 9 aa, Artificial Sequence
  Description of Artificial Sequence: Synthetic peptide
CIMSHCRQY

SEQ ID NO: 23265 - protein, 9 aa, Artificial Sequence
  Description of Artificial Sequence: Synthetic peptide
CIMSHFRQH

SEQ ID NO: 23266 - protein, 9 aa, Artificial Sequence
  Description of Artificial Sequence: Synthetic peptide
CIMSHGRQH

SEQ ID NO: 23267 - protein, 9 aa, Artificial Sequence
  Description of Artificial Sequence: Synthetic peptide
CIMSHNRQH

SEQ ID NO: 23268 - protein, 9 aa, Artificial Sequence
  Description of Artificial Sequence: Synthetic peptide
CIMSHWRQH

SEQ ID NO: 23269 - protein, 9 aa, Artificial Sequence
  Description of Artificial Sequence: Synthetic peptide
CIMSHYRQH

SEQ ID NO: 23270 - protein, 9 aa, Artificial Sequence
  Description of Artificial Sequence: Synthetic peptide
CIMSRCRQH

SEQ ID NO: 23271 - protein, 9 aa, Artificial Sequence
  Description of Artificial Sequence: Synthetic peptide
CIMTDWQRI

SEQ ID NO: 23272 - protein, 9 aa, Artificial Sequence
  Description of Artificial Sequence: Synthetic peptide
CINADGKYP

SEQ ID NO: 23273 - protein, 9 aa, Artificial Sequence
  Description of Artificial Sequence: Synthetic peptide
CINRFDHKQ

SEQ ID NO: 23274 - protein, 9 aa, Artificial Sequence
  Description of Artificial Sequence: Synthetic peptide
CINSDGKYS

SEQ ID NO: 23275 - protein, 9 aa, Artificial Sequence
  Description of Artificial Sequence: Synthetic peptide
CIPSDRHFG

SEQ ID NO: 23276 - protein, 9 aa, Artificial Sequence
  Description of Artificial Sequence: Synthetic peptide
CIPTYRHLV

SEQ ID NO: 23277 - protein, 9 aa, Artificial Sequence
  Description of Artificial Sequence: Synthetic peptide
CIQWWGMMG

SEQ ID NO: 23278 - protein, 9 aa, Artificial Sequence
  Description of Artificial Sequence: Synthetic peptide
CIRSHCRQH

SEQ ID NO: 23279 - protein, 9 aa, Artificial Sequence
  Description of Artificial Sequence: Synthetic peptide
CIRSSTDQP

SEQ ID NO: 23280 - protein, 9 aa, Artificial Sequence
  Description of Artificial Sequence: Synthetic peptide
CIRTDWQRI

SEQ ID NO: 23281 - protein, 9 aa, Artificial Sequence
  Description of Artificial Sequence: Synthetic peptide
CISRFDHKL

SEQ ID NO: 23282 - protein, 9 aa, Artificial Sequence
  Description of Artificial Sequence: Synthetic peptide
CISRYDHKQ

SEQ ID NO: 23283 - protein, 9 aa, Artificial Sequence
  Description of Artificial Sequence: Synthetic peptide
CITADGKYS

SEQ ID NO: 23284 - protein, 9 aa, Artificial Sequence
  Description of Artificial Sequence: Synthetic peptide
CITTMNVKT

SEQ ID NO: 23285 - protein, 9 aa, Artificial Sequence
  Description of Artificial Sequence: Synthetic peptide
CITTYSHFG

SEQ ID NO: 23286 - protein, 9 aa, Artificial Sequence
  Description of Artificial Sequence: Synthetic peptide
CIVLRLAWD

SEQ ID NO: 23287 - protein, 9 aa, Artificial Sequence
  Description of Artificial Sequence: Synthetic peptide
CIVPKMKER

SEQ ID NO: 23288 - protein, 9 aa, Artificial Sequence
  Description of Artificial Sequence: Synthetic peptide
CIVWWGMMG

SEQ ID NO: 23289 - protein, 9 aa, Artificial Sequence
  Description of Artificial Sequence: Synthetic peptide
CKHPSWYMD

SEQ ID NO: 23290 - protein, 9 aa, Artificial Sequence
  Description of Artificial Sequence: Synthetic peptide
CKKWTNQAH

SEQ ID NO: 23291 - protein, 9 aa, Artificial Sequence
  Description of Artificial Sequence: Synthetic peptide
CKPWTNQAH

SEQ ID NO: 23292 - protein, 9 aa, Artificial Sequence
  Description of Artificial Sequence: Synthetic peptide
CKQWTNQAQ

SEQ ID NO: 23293 - protein, 9 aa, Artificial Sequence
  Description of Artificial Sequence: Synthetic peptide
CKVHKHWDR

SEQ ID NO: 23294 - protein, 9 aa, Artificial Sequence
  Description of Artificial Sequence: Synthetic peptide
CKVHRNWDR

SEQ ID NO: 23295 - protein, 9 aa, Artificial Sequence
  Description of Artificial Sequence: Synthetic peptide
CKVRKNWDR

SEQ ID NO: 23296 - protein, 9 aa, Artificial Sequence
  Description of Artificial Sequence: Synthetic peptide
CLAIFRLQS

SEQ ID NO: 23297 - protein, 9 aa, Artificial Sequence
  Description of Artificial Sequence: Synthetic peptide
CLGATWVAA

SEQ ID NO: 23298 - protein, 9 aa, Artificial Sequence
  Description of Artificial Sequence: Synthetic peptide
CLGSTWAAA

SEQ ID NO: 23299 - protein, 9 aa, Artificial Sequence
  Description of Artificial Sequence: Synthetic peptide
CLGSTWFAA

SEQ ID NO: 23300 - protein, 9 aa, Artificial Sequence
  Description of Artificial Sequence: Synthetic peptide
CLGSTWGAA

SEQ ID NO: 23301 - protein, 9 aa, Artificial Sequence
  Description of Artificial Sequence: Synthetic peptide
CLGSTWVAT

SEQ ID NO: 23302 - protein, 9 aa, Artificial Sequence
  Description of Artificial Sequence: Synthetic peptide
CMCLKKFYY

SEQ ID NO: 23303 - protein, 9 aa, Artificial Sequence
  Description of Artificial Sequence: Synthetic peptide
CMCLKKYYY

SEQ ID NO: 23304 - protein, 9 aa, Artificial Sequence
  Description of Artificial Sequence: Synthetic peptide
CMCLRKCYY

SEQ ID NO: 23305 - protein, 9 aa, Artificial Sequence
  Description of Artificial Sequence: Synthetic peptide
CMCVKKCYY

SEQ ID NO: 23306 - protein, 9 aa, Artificial Sequence
  Description of Artificial Sequence: Synthetic peptide
CMENYHQQY

SEQ ID NO: 23307 - protein, 9 aa, Artificial Sequence
  Description of Artificial Sequence: Synthetic peptide
CMMSHCRQH

SEQ ID NO: 23308 - protein, 9 aa, Artificial Sequence
  Description of Artificial Sequence: Synthetic peptide
CQDFRHDCA

SEQ ID NO: 23309 - protein, 9 aa, Artificial Sequence
  Description of Artificial Sequence: Synthetic peptide
CQDFRHECS

SEQ ID NO: 23310 - protein, 9 aa, Artificial Sequence
  Description of Artificial Sequence: Synthetic peptide
CQGKWEKQE

SEQ ID NO: 23311 - protein, 9 aa, Artificial Sequence
  Description of Artificial Sequence: Synthetic peptide
CQKRIIMQA

SEQ ID NO: 23312 - protein, 9 aa, Artificial Sequence
  Description of Artificial Sequence: Synthetic peptide
CQPKWEKQE

SEQ ID NO: 23313 - protein, 9 aa, Artificial Sequence
  Description of Artificial Sequence: Synthetic peptide
CQQRLIMQA

SEQ ID NO: 23314 - protein, 9 aa, Artificial Sequence
  Description of Artificial Sequence: Synthetic peptide
CQREWEKQE

SEQ ID NO: 23315 - protein, 9 aa, Artificial Sequence
  Description of Artificial Sequence: Synthetic peptide
CQRKWEKQA

SEQ ID NO: 23316 - protein, 9 aa, Artificial Sequence
  Description of Artificial Sequence: Synthetic peptide
CQRRWEKQE

SEQ ID NO: 23317 - protein, 9 aa, Artificial Sequence
  Description of Artificial Sequence: Synthetic peptide
CRGKSHEHT

SEQ ID NO: 23318 - protein, 9 aa, Artificial Sequence
  Description of Artificial Sequence: Synthetic peptide
CRGKSHNHT

SEQ ID NO: 23319 - protein, 9 aa, Artificial Sequence
  Description of Artificial Sequence: Synthetic peptide
CRGKSRDHT

SEQ ID NO: 23320 - protein, 9 aa, Artificial Sequence
  Description of Artificial Sequence: Synthetic peptide
CRGQSHDHT

SEQ ID NO: 23321 - protein, 9 aa, Artificial Sequence
  Description of Artificial Sequence: Synthetic peptide
CRLIMEMCW

SEQ ID NO: 23322 - protein, 9 aa, Artificial Sequence
  Description of Artificial Sequence: Synthetic peptide
CRRKSHDHT

SEQ ID NO: 23323 - protein, 9 aa, Artificial Sequence
  Description of Artificial Sequence: Synthetic peptide
CSIWEDRSG

SEQ ID NO: 23324 - protein, 9 aa, Artificial Sequence
  Description of Artificial Sequence: Synthetic peptide
CSMERRNEL

SEQ ID NO: 23325 - protein, 9 aa, Artificial Sequence
  Description of Artificial Sequence: Synthetic peptide
CSMSHCRQH

SEQ ID NO: 23326 - protein, 9 aa, Artificial Sequence
  Description of Artificial Sequence: Synthetic peptide
CSPNFQDQK

SEQ ID NO: 23327 - protein, 9 aa, Artificial Sequence
  Description of Artificial Sequence: Synthetic peptide
CSRATWGAE

SEQ ID NO: 23328 - protein, 9 aa, Artificial Sequence
  Description of Artificial Sequence: Synthetic peptide
CTDRMVKAA

SEQ ID NO: 23329 - protein, 9 aa, Artificial Sequence
  Description of Artificial Sequence: Synthetic peptide
CTDRMVKAT

SEQ ID NO: 23330 - protein, 9 aa, Artificial Sequence
  Description of Artificial Sequence: Synthetic peptide
CTGNYHQQY

SEQ ID NO: 23331 - protein, 9 aa, Artificial Sequence
  Description of Artificial Sequence: Synthetic peptide
CTHKDIEMD

SEQ ID NO: 23332 - protein, 9 aa, Artificial Sequence
  Description of Artificial Sequence: Synthetic peptide
CTHKQSIAV

SEQ ID NO: 23333 - protein, 9 aa, Artificial Sequence
  Description of Artificial Sequence: Synthetic peptide
CTHRMVKAS

SEQ ID NO: 23334 - protein, 9 aa, Artificial Sequence
  Description of Artificial Sequence: Synthetic peptide
CTLFSGRTA

SEQ ID NO: 23335 - protein, 9 aa, Artificial Sequence
  Description of Artificial Sequence: Synthetic peptide
CTQSFVMYQ

SEQ ID NO: 23336 - protein, 9 aa, Artificial Sequence
  Description of Artificial Sequence: Synthetic peptide
CTVFSGRAA

SEQ ID NO: 23337 - protein, 9 aa, Artificial Sequence
  Description of Artificial Sequence: Synthetic peptide
CTVSSGRTA

SEQ ID NO: 23338 - protein, 9 aa, Artificial Sequence
  Description of Artificial Sequence: Synthetic peptide
CVAIEMSVA

SEQ ID NO: 23339 - protein, 9 aa, Artificial Sequence
  Description of Artificial Sequence: Synthetic peptide
CVCLKKCYY

SEQ ID NO: 23340 - protein, 9 aa, Artificial Sequence
  Description of Artificial Sequence: Synthetic peptide
CVCTYKIEH

SEQ ID NO: 23341 - protein, 9 aa, Artificial Sequence
  Description of Artificial Sequence: Synthetic peptide
CVFREIKTA

SEQ ID NO: 23342 - protein, 9 aa, Artificial Sequence
  Description of Artificial Sequence: Synthetic peptide
CVGINLEHH

SEQ ID NO: 23343 - protein, 9 aa, Artificial Sequence
  Description of Artificial Sequence: Synthetic peptide
CVGINLYHH

SEQ ID NO: 23344 - protein, 9 aa, Artificial Sequence
  Description of Artificial Sequence: Synthetic peptide
CVGLNLDHH

SEQ ID NO: 23345 - protein, 9 aa, Artificial Sequence
  Description of Artificial Sequence: Synthetic peptide
CVHGQYYQE

SEQ ID NO: 23346 - protein, 9 aa, Artificial Sequence
  Description of Artificial Sequence: Synthetic peptide
CVLIMEMCW

SEQ ID NO: 23347 - protein, 9 aa, Artificial Sequence
  Description of Artificial Sequence: Synthetic peptide
CVLYYNQQC

SEQ ID NO: 23348 - protein, 9 aa, Artificial Sequence
  Description of Artificial Sequence: Synthetic peptide
CVMCYNDCK

SEQ ID NO: 23349 - protein, 9 aa, Artificial Sequence
  Description of Artificial Sequence: Synthetic peptide
CVMSHCRQH

SEQ ID NO: 23350 - protein, 9 aa, Artificial Sequence
  Description of Artificial Sequence: Synthetic peptide
CVQGQYNQE

SEQ ID NO: 23351 - protein, 9 aa, Artificial Sequence
  Description of Artificial Sequence: Synthetic peptide
CVQGQYYQA

SEQ ID NO: 23352 - protein, 9 aa, Artificial Sequence
  Description of Artificial Sequence: Synthetic peptide
CVQGRYYQE

SEQ ID NO: 23353 - protein, 9 aa, Artificial Sequence
  Description of Artificial Sequence: Synthetic peptide
CVQTMNGRS

SEQ ID NO: 23354 - protein, 9 aa, Artificial Sequence
  Description of Artificial Sequence: Synthetic peptide
CVVINLDHH

SEQ ID NO: 23355 - protein, 9 aa, Artificial Sequence
  Description of Artificial Sequence: Synthetic peptide
CVYREIKTS

SEQ ID NO: 23356 - protein, 9 aa, Artificial Sequence
  Description of Artificial Sequence: Synthetic peptide
CVYREIQTA

SEQ ID NO: 23357 - protein, 9 aa, Artificial Sequence
  Description of Artificial Sequence: Synthetic peptide
CVYREITTA

SEQ ID NO: 23358 - protein, 9 aa, Artificial Sequence
  Description of Artificial Sequence: Synthetic peptide
CVYRELKTA

SEQ ID NO: 23359 - protein, 9 aa, Artificial Sequence
  Description of Artificial Sequence: Synthetic peptide
CVYREVKTA

SEQ ID NO: 23360 - protein, 9 aa, Artificial Sequence
  Description of Artificial Sequence: Synthetic peptide
CWAIFRLRS

SEQ ID NO: 23361 - protein, 9 aa, Artificial Sequence
  Description of Artificial Sequence: Synthetic peptide
CWAIFRMQS

SEQ ID NO: 23362 - protein, 9 aa, Artificial Sequence
  Description of Artificial Sequence: Synthetic peptide
CWAIVRLQS

SEQ ID NO: 23363 - protein, 9 aa, Artificial Sequence
  Description of Artificial Sequence: Synthetic peptide
CWAQLNTDP

SEQ ID NO: 23364 - protein, 9 aa, Artificial Sequence
  Description of Artificial Sequence: Synthetic peptide
CWAQLNTDS

SEQ ID NO: 23365 - protein, 9 aa, Artificial Sequence
  Description of Artificial Sequence: Synthetic peptide
CWDIFRLQS

SEQ ID NO: 23366 - protein, 9 aa, Artificial Sequence
  Description of Artificial Sequence: Synthetic peptide
CWDIYNACD

SEQ ID NO: 23367 - protein, 9 aa, Artificial Sequence
  Description of Artificial Sequence: Synthetic peptide
CWGIFRLQS

SEQ ID NO: 23368 - protein, 9 aa, Artificial Sequence
  Description of Artificial Sequence: Synthetic peptide
CWGQLNTDT

SEQ ID NO: 23369 - protein, 9 aa, Artificial Sequence
  Description of Artificial Sequence: Synthetic peptide
CWPQLNTDT

SEQ ID NO: 23370 - protein, 9 aa, Artificial Sequence
  Description of Artificial Sequence: Synthetic peptide
CWSIFRLQS

SEQ ID NO: 23371 - protein, 9 aa, Artificial Sequence
  Description of Artificial Sequence: Synthetic peptide
CWVMMKTQE

SEQ ID NO: 23372 - protein, 9 aa, Artificial Sequence
  Description of Artificial Sequence: Synthetic peptide
CYCTYKIEH

SEQ ID NO: 23373 - protein, 9 aa, Artificial Sequence
  Description of Artificial Sequence: Synthetic peptide
DAAKFGKHT

SEQ ID NO: 23374 - protein, 9 aa, Artificial Sequence
  Description of Artificial Sequence: Synthetic peptide
DASKVKLHR

SEQ ID NO: 23375 - protein, 9 aa, Artificial Sequence
  Description of Artificial Sequence: Synthetic peptide
DDLGAGRSE

SEQ ID NO: 23376 - protein, 9 aa, Artificial Sequence
  Description of Artificial Sequence: Synthetic peptide
DDNWHAWFM

SEQ ID NO: 23377 - protein, 9 aa, Artificial Sequence
  Description of Artificial Sequence: Synthetic peptide
DDVGAGRSD

SEQ ID NO: 23378 - protein, 9 aa, Artificial Sequence
  Description of Artificial Sequence: Synthetic peptide
DDVMWQLIH

SEQ ID NO: 23379 - protein, 9 aa, Artificial Sequence
  Description of Artificial Sequence: Synthetic peptide
DDWMPQWVD

SEQ ID NO: 23380 - protein, 9 aa, Artificial Sequence
  Description of Artificial Sequence: Synthetic peptide
DEFIWLVMH

SEQ ID NO: 23381 - protein, 9 aa, Artificial Sequence
  Description of Artificial Sequence: Synthetic peptide
DEISNQNSY

SEQ ID NO: 23382 - protein, 9 aa, Artificial Sequence
  Description of Artificial Sequence: Synthetic peptide
DGGVTTYGG

SEQ ID NO: 23383 - protein, 9 aa, Artificial Sequence
  Description of Artificial Sequence: Synthetic peptide
DHVIIKKNY

SEQ ID NO: 23384 - protein, 9 aa, Artificial Sequence
  Description of Artificial Sequence: Synthetic peptide
DIRPSVSDS

SEQ ID NO: 23385 - protein, 9 aa, Artificial Sequence
  Description of Artificial Sequence: Synthetic peptide
DKEWSVHMG

SEQ ID NO: 23386 - protein, 9 aa, Artificial Sequence
  Description of Artificial Sequence: Synthetic peptide
DLDAQGAMW

SEQ ID NO: 23387 - protein, 9 aa, Artificial Sequence
  Description of Artificial Sequence: Synthetic peptide
DLGMINNMA

SEQ ID NO: 23388 - protein, 9 aa, Artificial Sequence
  Description of Artificial Sequence: Synthetic peptide
DMDAKGAMW

SEQ ID NO: 23389 - protein, 9 aa, Artificial Sequence
  Description of Artificial Sequence: Synthetic peptide
DMDAQGSMW

SEQ ID NO: 23390 - protein, 9 aa, Artificial Sequence
  Description of Artificial Sequence: Synthetic peptide
DMSIATWNP

SEQ ID NO: 23391 - protein, 9 aa, Artificial Sequence
  Description of Artificial Sequence: Synthetic peptide
DPDKQGQGI

SEQ ID NO: 23392 - protein, 9 aa, Artificial Sequence
  Description of Artificial Sequence: Synthetic peptide
DPKWEKYAM

SEQ ID NO: 23393 - protein, 9 aa, Artificial Sequence
  Description of Artificial Sequence: Synthetic peptide
DPKWEKYGT

SEQ ID NO: 23394 - protein, 9 aa, Artificial Sequence
  Description of Artificial Sequence: Synthetic peptide
DQAWSVHMG

SEQ ID NO: 23395 - protein, 9 aa, Artificial Sequence
  Description of Artificial Sequence: Synthetic peptide
DQEWSVHMC

SEQ ID NO: 23396 - protein, 9 aa, Artificial Sequence
  Description of Artificial Sequence: Synthetic peptide
DQEWSVNMG

SEQ ID NO: 23397 - protein, 9 aa, Artificial Sequence
  Description of Artificial Sequence: Synthetic peptide
DQKWEKYGL

SEQ ID NO: 23398 - protein, 9 aa, Artificial Sequence
  Description of Artificial Sequence: Synthetic peptide
DQKWEKYGM

SEQ ID NO: 23399 - protein, 9 aa, Artificial Sequence
  Description of Artificial Sequence: Synthetic peptide
DQKWSVHMG

SEQ ID NO: 23400 - protein, 9 aa, Artificial Sequence
  Description of Artificial Sequence: Synthetic peptide
DQVWSVHMG

SEQ ID NO: 23401 - protein, 9 aa, Artificial Sequence
  Description of Artificial Sequence: Synthetic peptide
DREWSVHMG

SEQ ID NO: 23402 - protein, 9 aa, Artificial Sequence
  Description of Artificial Sequence: Synthetic peptide
DSKWLDRPV

SEQ ID NO: 23403 - protein, 9 aa, Artificial Sequence
  Description of Artificial Sequence: Synthetic peptide
DSSKVKLHH

SEQ ID NO: 23404 - protein, 9 aa, Artificial Sequence
  Description of Artificial Sequence: Synthetic peptide
DTDKKGQGI

SEQ ID NO: 23405 - protein, 9 aa, Artificial Sequence
  Description of Artificial Sequence: Synthetic peptide
DTDKQGQGF

SEQ ID NO: 23406 - protein, 9 aa, Artificial Sequence
  Description of Artificial Sequence: Synthetic peptide
DTDKQGQGL

SEQ ID NO: 23407 - protein, 9 aa, Artificial Sequence
  Description of Artificial Sequence: Synthetic peptide
DTDKQGQGM

SEQ ID NO: 23408 - protein, 9 aa, Artificial Sequence
  Description of Artificial Sequence: Synthetic peptide
DTDKQGQGV

SEQ ID NO: 23409 - protein, 9 aa, Artificial Sequence
  Description of Artificial Sequence: Synthetic peptide
DTDKQSQGI

SEQ ID NO: 23410 - protein, 9 aa, Artificial Sequence
  Description of Artificial Sequence: Synthetic peptide
DTNKQGQGI

SEQ ID NO: 23411 - protein, 9 aa, Artificial Sequence
  Description of Artificial Sequence: Synthetic peptide
DVDYRSKAW

SEQ ID NO: 23412 - protein, 9 aa, Artificial Sequence
  Description of Artificial Sequence: Synthetic peptide
DVDYRYEAW

SEQ ID NO: 23413 - protein, 9 aa, Artificial Sequence
  Description of Artificial Sequence: Synthetic peptide
DVFIDWSGR

SEQ ID NO: 23414 - protein, 9 aa, Artificial Sequence
  Description of Artificial Sequence: Synthetic peptide
DVKTDTSRD

SEQ ID NO: 23415 - protein, 9 aa, Artificial Sequence
  Description of Artificial Sequence: Synthetic peptide
DVRQILLCH

SEQ ID NO: 23416 - protein, 9 aa, Artificial Sequence
  Description of Artificial Sequence: Synthetic peptide
DVRQILVCH

SEQ ID NO: 23417 - protein, 9 aa, Artificial Sequence
  Description of Artificial Sequence: Synthetic peptide
DVRQIMMCH

SEQ ID NO: 23418 - protein, 9 aa, Artificial Sequence
  Description of Artificial Sequence: Synthetic peptide
DVRQLLMCH

SEQ ID NO: 23419 - protein, 9 aa, Artificial Sequence
  Description of Artificial Sequence: Synthetic peptide
DYFQYNEAR

SEQ ID NO: 23420 - protein, 9 aa, Artificial Sequence
  Description of Artificial Sequence: Synthetic peptide
DYYQYNEAP

SEQ ID NO: 23421 - protein, 9 aa, Artificial Sequence
  Description of Artificial Sequence: Synthetic peptide
EAISYVENV

SEQ ID NO: 23422 - protein, 9 aa, Artificial Sequence
  Description of Artificial Sequence: Synthetic peptide
ECDIFDGHQ

SEQ ID NO: 23423 - protein, 9 aa, Artificial Sequence
  Description of Artificial Sequence: Synthetic peptide
ECDILDGHQ

SEQ ID NO: 23424 - protein, 9 aa, Artificial Sequence
  Description of Artificial Sequence: Synthetic peptide
ECDRYIAEH

SEQ ID NO: 23425 - protein, 9 aa, Artificial Sequence
  Description of Artificial Sequence: Synthetic peptide
ECDRYIAQY

SEQ ID NO: 23426 - protein, 9 aa, Artificial Sequence
  Description of Artificial Sequence: Synthetic peptide
ECDRYISEY

SEQ ID NO: 23427 - protein, 9 aa, Artificial Sequence
  Description of Artificial Sequence: Synthetic peptide
ECGFIRLNE

SEQ ID NO: 23428 - protein, 9 aa, Artificial Sequence
  Description of Artificial Sequence: Synthetic peptide
ECKPIAGDR

SEQ ID NO: 23429 - protein, 9 aa, Artificial Sequence
  Description of Artificial Sequence: Synthetic peptide
ECYHVLANT

SEQ ID NO: 23430 - protein, 9 aa, Artificial Sequence
  Description of Artificial Sequence: Synthetic peptide
EDIHMIAGH

SEQ ID NO: 23431 - protein, 9 aa, Artificial Sequence
  Description of Artificial Sequence: Synthetic peptide
EDTHMIAGP

SEQ ID NO: 23432 - protein, 9 aa, Artificial Sequence
  Description of Artificial Sequence: Synthetic peptide
EDTHMIVGH

SEQ ID NO: 23433 - protein, 9 aa, Artificial Sequence
  Description of Artificial Sequence: Synthetic peptide
EEFDTIAAP

SEQ ID NO: 23434 - protein, 9 aa, Artificial Sequence
  Description of Artificial Sequence: Synthetic peptide
EEFDTLAAP

SEQ ID NO: 23435 - protein, 9 aa, Artificial Sequence
  Description of Artificial Sequence: Synthetic peptide
EEFDTVAAR

SEQ ID NO: 23436 - protein, 9 aa, Artificial Sequence
  Description of Artificial Sequence: Synthetic peptide
EEFDTVATP

SEQ ID NO: 23437 - protein, 9 aa, Artificial Sequence
  Description of Artificial Sequence: Synthetic peptide
EEFDTVGAP

SEQ ID NO: 23438 - protein, 9 aa, Artificial Sequence
  Description of Artificial Sequence: Synthetic peptide
EEYDTVAAP

SEQ ID NO: 23439 - protein, 9 aa, Artificial Sequence
  Description of Artificial Sequence: Synthetic peptide
EFDIDQCCT

SEQ ID NO: 23440 - protein, 9 aa, Artificial Sequence
  Description of Artificial Sequence: Synthetic peptide
EGDIFDGHQ

SEQ ID NO: 23441 - protein, 9 aa, Artificial Sequence
  Description of Artificial Sequence: Synthetic peptide
EGIWQGMDA

SEQ ID NO: 23442 - protein, 9 aa, Artificial Sequence
  Description of Artificial Sequence: Synthetic peptide
EHVIIEKNY

SEQ ID NO: 23443 - protein, 9 aa, Artificial Sequence
  Description of Artificial Sequence: Synthetic peptide
EHVILKKNY

SEQ ID NO: 23444 - protein, 9 aa, Artificial Sequence
  Description of Artificial Sequence: Synthetic peptide
EHVIMKKNY

SEQ ID NO: 23445 - protein, 9 aa, Artificial Sequence
  Description of Artificial Sequence: Synthetic peptide
EIKVVNSKD

SEQ ID NO: 23446 - protein, 9 aa, Artificial Sequence
  Description of Artificial Sequence: Synthetic peptide
EIKYRRCRA

SEQ ID NO: 23447 - protein, 9 aa, Artificial Sequence
  Description of Artificial Sequence: Synthetic peptide
EIKYRRFMA

SEQ ID NO: 23448 - protein, 9 aa, Artificial Sequence
  Description of Artificial Sequence: Synthetic peptide
EIKYRRSMA

SEQ ID NO: 23449 - protein, 9 aa, Artificial Sequence
  Description of Artificial Sequence: Synthetic peptide
EIREGEECC

SEQ ID NO: 23450 - protein, 9 aa, Artificial Sequence
  Description of Artificial Sequence: Synthetic peptide
EIRVVNSRD

SEQ ID NO: 23451 - protein, 9 aa, Artificial Sequence
  Description of Artificial Sequence: Synthetic peptide
EISPAAWMD

SEQ ID NO: 23452 - protein, 9 aa, Artificial Sequence
  Description of Artificial Sequence: Synthetic peptide
EKMESPECL

SEQ ID NO: 23453 - protein, 9 aa, Artificial Sequence
  Description of Artificial Sequence: Synthetic peptide
EKTWLVVWC

SEQ ID NO: 23454 - protein, 9 aa, Artificial Sequence
  Description of Artificial Sequence: Synthetic peptide
EMDAQGAMW

SEQ ID NO: 23455 - protein, 9 aa, Artificial Sequence
  Description of Artificial Sequence: Synthetic peptide
EMRMNIQCE

SEQ ID NO: 23456 - protein, 9 aa, Artificial Sequence
  Description of Artificial Sequence: Synthetic peptide
EPEGALDKT

SEQ ID NO: 23457 - protein, 9 aa, Artificial Sequence
  Description of Artificial Sequence: Synthetic peptide
EPEGELDRT

SEQ ID NO: 23458 - protein, 9 aa, Artificial Sequence
  Description of Artificial Sequence: Synthetic peptide
EPEGELYKT

SEQ ID NO: 23459 - protein, 9 aa, Artificial Sequence
  Description of Artificial Sequence: Synthetic peptide
EPEGEVDKT

SEQ ID NO: 23460 - protein, 9 aa, Artificial Sequence
  Description of Artificial Sequence: Synthetic peptide
EQEAYILRI

SEQ ID NO: 23461 - protein, 9 aa, Artificial Sequence
  Description of Artificial Sequence: Synthetic peptide
ESDIFDAHQ

SEQ ID NO: 23462 - protein, 9 aa, Artificial Sequence
  Description of Artificial Sequence: Synthetic peptide
ESDIFDGHE

SEQ ID NO: 23463 - protein, 9 aa, Artificial Sequence
  Description of Artificial Sequence: Synthetic peptide
ESDIFDGHK

SEQ ID NO: 23464 - protein, 9 aa, Artificial Sequence
  Description of Artificial Sequence: Synthetic peptide
ESDIFDGHP

SEQ ID NO: 23465 - protein, 9 aa, Artificial Sequence
  Description of Artificial Sequence: Synthetic peptide
ESDIFDGHR

SEQ ID NO: 23466 - protein, 9 aa, Artificial Sequence
  Description of Artificial Sequence: Synthetic peptide
ESDIFDGRQ

SEQ ID NO: 23467 - protein, 9 aa, Artificial Sequence
  Description of Artificial Sequence: Synthetic peptide
ESDIFDVHQ

SEQ ID NO: 23468 - protein, 9 aa, Artificial Sequence
  Description of Artificial Sequence: Synthetic peptide
ESDIFHGHQ

SEQ ID NO: 23469 - protein, 9 aa, Artificial Sequence
  Description of Artificial Sequence: Synthetic peptide
ESDIFVGHQ

SEQ ID NO: 23470 - protein, 9 aa, Artificial Sequence
  Description of Artificial Sequence: Synthetic peptide
ESDISDGHQ

SEQ ID NO: 23471 - protein, 9 aa, Artificial Sequence
  Description of Artificial Sequence: Synthetic peptide
ESDIVDGHP

SEQ ID NO: 23472 - protein, 9 aa, Artificial Sequence
  Description of Artificial Sequence: Synthetic peptide
ESDIVDGHQ

SEQ ID NO: 23473 - protein, 9 aa, Artificial Sequence
  Description of Artificial Sequence: Synthetic peptide
ESDPMQLFT

SEQ ID NO: 23474 - protein, 9 aa, Artificial Sequence
  Description of Artificial Sequence: Synthetic peptide
ESDPMQRFT

SEQ ID NO: 23475 - protein, 9 aa, Artificial Sequence
  Description of Artificial Sequence: Synthetic peptide
ESDVFEGHQ

SEQ ID NO: 23476 - protein, 9 aa, Artificial Sequence
  Description of Artificial Sequence: Synthetic peptide
ESKSCGLKG

SEQ ID NO: 23477 - protein, 9 aa, Artificial Sequence
  Description of Artificial Sequence: Synthetic peptide
ESKSCGLRG

SEQ ID NO: 23478 - protein, 9 aa, Artificial Sequence
  Description of Artificial Sequence: Synthetic peptide
ESNIFDGHQ

SEQ ID NO: 23479 - protein, 9 aa, Artificial Sequence
  Description of Artificial Sequence: Synthetic peptide
ESTSCGLTG

SEQ ID NO: 23480 - protein, 9 aa, Artificial Sequence
  Description of Artificial Sequence: Synthetic peptide
ESVDWIKCE

SEQ ID NO: 23481 - protein, 9 aa, Artificial Sequence
  Description of Artificial Sequence: Synthetic peptide
ESWPAAWMD

SEQ ID NO: 23482 - protein, 9 aa, Artificial Sequence
  Description of Artificial Sequence: Synthetic peptide
ETDIFDGHQ

SEQ ID NO: 23483 - protein, 9 aa, Artificial Sequence
  Description of Artificial Sequence: Synthetic peptide
EVEAIRGIR

SEQ ID NO: 23484 - protein, 9 aa, Artificial Sequence
  Description of Artificial Sequence: Synthetic peptide
EVEIFRLEG

SEQ ID NO: 23485 - protein, 9 aa, Artificial Sequence
  Description of Artificial Sequence: Synthetic peptide
EVIAYVENV

SEQ ID NO: 23486 - protein, 9 aa, Artificial Sequence
  Description of Artificial Sequence: Synthetic peptide
FDWMPQWVD

SEQ ID NO: 23487 - protein, 9 aa, Artificial Sequence
  Description of Artificial Sequence: Synthetic peptide
FGGQLRVMY

SEQ ID NO: 23488 - protein, 9 aa, Artificial Sequence
  Description of Artificial Sequence: Synthetic peptide
FGRERVWDS

SEQ ID NO: 23489 - protein, 9 aa, Artificial Sequence
  Description of Artificial Sequence: Synthetic peptide
FGSLYRRRG

SEQ ID NO: 23490 - protein, 9 aa, Artificial Sequence
  Description of Artificial Sequence: Synthetic peptide
FIGLRYKDQ

SEQ ID NO: 23491 - protein, 9 aa, Artificial Sequence
  Description of Artificial Sequence: Synthetic peptide
FKLWKLFQA

SEQ ID NO: 23492 - protein, 9 aa, Artificial Sequence
  Description of Artificial Sequence: Synthetic peptide
FKMDMTKRS

SEQ ID NO: 23493 - protein, 9 aa, Artificial Sequence
  Description of Artificial Sequence: Synthetic peptide
FKMWKLFKA

SEQ ID NO: 23494 - protein, 9 aa, Artificial Sequence
  Description of Artificial Sequence: Synthetic peptide
FKRWKLFQA

SEQ ID NO: 23495 - protein, 9 aa, Artificial Sequence
  Description of Artificial Sequence: Synthetic peptide
FNIPCLFSR

SEQ ID NO: 23496 - protein, 9 aa, Artificial Sequence
  Description of Artificial Sequence: Synthetic peptide
FNIQCLCSR

SEQ ID NO: 23497 - protein, 9 aa, Artificial Sequence
  Description of Artificial Sequence: Synthetic peptide
FNIQCLFTR

SEQ ID NO: 23498 - protein, 9 aa, Artificial Sequence
  Description of Artificial Sequence: Synthetic peptide
FNIQCLISR

SEQ ID NO: 23499 - protein, 9 aa, Artificial Sequence
  Description of Artificial Sequence: Synthetic peptide
FNIQCLYSR

SEQ ID NO: 23500 - protein, 9 aa, Artificial Sequence
  Description of Artificial Sequence: Synthetic peptide
FNIRCLFSR

SEQ ID NO: 23501 - protein, 9 aa, Artificial Sequence
  Description of Artificial Sequence: Synthetic peptide
FNLQCLFSR

SEQ ID NO: 23502 - protein, 9 aa, Artificial Sequence
  Description of Artificial Sequence: Synthetic peptide
FQTSMYCDW

SEQ ID NO: 23503 - protein, 9 aa, Artificial Sequence
  Description of Artificial Sequence: Synthetic peptide
FRGHAMWDA

SEQ ID NO: 23504 - protein, 9 aa, Artificial Sequence
  Description of Artificial Sequence: Synthetic peptide
FRGHGMWYA

SEQ ID NO: 23505 - protein, 9 aa, Artificial Sequence
  Description of Artificial Sequence: Synthetic peptide
FRGHGTWDA

SEQ ID NO: 23506 - protein, 9 aa, Artificial Sequence
  Description of Artificial Sequence: Synthetic peptide
FRGHGVWDA

SEQ ID NO: 23507 - protein, 9 aa, Artificial Sequence
  Description of Artificial Sequence: Synthetic peptide
FRGLGMWDA

SEQ ID NO: 23508 - protein, 9 aa, Artificial Sequence
  Description of Artificial Sequence: Synthetic peptide
FSEQNVSEA

SEQ ID NO: 23509 - protein, 9 aa, Artificial Sequence
  Description of Artificial Sequence: Synthetic peptide
FSIQCLFSR

SEQ ID NO: 23510 - protein, 9 aa, Artificial Sequence
  Description of Artificial Sequence: Synthetic peptide
FTEQIGRQM

SEQ ID NO: 23511 - protein, 9 aa, Artificial Sequence
  Description of Artificial Sequence: Synthetic peptide
FTQQIDRQM

SEQ ID NO: 23512 - protein, 9 aa, Artificial Sequence
  Description of Artificial Sequence: Synthetic peptide
FVCLRYKDQ

SEQ ID NO: 23513 - protein, 9 aa, Artificial Sequence
  Description of Artificial Sequence: Synthetic peptide
FVGWYLNSP

SEQ ID NO: 23514 - protein, 9 aa, Artificial Sequence
  Description of Artificial Sequence: Synthetic peptide
FVGWYWDSP

SEQ ID NO: 23515 - protein, 9 aa, Artificial Sequence
  Description of Artificial Sequence: Synthetic peptide
FVGWYWNPP

SEQ ID NO: 23516 - protein, 9 aa, Artificial Sequence
  Description of Artificial Sequence: Synthetic peptide
FVGWYWNSH

SEQ ID NO: 23517 - protein, 9 aa, Artificial Sequence
  Description of Artificial Sequence: Synthetic peptide
FVGWYWNSR

SEQ ID NO: 23518 - protein, 9 aa, Artificial Sequence
  Description of Artificial Sequence: Synthetic peptide
FVMGYNDCK

SEQ ID NO: 23519 - protein, 9 aa, Artificial Sequence
  Description of Artificial Sequence: Synthetic peptide
GCGLVQRFM

SEQ ID NO: 23520 - protein, 9 aa, Artificial Sequence
  Description of Artificial Sequence: Synthetic peptide
GHFTVLNWG

SEQ ID NO: 23521 - protein, 9 aa, Artificial Sequence
  Description of Artificial Sequence: Synthetic peptide
GNCKQDHCH

SEQ ID NO: 23522 - protein, 9 aa, Artificial Sequence
  Description of Artificial Sequence: Synthetic peptide
GRHTAVATG

SEQ ID NO: 23523 - protein, 9 aa, Artificial Sequence
  Description of Artificial Sequence: Synthetic peptide
GSERLYYCW

SEQ ID NO: 23524 - protein, 9 aa, Artificial Sequence
  Description of Artificial Sequence: Synthetic peptide
GSVMVAITG

SEQ ID NO: 23525 - protein, 9 aa, Artificial Sequence
  Description of Artificial Sequence: Synthetic peptide
GYGRMNKAS

SEQ ID NO: 23526 - protein, 9 aa, Artificial Sequence
  Description of Artificial Sequence: Synthetic peptide
HASICQGGD

SEQ ID NO: 23527 - protein, 9 aa, Artificial Sequence
  Description of Artificial Sequence: Synthetic peptide
HAYIYETWP

SEQ ID NO: 23528 - protein, 9 aa, Artificial Sequence
  Description of Artificial Sequence: Synthetic peptide
HDCDMQASE

SEQ ID NO: 23529 - protein, 9 aa, Artificial Sequence
  Description of Artificial Sequence: Synthetic peptide
HDKWGWWRE

SEQ ID NO: 23530 - protein, 9 aa, Artificial Sequence
  Description of Artificial Sequence: Synthetic peptide
HDRKACMIA

SEQ ID NO: 23531 - protein, 9 aa, Artificial Sequence
  Description of Artificial Sequence: Synthetic peptide
HDVMWQLIH

SEQ ID NO: 23532 - protein, 9 aa, Artificial Sequence
  Description of Artificial Sequence: Synthetic peptide
HDWMPQWVD

SEQ ID NO: 23533 - protein, 9 aa, Artificial Sequence
  Description of Artificial Sequence: Synthetic peptide
HEAKLVPKA

SEQ ID NO: 23534 - protein, 9 aa, Artificial Sequence
  Description of Artificial Sequence: Synthetic peptide
HEFIWLEMH

SEQ ID NO: 23535 - protein, 9 aa, Artificial Sequence
  Description of Artificial Sequence: Synthetic peptide
HEYIYETLP

SEQ ID NO: 23536 - protein, 9 aa, Artificial Sequence
  Description of Artificial Sequence: Synthetic peptide
HEYIYVTWP

SEQ ID NO: 23537 - protein, 9 aa, Artificial Sequence
  Description of Artificial Sequence: Synthetic peptide
HFDFNHQCQ

SEQ ID NO: 23538 - protein, 9 aa, Artificial Sequence
  Description of Artificial Sequence: Synthetic peptide
HFLEVAWGS

SEQ ID NO: 23539 - protein, 9 aa, Artificial Sequence
  Description of Artificial Sequence: Synthetic peptide
HHRHIANNG

SEQ ID NO: 23540 - protein, 9 aa, Artificial Sequence
  Description of Artificial Sequence: Synthetic peptide
HKHMILYHF

SEQ ID NO: 23541 - protein, 9 aa, Artificial Sequence
  Description of Artificial Sequence: Synthetic peptide
HMDIQMVMP

SEQ ID NO: 23542 - protein, 9 aa, Artificial Sequence
  Description of Artificial Sequence: Synthetic peptide
HMDIQMYMP

SEQ ID NO: 23543 - protein, 9 aa, Artificial Sequence
  Description of Artificial Sequence: Synthetic peptide
HMDIQVFMP

SEQ ID NO: 23544 - protein, 9 aa, Artificial Sequence
  Description of Artificial Sequence: Synthetic peptide
HMSIATWYP

SEQ ID NO: 23545 - protein, 9 aa, Artificial Sequence
  Description of Artificial Sequence: Synthetic peptide
HMTFYLSRD

SEQ ID NO: 23546 - protein, 9 aa, Artificial Sequence
  Description of Artificial Sequence: Synthetic peptide
HPSICEGGD

SEQ ID NO: 23547 - protein, 9 aa, Artificial Sequence
  Description of Artificial Sequence: Synthetic peptide
HSEMAMLMQ

SEQ ID NO: 23548 - protein, 9 aa, Artificial Sequence
  Description of Artificial Sequence: Synthetic peptide
HSEMVMWMQ

SEQ ID NO: 23549 - protein, 9 aa, Artificial Sequence
  Description of Artificial Sequence: Synthetic peptide
HSGELYDAF

SEQ ID NO: 23550 - protein, 9 aa, Artificial Sequence
  Description of Artificial Sequence: Synthetic peptide
HSGELYDCF

SEQ ID NO: 23551 - protein, 9 aa, Artificial Sequence
  Description of Artificial Sequence: Synthetic peptide
HSGELYDSF

SEQ ID NO: 23552 - protein, 9 aa, Artificial Sequence
  Description of Artificial Sequence: Synthetic peptide
HSGIHCCCG

SEQ ID NO: 23553 - protein, 9 aa, Artificial Sequence
  Description of Artificial Sequence: Synthetic peptide
HSNFFHLND

SEQ ID NO: 23554 - protein, 9 aa, Artificial Sequence
  Description of Artificial Sequence: Synthetic peptide
HSNFFHMTD

SEQ ID NO: 23555 - protein, 9 aa, Artificial Sequence
  Description of Artificial Sequence: Synthetic peptide
HVDGNIACN

SEQ ID NO: 23556 - protein, 9 aa, Artificial Sequence
  Description of Artificial Sequence: Synthetic peptide
HVDSNIACT

SEQ ID NO: 23557 - protein, 9 aa, Artificial Sequence
  Description of Artificial Sequence: Synthetic peptide
HVDSNISCN

SEQ ID NO: 23558 - protein, 9 aa, Artificial Sequence
  Description of Artificial Sequence: Synthetic peptide
HVDSNLACN

SEQ ID NO: 23559 - protein, 9 aa, Artificial Sequence
  Description of Artificial Sequence: Synthetic peptide
HVDSNVACN

SEQ ID NO: 23560 - protein, 9 aa, Artificial Sequence
  Description of Artificial Sequence: Synthetic peptide
HVNSNIACN

SEQ ID NO: 23561 - protein, 9 aa, Artificial Sequence
  Description of Artificial Sequence: Synthetic peptide
HYCKIIPCH

SEQ ID NO: 23562 - protein, 9 aa, Artificial Sequence
  Description of Artificial Sequence: Synthetic peptide
HYCKIIPSH

SEQ ID NO: 23563 - protein, 9 aa, Artificial Sequence
  Description of Artificial Sequence: Synthetic peptide
HYCKIIPYN

SEQ ID NO: 23564 - protein, 9 aa, Artificial Sequence
  Description of Artificial Sequence: Synthetic peptide
HYCKIITYH

SEQ ID NO: 23565 - protein, 9 aa, Artificial Sequence
  Description of Artificial Sequence: Synthetic peptide
HYCKILPYH

SEQ ID NO: 23566 - protein, 9 aa, Artificial Sequence
  Description of Artificial Sequence: Synthetic peptide
HYCKLIPYH

SEQ ID NO: 23567 - protein, 9 aa, Artificial Sequence
  Description of Artificial Sequence: Synthetic peptide
HYCKMIPYH

SEQ ID NO: 23568 - protein, 9 aa, Artificial Sequence
  Description of Artificial Sequence: Synthetic peptide
HYCKNIPYH

SEQ ID NO: 23569 - protein, 9 aa, Artificial Sequence
  Description of Artificial Sequence: Synthetic peptide
HYCKTIPYH

SEQ ID NO: 23570 - protein, 9 aa, Artificial Sequence
  Description of Artificial Sequence: Synthetic peptide
HYCMIIPYH

SEQ ID NO: 23571 - protein, 9 aa, Artificial Sequence
  Description of Artificial Sequence: Synthetic peptide
HYCQIIPYH

SEQ ID NO: 23572 - protein, 9 aa, Artificial Sequence
  Description of Artificial Sequence: Synthetic peptide
HYCRIIPYH

SEQ ID NO: 23573 - protein, 9 aa, Artificial Sequence
  Description of Artificial Sequence: Synthetic peptide
HYFKIIPYH

SEQ ID NO: 23574 - protein, 9 aa, Artificial Sequence
  Description of Artificial Sequence: Synthetic peptide
HYGKIIPYH

SEQ ID NO: 23575 - protein, 9 aa, Artificial Sequence
  Description of Artificial Sequence: Synthetic peptide
HYYKIIPYH

SEQ ID NO: 23576 - protein, 9 aa, Artificial Sequence
  Description of Artificial Sequence: Synthetic peptide
ICKIRSRLD

SEQ ID NO: 23577 - protein, 9 aa, Artificial Sequence
  Description of Artificial Sequence: Synthetic peptide
ICTIGSRLD

SEQ ID NO: 23578 - protein, 9 aa, Artificial Sequence
  Description of Artificial Sequence: Synthetic peptide
IDRKACMIA

SEQ ID NO: 23579 - protein, 9 aa, Artificial Sequence
  Description of Artificial Sequence: Synthetic peptide
IGVQFLKDH

SEQ ID NO: 23580 - protein, 9 aa, Artificial Sequence
  Description of Artificial Sequence: Synthetic peptide
IIGDKTQDD

SEQ ID NO: 23581 - protein, 9 aa, Artificial Sequence
  Description of Artificial Sequence: Synthetic peptide
IIRDKTEDD

SEQ ID NO: 23582 - protein, 9 aa, Artificial Sequence
  Description of Artificial Sequence: Synthetic peptide
IIRDKTQDG

SEQ ID NO: 23583 - protein, 9 aa, Artificial Sequence
  Description of Artificial Sequence: Synthetic peptide
IIRDKTQND

SEQ ID NO: 23584 - protein, 9 aa, Artificial Sequence
  Description of Artificial Sequence: Synthetic peptide
IIRDKTRDD

SEQ ID NO: 23585 - protein, 9 aa, Artificial Sequence
  Description of Artificial Sequence: Synthetic peptide
IIRDRTQDD

SEQ ID NO: 23586 - protein, 9 aa, Artificial Sequence
  Description of Artificial Sequence: Synthetic peptide
IIRDTTQDD

SEQ ID NO: 23587 - protein, 9 aa, Artificial Sequence
  Description of Artificial Sequence: Synthetic peptide
IIREKTQDD

SEQ ID NO: 23588 - protein, 9 aa, Artificial Sequence
  Description of Artificial Sequence: Synthetic peptide
IIRGKTQDD

SEQ ID NO: 23589 - protein, 9 aa, Artificial Sequence
  Description of Artificial Sequence: Synthetic peptide
IIRYKTQDD

SEQ ID NO: 23590 - protein, 9 aa, Artificial Sequence
  Description of Artificial Sequence: Synthetic peptide
IMRDKTQDD

SEQ ID NO: 23591 - protein, 9 aa, Artificial Sequence
  Description of Artificial Sequence: Synthetic peptide
IPRTYQEMQ

SEQ ID NO: 23592 - protein, 9 aa, Artificial Sequence
  Description of Artificial Sequence: Synthetic peptide
IQHQSRRHM

SEQ ID NO: 23593 - protein, 9 aa, Artificial Sequence
  Description of Artificial Sequence: Synthetic peptide
IQLKAVPSC

SEQ ID NO: 23594 - protein, 9 aa, Artificial Sequence
  Description of Artificial Sequence: Synthetic peptide
IQLKAVTCC

SEQ ID NO: 23595 - protein, 9 aa, Artificial Sequence
  Description of Artificial Sequence: Synthetic peptide
IQLKTVTSC

SEQ ID NO: 23596 - protein, 9 aa, Artificial Sequence
  Description of Artificial Sequence: Synthetic peptide
IRGHGMWDA

SEQ ID NO: 23597 - protein, 9 aa, Artificial Sequence
  Description of Artificial Sequence: Synthetic peptide
IRLKAVTSC

SEQ ID NO: 23598 - protein, 9 aa, Artificial Sequence
  Description of Artificial Sequence: Synthetic peptide
IRRHQMTDK

SEQ ID NO: 23599 - protein, 9 aa, Artificial Sequence
  Description of Artificial Sequence: Synthetic peptide
ISRDKTQDD

SEQ ID NO: 23600 - protein, 9 aa, Artificial Sequence
  Description of Artificial Sequence: Synthetic peptide
ITRTYQEME

SEQ ID NO: 23601 - protein, 9 aa, Artificial Sequence
  Description of Artificial Sequence: Synthetic peptide
ITRTYQEMK

SEQ ID NO: 23602 - protein, 9 aa, Artificial Sequence
  Description of Artificial Sequence: Synthetic peptide
ITRTYQERQ

SEQ ID NO: 23603 - protein, 9 aa, Artificial Sequence
  Description of Artificial Sequence: Synthetic peptide
IVRDKTQDD

SEQ ID NO: 23604 - protein, 9 aa, Artificial Sequence
  Description of Artificial Sequence: Synthetic peptide
KANMWLACV

SEQ ID NO: 23605 - protein, 9 aa, Artificial Sequence
  Description of Artificial Sequence: Synthetic peptide
KCGFIRLNE

SEQ ID NO: 23606 - protein, 9 aa, Artificial Sequence
  Description of Artificial Sequence: Synthetic peptide
KCVIGKGRR

SEQ ID NO: 23607 - protein, 9 aa, Artificial Sequence
  Description of Artificial Sequence: Synthetic peptide
KDFWEHECF

SEQ ID NO: 23608 - protein, 9 aa, Artificial Sequence
  Description of Artificial Sequence: Synthetic peptide
KDFWEHLCF

SEQ ID NO: 23609 - protein, 9 aa, Artificial Sequence
  Description of Artificial Sequence: Synthetic peptide
KDFWEHQCV

SEQ ID NO: 23610 - protein, 9 aa, Artificial Sequence
  Description of Artificial Sequence: Synthetic peptide
KDFWERQCF

SEQ ID NO: 23611 - protein, 9 aa, Artificial Sequence
  Description of Artificial Sequence: Synthetic peptide
KDFWEYQCF

SEQ ID NO: 23612 - protein, 9 aa, Artificial Sequence
  Description of Artificial Sequence: Synthetic peptide
KDFWGHQCF

SEQ ID NO: 23613 - protein, 9 aa, Artificial Sequence
  Description of Artificial Sequence: Synthetic peptide
KDFWKHQCF

SEQ ID NO: 23614 - protein, 9 aa, Artificial Sequence
  Description of Artificial Sequence: Synthetic peptide
KDRMGINQC

SEQ ID NO: 23615 - protein, 9 aa, Artificial Sequence
  Description of Artificial Sequence: Synthetic peptide
KDRMGLNQR

SEQ ID NO: 23616 - protein, 9 aa, Artificial Sequence
  Description of Artificial Sequence: Synthetic peptide
KDRMGLNQW

SEQ ID NO: 23617 - protein, 9 aa, Artificial Sequence
  Description of Artificial Sequence: Synthetic peptide
KDRMVLNQC

SEQ ID NO: 23618 - protein, 9 aa, Artificial Sequence
  Description of Artificial Sequence: Synthetic peptide
KDTHMIAGH

SEQ ID NO: 23619 - protein, 9 aa, Artificial Sequence
  Description of Artificial Sequence: Synthetic peptide
KDVTRLRCP

SEQ ID NO: 23620 - protein, 9 aa, Artificial Sequence
  Description of Artificial Sequence: Synthetic peptide
KDVWEHQCF

SEQ ID NO: 23621 - protein, 9 aa, Artificial Sequence
  Description of Artificial Sequence: Synthetic peptide
KEFDTVAAP

SEQ ID NO: 23622 - protein, 9 aa, Artificial Sequence
  Description of Artificial Sequence: Synthetic peptide
KFDIDQCCT

SEQ ID NO: 23623 - protein, 9 aa, Artificial Sequence
  Description of Artificial Sequence: Synthetic peptide
KKFWDTVIY

SEQ ID NO: 23624 - protein, 9 aa, Artificial Sequence
  Description of Artificial Sequence: Synthetic peptide
KKHMILCHF

SEQ ID NO: 23625 - protein, 9 aa, Artificial Sequence
  Description of Artificial Sequence: Synthetic peptide
KQTQIRRHM

SEQ ID NO: 23626 - protein, 9 aa, Artificial Sequence
  Description of Artificial Sequence: Synthetic peptide
KSDIFDGHQ

SEQ ID NO: 23627 - protein, 9 aa, Artificial Sequence
  Description of Artificial Sequence: Synthetic peptide
KSVDWIKCE

SEQ ID NO: 23628 - protein, 9 aa, Artificial Sequence
  Description of Artificial Sequence: Synthetic peptide
KYAYILDCA

SEQ ID NO: 23629 - protein, 9 aa, Artificial Sequence
  Description of Artificial Sequence: Synthetic peptide
KYAYSLYCA

SEQ ID NO: 23630 - protein, 9 aa, Artificial Sequence
  Description of Artificial Sequence: Synthetic peptide
KYGYSLDCA

SEQ ID NO: 23631 - protein, 9 aa, Artificial Sequence
  Description of Artificial Sequence: Synthetic peptide
KYTYSLDCA

SEQ ID NO: 23632 - protein, 9 aa, Artificial Sequence
  Description of Artificial Sequence: Synthetic peptide
KYWNYAEAK

SEQ ID NO: 23633 - protein, 9 aa, Artificial Sequence
  Description of Artificial Sequence: Synthetic peptide
LADIEYSHD

SEQ ID NO: 23634 - protein, 9 aa, Artificial Sequence
  Description of Artificial Sequence: Synthetic peptide
LAGKEGAHF

SEQ ID NO: 23635 - protein, 9 aa, Artificial Sequence
  Description of Artificial Sequence: Synthetic peptide
LCASRGLDA

SEQ ID NO: 23636 - protein, 9 aa, Artificial Sequence
  Description of Artificial Sequence: Synthetic peptide
LCGAIIKAS

SEQ ID NO: 23637 - protein, 9 aa, Artificial Sequence
  Description of Artificial Sequence: Synthetic peptide
LCGLIIKAS

SEQ ID NO: 23638 - protein, 9 aa, Artificial Sequence
  Description of Artificial Sequence: Synthetic peptide
LCGPIIKAA

SEQ ID NO: 23639 - protein, 9 aa, Artificial Sequence
  Description of Artificial Sequence: Synthetic peptide
LCGPIIKAP

SEQ ID NO: 23640 - protein, 9 aa, Artificial Sequence
  Description of Artificial Sequence: Synthetic peptide
LCGPIIKAY

SEQ ID NO: 23641 - protein, 9 aa, Artificial Sequence
  Description of Artificial Sequence: Synthetic peptide
LCGPIIKPS

SEQ ID NO: 23642 - protein, 9 aa, Artificial Sequence
  Description of Artificial Sequence: Synthetic peptide
LCGPIIKSS

SEQ ID NO: 23643 - protein, 9 aa, Artificial Sequence
  Description of Artificial Sequence: Synthetic peptide
LCGPIIRAS

SEQ ID NO: 23644 - protein, 9 aa, Artificial Sequence
  Description of Artificial Sequence: Synthetic peptide
LCGPILKAS

SEQ ID NO: 23645 - protein, 9 aa, Artificial Sequence
  Description of Artificial Sequence: Synthetic peptide
LCGPIVKAS

SEQ ID NO: 23646 - protein, 9 aa, Artificial Sequence
  Description of Artificial Sequence: Synthetic peptide
LCGPLIKAS

SEQ ID NO: 23647 - protein, 9 aa, Artificial Sequence
  Description of Artificial Sequence: Synthetic peptide
LCGQIIKAS

SEQ ID NO: 23648 - protein, 9 aa, Artificial Sequence
  Description of Artificial Sequence: Synthetic peptide
LCTSRGLDP

SEQ ID NO: 23649 - protein, 9 aa, Artificial Sequence
  Description of Artificial Sequence: Synthetic peptide
LDRKACLIA

SEQ ID NO: 23650 - protein, 9 aa, Artificial Sequence
  Description of Artificial Sequence: Synthetic peptide
LDRKACMIG

SEQ ID NO: 23651 - protein, 9 aa, Artificial Sequence
  Description of Artificial Sequence: Synthetic peptide
LDRKACMIS

SEQ ID NO: 23652 - protein, 9 aa, Artificial Sequence
  Description of Artificial Sequence: Synthetic peptide
LDRKACMMA

SEQ ID NO: 23653 - protein, 9 aa, Artificial Sequence
  Description of Artificial Sequence: Synthetic peptide
LDRKACMVA

SEQ ID NO: 23654 - protein, 9 aa, Artificial Sequence
  Description of Artificial Sequence: Synthetic peptide
LDRKACVIA

SEQ ID NO: 23655 - protein, 9 aa, Artificial Sequence
  Description of Artificial Sequence: Synthetic peptide
LDRKAFMIA

SEQ ID NO: 23656 - protein, 9 aa, Artificial Sequence
  Description of Artificial Sequence: Synthetic peptide
LDRKAWMIA

SEQ ID NO: 23657 - protein, 9 aa, Artificial Sequence
  Description of Artificial Sequence: Synthetic peptide
LDRKDCMIA

SEQ ID NO: 23658 - protein, 9 aa, Artificial Sequence
  Description of Artificial Sequence: Synthetic peptide
LDRKPCMIA

SEQ ID NO: 23659 - protein, 9 aa, Artificial Sequence
  Description of Artificial Sequence: Synthetic peptide
LDRKSCMIA

SEQ ID NO: 23660 - protein, 9 aa, Artificial Sequence
  Description of Artificial Sequence: Synthetic peptide
LDRKVCMIA

SEQ ID NO: 23661 - protein, 9 aa, Artificial Sequence
  Description of Artificial Sequence: Synthetic peptide
LDRQACMIA

SEQ ID NO: 23662 - protein, 9 aa, Artificial Sequence
  Description of Artificial Sequence: Synthetic peptide
LDRRACMIA

SEQ ID NO: 23663 - protein, 9 aa, Artificial Sequence
  Description of Artificial Sequence: Synthetic peptide
LFTDYWEQG

SEQ ID NO: 23664 - protein, 9 aa, Artificial Sequence
  Description of Artificial Sequence: Synthetic peptide
LGILYRRRG

SEQ ID NO: 23665 - protein, 9 aa, Artificial Sequence
  Description of Artificial Sequence: Synthetic peptide
LGSPYRRRG

SEQ ID NO: 23666 - protein, 9 aa, Artificial Sequence
  Description of Artificial Sequence: Synthetic peptide
LIRDKTQDD

SEQ ID NO: 23667 - protein, 9 aa, Artificial Sequence
  Description of Artificial Sequence: Synthetic peptide
LKAQFHWGA

SEQ ID NO: 23668 - protein, 9 aa, Artificial Sequence
  Description of Artificial Sequence: Synthetic peptide
LKDQFHWCA

SEQ ID NO: 23669 - protein, 9 aa, Artificial Sequence
  Description of Artificial Sequence: Synthetic peptide
LKDRFHWGA

SEQ ID NO: 23670 - protein, 9 aa, Artificial Sequence
  Description of Artificial Sequence: Synthetic peptide
LKMDMTKHS

SEQ ID NO: 23671 - protein, 9 aa, Artificial Sequence
  Description of Artificial Sequence: Synthetic peptide
LKVDMTKRS

SEQ ID NO: 23672 - protein, 9 aa, Artificial Sequence
  Description of Artificial Sequence: Synthetic peptide
LLFFMKFAK

SEQ ID NO: 23673 - protein, 9 aa, Artificial Sequence
  Description of Artificial Sequence: Synthetic peptide
LQMDMTKRS

SEQ ID NO: 23674 - protein, 9 aa, Artificial Sequence
  Description of Artificial Sequence: Synthetic peptide
LQPQMRRHM

SEQ ID NO: 23675 - protein, 9 aa, Artificial Sequence
  Description of Artificial Sequence: Synthetic peptide
LQPQNRRHM

SEQ ID NO: 23676 - protein, 9 aa, Artificial Sequence
  Description of Artificial Sequence: Synthetic peptide
LQPQSRRHV

SEQ ID NO: 23677 - protein, 9 aa, Artificial Sequence
  Description of Artificial Sequence: Synthetic peptide
LRCQMGDHW

SEQ ID NO: 23678 - protein, 9 aa, Artificial Sequence
  Description of Artificial Sequence: Synthetic peptide
LRMDMTKRS

SEQ ID NO: 23679 - protein, 9 aa, Artificial Sequence
  Description of Artificial Sequence: Synthetic peptide
LRVIQGDNY

SEQ ID NO: 23680 - protein, 9 aa, Artificial Sequence
  Description of Artificial Sequence: Synthetic peptide
LTHKRESEW

SEQ ID NO: 23681 - protein, 9 aa, Artificial Sequence
  Description of Artificial Sequence: Synthetic peptide
LTPKRESEC

SEQ ID NO: 23682 - protein, 9 aa, Artificial Sequence
  Description of Artificial Sequence: Synthetic peptide
LTRKRESEC

SEQ ID NO: 23683 - protein, 9 aa, Artificial Sequence
  Description of Artificial Sequence: Synthetic peptide
LWFYMKFAK

SEQ ID NO: 23684 - protein, 9 aa, Artificial Sequence
  Description of Artificial Sequence: Synthetic peptide
MANKWLACV

SEQ ID NO: 23685 - protein, 9 aa, Artificial Sequence
  Description of Artificial Sequence: Synthetic peptide
MANRWLACV

SEQ ID NO: 23686 - protein, 9 aa, Artificial Sequence
  Description of Artificial Sequence: Synthetic peptide
MASMWLACV

SEQ ID NO: 23687 - protein, 9 aa, Artificial Sequence
  Description of Artificial Sequence: Synthetic peptide
MATMWLACV

SEQ ID NO: 23688 - protein, 9 aa, Artificial Sequence
  Description of Artificial Sequence: Synthetic peptide
MCGLRYYWA

SEQ ID NO: 23689 - protein, 9 aa, Artificial Sequence
  Description of Artificial Sequence: Synthetic peptide
MCGPIIKAS

SEQ ID NO: 23690 - protein, 9 aa, Artificial Sequence
  Description of Artificial Sequence: Synthetic peptide
MCLLIRACE

SEQ ID NO: 23691 - protein, 9 aa, Artificial Sequence
  Description of Artificial Sequence: Synthetic peptide
MCLWILACE

SEQ ID NO: 23692 - protein, 9 aa, Artificial Sequence
  Description of Artificial Sequence: Synthetic peptide
MCLWIRPCE

SEQ ID NO: 23693 - protein, 9 aa, Artificial Sequence
  Description of Artificial Sequence: Synthetic peptide
MCRHIIPDN

SEQ ID NO: 23694 - protein, 9 aa, Artificial Sequence
  Description of Artificial Sequence: Synthetic peptide
MEHQSRRHM

SEQ ID NO: 23695 - protein, 9 aa, Artificial Sequence
  Description of Artificial Sequence: Synthetic peptide
MEPESRRHM

SEQ ID NO: 23696 - protein, 9 aa, Artificial Sequence
  Description of Artificial Sequence: Synthetic peptide
MEPQSRRHI

SEQ ID NO: 23697 - protein, 9 aa, Artificial Sequence
  Description of Artificial Sequence: Synthetic peptide
MEPQSRRHM

SEQ ID NO: 23698 - protein, 9 aa, Artificial Sequence
  Description of Artificial Sequence: Synthetic peptide
MFEKYFQSM

SEQ ID NO: 23699 - protein, 9 aa, Artificial Sequence
  Description of Artificial Sequence: Synthetic peptide
MFMKDELIA

SEQ ID NO: 23700 - protein, 9 aa, Artificial Sequence
  Description of Artificial Sequence: Synthetic peptide
MFMKNELMA

SEQ ID NO: 23701 - protein, 9 aa, Artificial Sequence
  Description of Artificial Sequence: Synthetic peptide
MHKHFEDHK

SEQ ID NO: 23702 - protein, 9 aa, Artificial Sequence
  Description of Artificial Sequence: Synthetic peptide
MHKHFKGHK

SEQ ID NO: 23703 - protein, 9 aa, Artificial Sequence
  Description of Artificial Sequence: Synthetic peptide
MHKHYKDHK

SEQ ID NO: 23704 - protein, 9 aa, Artificial Sequence
  Description of Artificial Sequence: Synthetic peptide
MHKRFKDHK

SEQ ID NO: 23705 - protein, 9 aa, Artificial Sequence
  Description of Artificial Sequence: Synthetic peptide
MHLLKDFCT

SEQ ID NO: 23706 - protein, 9 aa, Artificial Sequence
  Description of Artificial Sequence: Synthetic peptide
MHQHFKDHK

SEQ ID NO: 23707 - protein, 9 aa, Artificial Sequence
  Description of Artificial Sequence: Synthetic peptide
MHRHFKDHK

SEQ ID NO: 23708 - protein, 9 aa, Artificial Sequence
  Description of Artificial Sequence: Synthetic peptide
MIDWGNKCT

SEQ ID NO: 23709 - protein, 9 aa, Artificial Sequence
  Description of Artificial Sequence: Synthetic peptide
MKPQGRRHM

SEQ ID NO: 23710 - protein, 9 aa, Artificial Sequence
  Description of Artificial Sequence: Synthetic peptide
MKPQSRRHL

SEQ ID NO: 23711 - protein, 9 aa, Artificial Sequence
  Description of Artificial Sequence: Synthetic peptide
MLAGWWQDT

SEQ ID NO: 23712 - protein, 9 aa, Artificial Sequence
  Description of Artificial Sequence: Synthetic peptide
MLGEWWPGC

SEQ ID NO: 23713 - protein, 9 aa, Artificial Sequence
  Description of Artificial Sequence: Synthetic peptide
MLNWGNKCT

SEQ ID NO: 23714 - protein, 9 aa, Artificial Sequence
  Description of Artificial Sequence: Synthetic peptide
MNKHFKDHK

SEQ ID NO: 23715 - protein, 9 aa, Artificial Sequence
  Description of Artificial Sequence: Synthetic peptide
MPKHFKDHK

SEQ ID NO: 23716 - protein, 9 aa, Artificial Sequence
  Description of Artificial Sequence: Synthetic peptide
MQHLSRRHM

SEQ ID NO: 23717 - protein, 9 aa, Artificial Sequence
  Description of Artificial Sequence: Synthetic peptide
MQHQCRRHM

SEQ ID NO: 23718 - protein, 9 aa, Artificial Sequence
  Description of Artificial Sequence: Synthetic peptide
MQHRSRRHM

SEQ ID NO: 23719 - protein, 9 aa, Artificial Sequence
  Description of Artificial Sequence: Synthetic peptide
MQLQCRRHM

SEQ ID NO: 23720 - protein, 9 aa, Artificial Sequence
  Description of Artificial Sequence: Synthetic peptide
MQLRSRRHM

SEQ ID NO: 23721 - protein, 9 aa, Artificial Sequence
  Description of Artificial Sequence: Synthetic peptide
MQPDSRRHM

SEQ ID NO: 23722 - protein, 9 aa, Artificial Sequence
  Description of Artificial Sequence: Synthetic peptide
MQPHIRRHM

SEQ ID NO: 23723 - protein, 9 aa, Artificial Sequence
  Description of Artificial Sequence: Synthetic peptide
MQPHSRRDM

SEQ ID NO: 23724 - protein, 9 aa, Artificial Sequence
  Description of Artificial Sequence: Synthetic peptide
MQPLSRRHM

SEQ ID NO: 23725 - protein, 9 aa, Artificial Sequence
  Description of Artificial Sequence: Synthetic peptide
MQPPSRRRM

SEQ ID NO: 23726 - protein, 9 aa, Artificial Sequence
  Description of Artificial Sequence: Synthetic peptide
MQPQFRRHM

SEQ ID NO: 23727 - protein, 9 aa, Artificial Sequence
  Description of Artificial Sequence: Synthetic peptide
MQPQSRRDM

SEQ ID NO: 23728 - protein, 9 aa, Artificial Sequence
  Description of Artificial Sequence: Synthetic peptide
MQPQSRRHK

SEQ ID NO: 23729 - protein, 9 aa, Artificial Sequence
  Description of Artificial Sequence: Synthetic peptide
MQPQSRRNM

SEQ ID NO: 23730 - protein, 9 aa, Artificial Sequence
  Description of Artificial Sequence: Synthetic peptide
MQPRGRRHM

SEQ ID NO: 23731 - protein, 9 aa, Artificial Sequence
  Description of Artificial Sequence: Synthetic peptide
MQPRSRRHM

SEQ ID NO: 23732 - protein, 9 aa, Artificial Sequence
  Description of Artificial Sequence: Synthetic peptide
MQRRSRRHM

SEQ ID NO: 23733 - protein, 9 aa, Artificial Sequence
  Description of Artificial Sequence: Synthetic peptide
MQTESRRHM

SEQ ID NO: 23734 - protein, 9 aa, Artificial Sequence
  Description of Artificial Sequence: Synthetic peptide
MQTQSLRHM

SEQ ID NO: 23735 - protein, 9 aa, Artificial Sequence
  Description of Artificial Sequence: Synthetic peptide
MQTQSRRNM

SEQ ID NO: 23736 - protein, 9 aa, Artificial Sequence
  Description of Artificial Sequence: Synthetic peptide
MRIIQGDNY

SEQ ID NO: 23737 - protein, 9 aa, Artificial Sequence
  Description of Artificial Sequence: Synthetic peptide
MRPQCRRHM

SEQ ID NO: 23738 - protein, 9 aa, Artificial Sequence
  Description of Artificial Sequence: Synthetic peptide
MRPQSRRHK

SEQ ID NO: 23739 - protein, 9 aa, Artificial Sequence
  Description of Artificial Sequence: Synthetic peptide
MRPQSRRHM

SEQ ID NO: 23740 - protein, 9 aa, Artificial Sequence
  Description of Artificial Sequence: Synthetic peptide
MRPQSRRHR

SEQ ID NO: 23741 - protein, 9 aa, Artificial Sequence
  Description of Artificial Sequence: Synthetic peptide
MRVIQGDNC

SEQ ID NO: 23742 - protein, 9 aa, Artificial Sequence
  Description of Artificial Sequence: Synthetic peptide
MSNMWLACV

SEQ ID NO: 23743 - protein, 9 aa, Artificial Sequence
  Description of Artificial Sequence: Synthetic peptide
MSPKPAYWG

SEQ ID NO: 23744 - protein, 9 aa, Artificial Sequence
  Description of Artificial Sequence: Synthetic peptide
MSTKPAYWA

SEQ ID NO: 23745 - protein, 9 aa, Artificial Sequence
  Description of Artificial Sequence: Synthetic peptide
MSTKPEYWG

SEQ ID NO: 23746 - protein, 9 aa, Artificial Sequence
  Description of Artificial Sequence: Synthetic peptide
MTAKMAGRM

SEQ ID NO: 23747 - protein, 9 aa, Artificial Sequence
  Description of Artificial Sequence: Synthetic peptide
MTNMWLACV

SEQ ID NO: 23748 - protein, 9 aa, Artificial Sequence
  Description of Artificial Sequence: Synthetic peptide
MVAIKQYHT

SEQ ID NO: 23749 - protein, 9 aa, Artificial Sequence
  Description of Artificial Sequence: Synthetic peptide
MVGVTRDAS

SEQ ID NO: 23750 - protein, 9 aa, Artificial Sequence
  Description of Artificial Sequence: Synthetic peptide
MVVIKQYQT

SEQ ID NO: 23751 - protein, 9 aa, Artificial Sequence
  Description of Artificial Sequence: Synthetic peptide
MVVIKRYHT

SEQ ID NO: 23752 - protein, 9 aa, Artificial Sequence
  Description of Artificial Sequence: Synthetic peptide
MWFFMKFAK

SEQ ID NO: 23753 - protein, 9 aa, Artificial Sequence
  Description of Artificial Sequence: Synthetic peptide
MWGEWWPGG

SEQ ID NO: 23754 - protein, 9 aa, Artificial Sequence
  Description of Artificial Sequence: Synthetic peptide
MWVIQGDNY

SEQ ID NO: 23755 - protein, 9 aa, Artificial Sequence
  Description of Artificial Sequence: Synthetic peptide
MYKHFKDHK

SEQ ID NO: 23756 - protein, 9 aa, Artificial Sequence
  Description of Artificial Sequence: Synthetic peptide
NDGMVHNCW

SEQ ID NO: 23757 - protein, 9 aa, Artificial Sequence
  Description of Artificial Sequence: Synthetic peptide
NDHWHAWFM

SEQ ID NO: 23758 - protein, 9 aa, Artificial Sequence
  Description of Artificial Sequence: Synthetic peptide
NDKWGWWRQ

SEQ ID NO: 23759 - protein, 9 aa, Artificial Sequence
  Description of Artificial Sequence: Synthetic peptide
NDLMWQLIH

SEQ ID NO: 23760 - protein, 9 aa, Artificial Sequence
  Description of Artificial Sequence: Synthetic peptide
NDNWDAWFM

SEQ ID NO: 23761 - protein, 9 aa, Artificial Sequence
  Description of Artificial Sequence: Synthetic peptide
NDNWHAWFR

SEQ ID NO: 23762 - protein, 9 aa, Artificial Sequence
  Description of Artificial Sequence: Synthetic peptide
NDNWHAWFV

SEQ ID NO: 23763 - protein, 9 aa, Artificial Sequence
  Description of Artificial Sequence: Synthetic peptide
NDNWHAWIM

SEQ ID NO: 23764 - protein, 9 aa, Artificial Sequence
  Description of Artificial Sequence: Synthetic peptide
NDNWHEWFM

SEQ ID NO: 23765 - protein, 9 aa, Artificial Sequence
  Description of Artificial Sequence: Synthetic peptide
NDVMWELIH

SEQ ID NO: 23766 - protein, 9 aa, Artificial Sequence
  Description of Artificial Sequence: Synthetic peptide
NDVMWHLIH

SEQ ID NO: 23767 - protein, 9 aa, Artificial Sequence
  Description of Artificial Sequence: Synthetic peptide
NDVMWQLIR

SEQ ID NO: 23768 - protein, 9 aa, Artificial Sequence
  Description of Artificial Sequence: Synthetic peptide
NDVMWQLIY

SEQ ID NO: 23769 - protein, 9 aa, Artificial Sequence
  Description of Artificial Sequence: Synthetic peptide
NDVMWQLVH

SEQ ID NO: 23770 - protein, 9 aa, Artificial Sequence
  Description of Artificial Sequence: Synthetic peptide
NDWMPQWVD

SEQ ID NO: 23771 - protein, 9 aa, Artificial Sequence
  Description of Artificial Sequence: Synthetic peptide
NEISNQNTY

SEQ ID NO: 23772 - protein, 9 aa, Artificial Sequence
  Description of Artificial Sequence: Synthetic peptide
NFDFNHQCH

SEQ ID NO: 23773 - protein, 9 aa, Artificial Sequence
  Description of Artificial Sequence: Synthetic peptide
NFGIYHLQG

SEQ ID NO: 23774 - protein, 9 aa, Artificial Sequence
  Description of Artificial Sequence: Synthetic peptide
NKHCIAMPC

SEQ ID NO: 23775 - protein, 9 aa, Artificial Sequence
  Description of Artificial Sequence: Synthetic peptide
NKYCIAMAC

SEQ ID NO: 23776 - protein, 9 aa, Artificial Sequence
  Description of Artificial Sequence: Synthetic peptide
NKYCIAMPF

SEQ ID NO: 23777 - protein, 9 aa, Artificial Sequence
  Description of Artificial Sequence: Synthetic peptide
NKYCITMPC

SEQ ID NO: 23778 - protein, 9 aa, Artificial Sequence
  Description of Artificial Sequence: Synthetic peptide
NKYCLAMPC

SEQ ID NO: 23779 - protein, 9 aa, Artificial Sequence
  Description of Artificial Sequence: Synthetic peptide
NMDAQGAMW

SEQ ID NO: 23780 - protein, 9 aa, Artificial Sequence
  Description of Artificial Sequence: Synthetic peptide
NNGEWDVCY

SEQ ID NO: 23781 - protein, 9 aa, Artificial Sequence
  Description of Artificial Sequence: Synthetic peptide
NPKWEKYGM

SEQ ID NO: 23782 - protein, 9 aa, Artificial Sequence
  Description of Artificial Sequence: Synthetic peptide
NQDWLLSVP

SEQ ID NO: 23783 - protein, 9 aa, Artificial Sequence
  Description of Artificial Sequence: Synthetic peptide
NQEWSVHMG

SEQ ID NO: 23784 - protein, 9 aa, Artificial Sequence
  Description of Artificial Sequence: Synthetic peptide
NVDVRESEW

SEQ ID NO: 23785 - protein, 9 aa, Artificial Sequence
  Description of Artificial Sequence: Synthetic peptide
NWHEKRHRG

SEQ ID NO: 23786 - protein, 9 aa, Artificial Sequence
  Description of Artificial Sequence: Synthetic peptide
NYKPSFLTR

SEQ ID NO: 23787 - protein, 9 aa, Artificial Sequence
  Description of Artificial Sequence: Synthetic peptide
PCAIEESHD

SEQ ID NO: 23788 - protein, 9 aa, Artificial Sequence
  Description of Artificial Sequence: Synthetic peptide
PCDRFMAMY

SEQ ID NO: 23789 - protein, 9 aa, Artificial Sequence
  Description of Artificial Sequence: Synthetic peptide
PEDFENHDG

SEQ ID NO: 23790 - protein, 9 aa, Artificial Sequence
  Description of Artificial Sequence: Synthetic peptide
PLRAEMSFH

SEQ ID NO: 23791 - protein, 9 aa, Artificial Sequence
  Description of Artificial Sequence: Synthetic peptide
QCDRVWLNQ

SEQ ID NO: 23792 - protein, 9 aa, Artificial Sequence
  Description of Artificial Sequence: Synthetic peptide
QCEFIRLNE

SEQ ID NO: 23793 - protein, 9 aa, Artificial Sequence
  Description of Artificial Sequence: Synthetic peptide
QCGFIRLDG

SEQ ID NO: 23794 - protein, 9 aa, Artificial Sequence
  Description of Artificial Sequence: Synthetic peptide
QCGFIRLHE

SEQ ID NO: 23795 - protein, 9 aa, Artificial Sequence
  Description of Artificial Sequence: Synthetic peptide
QCGFIRLNG

SEQ ID NO: 23796 - protein, 9 aa, Artificial Sequence
  Description of Artificial Sequence: Synthetic peptide
QCGFIRLNQ

SEQ ID NO: 23797 - protein, 9 aa, Artificial Sequence
  Description of Artificial Sequence: Synthetic peptide
QCGFIRVNE

SEQ ID NO: 23798 - protein, 9 aa, Artificial Sequence
  Description of Artificial Sequence: Synthetic peptide
QCGFLRLNE

SEQ ID NO: 23799 - protein, 9 aa, Artificial Sequence
  Description of Artificial Sequence: Synthetic peptide
QCHIIVAPE

SEQ ID NO: 23800 - protein, 9 aa, Artificial Sequence
  Description of Artificial Sequence: Synthetic peptide
QCHIMVARE

SEQ ID NO: 23801 - protein, 9 aa, Artificial Sequence
  Description of Artificial Sequence: Synthetic peptide
QCHINVARE

SEQ ID NO: 23802 - protein, 9 aa, Artificial Sequence
  Description of Artificial Sequence: Synthetic peptide
QCPIIVARE

SEQ ID NO: 23803 - protein, 9 aa, Artificial Sequence
  Description of Artificial Sequence: Synthetic peptide
QDFWEHQCF

SEQ ID NO: 23804 - protein, 9 aa, Artificial Sequence
  Description of Artificial Sequence: Synthetic peptide
QEFDTVAAP

SEQ ID NO: 23805 - protein, 9 aa, Artificial Sequence
  Description of Artificial Sequence: Synthetic peptide
QEHMILCHF

SEQ ID NO: 23806 - protein, 9 aa, Artificial Sequence
  Description of Artificial Sequence: Synthetic peptide
QETWLVVWC

SEQ ID NO: 23807 - protein, 9 aa, Artificial Sequence
  Description of Artificial Sequence: Synthetic peptide
QFGFIRLNE

SEQ ID NO: 23808 - protein, 9 aa, Artificial Sequence
  Description of Artificial Sequence: Synthetic peptide
QFHIDQCCT

SEQ ID NO: 23809 - protein, 9 aa, Artificial Sequence
  Description of Artificial Sequence: Synthetic peptide
QGGFIRLNA

SEQ ID NO: 23810 - protein, 9 aa, Artificial Sequence
  Description of Artificial Sequence: Synthetic peptide
QGGFIRLNG

SEQ ID NO: 23811 - protein, 9 aa, Artificial Sequence
  Description of Artificial Sequence: Synthetic peptide
QIGCNVMIS

SEQ ID NO: 23812 - protein, 9 aa, Artificial Sequence
  Description of Artificial Sequence: Synthetic peptide
QIGFNVMLS

SEQ ID NO: 23813 - protein, 9 aa, Artificial Sequence
  Description of Artificial Sequence: Synthetic peptide
QIKYRRCMA

SEQ ID NO: 23814 - protein, 9 aa, Artificial Sequence
  Description of Artificial Sequence: Synthetic peptide
QIWPAAWMD

SEQ ID NO: 23815 - protein, 9 aa, Artificial Sequence
  Description of Artificial Sequence: Synthetic peptide
QKDMIICHF

SEQ ID NO: 23816 - protein, 9 aa, Artificial Sequence
  Description of Artificial Sequence: Synthetic peptide
QKDMILCHF

SEQ ID NO: 23817 - protein, 9 aa, Artificial Sequence
  Description of Artificial Sequence: Synthetic peptide
QKDWGRRVT

SEQ ID NO: 23818 - protein, 9 aa, Artificial Sequence
  Description of Artificial Sequence: Synthetic peptide
QKEAYILRI

SEQ ID NO: 23819 - protein, 9 aa, Artificial Sequence
  Description of Artificial Sequence: Synthetic peptide
QKHMIICHF

SEQ ID NO: 23820 - protein, 9 aa, Artificial Sequence
  Description of Artificial Sequence: Synthetic peptide
QKHMILCGF

SEQ ID NO: 23821 - protein, 9 aa, Artificial Sequence
  Description of Artificial Sequence: Synthetic peptide
QKHMILCRF

SEQ ID NO: 23822 - protein, 9 aa, Artificial Sequence
  Description of Artificial Sequence: Synthetic peptide
QKHMILCYF

SEQ ID NO: 23823 - protein, 9 aa, Artificial Sequence
  Description of Artificial Sequence: Synthetic peptide
QKHMLLCHF

SEQ ID NO: 23824 - protein, 9 aa, Artificial Sequence
  Description of Artificial Sequence: Synthetic peptide
QKHMMLCHF

SEQ ID NO: 23825 - protein, 9 aa, Artificial Sequence
  Description of Artificial Sequence: Synthetic peptide
QKHMSLCHF

SEQ ID NO: 23826 - protein, 9 aa, Artificial Sequence
  Description of Artificial Sequence: Synthetic peptide
QKHMTLCHF

SEQ ID NO: 23827 - protein, 9 aa, Artificial Sequence
  Description of Artificial Sequence: Synthetic peptide
QKHRILCHF

SEQ ID NO: 23828 - protein, 9 aa, Artificial Sequence
  Description of Artificial Sequence: Synthetic peptide
QKHRLLCHF

SEQ ID NO: 23829 - protein, 9 aa, Artificial Sequence
  Description of Artificial Sequence: Synthetic peptide
QKHTILCHF

SEQ ID NO: 23830 - protein, 9 aa, Artificial Sequence
  Description of Artificial Sequence: Synthetic peptide
QKHVILCHF

SEQ ID NO: 23831 - protein, 9 aa, Artificial Sequence
  Description of Artificial Sequence: Synthetic peptide
QKIWLVVWC

SEQ ID NO: 23832 - protein, 9 aa, Artificial Sequence
  Description of Artificial Sequence: Synthetic peptide
QKKMILCHF

SEQ ID NO: 23833 - protein, 9 aa, Artificial Sequence
  Description of Artificial Sequence: Synthetic peptide
QKNMILCHF

SEQ ID NO: 23834 - protein, 9 aa, Artificial Sequence
  Description of Artificial Sequence: Synthetic peptide
QKPMILCHF

SEQ ID NO: 23835 - protein, 9 aa, Artificial Sequence
  Description of Artificial Sequence: Synthetic peptide
QKPWLVVWC

SEQ ID NO: 23836 - protein, 9 aa, Artificial Sequence
  Description of Artificial Sequence: Synthetic peptide
QKRMILCHF

SEQ ID NO: 23837 - protein, 9 aa, Artificial Sequence
  Description of Artificial Sequence: Synthetic peptide
QKTWLIVWC

SEQ ID NO: 23838 - protein, 9 aa, Artificial Sequence
  Description of Artificial Sequence: Synthetic peptide
QKTWLVGWC

SEQ ID NO: 23839 - protein, 9 aa, Artificial Sequence
  Description of Artificial Sequence: Synthetic peptide
QKTWLVVWF

SEQ ID NO: 23840 - protein, 9 aa, Artificial Sequence
  Description of Artificial Sequence: Synthetic peptide
QKTWLVVWV

SEQ ID NO: 23841 - protein, 9 aa, Artificial Sequence
  Description of Artificial Sequence: Synthetic peptide
QKTWLVVWY

SEQ ID NO: 23842 - protein, 9 aa, Artificial Sequence
  Description of Artificial Sequence: Synthetic peptide
QNYWCVCGA

SEQ ID NO: 23843 - protein, 9 aa, Artificial Sequence
  Description of Artificial Sequence: Synthetic peptide
QPDPMKQWS

SEQ ID NO: 23844 - protein, 9 aa, Artificial Sequence
  Description of Artificial Sequence: Synthetic peptide
QPKEWVIKD

SEQ ID NO: 23845 - protein, 9 aa, Artificial Sequence
  Description of Artificial Sequence: Synthetic peptide
QPREWVIKE

SEQ ID NO: 23846 - protein, 9 aa, Artificial Sequence
  Description of Artificial Sequence: Synthetic peptide
QQDPMKQWT

SEQ ID NO: 23847 - protein, 9 aa, Artificial Sequence
  Description of Artificial Sequence: Synthetic peptide
QQEACILRI

SEQ ID NO: 23848 - protein, 9 aa, Artificial Sequence
  Description of Artificial Sequence: Synthetic peptide
QQEAFILRI

SEQ ID NO: 23849 - protein, 9 aa, Artificial Sequence
  Description of Artificial Sequence: Synthetic peptide
QQEAYILKI

SEQ ID NO: 23850 - protein, 9 aa, Artificial Sequence
  Description of Artificial Sequence: Synthetic peptide
QQEAYILRL

SEQ ID NO: 23851 - protein, 9 aa, Artificial Sequence
  Description of Artificial Sequence: Synthetic peptide
QQEAYILRV

SEQ ID NO: 23852 - protein, 9 aa, Artificial Sequence
  Description of Artificial Sequence: Synthetic peptide
QQEEYILRI

SEQ ID NO: 23853 - protein, 9 aa, Artificial Sequence
  Description of Artificial Sequence: Synthetic peptide
QQEGYILRI

SEQ ID NO: 23854 - protein, 9 aa, Artificial Sequence
  Description of Artificial Sequence: Synthetic peptide
QQESYILRI

SEQ ID NO: 23855 - protein, 9 aa, Artificial Sequence
  Description of Artificial Sequence: Synthetic peptide
QQEVYILRI

SEQ ID NO: 23856 - protein, 9 aa, Artificial Sequence
  Description of Artificial Sequence: Synthetic peptide
QQHMILCHF

SEQ ID NO: 23857 - protein, 9 aa, Artificial Sequence
  Description of Artificial Sequence: Synthetic peptide
QSDDWIKCE

SEQ ID NO: 23858 - protein, 9 aa, Artificial Sequence
  Description of Artificial Sequence: Synthetic peptide
QSDIFDGHQ

SEQ ID NO: 23859 - protein, 9 aa, Artificial Sequence
  Description of Artificial Sequence: Synthetic peptide
QSDRVWLNP

SEQ ID NO: 23860 - protein, 9 aa, Artificial Sequence
  Description of Artificial Sequence: Synthetic peptide
QSEMAMWMQ

SEQ ID NO: 23861 - protein, 9 aa, Artificial Sequence
  Description of Artificial Sequence: Synthetic peptide
QSGWLLEAK

SEQ ID NO: 23862 - protein, 9 aa, Artificial Sequence
  Description of Artificial Sequence: Synthetic peptide
QSIDWIKCE

SEQ ID NO: 23863 - protein, 9 aa, Artificial Sequence
  Description of Artificial Sequence: Synthetic peptide
QSLDWIKCE

SEQ ID NO: 23864 - protein, 9 aa, Artificial Sequence
  Description of Artificial Sequence: Synthetic peptide
QSVDWIKGE

SEQ ID NO: 23865 - protein, 9 aa, Artificial Sequence
  Description of Artificial Sequence: Synthetic peptide
QSVDWIKYE

SEQ ID NO: 23866 - protein, 9 aa, Artificial Sequence
  Description of Artificial Sequence: Synthetic peptide
QSVDWIQCE

SEQ ID NO: 23867 - protein, 9 aa, Artificial Sequence
  Description of Artificial Sequence: Synthetic peptide
QSVDWIRCE

SEQ ID NO: 23868 - protein, 9 aa, Artificial Sequence
  Description of Artificial Sequence: Synthetic peptide
QSVDWLKCE

SEQ ID NO: 23869 - protein, 9 aa, Artificial Sequence
  Description of Artificial Sequence: Synthetic peptide
QSVDWMKCE

SEQ ID NO: 23870 - protein, 9 aa, Artificial Sequence
  Description of Artificial Sequence: Synthetic peptide
QSVDWVKCE

SEQ ID NO: 23871 - protein, 9 aa, Artificial Sequence
  Description of Artificial Sequence: Synthetic peptide
QSVVWIKCE

SEQ ID NO: 23872 - protein, 9 aa, Artificial Sequence
  Description of Artificial Sequence: Synthetic peptide
QSVYWIKCE

SEQ ID NO: 23873 - protein, 9 aa, Artificial Sequence
  Description of Artificial Sequence: Synthetic peptide
QVKYRTCDW

SEQ ID NO: 23874 - protein, 9 aa, Artificial Sequence
  Description of Artificial Sequence: Synthetic peptide
QVTSDGKIV

SEQ ID NO: 23875 - protein, 9 aa, Artificial Sequence
  Description of Artificial Sequence: Synthetic peptide
QYSRMNKAS

SEQ ID NO: 23876 - protein, 9 aa, Artificial Sequence
  Description of Artificial Sequence: Synthetic peptide
RAKTCIYKY

SEQ ID NO: 23877 - protein, 9 aa, Artificial Sequence
  Description of Artificial Sequence: Synthetic peptide
RAKTCLYKC

SEQ ID NO: 23878 - protein, 9 aa, Artificial Sequence
  Description of Artificial Sequence: Synthetic peptide
RCDGLWCHF

SEQ ID NO: 23879 - protein, 9 aa, Artificial Sequence
  Description of Artificial Sequence: Synthetic peptide
RCGFIRLNE

SEQ ID NO: 23880 - protein, 9 aa, Artificial Sequence
  Description of Artificial Sequence: Synthetic peptide
RCGFIRLNG

SEQ ID NO: 23881 - protein, 9 aa, Artificial Sequence
  Description of Artificial Sequence: Synthetic peptide
RCMKLVGTA

SEQ ID NO: 23882 - protein, 9 aa, Artificial Sequence
  Description of Artificial Sequence: Synthetic peptide
RCRNCGSNG

SEQ ID NO: 23883 - protein, 9 aa, Artificial Sequence
  Description of Artificial Sequence: Synthetic peptide
RDFWEHQCF

SEQ ID NO: 23884 - protein, 9 aa, Artificial Sequence
  Description of Artificial Sequence: Synthetic peptide
RDQCVASCA

SEQ ID NO: 23885 - protein, 9 aa, Artificial Sequence
  Description of Artificial Sequence: Synthetic peptide
REAKVFEIK

SEQ ID NO: 23886 - protein, 9 aa, Artificial Sequence
  Description of Artificial Sequence: Synthetic peptide
REAKVFEPK

SEQ ID NO: 23887 - protein, 9 aa, Artificial Sequence
  Description of Artificial Sequence: Synthetic peptide
REPKVFELK

SEQ ID NO: 23888 - protein, 9 aa, Artificial Sequence
  Description of Artificial Sequence: Synthetic peptide
RESKVFELK

SEQ ID NO: 23889 - protein, 9 aa, Artificial Sequence
  Description of Artificial Sequence: Synthetic peptide
RETKVFELK

SEQ ID NO: 23890 - protein, 9 aa, Artificial Sequence
  Description of Artificial Sequence: Synthetic peptide
RFKLLMTGR

SEQ ID NO: 23891 - protein, 9 aa, Artificial Sequence
  Description of Artificial Sequence: Synthetic peptide
RKTWLVVWC

SEQ ID NO: 23892 - protein, 9 aa, Artificial Sequence
  Description of Artificial Sequence: Synthetic peptide
RLKPSAVQR

SEQ ID NO: 23893 - protein, 9 aa, Artificial Sequence
  Description of Artificial Sequence: Synthetic peptide
RLRNCGSNG

SEQ ID NO: 23894 - protein, 9 aa, Artificial Sequence
  Description of Artificial Sequence: Synthetic peptide
RLVRDSKNT

SEQ ID NO: 23895 - protein, 9 aa, Artificial Sequence
  Description of Artificial Sequence: Synthetic peptide
RLVRDSKTN

SEQ ID NO: 23896 - protein, 9 aa, Artificial Sequence
  Description of Artificial Sequence: Synthetic peptide
RMIQPEHVV

SEQ ID NO: 23897 - protein, 9 aa, Artificial Sequence
  Description of Artificial Sequence: Synthetic peptide
RMKWYLLCV

SEQ ID NO: 23898 - protein, 9 aa, Artificial Sequence
  Description of Artificial Sequence: Synthetic peptide
RMKWYLTCV

SEQ ID NO: 23899 - protein, 9 aa, Artificial Sequence
  Description of Artificial Sequence: Synthetic peptide
RMPIELMHG

SEQ ID NO: 23900 - protein, 9 aa, Artificial Sequence
  Description of Artificial Sequence: Synthetic peptide
RNNWKVDSQ

SEQ ID NO: 23901 - protein, 9 aa, Artificial Sequence
  Description of Artificial Sequence: Synthetic peptide
RNNWKVNSR

SEQ ID NO: 23902 - protein, 9 aa, Artificial Sequence
  Description of Artificial Sequence: Synthetic peptide
RNYWCMCGA

SEQ ID NO: 23903 - protein, 9 aa, Artificial Sequence
  Description of Artificial Sequence: Synthetic peptide
RPATVHASF

SEQ ID NO: 23904 - protein, 9 aa, Artificial Sequence
  Description of Artificial Sequence: Synthetic peptide
RPEMVHASF

SEQ ID NO: 23905 - protein, 9 aa, Artificial Sequence
  Description of Artificial Sequence: Synthetic peptide
RPERVHASF

SEQ ID NO: 23906 - protein, 9 aa, Artificial Sequence
  Description of Artificial Sequence: Synthetic peptide
RQEAYILRI

SEQ ID NO: 23907 - protein, 9 aa, Artificial Sequence
  Description of Artificial Sequence: Synthetic peptide
RQGCLLAWQ

SEQ ID NO: 23908 - protein, 9 aa, Artificial Sequence
  Description of Artificial Sequence: Synthetic peptide
RQPQSRRHM

SEQ ID NO: 23909 - protein, 9 aa, Artificial Sequence
  Description of Artificial Sequence: Synthetic peptide
RRDELLIPD

SEQ ID NO: 23910 - protein, 9 aa, Artificial Sequence
  Description of Artificial Sequence: Synthetic peptide
RRIELLIPD

SEQ ID NO: 23911 - protein, 9 aa, Artificial Sequence
  Description of Artificial Sequence: Synthetic peptide
RRKWYLPCV

SEQ ID NO: 23912 - protein, 9 aa, Artificial Sequence
  Description of Artificial Sequence: Synthetic peptide
RRNELLLPD

SEQ ID NO: 23913 - protein, 9 aa, Artificial Sequence
  Description of Artificial Sequence: Synthetic peptide
RRSELLIPD

SEQ ID NO: 23914 - protein, 9 aa, Artificial Sequence
  Description of Artificial Sequence: Synthetic peptide
RRTELLIPD

SEQ ID NO: 23915 - protein, 9 aa, Artificial Sequence
  Description of Artificial Sequence: Synthetic peptide
RSVDWIKCE

SEQ ID NO: 23916 - protein, 9 aa, Artificial Sequence
  Description of Artificial Sequence: Synthetic peptide
RVADLMYIG

SEQ ID NO: 23917 - protein, 9 aa, Artificial Sequence
  Description of Artificial Sequence: Synthetic peptide
RVGDVMYIG

SEQ ID NO: 23918 - protein, 9 aa, Artificial Sequence
  Description of Artificial Sequence: Synthetic peptide
RVSDVMYIG

SEQ ID NO: 23919 - protein, 9 aa, Artificial Sequence
  Description of Artificial Sequence: Synthetic peptide
RVTDVMYIG

SEQ ID NO: 23920 - protein, 9 aa, Artificial Sequence
  Description of Artificial Sequence: Synthetic peptide
RVVRDSKNN

SEQ ID NO: 23921 - protein, 9 aa, Artificial Sequence
  Description of Artificial Sequence: Synthetic peptide
RWGFIRLNE

SEQ ID NO: 23922 - protein, 9 aa, Artificial Sequence
  Description of Artificial Sequence: Synthetic peptide
RWRHCGSNG

SEQ ID NO: 23923 - protein, 9 aa, Artificial Sequence
  Description of Artificial Sequence: Synthetic peptide
RWRICGSNG

SEQ ID NO: 23924 - protein, 9 aa, Artificial Sequence
  Description of Artificial Sequence: Synthetic peptide
RWRNCGGNG

SEQ ID NO: 23925 - protein, 9 aa, Artificial Sequence
  Description of Artificial Sequence: Synthetic peptide
RWRNCGNNG

SEQ ID NO: 23926 - protein, 9 aa, Artificial Sequence
  Description of Artificial Sequence: Synthetic peptide
RWRNCGSNA

SEQ ID NO: 23927 - protein, 9 aa, Artificial Sequence
  Description of Artificial Sequence: Synthetic peptide
RWRNCSSNG

SEQ ID NO: 23928 - protein, 9 aa, Artificial Sequence
  Description of Artificial Sequence: Synthetic peptide
RWRNGGSNG

SEQ ID NO: 23929 - protein, 9 aa, Artificial Sequence
  Description of Artificial Sequence: Synthetic peptide
RWRSCGSNG

SEQ ID NO: 23930 - protein, 9 aa, Artificial Sequence
  Description of Artificial Sequence: Synthetic peptide
RYCKIIPYH

SEQ ID NO: 23931 - protein, 9 aa, Artificial Sequence
  Description of Artificial Sequence: Synthetic peptide
RYWNYAEAK

SEQ ID NO: 23932 - protein, 9 aa, Artificial Sequence
  Description of Artificial Sequence: Synthetic peptide
SAGIFYAHK

SEQ ID NO: 23933 - protein, 9 aa, Artificial Sequence
  Description of Artificial Sequence: Synthetic peptide
SAYIFYAHK

SEQ ID NO: 23934 - protein, 9 aa, Artificial Sequence
  Description of Artificial Sequence: Synthetic peptide
SCGLVERFM

SEQ ID NO: 23935 - protein, 9 aa, Artificial Sequence
  Description of Artificial Sequence: Synthetic peptide
SDQCQWWCM

SEQ ID NO: 23936 - protein, 9 aa, Artificial Sequence
  Description of Artificial Sequence: Synthetic peptide
SGGLVQRFM

SEQ ID NO: 23937 - protein, 9 aa, Artificial Sequence
  Description of Artificial Sequence: Synthetic peptide
SGNIYESGQ

SEQ ID NO: 23938 - protein, 9 aa, Artificial Sequence
  Description of Artificial Sequence: Synthetic peptide
SIRDKTQDD

SEQ ID NO: 23939 - protein, 9 aa, Artificial Sequence
  Description of Artificial Sequence: Synthetic peptide
SIRQFMMHL

SEQ ID NO: 23940 - protein, 9 aa, Artificial Sequence
  Description of Artificial Sequence: Synthetic peptide
SIRQYMMHL

SEQ ID NO: 23941 - protein, 9 aa, Artificial Sequence
  Description of Artificial Sequence: Synthetic peptide
SKGCIIAMQ

SEQ ID NO: 23942 - protein, 9 aa, Artificial Sequence
  Description of Artificial Sequence: Synthetic peptide
SQVSTLNGM

SEQ ID NO: 23943 - protein, 9 aa, Artificial Sequence
  Description of Artificial Sequence: Synthetic peptide
SSHAANFCG

SEQ ID NO: 23944 - protein, 9 aa, Artificial Sequence
  Description of Artificial Sequence: Synthetic peptide
SSHATTFCG

SEQ ID NO: 23945 - protein, 9 aa, Artificial Sequence
  Description of Artificial Sequence: Synthetic peptide
SSKYEMKFL

SEQ ID NO: 23946 - protein, 9 aa, Artificial Sequence
  Description of Artificial Sequence: Synthetic peptide
STDKDIEMD

SEQ ID NO: 23947 - protein, 9 aa, Artificial Sequence
  Description of Artificial Sequence: Synthetic peptide
STHKDIEMG

SEQ ID NO: 23948 - protein, 9 aa, Artificial Sequence
  Description of Artificial Sequence: Synthetic peptide
STHKDIEMN

SEQ ID NO: 23949 - protein, 9 aa, Artificial Sequence
  Description of Artificial Sequence: Synthetic peptide
STHKDIVMD

SEQ ID NO: 23950 - protein, 9 aa, Artificial Sequence
  Description of Artificial Sequence: Synthetic peptide
STTQWGVCN

SEQ ID NO: 23951 - protein, 9 aa, Artificial Sequence
  Description of Artificial Sequence: Synthetic peptide
SWHEKRHRG

SEQ ID NO: 23952 - protein, 9 aa, Artificial Sequence
  Description of Artificial Sequence: Synthetic peptide
SWSMQSKST

SEQ ID NO: 23953 - protein, 9 aa, Artificial Sequence
  Description of Artificial Sequence: Synthetic peptide
SYGQIEGYQ

SEQ ID NO: 23954 - protein, 9 aa, Artificial Sequence
  Description of Artificial Sequence: Synthetic peptide
TCAVFVIHC

SEQ ID NO: 23955 - protein, 9 aa, Artificial Sequence
  Description of Artificial Sequence: Synthetic peptide
TCDRFMAMY

SEQ ID NO: 23956 - protein, 9 aa, Artificial Sequence
  Description of Artificial Sequence: Synthetic peptide
TCFIGKGRR

SEQ ID NO: 23957 - protein, 9 aa, Artificial Sequence
  Description of Artificial Sequence: Synthetic peptide
TCGIGKGRR

SEQ ID NO: 23958 - protein, 9 aa, Artificial Sequence
  Description of Artificial Sequence: Synthetic peptide
TCIIGKGRR

SEQ ID NO: 23959 - protein, 9 aa, Artificial Sequence
  Description of Artificial Sequence: Synthetic peptide
TCIIGQGRR

SEQ ID NO: 23960 - protein, 9 aa, Artificial Sequence
  Description of Artificial Sequence: Synthetic peptide
TCLIGKGRR

SEQ ID NO: 23961 - protein, 9 aa, Artificial Sequence
  Description of Artificial Sequence: Synthetic peptide
TCVIAKGRR

SEQ ID NO: 23962 - protein, 9 aa, Artificial Sequence
  Description of Artificial Sequence: Synthetic peptide
TCVIEKGRR

SEQ ID NO: 23963 - protein, 9 aa, Artificial Sequence
  Description of Artificial Sequence: Synthetic peptide
TCVIGKGQR

SEQ ID NO: 23964 - protein, 9 aa, Artificial Sequence
  Description of Artificial Sequence: Synthetic peptide
TCVIGQGRR

SEQ ID NO: 23965 - protein, 9 aa, Artificial Sequence
  Description of Artificial Sequence: Synthetic peptide
TCVIGRGRR

SEQ ID NO: 23966 - protein, 9 aa, Artificial Sequence
  Description of Artificial Sequence: Synthetic peptide
TCVIVKGRR

SEQ ID NO: 23967 - protein, 9 aa, Artificial Sequence
  Description of Artificial Sequence: Synthetic peptide
TEDFENHDA

SEQ ID NO: 23968 - protein, 9 aa, Artificial Sequence
  Description of Artificial Sequence: Synthetic peptide
TIRQFMMHL

SEQ ID NO: 23969 - protein, 9 aa, Artificial Sequence
  Description of Artificial Sequence: Synthetic peptide
TKGCIIDMQ

SEQ ID NO: 23970 - protein, 9 aa, Artificial Sequence
  Description of Artificial Sequence: Synthetic peptide
TKLNCVYYG

SEQ ID NO: 23971 - protein, 9 aa, Artificial Sequence
  Description of Artificial Sequence: Synthetic peptide
TKVNCIYYG

SEQ ID NO: 23972 - protein, 9 aa, Artificial Sequence
  Description of Artificial Sequence: Synthetic peptide
TLRAAMSFH

SEQ ID NO: 23973 - protein, 9 aa, Artificial Sequence
  Description of Artificial Sequence: Synthetic peptide
TLRAEMSFR

SEQ ID NO: 23974 - protein, 9 aa, Artificial Sequence
  Description of Artificial Sequence: Synthetic peptide
TLRAEMSIH

SEQ ID NO: 23975 - protein, 9 aa, Artificial Sequence
  Description of Artificial Sequence: Synthetic peptide
TLRAVMSFH

SEQ ID NO: 23976 - protein, 9 aa, Artificial Sequence
  Description of Artificial Sequence: Synthetic peptide
TNCKQDHCH

SEQ ID NO: 23977 - protein, 9 aa, Artificial Sequence
  Description of Artificial Sequence: Synthetic peptide
TRVNCVYYG

SEQ ID NO: 23978 - protein, 9 aa, Artificial Sequence
  Description of Artificial Sequence: Synthetic peptide
TSERLYYCW

SEQ ID NO: 23979 - protein, 9 aa, Artificial Sequence
  Description of Artificial Sequence: Synthetic peptide
TSHATNFCG

SEQ ID NO: 23980 - protein, 9 aa, Artificial Sequence
  Description of Artificial Sequence: Synthetic peptide
TSNKDQRYY

SEQ ID NO: 23981 - protein, 9 aa, Artificial Sequence
  Description of Artificial Sequence: Synthetic peptide
TSSKDQRYY

SEQ ID NO: 23982 - protein, 9 aa, Artificial Sequence
  Description of Artificial Sequence: Synthetic peptide
TSYKDERYY

SEQ ID NO: 23983 - protein, 9 aa, Artificial Sequence
  Description of Artificial Sequence: Synthetic peptide
TSYKNQRYY

SEQ ID NO: 23984 - protein, 9 aa, Artificial Sequence
  Description of Artificial Sequence: Synthetic peptide
TTTQWGMCN

SEQ ID NO: 23985 - protein, 9 aa, Artificial Sequence
  Description of Artificial Sequence: Synthetic peptide
TVLAWGLCN

SEQ ID NO: 23986 - protein, 9 aa, Artificial Sequence
  Description of Artificial Sequence: Synthetic peptide
TVRADMSFH

SEQ ID NO: 23987 - protein, 9 aa, Artificial Sequence
  Description of Artificial Sequence: Synthetic peptide
TYKPSFWTR

SEQ ID NO: 23988 - protein, 9 aa, Artificial Sequence
  Description of Artificial Sequence: Synthetic peptide
TYWNYAESK

SEQ ID NO: 23989 - protein, 9 aa, Artificial Sequence
  Description of Artificial Sequence: Synthetic peptide
VASKTLWET

SEQ ID NO: 23990 - protein, 9 aa, Artificial Sequence
  Description of Artificial Sequence: Synthetic peptide
VCFKLFHVG

SEQ ID NO: 23991 - protein, 9 aa, Artificial Sequence
  Description of Artificial Sequence: Synthetic peptide
VDRKACMIA

SEQ ID NO: 23992 - protein, 9 aa, Artificial Sequence
  Description of Artificial Sequence: Synthetic peptide
VFTDYWEKG

SEQ ID NO: 23993 - protein, 9 aa, Artificial Sequence
  Description of Artificial Sequence: Synthetic peptide
VFTDYWERG

SEQ ID NO: 23994 - protein, 9 aa, Artificial Sequence
  Description of Artificial Sequence: Synthetic peptide
VFVGKNAAW

SEQ ID NO: 23995 - protein, 9 aa, Artificial Sequence
  Description of Artificial Sequence: Synthetic peptide
VGSLYRRRG

SEQ ID NO: 23996 - protein, 9 aa, Artificial Sequence
  Description of Artificial Sequence: Synthetic peptide
VIRDKTQDD

SEQ ID NO: 23997 - protein, 9 aa, Artificial Sequence
  Description of Artificial Sequence: Synthetic peptide
VLDAIHWHW

SEQ ID NO: 23998 - protein, 9 aa, Artificial Sequence
  Description of Artificial Sequence: Synthetic peptide
VQPESRRHM

SEQ ID NO: 23999 - protein, 9 aa, Artificial Sequence
  Description of Artificial Sequence: Synthetic peptide
VRFTVLNWG

SEQ ID NO: 24000 - protein, 9 aa, Artificial Sequence
  Description of Artificial Sequence: Synthetic peptide
VRIQPQHNK

SEQ ID NO: 24001 - protein, 9 aa, Artificial Sequence
  Description of Artificial Sequence: Synthetic peptide
VRLKPQHNK

SEQ ID NO: 24002 - protein, 9 aa, Artificial Sequence
  Description of Artificial Sequence: Synthetic peptide
VRLQPKHNK

SEQ ID NO: 24003 - protein, 9 aa, Artificial Sequence
  Description of Artificial Sequence: Synthetic peptide
VRLQPQHDK

SEQ ID NO: 24004 - protein, 9 aa, Artificial Sequence
  Description of Artificial Sequence: Synthetic peptide
VRLQPQHDR

SEQ ID NO: 24005 - protein, 9 aa, Artificial Sequence
  Description of Artificial Sequence: Synthetic peptide
VRLQPQHSR

SEQ ID NO: 24006 - protein, 9 aa, Artificial Sequence
  Description of Artificial Sequence: Synthetic peptide
VRLQPQLNK

SEQ ID NO: 24007 - protein, 9 aa, Artificial Sequence
  Description of Artificial Sequence: Synthetic peptide
VRLQPQRNK

SEQ ID NO: 24008 - protein, 9 aa, Artificial Sequence
  Description of Artificial Sequence: Synthetic peptide
VSDPMQQFT

SEQ ID NO: 24009 - protein, 9 aa, Artificial Sequence
  Description of Artificial Sequence: Synthetic peptide
VVHQMAYCF

SEQ ID NO: 24010 - protein, 9 aa, Artificial Sequence
  Description of Artificial Sequence: Synthetic peptide
VWDWEHKCT

SEQ ID NO: 24011 - protein, 9 aa, Artificial Sequence
  Description of Artificial Sequence: Synthetic peptide
VWFFMKFAK

SEQ ID NO: 24012 - protein, 9 aa, Artificial Sequence
  Description of Artificial Sequence: Synthetic peptide
VWNGEHKCT

SEQ ID NO: 24013 - protein, 9 aa, Artificial Sequence
  Description of Artificial Sequence: Synthetic peptide
WAAIEYSHD

SEQ ID NO: 24014 - protein, 9 aa, Artificial Sequence
  Description of Artificial Sequence: Synthetic peptide
WADIDYSHD

SEQ ID NO: 24015 - protein, 9 aa, Artificial Sequence
  Description of Artificial Sequence: Synthetic peptide
WADIEYGHD

SEQ ID NO: 24016 - protein, 9 aa, Artificial Sequence
  Description of Artificial Sequence: Synthetic peptide
WADIEYSHA

SEQ ID NO: 24017 - protein, 9 aa, Artificial Sequence
  Description of Artificial Sequence: Synthetic peptide
WAGIEYSHD

SEQ ID NO: 24018 - protein, 9 aa, Artificial Sequence
  Description of Artificial Sequence: Synthetic peptide
WAYIEYSHD

SEQ ID NO: 24019 - protein, 9 aa, Artificial Sequence
  Description of Artificial Sequence: Synthetic peptide
WCGPIIKAS

SEQ ID NO: 24020 - protein, 9 aa, Artificial Sequence
  Description of Artificial Sequence: Synthetic peptide
WDFHSIFPG

SEQ ID NO: 24021 - protein, 9 aa, Artificial Sequence
  Description of Artificial Sequence: Synthetic peptide
WDYHIIFPG

SEQ ID NO: 24022 - protein, 9 aa, Artificial Sequence
  Description of Artificial Sequence: Synthetic peptide
WDYHSICPG

SEQ ID NO: 24023 - protein, 9 aa, Artificial Sequence
  Description of Artificial Sequence: Synthetic peptide
WDYHSIFAG

SEQ ID NO: 24024 - protein, 9 aa, Artificial Sequence
  Description of Artificial Sequence: Synthetic peptide
WDYHSIFPC

SEQ ID NO: 24025 - protein, 9 aa, Artificial Sequence
  Description of Artificial Sequence: Synthetic peptide
WDYHSIYPG

SEQ ID NO: 24026 - protein, 9 aa, Artificial Sequence
  Description of Artificial Sequence: Synthetic peptide
WDYHSVFPG

SEQ ID NO: 24027 - protein, 9 aa, Artificial Sequence
  Description of Artificial Sequence: Synthetic peptide
WDYHTIFPG

SEQ ID NO: 24028 - protein, 9 aa, Artificial Sequence
  Description of Artificial Sequence: Synthetic peptide
WQHGREADH

SEQ ID NO: 24029 - protein, 9 aa, Artificial Sequence
  Description of Artificial Sequence: Synthetic peptide
WSNFALWCQ

SEQ ID NO: 24030 - protein, 9 aa, Artificial Sequence
  Description of Artificial Sequence: Synthetic peptide
WSSFAVWCQ

SEQ ID NO: 24031 - protein, 9 aa, Artificial Sequence
  Description of Artificial Sequence: Synthetic peptide
WSSFTLWCQ

SEQ ID NO: 24032 - protein, 9 aa, Artificial Sequence
  Description of Artificial Sequence: Synthetic peptide
YAQSFSQGI

SEQ ID NO: 24033 - protein, 9 aa, Artificial Sequence
  Description of Artificial Sequence: Synthetic peptide
YAWMPQWVD

SEQ ID NO: 24034 - protein, 9 aa, Artificial Sequence
  Description of Artificial Sequence: Synthetic peptide
YCFINSAYP

SEQ ID NO: 24035 - protein, 9 aa, Artificial Sequence
  Description of Artificial Sequence: Synthetic peptide
YCPRLVEAS

SEQ ID NO: 24036 - protein, 9 aa, Artificial Sequence
  Description of Artificial Sequence: Synthetic peptide
YDCDMKASE

SEQ ID NO: 24037 - protein, 9 aa, Artificial Sequence
  Description of Artificial Sequence: Synthetic peptide
YDCDMQASG

SEQ ID NO: 24038 - protein, 9 aa, Artificial Sequence
  Description of Artificial Sequence: Synthetic peptide
YDCDVQASE

SEQ ID NO: 24039 - protein, 9 aa, Artificial Sequence
  Description of Artificial Sequence: Synthetic peptide
YDCVMQASE

SEQ ID NO: 24040 - protein, 9 aa, Artificial Sequence
  Description of Artificial Sequence: Synthetic peptide
YDFDMQASE

SEQ ID NO: 24041 - protein, 9 aa, Artificial Sequence
  Description of Artificial Sequence: Synthetic peptide
YDGMPQWVD

SEQ ID NO: 24042 - protein, 9 aa, Artificial Sequence
  Description of Artificial Sequence: Synthetic peptide
YDLMPKWVD

SEQ ID NO: 24043 - protein, 9 aa, Artificial Sequence
  Description of Artificial Sequence: Synthetic peptide
YDLMPQWVD

SEQ ID NO: 24044 - protein, 9 aa, Artificial Sequence
  Description of Artificial Sequence: Synthetic peptide
YDWDMQASE

SEQ ID NO: 24045 - protein, 9 aa, Artificial Sequence
  Description of Artificial Sequence: Synthetic peptide
YDWMAQWVD

SEQ ID NO: 24046 - protein, 9 aa, Artificial Sequence
  Description of Artificial Sequence: Synthetic peptide
YDWMHQWID

SEQ ID NO: 24047 - protein, 9 aa, Artificial Sequence
  Description of Artificial Sequence: Synthetic peptide
YDWMPEWVD

SEQ ID NO: 24048 - protein, 9 aa, Artificial Sequence
  Description of Artificial Sequence: Synthetic peptide
YDWMPHWGD

SEQ ID NO: 24049 - protein, 9 aa, Artificial Sequence
  Description of Artificial Sequence: Synthetic peptide
YDWMPHWVE

SEQ ID NO: 24050 - protein, 9 aa, Artificial Sequence
  Description of Artificial Sequence: Synthetic peptide
YDWMPKWVD

SEQ ID NO: 24051 - protein, 9 aa, Artificial Sequence
  Description of Artificial Sequence: Synthetic peptide
YDWMPPWVD

SEQ ID NO: 24052 - protein, 9 aa, Artificial Sequence
  Description of Artificial Sequence: Synthetic peptide
YDWMPQLVD

SEQ ID NO: 24053 - protein, 9 aa, Artificial Sequence
  Description of Artificial Sequence: Synthetic peptide
YDWMPQWAD

SEQ ID NO: 24054 - protein, 9 aa, Artificial Sequence
  Description of Artificial Sequence: Synthetic peptide
YDWMPQWDA

SEQ ID NO: 24055 - protein, 9 aa, Artificial Sequence
  Description of Artificial Sequence: Synthetic peptide
YDWMPQWDD

SEQ ID NO: 24056 - protein, 9 aa, Artificial Sequence
  Description of Artificial Sequence: Synthetic peptide
YDWMPQWFD

SEQ ID NO: 24057 - protein, 9 aa, Artificial Sequence
  Description of Artificial Sequence: Synthetic peptide
YDWMPQWGA

SEQ ID NO: 24058 - protein, 9 aa, Artificial Sequence
  Description of Artificial Sequence: Synthetic peptide
YDWMPQWGD

SEQ ID NO: 24059 - protein, 9 aa, Artificial Sequence
  Description of Artificial Sequence: Synthetic peptide
YDWMPQWID

SEQ ID NO: 24060 - protein, 9 aa, Artificial Sequence
  Description of Artificial Sequence: Synthetic peptide
YDWMPQWIG

SEQ ID NO: 24061 - protein, 9 aa, Artificial Sequence
  Description of Artificial Sequence: Synthetic peptide
YDWMPQWIV

SEQ ID NO: 24062 - protein, 9 aa, Artificial Sequence
  Description of Artificial Sequence: Synthetic peptide
YDWMPQWLG

SEQ ID NO: 24063 - protein, 9 aa, Artificial Sequence
  Description of Artificial Sequence: Synthetic peptide
YDWMPQWVA

SEQ ID NO: 24064 - protein, 9 aa, Artificial Sequence
  Description of Artificial Sequence: Synthetic peptide
YDWMPQWVH

SEQ ID NO: 24065 - protein, 9 aa, Artificial Sequence
  Description of Artificial Sequence: Synthetic peptide
YDWMPQWVV

SEQ ID NO: 24066 - protein, 9 aa, Artificial Sequence
  Description of Artificial Sequence: Synthetic peptide
YDWMPQWVY

SEQ ID NO: 24067 - protein, 9 aa, Artificial Sequence
  Description of Artificial Sequence: Synthetic peptide
YDWMRQWVD

SEQ ID NO: 24068 - protein, 9 aa, Artificial Sequence
  Description of Artificial Sequence: Synthetic peptide
YDWMSQWVD

SEQ ID NO: 24069 - protein, 9 aa, Artificial Sequence
  Description of Artificial Sequence: Synthetic peptide
YDWMTQWVD

SEQ ID NO: 24070 - protein, 9 aa, Artificial Sequence
  Description of Artificial Sequence: Synthetic peptide
YDWRPQWVD

SEQ ID NO: 24071 - protein, 9 aa, Artificial Sequence
  Description of Artificial Sequence: Synthetic peptide
YDWVPQWVD

SEQ ID NO: 24072 - protein, 9 aa, Artificial Sequence
  Description of Artificial Sequence: Synthetic peptide
YDYDMQASE

SEQ ID NO: 24073 - protein, 9 aa, Artificial Sequence
  Description of Artificial Sequence: Synthetic peptide
YEAPTILNP

SEQ ID NO: 24074 - protein, 9 aa, Artificial Sequence
  Description of Artificial Sequence: Synthetic peptide
YEWMPQCVD

SEQ ID NO: 24075 - protein, 9 aa, Artificial Sequence
  Description of Artificial Sequence: Synthetic peptide
YFCILDKMT

SEQ ID NO: 24076 - protein, 9 aa, Artificial Sequence
  Description of Artificial Sequence: Synthetic peptide
YFCIMEKMT

SEQ ID NO: 24077 - protein, 9 aa, Artificial Sequence
  Description of Artificial Sequence: Synthetic peptide
YFCIQEKMT

SEQ ID NO: 24078 - protein, 9 aa, Artificial Sequence
  Description of Artificial Sequence: Synthetic peptide
YFCSWNTQE

SEQ ID NO: 24079 - protein, 9 aa, Artificial Sequence
  Description of Artificial Sequence: Synthetic peptide
YFDFNHQCQ

SEQ ID NO: 24080 - protein, 9 aa, Artificial Sequence
  Description of Artificial Sequence: Synthetic peptide
YGHEKRHRG

SEQ ID NO: 24081 - protein, 9 aa, Artificial Sequence
  Description of Artificial Sequence: Synthetic peptide
YGLIMEMCW

SEQ ID NO: 24082 - protein, 9 aa, Artificial Sequence
  Description of Artificial Sequence: Synthetic peptide
YGWMPQWVD

SEQ ID NO: 24083 - protein, 9 aa, Artificial Sequence
  Description of Artificial Sequence: Synthetic peptide
YHGHIANNG

SEQ ID NO: 24084 - protein, 9 aa, Artificial Sequence
  Description of Artificial Sequence: Synthetic peptide
YHMGFNQCY

SEQ ID NO: 24085 - protein, 9 aa, Artificial Sequence
  Description of Artificial Sequence: Synthetic peptide
YHMNFNQCY

SEQ ID NO: 24086 - protein, 9 aa, Artificial Sequence
  Description of Artificial Sequence: Synthetic peptide
YHMSFKQCY

SEQ ID NO: 24087 - protein, 9 aa, Artificial Sequence
  Description of Artificial Sequence: Synthetic peptide
YHMTFNQCY

SEQ ID NO: 24088 - protein, 9 aa, Artificial Sequence
  Description of Artificial Sequence: Synthetic peptide
YHRHIADNG

SEQ ID NO: 24089 - protein, 9 aa, Artificial Sequence
  Description of Artificial Sequence: Synthetic peptide
YHRHTANNG

SEQ ID NO: 24090 - protein, 9 aa, Artificial Sequence
  Description of Artificial Sequence: Synthetic peptide
YHRNIANNG

SEQ ID NO: 24091 - protein, 9 aa, Artificial Sequence
  Description of Artificial Sequence: Synthetic peptide
YIRDGGSHD

SEQ ID NO: 24092 - protein, 9 aa, Artificial Sequence
  Description of Artificial Sequence: Synthetic peptide
YIRDGVSHG

SEQ ID NO: 24093 - protein, 9 aa, Artificial Sequence
  Description of Artificial Sequence: Synthetic peptide
YIRDGVSHH

SEQ ID NO: 24094 - protein, 9 aa, Artificial Sequence
  Description of Artificial Sequence: Synthetic peptide
YIRVGGNNQ

SEQ ID NO: 24095 - protein, 9 aa, Artificial Sequence
  Description of Artificial Sequence: Synthetic peptide
YIRVGVSHD

SEQ ID NO: 24096 - protein, 9 aa, Artificial Sequence
  Description of Artificial Sequence: Synthetic peptide
YLHEKRHRG

SEQ ID NO: 24097 - protein, 9 aa, Artificial Sequence
  Description of Artificial Sequence: Synthetic peptide
YLRSLKCGD

SEQ ID NO: 24098 - protein, 9 aa, Artificial Sequence
  Description of Artificial Sequence: Synthetic peptide
YNWMPQWVD

SEQ ID NO: 24099 - protein, 9 aa, Artificial Sequence
  Description of Artificial Sequence: Synthetic peptide
YQASIYCDW

SEQ ID NO: 24100 - protein, 9 aa, Artificial Sequence
  Description of Artificial Sequence: Synthetic peptide
YQTSIYCDW

SEQ ID NO: 24101 - protein, 9 aa, Artificial Sequence
  Description of Artificial Sequence: Synthetic peptide
YSDVLIYAN

SEQ ID NO: 24102 - protein, 9 aa, Artificial Sequence
  Description of Artificial Sequence: Synthetic peptide
YSDVLVCAN

SEQ ID NO: 24103 - protein, 9 aa, Artificial Sequence
  Description of Artificial Sequence: Synthetic peptide
YSDVMICAN

SEQ ID NO: 24104 - protein, 9 aa, Artificial Sequence
  Description of Artificial Sequence: Synthetic peptide
YVDSNIACN

SEQ ID NO: 24105 - protein, 9 aa, Artificial Sequence
  Description of Artificial Sequence: Synthetic peptide
YVLESNYCE

SEQ ID NO: 24106 - protein, 9 aa, Artificial Sequence
  Description of Artificial Sequence: Synthetic peptide
YVRDGVSHD

SEQ ID NO: 24107 - protein, 9 aa, Artificial Sequence
  Description of Artificial Sequence: Synthetic peptide
YVRQILMCH

SEQ ID NO: 24108 - protein, 9 aa, Artificial Sequence
  Description of Artificial Sequence: Synthetic peptide
YVVESNYCQ

SEQ ID NO: 24109 - protein, 9 aa, Artificial Sequence
  Description of Artificial Sequence: Synthetic peptide
YVWMPQWVD

SEQ ID NO: 24110 - protein, 9 aa, Artificial Sequence
  Description of Artificial Sequence: Synthetic peptide
YWHEQRHRG

SEQ ID NO: 24111 - protein, 9 aa, Artificial Sequence
  Description of Artificial Sequence: Synthetic peptide
YWHERRHRG

SEQ ID NO: 24112 - protein, 9 aa, Artificial Sequence
  Description of Artificial Sequence: Synthetic peptide
YWREKRHRG

SEQ ID NO: 24113 - protein, 9 aa, Artificial Sequence
  Description of Artificial Sequence: Synthetic peptide
YYCKIIPYH

SEQ ID NO: 24114 - protein, 9 aa, Artificial Sequence
  Description of Artificial Sequence: Synthetic peptide
YYFQYNEAP

SEQ ID NO: 24115 - protein, 9 aa, Artificial Sequence
  Description of Artificial Sequence: Synthetic peptide
YYKPSFWTR

SEQ ID NO: 24116 - protein, 9 aa, Artificial Sequence
  Description of Artificial Sequence: Synthetic peptide
YYWHVSAFG

SEQ ID NO: 24117 - protein, 9 aa, Artificial Sequence
  Description of Artificial Sequence: Synthetic peptide
YYWHVSTFW

SEQ ID NO: 24118 - protein, 9 aa, Artificial Sequence
  Description of Artificial Sequence: Synthetic peptide
FGDHLRVMY

SEQ ID NO: 24119 - protein, 9 aa, Artificial Sequence
  Description of Artificial Sequence: Synthetic peptide
LPTQYQQQN

SEQ ID NO: 24120 - protein, 9 aa, Artificial Sequence
  Description of Artificial Sequence: Synthetic peptide
TKKIIESSS

SEQ ID NO: 24121 - protein, 9 aa, Artificial Sequence
  Description of Artificial Sequence: Synthetic peptide
IMYLKRCCT

SEQ ID NO: 24122 - protein, 9 aa, Artificial Sequence
  Description of Artificial Sequence: Synthetic peptide
TSDQCGNED

SEQ ID NO: 24123 - protein, 9 aa, Artificial Sequence
  Description of Artificial Sequence: Synthetic peptide
GQFPHYGIF

SEQ ID NO: 24124 - protein, 9 aa, Artificial Sequence
  Description of Artificial Sequence: Synthetic peptide
YTELMKKAC

SEQ ID NO: 24125 - protein, 9 aa, Artificial Sequence
  Description of Artificial Sequence: Synthetic peptide
LGMHYKDNC

SEQ ID NO: 24126 - protein, 9 aa, Artificial Sequence
  Description of Artificial Sequence: Synthetic peptide
KMGTMDFNH

SEQ ID NO: 24127 - protein, 9 aa, Artificial Sequence
  Description of Artificial Sequence: Synthetic peptide
QWDDEWDMD

SEQ ID NO: 24128 - protein, 9 aa, Artificial Sequence
  Description of Artificial Sequence: Synthetic peptide
THACMYHEY

SEQ ID NO: 24129 - protein, 9 aa, Artificial Sequence
  Description of Artificial Sequence: Synthetic peptide
LEQCHDHCA

SEQ ID NO: 24130 - protein, 9 aa, Artificial Sequence
  Description of Artificial Sequence: Synthetic peptide
TKVNCVYYG

SEQ ID NO: 24131 - protein, 9 aa, Artificial Sequence
  Description of Artificial Sequence: Synthetic peptide
QELGVNCAA

SEQ ID NO: 24132 - protein, 9 aa, Artificial Sequence
  Description of Artificial Sequence: Synthetic peptide
QKDWGPRVT

SEQ ID NO: 24133 - protein, 9 aa, Artificial Sequence
  Description of Artificial Sequence: Synthetic peptide
APMTCKEFL

SEQ ID NO: 24134 - protein, 9 aa, Artificial Sequence
  Description of Artificial Sequence: Synthetic peptide
ASWFPVLFP

SEQ ID NO: 24135 - protein, 9 aa, Artificial Sequence
  Description of Artificial Sequence: Synthetic peptide
CTYAAMMSY

SEQ ID NO: 24136 - protein, 9 aa, Artificial Sequence
  Description of Artificial Sequence: Synthetic peptide
CVQCECNQN

SEQ ID NO: 24137 - protein, 9 aa, Artificial Sequence
  Description of Artificial Sequence: Synthetic peptide
DMFRPDVRC

SEQ ID NO: 24138 - protein, 9 aa, Artificial Sequence
  Description of Artificial Sequence: Synthetic peptide
DTDNKPHFA

SEQ ID NO: 24139 - protein, 9 aa, Artificial Sequence
  Description of Artificial Sequence: Synthetic peptide
DTHIFIRHA

SEQ ID NO: 24140 - protein, 9 aa, Artificial Sequence
  Description of Artificial Sequence: Synthetic peptide
EFHFKCRTD

SEQ ID NO: 24141 - protein, 9 aa, Artificial Sequence
  Description of Artificial Sequence: Synthetic peptide
EHHAMMLHE

SEQ ID NO: 24142 - protein, 9 aa, Artificial Sequence
  Description of Artificial Sequence: Synthetic peptide
FSHMPTSGG

SEQ ID NO: 24143 - protein, 9 aa, Artificial Sequence
  Description of Artificial Sequence: Synthetic peptide
FVCPRAFNM

SEQ ID NO: 24144 - protein, 9 aa, Artificial Sequence
  Description of Artificial Sequence: Synthetic peptide
FWMNCWVIV

SEQ ID NO: 24145 - protein, 9 aa, Artificial Sequence
  Description of Artificial Sequence: Synthetic peptide
GQYIAVNYS

SEQ ID NO: 24146 - protein, 9 aa, Artificial Sequence
  Description of Artificial Sequence: Synthetic peptide
HYEMPQAMQ

SEQ ID NO: 24147 - protein, 9 aa, Artificial Sequence
  Description of Artificial Sequence: Synthetic peptide
KCGNEGRMS

SEQ ID NO: 24148 - protein, 9 aa, Artificial Sequence
  Description of Artificial Sequence: Synthetic peptide
LQKGWANCE

SEQ ID NO: 24149 - protein, 9 aa, Artificial Sequence
  Description of Artificial Sequence: Synthetic peptide
LSTLITMMD

SEQ ID NO: 24150 - protein, 9 aa, Artificial Sequence
  Description of Artificial Sequence: Synthetic peptide
LTDFHPKML

SEQ ID NO: 24151 - protein, 9 aa, Artificial Sequence
  Description of Artificial Sequence: Synthetic peptide
MAMKLIEGN

SEQ ID NO: 24152 - protein, 9 aa, Artificial Sequence
  Description of Artificial Sequence: Synthetic peptide
NFCKQGNTC

SEQ ID NO: 24153 - protein, 9 aa, Artificial Sequence
  Description of Artificial Sequence: Synthetic peptide
NIRCGNDAS

SEQ ID NO: 24154 - protein, 9 aa, Artificial Sequence
  Description of Artificial Sequence: Synthetic peptide
NQQPGQHSQ

SEQ ID NO: 24155 - protein, 9 aa, Artificial Sequence
  Description of Artificial Sequence: Synthetic peptide
NVVCVRYKS

SEQ ID NO: 24156 - protein, 9 aa, Artificial Sequence
  Description of Artificial Sequence: Synthetic peptide
QATMDAWVH

SEQ ID NO: 24157 - protein, 9 aa, Artificial Sequence
  Description of Artificial Sequence: Synthetic peptide
QIPKAWNRY

SEQ ID NO: 24158 - protein, 9 aa, Artificial Sequence
  Description of Artificial Sequence: Synthetic peptide
QTTTNDSSQ

SEQ ID NO: 24159 - protein, 9 aa, Artificial Sequence
  Description of Artificial Sequence: Synthetic peptide
SADRTAMFH

SEQ ID NO: 24160 - protein, 9 aa, Artificial Sequence
  Description of Artificial Sequence: Synthetic peptide
SARTDCQCK

SEQ ID NO: 24161 - protein, 9 aa, Artificial Sequence
  Description of Artificial Sequence: Synthetic peptide
SDSKVQWGM

SEQ ID NO: 24162 - protein, 9 aa, Artificial Sequence
  Description of Artificial Sequence: Synthetic peptide
SEDHFGFWV

SEQ ID NO: 24163 - protein, 9 aa, Artificial Sequence
  Description of Artificial Sequence: Synthetic peptide
SHWFFHFDL

SEQ ID NO: 24164 - protein, 9 aa, Artificial Sequence
  Description of Artificial Sequence: Synthetic peptide
STSWLNDLT

SEQ ID NO: 24165 - protein, 9 aa, Artificial Sequence
  Description of Artificial Sequence: Synthetic peptide
TEFSQQYKC

SEQ ID NO: 24166 - protein, 9 aa, Artificial Sequence
  Description of Artificial Sequence: Synthetic peptide
VAFEYGERA

SEQ ID NO: 24167 - protein, 9 aa, Artificial Sequence
  Description of Artificial Sequence: Synthetic peptide
VCGWWHQYW

SEQ ID NO: 24168 - protein, 9 aa, Artificial Sequence
  Description of Artificial Sequence: Synthetic peptide
VHTEMSNID

SEQ ID NO: 24169 - protein, 9 aa, Artificial Sequence
  Description of Artificial Sequence: Synthetic peptide
VTQRPLHHS

SEQ ID NO: 24170 - protein, 9 aa, Artificial Sequence
  Description of Artificial Sequence: Synthetic peptide
WLYLAFAQN

SEQ ID NO: 24171 - protein, 9 aa, Artificial Sequence
  Description of Artificial Sequence: Synthetic peptide
WWKPCNCQY

SEQ ID NO: 24172 - protein, 9 aa, Artificial Sequence
  Description of Artificial Sequence: Synthetic peptide
YATQMQHLE

SEQ ID NO: 24173 - protein, 9 aa, Artificial Sequence
  Description of Artificial Sequence: Synthetic peptide
YMGSTNIWM

SEQ ID NO: 24174 - protein, 9 aa, Artificial Sequence
  Description of Artificial Sequence: Synthetic peptide
GVGPSHGER

SEQ ID NO: 24175 - protein, 9 aa, Artificial Sequence
  Description of Artificial Sequence: Synthetic peptide
GVMHHGIFD

SEQ ID NO: 24176 - protein, 9 aa, Artificial Sequence
  Description of Artificial Sequence: Synthetic peptide
AISMYWSSW

SEQ ID NO: 24177 - protein, 9 aa, Artificial Sequence
  Description of Artificial Sequence: Synthetic peptide
AVQCYIHPS

SEQ ID NO: 24178 - protein, 9 aa, Artificial Sequence
  Description of Artificial Sequence: Synthetic peptide
CSTIHAGHP

SEQ ID NO: 24179 - protein, 9 aa, Artificial Sequence
  Description of Artificial Sequence: Synthetic peptide
DIGMYWSSW

SEQ ID NO: 24180 - protein, 9 aa, Artificial Sequence
  Description of Artificial Sequence: Synthetic peptide
DISMCWSSW

SEQ ID NO: 24181 - protein, 9 aa, Artificial Sequence
  Description of Artificial Sequence: Synthetic peptide
DISMDWSSW

SEQ ID NO: 24182 - protein, 9 aa, Artificial Sequence
  Description of Artificial Sequence: Synthetic peptide
DISMYWGSW

SEQ ID NO: 24183 - protein, 9 aa, Artificial Sequence
  Description of Artificial Sequence: Synthetic peptide
DISMYWSGW

SEQ ID NO: 24184 - protein, 9 aa, Artificial Sequence
  Description of Artificial Sequence: Synthetic peptide
DISMYWSSL

SEQ ID NO: 24185 - protein, 9 aa, Artificial Sequence
  Description of Artificial Sequence: Synthetic peptide
DISMYWSSW

SEQ ID NO: 24186 - protein, 9 aa, Artificial Sequence
  Description of Artificial Sequence: Synthetic peptide
DMSMYWSSW

SEQ ID NO: 24187 - protein, 9 aa, Artificial Sequence
  Description of Artificial Sequence: Synthetic peptide
GISMYWSSW

SEQ ID NO: 24188 - protein, 9 aa, Artificial Sequence
  Description of Artificial Sequence: Synthetic peptide
KPMINEIVY

SEQ ID NO: 24189 - protein, 9 aa, Artificial Sequence
  Description of Artificial Sequence: Synthetic peptide
LHALINQGS

SEQ ID NO: 24190 - protein, 9 aa, Artificial Sequence
  Description of Artificial Sequence: Synthetic peptide
LHALVNQGS

SEQ ID NO: 24191 - protein, 9 aa, Artificial Sequence
  Description of Artificial Sequence: Synthetic peptide
LHALVNQGY

SEQ ID NO: 24192 - protein, 9 aa, Artificial Sequence
  Description of Artificial Sequence: Synthetic peptide
LRALVNQGS

SEQ ID NO: 24193 - protein, 9 aa, Artificial Sequence
  Description of Artificial Sequence: Synthetic peptide
MCLRDHNGL

SEQ ID NO: 24194 - protein, 9 aa, Artificial Sequence
  Description of Artificial Sequence: Synthetic peptide
MPMINEIVY

SEQ ID NO: 24195 - protein, 9 aa, Artificial Sequence
  Description of Artificial Sequence: Synthetic peptide
MYLCDHNGL

SEQ ID NO: 24196 - protein, 9 aa, Artificial Sequence
  Description of Artificial Sequence: Synthetic peptide
MYLRDDNGL

SEQ ID NO: 24197 - protein, 9 aa, Artificial Sequence
  Description of Artificial Sequence: Synthetic peptide
MYLRDHDGL

SEQ ID NO: 24198 - protein, 9 aa, Artificial Sequence
  Description of Artificial Sequence: Synthetic peptide
MYLRDHNCL

SEQ ID NO: 24199 - protein, 9 aa, Artificial Sequence
  Description of Artificial Sequence: Synthetic peptide
MYLRDHNDL

SEQ ID NO: 24200 - protein, 9 aa, Artificial Sequence
  Description of Artificial Sequence: Synthetic peptide
MYLRDHNGL

SEQ ID NO: 24201 - protein, 9 aa, Artificial Sequence
  Description of Artificial Sequence: Synthetic peptide
MYLRDHNSL

SEQ ID NO: 24202 - protein, 9 aa, Artificial Sequence
  Description of Artificial Sequence: Synthetic peptide
MYLRDHNVL

SEQ ID NO: 24203 - protein, 9 aa, Artificial Sequence
  Description of Artificial Sequence: Synthetic peptide
MYLRDHSGL

SEQ ID NO: 24204 - protein, 9 aa, Artificial Sequence
  Description of Artificial Sequence: Synthetic peptide
MYLRDHTGL

SEQ ID NO: 24205 - protein, 9 aa, Artificial Sequence
  Description of Artificial Sequence: Synthetic peptide
MYLRDRNGL

SEQ ID NO: 24206 - protein, 9 aa, Artificial Sequence
  Description of Artificial Sequence: Synthetic peptide
MYLRGHNGL

SEQ ID NO: 24207 - protein, 9 aa, Artificial Sequence
  Description of Artificial Sequence: Synthetic peptide
MYLRNHNGL

SEQ ID NO: 24208 - protein, 9 aa, Artificial Sequence
  Description of Artificial Sequence: Synthetic peptide
NISMYWSSW

SEQ ID NO: 24209 - protein, 9 aa, Artificial Sequence
  Description of Artificial Sequence: Synthetic peptide
QCYAIAHLI

SEQ ID NO: 24210 - protein, 9 aa, Artificial Sequence
  Description of Artificial Sequence: Synthetic peptide
RCCAIAHLI

SEQ ID NO: 24211 - protein, 9 aa, Artificial Sequence
  Description of Artificial Sequence: Synthetic peptide
RCYAIADLI

SEQ ID NO: 24212 - protein, 9 aa, Artificial Sequence
  Description of Artificial Sequence: Synthetic peptide
RCYAIAHLI

SEQ ID NO: 24213 - protein, 9 aa, Artificial Sequence
  Description of Artificial Sequence: Synthetic peptide
RCYAIAHLL

SEQ ID NO: 24214 - protein, 9 aa, Artificial Sequence
  Description of Artificial Sequence: Synthetic peptide
RCYAIAHLV

SEQ ID NO: 24215 - protein, 9 aa, Artificial Sequence
  Description of Artificial Sequence: Synthetic peptide
RCYAIAHVI

SEQ ID NO: 24216 - protein, 9 aa, Artificial Sequence
  Description of Artificial Sequence: Synthetic peptide
RCYAIAHWI

SEQ ID NO: 24217 - protein, 9 aa, Artificial Sequence
  Description of Artificial Sequence: Synthetic peptide
RCYAIALLI

SEQ ID NO: 24218 - protein, 9 aa, Artificial Sequence
  Description of Artificial Sequence: Synthetic peptide
RCYAIAPLI

SEQ ID NO: 24219 - protein, 9 aa, Artificial Sequence
  Description of Artificial Sequence: Synthetic peptide
RCYAIARLI

SEQ ID NO: 24220 - protein, 9 aa, Artificial Sequence
  Description of Artificial Sequence: Synthetic peptide
RCYAIGHLI

SEQ ID NO: 24221 - protein, 9 aa, Artificial Sequence
  Description of Artificial Sequence: Synthetic peptide
RCYAISHLI

SEQ ID NO: 24222 - protein, 9 aa, Artificial Sequence
  Description of Artificial Sequence: Synthetic peptide
RCYAITHLI

SEQ ID NO: 24223 - protein, 9 aa, Artificial Sequence
  Description of Artificial Sequence: Synthetic peptide
RCYAIVHLI

SEQ ID NO: 24224 - protein, 9 aa, Artificial Sequence
  Description of Artificial Sequence: Synthetic peptide
RCYAVAHLI

SEQ ID NO: 24225 - protein, 9 aa, Artificial Sequence
  Description of Artificial Sequence: Synthetic peptide
RCYDIAHLI

SEQ ID NO: 24226 - protein, 9 aa, Artificial Sequence
  Description of Artificial Sequence: Synthetic peptide
RCYSIAHLI

SEQ ID NO: 24227 - protein, 9 aa, Artificial Sequence
  Description of Artificial Sequence: Synthetic peptide
RCYTIAHLI

SEQ ID NO: 24228 - protein, 9 aa, Artificial Sequence
  Description of Artificial Sequence: Synthetic peptide
RGYAIAHLI

SEQ ID NO: 24229 - protein, 9 aa, Artificial Sequence
  Description of Artificial Sequence: Synthetic peptide
RWYAIAHLI

SEQ ID NO: 24230 - protein, 9 aa, Artificial Sequence
  Description of Artificial Sequence: Synthetic peptide
SIQCYIHPS

SEQ ID NO: 24231 - protein, 9 aa, Artificial Sequence
  Description of Artificial Sequence: Synthetic peptide
SVQCCIHPS

SEQ ID NO: 24232 - protein, 9 aa, Artificial Sequence
  Description of Artificial Sequence: Synthetic peptide
SVQCYIHPS

SEQ ID NO: 24233 - protein, 9 aa, Artificial Sequence
  Description of Artificial Sequence: Synthetic peptide
SVQCYIRPS

SEQ ID NO: 24234 - protein, 9 aa, Artificial Sequence
  Description of Artificial Sequence: Synthetic peptide
SVQCYMHPS

SEQ ID NO: 24235 - protein, 9 aa, Artificial Sequence
  Description of Artificial Sequence: Synthetic peptide
SVQCYVHPS

SEQ ID NO: 24236 - protein, 9 aa, Artificial Sequence
  Description of Artificial Sequence: Synthetic peptide
SVQFYIHPS

SEQ ID NO: 24237 - protein, 9 aa, Artificial Sequence
  Description of Artificial Sequence: Synthetic peptide
TPMIDEIVY

SEQ ID NO: 24238 - protein, 9 aa, Artificial Sequence
  Description of Artificial Sequence: Synthetic peptide
TPMINEIFY

SEQ ID NO: 24239 - protein, 9 aa, Artificial Sequence
  Description of Artificial Sequence: Synthetic peptide
TPMINEIVC

SEQ ID NO: 24240 - protein, 9 aa, Artificial Sequence
  Description of Artificial Sequence: Synthetic peptide
TPMINEIVY

SEQ ID NO: 24241 - protein, 9 aa, Artificial Sequence
  Description of Artificial Sequence: Synthetic peptide
TPMINEMVY

SEQ ID NO: 24242 - protein, 9 aa, Artificial Sequence
  Description of Artificial Sequence: Synthetic peptide
TPMINEVVY

SEQ ID NO: 24243 - protein, 9 aa, Artificial Sequence
  Description of Artificial Sequence: Synthetic peptide
TPMINGIVY

SEQ ID NO: 24244 - protein, 9 aa, Artificial Sequence
  Description of Artificial Sequence: Synthetic peptide
TPMISEIVY

SEQ ID NO: 24245 - protein, 9 aa, Artificial Sequence
  Description of Artificial Sequence: Synthetic peptide
TPMVNEIVY

SEQ ID NO: 24246 - protein, 9 aa, Artificial Sequence
  Description of Artificial Sequence: Synthetic peptide
VYLRDHNGL

SEQ ID NO: 24247 - protein, 9 aa, Artificial Sequence
  Description of Artificial Sequence: Synthetic peptide
YSTIHAGHP

SEQ ID NO: 24248 - protein, 9 aa, Artificial Sequence
  Description of Artificial Sequence: Synthetic peptide
RVTIMFTGT

SEQ ID NO: 24249 - protein, 9 aa, Artificial Sequence
  Description of Artificial Sequence: Synthetic peptide
GTRINTCNG

SEQ ID NO: 24250 - protein, 9 aa, Artificial Sequence
  Description of Artificial Sequence: Synthetic peptide
AVGSLRTFQ

SEQ ID NO: 24251 - protein, 9 aa, Artificial Sequence
  Description of Artificial Sequence: Synthetic peptide
CNTPYEFWA

SEQ ID NO: 24252 - protein, 9 aa, Artificial Sequence
  Description of Artificial Sequence: Synthetic peptide
DLRLMACCG

SEQ ID NO: 24253 - protein, 9 aa, Artificial Sequence
  Description of Artificial Sequence: Synthetic peptide
RRRFGISGL

SEQ ID NO: 24254 - protein, 9 aa, Artificial Sequence
  Description of Artificial Sequence: Synthetic peptide
VTYYSMTQQ

SEQ ID NO: 24255 - protein, 9 aa, Artificial Sequence
  Description of Artificial Sequence: Synthetic peptide
MASRKSMID

SEQ ID NO: 24256 - protein, 9 aa, Artificial Sequence
  Description of Artificial Sequence: Synthetic peptide
GMVELGSCW

SEQ ID NO: 24257 - protein, 9 aa, Artificial Sequence
  Description of Artificial Sequence: Synthetic peptide
TVTTTKWRD

SEQ ID NO: 24258 - protein, 9 aa, Artificial Sequence
  Description of Artificial Sequence: Synthetic peptide
QHTQQLVQN

SEQ ID NO: 24259 - protein, 9 aa, Artificial Sequence
  Description of Artificial Sequence: Synthetic peptide
SGNMYESGE

SEQ ID NO: 24260 - protein, 9 aa, Artificial Sequence
  Description of Artificial Sequence: Synthetic peptide
QDFRMNAGA

SEQ ID NO: 24261 - protein, 9 aa, Artificial Sequence
  Description of Artificial Sequence: Synthetic peptide
GLSMVLHFV

SEQ ID NO: 24262 - protein, 9 aa, Artificial Sequence
  Description of Artificial Sequence: Synthetic peptide
AMTRCKAGH

SEQ ID NO: 24263 - protein, 9 aa, Artificial Sequence
  Description of Artificial Sequence: Synthetic peptide
GSNRNPIMM

SEQ ID NO: 24264 - protein, 9 aa, Artificial Sequence
  Description of Artificial Sequence: Synthetic peptide
ASAGRNWTA

SEQ ID NO: 24265 - protein, 9 aa, Artificial Sequence
  Description of Artificial Sequence: Synthetic peptide
TYWTKQSEV

SEQ ID NO: 24266 - protein, 9 aa, Artificial Sequence
  Description of Artificial Sequence: Synthetic peptide
CIWSSPDQP

SEQ ID NO: 24267 - protein, 9 aa, Artificial Sequence
  Description of Artificial Sequence: Synthetic peptide
NYLQMCWFN

SEQ ID NO: 24268 - protein, 9 aa, Artificial Sequence
  Description of Artificial Sequence: Synthetic peptide
TTYPHNTHG

SEQ ID NO: 24269 - protein, 9 aa, Artificial Sequence
  Description of Artificial Sequence: Synthetic peptide
TCTNSEPHP

SEQ ID NO: 24270 - protein, 9 aa, Artificial Sequence
  Description of Artificial Sequence: Synthetic peptide
ECQYEMNDD

SEQ ID NO: 24271 - protein, 9 aa, Artificial Sequence
  Description of Artificial Sequence: Synthetic peptide
THAQMSLRD

SEQ ID NO: 24272 - protein, 9 aa, Artificial Sequence
  Description of Artificial Sequence: Synthetic peptide
KYASMDIYS

SEQ ID NO: 24273 - protein, 9 aa, Artificial Sequence
  Description of Artificial Sequence: Synthetic peptide
AQSKSLMRC

SEQ ID NO: 24274 - protein, 9 aa, Artificial Sequence
  Description of Artificial Sequence: Synthetic peptide
TVMQCGTMP

SEQ ID NO: 24275 - protein, 9 aa, Artificial Sequence
  Description of Artificial Sequence: Synthetic peptide
TAFQSLQQM

SEQ ID NO: 24276 - protein, 9 aa, Artificial Sequence
  Description of Artificial Sequence: Synthetic peptide
HMDEVCSKD

SEQ ID NO: 24277 - protein, 9 aa, Artificial Sequence
  Description of Artificial Sequence: Synthetic peptide
YVSLCNDGN

SEQ ID NO: 24278 - protein, 9 aa, Artificial Sequence
  Description of Artificial Sequence: Synthetic peptide
RVEYVTDSH

SEQ ID NO: 24279 - protein, 9 aa, Artificial Sequence
  Description of Artificial Sequence: Synthetic peptide
MCQNVEKEY

SEQ ID NO: 24280 - protein, 9 aa, Artificial Sequence
  Description of Artificial Sequence: Synthetic peptide
NSTPMACME

SEQ ID NO: 24281 - protein, 9 aa, Artificial Sequence
  Description of Artificial Sequence: Synthetic peptide
TSEPHCSYA

SEQ ID NO: 24282 - protein, 9 aa, Artificial Sequence
  Description of Artificial Sequence: Synthetic peptide
DPGWYGLAP

SEQ ID NO: 24283 - protein, 9 aa, Artificial Sequence
  Description of Artificial Sequence: Synthetic peptide
CWGPIMHPF

SEQ ID NO: 24284 - protein, 9 aa, Artificial Sequence
  Description of Artificial Sequence: Synthetic peptide
LSVQAQWDS

SEQ ID NO: 24285 - protein, 9 aa, Artificial Sequence
  Description of Artificial Sequence: Synthetic peptide
IAKIGNCVW

SEQ ID NO: 24286 - protein, 9 aa, Artificial Sequence
  Description of Artificial Sequence: Synthetic peptide
KAVSYHHDG

SEQ ID NO: 24287 - protein, 9 aa, Artificial Sequence
  Description of Artificial Sequence: Synthetic peptide
SLTQYQWRG

SEQ ID NO: 24288 - protein, 9 aa, Artificial Sequence
  Description of Artificial Sequence: Synthetic peptide
MATCYMYAD

SEQ ID NO: 24289 - protein, 9 aa, Artificial Sequence
  Description of Artificial Sequence: Synthetic peptide
APFFTFTNH

SEQ ID NO: 24290 - protein, 9 aa, Artificial Sequence
  Description of Artificial Sequence: Synthetic peptide
TRMQAVDHE

SEQ ID NO: 24291 - protein, 9 aa, Artificial Sequence
  Description of Artificial Sequence: Synthetic peptide
FWMQTEHGT

SEQ ID NO: 24292 - protein, 9 aa, Artificial Sequence
  Description of Artificial Sequence: Synthetic peptide
GCEEVGRCQ

SEQ ID NO: 24293 - protein, 9 aa, Artificial Sequence
  Description of Artificial Sequence: Synthetic peptide
IKHITRNTY

SEQ ID NO: 24294 - protein, 9 aa, Artificial Sequence
  Description of Artificial Sequence: Synthetic peptide
WKWYGLPHH

SEQ ID NO: 24295 - protein, 9 aa, Artificial Sequence
  Description of Artificial Sequence: Synthetic peptide
ESTFWQHTF

SEQ ID NO: 24296 - protein, 9 aa, Artificial Sequence
  Description of Artificial Sequence: Synthetic peptide
SQMKYAHNQ

SEQ ID NO: 24297 - protein, 9 aa, Artificial Sequence
  Description of Artificial Sequence: Synthetic peptide
AEVPYVMQQ

SEQ ID NO: 24298 - protein, 9 aa, Artificial Sequence
  Description of Artificial Sequence: Synthetic peptide
TCGHTRFFI

SEQ ID NO: 24299 - protein, 9 aa, Artificial Sequence
  Description of Artificial Sequence: Synthetic peptide
NTSGELIMP

SEQ ID NO: 24300 - protein, 9 aa, Artificial Sequence
  Description of Artificial Sequence: Synthetic peptide
DRVNLMWKD

SEQ ID NO: 24301 - protein, 9 aa, Artificial Sequence
  Description of Artificial Sequence: Synthetic peptide
AVHTADVCC

SEQ ID NO: 24302 - protein, 9 aa, Artificial Sequence
  Description of Artificial Sequence: Synthetic peptide
EFVLGCQGI

SEQ ID NO: 24303 - protein, 9 aa, Artificial Sequence
  Description of Artificial Sequence: Synthetic peptide
DVKAFMGGV

SEQ ID NO: 24304 - protein, 9 aa, Artificial Sequence
  Description of Artificial Sequence: Synthetic peptide
TTSQNSEAM

SEQ ID NO: 24305 - protein, 9 aa, Artificial Sequence
  Description of Artificial Sequence: Synthetic peptide
YASSCQNAM

SEQ ID NO: 24306 - protein, 9 aa, Artificial Sequence
  Description of Artificial Sequence: Synthetic peptide
QSMVACYTI

SEQ ID NO: 24307 - protein, 9 aa, Artificial Sequence
  Description of Artificial Sequence: Synthetic peptide
MGYAKHDSH

SEQ ID NO: 24308 - protein, 9 aa, Artificial Sequence
  Description of Artificial Sequence: Synthetic peptide
SSRMQMQGP

SEQ ID NO: 24309 - protein, 9 aa, Artificial Sequence
  Description of Artificial Sequence: Synthetic peptide
SQIQIRQAD

SEQ ID NO: 24310 - protein, 9 aa, Artificial Sequence
  Description of Artificial Sequence: Synthetic peptide
VHHKTNRSY

SEQ ID NO: 24311 - protein, 9 aa, Artificial Sequence
  Description of Artificial Sequence: Synthetic peptide
RVNGSTCRH

SEQ ID NO: 24312 - protein, 9 aa, Artificial Sequence
  Description of Artificial Sequence: Synthetic peptide
NGNHYNAMR

SEQ ID NO: 24313 - protein, 9 aa, Artificial Sequence
  Description of Artificial Sequence: Synthetic peptide
WTTSIAVDT

SEQ ID NO: 24314 - protein, 9 aa, Artificial Sequence
  Description of Artificial Sequence: Synthetic peptide
FTEPMCMQG

SEQ ID NO: 24315 - protein, 9 aa, Artificial Sequence
  Description of Artificial Sequence: Synthetic peptide
DVKSWAVCD

SEQ ID NO: 24316 - protein, 9 aa, Artificial Sequence
  Description of Artificial Sequence: Synthetic peptide
AYHCYMSWM

SEQ ID NO: 24317 - protein, 9 aa, Artificial Sequence
  Description of Artificial Sequence: Synthetic peptide
RYPCCQSPF

SEQ ID NO: 24318 - protein, 9 aa, Artificial Sequence
  Description of Artificial Sequence: Synthetic peptide
AHAWLQHWA

SEQ ID NO: 24319 - protein, 9 aa, Artificial Sequence
  Description of Artificial Sequence: Synthetic peptide
HQCNCLLSW

SEQ ID NO: 24320 - protein, 9 aa, Artificial Sequence
  Description of Artificial Sequence: Synthetic peptide
TNFPTSMHG

SEQ ID NO: 24321 - protein, 9 aa, Artificial Sequence
  Description of Artificial Sequence: Synthetic peptide
QHLMTFSHE

SEQ ID NO: 24322 - protein, 9 aa, Artificial Sequence
  Description of Artificial Sequence: Synthetic peptide
QRNEMSASR

SEQ ID NO: 24323 - protein, 9 aa, Artificial Sequence
  Description of Artificial Sequence: Synthetic peptide
WDGWVTTHF

SEQ ID NO: 24324 - protein, 9 aa, Artificial Sequence
  Description of Artificial Sequence: Synthetic peptide
PAHINDQYM

SEQ ID NO: 24325 - protein, 9 aa, Artificial Sequence
  Description of Artificial Sequence: Synthetic peptide
VLKSNLTGM

SEQ ID NO: 24326 - protein, 9 aa, Artificial Sequence
  Description of Artificial Sequence: Synthetic peptide
ATGTYNLQE

SEQ ID NO: 24327 - protein, 9 aa, Artificial Sequence
  Description of Artificial Sequence: Synthetic peptide
LINSIVCGD

SEQ ID NO: 24328 - protein, 9 aa, Artificial Sequence
  Description of Artificial Sequence: Synthetic peptide
ACHTGQSGM

SEQ ID NO: 24329 - protein, 9 aa, Artificial Sequence
  Description of Artificial Sequence: Synthetic peptide
DHLSNDAEM

SEQ ID NO: 24330 - protein, 9 aa, Artificial Sequence
  Description of Artificial Sequence: Synthetic peptide
SECEVLCSL

SEQ ID NO: 24331 - protein, 9 aa, Artificial Sequence
  Description of Artificial Sequence: Synthetic peptide
VFNLMLQDK

SEQ ID NO: 24332 - protein, 9 aa, Artificial Sequence
  Description of Artificial Sequence: Synthetic peptide
ILINDREWG

SEQ ID NO: 24333 - protein, 9 aa, Artificial Sequence
  Description of Artificial Sequence: Synthetic peptide
QWFTKGVGE

SEQ ID NO: 24334 - protein, 9 aa, Artificial Sequence
  Description of Artificial Sequence: Synthetic peptide
NVMGTQAKE

SEQ ID NO: 24335 - protein, 9 aa, Artificial Sequence
  Description of Artificial Sequence: Synthetic peptide
YSDPKNMSI

SEQ ID NO: 24336 - protein, 9 aa, Artificial Sequence
  Description of Artificial Sequence: Synthetic peptide
LEIGGKTRT

SEQ ID NO: 24337 - protein, 9 aa, Artificial Sequence
  Description of Artificial Sequence: Synthetic peptide
ASMHEETCL

SEQ ID NO: 24338 - protein, 9 aa, Artificial Sequence
  Description of Artificial Sequence: Synthetic peptide
WERCLELNQ

SEQ ID NO: 24339 - protein, 9 aa, Artificial Sequence
  Description of Artificial Sequence: Synthetic peptide
MPWLDKPPC

SEQ ID NO: 24340 - protein, 9 aa, Artificial Sequence
  Description of Artificial Sequence: Synthetic peptide
ATMNLSWGL

SEQ ID NO: 24341 - protein, 9 aa, Artificial Sequence
  Description of Artificial Sequence: Synthetic peptide
WVHPYSYCA

SEQ ID NO: 24342 - protein, 9 aa, Artificial Sequence
  Description of Artificial Sequence: Synthetic peptide
QSRCVDNTV

SEQ ID NO: 24343 - protein, 9 aa, Artificial Sequence
  Description of Artificial Sequence: Synthetic peptide
NRIQMTDFQ

SEQ ID NO: 24344 - protein, 9 aa, Artificial Sequence
  Description of Artificial Sequence: Synthetic peptide
SNVACIQAF

SEQ ID NO: 24345 - protein, 9 aa, Artificial Sequence
  Description of Artificial Sequence: Synthetic peptide
INYISFVDR

SEQ ID NO: 24346 - protein, 9 aa, Artificial Sequence
  Description of Artificial Sequence: Synthetic peptide
EVRIQCKID

SEQ ID NO: 24347 - protein, 9 aa, Artificial Sequence
  Description of Artificial Sequence: Synthetic peptide
SVLHVQALA

SEQ ID NO: 24348 - protein, 9 aa, Artificial Sequence
  Description of Artificial Sequence: Synthetic peptide
CWILHHRCS

SEQ ID NO: 24349 - protein, 9 aa, Artificial Sequence
  Description of Artificial Sequence: Synthetic peptide
KMAGIGCWY

SEQ ID NO: 24350 - protein, 9 aa, Artificial Sequence
  Description of Artificial Sequence: Synthetic peptide
LCAVCGDCD

SEQ ID NO: 24351 - protein, 9 aa, Artificial Sequence
  Description of Artificial Sequence: Synthetic peptide
HSMMPGWPS

SEQ ID NO: 24352 - protein, 9 aa, Artificial Sequence
  Description of Artificial Sequence: Synthetic peptide
DQEAQVVTG

SEQ ID NO: 24353 - protein, 9 aa, Artificial Sequence
  Description of Artificial Sequence: Synthetic peptide
ISLVWMHYP

SEQ ID NO: 24354 - protein, 9 aa, Artificial Sequence
  Description of Artificial Sequence: Synthetic peptide
AACNGLEYQ

SEQ ID NO: 24355 - protein, 9 aa, Artificial Sequence
  Description of Artificial Sequence: Synthetic peptide
AADCYHWFR

SEQ ID NO: 24356 - protein, 9 aa, Artificial Sequence
  Description of Artificial Sequence: Synthetic peptide
AAEWDRFAE

SEQ ID NO: 24357 - protein, 9 aa, Artificial Sequence
  Description of Artificial Sequence: Synthetic peptide
AAGLQVDSW

SEQ ID NO: 24358 - protein, 9 aa, Artificial Sequence
  Description of Artificial Sequence: Synthetic peptide
AAMASAFVY

SEQ ID NO: 24359 - protein, 9 aa, Artificial Sequence
  Description of Artificial Sequence: Synthetic peptide
AAMLGWESE

SEQ ID NO: 24360 - protein, 9 aa, Artificial Sequence
  Description of Artificial Sequence: Synthetic peptide
AASPKTMNE

SEQ ID NO: 24361 - protein, 9 aa, Artificial Sequence
  Description of Artificial Sequence: Synthetic peptide
ACDRFMAMY

SEQ ID NO: 24362 - protein, 9 aa, Artificial Sequence
  Description of Artificial Sequence: Synthetic peptide
ACSVSICTE

SEQ ID NO: 24363 - protein, 9 aa, Artificial Sequence
  Description of Artificial Sequence: Synthetic peptide
ACYDYYQQV

SEQ ID NO: 24364 - protein, 9 aa, Artificial Sequence
  Description of Artificial Sequence: Synthetic peptide
ACYSYEFEE

SEQ ID NO: 24365 - protein, 9 aa, Artificial Sequence
  Description of Artificial Sequence: Synthetic peptide
ADCFIFAEY

SEQ ID NO: 24366 - protein, 9 aa, Artificial Sequence
  Description of Artificial Sequence: Synthetic peptide
AELEIMWDD

SEQ ID NO: 24367 - protein, 9 aa, Artificial Sequence
  Description of Artificial Sequence: Synthetic peptide
AFGVYPSVS

SEQ ID NO: 24368 - protein, 9 aa, Artificial Sequence
  Description of Artificial Sequence: Synthetic peptide
AFNHVHEGT

SEQ ID NO: 24369 - protein, 9 aa, Artificial Sequence
  Description of Artificial Sequence: Synthetic peptide
AFTIEDDWW

SEQ ID NO: 24370 - protein, 9 aa, Artificial Sequence
  Description of Artificial Sequence: Synthetic peptide
AGVQENVSV

SEQ ID NO: 24371 - protein, 9 aa, Artificial Sequence
  Description of Artificial Sequence: Synthetic peptide
AILTVCIGA

SEQ ID NO: 24372 - protein, 9 aa, Artificial Sequence
  Description of Artificial Sequence: Synthetic peptide
AINMSGSGN

SEQ ID NO: 24373 - protein, 9 aa, Artificial Sequence
  Description of Artificial Sequence: Synthetic peptide
AKNDNLCAD

SEQ ID NO: 24374 - protein, 9 aa, Artificial Sequence
  Description of Artificial Sequence: Synthetic peptide
AKRQKVVLS

SEQ ID NO: 24375 - protein, 9 aa, Artificial Sequence
  Description of Artificial Sequence: Synthetic peptide
AKWRGTLIN

SEQ ID NO: 24376 - protein, 9 aa, Artificial Sequence
  Description of Artificial Sequence: Synthetic peptide
ALCDYMSWH

SEQ ID NO: 24377 - protein, 9 aa, Artificial Sequence
  Description of Artificial Sequence: Synthetic peptide
AMEYRSWHT

SEQ ID NO: 24378 - protein, 9 aa, Artificial Sequence
  Description of Artificial Sequence: Synthetic peptide
ANCIRPFTS

SEQ ID NO: 24379 - protein, 9 aa, Artificial Sequence
  Description of Artificial Sequence: Synthetic peptide
ANCKQDHCH

SEQ ID NO: 24380 - protein, 9 aa, Artificial Sequence
  Description of Artificial Sequence: Synthetic peptide
ANICTIESD

SEQ ID NO: 24381 - protein, 9 aa, Artificial Sequence
  Description of Artificial Sequence: Synthetic peptide
ANIRGRSMK

SEQ ID NO: 24382 - protein, 9 aa, Artificial Sequence
  Description of Artificial Sequence: Synthetic peptide
ANQVTGSWK

SEQ ID NO: 24383 - protein, 9 aa, Artificial Sequence
  Description of Artificial Sequence: Synthetic peptide
ANTQYPAHM

SEQ ID NO: 24384 - protein, 9 aa, Artificial Sequence
  Description of Artificial Sequence: Synthetic peptide
ANWPMACDQ

SEQ ID NO: 24385 - protein, 9 aa, Artificial Sequence
  Description of Artificial Sequence: Synthetic peptide
APFRKQMPG

SEQ ID NO: 24386 - protein, 9 aa, Artificial Sequence
  Description of Artificial Sequence: Synthetic peptide
APWHSNDMR

SEQ ID NO: 24387 - protein, 9 aa, Artificial Sequence
  Description of Artificial Sequence: Synthetic peptide
AQNVLDTVQ

SEQ ID NO: 24388 - protein, 9 aa, Artificial Sequence
  Description of Artificial Sequence: Synthetic peptide
AQNVLGTVQ

SEQ ID NO: 24389 - protein, 9 aa, Artificial Sequence
  Description of Artificial Sequence: Synthetic peptide
AQVSTLNGM

SEQ ID NO: 24390 - protein, 9 aa, Artificial Sequence
  Description of Artificial Sequence: Synthetic peptide
AREDPCAPR

SEQ ID NO: 24391 - protein, 9 aa, Artificial Sequence
  Description of Artificial Sequence: Synthetic peptide
ARGWDYKCP

SEQ ID NO: 24392 - protein, 9 aa, Artificial Sequence
  Description of Artificial Sequence: Synthetic peptide
ASERLYYCW

SEQ ID NO: 24393 - protein, 9 aa, Artificial Sequence
  Description of Artificial Sequence: Synthetic peptide
ASILQFTVD

SEQ ID NO: 24394 - protein, 9 aa, Artificial Sequence
  Description of Artificial Sequence: Synthetic peptide
ASKPTRKVT

SEQ ID NO: 24395 - protein, 9 aa, Artificial Sequence
  Description of Artificial Sequence: Synthetic peptide
ASQYQQSLS

SEQ ID NO: 24396 - protein, 9 aa, Artificial Sequence
  Description of Artificial Sequence: Synthetic peptide
ATAINQRQA

SEQ ID NO: 24397 - protein, 9 aa, Artificial Sequence
  Description of Artificial Sequence: Synthetic peptide
ATEQCLNYL

SEQ ID NO: 24398 - protein, 9 aa, Artificial Sequence
  Description of Artificial Sequence: Synthetic peptide
ATIRQTLLN

SEQ ID NO: 24399 - protein, 9 aa, Artificial Sequence
  Description of Artificial Sequence: Synthetic peptide
ATTCITSDD

SEQ ID NO: 24400 - protein, 9 aa, Artificial Sequence
  Description of Artificial Sequence: Synthetic peptide
ATTKGMSGW

SEQ ID NO: 24401 - protein, 9 aa, Artificial Sequence
  Description of Artificial Sequence: Synthetic peptide
ATTLINQEW

SEQ ID NO: 24402 - protein, 9 aa, Artificial Sequence
  Description of Artificial Sequence: Synthetic peptide
AVGHFYTNS

SEQ ID NO: 24403 - protein, 9 aa, Artificial Sequence
  Description of Artificial Sequence: Synthetic peptide
AVHTADVFC

SEQ ID NO: 24404 - protein, 9 aa, Artificial Sequence
  Description of Artificial Sequence: Synthetic peptide
AVIFMSVCE

SEQ ID NO: 24405 - protein, 9 aa, Artificial Sequence
  Description of Artificial Sequence: Synthetic peptide
AVTQQVDEN

SEQ ID NO: 24406 - protein, 9 aa, Artificial Sequence
  Description of Artificial Sequence: Synthetic peptide
AWCNIDMST

SEQ ID NO: 24407 - protein, 9 aa, Artificial Sequence
  Description of Artificial Sequence: Synthetic peptide
AWSCIMSYD

SEQ ID NO: 24408 - protein, 9 aa, Artificial Sequence
  Description of Artificial Sequence: Synthetic peptide
AYENFHWYD

SEQ ID NO: 24409 - protein, 9 aa, Artificial Sequence
  Description of Artificial Sequence: Synthetic peptide
AYHDSGHEW

SEQ ID NO: 24410 - protein, 9 aa, Artificial Sequence
  Description of Artificial Sequence: Synthetic peptide
AYYQLQMSS

SEQ ID NO: 24411 - protein, 9 aa, Artificial Sequence
  Description of Artificial Sequence: Synthetic peptide
CADVPITMA

SEQ ID NO: 24412 - protein, 9 aa, Artificial Sequence
  Description of Artificial Sequence: Synthetic peptide
CAEQWAAML

SEQ ID NO: 24413 - protein, 9 aa, Artificial Sequence
  Description of Artificial Sequence: Synthetic peptide
CAHWTYDCY

SEQ ID NO: 24414 - protein, 9 aa, Artificial Sequence
  Description of Artificial Sequence: Synthetic peptide
CAHWYYEQR

SEQ ID NO: 24415 - protein, 9 aa, Artificial Sequence
  Description of Artificial Sequence: Synthetic peptide
CANKEHVCH

SEQ ID NO: 24416 - protein, 9 aa, Artificial Sequence
  Description of Artificial Sequence: Synthetic peptide
CANWKDHGY

SEQ ID NO: 24417 - protein, 9 aa, Artificial Sequence
  Description of Artificial Sequence: Synthetic peptide
CAQHRDTAF

SEQ ID NO: 24418 - protein, 9 aa, Artificial Sequence
  Description of Artificial Sequence: Synthetic peptide
CASLKVFDS

SEQ ID NO: 24419 - protein, 9 aa, Artificial Sequence
  Description of Artificial Sequence: Synthetic peptide
CASTYTGIN

SEQ ID NO: 24420 - protein, 9 aa, Artificial Sequence
  Description of Artificial Sequence: Synthetic peptide
CATAMFRYQ

SEQ ID NO: 24421 - protein, 9 aa, Artificial Sequence
  Description of Artificial Sequence: Synthetic peptide
CATKSMMYG

SEQ ID NO: 24422 - protein, 9 aa, Artificial Sequence
  Description of Artificial Sequence: Synthetic peptide
CAWLSQTAS

SEQ ID NO: 24423 - protein, 9 aa, Artificial Sequence
  Description of Artificial Sequence: Synthetic peptide
CCMPLQSFG

SEQ ID NO: 24424 - protein, 9 aa, Artificial Sequence
  Description of Artificial Sequence: Synthetic peptide
CEGFEMRVE

SEQ ID NO: 24425 - protein, 9 aa, Artificial Sequence
  Description of Artificial Sequence: Synthetic peptide
CEGWGTYCI

SEQ ID NO: 24426 - protein, 9 aa, Artificial Sequence
  Description of Artificial Sequence: Synthetic peptide
CEHGNENWP

SEQ ID NO: 24427 - protein, 9 aa, Artificial Sequence
  Description of Artificial Sequence: Synthetic peptide
CFGFVNSVN

SEQ ID NO: 24428 - protein, 9 aa, Artificial Sequence
  Description of Artificial Sequence: Synthetic peptide
CFMWNWHHE

SEQ ID NO: 24429 - protein, 9 aa, Artificial Sequence
  Description of Artificial Sequence: Synthetic peptide
CFRMYDLLS

SEQ ID NO: 24430 - protein, 9 aa, Artificial Sequence
  Description of Artificial Sequence: Synthetic peptide
CFTNNVVWT

SEQ ID NO: 24431 - protein, 9 aa, Artificial Sequence
  Description of Artificial Sequence: Synthetic peptide
CGCSEVTPH

SEQ ID NO: 24432 - protein, 9 aa, Artificial Sequence
  Description of Artificial Sequence: Synthetic peptide
CGLIMEMCW

SEQ ID NO: 24433 - protein, 9 aa, Artificial Sequence
  Description of Artificial Sequence: Synthetic peptide
CGWWFNAAE

SEQ ID NO: 24434 - protein, 9 aa, Artificial Sequence
  Description of Artificial Sequence: Synthetic peptide
CHAEYSHEQ

SEQ ID NO: 24435 - protein, 9 aa, Artificial Sequence
  Description of Artificial Sequence: Synthetic peptide
CHFQYQNQA

SEQ ID NO: 24436 - protein, 9 aa, Artificial Sequence
  Description of Artificial Sequence: Synthetic peptide
CHLLLTDCY

SEQ ID NO: 24437 - protein, 9 aa, Artificial Sequence
  Description of Artificial Sequence: Synthetic peptide
CHMMDWQCG

SEQ ID NO: 24438 - protein, 9 aa, Artificial Sequence
  Description of Artificial Sequence: Synthetic peptide
CHMQFMEAG

SEQ ID NO: 24439 - protein, 9 aa, Artificial Sequence
  Description of Artificial Sequence: Synthetic peptide
CHTEYSHEQ

SEQ ID NO: 24440 - protein, 9 aa, Artificial Sequence
  Description of Artificial Sequence: Synthetic peptide
CIDLRLAWD

SEQ ID NO: 24441 - protein, 9 aa, Artificial Sequence
  Description of Artificial Sequence: Synthetic peptide
CIEWWGMMG

SEQ ID NO: 24442 - protein, 9 aa, Artificial Sequence
  Description of Artificial Sequence: Synthetic peptide
CIIPKMKER

SEQ ID NO: 24443 - protein, 9 aa, Artificial Sequence
  Description of Artificial Sequence: Synthetic peptide
CILHRYVIE

SEQ ID NO: 24444 - protein, 9 aa, Artificial Sequence
  Description of Artificial Sequence: Synthetic peptide
CILLKKCMA

SEQ ID NO: 24445 - protein, 9 aa, Artificial Sequence
  Description of Artificial Sequence: Synthetic peptide
CINADGKYS

SEQ ID NO: 24446 - protein, 9 aa, Artificial Sequence
  Description of Artificial Sequence: Synthetic peptide
CIQAVIGGT

SEQ ID NO: 24447 - protein, 9 aa, Artificial Sequence
  Description of Artificial Sequence: Synthetic peptide
CIRLTEYLG

SEQ ID NO: 24448 - protein, 9 aa, Artificial Sequence
  Description of Artificial Sequence: Synthetic peptide
CIRTMNGSW

SEQ ID NO: 24449 - protein, 9 aa, Artificial Sequence
  Description of Artificial Sequence: Synthetic peptide
CISRFDHKQ

SEQ ID NO: 24450 - protein, 9 aa, Artificial Sequence
  Description of Artificial Sequence: Synthetic peptide
CKQWTNQAH

SEQ ID NO: 24451 - protein, 9 aa, Artificial Sequence
  Description of Artificial Sequence: Synthetic peptide
CKVHKNWDR

SEQ ID NO: 24452 - protein, 9 aa, Artificial Sequence
  Description of Artificial Sequence: Synthetic peptide
CLGSTWVAA

SEQ ID NO: 24453 - protein, 9 aa, Artificial Sequence
  Description of Artificial Sequence: Synthetic peptide
CMCLKKCYY

SEQ ID NO: 24454 - protein, 9 aa, Artificial Sequence
  Description of Artificial Sequence: Synthetic peptide
CMQQYDNGQ

SEQ ID NO: 24455 - protein, 9 aa, Artificial Sequence
  Description of Artificial Sequence: Synthetic peptide
CMREQMNAC

SEQ ID NO: 24456 - protein, 9 aa, Artificial Sequence
  Description of Artificial Sequence: Synthetic peptide
CNKDINQSC

SEQ ID NO: 24457 - protein, 9 aa, Artificial Sequence
  Description of Artificial Sequence: Synthetic peptide
CNWLFMTQW

SEQ ID NO: 24458 - protein, 9 aa, Artificial Sequence
  Description of Artificial Sequence: Synthetic peptide
CPGPMMQMA

SEQ ID NO: 24459 - protein, 9 aa, Artificial Sequence
  Description of Artificial Sequence: Synthetic peptide
CPKPIGCGG

SEQ ID NO: 24460 - protein, 9 aa, Artificial Sequence
  Description of Artificial Sequence: Synthetic peptide
CQDFRHECA

SEQ ID NO: 24461 - protein, 9 aa, Artificial Sequence
  Description of Artificial Sequence: Synthetic peptide
CQQRIIMQA

SEQ ID NO: 24462 - protein, 9 aa, Artificial Sequence
  Description of Artificial Sequence: Synthetic peptide
CQRKWEKQE

SEQ ID NO: 24463 - protein, 9 aa, Artificial Sequence
  Description of Artificial Sequence: Synthetic peptide
CRTELGSMY

SEQ ID NO: 24464 - protein, 9 aa, Artificial Sequence
  Description of Artificial Sequence: Synthetic peptide
CSAKVPMPT

SEQ ID NO: 24465 - protein, 9 aa, Artificial Sequence
  Description of Artificial Sequence: Synthetic peptide
CSAQIKAAC

SEQ ID NO: 24466 - protein, 9 aa, Artificial Sequence
  Description of Artificial Sequence: Synthetic peptide
CSCAMYNFH

SEQ ID NO: 24467 - protein, 9 aa, Artificial Sequence
  Description of Artificial Sequence: Synthetic peptide
CSDQYQTQN

SEQ ID NO: 24468 - protein, 9 aa, Artificial Sequence
  Description of Artificial Sequence: Synthetic peptide
CSGRLGSLY

SEQ ID NO: 24469 - protein, 9 aa, Artificial Sequence
  Description of Artificial Sequence: Synthetic peptide
CSHHLMTFG

SEQ ID NO: 24470 - protein, 9 aa, Artificial Sequence
  Description of Artificial Sequence: Synthetic peptide
CSHNFQDQK

SEQ ID NO: 24471 - protein, 9 aa, Artificial Sequence
  Description of Artificial Sequence: Synthetic peptide
CSIWEDKSG

SEQ ID NO: 24472 - protein, 9 aa, Artificial Sequence
  Description of Artificial Sequence: Synthetic peptide
CSMECRNEL

SEQ ID NO: 24473 - protein, 9 aa, Artificial Sequence
  Description of Artificial Sequence: Synthetic peptide
CSTTMNVKT

SEQ ID NO: 24474 - protein, 9 aa, Artificial Sequence
  Description of Artificial Sequence: Synthetic peptide
CSVITQTTG

SEQ ID NO: 24475 - protein, 9 aa, Artificial Sequence
  Description of Artificial Sequence: Synthetic peptide
CTDKLLNAG

SEQ ID NO: 24476 - protein, 9 aa, Artificial Sequence
  Description of Artificial Sequence: Synthetic peptide
CTDRMVKAS

SEQ ID NO: 24477 - protein, 9 aa, Artificial Sequence
  Description of Artificial Sequence: Synthetic peptide
CTENYHQQY

SEQ ID NO: 24478 - protein, 9 aa, Artificial Sequence
  Description of Artificial Sequence: Synthetic peptide
CTGQYMGYI

SEQ ID NO: 24479 - protein, 9 aa, Artificial Sequence
  Description of Artificial Sequence: Synthetic peptide
CTHQQSIAV

SEQ ID NO: 24480 - protein, 9 aa, Artificial Sequence
  Description of Artificial Sequence: Synthetic peptide
CTLKQNMPA

SEQ ID NO: 24481 - protein, 9 aa, Artificial Sequence
  Description of Artificial Sequence: Synthetic peptide
CTQLSVNMQ

SEQ ID NO: 24482 - protein, 9 aa, Artificial Sequence
  Description of Artificial Sequence: Synthetic peptide
CTQSFVLYQ

SEQ ID NO: 24483 - protein, 9 aa, Artificial Sequence
  Description of Artificial Sequence: Synthetic peptide
CTVFSGRTA

SEQ ID NO: 24484 - protein, 9 aa, Artificial Sequence
  Description of Artificial Sequence: Synthetic peptide
CTVRQWHKP

SEQ ID NO: 24485 - protein, 9 aa, Artificial Sequence
  Description of Artificial Sequence: Synthetic peptide
CVAIDMSVA

SEQ ID NO: 24486 - protein, 9 aa, Artificial Sequence
  Description of Artificial Sequence: Synthetic peptide
CVEYLKQLY

SEQ ID NO: 24487 - protein, 9 aa, Artificial Sequence
  Description of Artificial Sequence: Synthetic peptide
CVGDREPWG

SEQ ID NO: 24488 - protein, 9 aa, Artificial Sequence
  Description of Artificial Sequence: Synthetic peptide
CVGINLDHH

SEQ ID NO: 24489 - protein, 9 aa, Artificial Sequence
  Description of Artificial Sequence: Synthetic peptide
CVGKQIMAE

SEQ ID NO: 24490 - protein, 9 aa, Artificial Sequence
  Description of Artificial Sequence: Synthetic peptide
CVIHPPNFD

SEQ ID NO: 24491 - protein, 9 aa, Artificial Sequence
  Description of Artificial Sequence: Synthetic peptide
CVLYYNQHC

SEQ ID NO: 24492 - protein, 9 aa, Artificial Sequence
  Description of Artificial Sequence: Synthetic peptide
CVQGQYYQE

SEQ ID NO: 24493 - protein, 9 aa, Artificial Sequence
  Description of Artificial Sequence: Synthetic peptide
CVQHNLVGY

SEQ ID NO: 24494 - protein, 9 aa, Artificial Sequence
  Description of Artificial Sequence: Synthetic peptide
CVQTMNGKS

SEQ ID NO: 24495 - protein, 9 aa, Artificial Sequence
  Description of Artificial Sequence: Synthetic peptide
CVYREIKTA

SEQ ID NO: 24496 - protein, 9 aa, Artificial Sequence
  Description of Artificial Sequence: Synthetic peptide
CWAIFRLQS

SEQ ID NO: 24497 - protein, 9 aa, Artificial Sequence
  Description of Artificial Sequence: Synthetic peptide
CWAQLNTDT

SEQ ID NO: 24498 - protein, 9 aa, Artificial Sequence
  Description of Artificial Sequence: Synthetic peptide
CWEMMKTQE

SEQ ID NO: 24499 - protein, 9 aa, Artificial Sequence
  Description of Artificial Sequence: Synthetic peptide
CWNIYNACD

SEQ ID NO: 24500 - protein, 9 aa, Artificial Sequence
  Description of Artificial Sequence: Synthetic peptide
CWSSWQKRD

SEQ ID NO: 24501 - protein, 9 aa, Artificial Sequence
  Description of Artificial Sequence: Synthetic peptide
CYDGWWCPS

SEQ ID NO: 24502 - protein, 9 aa, Artificial Sequence
  Description of Artificial Sequence: Synthetic peptide
CYKFVGAAD

SEQ ID NO: 24503 - protein, 9 aa, Artificial Sequence
  Description of Artificial Sequence: Synthetic peptide
CYRDVRARG

SEQ ID NO: 24504 - protein, 9 aa, Artificial Sequence
  Description of Artificial Sequence: Synthetic peptide
CYVYWTTCP

SEQ ID NO: 24505 - protein, 9 aa, Artificial Sequence
  Description of Artificial Sequence: Synthetic peptide
DAAQFGKHT

SEQ ID NO: 24506 - protein, 9 aa, Artificial Sequence
  Description of Artificial Sequence: Synthetic peptide
DACWGHEYA

SEQ ID NO: 24507 - protein, 9 aa, Artificial Sequence
  Description of Artificial Sequence: Synthetic peptide
DAGTNSFCG

SEQ ID NO: 24508 - protein, 9 aa, Artificial Sequence
  Description of Artificial Sequence: Synthetic peptide
DAGVTTYGG

SEQ ID NO: 24509 - protein, 9 aa, Artificial Sequence
  Description of Artificial Sequence: Synthetic peptide
DASKVKLHH

SEQ ID NO: 24510 - protein, 9 aa, Artificial Sequence
  Description of Artificial Sequence: Synthetic peptide
DASSYLHLC

SEQ ID NO: 24511 - protein, 9 aa, Artificial Sequence
  Description of Artificial Sequence: Synthetic peptide
DCAKFPFMI

SEQ ID NO: 24512 - protein, 9 aa, Artificial Sequence
  Description of Artificial Sequence: Synthetic peptide
DCEDIKKWE

SEQ ID NO: 24513 - protein, 9 aa, Artificial Sequence
  Description of Artificial Sequence: Synthetic peptide
DCGQFSIIE

SEQ ID NO: 24514 - protein, 9 aa, Artificial Sequence
  Description of Artificial Sequence: Synthetic peptide
DDHWDWLCY

SEQ ID NO: 24515 - protein, 9 aa, Artificial Sequence
  Description of Artificial Sequence: Synthetic peptide
DDLGAGRSD

SEQ ID NO: 24516 - protein, 9 aa, Artificial Sequence
  Description of Artificial Sequence: Synthetic peptide
DDLSMTNDC

SEQ ID NO: 24517 - protein, 9 aa, Artificial Sequence
  Description of Artificial Sequence: Synthetic peptide
DEEFYPPAW

SEQ ID NO: 24518 - protein, 9 aa, Artificial Sequence
  Description of Artificial Sequence: Synthetic peptide
DEFIWLEMH

SEQ ID NO: 24519 - protein, 9 aa, Artificial Sequence
  Description of Artificial Sequence: Synthetic peptide
DETVFRNPV

SEQ ID NO: 24520 - protein, 9 aa, Artificial Sequence
  Description of Artificial Sequence: Synthetic peptide
DFEYFSTKD

SEQ ID NO: 24521 - protein, 9 aa, Artificial Sequence
  Description of Artificial Sequence: Synthetic peptide
DGFQYDAHC

SEQ ID NO: 24522 - protein, 9 aa, Artificial Sequence
  Description of Artificial Sequence: Synthetic peptide
DGVQVDWGR

SEQ ID NO: 24523 - protein, 9 aa, Artificial Sequence
  Description of Artificial Sequence: Synthetic peptide
DHKEYMDKG

SEQ ID NO: 24524 - protein, 9 aa, Artificial Sequence
  Description of Artificial Sequence: Synthetic peptide
DHRQWKVLA

SEQ ID NO: 24525 - protein, 9 aa, Artificial Sequence
  Description of Artificial Sequence: Synthetic peptide
DICHYIRNE

SEQ ID NO: 24526 - protein, 9 aa, Artificial Sequence
  Description of Artificial Sequence: Synthetic peptide
DIMRYINTA

SEQ ID NO: 24527 - protein, 9 aa, Artificial Sequence
  Description of Artificial Sequence: Synthetic peptide
DIRTSVSDS

SEQ ID NO: 24528 - protein, 9 aa, Artificial Sequence
  Description of Artificial Sequence: Synthetic peptide
DITQMVVGC

SEQ ID NO: 24529 - protein, 9 aa, Artificial Sequence
  Description of Artificial Sequence: Synthetic peptide
DIVIKIGMG

SEQ ID NO: 24530 - protein, 9 aa, Artificial Sequence
  Description of Artificial Sequence: Synthetic peptide
DKGCKCQWG

SEQ ID NO: 24531 - protein, 9 aa, Artificial Sequence
  Description of Artificial Sequence: Synthetic peptide
DKKPVEDDM

SEQ ID NO: 24532 - protein, 9 aa, Artificial Sequence
  Description of Artificial Sequence: Synthetic peptide
DKVVQQCKD

SEQ ID NO: 24533 - protein, 9 aa, Artificial Sequence
  Description of Artificial Sequence: Synthetic peptide
DLEHKHQFF

SEQ ID NO: 24534 - protein, 9 aa, Artificial Sequence
  Description of Artificial Sequence: Synthetic peptide
DLRCDPQMW

SEQ ID NO: 24535 - protein, 9 aa, Artificial Sequence
  Description of Artificial Sequence: Synthetic peptide
DMDAQGAMW

SEQ ID NO: 24536 - protein, 9 aa, Artificial Sequence
  Description of Artificial Sequence: Synthetic peptide
DMYFTRHTW

SEQ ID NO: 24537 - protein, 9 aa, Artificial Sequence
  Description of Artificial Sequence: Synthetic peptide
DMYSMVKHN

SEQ ID NO: 24538 - protein, 9 aa, Artificial Sequence
  Description of Artificial Sequence: Synthetic peptide
DNFPWCTGN

SEQ ID NO: 24539 - protein, 9 aa, Artificial Sequence
  Description of Artificial Sequence: Synthetic peptide
DQCVLSRGH

SEQ ID NO: 24540 - protein, 9 aa, Artificial Sequence
  Description of Artificial Sequence: Synthetic peptide
DQEWSVHMG

SEQ ID NO: 24541 - protein, 9 aa, Artificial Sequence
  Description of Artificial Sequence: Synthetic peptide
DQFCTYDYT

SEQ ID NO: 24542 - protein, 9 aa, Artificial Sequence
  Description of Artificial Sequence: Synthetic peptide
DQGPSESDL

SEQ ID NO: 24543 - protein, 9 aa, Artificial Sequence
  Description of Artificial Sequence: Synthetic peptide
DQKVMFECY

SEQ ID NO: 24544 - protein, 9 aa, Artificial Sequence
  Description of Artificial Sequence: Synthetic peptide
DQQCAQMGV

SEQ ID NO: 24545 - protein, 9 aa, Artificial Sequence
  Description of Artificial Sequence: Synthetic peptide
DRQCCKLTF

SEQ ID NO: 24546 - protein, 9 aa, Artificial Sequence
  Description of Artificial Sequence: Synthetic peptide
DSHRLPGNW

SEQ ID NO: 24547 - protein, 9 aa, Artificial Sequence
  Description of Artificial Sequence: Synthetic peptide
DSMHYYMMH

SEQ ID NO: 24548 - protein, 9 aa, Artificial Sequence
  Description of Artificial Sequence: Synthetic peptide
DSNYEEKVI

SEQ ID NO: 24549 - protein, 9 aa, Artificial Sequence
  Description of Artificial Sequence: Synthetic peptide
DSQYMCVHR

SEQ ID NO: 24550 - protein, 9 aa, Artificial Sequence
  Description of Artificial Sequence: Synthetic peptide
DSRQFENQC

SEQ ID NO: 24551 - protein, 9 aa, Artificial Sequence
  Description of Artificial Sequence: Synthetic peptide
DSTGRPMMG

SEQ ID NO: 24552 - protein, 9 aa, Artificial Sequence
  Description of Artificial Sequence: Synthetic peptide
DSVAHSSQK

SEQ ID NO: 24553 - protein, 9 aa, Artificial Sequence
  Description of Artificial Sequence: Synthetic peptide
DTDRGLVYE

SEQ ID NO: 24554 - protein, 9 aa, Artificial Sequence
  Description of Artificial Sequence: Synthetic peptide
DTHAVEFAA

SEQ ID NO: 24555 - protein, 9 aa, Artificial Sequence
  Description of Artificial Sequence: Synthetic peptide
DTHWWNILC

SEQ ID NO: 24556 - protein, 9 aa, Artificial Sequence
  Description of Artificial Sequence: Synthetic peptide
DTYGIQDFQ

SEQ ID NO: 24557 - protein, 9 aa, Artificial Sequence
  Description of Artificial Sequence: Synthetic peptide
DVDFEWSQW

SEQ ID NO: 24558 - protein, 9 aa, Artificial Sequence
  Description of Artificial Sequence: Synthetic peptide
DVEPEYCAG

SEQ ID NO: 24559 - protein, 9 aa, Artificial Sequence
  Description of Artificial Sequence: Synthetic peptide
DVFIDWSGQ

SEQ ID NO: 24560 - protein, 9 aa, Artificial Sequence
  Description of Artificial Sequence: Synthetic peptide
DVIMGPIAN

SEQ ID NO: 24561 - protein, 9 aa, Artificial Sequence
  Description of Artificial Sequence: Synthetic peptide
DVINRYECG

SEQ ID NO: 24562 - protein, 9 aa, Artificial Sequence
  Description of Artificial Sequence: Synthetic peptide
DVKQQPLAI

SEQ ID NO: 24563 - protein, 9 aa, Artificial Sequence
  Description of Artificial Sequence: Synthetic peptide
DVKTDTSPD

SEQ ID NO: 24564 - protein, 9 aa, Artificial Sequence
  Description of Artificial Sequence: Synthetic peptide
DVLLADTEP

SEQ ID NO: 24565 - protein, 9 aa, Artificial Sequence
  Description of Artificial Sequence: Synthetic peptide
DVRDNEPER

SEQ ID NO: 24566 - protein, 9 aa, Artificial Sequence
  Description of Artificial Sequence: Synthetic peptide
DVRQILMCH

SEQ ID NO: 24567 - protein, 9 aa, Artificial Sequence
  Description of Artificial Sequence: Synthetic peptide
DVWQNSGAL

SEQ ID NO: 24568 - protein, 9 aa, Artificial Sequence
  Description of Artificial Sequence: Synthetic peptide
DWNQVDNYY

SEQ ID NO: 24569 - protein, 9 aa, Artificial Sequence
  Description of Artificial Sequence: Synthetic peptide
DWPAQKGWA

SEQ ID NO: 24570 - protein, 9 aa, Artificial Sequence
  Description of Artificial Sequence: Synthetic peptide
DWQPMLHMN

SEQ ID NO: 24571 - protein, 9 aa, Artificial Sequence
  Description of Artificial Sequence: Synthetic peptide
DYLAMNLHF

SEQ ID NO: 24572 - protein, 9 aa, Artificial Sequence
  Description of Artificial Sequence: Synthetic peptide
DYMHMLTAQ

SEQ ID NO: 24573 - protein, 9 aa, Artificial Sequence
  Description of Artificial Sequence: Synthetic peptide
DYMQNQYGT

SEQ ID NO: 24574 - protein, 9 aa, Artificial Sequence
  Description of Artificial Sequence: Synthetic peptide
EAEIFRLEG

SEQ ID NO: 24575 - protein, 9 aa, Artificial Sequence
  Description of Artificial Sequence: Synthetic peptide
EALMPMLGA

SEQ ID NO: 24576 - protein, 9 aa, Artificial Sequence
  Description of Artificial Sequence: Synthetic peptide
EASTQWLMQ

SEQ ID NO: 24577 - protein, 9 aa, Artificial Sequence
  Description of Artificial Sequence: Synthetic peptide
EATCDPPYN

SEQ ID NO: 24578 - protein, 9 aa, Artificial Sequence
  Description of Artificial Sequence: Synthetic peptide
EATIMDQVV

SEQ ID NO: 24579 - protein, 9 aa, Artificial Sequence
  Description of Artificial Sequence: Synthetic peptide
EATKQSWTH

SEQ ID NO: 24580 - protein, 9 aa, Artificial Sequence
  Description of Artificial Sequence: Synthetic peptide
EAYLTIDKL

SEQ ID NO: 24581 - protein, 9 aa, Artificial Sequence
  Description of Artificial Sequence: Synthetic peptide
ECDRYIAEY

SEQ ID NO: 24582 - protein, 9 aa, Artificial Sequence
  Description of Artificial Sequence: Synthetic peptide
ECGLWWGSE

SEQ ID NO: 24583 - protein, 9 aa, Artificial Sequence
  Description of Artificial Sequence: Synthetic peptide
ECKPIAGDK

SEQ ID NO: 24584 - protein, 9 aa, Artificial Sequence
  Description of Artificial Sequence: Synthetic peptide
ECPNVNTAQ

SEQ ID NO: 24585 - protein, 9 aa, Artificial Sequence
  Description of Artificial Sequence: Synthetic peptide
ECVANPFQP

SEQ ID NO: 24586 - protein, 9 aa, Artificial Sequence
  Description of Artificial Sequence: Synthetic peptide
ECYHVLANS

SEQ ID NO: 24587 - protein, 9 aa, Artificial Sequence
  Description of Artificial Sequence: Synthetic peptide
EDTHMIAGH

SEQ ID NO: 24588 - protein, 9 aa, Artificial Sequence
  Description of Artificial Sequence: Synthetic peptide
EEFDTVAAP

SEQ ID NO: 24589 - protein, 9 aa, Artificial Sequence
  Description of Artificial Sequence: Synthetic peptide
EFMLSSKDI

SEQ ID NO: 24590 - protein, 9 aa, Artificial Sequence
  Description of Artificial Sequence: Synthetic peptide
EFYHFMYKD

SEQ ID NO: 24591 - protein, 9 aa, Artificial Sequence
  Description of Artificial Sequence: Synthetic peptide
EGVESMLYA

SEQ ID NO: 24592 - protein, 9 aa, Artificial Sequence
  Description of Artificial Sequence: Synthetic peptide
EHDWITVYE

SEQ ID NO: 24593 - protein, 9 aa, Artificial Sequence
  Description of Artificial Sequence: Synthetic peptide
EHVIIKKNY

SEQ ID NO: 24594 - protein, 9 aa, Artificial Sequence
  Description of Artificial Sequence: Synthetic peptide
EICVVTGEQ

SEQ ID NO: 24595 - protein, 9 aa, Artificial Sequence
  Description of Artificial Sequence: Synthetic peptide
EIEMMGRGE

SEQ ID NO: 24596 - protein, 9 aa, Artificial Sequence
  Description of Artificial Sequence: Synthetic peptide
EIKVVNSRD

SEQ ID NO: 24597 - protein, 9 aa, Artificial Sequence
  Description of Artificial Sequence: Synthetic peptide
EIKYRRCMA

SEQ ID NO: 24598 - protein, 9 aa, Artificial Sequence
  Description of Artificial Sequence: Synthetic peptide
EIRECEECC

SEQ ID NO: 24599 - protein, 9 aa, Artificial Sequence
  Description of Artificial Sequence: Synthetic peptide
EITDWGVVP

SEQ ID NO: 24600 - protein, 9 aa, Artificial Sequence
  Description of Artificial Sequence: Synthetic peptide
EITYRRCMA

SEQ ID NO: 24601 - protein, 9 aa, Artificial Sequence
  Description of Artificial Sequence: Synthetic peptide
EIYMRHNFP

SEQ ID NO: 24602 - protein, 9 aa, Artificial Sequence
  Description of Artificial Sequence: Synthetic peptide
EKAHSWQDP

SEQ ID NO: 24603 - protein, 9 aa, Artificial Sequence
  Description of Artificial Sequence: Synthetic peptide
EKISICSQY

SEQ ID NO: 24604 - protein, 9 aa, Artificial Sequence
  Description of Artificial Sequence: Synthetic peptide
EKMESPECI

SEQ ID NO: 24605 - protein, 9 aa, Artificial Sequence
  Description of Artificial Sequence: Synthetic peptide
EKPYHEEKF

SEQ ID NO: 24606 - protein, 9 aa, Artificial Sequence
  Description of Artificial Sequence: Synthetic peptide
ELLFMNAMS

SEQ ID NO: 24607 - protein, 9 aa, Artificial Sequence
  Description of Artificial Sequence: Synthetic peptide
EMARNIEQN

SEQ ID NO: 24608 - protein, 9 aa, Artificial Sequence
  Description of Artificial Sequence: Synthetic peptide
EMRMNIQWE

SEQ ID NO: 24609 - protein, 9 aa, Artificial Sequence
  Description of Artificial Sequence: Synthetic peptide
ENCEPMHCE

SEQ ID NO: 24610 - protein, 9 aa, Artificial Sequence
  Description of Artificial Sequence: Synthetic peptide
ENCHITKMD

SEQ ID NO: 24611 - protein, 9 aa, Artificial Sequence
  Description of Artificial Sequence: Synthetic peptide
ENSYTHDTI

SEQ ID NO: 24612 - protein, 9 aa, Artificial Sequence
  Description of Artificial Sequence: Synthetic peptide
ENTLFMRYH

SEQ ID NO: 24613 - protein, 9 aa, Artificial Sequence
  Description of Artificial Sequence: Synthetic peptide
EPKQEEWYV

SEQ ID NO: 24614 - protein, 9 aa, Artificial Sequence
  Description of Artificial Sequence: Synthetic peptide
EPVTFVGQA

SEQ ID NO: 24615 - protein, 9 aa, Artificial Sequence
  Description of Artificial Sequence: Synthetic peptide
EPYFCCCVP

SEQ ID NO: 24616 - protein, 9 aa, Artificial Sequence
  Description of Artificial Sequence: Synthetic peptide
ERDHVNISC

SEQ ID NO: 24617 - protein, 9 aa, Artificial Sequence
  Description of Artificial Sequence: Synthetic peptide
ERSWYYDQY

SEQ ID NO: 24618 - protein, 9 aa, Artificial Sequence
  Description of Artificial Sequence: Synthetic peptide
ESCEGILTF

SEQ ID NO: 24619 - protein, 9 aa, Artificial Sequence
  Description of Artificial Sequence: Synthetic peptide
ESDPMQQFT

SEQ ID NO: 24620 - protein, 9 aa, Artificial Sequence
  Description of Artificial Sequence: Synthetic peptide
ESEYNSSYN

SEQ ID NO: 24621 - protein, 9 aa, Artificial Sequence
  Description of Artificial Sequence: Synthetic peptide
ESKSCGLTG

SEQ ID NO: 24622 - protein, 9 aa, Artificial Sequence
  Description of Artificial Sequence: Synthetic peptide
ESNLTPWSQ

SEQ ID NO: 24623 - protein, 9 aa, Artificial Sequence
  Description of Artificial Sequence: Synthetic peptide
ESRWMDEHT

SEQ ID NO: 24624 - protein, 9 aa, Artificial Sequence
  Description of Artificial Sequence: Synthetic peptide
ESTHKFMQD

SEQ ID NO: 24625 - protein, 9 aa, Artificial Sequence
  Description of Artificial Sequence: Synthetic peptide
ESYSTAEMA

SEQ ID NO: 24626 - protein, 9 aa, Artificial Sequence
  Description of Artificial Sequence: Synthetic peptide
ETEWAWVTQ

SEQ ID NO: 24627 - protein, 9 aa, Artificial Sequence
  Description of Artificial Sequence: Synthetic peptide
ETLPIEIRS

SEQ ID NO: 24628 - protein, 9 aa, Artificial Sequence
  Description of Artificial Sequence: Synthetic peptide
ETSKWHAVC

SEQ ID NO: 24629 - protein, 9 aa, Artificial Sequence
  Description of Artificial Sequence: Synthetic peptide
ETVLHQWAA

SEQ ID NO: 24630 - protein, 9 aa, Artificial Sequence
  Description of Artificial Sequence: Synthetic peptide
EVAMLEEDK

SEQ ID NO: 24631 - protein, 9 aa, Artificial Sequence
  Description of Artificial Sequence: Synthetic peptide
EVCLRHYWQ

SEQ ID NO: 24632 - protein, 9 aa, Artificial Sequence
  Description of Artificial Sequence: Synthetic peptide
EVDCKVSHV

SEQ ID NO: 24633 - protein, 9 aa, Artificial Sequence
  Description of Artificial Sequence: Synthetic peptide
EVDVHDEWV

SEQ ID NO: 24634 - protein, 9 aa, Artificial Sequence
  Description of Artificial Sequence: Synthetic peptide
EVEAIRGIQ

SEQ ID NO: 24635 - protein, 9 aa, Artificial Sequence
  Description of Artificial Sequence: Synthetic peptide
EVEFMSYRW

SEQ ID NO: 24636 - protein, 9 aa, Artificial Sequence
  Description of Artificial Sequence: Synthetic peptide
EVISYVENV

SEQ ID NO: 24637 - protein, 9 aa, Artificial Sequence
  Description of Artificial Sequence: Synthetic peptide
EVLHRDLHM

SEQ ID NO: 24638 - protein, 9 aa, Artificial Sequence
  Description of Artificial Sequence: Synthetic peptide
EVMCSDVPK

SEQ ID NO: 24639 - protein, 9 aa, Artificial Sequence
  Description of Artificial Sequence: Synthetic peptide
EVNCTHLYN

SEQ ID NO: 24640 - protein, 9 aa, Artificial Sequence
  Description of Artificial Sequence: Synthetic peptide
EYARKTKGW

SEQ ID NO: 24641 - protein, 9 aa, Artificial Sequence
  Description of Artificial Sequence: Synthetic peptide
EYPYRYEFS

SEQ ID NO: 24642 - protein, 9 aa, Artificial Sequence
  Description of Artificial Sequence: Synthetic peptide
EYRWMPNHL

SEQ ID NO: 24643 - protein, 9 aa, Artificial Sequence
  Description of Artificial Sequence: Synthetic peptide
FACQCKGCS

SEQ ID NO: 24644 - protein, 9 aa, Artificial Sequence
  Description of Artificial Sequence: Synthetic peptide
FAKYMNHGG

SEQ ID NO: 24645 - protein, 9 aa, Artificial Sequence
  Description of Artificial Sequence: Synthetic peptide
FDEPMIHQW

SEQ ID NO: 24646 - protein, 9 aa, Artificial Sequence
  Description of Artificial Sequence: Synthetic peptide
FEYIWVYWY

SEQ ID NO: 24647 - protein, 9 aa, Artificial Sequence
  Description of Artificial Sequence: Synthetic peptide
FFCPKHKWP

SEQ ID NO: 24648 - protein, 9 aa, Artificial Sequence
  Description of Artificial Sequence: Synthetic peptide
FICLRYKDQ

SEQ ID NO: 24649 - protein, 9 aa, Artificial Sequence
  Description of Artificial Sequence: Synthetic peptide
FIWVCHTYK

SEQ ID NO: 24650 - protein, 9 aa, Artificial Sequence
  Description of Artificial Sequence: Synthetic peptide
FKMWKLFQA

SEQ ID NO: 24651 - protein, 9 aa, Artificial Sequence
  Description of Artificial Sequence: Synthetic peptide
FLELMQIGL

SEQ ID NO: 24652 - protein, 9 aa, Artificial Sequence
  Description of Artificial Sequence: Synthetic peptide
FLRYMVCAH

SEQ ID NO: 24653 - protein, 9 aa, Artificial Sequence
  Description of Artificial Sequence: Synthetic peptide
FMEQDIGHA

SEQ ID NO: 24654 - protein, 9 aa, Artificial Sequence
  Description of Artificial Sequence: Synthetic peptide
FNGSICDTY

SEQ ID NO: 24655 - protein, 9 aa, Artificial Sequence
  Description of Artificial Sequence: Synthetic peptide
FNNNDVHPI

SEQ ID NO: 24656 - protein, 9 aa, Artificial Sequence
  Description of Artificial Sequence: Synthetic peptide
FPSAYQHQH

SEQ ID NO: 24657 - protein, 9 aa, Artificial Sequence
  Description of Artificial Sequence: Synthetic peptide
FQSMGEIWC

SEQ ID NO: 24658 - protein, 9 aa, Artificial Sequence
  Description of Artificial Sequence: Synthetic peptide
FRGHGMWDA

SEQ ID NO: 24659 - protein, 9 aa, Artificial Sequence
  Description of Artificial Sequence: Synthetic peptide
FRLCSDVRC

SEQ ID NO: 24660 - protein, 9 aa, Artificial Sequence
  Description of Artificial Sequence: Synthetic peptide
FSNLVEVSK

SEQ ID NO: 24661 - protein, 9 aa, Artificial Sequence
  Description of Artificial Sequence: Synthetic peptide
FSTCTSCCA

SEQ ID NO: 24662 - protein, 9 aa, Artificial Sequence
  Description of Artificial Sequence: Synthetic peptide
FTCPYKFGM

SEQ ID NO: 24663 - protein, 9 aa, Artificial Sequence
  Description of Artificial Sequence: Synthetic peptide
FTEQIDRQM

SEQ ID NO: 24664 - protein, 9 aa, Artificial Sequence
  Description of Artificial Sequence: Synthetic peptide
FTMASAQAD

SEQ ID NO: 24665 - protein, 9 aa, Artificial Sequence
  Description of Artificial Sequence: Synthetic peptide
FVCLGRKGP

SEQ ID NO: 24666 - protein, 9 aa, Artificial Sequence
  Description of Artificial Sequence: Synthetic peptide
FVGWYWNSP

SEQ ID NO: 24667 - protein, 9 aa, Artificial Sequence
  Description of Artificial Sequence: Synthetic peptide
FWKTKSGGA

SEQ ID NO: 24668 - protein, 9 aa, Artificial Sequence
  Description of Artificial Sequence: Synthetic peptide
FWQMKSCLP

SEQ ID NO: 24669 - protein, 9 aa, Artificial Sequence
  Description of Artificial Sequence: Synthetic peptide
FWVLDMCQA

SEQ ID NO: 24670 - protein, 9 aa, Artificial Sequence
  Description of Artificial Sequence: Synthetic peptide
FWYPKDRMV

SEQ ID NO: 24671 - protein, 9 aa, Artificial Sequence
  Description of Artificial Sequence: Synthetic peptide
GACERRDAM

SEQ ID NO: 24672 - protein, 9 aa, Artificial Sequence
  Description of Artificial Sequence: Synthetic peptide
GADQCMLWE

SEQ ID NO: 24673 - protein, 9 aa, Artificial Sequence
  Description of Artificial Sequence: Synthetic peptide
GAIYFNKLG

SEQ ID NO: 24674 - protein, 9 aa, Artificial Sequence
  Description of Artificial Sequence: Synthetic peptide
GCAPLVQDD

SEQ ID NO: 24675 - protein, 9 aa, Artificial Sequence
  Description of Artificial Sequence: Synthetic peptide
GCAYQAVNP

SEQ ID NO: 24676 - protein, 9 aa, Artificial Sequence
  Description of Artificial Sequence: Synthetic peptide
GCISTLNGM

SEQ ID NO: 24677 - protein, 9 aa, Artificial Sequence
  Description of Artificial Sequence: Synthetic peptide
GCMKLVGTA

SEQ ID NO: 24678 - protein, 9 aa, Artificial Sequence
  Description of Artificial Sequence: Synthetic peptide
GEVVPHISW

SEQ ID NO: 24679 - protein, 9 aa, Artificial Sequence
  Description of Artificial Sequence: Synthetic peptide
GFHLEEKYD

SEQ ID NO: 24680 - protein, 9 aa, Artificial Sequence
  Description of Artificial Sequence: Synthetic peptide
GFKQYATYI

SEQ ID NO: 24681 - protein, 9 aa, Artificial Sequence
  Description of Artificial Sequence: Synthetic peptide
GGHFDGWQR

SEQ ID NO: 24682 - protein, 9 aa, Artificial Sequence
  Description of Artificial Sequence: Synthetic peptide
GGMWLQNVS

SEQ ID NO: 24683 - protein, 9 aa, Artificial Sequence
  Description of Artificial Sequence: Synthetic peptide
GGWFMGVMG

SEQ ID NO: 24684 - protein, 9 aa, Artificial Sequence
  Description of Artificial Sequence: Synthetic peptide
GHREFQMPY

SEQ ID NO: 24685 - protein, 9 aa, Artificial Sequence
  Description of Artificial Sequence: Synthetic peptide
GHVAYPPDQ

SEQ ID NO: 24686 - protein, 9 aa, Artificial Sequence
  Description of Artificial Sequence: Synthetic peptide
GIARMFRWV

SEQ ID NO: 24687 - protein, 9 aa, Artificial Sequence
  Description of Artificial Sequence: Synthetic peptide
GIGYKWFPG

SEQ ID NO: 24688 - protein, 9 aa, Artificial Sequence
  Description of Artificial Sequence: Synthetic peptide
GLMPVMNYT

SEQ ID NO: 24689 - protein, 9 aa, Artificial Sequence
  Description of Artificial Sequence: Synthetic peptide
GNATKIKLN

SEQ ID NO: 24690 - protein, 9 aa, Artificial Sequence
  Description of Artificial Sequence: Synthetic peptide
GNRRCWVPF

SEQ ID NO: 24691 - protein, 9 aa, Artificial Sequence
  Description of Artificial Sequence: Synthetic peptide
GQGGNCKSH

SEQ ID NO: 24692 - protein, 9 aa, Artificial Sequence
  Description of Artificial Sequence: Synthetic peptide
GSHEYWEMA

SEQ ID NO: 24693 - protein, 9 aa, Artificial Sequence
  Description of Artificial Sequence: Synthetic peptide
GSLFQNYQW

SEQ ID NO: 24694 - protein, 9 aa, Artificial Sequence
  Description of Artificial Sequence: Synthetic peptide
GSYMACRMD

SEQ ID NO: 24695 - protein, 9 aa, Artificial Sequence
  Description of Artificial Sequence: Synthetic peptide
GTCNFQMDS

SEQ ID NO: 24696 - protein, 9 aa, Artificial Sequence
  Description of Artificial Sequence: Synthetic peptide
GTDCFWWHE

SEQ ID NO: 24697 - protein, 9 aa, Artificial Sequence
  Description of Artificial Sequence: Synthetic peptide
GTSFVGNPL

SEQ ID NO: 24698 - protein, 9 aa, Artificial Sequence
  Description of Artificial Sequence: Synthetic peptide
GTYVCQNHD

SEQ ID NO: 24699 - protein, 9 aa, Artificial Sequence
  Description of Artificial Sequence: Synthetic peptide
GVAHPEAVC

SEQ ID NO: 24700 - protein, 9 aa, Artificial Sequence
  Description of Artificial Sequence: Synthetic peptide
GVTEHNEVC

SEQ ID NO: 24701 - protein, 9 aa, Artificial Sequence
  Description of Artificial Sequence: Synthetic peptide
GVVDESYDP

SEQ ID NO: 24702 - protein, 9 aa, Artificial Sequence
  Description of Artificial Sequence: Synthetic peptide
GVVGLNTCV

SEQ ID NO: 24703 - protein, 9 aa, Artificial Sequence
  Description of Artificial Sequence: Synthetic peptide
GWCNRYFWD

SEQ ID NO: 24704 - protein, 9 aa, Artificial Sequence
  Description of Artificial Sequence: Synthetic peptide
GWIRYKNSE

SEQ ID NO: 24705 - protein, 9 aa, Artificial Sequence
  Description of Artificial Sequence: Synthetic peptide
GYFGKCKRI

SEQ ID NO: 24706 - protein, 9 aa, Artificial Sequence
  Description of Artificial Sequence: Synthetic peptide
HADMEQGNS

SEQ ID NO: 24707 - protein, 9 aa, Artificial Sequence
  Description of Artificial Sequence: Synthetic peptide
HADSNIACN

SEQ ID NO: 24708 - protein, 9 aa, Artificial Sequence
  Description of Artificial Sequence: Synthetic peptide
HAESMVCHH

SEQ ID NO: 24709 - protein, 9 aa, Artificial Sequence
  Description of Artificial Sequence: Synthetic peptide
HASLNLNPS

SEQ ID NO: 24710 - protein, 9 aa, Artificial Sequence
  Description of Artificial Sequence: Synthetic peptide
HCIWNWSDA

SEQ ID NO: 24711 - protein, 9 aa, Artificial Sequence
  Description of Artificial Sequence: Synthetic peptide
HEAKQVPKA

SEQ ID NO: 24712 - protein, 9 aa, Artificial Sequence
  Description of Artificial Sequence: Synthetic peptide
HERCSELEY

SEQ ID NO: 24713 - protein, 9 aa, Artificial Sequence
  Description of Artificial Sequence: Synthetic peptide
HEYIYETWP

SEQ ID NO: 24714 - protein, 9 aa, Artificial Sequence
  Description of Artificial Sequence: Synthetic peptide
HFYVGSPED

SEQ ID NO: 24715 - protein, 9 aa, Artificial Sequence
  Description of Artificial Sequence: Synthetic peptide
HHQYIDCFV

SEQ ID NO: 24716 - protein, 9 aa, Artificial Sequence
  Description of Artificial Sequence: Synthetic peptide
HIDPDHWHG

SEQ ID NO: 24717 - protein, 9 aa, Artificial Sequence
  Description of Artificial Sequence: Synthetic peptide
HKLYEDRIN

SEQ ID NO: 24718 - protein, 9 aa, Artificial Sequence
  Description of Artificial Sequence: Synthetic peptide
HKNDLAAVQ

SEQ ID NO: 24719 - protein, 9 aa, Artificial Sequence
  Description of Artificial Sequence: Synthetic peptide
HKSDMWWTA

SEQ ID NO: 24720 - protein, 9 aa, Artificial Sequence
  Description of Artificial Sequence: Synthetic peptide
HLPAPELYL

SEQ ID NO: 24721 - protein, 9 aa, Artificial Sequence
  Description of Artificial Sequence: Synthetic peptide
HMDIQMFMP

SEQ ID NO: 24722 - protein, 9 aa, Artificial Sequence
  Description of Artificial Sequence: Synthetic peptide
HNFCMYWPQ

SEQ ID NO: 24723 - protein, 9 aa, Artificial Sequence
  Description of Artificial Sequence: Synthetic peptide
HNHSADSFA

SEQ ID NO: 24724 - protein, 9 aa, Artificial Sequence
  Description of Artificial Sequence: Synthetic peptide
HPELLDRFE

SEQ ID NO: 24725 - protein, 9 aa, Artificial Sequence
  Description of Artificial Sequence: Synthetic peptide
HPSSTWSIL

SEQ ID NO: 24726 - protein, 9 aa, Artificial Sequence
  Description of Artificial Sequence: Synthetic peptide
HQNKFEWSP

SEQ ID NO: 24727 - protein, 9 aa, Artificial Sequence
  Description of Artificial Sequence: Synthetic peptide
HRNEQLIRA

SEQ ID NO: 24728 - protein, 9 aa, Artificial Sequence
  Description of Artificial Sequence: Synthetic peptide
HSGELYDGF

SEQ ID NO: 24729 - protein, 9 aa, Artificial Sequence
  Description of Artificial Sequence: Synthetic peptide
HSMLETTGK

SEQ ID NO: 24730 - protein, 9 aa, Artificial Sequence
  Description of Artificial Sequence: Synthetic peptide
HSNFFHMND

SEQ ID NO: 24731 - protein, 9 aa, Artificial Sequence
  Description of Artificial Sequence: Synthetic peptide
HSYQQCAVG

SEQ ID NO: 24732 - protein, 9 aa, Artificial Sequence
  Description of Artificial Sequence: Synthetic peptide
HTPQVLKGE

SEQ ID NO: 24733 - protein, 9 aa, Artificial Sequence
  Description of Artificial Sequence: Synthetic peptide
HTTAHQNWA

SEQ ID NO: 24734 - protein, 9 aa, Artificial Sequence
  Description of Artificial Sequence: Synthetic peptide
HTTFALVMH

SEQ ID NO: 24735 - protein, 9 aa, Artificial Sequence
  Description of Artificial Sequence: Synthetic peptide
HVDSNIACN

SEQ ID NO: 24736 - protein, 9 aa, Artificial Sequence
  Description of Artificial Sequence: Synthetic peptide
HVKSPTFQT

SEQ ID NO: 24737 - protein, 9 aa, Artificial Sequence
  Description of Artificial Sequence: Synthetic peptide
HVKVHEMMI

SEQ ID NO: 24738 - protein, 9 aa, Artificial Sequence
  Description of Artificial Sequence: Synthetic peptide
HVMPKQGFN

SEQ ID NO: 24739 - protein, 9 aa, Artificial Sequence
  Description of Artificial Sequence: Synthetic peptide
HYCKIIPYH

SEQ ID NO: 24740 - protein, 9 aa, Artificial Sequence
  Description of Artificial Sequence: Synthetic peptide
HYEYCFGIF

SEQ ID NO: 24741 - protein, 9 aa, Artificial Sequence
  Description of Artificial Sequence: Synthetic peptide
IAGTYTNWY

SEQ ID NO: 24742 - protein, 9 aa, Artificial Sequence
  Description of Artificial Sequence: Synthetic peptide
IAMDNQNTD

SEQ ID NO: 24743 - protein, 9 aa, Artificial Sequence
  Description of Artificial Sequence: Synthetic peptide
IAQDTGTLH

SEQ ID NO: 24744 - protein, 9 aa, Artificial Sequence
  Description of Artificial Sequence: Synthetic peptide
ICKIGSRLD

SEQ ID NO: 24745 - protein, 9 aa, Artificial Sequence
  Description of Artificial Sequence: Synthetic peptide
IEGHWAQFP

SEQ ID NO: 24746 - protein, 9 aa, Artificial Sequence
  Description of Artificial Sequence: Synthetic peptide
IEIATVNVH

SEQ ID NO: 24747 - protein, 9 aa, Artificial Sequence
  Description of Artificial Sequence: Synthetic peptide
IFMVHDSDY

SEQ ID NO: 24748 - protein, 9 aa, Artificial Sequence
  Description of Artificial Sequence: Synthetic peptide
IFVGKNAAW

SEQ ID NO: 24749 - protein, 9 aa, Artificial Sequence
  Description of Artificial Sequence: Synthetic peptide
IGIQFLKDH

SEQ ID NO: 24750 - protein, 9 aa, Artificial Sequence
  Description of Artificial Sequence: Synthetic peptide
IGTYGWIEA

SEQ ID NO: 24751 - protein, 9 aa, Artificial Sequence
  Description of Artificial Sequence: Synthetic peptide
IHDASTKDQ

SEQ ID NO: 24752 - protein, 9 aa, Artificial Sequence
  Description of Artificial Sequence: Synthetic peptide
IHMHEVGVY

SEQ ID NO: 24753 - protein, 9 aa, Artificial Sequence
  Description of Artificial Sequence: Synthetic peptide
IIKDVGDFG

SEQ ID NO: 24754 - protein, 9 aa, Artificial Sequence
  Description of Artificial Sequence: Synthetic peptide
IIPQVDQYY

SEQ ID NO: 24755 - protein, 9 aa, Artificial Sequence
  Description of Artificial Sequence: Synthetic peptide
IIRDKTQDD

SEQ ID NO: 24756 - protein, 9 aa, Artificial Sequence
  Description of Artificial Sequence: Synthetic peptide
IKCDKCQDQ

SEQ ID NO: 24757 - protein, 9 aa, Artificial Sequence
  Description of Artificial Sequence: Synthetic peptide
IKGRFDWDC

SEQ ID NO: 24758 - protein, 9 aa, Artificial Sequence
  Description of Artificial Sequence: Synthetic peptide
IMEYVHKPG

SEQ ID NO: 24759 - protein, 9 aa, Artificial Sequence
  Description of Artificial Sequence: Synthetic peptide
IQAATNLWQ

SEQ ID NO: 24760 - protein, 9 aa, Artificial Sequence
  Description of Artificial Sequence: Synthetic peptide
IQGEVTVTA

SEQ ID NO: 24761 - protein, 9 aa, Artificial Sequence
  Description of Artificial Sequence: Synthetic peptide
IQGPEAIMK

SEQ ID NO: 24762 - protein, 9 aa, Artificial Sequence
  Description of Artificial Sequence: Synthetic peptide
IQGVQWMNH

SEQ ID NO: 24763 - protein, 9 aa, Artificial Sequence
  Description of Artificial Sequence: Synthetic peptide
IREEMHEQF

SEQ ID NO: 24764 - protein, 9 aa, Artificial Sequence
  Description of Artificial Sequence: Synthetic peptide
ISGLAQMGM

SEQ ID NO: 24765 - protein, 9 aa, Artificial Sequence
  Description of Artificial Sequence: Synthetic peptide
ISICYHMFP

SEQ ID NO: 24766 - protein, 9 aa, Artificial Sequence
  Description of Artificial Sequence: Synthetic peptide
ISMQICAGW

SEQ ID NO: 24767 - protein, 9 aa, Artificial Sequence
  Description of Artificial Sequence: Synthetic peptide
ITCQSNEQH

SEQ ID NO: 24768 - protein, 9 aa, Artificial Sequence
  Description of Artificial Sequence: Synthetic peptide
ITGTRFAEV

SEQ ID NO: 24769 - protein, 9 aa, Artificial Sequence
  Description of Artificial Sequence: Synthetic peptide
ITMPAEAFQ

SEQ ID NO: 24770 - protein, 9 aa, Artificial Sequence
  Description of Artificial Sequence: Synthetic peptide
ITTKYQIDH

SEQ ID NO: 24771 - protein, 9 aa, Artificial Sequence
  Description of Artificial Sequence: Synthetic peptide
ITTPQLNSV

SEQ ID NO: 24772 - protein, 9 aa, Artificial Sequence
  Description of Artificial Sequence: Synthetic peptide
IVDHLPRHG

SEQ ID NO: 24773 - protein, 9 aa, Artificial Sequence
  Description of Artificial Sequence: Synthetic peptide
IVGLATTAM

SEQ ID NO: 24774 - protein, 9 aa, Artificial Sequence
  Description of Artificial Sequence: Synthetic peptide
IVHPTLNTP

SEQ ID NO: 24775 - protein, 9 aa, Artificial Sequence
  Description of Artificial Sequence: Synthetic peptide
IVMREHGAC

SEQ ID NO: 24776 - protein, 9 aa, Artificial Sequence
  Description of Artificial Sequence: Synthetic peptide
IWADLECGR

SEQ ID NO: 24777 - protein, 9 aa, Artificial Sequence
  Description of Artificial Sequence: Synthetic peptide
IWDLAGDAM

SEQ ID NO: 24778 - protein, 9 aa, Artificial Sequence
  Description of Artificial Sequence: Synthetic peptide
IYNQRQMCP

SEQ ID NO: 24779 - protein, 9 aa, Artificial Sequence
  Description of Artificial Sequence: Synthetic peptide
KACDRQIYE

SEQ ID NO: 24780 - protein, 9 aa, Artificial Sequence
  Description of Artificial Sequence: Synthetic peptide
KACEMYASF

SEQ ID NO: 24781 - protein, 9 aa, Artificial Sequence
  Description of Artificial Sequence: Synthetic peptide
KADAKVPCC

SEQ ID NO: 24782 - protein, 9 aa, Artificial Sequence
  Description of Artificial Sequence: Synthetic peptide
KADVRSAQH

SEQ ID NO: 24783 - protein, 9 aa, Artificial Sequence
  Description of Artificial Sequence: Synthetic peptide
KASNDYLCR

SEQ ID NO: 24784 - protein, 9 aa, Artificial Sequence
  Description of Artificial Sequence: Synthetic peptide
KCDGLWCHF

SEQ ID NO: 24785 - protein, 9 aa, Artificial Sequence
  Description of Artificial Sequence: Synthetic peptide
KDRMGLNQC

SEQ ID NO: 24786 - protein, 9 aa, Artificial Sequence
  Description of Artificial Sequence: Synthetic peptide
KDVTKLRCP

SEQ ID NO: 24787 - protein, 9 aa, Artificial Sequence
  Description of Artificial Sequence: Synthetic peptide
KEPITAEHK

SEQ ID NO: 24788 - protein, 9 aa, Artificial Sequence
  Description of Artificial Sequence: Synthetic peptide
KFAGAGIGW

SEQ ID NO: 24789 - protein, 9 aa, Artificial Sequence
  Description of Artificial Sequence: Synthetic peptide
KGKLEYRIR

SEQ ID NO: 24790 - protein, 9 aa, Artificial Sequence
  Description of Artificial Sequence: Synthetic peptide
KGLDVPHWG

SEQ ID NO: 24791 - protein, 9 aa, Artificial Sequence
  Description of Artificial Sequence: Synthetic peptide
KHCEILCNW

SEQ ID NO: 24792 - protein, 9 aa, Artificial Sequence
  Description of Artificial Sequence: Synthetic peptide
KIAEWEDWM

SEQ ID NO: 24793 - protein, 9 aa, Artificial Sequence
  Description of Artificial Sequence: Synthetic peptide
KICSQLDSP

SEQ ID NO: 24794 - protein, 9 aa, Artificial Sequence
  Description of Artificial Sequence: Synthetic peptide
KKFWDTVIC

SEQ ID NO: 24795 - protein, 9 aa, Artificial Sequence
  Description of Artificial Sequence: Synthetic peptide
KKNCREPEQ

SEQ ID NO: 24796 - protein, 9 aa, Artificial Sequence
  Description of Artificial Sequence: Synthetic peptide
KMQAMGVNW

SEQ ID NO: 24797 - protein, 9 aa, Artificial Sequence
  Description of Artificial Sequence: Synthetic peptide
KPTKYEWLH

SEQ ID NO: 24798 - protein, 9 aa, Artificial Sequence
  Description of Artificial Sequence: Synthetic peptide
KREAQMVGN

SEQ ID NO: 24799 - protein, 9 aa, Artificial Sequence
  Description of Artificial Sequence: Synthetic peptide
KSLIQQSWD

SEQ ID NO: 24800 - protein, 9 aa, Artificial Sequence
  Description of Artificial Sequence: Synthetic peptide
KSMVIRHAQ

SEQ ID NO: 24801 - protein, 9 aa, Artificial Sequence
  Description of Artificial Sequence: Synthetic peptide
KTCHPEGMP

SEQ ID NO: 24802 - protein, 9 aa, Artificial Sequence
  Description of Artificial Sequence: Synthetic peptide
KTNMHAKSV

SEQ ID NO: 24803 - protein, 9 aa, Artificial Sequence
  Description of Artificial Sequence: Synthetic peptide
KTNRTYMWR

SEQ ID NO: 24804 - protein, 9 aa, Artificial Sequence
  Description of Artificial Sequence: Synthetic peptide
KVEACQSVE

SEQ ID NO: 24805 - protein, 9 aa, Artificial Sequence
  Description of Artificial Sequence: Synthetic peptide
KVGAHVAQE

SEQ ID NO: 24806 - protein, 9 aa, Artificial Sequence
  Description of Artificial Sequence: Synthetic peptide
KVGIHDSLV

SEQ ID NO: 24807 - protein, 9 aa, Artificial Sequence
  Description of Artificial Sequence: Synthetic peptide
KVKWKDKDL

SEQ ID NO: 24808 - protein, 9 aa, Artificial Sequence
  Description of Artificial Sequence: Synthetic peptide
KVYYIISHQ

SEQ ID NO: 24809 - protein, 9 aa, Artificial Sequence
  Description of Artificial Sequence: Synthetic peptide
KWIMWIEYN

SEQ ID NO: 24810 - protein, 9 aa, Artificial Sequence
  Description of Artificial Sequence: Synthetic peptide
KYHNVPSKI

SEQ ID NO: 24811 - protein, 9 aa, Artificial Sequence
  Description of Artificial Sequence: Synthetic peptide
KYQYYQEGP

SEQ ID NO: 24812 - protein, 9 aa, Artificial Sequence
  Description of Artificial Sequence: Synthetic peptide
LAGCLCYTN

SEQ ID NO: 24813 - protein, 9 aa, Artificial Sequence
  Description of Artificial Sequence: Synthetic peptide
LAGCLWYTN

SEQ ID NO: 24814 - protein, 9 aa, Artificial Sequence
  Description of Artificial Sequence: Synthetic peptide
LAICHSNLA

SEQ ID NO: 24815 - protein, 9 aa, Artificial Sequence
  Description of Artificial Sequence: Synthetic peptide
LANMPNMGF

SEQ ID NO: 24816 - protein, 9 aa, Artificial Sequence
  Description of Artificial Sequence: Synthetic peptide
LATQACSCN

SEQ ID NO: 24817 - protein, 9 aa, Artificial Sequence
  Description of Artificial Sequence: Synthetic peptide
LCASRGLDP

SEQ ID NO: 24818 - protein, 9 aa, Artificial Sequence
  Description of Artificial Sequence: Synthetic peptide
LCGPIIKAS

SEQ ID NO: 24819 - protein, 9 aa, Artificial Sequence
  Description of Artificial Sequence: Synthetic peptide
LCIRLWTSA

SEQ ID NO: 24820 - protein, 9 aa, Artificial Sequence
  Description of Artificial Sequence: Synthetic peptide
LCPNWWRYQ

SEQ ID NO: 24821 - protein, 9 aa, Artificial Sequence
  Description of Artificial Sequence: Synthetic peptide
LDRKACMIA

SEQ ID NO: 24822 - protein, 9 aa, Artificial Sequence
  Description of Artificial Sequence: Synthetic peptide
LEAELMGHC

SEQ ID NO: 24823 - protein, 9 aa, Artificial Sequence
  Description of Artificial Sequence: Synthetic peptide
LEVDMHASY

SEQ ID NO: 24824 - protein, 9 aa, Artificial Sequence
  Description of Artificial Sequence: Synthetic peptide
LFEQKMVWS

SEQ ID NO: 24825 - protein, 9 aa, Artificial Sequence
  Description of Artificial Sequence: Synthetic peptide
LFSPYEACC

SEQ ID NO: 24826 - protein, 9 aa, Artificial Sequence
  Description of Artificial Sequence: Synthetic peptide
LFVVTTTNN

SEQ ID NO: 24827 - protein, 9 aa, Artificial Sequence
  Description of Artificial Sequence: Synthetic peptide
LGSLYRRRG

SEQ ID NO: 24828 - protein, 9 aa, Artificial Sequence
  Description of Artificial Sequence: Synthetic peptide
LGYHVQEAG

SEQ ID NO: 24829 - protein, 9 aa, Artificial Sequence
  Description of Artificial Sequence: Synthetic peptide
LHCQMGDHW

SEQ ID NO: 24830 - protein, 9 aa, Artificial Sequence
  Description of Artificial Sequence: Synthetic peptide
LHEIQKPNH

SEQ ID NO: 24831 - protein, 9 aa, Artificial Sequence
  Description of Artificial Sequence: Synthetic peptide
LHSQADGLY

SEQ ID NO: 24832 - protein, 9 aa, Artificial Sequence
  Description of Artificial Sequence: Synthetic peptide
LHTPQHDCH

SEQ ID NO: 24833 - protein, 9 aa, Artificial Sequence
  Description of Artificial Sequence: Synthetic peptide
LKDQFHWGA

SEQ ID NO: 24834 - protein, 9 aa, Artificial Sequence
  Description of Artificial Sequence: Synthetic peptide
LKELIQFGN

SEQ ID NO: 24835 - protein, 9 aa, Artificial Sequence
  Description of Artificial Sequence: Synthetic peptide
LKMDMTKRS

SEQ ID NO: 24836 - protein, 9 aa, Artificial Sequence
  Description of Artificial Sequence: Synthetic peptide
LLPPMMMGQ

SEQ ID NO: 24837 - protein, 9 aa, Artificial Sequence
  Description of Artificial Sequence: Synthetic peptide
LNLYWFWSA

SEQ ID NO: 24838 - protein, 9 aa, Artificial Sequence
  Description of Artificial Sequence: Synthetic peptide
LNPMTQNHE

SEQ ID NO: 24839 - protein, 9 aa, Artificial Sequence
  Description of Artificial Sequence: Synthetic peptide
LPLQVSNMA

SEQ ID NO: 24840 - protein, 9 aa, Artificial Sequence
  Description of Artificial Sequence: Synthetic peptide
LPRLNLVDR

SEQ ID NO: 24841 - protein, 9 aa, Artificial Sequence
  Description of Artificial Sequence: Synthetic peptide
LQDVIVDCE

SEQ ID NO: 24842 - protein, 9 aa, Artificial Sequence
  Description of Artificial Sequence: Synthetic peptide
LQTPQHHGA

SEQ ID NO: 24843 - protein, 9 aa, Artificial Sequence
  Description of Artificial Sequence: Synthetic peptide
LRYYIEMDR

SEQ ID NO: 24844 - protein, 9 aa, Artificial Sequence
  Description of Artificial Sequence: Synthetic peptide
LSQMLAHTA

SEQ ID NO: 24845 - protein, 9 aa, Artificial Sequence
  Description of Artificial Sequence: Synthetic peptide
LSVWAIRND

SEQ ID NO: 24846 - protein, 9 aa, Artificial Sequence
  Description of Artificial Sequence: Synthetic peptide
LTHKRESEC

SEQ ID NO: 24847 - protein, 9 aa, Artificial Sequence
  Description of Artificial Sequence: Synthetic peptide
LTMGFEIGW

SEQ ID NO: 24848 - protein, 9 aa, Artificial Sequence
  Description of Artificial Sequence: Synthetic peptide
LTNPWHYFA

SEQ ID NO: 24849 - protein, 9 aa, Artificial Sequence
  Description of Artificial Sequence: Synthetic peptide
LTVIIFDDA

SEQ ID NO: 24850 - protein, 9 aa, Artificial Sequence
  Description of Artificial Sequence: Synthetic peptide
LVAMVPQSY

SEQ ID NO: 24851 - protein, 9 aa, Artificial Sequence
  Description of Artificial Sequence: Synthetic peptide
LVDQGKCMQ

SEQ ID NO: 24852 - protein, 9 aa, Artificial Sequence
  Description of Artificial Sequence: Synthetic peptide
LWHWLWLKT

SEQ ID NO: 24853 - protein, 9 aa, Artificial Sequence
  Description of Artificial Sequence: Synthetic peptide
LWTRMVYFG

SEQ ID NO: 24854 - protein, 9 aa, Artificial Sequence
  Description of Artificial Sequence: Synthetic peptide
LYAHGNCYP

SEQ ID NO: 24855 - protein, 9 aa, Artificial Sequence
  Description of Artificial Sequence: Synthetic peptide
LYASVMQSE

SEQ ID NO: 24856 - protein, 9 aa, Artificial Sequence
  Description of Artificial Sequence: Synthetic peptide
LYKMVTKLH

SEQ ID NO: 24857 - protein, 9 aa, Artificial Sequence
  Description of Artificial Sequence: Synthetic peptide
MAPTVVRKK

SEQ ID NO: 24858 - protein, 9 aa, Artificial Sequence
  Description of Artificial Sequence: Synthetic peptide
MATPKEVMQ

SEQ ID NO: 24859 - protein, 9 aa, Artificial Sequence
  Description of Artificial Sequence: Synthetic peptide
MCAGWCDDQ

SEQ ID NO: 24860 - protein, 9 aa, Artificial Sequence
  Description of Artificial Sequence: Synthetic peptide
MCGLRYYWP

SEQ ID NO: 24861 - protein, 9 aa, Artificial Sequence
  Description of Artificial Sequence: Synthetic peptide
MCLWIRACE

SEQ ID NO: 24862 - protein, 9 aa, Artificial Sequence
  Description of Artificial Sequence: Synthetic peptide
MCPNHKPCW

SEQ ID NO: 24863 - protein, 9 aa, Artificial Sequence
  Description of Artificial Sequence: Synthetic peptide
MESLCVYFY

SEQ ID NO: 24864 - protein, 9 aa, Artificial Sequence
  Description of Artificial Sequence: Synthetic peptide
MFMKNELIA

SEQ ID NO: 24865 - protein, 9 aa, Artificial Sequence
  Description of Artificial Sequence: Synthetic peptide
MGCQSQKPK

SEQ ID NO: 24866 - protein, 9 aa, Artificial Sequence
  Description of Artificial Sequence: Synthetic peptide
MGMFNTMAE

SEQ ID NO: 24867 - protein, 9 aa, Artificial Sequence
  Description of Artificial Sequence: Synthetic peptide
MHETHTWGA

SEQ ID NO: 24868 - protein, 9 aa, Artificial Sequence
  Description of Artificial Sequence: Synthetic peptide
MHMSTLDAK

SEQ ID NO: 24869 - protein, 9 aa, Artificial Sequence
  Description of Artificial Sequence: Synthetic peptide
MHVQQQRYG

SEQ ID NO: 24870 - protein, 9 aa, Artificial Sequence
  Description of Artificial Sequence: Synthetic peptide
MIYKDYNHA

SEQ ID NO: 24871 - protein, 9 aa, Artificial Sequence
  Description of Artificial Sequence: Synthetic peptide
MIYPCMTSC

SEQ ID NO: 24872 - protein, 9 aa, Artificial Sequence
  Description of Artificial Sequence: Synthetic peptide
MKHESDGGF

SEQ ID NO: 24873 - protein, 9 aa, Artificial Sequence
  Description of Artificial Sequence: Synthetic peptide
MLAGWWQET

SEQ ID NO: 24874 - protein, 9 aa, Artificial Sequence
  Description of Artificial Sequence: Synthetic peptide
MMIVQCSNK

SEQ ID NO: 24875 - protein, 9 aa, Artificial Sequence
  Description of Artificial Sequence: Synthetic peptide
MMKWTEYMV

SEQ ID NO: 24876 - protein, 9 aa, Artificial Sequence
  Description of Artificial Sequence: Synthetic peptide
MMTLKNTMD

SEQ ID NO: 24877 - protein, 9 aa, Artificial Sequence
  Description of Artificial Sequence: Synthetic peptide
MNFNSLAQW

SEQ ID NO: 24878 - protein, 9 aa, Artificial Sequence
  Description of Artificial Sequence: Synthetic peptide
MNLPKSHDC

SEQ ID NO: 24879 - protein, 9 aa, Artificial Sequence
  Description of Artificial Sequence: Synthetic peptide
MNMYYTGEV

SEQ ID NO: 24880 - protein, 9 aa, Artificial Sequence
  Description of Artificial Sequence: Synthetic peptide
MNNIYECIP

SEQ ID NO: 24881 - protein, 9 aa, Artificial Sequence
  Description of Artificial Sequence: Synthetic peptide
MNSHNHTST

SEQ ID NO: 24882 - protein, 9 aa, Artificial Sequence
  Description of Artificial Sequence: Synthetic peptide
MNTPTFHQI

SEQ ID NO: 24883 - protein, 9 aa, Artificial Sequence
  Description of Artificial Sequence: Synthetic peptide
MPTMMGSYM

SEQ ID NO: 24884 - protein, 9 aa, Artificial Sequence
  Description of Artificial Sequence: Synthetic peptide
MQFRTNNAN

SEQ ID NO: 24885 - protein, 9 aa, Artificial Sequence
  Description of Artificial Sequence: Synthetic peptide
MQNISCPQC

SEQ ID NO: 24886 - protein, 9 aa, Artificial Sequence
  Description of Artificial Sequence: Synthetic peptide
MQPRYNCEG

SEQ ID NO: 24887 - protein, 9 aa, Artificial Sequence
  Description of Artificial Sequence: Synthetic peptide
MQSFVGVMW

SEQ ID NO: 24888 - protein, 9 aa, Artificial Sequence
  Description of Artificial Sequence: Synthetic peptide
MRALSVSQG

SEQ ID NO: 24889 - protein, 9 aa, Artificial Sequence
  Description of Artificial Sequence: Synthetic peptide
MRTMFYTSP

SEQ ID NO: 24890 - protein, 9 aa, Artificial Sequence
  Description of Artificial Sequence: Synthetic peptide
MRVIQGDNY

SEQ ID NO: 24891 - protein, 9 aa, Artificial Sequence
  Description of Artificial Sequence: Synthetic peptide
MSFTYVGGS

SEQ ID NO: 24892 - protein, 9 aa, Artificial Sequence
  Description of Artificial Sequence: Synthetic peptide
MSTKPAYWG

SEQ ID NO: 24893 - protein, 9 aa, Artificial Sequence
  Description of Artificial Sequence: Synthetic peptide
MSTKPVYWG

SEQ ID NO: 24894 - protein, 9 aa, Artificial Sequence
  Description of Artificial Sequence: Synthetic peptide
MTDLQLIER

SEQ ID NO: 24895 - protein, 9 aa, Artificial Sequence
  Description of Artificial Sequence: Synthetic peptide
MTEILQITG

SEQ ID NO: 24896 - protein, 9 aa, Artificial Sequence
  Description of Artificial Sequence: Synthetic peptide
MTEPFMQDL

SEQ ID NO: 24897 - protein, 9 aa, Artificial Sequence
  Description of Artificial Sequence: Synthetic peptide
MTIGYFVQA

SEQ ID NO: 24898 - protein, 9 aa, Artificial Sequence
  Description of Artificial Sequence: Synthetic peptide
MTNRMQALQ

SEQ ID NO: 24899 - protein, 9 aa, Artificial Sequence
  Description of Artificial Sequence: Synthetic peptide
MTRFKIYHE

SEQ ID NO: 24900 - protein, 9 aa, Artificial Sequence
  Description of Artificial Sequence: Synthetic peptide
MTTHCNTAI

SEQ ID NO: 24901 - protein, 9 aa, Artificial Sequence
  Description of Artificial Sequence: Synthetic peptide
MVNCAVTYQ

SEQ ID NO: 24902 - protein, 9 aa, Artificial Sequence
  Description of Artificial Sequence: Synthetic peptide
MVSDTQHGK

SEQ ID NO: 24903 - protein, 9 aa, Artificial Sequence
  Description of Artificial Sequence: Synthetic peptide
MVSYDVLGK

SEQ ID NO: 24904 - protein, 9 aa, Artificial Sequence
  Description of Artificial Sequence: Synthetic peptide
MVSYNVLGK

SEQ ID NO: 24905 - protein, 9 aa, Artificial Sequence
  Description of Artificial Sequence: Synthetic peptide
MVTTQQIVC

SEQ ID NO: 24906 - protein, 9 aa, Artificial Sequence
  Description of Artificial Sequence: Synthetic peptide
MVVIKQYHT

SEQ ID NO: 24907 - protein, 9 aa, Artificial Sequence
  Description of Artificial Sequence: Synthetic peptide
MVVVTRDAS

SEQ ID NO: 24908 - protein, 9 aa, Artificial Sequence
  Description of Artificial Sequence: Synthetic peptide
MWGEWWPGC

SEQ ID NO: 24909 - protein, 9 aa, Artificial Sequence
  Description of Artificial Sequence: Synthetic peptide
MWQEFQWQY

SEQ ID NO: 24910 - protein, 9 aa, Artificial Sequence
  Description of Artificial Sequence: Synthetic peptide
MYIPRNGEP

SEQ ID NO: 24911 - protein, 9 aa, Artificial Sequence
  Description of Artificial Sequence: Synthetic peptide
NACMVTGCG

SEQ ID NO: 24912 - protein, 9 aa, Artificial Sequence
  Description of Artificial Sequence: Synthetic peptide
NAEWQRDTF

SEQ ID NO: 24913 - protein, 9 aa, Artificial Sequence
  Description of Artificial Sequence: Synthetic peptide
NASPCQIFG

SEQ ID NO: 24914 - protein, 9 aa, Artificial Sequence
  Description of Artificial Sequence: Synthetic peptide
NCFVMYCGR

SEQ ID NO: 24915 - protein, 9 aa, Artificial Sequence
  Description of Artificial Sequence: Synthetic peptide
NDKWGWWRE

SEQ ID NO: 24916 - protein, 9 aa, Artificial Sequence
  Description of Artificial Sequence: Synthetic peptide
NDVMWQLIH

SEQ ID NO: 24917 - protein, 9 aa, Artificial Sequence
  Description of Artificial Sequence: Synthetic peptide
NFDFNHQCQ

SEQ ID NO: 24918 - protein, 9 aa, Artificial Sequence
  Description of Artificial Sequence: Synthetic peptide
NFEIYHLQC

SEQ ID NO: 24919 - protein, 9 aa, Artificial Sequence
  Description of Artificial Sequence: Synthetic peptide
NFGIYHLQC

SEQ ID NO: 24920 - protein, 9 aa, Artificial Sequence
  Description of Artificial Sequence: Synthetic peptide
NFNWTRADC

SEQ ID NO: 24921 - protein, 9 aa, Artificial Sequence
  Description of Artificial Sequence: Synthetic peptide
NFRTINAHP

SEQ ID NO: 24922 - protein, 9 aa, Artificial Sequence
  Description of Artificial Sequence: Synthetic peptide
NGDPVFRMA

SEQ ID NO: 24923 - protein, 9 aa, Artificial Sequence
  Description of Artificial Sequence: Synthetic peptide
NIEGIEFNA

SEQ ID NO: 24924 - protein, 9 aa, Artificial Sequence
  Description of Artificial Sequence: Synthetic peptide
NIVGATEWD

SEQ ID NO: 24925 - protein, 9 aa, Artificial Sequence
  Description of Artificial Sequence: Synthetic peptide
NKDDTCFQF

SEQ ID NO: 24926 - protein, 9 aa, Artificial Sequence
  Description of Artificial Sequence: Synthetic peptide
NKYCIAMPC

SEQ ID NO: 24927 - protein, 9 aa, Artificial Sequence
  Description of Artificial Sequence: Synthetic peptide
NLGETITNA

SEQ ID NO: 24928 - protein, 9 aa, Artificial Sequence
  Description of Artificial Sequence: Synthetic peptide
NMIHLWTTE

SEQ ID NO: 24929 - protein, 9 aa, Artificial Sequence
  Description of Artificial Sequence: Synthetic peptide
NMNQNPTMS

SEQ ID NO: 24930 - protein, 9 aa, Artificial Sequence
  Description of Artificial Sequence: Synthetic peptide
NMYWCMQIH

SEQ ID NO: 24931 - protein, 9 aa, Artificial Sequence
  Description of Artificial Sequence: Synthetic peptide
NNRETMIHG

SEQ ID NO: 24932 - protein, 9 aa, Artificial Sequence
  Description of Artificial Sequence: Synthetic peptide
NNREWDVCY

SEQ ID NO: 24933 - protein, 9 aa, Artificial Sequence
  Description of Artificial Sequence: Synthetic peptide
NPPDVGCPS

SEQ ID NO: 24934 - protein, 9 aa, Artificial Sequence
  Description of Artificial Sequence: Synthetic peptide
NPQSLCYSC

SEQ ID NO: 24935 - protein, 9 aa, Artificial Sequence
  Description of Artificial Sequence: Synthetic peptide
NQHWLLSVP

SEQ ID NO: 24936 - protein, 9 aa, Artificial Sequence
  Description of Artificial Sequence: Synthetic peptide
NQMPCWVFF

SEQ ID NO: 24937 - protein, 9 aa, Artificial Sequence
  Description of Artificial Sequence: Synthetic peptide
NSCFIAENC

SEQ ID NO: 24938 - protein, 9 aa, Artificial Sequence
  Description of Artificial Sequence: Synthetic peptide
NSGIATADH

SEQ ID NO: 24939 - protein, 9 aa, Artificial Sequence
  Description of Artificial Sequence: Synthetic peptide
NSIQYGQAP

SEQ ID NO: 24940 - protein, 9 aa, Artificial Sequence
  Description of Artificial Sequence: Synthetic peptide
NSKSPSEGC

SEQ ID NO: 24941 - protein, 9 aa, Artificial Sequence
  Description of Artificial Sequence: Synthetic peptide
NSQPWYRHS

SEQ ID NO: 24942 - protein, 9 aa, Artificial Sequence
  Description of Artificial Sequence: Synthetic peptide
NSTAHAFAY

SEQ ID NO: 24943 - protein, 9 aa, Artificial Sequence
  Description of Artificial Sequence: Synthetic peptide
NSTAHPMMW

SEQ ID NO: 24944 - protein, 9 aa, Artificial Sequence
  Description of Artificial Sequence: Synthetic peptide
NTHVCNLHE

SEQ ID NO: 24945 - protein, 9 aa, Artificial Sequence
  Description of Artificial Sequence: Synthetic peptide
NTLFWDGNP

SEQ ID NO: 24946 - protein, 9 aa, Artificial Sequence
  Description of Artificial Sequence: Synthetic peptide
NVEERNRHF

SEQ ID NO: 24947 - protein, 9 aa, Artificial Sequence
  Description of Artificial Sequence: Synthetic peptide
NVEKQVAMG

SEQ ID NO: 24948 - protein, 9 aa, Artificial Sequence
  Description of Artificial Sequence: Synthetic peptide
NVHHTTQIP

SEQ ID NO: 24949 - protein, 9 aa, Artificial Sequence
  Description of Artificial Sequence: Synthetic peptide
NVMSALDLS

SEQ ID NO: 24950 - protein, 9 aa, Artificial Sequence
  Description of Artificial Sequence: Synthetic peptide
NVTQWDEDL

SEQ ID NO: 24951 - protein, 9 aa, Artificial Sequence
  Description of Artificial Sequence: Synthetic peptide
NVVQCNGPH

SEQ ID NO: 24952 - protein, 9 aa, Artificial Sequence
  Description of Artificial Sequence: Synthetic peptide
NWFGINSWH

SEQ ID NO: 24953 - protein, 9 aa, Artificial Sequence
  Description of Artificial Sequence: Synthetic peptide
PANYSMPNC

SEQ ID NO: 24954 - protein, 9 aa, Artificial Sequence
  Description of Artificial Sequence: Synthetic peptide
PDGYRRSHG

SEQ ID NO: 24955 - protein, 9 aa, Artificial Sequence
  Description of Artificial Sequence: Synthetic peptide
PDWCQDPGM

SEQ ID NO: 24956 - protein, 9 aa, Artificial Sequence
  Description of Artificial Sequence: Synthetic peptide
PEELYLYRK

SEQ ID NO: 24957 - protein, 9 aa, Artificial Sequence
  Description of Artificial Sequence: Synthetic peptide
PEYRQWMLI

SEQ ID NO: 24958 - protein, 9 aa, Artificial Sequence
  Description of Artificial Sequence: Synthetic peptide
PFLFTVIHN

SEQ ID NO: 24959 - protein, 9 aa, Artificial Sequence
  Description of Artificial Sequence: Synthetic peptide
PFVHDDMAR

SEQ ID NO: 24960 - protein, 9 aa, Artificial Sequence
  Description of Artificial Sequence: Synthetic peptide
PGEENEPPA

SEQ ID NO: 24961 - protein, 9 aa, Artificial Sequence
  Description of Artificial Sequence: Synthetic peptide
PIWTQHHTM

SEQ ID NO: 24962 - protein, 9 aa, Artificial Sequence
  Description of Artificial Sequence: Synthetic peptide
PLQQYDGCS

SEQ ID NO: 24963 - protein, 9 aa, Artificial Sequence
  Description of Artificial Sequence: Synthetic peptide
PQHCNTMWG

SEQ ID NO: 24964 - protein, 9 aa, Artificial Sequence
  Description of Artificial Sequence: Synthetic peptide
PQIDSLQDY

SEQ ID NO: 24965 - protein, 9 aa, Artificial Sequence
  Description of Artificial Sequence: Synthetic peptide
PRNDDNCLP

SEQ ID NO: 24966 - protein, 9 aa, Artificial Sequence
  Description of Artificial Sequence: Synthetic peptide
PVIWLPVDS

SEQ ID NO: 24967 - protein, 9 aa, Artificial Sequence
  Description of Artificial Sequence: Synthetic peptide
PWDKEEPQG

SEQ ID NO: 24968 - protein, 9 aa, Artificial Sequence
  Description of Artificial Sequence: Synthetic peptide
PYAIEESHD

SEQ ID NO: 24969 - protein, 9 aa, Artificial Sequence
  Description of Artificial Sequence: Synthetic peptide
PYIRRVHVS

SEQ ID NO: 24970 - protein, 9 aa, Artificial Sequence
  Description of Artificial Sequence: Synthetic peptide
QAACAMATT

SEQ ID NO: 24971 - protein, 9 aa, Artificial Sequence
  Description of Artificial Sequence: Synthetic peptide
QADKQFYGN

SEQ ID NO: 24972 - protein, 9 aa, Artificial Sequence
  Description of Artificial Sequence: Synthetic peptide
QAGYQSALY

SEQ ID NO: 24973 - protein, 9 aa, Artificial Sequence
  Description of Artificial Sequence: Synthetic peptide
QANGENLDH

SEQ ID NO: 24974 - protein, 9 aa, Artificial Sequence
  Description of Artificial Sequence: Synthetic peptide
QCDRVWLNP

SEQ ID NO: 24975 - protein, 9 aa, Artificial Sequence
  Description of Artificial Sequence: Synthetic peptide
QCIPKQKDY

SEQ ID NO: 24976 - protein, 9 aa, Artificial Sequence
  Description of Artificial Sequence: Synthetic peptide
QCQTLDCCD

SEQ ID NO: 24977 - protein, 9 aa, Artificial Sequence
  Description of Artificial Sequence: Synthetic peptide
QCWYCELCP

SEQ ID NO: 24978 - protein, 9 aa, Artificial Sequence
  Description of Artificial Sequence: Synthetic peptide
QESEVHVFG

SEQ ID NO: 24979 - protein, 9 aa, Artificial Sequence
  Description of Artificial Sequence: Synthetic peptide
QFQLVTIQG

SEQ ID NO: 24980 - protein, 9 aa, Artificial Sequence
  Description of Artificial Sequence: Synthetic peptide
QGAFHTAWT

SEQ ID NO: 24981 - protein, 9 aa, Artificial Sequence
  Description of Artificial Sequence: Synthetic peptide
QGEKCVPDF

SEQ ID NO: 24982 - protein, 9 aa, Artificial Sequence
  Description of Artificial Sequence: Synthetic peptide
QGIMTSCQT

SEQ ID NO: 24983 - protein, 9 aa, Artificial Sequence
  Description of Artificial Sequence: Synthetic peptide
QGVRMVGNS

SEQ ID NO: 24984 - protein, 9 aa, Artificial Sequence
  Description of Artificial Sequence: Synthetic peptide
QHCMHSMVE

SEQ ID NO: 24985 - protein, 9 aa, Artificial Sequence
  Description of Artificial Sequence: Synthetic peptide
QHQHDLPTG

SEQ ID NO: 24986 - protein, 9 aa, Artificial Sequence
  Description of Artificial Sequence: Synthetic peptide
QIAVVCSQR

SEQ ID NO: 24987 - protein, 9 aa, Artificial Sequence
  Description of Artificial Sequence: Synthetic peptide
QIAVVCSQW

SEQ ID NO: 24988 - protein, 9 aa, Artificial Sequence
  Description of Artificial Sequence: Synthetic peptide
QIFKALVGE

SEQ ID NO: 24989 - protein, 9 aa, Artificial Sequence
  Description of Artificial Sequence: Synthetic peptide
QIGWDDAIT

SEQ ID NO: 24990 - protein, 9 aa, Artificial Sequence
  Description of Artificial Sequence: Synthetic peptide
QIISETGWE

SEQ ID NO: 24991 - protein, 9 aa, Artificial Sequence
  Description of Artificial Sequence: Synthetic peptide
QKFCNIHEY

SEQ ID NO: 24992 - protein, 9 aa, Artificial Sequence
  Description of Artificial Sequence: Synthetic peptide
QKQTSISFS

SEQ ID NO: 24993 - protein, 9 aa, Artificial Sequence
  Description of Artificial Sequence: Synthetic peptide
QKTWLVVWC

SEQ ID NO: 24994 - protein, 9 aa, Artificial Sequence
  Description of Artificial Sequence: Synthetic peptide
QMATPVDMT

SEQ ID NO: 24995 - protein, 9 aa, Artificial Sequence
  Description of Artificial Sequence: Synthetic peptide
QMGCTFQTP

SEQ ID NO: 24996 - protein, 9 aa, Artificial Sequence
  Description of Artificial Sequence: Synthetic peptide
QMGLLDTYP

SEQ ID NO: 24997 - protein, 9 aa, Artificial Sequence
  Description of Artificial Sequence: Synthetic peptide
QMYMDFTQP

SEQ ID NO: 24998 - protein, 9 aa, Artificial Sequence
  Description of Artificial Sequence: Synthetic peptide
QNYWCMCGA

SEQ ID NO: 24999 - protein, 9 aa, Artificial Sequence
  Description of Artificial Sequence: Synthetic peptide
QPKEWVIKE

SEQ ID NO: 25000 - protein, 9 aa, Artificial Sequence
  Description of Artificial Sequence: Synthetic peptide
QPRNDCNEH

SEQ ID NO: 25001 - protein, 9 aa, Artificial Sequence
  Description of Artificial Sequence: Synthetic peptide
QQAMYTSSG

SEQ ID NO: 25002 - protein, 9 aa, Artificial Sequence
  Description of Artificial Sequence: Synthetic peptide
QQDPMKQWS

SEQ ID NO: 25003 - protein, 9 aa, Artificial Sequence
  Description of Artificial Sequence: Synthetic peptide
QQEVEQTMG

SEQ ID NO: 25004 - protein, 9 aa, Artificial Sequence
  Description of Artificial Sequence: Synthetic peptide
QQEYFDDMQ

SEQ ID NO: 25005 - protein, 9 aa, Artificial Sequence
  Description of Artificial Sequence: Synthetic peptide
QQSAVGAHY

SEQ ID NO: 25006 - protein, 9 aa, Artificial Sequence
  Description of Artificial Sequence: Synthetic peptide
QQVYEMKWH

SEQ ID NO: 25007 - protein, 9 aa, Artificial Sequence
  Description of Artificial Sequence: Synthetic peptide
QRVMSGKPL

SEQ ID NO: 25008 - protein, 9 aa, Artificial Sequence
  Description of Artificial Sequence: Synthetic peptide
QSDPQPVIW

SEQ ID NO: 25009 - protein, 9 aa, Artificial Sequence
  Description of Artificial Sequence: Synthetic peptide
QSGIHCCCG

SEQ ID NO: 25010 - protein, 9 aa, Artificial Sequence
  Description of Artificial Sequence: Synthetic peptide
QSGWFLEAK

SEQ ID NO: 25011 - protein, 9 aa, Artificial Sequence
  Description of Artificial Sequence: Synthetic peptide
QSHFCFENA

SEQ ID NO: 25012 - protein, 9 aa, Artificial Sequence
  Description of Artificial Sequence: Synthetic peptide
QSIPEWSCA

SEQ ID NO: 25013 - protein, 9 aa, Artificial Sequence
  Description of Artificial Sequence: Synthetic peptide
QSNGQKDSQ

SEQ ID NO: 25014 - protein, 9 aa, Artificial Sequence
  Description of Artificial Sequence: Synthetic peptide
QSVDWIKCE

SEQ ID NO: 25015 - protein, 9 aa, Artificial Sequence
  Description of Artificial Sequence: Synthetic peptide
QTDQYWKMG

SEQ ID NO: 25016 - protein, 9 aa, Artificial Sequence
  Description of Artificial Sequence: Synthetic peptide
QTGWLHSYG

SEQ ID NO: 25017 - protein, 9 aa, Artificial Sequence
  Description of Artificial Sequence: Synthetic peptide
QTKTGEIQK

SEQ ID NO: 25018 - protein, 9 aa, Artificial Sequence
  Description of Artificial Sequence: Synthetic peptide
QTKTGKSAT

SEQ ID NO: 25019 - protein, 9 aa, Artificial Sequence
  Description of Artificial Sequence: Synthetic peptide
QVHTKWDGM

SEQ ID NO: 25020 - protein, 9 aa, Artificial Sequence
  Description of Artificial Sequence: Synthetic peptide
QVQYRTCDW

SEQ ID NO: 25021 - protein, 9 aa, Artificial Sequence
  Description of Artificial Sequence: Synthetic peptide
QWTEKTFEG

SEQ ID NO: 25022 - protein, 9 aa, Artificial Sequence
  Description of Artificial Sequence: Synthetic peptide
QYEPLGRAM

SEQ ID NO: 25023 - protein, 9 aa, Artificial Sequence
  Description of Artificial Sequence: Synthetic peptide
QYKSTQRRN

SEQ ID NO: 25024 - protein, 9 aa, Artificial Sequence
  Description of Artificial Sequence: Synthetic peptide
QYYMLSESA

SEQ ID NO: 25025 - protein, 9 aa, Artificial Sequence
  Description of Artificial Sequence: Synthetic peptide
RAKTCIYKC

SEQ ID NO: 25026 - protein, 9 aa, Artificial Sequence
  Description of Artificial Sequence: Synthetic peptide
RAMCILHNQ

SEQ ID NO: 25027 - protein, 9 aa, Artificial Sequence
  Description of Artificial Sequence: Synthetic peptide
RAMPTAAQL

SEQ ID NO: 25028 - protein, 9 aa, Artificial Sequence
  Description of Artificial Sequence: Synthetic peptide
RDLPIQFGP

SEQ ID NO: 25029 - protein, 9 aa, Artificial Sequence
  Description of Artificial Sequence: Synthetic peptide
RDMDMQMWC

SEQ ID NO: 25030 - protein, 9 aa, Artificial Sequence
  Description of Artificial Sequence: Synthetic peptide
REAKVFELK

SEQ ID NO: 25031 - protein, 9 aa, Artificial Sequence
  Description of Artificial Sequence: Synthetic peptide
REGCYNTQE

SEQ ID NO: 25032 - protein, 9 aa, Artificial Sequence
  Description of Artificial Sequence: Synthetic peptide
RFELLMTGR

SEQ ID NO: 25033 - protein, 9 aa, Artificial Sequence
  Description of Artificial Sequence: Synthetic peptide
RGFWVEKSG

SEQ ID NO: 25034 - protein, 9 aa, Artificial Sequence
  Description of Artificial Sequence: Synthetic peptide
RGSAKDAWG

SEQ ID NO: 25035 - protein, 9 aa, Artificial Sequence
  Description of Artificial Sequence: Synthetic peptide
RISSEGMWC

SEQ ID NO: 25036 - protein, 9 aa, Artificial Sequence
  Description of Artificial Sequence: Synthetic peptide
RLHIDDEDH

SEQ ID NO: 25037 - protein, 9 aa, Artificial Sequence
  Description of Artificial Sequence: Synthetic peptide
RLVRDSKNN

SEQ ID NO: 25038 - protein, 9 aa, Artificial Sequence
  Description of Artificial Sequence: Synthetic peptide
RMEELINDK

SEQ ID NO: 25039 - protein, 9 aa, Artificial Sequence
  Description of Artificial Sequence: Synthetic peptide
RMVTWDQSE

SEQ ID NO: 25040 - protein, 9 aa, Artificial Sequence
  Description of Artificial Sequence: Synthetic peptide
RNMCRHNDI

SEQ ID NO: 25041 - protein, 9 aa, Artificial Sequence
  Description of Artificial Sequence: Synthetic peptide
RPETVHASF

SEQ ID NO: 25042 - protein, 9 aa, Artificial Sequence
  Description of Artificial Sequence: Synthetic peptide
RQGCLLAWP

SEQ ID NO: 25043 - protein, 9 aa, Artificial Sequence
  Description of Artificial Sequence: Synthetic peptide
RQICNEPWN

SEQ ID NO: 25044 - protein, 9 aa, Artificial Sequence
  Description of Artificial Sequence: Synthetic peptide
RRNELLIPD

SEQ ID NO: 25045 - protein, 9 aa, Artificial Sequence
  Description of Artificial Sequence: Synthetic peptide
RSEMVNTQM

SEQ ID NO: 25046 - protein, 9 aa, Artificial Sequence
  Description of Artificial Sequence: Synthetic peptide
RSQWHNSID

SEQ ID NO: 25047 - protein, 9 aa, Artificial Sequence
  Description of Artificial Sequence: Synthetic peptide
RSSEYLTQQ

SEQ ID NO: 25048 - protein, 9 aa, Artificial Sequence
  Description of Artificial Sequence: Synthetic peptide
RTLVKGAQC

SEQ ID NO: 25049 - protein, 9 aa, Artificial Sequence
  Description of Artificial Sequence: Synthetic peptide
RTQGCGPSR

SEQ ID NO: 25050 - protein, 9 aa, Artificial Sequence
  Description of Artificial Sequence: Synthetic peptide
RVADVMYIG

SEQ ID NO: 25051 - protein, 9 aa, Artificial Sequence
  Description of Artificial Sequence: Synthetic peptide
RVECRPWGE

SEQ ID NO: 25052 - protein, 9 aa, Artificial Sequence
  Description of Artificial Sequence: Synthetic peptide
RVMDNACDM

SEQ ID NO: 25053 - protein, 9 aa, Artificial Sequence
  Description of Artificial Sequence: Synthetic peptide
RWDYYWTGM

SEQ ID NO: 25054 - protein, 9 aa, Artificial Sequence
  Description of Artificial Sequence: Synthetic peptide
RWRNCGSNG

SEQ ID NO: 25055 - protein, 9 aa, Artificial Sequence
  Description of Artificial Sequence: Synthetic peptide
SACIFYAHK

SEQ ID NO: 25056 - protein, 9 aa, Artificial Sequence
  Description of Artificial Sequence: Synthetic peptide
SAEMWVKDE

SEQ ID NO: 25057 - protein, 9 aa, Artificial Sequence
  Description of Artificial Sequence: Synthetic peptide
SALPCNTAQ

SEQ ID NO: 25058 - protein, 9 aa, Artificial Sequence
  Description of Artificial Sequence: Synthetic peptide
SARTEERES

SEQ ID NO: 25059 - protein, 9 aa, Artificial Sequence
  Description of Artificial Sequence: Synthetic peptide
SATTMPRTD

SEQ ID NO: 25060 - protein, 9 aa, Artificial Sequence
  Description of Artificial Sequence: Synthetic peptide
SCFINSAYP

SEQ ID NO: 25061 - protein, 9 aa, Artificial Sequence
  Description of Artificial Sequence: Synthetic peptide
SCGLVQRFM

SEQ ID NO: 25062 - protein, 9 aa, Artificial Sequence
  Description of Artificial Sequence: Synthetic peptide
SCGQVEHYC

SEQ ID NO: 25063 - protein, 9 aa, Artificial Sequence
  Description of Artificial Sequence: Synthetic peptide
SCQMYTYGI

SEQ ID NO: 25064 - protein, 9 aa, Artificial Sequence
  Description of Artificial Sequence: Synthetic peptide
SCRLRFNYA

SEQ ID NO: 25065 - protein, 9 aa, Artificial Sequence
  Description of Artificial Sequence: Synthetic peptide
SCTTCHSWQ

SEQ ID NO: 25066 - protein, 9 aa, Artificial Sequence
  Description of Artificial Sequence: Synthetic peptide
SFASMYNIK

SEQ ID NO: 25067 - protein, 9 aa, Artificial Sequence
  Description of Artificial Sequence: Synthetic peptide
SFMYKTQAL

SEQ ID NO: 25068 - protein, 9 aa, Artificial Sequence
  Description of Artificial Sequence: Synthetic peptide
SFYKNGMSN

SEQ ID NO: 25069 - protein, 9 aa, Artificial Sequence
  Description of Artificial Sequence: Synthetic peptide
SGGFCNYAT

SEQ ID NO: 25070 - protein, 9 aa, Artificial Sequence
  Description of Artificial Sequence: Synthetic peptide
SIGPASNAL

SEQ ID NO: 25071 - protein, 9 aa, Artificial Sequence
  Description of Artificial Sequence: Synthetic peptide
SIHMAEGVE

SEQ ID NO: 25072 - protein, 9 aa, Artificial Sequence
  Description of Artificial Sequence: Synthetic peptide
SIHRWNWMG

SEQ ID NO: 25073 - protein, 9 aa, Artificial Sequence
  Description of Artificial Sequence: Synthetic peptide
SINPESQGS

SEQ ID NO: 25074 - protein, 9 aa, Artificial Sequence
  Description of Artificial Sequence: Synthetic peptide
SISPSMGEK

SEQ ID NO: 25075 - protein, 9 aa, Artificial Sequence
  Description of Artificial Sequence: Synthetic peptide
SIVHPPTTS

SEQ ID NO: 25076 - protein, 9 aa, Artificial Sequence
  Description of Artificial Sequence: Synthetic peptide
SKGCIIDMQ

SEQ ID NO: 25077 - protein, 9 aa, Artificial Sequence
  Description of Artificial Sequence: Synthetic peptide
SKLLVTRNH

SEQ ID NO: 25078 - protein, 9 aa, Artificial Sequence
  Description of Artificial Sequence: Synthetic peptide
SKRLVTRNH

SEQ ID NO: 25079 - protein, 9 aa, Artificial Sequence
  Description of Artificial Sequence: Synthetic peptide
SLKDVDLWH

SEQ ID NO: 25080 - protein, 9 aa, Artificial Sequence
  Description of Artificial Sequence: Synthetic peptide
SLYKHEIWW

SEQ ID NO: 25081 - protein, 9 aa, Artificial Sequence
  Description of Artificial Sequence: Synthetic peptide
SMFPFNMGP

SEQ ID NO: 25082 - protein, 9 aa, Artificial Sequence
  Description of Artificial Sequence: Synthetic peptide
SMTDCDFHQ

SEQ ID NO: 25083 - protein, 9 aa, Artificial Sequence
  Description of Artificial Sequence: Synthetic peptide
SNHPNMHTY

SEQ ID NO: 25084 - protein, 9 aa, Artificial Sequence
  Description of Artificial Sequence: Synthetic peptide
SQGNTRYSY

SEQ ID NO: 25085 - protein, 9 aa, Artificial Sequence
  Description of Artificial Sequence: Synthetic peptide
SRCLRHQEC

SEQ ID NO: 25086 - protein, 9 aa, Artificial Sequence
  Description of Artificial Sequence: Synthetic peptide
SRMDMNHGL

SEQ ID NO: 25087 - protein, 9 aa, Artificial Sequence
  Description of Artificial Sequence: Synthetic peptide
SRTMYKWMP

SEQ ID NO: 25088 - protein, 9 aa, Artificial Sequence
  Description of Artificial Sequence: Synthetic peptide
SRTNIEWGG

SEQ ID NO: 25089 - protein, 9 aa, Artificial Sequence
  Description of Artificial Sequence: Synthetic peptide
SRYKCQHRN

SEQ ID NO: 25090 - protein, 9 aa, Artificial Sequence
  Description of Artificial Sequence: Synthetic peptide
SSDQLIMWG

SEQ ID NO: 25091 - protein, 9 aa, Artificial Sequence
  Description of Artificial Sequence: Synthetic peptide
SSHATNFCG

SEQ ID NO: 25092 - protein, 9 aa, Artificial Sequence
  Description of Artificial Sequence: Synthetic peptide
SSHTTNFCG

SEQ ID NO: 25093 - protein, 9 aa, Artificial Sequence
  Description of Artificial Sequence: Synthetic peptide
SSTGMQSST

SEQ ID NO: 25094 - protein, 9 aa, Artificial Sequence
  Description of Artificial Sequence: Synthetic peptide
SSTTHSRMQ

SEQ ID NO: 25095 - protein, 9 aa, Artificial Sequence
  Description of Artificial Sequence: Synthetic peptide
STFPKWTSE

SEQ ID NO: 25096 - protein, 9 aa, Artificial Sequence
  Description of Artificial Sequence: Synthetic peptide
STHFRTEDR

SEQ ID NO: 25097 - protein, 9 aa, Artificial Sequence
  Description of Artificial Sequence: Synthetic peptide
STLVYPCGP

SEQ ID NO: 25098 - protein, 9 aa, Artificial Sequence
  Description of Artificial Sequence: Synthetic peptide
STSAQPNFD

SEQ ID NO: 25099 - protein, 9 aa, Artificial Sequence
  Description of Artificial Sequence: Synthetic peptide
STTQWGMCN

SEQ ID NO: 25100 - protein, 9 aa, Artificial Sequence
  Description of Artificial Sequence: Synthetic peptide
STVSQMNYF

SEQ ID NO: 25101 - protein, 9 aa, Artificial Sequence
  Description of Artificial Sequence: Synthetic peptide
SVCPSHMWM

SEQ ID NO: 25102 - protein, 9 aa, Artificial Sequence
  Description of Artificial Sequence: Synthetic peptide
SVFSFHSDT

SEQ ID NO: 25103 - protein, 9 aa, Artificial Sequence
  Description of Artificial Sequence: Synthetic peptide
SWDVRVTAQ

SEQ ID NO: 25104 - protein, 9 aa, Artificial Sequence
  Description of Artificial Sequence: Synthetic peptide
SWSMQNKST

SEQ ID NO: 25105 - protein, 9 aa, Artificial Sequence
  Description of Artificial Sequence: Synthetic peptide
SWVSADEVP

SEQ ID NO: 25106 - protein, 9 aa, Artificial Sequence
  Description of Artificial Sequence: Synthetic peptide
SYGQIECYQ

SEQ ID NO: 25107 - protein, 9 aa, Artificial Sequence
  Description of Artificial Sequence: Synthetic peptide
SYLRAHHKD

SEQ ID NO: 25108 - protein, 9 aa, Artificial Sequence
  Description of Artificial Sequence: Synthetic peptide
TAALMGNMA

SEQ ID NO: 25109 - protein, 9 aa, Artificial Sequence
  Description of Artificial Sequence: Synthetic peptide
TALDNSTGI

SEQ ID NO: 25110 - protein, 9 aa, Artificial Sequence
  Description of Artificial Sequence: Synthetic peptide
TAQLMQTAC

SEQ ID NO: 25111 - protein, 9 aa, Artificial Sequence
  Description of Artificial Sequence: Synthetic peptide
TAYLNNWVP

SEQ ID NO: 25112 - protein, 9 aa, Artificial Sequence
  Description of Artificial Sequence: Synthetic peptide
TAYPEYCGN

SEQ ID NO: 25113 - protein, 9 aa, Artificial Sequence
  Description of Artificial Sequence: Synthetic peptide
TCAPQGKQE

SEQ ID NO: 25114 - protein, 9 aa, Artificial Sequence
  Description of Artificial Sequence: Synthetic peptide
TCAVFVFHC

SEQ ID NO: 25115 - protein, 9 aa, Artificial Sequence
  Description of Artificial Sequence: Synthetic peptide
TCEEYYNPF

SEQ ID NO: 25116 - protein, 9 aa, Artificial Sequence
  Description of Artificial Sequence: Synthetic peptide
TCELMQVMH

SEQ ID NO: 25117 - protein, 9 aa, Artificial Sequence
  Description of Artificial Sequence: Synthetic peptide
TCQNIAMQL

SEQ ID NO: 25118 - protein, 9 aa, Artificial Sequence
  Description of Artificial Sequence: Synthetic peptide
RDQCRMEAG

SEQ ID NO: 25119 - protein, 9 aa, Artificial Sequence
  Description of Artificial Sequence: Synthetic peptide
EIREFRASN

SEQ ID NO: 25120 - protein, 9 aa, Artificial Sequence
  Description of Artificial Sequence: Synthetic peptide
DVCDDHKPT

SEQ ID NO: 25121 - protein, 9 aa, Artificial Sequence
  Description of Artificial Sequence: Synthetic peptide
EVRIQCEID

SEQ ID NO: 25122 - protein, 9 aa, Artificial Sequence
  Description of Artificial Sequence: Synthetic peptide
WERCLELNP

SEQ ID NO: 25123 - protein, 9 aa, Artificial Sequence
  Description of Artificial Sequence: Synthetic peptide
PVMCVWHDN

SEQ ID NO: 25124 - protein, 9 aa, Artificial Sequence
  Description of Artificial Sequence: Synthetic peptide
CWECCPDSG

SEQ ID NO: 25125 - protein, 9 aa, Artificial Sequence
  Description of Artificial Sequence: Synthetic peptide
TGCNHNGRF

SEQ ID NO: 25126 - protein, 9 aa, Artificial Sequence
  Description of Artificial Sequence: Synthetic peptide
PVICVWHDS

SEQ ID NO: 25127 - protein, 9 aa, Artificial Sequence
  Description of Artificial Sequence: Synthetic peptide
RDQCRMEYG

SEQ ID NO: 25128 - protein, 9 aa, Artificial Sequence
  Description of Artificial Sequence: Synthetic peptide
KGNPLDGDK

SEQ ID NO: 25129 - protein, 9 aa, Artificial Sequence
  Description of Artificial Sequence: Synthetic peptide
EINEFRASN

SEQ ID NO: 25130 - protein, 9 aa, Artificial Sequence
  Description of Artificial Sequence: Synthetic peptide
YSDAKNMSI

SEQ ID NO: 25131 - protein, 9 aa, Artificial Sequence
  Description of Artificial Sequence: Synthetic peptide
DLLVATEWF

SEQ ID NO: 25132 - protein, 9 aa, Artificial Sequence
  Description of Artificial Sequence: Synthetic peptide
PYGTIEYDE

SEQ ID NO: 25133 - protein, 9 aa, Artificial Sequence
  Description of Artificial Sequence: Synthetic peptide
FPKVSECNW

SEQ ID NO: 25134 - protein, 9 aa, Artificial Sequence
  Description of Artificial Sequence: Synthetic peptide
TQHEDHWLA

SEQ ID NO: 25135 - protein, 9 aa, Artificial Sequence
  Description of Artificial Sequence: Synthetic peptide
NGVGRPGDN

SEQ ID NO: 25136 - protein, 9 aa, Artificial Sequence
  Description of Artificial Sequence: Synthetic peptide
AADIFALND

SEQ ID NO: 25137 - protein, 9 aa, Artificial Sequence
  Description of Artificial Sequence: Synthetic peptide
EDNIQIMMI

SEQ ID NO: 25138 - protein, 9 aa, Artificial Sequence
  Description of Artificial Sequence: Synthetic peptide
AVCDDHKPN

SEQ ID NO: 25139 - protein, 9 aa, Artificial Sequence
  Description of Artificial Sequence: Synthetic peptide
TQPEDHWLS

SEQ ID NO: 25140 - protein, 9 aa, Artificial Sequence
  Description of Artificial Sequence: Synthetic peptide
FPKGSEGNW

SEQ ID NO: 25141 - protein, 9 aa, Artificial Sequence
  Description of Artificial Sequence: Synthetic peptide
WEQCLELNQ

SEQ ID NO: 25142 - protein, 9 aa, Artificial Sequence
  Description of Artificial Sequence: Synthetic peptide
TYEALQNSW

SEQ ID NO: 25143 - protein, 9 aa, Artificial Sequence
  Description of Artificial Sequence: Synthetic peptide
WERCMELNQ

SEQ ID NO: 25144 - protein, 9 aa, Artificial Sequence
  Description of Artificial Sequence: Synthetic peptide
RYQCRMESG

SEQ ID NO: 25145 - protein, 9 aa, Artificial Sequence
  Description of Artificial Sequence: Synthetic peptide
SGDWDFGAW

SEQ ID NO: 25146 - protein, 9 aa, Artificial Sequence
  Description of Artificial Sequence: Synthetic peptide
DLIVATAWF

SEQ ID NO: 25147 - protein, 9 aa, Artificial Sequence
  Description of Artificial Sequence: Synthetic peptide
VFKPLDNRY

SEQ ID NO: 25148 - protein, 9 aa, Artificial Sequence
  Description of Artificial Sequence: Synthetic peptide
DSYTDSWST

SEQ ID NO: 25149 - protein, 9 aa, Artificial Sequence
  Description of Artificial Sequence: Synthetic peptide
PFACDRYEV

SEQ ID NO: 25150 - protein, 9 aa, Artificial Sequence
  Description of Artificial Sequence: Synthetic peptide
SGDLDFGEW

SEQ ID NO: 25151 - protein, 9 aa, Artificial Sequence
  Description of Artificial Sequence: Synthetic peptide
KDGRNPDCL

SEQ ID NO: 25152 - protein, 9 aa, Artificial Sequence
  Description of Artificial Sequence: Synthetic peptide
DLSVATEWF

SEQ ID NO: 25153 - protein, 9 aa, Artificial Sequence
  Description of Artificial Sequence: Synthetic peptide
SADIFAIND

SEQ ID NO: 25154 - protein, 9 aa, Artificial Sequence
  Description of Artificial Sequence: Synthetic peptide
CWACCTDSG

SEQ ID NO: 25155 - protein, 9 aa, Artificial Sequence
  Description of Artificial Sequence: Synthetic peptide
CWECYTDSG

SEQ ID NO: 25156 - protein, 9 aa, Artificial Sequence
  Description of Artificial Sequence: Synthetic peptide
YKGMEKDPV

SEQ ID NO: 25157 - protein, 9 aa, Artificial Sequence
  Description of Artificial Sequence: Synthetic peptide
TYESLQTSW

SEQ ID NO: 25158 - protein, 9 aa, Artificial Sequence
  Description of Artificial Sequence: Synthetic peptide
QTNEEEYGN

SEQ ID NO: 25159 - protein, 9 aa, Artificial Sequence
  Description of Artificial Sequence: Synthetic peptide
YYNHKIVEQ

SEQ ID NO: 25160 - protein, 9 aa, Artificial Sequence
  Description of Artificial Sequence: Synthetic peptide
CWEGCTDSG

SEQ ID NO: 25161 - protein, 9 aa, Artificial Sequence
  Description of Artificial Sequence: Synthetic peptide
AADIFAINA

SEQ ID NO: 25162 - protein, 9 aa, Artificial Sequence
  Description of Artificial Sequence: Synthetic peptide
PYGPIEYDA

SEQ ID NO: 25163 - protein, 9 aa, Artificial Sequence
  Description of Artificial Sequence: Synthetic peptide
EAGCKVWPT

SEQ ID NO: 25164 - protein, 9 aa, Artificial Sequence
  Description of Artificial Sequence: Synthetic peptide
EFGCMYWGY

SEQ ID NO: 25165 - protein, 9 aa, Artificial Sequence
  Description of Artificial Sequence: Synthetic peptide
DVAPMHQVA

SEQ ID NO: 25166 - protein, 9 aa, Artificial Sequence
  Description of Artificial Sequence: Synthetic peptide
EVLIQCKID

SEQ ID NO: 25167 - protein, 9 aa, Artificial Sequence
  Description of Artificial Sequence: Synthetic peptide
NKMIIFDSW

SEQ ID NO: 25168 - protein, 9 aa, Artificial Sequence
  Description of Artificial Sequence: Synthetic peptide
DVADVPDTT

SEQ ID NO: 25169 - protein, 9 aa, Artificial Sequence
  Description of Artificial Sequence: Synthetic peptide
HTIMEWSPT

SEQ ID NO: 25170 - protein, 9 aa, Artificial Sequence
  Description of Artificial Sequence: Synthetic peptide
CGECCTDSG

SEQ ID NO: 25171 - protein, 9 aa, Artificial Sequence
  Description of Artificial Sequence: Synthetic peptide
DVTTTSWIE

SEQ ID NO: 25172 - protein, 9 aa, Artificial Sequence
  Description of Artificial Sequence: Synthetic peptide
ECGCMYWCY

SEQ ID NO: 25173 - protein, 9 aa, Artificial Sequence
  Description of Artificial Sequence: Synthetic peptide
GNEDCNLAF

SEQ ID NO: 25174 - protein, 9 aa, Artificial Sequence
  Description of Artificial Sequence: Synthetic peptide
HHFNVNLDI

SEQ ID NO: 25175 - protein, 9 aa, Artificial Sequence
  Description of Artificial Sequence: Synthetic peptide
TQTEDHWLA

SEQ ID NO: 25176 - protein, 9 aa, Artificial Sequence
  Description of Artificial Sequence: Synthetic peptide
ECGCMYWGC

SEQ ID NO: 25177 - protein, 9 aa, Artificial Sequence
  Description of Artificial Sequence: Synthetic peptide
YSDPKNMYI

SEQ ID NO: 25178 - protein, 9 aa, Artificial Sequence
  Description of Artificial Sequence: Synthetic peptide
EIHMFGPSE

SEQ ID NO: 25179 - protein, 9 aa, Artificial Sequence
  Description of Artificial Sequence: Synthetic peptide
EAMPFRENQ

SEQ ID NO: 25180 - protein, 9 aa, Artificial Sequence
  Description of Artificial Sequence: Synthetic peptide
YSDPMNMSI

SEQ ID NO: 25181 - protein, 9 aa, Artificial Sequence
  Description of Artificial Sequence: Synthetic peptide
DLIVATELF

SEQ ID NO: 25182 - protein, 9 aa, Artificial Sequence
  Description of Artificial Sequence: Synthetic peptide
KEFVQWAAA

SEQ ID NO: 25183 - protein, 9 aa, Artificial Sequence
  Description of Artificial Sequence: Synthetic peptide
ASDMQFWSM

SEQ ID NO: 25184 - protein, 9 aa, Artificial Sequence
  Description of Artificial Sequence: Synthetic peptide
DTSDLQVMK

SEQ ID NO: 25185 - protein, 9 aa, Artificial Sequence
  Description of Artificial Sequence: Synthetic peptide
EVYKNDDGN

SEQ ID NO: 25186 - protein, 9 aa, Artificial Sequence
  Description of Artificial Sequence: Synthetic peptide
NIDEMNCNA

SEQ ID NO: 25187 - protein, 9 aa, Artificial Sequence
  Description of Artificial Sequence: Synthetic peptide
YKGMEKTPV

SEQ ID NO: 25188 - protein, 9 aa, Artificial Sequence
  Description of Artificial Sequence: Synthetic peptide
NTVEKMQTL

SEQ ID NO: 25189 - protein, 9 aa, Artificial Sequence
  Description of Artificial Sequence: Synthetic peptide
ESYPKLTQF

SEQ ID NO: 25190 - protein, 9 aa, Artificial Sequence
  Description of Artificial Sequence: Synthetic peptide
RDAWKWKRY

SEQ ID NO: 25191 - protein, 9 aa, Artificial Sequence
  Description of Artificial Sequence: Synthetic peptide
TIDDKQSWA

SEQ ID NO: 25192 - protein, 9 aa, Artificial Sequence
  Description of Artificial Sequence: Synthetic peptide
ATMDGHMSM

SEQ ID NO: 25193 - protein, 9 aa, Artificial Sequence
  Description of Artificial Sequence: Synthetic peptide
WGRCLELNQ

SEQ ID NO: 25194 - protein, 9 aa, Artificial Sequence
  Description of Artificial Sequence: Synthetic peptide
CQMLCRTPV

SEQ ID NO: 25195 - protein, 9 aa, Artificial Sequence
  Description of Artificial Sequence: Synthetic peptide
VFKTLDKRY

SEQ ID NO: 25196 - protein, 9 aa, Artificial Sequence
  Description of Artificial Sequence: Synthetic peptide
EMAELWDTG

SEQ ID NO: 25197 - protein, 9 aa, Artificial Sequence
  Description of Artificial Sequence: Synthetic peptide
EISSSNLDP

SEQ ID NO: 25198 - protein, 9 aa, Artificial Sequence
  Description of Artificial Sequence: Synthetic peptide
DLIVATEGF

SEQ ID NO: 25199 - protein, 9 aa, Artificial Sequence
  Description of Artificial Sequence: Synthetic peptide
FCDPAHHYE

SEQ ID NO: 25200 - protein, 9 aa, Artificial Sequence
  Description of Artificial Sequence: Synthetic peptide
VMDEYEANP

SEQ ID NO: 25201 - protein, 9 aa, Artificial Sequence
  Description of Artificial Sequence: Synthetic peptide
ETSEHNRMP

SEQ ID NO: 25202 - protein, 9 aa, Artificial Sequence
  Description of Artificial Sequence: Synthetic peptide
ECGCMYWGS

SEQ ID NO: 25203 - protein, 9 aa, Artificial Sequence
  Description of Artificial Sequence: Synthetic peptide
PYGLIEYDE

SEQ ID NO: 25204 - protein, 9 aa, Artificial Sequence
  Description of Artificial Sequence: Synthetic peptide
EIAGNDTYM

SEQ ID NO: 25205 - protein, 9 aa, Artificial Sequence
  Description of Artificial Sequence: Synthetic peptide
VDRLFRVEY

SEQ ID NO: 25206 - protein, 9 aa, Artificial Sequence
  Description of Artificial Sequence: Synthetic peptide
PTEPDEQYA

SEQ ID NO: 25207 - protein, 9 aa, Artificial Sequence
  Description of Artificial Sequence: Synthetic peptide
SVDQDQPGN

SEQ ID NO: 25208 - protein, 9 aa, Artificial Sequence
  Description of Artificial Sequence: Synthetic peptide
GWECCTDSG

SEQ ID NO: 25209 - protein, 9 aa, Artificial Sequence
  Description of Artificial Sequence: Synthetic peptide
SGDWDFGEG

SEQ ID NO: 25210 - protein, 9 aa, Artificial Sequence
  Description of Artificial Sequence: Synthetic peptide
DMENPNAGP

SEQ ID NO: 25211 - protein, 9 aa, Artificial Sequence
  Description of Artificial Sequence: Synthetic peptide
VFKPLDKRS

SEQ ID NO: 25212 - protein, 9 aa, Artificial Sequence
  Description of Artificial Sequence: Synthetic peptide
DVIPRDGAE

SEQ ID NO: 25213 - protein, 9 aa, Artificial Sequence
  Description of Artificial Sequence: Synthetic peptide
PVICVWHGN

SEQ ID NO: 25214 - protein, 9 aa, Artificial Sequence
  Description of Artificial Sequence: Synthetic peptide
ITAEVTWQE

SEQ ID NO: 25215 - protein, 9 aa, Artificial Sequence
  Description of Artificial Sequence: Synthetic peptide
IRTWGCKKQ

SEQ ID NO: 25216 - protein, 9 aa, Artificial Sequence
  Description of Artificial Sequence: Synthetic peptide
GSHWYDCNP

SEQ ID NO: 25217 - protein, 9 aa, Artificial Sequence
  Description of Artificial Sequence: Synthetic peptide
RLTEDMSDM

SEQ ID NO: 25218 - protein, 9 aa, Artificial Sequence
  Description of Artificial Sequence: Synthetic peptide
FDWMANVSV

SEQ ID NO: 25219 - protein, 9 aa, Artificial Sequence
  Description of Artificial Sequence: Synthetic peptide
THESLQNSW

SEQ ID NO: 25220 - protein, 9 aa, Artificial Sequence
  Description of Artificial Sequence: Synthetic peptide
FQMLCRPPV

SEQ ID NO: 25221 - protein, 9 aa, Artificial Sequence
  Description of Artificial Sequence: Synthetic peptide
EIHMVGQSE

SEQ ID NO: 25222 - protein, 9 aa, Artificial Sequence
  Description of Artificial Sequence: Synthetic peptide
ETADRIHWI

SEQ ID NO: 25223 - protein, 9 aa, Artificial Sequence
  Description of Artificial Sequence: Synthetic peptide
PYGPIEYYE

SEQ ID NO: 25224 - protein, 9 aa, Artificial Sequence
  Description of Artificial Sequence: Synthetic peptide
CDHVTKNPT

SEQ ID NO: 25225 - protein, 9 aa, Artificial Sequence
  Description of Artificial Sequence: Synthetic peptide
EVHTKDEHM

SEQ ID NO: 25226 - protein, 9 aa, Artificial Sequence
  Description of Artificial Sequence: Synthetic peptide
TVCNHHGRF

SEQ ID NO: 25227 - protein, 9 aa, Artificial Sequence
  Description of Artificial Sequence: Synthetic peptide
QGDYSWWRY

SEQ ID NO: 25228 - protein, 9 aa, Artificial Sequence
  Description of Artificial Sequence: Synthetic peptide
GTLDVPTMF

SEQ ID NO: 25229 - protein, 9 aa, Artificial Sequence
  Description of Artificial Sequence: Synthetic peptide
SVICVWHDN

SEQ ID NO: 25230 - protein, 9 aa, Artificial Sequence
  Description of Artificial Sequence: Synthetic peptide
HVDITDNDM

SEQ ID NO: 25231 - protein, 9 aa, Artificial Sequence
  Description of Artificial Sequence: Synthetic peptide
CDHATKHPT

SEQ ID NO: 25232 - protein, 9 aa, Artificial Sequence
  Description of Artificial Sequence: Synthetic peptide
TYEYLQNSW

SEQ ID NO: 25233 - protein, 9 aa, Artificial Sequence
  Description of Artificial Sequence: Synthetic peptide
ATSEIQPFV

SEQ ID NO: 25234 - protein, 9 aa, Artificial Sequence
  Description of Artificial Sequence: Synthetic peptide
EVTEGCPMG

SEQ ID NO: 25235 - protein, 9 aa, Artificial Sequence
  Description of Artificial Sequence: Synthetic peptide
DNVDLDIQH

SEQ ID NO: 25236 - protein, 9 aa, Artificial Sequence
  Description of Artificial Sequence: Synthetic peptide
NVLGFDDGG

SEQ ID NO: 25237 - protein, 9 aa, Artificial Sequence
  Description of Artificial Sequence: Synthetic peptide
SNVMATQNW

SEQ ID NO: 25238 - protein, 9 aa, Artificial Sequence
  Description of Artificial Sequence: Synthetic peptide
QVTDNAAGM

SEQ ID NO: 25239 - protein, 9 aa, Artificial Sequence
  Description of Artificial Sequence: Synthetic peptide
AKYLPGLYY

SEQ ID NO: 25240 - protein, 9 aa, Artificial Sequence
  Description of Artificial Sequence: Synthetic peptide
HNCPWDQQY

SEQ ID NO: 25241 - protein, 9 aa, Artificial Sequence
  Description of Artificial Sequence: Synthetic peptide
CWECCTYSG

SEQ ID NO: 25242 - protein, 9 aa, Artificial Sequence
  Description of Artificial Sequence: Synthetic peptide
WNTIMTYES

SEQ ID NO: 25243 - protein, 9 aa, Artificial Sequence
  Description of Artificial Sequence: Synthetic peptide
PQYVHNWRQ

SEQ ID NO: 25244 - protein, 9 aa, Artificial Sequence
  Description of Artificial Sequence: Synthetic peptide
HTGMEWSPT

SEQ ID NO: 25245 - protein, 9 aa, Artificial Sequence
  Description of Artificial Sequence: Synthetic peptide
WDYSMAKKD

SEQ ID NO: 25246 - protein, 9 aa, Artificial Sequence
  Description of Artificial Sequence: Synthetic peptide
WKHCEREIN

SEQ ID NO: 25247 - protein, 9 aa, Artificial Sequence
  Description of Artificial Sequence: Synthetic peptide
SIFDYDTFQ

SEQ ID NO: 25248 - protein, 9 aa, Artificial Sequence
  Description of Artificial Sequence: Synthetic peptide
QTNGEEDGN

SEQ ID NO: 25249 - protein, 9 aa, Artificial Sequence
  Description of Artificial Sequence: Synthetic peptide
EAALENVNM

SEQ ID NO: 25250 - protein, 9 aa, Artificial Sequence
  Description of Artificial Sequence: Synthetic peptide
WQKPINCEC

SEQ ID NO: 25251 - protein, 9 aa, Artificial Sequence
  Description of Artificial Sequence: Synthetic peptide
EIRMFGQSE

SEQ ID NO: 25252 - protein, 9 aa, Artificial Sequence
  Description of Artificial Sequence: Synthetic peptide
DALEWPMPP

SEQ ID NO: 25253 - protein, 9 aa, Artificial Sequence
  Description of Artificial Sequence: Synthetic peptide
DIAPDWKGE

SEQ ID NO: 25254 - protein, 9 aa, Artificial Sequence
  Description of Artificial Sequence: Synthetic peptide
TKMNIFDSW

SEQ ID NO: 25255 - protein, 9 aa, Artificial Sequence
  Description of Artificial Sequence: Synthetic peptide
MVRPTDQPA

SEQ ID NO: 25256 - protein, 9 aa, Artificial Sequence
  Description of Artificial Sequence: Synthetic peptide
ETEDQARSC

SEQ ID NO: 25257 - protein, 9 aa, Artificial Sequence
  Description of Artificial Sequence: Synthetic peptide
IEYWEHETK

SEQ ID NO: 25258 - protein, 9 aa, Artificial Sequence
  Description of Artificial Sequence: Synthetic peptide
TIVEDAPLA

SEQ ID NO: 25259 - protein, 9 aa, Artificial Sequence
  Description of Artificial Sequence: Synthetic peptide
YKEMPTILC

SEQ ID NO: 25260 - protein, 9 aa, Artificial Sequence
  Description of Artificial Sequence: Synthetic peptide
TVLEDSMWA

SEQ ID NO: 25261 - protein, 9 aa, Artificial Sequence
  Description of Artificial Sequence: Synthetic peptide
AVCDWLIAE

SEQ ID NO: 25262 - protein, 9 aa, Artificial Sequence
  Description of Artificial Sequence: Synthetic peptide
PSSCDWIPV

SEQ ID NO: 25263 - protein, 9 aa, Artificial Sequence
  Description of Artificial Sequence: Synthetic peptide
LSTELHHFG

SEQ ID NO: 25264 - protein, 9 aa, Artificial Sequence
  Description of Artificial Sequence: Synthetic peptide
CTEGENDEH

SEQ ID NO: 25265 - protein, 9 aa, Artificial Sequence
  Description of Artificial Sequence: Synthetic peptide
PMPDGMFGI

SEQ ID NO: 25266 - protein, 9 aa, Artificial Sequence
  Description of Artificial Sequence: Synthetic peptide
CTVDGLHFH

SEQ ID NO: 25267 - protein, 9 aa, Artificial Sequence
  Description of Artificial Sequence: Synthetic peptide
DNYMQLNGV

SEQ ID NO: 25268 - protein, 9 aa, Artificial Sequence
  Description of Artificial Sequence: Synthetic peptide
DVDGEHEVY

SEQ ID NO: 25269 - protein, 9 aa, Artificial Sequence
  Description of Artificial Sequence: Synthetic peptide
EVQHELASG

SEQ ID NO: 25270 - protein, 9 aa, Artificial Sequence
  Description of Artificial Sequence: Synthetic peptide
FTGDFATFA

SEQ ID NO: 25271 - protein, 9 aa, Artificial Sequence
  Description of Artificial Sequence: Synthetic peptide
TTDQQCTGP

SEQ ID NO: 25272 - protein, 9 aa, Artificial Sequence
  Description of Artificial Sequence: Synthetic peptide
ESVEKSISN

SEQ ID NO: 25273 - protein, 9 aa, Artificial Sequence
  Description of Artificial Sequence: Synthetic peptide
AMGEEINYQ

SEQ ID NO: 25274 - protein, 9 aa, Artificial Sequence
  Description of Artificial Sequence: Synthetic peptide
VAGDIEWYG

SEQ ID NO: 25275 - protein, 9 aa, Artificial Sequence
  Description of Artificial Sequence: Synthetic peptide
DTQPDTLNP

SEQ ID NO: 25276 - protein, 9 aa, Artificial Sequence
  Description of Artificial Sequence: Synthetic peptide
AITDDNRMQ

SEQ ID NO: 25277 - protein, 9 aa, Artificial Sequence
  Description of Artificial Sequence: Synthetic peptide
TNDQQCTGH

SEQ ID NO: 25278 - protein, 9 aa, Artificial Sequence
  Description of Artificial Sequence: Synthetic peptide
VCEELDREW

SEQ ID NO: 25279 - protein, 9 aa, Artificial Sequence
  Description of Artificial Sequence: Synthetic peptide
GNGYWMCMS

SEQ ID NO: 25280 - protein, 9 aa, Artificial Sequence
  Description of Artificial Sequence: Synthetic peptide
HQYVHTWRQ

SEQ ID NO: 25281 - protein, 9 aa, Artificial Sequence
  Description of Artificial Sequence: Synthetic peptide
SYHMFDYGE

SEQ ID NO: 25282 - protein, 9 aa, Artificial Sequence
  Description of Artificial Sequence: Synthetic peptide
CMHDEMQTS

SEQ ID NO: 25283 - protein, 9 aa, Artificial Sequence
  Description of Artificial Sequence: Synthetic peptide
DFNSIDHSG

SEQ ID NO: 25284 - protein, 9 aa, Artificial Sequence
  Description of Artificial Sequence: Synthetic peptide
DASERNRWQ

SEQ ID NO: 25285 - protein, 9 aa, Artificial Sequence
  Description of Artificial Sequence: Synthetic peptide
RHNPHDACF

SEQ ID NO: 25286 - protein, 9 aa, Artificial Sequence
  Description of Artificial Sequence: Synthetic peptide
QYVDQENCN

SEQ ID NO: 25287 - protein, 9 aa, Artificial Sequence
  Description of Artificial Sequence: Synthetic peptide
DASPQCDRD

SEQ ID NO: 25288 - protein, 9 aa, Artificial Sequence
  Description of Artificial Sequence: Synthetic peptide
EIKPAAEIT

SEQ ID NO: 25289 - protein, 9 aa, Artificial Sequence
  Description of Artificial Sequence: Synthetic peptide
DALTRVDGD

SEQ ID NO: 25290 - protein, 9 aa, Artificial Sequence
  Description of Artificial Sequence: Synthetic peptide
DYQWPDVEE

SEQ ID NO: 25291 - protein, 9 aa, Artificial Sequence
  Description of Artificial Sequence: Synthetic peptide
DIVENDSLQ

SEQ ID NO: 25292 - protein, 9 aa, Artificial Sequence
  Description of Artificial Sequence: Synthetic peptide
VIVESEEYM

SEQ ID NO: 25293 - protein, 9 aa, Artificial Sequence
  Description of Artificial Sequence: Synthetic peptide
GFVDKMVMD

SEQ ID NO: 25294 - protein, 9 aa, Artificial Sequence
  Description of Artificial Sequence: Synthetic peptide
IVHEWEVNH

SEQ ID NO: 25295 - protein, 9 aa, Artificial Sequence
  Description of Artificial Sequence: Synthetic peptide
EVMQPEASV

SEQ ID NO: 25296 - protein, 9 aa, Artificial Sequence
  Description of Artificial Sequence: Synthetic peptide
QTLDKWDGP

SEQ ID NO: 25297 - protein, 9 aa, Artificial Sequence
  Description of Artificial Sequence: Synthetic peptide
DTFMMQSAH

SEQ ID NO: 25298 - protein, 9 aa, Artificial Sequence
  Description of Artificial Sequence: Synthetic peptide
DAIPWWWSY

SEQ ID NO: 25299 - protein, 9 aa, Artificial Sequence
  Description of Artificial Sequence: Synthetic peptide
WERCLVLNQ

SEQ ID NO: 25300 - protein, 9 aa, Artificial Sequence
  Description of Artificial Sequence: Synthetic peptide
NVEEGMAAD

SEQ ID NO: 25301 - protein, 9 aa, Artificial Sequence
  Description of Artificial Sequence: Synthetic peptide
EAGPWKRDV

SEQ ID NO: 25302 - protein, 9 aa, Artificial Sequence
  Description of Artificial Sequence: Synthetic peptide
TIHDVAMMD

SEQ ID NO: 25303 - protein, 9 aa, Artificial Sequence
  Description of Artificial Sequence: Synthetic peptide
MNLQIGGKG

SEQ ID NO: 25304 - protein, 9 aa, Artificial Sequence
  Description of Artificial Sequence: Synthetic peptide
NNVRQVGNT

SEQ ID NO: 25305 - protein, 9 aa, Artificial Sequence
  Description of Artificial Sequence: Synthetic peptide
QFPGGDDEG

SEQ ID NO: 25306 - protein, 9 aa, Artificial Sequence
  Description of Artificial Sequence: Synthetic peptide
VYVEKMGWY

SEQ ID NO: 25307 - protein, 9 aa, Artificial Sequence
  Description of Artificial Sequence: Synthetic peptide
TVEHTNHDA

SEQ ID NO: 25308 - protein, 9 aa, Artificial Sequence
  Description of Artificial Sequence: Synthetic peptide
HQYVHDWRQ

SEQ ID NO: 25309 - protein, 9 aa, Artificial Sequence
  Description of Artificial Sequence: Synthetic peptide
NLIVATEWF

SEQ ID NO: 25310 - protein, 9 aa, Artificial Sequence
  Description of Artificial Sequence: Synthetic peptide
MLMHADMTP

SEQ ID NO: 25311 - protein, 9 aa, Artificial Sequence
  Description of Artificial Sequence: Synthetic peptide
DSSESLNQN

SEQ ID NO: 25312 - protein, 9 aa, Artificial Sequence
  Description of Artificial Sequence: Synthetic peptide
KCEFYQFCQ

SEQ ID NO: 25313 - protein, 9 aa, Artificial Sequence
  Description of Artificial Sequence: Synthetic peptide
EVCSQWTQF

SEQ ID NO: 25314 - protein, 9 aa, Artificial Sequence
  Description of Artificial Sequence: Synthetic peptide
MIDEVWHHW

SEQ ID NO: 25315 - protein, 9 aa, Artificial Sequence
  Description of Artificial Sequence: Synthetic peptide
PNMPHAEDQ

SEQ ID NO: 25316 - protein, 9 aa, Artificial Sequence
  Description of Artificial Sequence: Synthetic peptide
TFDDFDMCA

SEQ ID NO: 25317 - protein, 9 aa, Artificial Sequence
  Description of Artificial Sequence: Synthetic peptide
PWQQHRKMS

SEQ ID NO: 25318 - protein, 9 aa, Artificial Sequence
  Description of Artificial Sequence: Synthetic peptide
GDPWEEWRK

SEQ ID NO: 25319 - protein, 9 aa, Artificial Sequence
  Description of Artificial Sequence: Synthetic peptide
EQLEDNDMQ

SEQ ID NO: 25320 - protein, 9 aa, Artificial Sequence
  Description of Artificial Sequence: Synthetic peptide
MIHSQDMFE

SEQ ID NO: 25321 - protein, 9 aa, Artificial Sequence
  Description of Artificial Sequence: Synthetic peptide
QVFHQDDVN

SEQ ID NO: 25322 - protein, 9 aa, Artificial Sequence
  Description of Artificial Sequence: Synthetic peptide
HYKYDANRK

SEQ ID NO: 25323 - protein, 9 aa, Artificial Sequence
  Description of Artificial Sequence: Synthetic peptide
DMMNIEKMG

SEQ ID NO: 25324 - protein, 9 aa, Artificial Sequence
  Description of Artificial Sequence: Synthetic peptide
WEHCYRVSW

SEQ ID NO: 25325 - protein, 9 aa, Artificial Sequence
  Description of Artificial Sequence: Synthetic peptide
DILFWEDDD

SEQ ID NO: 25326 - protein, 9 aa, Artificial Sequence
  Description of Artificial Sequence: Synthetic peptide
MTDEHLQYT

SEQ ID NO: 25327 - protein, 9 aa, Artificial Sequence
  Description of Artificial Sequence: Synthetic peptide
LSVDRDYFL

SEQ ID NO: 25328 - protein, 9 aa, Artificial Sequence
  Description of Artificial Sequence: Synthetic peptide
DVQQIHNKE

SEQ ID NO: 25329 - protein, 9 aa, Artificial Sequence
  Description of Artificial Sequence: Synthetic peptide
MITNNCNIP

SEQ ID NO: 25330 - protein, 9 aa, Artificial Sequence
  Description of Artificial Sequence: Synthetic peptide
NISWNESHD

SEQ ID NO: 25331 - protein, 9 aa, Artificial Sequence
  Description of Artificial Sequence: Synthetic peptide
ETVHPSASN

SEQ ID NO: 25332 - protein, 9 aa, Artificial Sequence
  Description of Artificial Sequence: Synthetic peptide
TKMIIFDAW

SEQ ID NO: 25333 - protein, 9 aa, Artificial Sequence
  Description of Artificial Sequence: Synthetic peptide
IIAQWDQVN

SEQ ID NO: 25334 - protein, 9 aa, Artificial Sequence
  Description of Artificial Sequence: Synthetic peptide
TADDFQGDE

SEQ ID NO: 25335 - protein, 9 aa, Artificial Sequence
  Description of Artificial Sequence: Synthetic peptide
SQERMAYDG

SEQ ID NO: 25336 - protein, 9 aa, Artificial Sequence
  Description of Artificial Sequence: Synthetic peptide
EAMQDHTDC

SEQ ID NO: 25337 - protein, 9 aa, Artificial Sequence
  Description of Artificial Sequence: Synthetic peptide
CDWMANVAV

SEQ ID NO: 25338 - protein, 9 aa, Artificial Sequence
  Description of Artificial Sequence: Synthetic peptide
DVKPVQKDW

SEQ ID NO: 25339 - protein, 9 aa, Artificial Sequence
  Description of Artificial Sequence: Synthetic peptide
ANEYQYDTM

SEQ ID NO: 25340 - protein, 9 aa, Artificial Sequence
  Description of Artificial Sequence: Synthetic peptide
MVVDRMLGW

SEQ ID NO: 25341 - protein, 9 aa, Artificial Sequence
  Description of Artificial Sequence: Synthetic peptide
MVVEYLTAG

SEQ ID NO: 25342 - protein, 9 aa, Artificial Sequence
  Description of Artificial Sequence: Synthetic peptide
MPAYSKLKW

SEQ ID NO: 25343 - protein, 9 aa, Artificial Sequence
  Description of Artificial Sequence: Synthetic peptide
AHEEDEAMQ

SEQ ID NO: 25344 - protein, 9 aa, Artificial Sequence
  Description of Artificial Sequence: Synthetic peptide
ETRPTVAIQ

SEQ ID NO: 25345 - protein, 9 aa, Artificial Sequence
  Description of Artificial Sequence: Synthetic peptide
VDNMSEGRQ

SEQ ID NO: 25346 - protein, 9 aa, Artificial Sequence
  Description of Artificial Sequence: Synthetic peptide
SQESMDYDG

SEQ ID NO: 25347 - protein, 9 aa, Artificial Sequence
  Description of Artificial Sequence: Synthetic peptide
CVDDLASSF

SEQ ID NO: 25348 - protein, 9 aa, Artificial Sequence
  Description of Artificial Sequence: Synthetic peptide
EVKPSMRDD

SEQ ID NO: 25349 - protein, 9 aa, Artificial Sequence
  Description of Artificial Sequence: Synthetic peptide
LCSQPIPEP

SEQ ID NO: 25350 - protein, 9 aa, Artificial Sequence
  Description of Artificial Sequence: Synthetic peptide
ETRPGMSDS

SEQ ID NO: 25351 - protein, 9 aa, Artificial Sequence
  Description of Artificial Sequence: Synthetic peptide
ETSFKIHEH

SEQ ID NO: 25352 - protein, 9 aa, Artificial Sequence
  Description of Artificial Sequence: Synthetic peptide
DTVEGGYIQ

SEQ ID NO: 25353 - protein, 9 aa, Artificial Sequence
  Description of Artificial Sequence: Synthetic peptide
YYEHPINKK

SEQ ID NO: 25354 - protein, 9 aa, Artificial Sequence
  Description of Artificial Sequence: Synthetic peptide
SIDWINQQG

SEQ ID NO: 25355 - protein, 9 aa, Artificial Sequence
  Description of Artificial Sequence: Synthetic peptide
EITPYAKWP

SEQ ID NO: 25356 - protein, 9 aa, Artificial Sequence
  Description of Artificial Sequence: Synthetic peptide
EMCERNAGI

SEQ ID NO: 25357 - protein, 9 aa, Artificial Sequence
  Description of Artificial Sequence: Synthetic peptide
DVCTNPWYT

SEQ ID NO: 25358 - protein, 9 aa, Artificial Sequence
  Description of Artificial Sequence: Synthetic peptide
NDYFRVYRK

SEQ ID NO: 25359 - protein, 9 aa, Artificial Sequence
  Description of Artificial Sequence: Synthetic peptide
SQEHMDYDG

SEQ ID NO: 25360 - protein, 9 aa, Artificial Sequence
  Description of Artificial Sequence: Synthetic peptide
LGPWPQTDQ

SEQ ID NO: 25361 - protein, 9 aa, Artificial Sequence
  Description of Artificial Sequence: Synthetic peptide
AGEFVQANW

SEQ ID NO: 25362 - protein, 9 aa, Artificial Sequence
  Description of Artificial Sequence: Synthetic peptide
TVKPHDNTE

SEQ ID NO: 25363 - protein, 9 aa, Artificial Sequence
  Description of Artificial Sequence: Synthetic peptide
QDEMMMACI

SEQ ID NO: 25364 - protein, 9 aa, Artificial Sequence
  Description of Artificial Sequence: Synthetic peptide
VTWEDVYIN

SEQ ID NO: 25365 - protein, 9 aa, Artificial Sequence
  Description of Artificial Sequence: Synthetic peptide
NVHESDTMF

SEQ ID NO: 25366 - protein, 9 aa, Artificial Sequence
  Description of Artificial Sequence: Synthetic peptide
NIAGYEWWM

SEQ ID NO: 25367 - protein, 9 aa, Artificial Sequence
  Description of Artificial Sequence: Synthetic peptide
WLLGMWNTG

SEQ ID NO: 25368 - protein, 9 aa, Artificial Sequence
  Description of Artificial Sequence: Synthetic peptide
VINPHDRSV

SEQ ID NO: 25369 - protein, 9 aa, Artificial Sequence
  Description of Artificial Sequence: Synthetic peptide
TVIPYEMFD

SEQ ID NO: 25370 - protein, 9 aa, Artificial Sequence
  Description of Artificial Sequence: Synthetic peptide
PSTNLTDSA

SEQ ID NO: 25371 - protein, 9 aa, Artificial Sequence
  Description of Artificial Sequence: Synthetic peptide
SVYDDFTST

SEQ ID NO: 25372 - protein, 9 aa, Artificial Sequence
  Description of Artificial Sequence: Synthetic peptide
NIHGVNLQG

SEQ ID NO: 25373 - protein, 9 aa, Artificial Sequence
  Description of Artificial Sequence: Synthetic peptide
DWEKVPCMK

SEQ ID NO: 25374 - protein, 9 aa, Artificial Sequence
  Description of Artificial Sequence: Synthetic peptide
TQQVADYTK

SEQ ID NO: 25375 - protein, 9 aa, Artificial Sequence
  Description of Artificial Sequence: Synthetic peptide
FIGSSDKQS

SEQ ID NO: 25376 - protein, 9 aa, Artificial Sequence
  Description of Artificial Sequence: Synthetic peptide
CLDELVEED

SEQ ID NO: 25377 - protein, 9 aa, Artificial Sequence
  Description of Artificial Sequence: Synthetic peptide
ATLDLDSHA

SEQ ID NO: 25378 - protein, 9 aa, Artificial Sequence
  Description of Artificial Sequence: Synthetic peptide
DTQQEQSQC

SEQ ID NO: 25379 - protein, 9 aa, Artificial Sequence
  Description of Artificial Sequence: Synthetic peptide
TAEIFAVND

SEQ ID NO: 25380 - protein, 9 aa, Artificial Sequence
  Description of Artificial Sequence: Synthetic peptide
DVVFNLWAP

SEQ ID NO: 25381 - protein, 9 aa, Artificial Sequence
  Description of Artificial Sequence: Synthetic peptide
GSMSSTVPH

SEQ ID NO: 25382 - protein, 9 aa, Artificial Sequence
  Description of Artificial Sequence: Synthetic peptide
NVVMLDQSY

SEQ ID NO: 25383 - protein, 9 aa, Artificial Sequence
  Description of Artificial Sequence: Synthetic peptide
QQDMIVTKQ

SEQ ID NO: 25384 - protein, 9 aa, Artificial Sequence
  Description of Artificial Sequence: Synthetic peptide
DFMFLISTH

SEQ ID NO: 25385 - protein, 9 aa, Artificial Sequence
  Description of Artificial Sequence: Synthetic peptide
FQVDTFMFE

SEQ ID NO: 25386 - protein, 9 aa, Artificial Sequence
  Description of Artificial Sequence: Synthetic peptide
IFEWGDATY

SEQ ID NO: 25387 - protein, 9 aa, Artificial Sequence
  Description of Artificial Sequence: Synthetic peptide
LPPGIEWEH

SEQ ID NO: 25388 - protein, 9 aa, Artificial Sequence
  Description of Artificial Sequence: Synthetic peptide
MDRLAEFKD

SEQ ID NO: 25389 - protein, 9 aa, Artificial Sequence
  Description of Artificial Sequence: Synthetic peptide
DTVVKNMYH

SEQ ID NO: 25390 - protein, 9 aa, Artificial Sequence
  Description of Artificial Sequence: Synthetic peptide
EQIPVTWTT

SEQ ID NO: 25391 - protein, 9 aa, Artificial Sequence
  Description of Artificial Sequence: Synthetic peptide
WHMMSRDGN

SEQ ID NO: 25392 - protein, 9 aa, Artificial Sequence
  Description of Artificial Sequence: Synthetic peptide
STEEGKGWF

SEQ ID NO: 25393 - protein, 9 aa, Artificial Sequence
  Description of Artificial Sequence: Synthetic peptide
DVMMALATQ

SEQ ID NO: 25394 - protein, 9 aa, Artificial Sequence
  Description of Artificial Sequence: Synthetic peptide
SAEPQDANV

SEQ ID NO: 25395 - protein, 9 aa, Artificial Sequence
  Description of Artificial Sequence: Synthetic peptide
SVTMDEEAH

SEQ ID NO: 25396 - protein, 9 aa, Artificial Sequence
  Description of Artificial Sequence: Synthetic peptide
AVPTSQAEY

SEQ ID NO: 25397 - protein, 9 aa, Artificial Sequence
  Description of Artificial Sequence: Synthetic peptide
PCAMHNWCC

SEQ ID NO: 25398 - protein, 9 aa, Artificial Sequence
  Description of Artificial Sequence: Synthetic peptide
EVYVESQNE

SEQ ID NO: 25399 - protein, 9 aa, Artificial Sequence
  Description of Artificial Sequence: Synthetic peptide
CIDTYDIDS

SEQ ID NO: 25400 - protein, 9 aa, Artificial Sequence
  Description of Artificial Sequence: Synthetic peptide
SNMELYCRV

SEQ ID NO: 25401 - protein, 9 aa, Artificial Sequence
  Description of Artificial Sequence: Synthetic peptide
GTHEHEYGA

SEQ ID NO: 25402 - protein, 9 aa, Artificial Sequence
  Description of Artificial Sequence: Synthetic peptide
DTLPVQVYQ

SEQ ID NO: 25403 - protein, 9 aa, Artificial Sequence
  Description of Artificial Sequence: Synthetic peptide
NIFDTNVLT

SEQ ID NO: 25404 - protein, 9 aa, Artificial Sequence
  Description of Artificial Sequence: Synthetic peptide
VSEDKEAIS

SEQ ID NO: 25405 - protein, 9 aa, Artificial Sequence
  Description of Artificial Sequence: Synthetic peptide
VMHDIPNFF

SEQ ID NO: 25406 - protein, 9 aa, Artificial Sequence
  Description of Artificial Sequence: Synthetic peptide
ETMSRHEGM

SEQ ID NO: 25407 - protein, 9 aa, Artificial Sequence
  Description of Artificial Sequence: Synthetic peptide
ATEIDHWQW

SEQ ID NO: 25408 - protein, 9 aa, Artificial Sequence
  Description of Artificial Sequence: Synthetic peptide
LSMDVTMAG

SEQ ID NO: 25409 - protein, 9 aa, Artificial Sequence
  Description of Artificial Sequence: Synthetic peptide
AIHWMDWCQ

SEQ ID NO: 25410 - protein, 9 aa, Artificial Sequence
  Description of Artificial Sequence: Synthetic peptide
TVHFFSEET

SEQ ID NO: 25411 - protein, 9 aa, Artificial Sequence
  Description of Artificial Sequence: Synthetic peptide
EMAGPFVTT

SEQ ID NO: 25412 - protein, 9 aa, Artificial Sequence
  Description of Artificial Sequence: Synthetic peptide
DIHVNNFWN

SEQ ID NO: 25413 - protein, 9 aa, Artificial Sequence
  Description of Artificial Sequence: Synthetic peptide
EKQMDGINH

SEQ ID NO: 25414 - protein, 9 aa, Artificial Sequence
  Description of Artificial Sequence: Synthetic peptide
QEDGDFSTF

SEQ ID NO: 25415 - protein, 9 aa, Artificial Sequence
  Description of Artificial Sequence: Synthetic peptide
EITQTYDHL

SEQ ID NO: 25416 - protein, 9 aa, Artificial Sequence
  Description of Artificial Sequence: Synthetic peptide
AHSEIMCDQ

SEQ ID NO: 25417 - protein, 9 aa, Artificial Sequence
  Description of Artificial Sequence: Synthetic peptide
VTKLAEDVY

SEQ ID NO: 25418 - protein, 9 aa, Artificial Sequence
  Description of Artificial Sequence: Synthetic peptide
PEFMWCVPW

SEQ ID NO: 25419 - protein, 9 aa, Artificial Sequence
  Description of Artificial Sequence: Synthetic peptide
DTTTDMWVA

SEQ ID NO: 25420 - protein, 9 aa, Artificial Sequence
  Description of Artificial Sequence: Synthetic peptide
DVFIENQHW

SEQ ID NO: 25421 - protein, 9 aa, Artificial Sequence
  Description of Artificial Sequence: Synthetic peptide
NVSLQSIHK

SEQ ID NO: 25422 - protein, 9 aa, Artificial Sequence
  Description of Artificial Sequence: Synthetic peptide
ESGMEQISQ

SEQ ID NO: 25423 - protein, 9 aa, Artificial Sequence
  Description of Artificial Sequence: Synthetic peptide
PNGCYTDCE

SEQ ID NO: 25424 - protein, 9 aa, Artificial Sequence
  Description of Artificial Sequence: Synthetic peptide
AVKEFHDCF

SEQ ID NO: 25425 - protein, 9 aa, Artificial Sequence
  Description of Artificial Sequence: Synthetic peptide
WVADHGDGS

SEQ ID NO: 25426 - protein, 9 aa, Artificial Sequence
  Description of Artificial Sequence: Synthetic peptide
EIGMTQPCT

SEQ ID NO: 25427 - protein, 9 aa, Artificial Sequence
  Description of Artificial Sequence: Synthetic peptide
WLYTSNFKD

SEQ ID NO: 25428 - protein, 9 aa, Artificial Sequence
  Description of Artificial Sequence: Synthetic peptide
DDMEDQQQY

SEQ ID NO: 25429 - protein, 9 aa, Artificial Sequence
  Description of Artificial Sequence: Synthetic peptide
EATTTSEKD

SEQ ID NO: 25430 - protein, 9 aa, Artificial Sequence
  Description of Artificial Sequence: Synthetic peptide
QTQDTMNLH

SEQ ID NO: 25431 - protein, 9 aa, Artificial Sequence
  Description of Artificial Sequence: Synthetic peptide
QVHHNNVDM

SEQ ID NO: 25432 - protein, 9 aa, Artificial Sequence
  Description of Artificial Sequence: Synthetic peptide
SVVLCNLCQ

SEQ ID NO: 25433 - protein, 9 aa, Artificial Sequence
  Description of Artificial Sequence: Synthetic peptide
DAPDFMTFC

SEQ ID NO: 25434 - protein, 9 aa, Artificial Sequence
  Description of Artificial Sequence: Synthetic peptide
FPRIEGQGE

SEQ ID NO: 25435 - protein, 9 aa, Artificial Sequence
  Description of Artificial Sequence: Synthetic peptide
PQLFKGPVE

SEQ ID NO: 25436 - protein, 9 aa, Artificial Sequence
  Description of Artificial Sequence: Synthetic peptide
TTEWLDFDA

SEQ ID NO: 25437 - protein, 9 aa, Artificial Sequence
  Description of Artificial Sequence: Synthetic peptide
FEWVDWGYV

SEQ ID NO: 25438 - protein, 9 aa, Artificial Sequence
  Description of Artificial Sequence: Synthetic peptide
MRNYPDARF

SEQ ID NO: 25439 - protein, 9 aa, Artificial Sequence
  Description of Artificial Sequence: Synthetic peptide
EIGSCPEWC

SEQ ID NO: 25440 - protein, 9 aa, Artificial Sequence
  Description of Artificial Sequence: Synthetic peptide
DNPPGRRKP

SEQ ID NO: 25441 - protein, 9 aa, Artificial Sequence
  Description of Artificial Sequence: Synthetic peptide
TTTDSPMHF

SEQ ID NO: 25442 - protein, 9 aa, Artificial Sequence
  Description of Artificial Sequence: Synthetic peptide
SCDESEAYY

SEQ ID NO: 25443 - protein, 9 aa, Artificial Sequence
  Description of Artificial Sequence: Synthetic peptide
WEHVLDYAK

SEQ ID NO: 25444 - protein, 9 aa, Artificial Sequence
  Description of Artificial Sequence: Synthetic peptide
DASFVDQDE

SEQ ID NO: 25445 - protein, 9 aa, Artificial Sequence
  Description of Artificial Sequence: Synthetic peptide
GVNEAEFTI

SEQ ID NO: 25446 - protein, 9 aa, Artificial Sequence
  Description of Artificial Sequence: Synthetic peptide
MIEVTSHST

SEQ ID NO: 25447 - protein, 9 aa, Artificial Sequence
  Description of Artificial Sequence: Synthetic peptide
AVQHTEFNL

SEQ ID NO: 25448 - protein, 9 aa, Artificial Sequence
  Description of Artificial Sequence: Synthetic peptide
DIQGMLEAA

SEQ ID NO: 25449 - protein, 9 aa, Artificial Sequence
  Description of Artificial Sequence: Synthetic peptide
DVVMTAMDY

SEQ ID NO: 25450 - protein, 9 aa, Artificial Sequence
  Description of Artificial Sequence: Synthetic peptide
FKDWDHHTV

SEQ ID NO: 25451 - protein, 9 aa, Artificial Sequence
  Description of Artificial Sequence: Synthetic peptide
NVEHNNMGA

SEQ ID NO: 25452 - protein, 9 aa, Artificial Sequence
  Description of Artificial Sequence: Synthetic peptide
HVHEIMEEE

SEQ ID NO: 25453 - protein, 9 aa, Artificial Sequence
  Description of Artificial Sequence: Synthetic peptide
SVMTNDDID

SEQ ID NO: 25454 - protein, 9 aa, Artificial Sequence
  Description of Artificial Sequence: Synthetic peptide
GPIEFGWQI

SEQ ID NO: 25455 - protein, 9 aa, Artificial Sequence
  Description of Artificial Sequence: Synthetic peptide
EFANTEHTS

SEQ ID NO: 25456 - protein, 9 aa, Artificial Sequence
  Description of Artificial Sequence: Synthetic peptide
VTEDMIMNT

SEQ ID NO: 25457 - protein, 9 aa, Artificial Sequence
  Description of Artificial Sequence: Synthetic peptide
SQISVEFNC

SEQ ID NO: 25458 - protein, 9 aa, Artificial Sequence
  Description of Artificial Sequence: Synthetic peptide
EFWSMWVSD

SEQ ID NO: 25459 - protein, 9 aa, Artificial Sequence
  Description of Artificial Sequence: Synthetic peptide
DADELRSAK

SEQ ID NO: 25460 - protein, 9 aa, Artificial Sequence
  Description of Artificial Sequence: Synthetic peptide
EMRTYNKDY

SEQ ID NO: 25461 - protein, 9 aa, Artificial Sequence
  Description of Artificial Sequence: Synthetic peptide
SSTELFQAG

SEQ ID NO: 25462 - protein, 9 aa, Artificial Sequence
  Description of Artificial Sequence: Synthetic peptide
TEPETYPAT

SEQ ID NO: 25463 - protein, 9 aa, Artificial Sequence
  Description of Artificial Sequence: Synthetic peptide
VMDDESHRG

SEQ ID NO: 25464 - protein, 9 aa, Artificial Sequence
  Description of Artificial Sequence: Synthetic peptide
DACEEGSSM

SEQ ID NO: 25465 - protein, 9 aa, Artificial Sequence
  Description of Artificial Sequence: Synthetic peptide
WYTQDIEKE

SEQ ID NO: 25466 - protein, 9 aa, Artificial Sequence
  Description of Artificial Sequence: Synthetic peptide
IGDHDCQEQ

SEQ ID NO: 25467 - protein, 9 aa, Artificial Sequence
  Description of Artificial Sequence: Synthetic peptide
DVGNTYNHW

SEQ ID NO: 25468 - protein, 9 aa, Artificial Sequence
  Description of Artificial Sequence: Synthetic peptide
QSYTTMYQC

SEQ ID NO: 25469 - protein, 9 aa, Artificial Sequence
  Description of Artificial Sequence: Synthetic peptide
ISGEIDYME

SEQ ID NO: 25470 - protein, 9 aa, Artificial Sequence
  Description of Artificial Sequence: Synthetic peptide
ACCEFELTQ

SEQ ID NO: 25471 - protein, 9 aa, Artificial Sequence
  Description of Artificial Sequence: Synthetic peptide
TANEWETME

SEQ ID NO: 25472 - protein, 9 aa, Artificial Sequence
  Description of Artificial Sequence: Synthetic peptide
AEKMDEIWK

SEQ ID NO: 25473 - protein, 9 aa, Artificial Sequence
  Description of Artificial Sequence: Synthetic peptide
VTKPKWSNF

SEQ ID NO: 25474 - protein, 9 aa, Artificial Sequence
  Description of Artificial Sequence: Synthetic peptide
VVVLSDFGE

SEQ ID NO: 25475 - protein, 9 aa, Artificial Sequence
  Description of Artificial Sequence: Synthetic peptide
GSHWYDYNQ

SEQ ID NO: 25476 - protein, 9 aa, Artificial Sequence
  Description of Artificial Sequence: Synthetic peptide
GMYESNQGS

SEQ ID NO: 25477 - protein, 9 aa, Artificial Sequence
  Description of Artificial Sequence: Synthetic peptide
DVDCVWHEE

SEQ ID NO: 25478 - protein, 9 aa, Artificial Sequence
  Description of Artificial Sequence: Synthetic peptide
LVYDPHFTS

SEQ ID NO: 25479 - protein, 9 aa, Artificial Sequence
  Description of Artificial Sequence: Synthetic peptide
NDVDLWHVD

SEQ ID NO: 25480 - protein, 9 aa, Artificial Sequence
  Description of Artificial Sequence: Synthetic peptide
AVEYAGWEK

SEQ ID NO: 25481 - protein, 9 aa, Artificial Sequence
  Description of Artificial Sequence: Synthetic peptide
FYQADIGWA

SEQ ID NO: 25482 - protein, 9 aa, Artificial Sequence
  Description of Artificial Sequence: Synthetic peptide
NTEAEDHQD

SEQ ID NO: 25483 - protein, 9 aa, Artificial Sequence
  Description of Artificial Sequence: Synthetic peptide
RCDCKVHEF

SEQ ID NO: 25484 - protein, 9 aa, Artificial Sequence
  Description of Artificial Sequence: Synthetic peptide
HLPCGWPAV

SEQ ID NO: 25485 - protein, 9 aa, Artificial Sequence
  Description of Artificial Sequence: Synthetic peptide
IPVHFDWFF

SEQ ID NO: 25486 - protein, 9 aa, Artificial Sequence
  Description of Artificial Sequence: Synthetic peptide
NVEGIVTAC

SEQ ID NO: 25487 - protein, 9 aa, Artificial Sequence
  Description of Artificial Sequence: Synthetic peptide
DVGNMAAIE

SEQ ID NO: 25488 - protein, 9 aa, Artificial Sequence
  Description of Artificial Sequence: Synthetic peptide
ETLQAQHCD

SEQ ID NO: 25489 - protein, 9 aa, Artificial Sequence
  Description of Artificial Sequence: Synthetic peptide
NTADIHMKE

SEQ ID NO: 25490 - protein, 9 aa, Artificial Sequence
  Description of Artificial Sequence: Synthetic peptide
SPLEVWTPA

SEQ ID NO: 25491 - protein, 9 aa, Artificial Sequence
  Description of Artificial Sequence: Synthetic peptide
KFVWDTWAW

SEQ ID NO: 25492 - protein, 9 aa, Artificial Sequence
  Description of Artificial Sequence: Synthetic peptide
KCFLCGSTT

SEQ ID NO: 25493 - protein, 9 aa, Artificial Sequence
  Description of Artificial Sequence: Synthetic peptide
WECADRRPT

SEQ ID NO: 25494 - protein, 9 aa, Artificial Sequence
  Description of Artificial Sequence: Synthetic peptide
VIDDYFQMC

SEQ ID NO: 25495 - protein, 9 aa, Artificial Sequence
  Description of Artificial Sequence: Synthetic peptide
GATCTIVRY

SEQ ID NO: 25496 - protein, 9 aa, Artificial Sequence
  Description of Artificial Sequence: Synthetic peptide
TIDCYAAMD

SEQ ID NO: 25497 - protein, 9 aa, Artificial Sequence
  Description of Artificial Sequence: Synthetic peptide
PYCQQAANW

SEQ ID NO: 25498 - protein, 9 aa, Artificial Sequence
  Description of Artificial Sequence: Synthetic peptide
MVYEATELD

SEQ ID NO: 25499 - protein, 9 aa, Artificial Sequence
  Description of Artificial Sequence: Synthetic peptide
MTVDLYEVL

SEQ ID NO: 25500 - protein, 9 aa, Artificial Sequence
  Description of Artificial Sequence: Synthetic peptide
EVDKGLAQA

SEQ ID NO: 25501 - protein, 9 aa, Artificial Sequence
  Description of Artificial Sequence: Synthetic peptide
DSELLPEAH

SEQ ID NO: 25502 - protein, 9 aa, Artificial Sequence
  Description of Artificial Sequence: Synthetic peptide
AVYDHAPQN

SEQ ID NO: 25503 - protein, 9 aa, Artificial Sequence
  Description of Artificial Sequence: Synthetic peptide
WHHTHSHNC

SEQ ID NO: 25504 - protein, 9 aa, Artificial Sequence
  Description of Artificial Sequence: Synthetic peptide
DIMPQWAFM

SEQ ID NO: 25505 - protein, 9 aa, Artificial Sequence
  Description of Artificial Sequence: Synthetic peptide
DIRHYNISR

SEQ ID NO: 25506 - protein, 9 aa, Artificial Sequence
  Description of Artificial Sequence: Synthetic peptide
VTLDGNRMG

SEQ ID NO: 25507 - protein, 9 aa, Artificial Sequence
  Description of Artificial Sequence: Synthetic peptide
IIETQCQAI

SEQ ID NO: 25508 - protein, 9 aa, Artificial Sequence
  Description of Artificial Sequence: Synthetic peptide
EASHIFTGE

SEQ ID NO: 25509 - protein, 9 aa, Artificial Sequence
  Description of Artificial Sequence: Synthetic peptide
QIAEACAQH

SEQ ID NO: 25510 - protein, 9 aa, Artificial Sequence
  Description of Artificial Sequence: Synthetic peptide
ETTCNMGAK

SEQ ID NO: 25511 - protein, 9 aa, Artificial Sequence
  Description of Artificial Sequence: Synthetic peptide
VFDMTNLRV

SEQ ID NO: 25512 - protein, 9 aa, Artificial Sequence
  Description of Artificial Sequence: Synthetic peptide
LSPWHQTDQ

SEQ ID NO: 25513 - protein, 9 aa, Artificial Sequence
  Description of Artificial Sequence: Synthetic peptide
ECSHQDRSN

SEQ ID NO: 25514 - protein, 9 aa, Artificial Sequence
  Description of Artificial Sequence: Synthetic peptide
TMMDAEVGL

SEQ ID NO: 25515 - protein, 9 aa, Artificial Sequence
  Description of Artificial Sequence: Synthetic peptide
YLTELIQKT

SEQ ID NO: 25516 - protein, 9 aa, Artificial Sequence
  Description of Artificial Sequence: Synthetic peptide
EIVELRQTR

SEQ ID NO: 25517 - protein, 9 aa, Artificial Sequence
  Description of Artificial Sequence: Synthetic peptide
FPMVWFVLF

SEQ ID NO: 25518 - protein, 9 aa, Artificial Sequence
  Description of Artificial Sequence: Synthetic peptide
SNEWPTMIH

SEQ ID NO: 25519 - protein, 9 aa, Artificial Sequence
  Description of Artificial Sequence: Synthetic peptide
QISEHAGRS

SEQ ID NO: 25520 - protein, 9 aa, Artificial Sequence
  Description of Artificial Sequence: Synthetic peptide
VVQEKSINW

SEQ ID NO: 25521 - protein, 9 aa, Artificial Sequence
  Description of Artificial Sequence: Synthetic peptide
DAQPQRNGS

SEQ ID NO: 25522 - protein, 9 aa, Artificial Sequence
  Description of Artificial Sequence: Synthetic peptide
EVWTSCMTP

SEQ ID NO: 25523 - protein, 9 aa, Artificial Sequence
  Description of Artificial Sequence: Synthetic peptide
EATNFTIGR

SEQ ID NO: 25524 - protein, 9 aa, Artificial Sequence
  Description of Artificial Sequence: Synthetic peptide
VTEPHSFTV

SEQ ID NO: 25525 - protein, 9 aa, Artificial Sequence
  Description of Artificial Sequence: Synthetic peptide
LHEVQTILH

SEQ ID NO: 25526 - protein, 9 aa, Artificial Sequence
  Description of Artificial Sequence: Synthetic peptide
EVVTQMEHL

SEQ ID NO: 25527 - protein, 9 aa, Artificial Sequence
  Description of Artificial Sequence: Synthetic peptide
WRVWQNLPQ

SEQ ID NO: 25528 - protein, 9 aa, Artificial Sequence
  Description of Artificial Sequence: Synthetic peptide
TSEYMATGE

SEQ ID NO: 25529 - protein, 9 aa, Artificial Sequence
  Description of Artificial Sequence: Synthetic peptide
KDWRFEDEK

SEQ ID NO: 25530 - protein, 9 aa, Artificial Sequence
  Description of Artificial Sequence: Synthetic peptide
IQAEQMSGC

SEQ ID NO: 25531 - protein, 9 aa, Artificial Sequence
  Description of Artificial Sequence: Synthetic peptide
DAKNWLDKN

SEQ ID NO: 25532 - protein, 9 aa, Artificial Sequence
  Description of Artificial Sequence: Synthetic peptide
MPNFAWEAQ

SEQ ID NO: 25533 - protein, 9 aa, Artificial Sequence
  Description of Artificial Sequence: Synthetic peptide
DLLNYGMFH

SEQ ID NO: 25534 - protein, 9 aa, Artificial Sequence
  Description of Artificial Sequence: Synthetic peptide
EQPFDEFKA

SEQ ID NO: 25535 - protein, 9 aa, Artificial Sequence
  Description of Artificial Sequence: Synthetic peptide
HATGLVNVM

SEQ ID NO: 25536 - protein, 9 aa, Artificial Sequence
  Description of Artificial Sequence: Synthetic peptide
KEEFNQEPA

SEQ ID NO: 25537 - protein, 9 aa, Artificial Sequence
  Description of Artificial Sequence: Synthetic peptide
EAYTRVGYE

SEQ ID NO: 25538 - protein, 9 aa, Artificial Sequence
  Description of Artificial Sequence: Synthetic peptide
MQEEMGPRK

SEQ ID NO: 25539 - protein, 9 aa, Artificial Sequence
  Description of Artificial Sequence: Synthetic peptide
DFTNQDHDN

SEQ ID NO: 25540 - protein, 9 aa, Artificial Sequence
  Description of Artificial Sequence: Synthetic peptide
EVRANCESY

SEQ ID NO: 25541 - protein, 9 aa, Artificial Sequence
  Description of Artificial Sequence: Synthetic peptide
DNTDPDGSW

SEQ ID NO: 25542 - protein, 9 aa, Artificial Sequence
  Description of Artificial Sequence: Synthetic peptide
TIGPSNFST

SEQ ID NO: 25543 - protein, 9 aa, Artificial Sequence
  Description of Artificial Sequence: Synthetic peptide
DNANFSGAD

SEQ ID NO: 25544 - protein, 9 aa, Artificial Sequence
  Description of Artificial Sequence: Synthetic peptide
EYMERDMSI

SEQ ID NO: 25545 - protein, 9 aa, Artificial Sequence
  Description of Artificial Sequence: Synthetic peptide
FDKLGTMWG

SEQ ID NO: 25546 - protein, 9 aa, Artificial Sequence
  Description of Artificial Sequence: Synthetic peptide
CVDQLDDVT

SEQ ID NO: 25547 - protein, 9 aa, Artificial Sequence
  Description of Artificial Sequence: Synthetic peptide
ESGGYMRMC

SEQ ID NO: 25548 - protein, 9 aa, Artificial Sequence
  Description of Artificial Sequence: Synthetic peptide
VQTMPKPIY

SEQ ID NO: 25549 - protein, 9 aa, Artificial Sequence
  Description of Artificial Sequence: Synthetic peptide
TYVDNNHMV

SEQ ID NO: 25550 - protein, 9 aa, Artificial Sequence
  Description of Artificial Sequence: Synthetic peptide
EIVVEFEDQ

SEQ ID NO: 25551 - protein, 9 aa, Artificial Sequence
  Description of Artificial Sequence: Synthetic peptide
IPDCMNLSQ

SEQ ID NO: 25552 - protein, 9 aa, Artificial Sequence
  Description of Artificial Sequence: Synthetic peptide
HTVMEGSPT

SEQ ID NO: 25553 - protein, 9 aa, Artificial Sequence
  Description of Artificial Sequence: Synthetic peptide
PIIPIAEHV

SEQ ID NO: 25554 - protein, 9 aa, Artificial Sequence
  Description of Artificial Sequence: Synthetic peptide
DVQGSGQWV

SEQ ID NO: 25555 - protein, 9 aa, Artificial Sequence
  Description of Artificial Sequence: Synthetic peptide
HTNQQANSP

SEQ ID NO: 25556 - protein, 9 aa, Artificial Sequence
  Description of Artificial Sequence: Synthetic peptide
STDDEYSLA

SEQ ID NO: 25557 - protein, 9 aa, Artificial Sequence
  Description of Artificial Sequence: Synthetic peptide
TAVEWHYFD

SEQ ID NO: 25558 - protein, 9 aa, Artificial Sequence
  Description of Artificial Sequence: Synthetic peptide
MAPQSLWNM

SEQ ID NO: 25559 - protein, 9 aa, Artificial Sequence
  Description of Artificial Sequence: Synthetic peptide
SSGEMDHVY

SEQ ID NO: 25560 - protein, 9 aa, Artificial Sequence
  Description of Artificial Sequence: Synthetic peptide
TIDDYGPIS

SEQ ID NO: 25561 - protein, 9 aa, Artificial Sequence
  Description of Artificial Sequence: Synthetic peptide
DQPCKMWAR

SEQ ID NO: 25562 - protein, 9 aa, Artificial Sequence
  Description of Artificial Sequence: Synthetic peptide
TTEAGTALE

SEQ ID NO: 25563 - protein, 9 aa, Artificial Sequence
  Description of Artificial Sequence: Synthetic peptide
ETDLKCHSY

SEQ ID NO: 25564 - protein, 9 aa, Artificial Sequence
  Description of Artificial Sequence: Synthetic peptide
ACVEQEKAD

SEQ ID NO: 25565 - protein, 9 aa, Artificial Sequence
  Description of Artificial Sequence: Synthetic peptide
SMNEMYQYP

SEQ ID NO: 25566 - protein, 9 aa, Artificial Sequence
  Description of Artificial Sequence: Synthetic peptide
GIDTTTQAF

SEQ ID NO: 25567 - protein, 9 aa, Artificial Sequence
  Description of Artificial Sequence: Synthetic peptide
FPQMNEWEC

SEQ ID NO: 25568 - protein, 9 aa, Artificial Sequence
  Description of Artificial Sequence: Synthetic peptide
DVHTTCYHY

SEQ ID NO: 25569 - protein, 9 aa, Artificial Sequence
  Description of Artificial Sequence: Synthetic peptide
SQPNPEINW

SEQ ID NO: 25570 - protein, 9 aa, Artificial Sequence
  Description of Artificial Sequence: Synthetic peptide
EVMLSKMEY

SEQ ID NO: 25571 - protein, 9 aa, Artificial Sequence
  Description of Artificial Sequence: Synthetic peptide
IVDHCNMYP

SEQ ID NO: 25572 - protein, 9 aa, Artificial Sequence
  Description of Artificial Sequence: Synthetic peptide
EFHQFGNHM

SEQ ID NO: 25573 - protein, 9 aa, Artificial Sequence
  Description of Artificial Sequence: Synthetic peptide
TVQMGEWGY

SEQ ID NO: 25574 - protein, 9 aa, Artificial Sequence
  Description of Artificial Sequence: Synthetic peptide
NMSDGHEVC

SEQ ID NO: 25575 - protein, 9 aa, Artificial Sequence
  Description of Artificial Sequence: Synthetic peptide
DDNEYHVWS

SEQ ID NO: 25576 - protein, 9 aa, Artificial Sequence
  Description of Artificial Sequence: Synthetic peptide
DNWMGQDDK

SEQ ID NO: 25577 - protein, 9 aa, Artificial Sequence
  Description of Artificial Sequence: Synthetic peptide
DEMDAQMGA

SEQ ID NO: 25578 - protein, 9 aa, Artificial Sequence
  Description of Artificial Sequence: Synthetic peptide
TNDWMRLRV

SEQ ID NO: 25579 - protein, 9 aa, Artificial Sequence
  Description of Artificial Sequence: Synthetic peptide
IHYDYNTIC

SEQ ID NO: 25580 - protein, 9 aa, Artificial Sequence
  Description of Artificial Sequence: Synthetic peptide
DTGSFTSTP

SEQ ID NO: 25581 - protein, 9 aa, Artificial Sequence
  Description of Artificial Sequence: Synthetic peptide
LTEATPKWT

SEQ ID NO: 25582 - protein, 9 aa, Artificial Sequence
  Description of Artificial Sequence: Synthetic peptide
GDWSERSIT

SEQ ID NO: 25583 - protein, 9 aa, Artificial Sequence
  Description of Artificial Sequence: Synthetic peptide
TTCPMEKLN

SEQ ID NO: 25584 - protein, 9 aa, Artificial Sequence
  Description of Artificial Sequence: Synthetic peptide
LCVEDNIQQ

SEQ ID NO: 25585 - protein, 9 aa, Artificial Sequence
  Description of Artificial Sequence: Synthetic peptide
DVAQYGLGN

SEQ ID NO: 25586 - protein, 9 aa, Artificial Sequence
  Description of Artificial Sequence: Synthetic peptide
TADMMPMNP

SEQ ID NO: 25587 - protein, 9 aa, Artificial Sequence
  Description of Artificial Sequence: Synthetic peptide
TDESEFESS

SEQ ID NO: 25588 - protein, 9 aa, Artificial Sequence
  Description of Artificial Sequence: Synthetic peptide
HDMSYHDPI

SEQ ID NO: 25589 - protein, 9 aa, Artificial Sequence
  Description of Artificial Sequence: Synthetic peptide
TVVERHEHG

SEQ ID NO: 25590 - protein, 9 aa, Artificial Sequence
  Description of Artificial Sequence: Synthetic peptide
CVETQWRAD

SEQ ID NO: 25591 - protein, 9 aa, Artificial Sequence
  Description of Artificial Sequence: Synthetic peptide
SFDIESARQ

SEQ ID NO: 25592 - protein, 9 aa, Artificial Sequence
  Description of Artificial Sequence: Synthetic peptide
EVEVVKEFQ

SEQ ID NO: 25593 - protein, 9 aa, Artificial Sequence
  Description of Artificial Sequence: Synthetic peptide
NTQTTDIHG

SEQ ID NO: 25594 - protein, 9 aa, Artificial Sequence
  Description of Artificial Sequence: Synthetic peptide
PQKGDDWLY

SEQ ID NO: 25595 - protein, 9 aa, Artificial Sequence
  Description of Artificial Sequence: Synthetic peptide
PCEQMPYIM

SEQ ID NO: 25596 - protein, 9 aa, Artificial Sequence
  Description of Artificial Sequence: Synthetic peptide
DEYDNVWQA

SEQ ID NO: 25597 - protein, 9 aa, Artificial Sequence
  Description of Artificial Sequence: Synthetic peptide
DMRDSHAWP

SEQ ID NO: 25598 - protein, 9 aa, Artificial Sequence
  Description of Artificial Sequence: Synthetic peptide
YTCHEEWPL

SEQ ID NO: 25599 - protein, 9 aa, Artificial Sequence
  Description of Artificial Sequence: Synthetic peptide
ESGLAPMNL

SEQ ID NO: 25600 - protein, 9 aa, Artificial Sequence
  Description of Artificial Sequence: Synthetic peptide
PMDHEKRYH

SEQ ID NO: 25601 - protein, 9 aa, Artificial Sequence
  Description of Artificial Sequence: Synthetic peptide
VPEPDDKPY

SEQ ID NO: 25602 - protein, 9 aa, Artificial Sequence
  Description of Artificial Sequence: Synthetic peptide
AIIWTTDQP

SEQ ID NO: 25603 - protein, 9 aa, Artificial Sequence
  Description of Artificial Sequence: Synthetic peptide
QSMPICEGH

SEQ ID NO: 25604 - protein, 9 aa, Artificial Sequence
  Description of Artificial Sequence: Synthetic peptide
DAGPLSMRS

SEQ ID NO: 25605 - protein, 9 aa, Artificial Sequence
  Description of Artificial Sequence: Synthetic peptide
VTEVQHMAK

SEQ ID NO: 25606 - protein, 9 aa, Artificial Sequence
  Description of Artificial Sequence: Synthetic peptide
WEGFYMLTL

SEQ ID NO: 25607 - protein, 9 aa, Artificial Sequence
  Description of Artificial Sequence: Synthetic peptide
MIMCMDCFP

SEQ ID NO: 25608 - protein, 9 aa, Artificial Sequence
  Description of Artificial Sequence: Synthetic peptide
DIAGMPHIS

SEQ ID NO: 25609 - protein, 9 aa, Artificial Sequence
  Description of Artificial Sequence: Synthetic peptide
GVDAGLVSE

SEQ ID NO: 25610 - protein, 9 aa, Artificial Sequence
  Description of Artificial Sequence: Synthetic peptide
TIDVPMQYA

SEQ ID NO: 25611 - protein, 9 aa, Artificial Sequence
  Description of Artificial Sequence: Synthetic peptide
MELEGHNLP

SEQ ID NO: 25612 - protein, 9 aa, Artificial Sequence
  Description of Artificial Sequence: Synthetic peptide
DEWYRSKED

SEQ ID NO: 25613 - protein, 9 aa, Artificial Sequence
  Description of Artificial Sequence: Synthetic peptide
VWDCPKWRH

SEQ ID NO: 25614 - protein, 9 aa, Artificial Sequence
  Description of Artificial Sequence: Synthetic peptide
SYDDTVICW

SEQ ID NO: 25615 - protein, 9 aa, Artificial Sequence
  Description of Artificial Sequence: Synthetic peptide
IVDNKCYYN

SEQ ID NO: 25616 - protein, 9 aa, Artificial Sequence
  Description of Artificial Sequence: Synthetic peptide
DSTPIMQRC

SEQ ID NO: 25617 - protein, 9 aa, Artificial Sequence
  Description of Artificial Sequence: Synthetic peptide
YWDCQHSYM

SEQ ID NO: 25618 - protein, 9 aa, Artificial Sequence
  Description of Artificial Sequence: Synthetic peptide
TKMIIFGSW

SEQ ID NO: 25619 - protein, 9 aa, Artificial Sequence
  Description of Artificial Sequence: Synthetic peptide
SVVIRQLVD

SEQ ID NO: 25620 - protein, 9 aa, Artificial Sequence
  Description of Artificial Sequence: Synthetic peptide
EVCIHEQCM

SEQ ID NO: 25621 - protein, 9 aa, Artificial Sequence
  Description of Artificial Sequence: Synthetic peptide
DCSHEAHRY

SEQ ID NO: 25622 - protein, 9 aa, Artificial Sequence
  Description of Artificial Sequence: Synthetic peptide
INPELSEGC

SEQ ID NO: 25623 - protein, 9 aa, Artificial Sequence
  Description of Artificial Sequence: Synthetic peptide
DTSSWGVIP

SEQ ID NO: 25624 - protein, 9 aa, Artificial Sequence
  Description of Artificial Sequence: Synthetic peptide
HYRDNKSLP

SEQ ID NO: 25625 - protein, 9 aa, Artificial Sequence
  Description of Artificial Sequence: Synthetic peptide
MNSEPVTET

SEQ ID NO: 25626 - protein, 9 aa, Artificial Sequence
  Description of Artificial Sequence: Synthetic peptide
QMEWLAAGP

SEQ ID NO: 25627 - protein, 9 aa, Artificial Sequence
  Description of Artificial Sequence: Synthetic peptide
IFTTADGEF

SEQ ID NO: 25628 - protein, 9 aa, Artificial Sequence
  Description of Artificial Sequence: Synthetic peptide
MFPSEAKEI

SEQ ID NO: 25629 - protein, 9 aa, Artificial Sequence
  Description of Artificial Sequence: Synthetic peptide
DVKPGLFYT

SEQ ID NO: 25630 - protein, 9 aa, Artificial Sequence
  Description of Artificial Sequence: Synthetic peptide
ETDQPQLAA

SEQ ID NO: 25631 - protein, 9 aa, Artificial Sequence
  Description of Artificial Sequence: Synthetic peptide
DVLLYMSAT

SEQ ID NO: 25632 - protein, 9 aa, Artificial Sequence
  Description of Artificial Sequence: Synthetic peptide
DIIFKLEAG

SEQ ID NO: 25633 - protein, 9 aa, Artificial Sequence
  Description of Artificial Sequence: Synthetic peptide
CDAGLISKM

SEQ ID NO: 25634 - protein, 9 aa, Artificial Sequence
  Description of Artificial Sequence: Synthetic peptide
MFTGPDVRH

SEQ ID NO: 25635 - protein, 9 aa, Artificial Sequence
  Description of Artificial Sequence: Synthetic peptide
GVMESQYIS

SEQ ID NO: 25636 - protein, 9 aa, Artificial Sequence
  Description of Artificial Sequence: Synthetic peptide
DCTLQPAMY

SEQ ID NO: 25637 - protein, 9 aa, Artificial Sequence
  Description of Artificial Sequence: Synthetic peptide
PEAQRVAGI

SEQ ID NO: 25638 - protein, 9 aa, Artificial Sequence
  Description of Artificial Sequence: Synthetic peptide
DVEMCQKMS

SEQ ID NO: 25639 - protein, 9 aa, Artificial Sequence
  Description of Artificial Sequence: Synthetic peptide
WHGCYKIMF

SEQ ID NO: 25640 - protein, 9 aa, Artificial Sequence
  Description of Artificial Sequence: Synthetic peptide
VHMPYTEET

SEQ ID NO: 25641 - protein, 9 aa, Artificial Sequence
  Description of Artificial Sequence: Synthetic peptide
ENGTHQYND

SEQ ID NO: 25642 - protein, 9 aa, Artificial Sequence
  Description of Artificial Sequence: Synthetic peptide
QCAYSWWRY

SEQ ID NO: 25643 - protein, 9 aa, Artificial Sequence
  Description of Artificial Sequence: Synthetic peptide
CEWLGTCNH

SEQ ID NO: 25644 - protein, 9 aa, Artificial Sequence
  Description of Artificial Sequence: Synthetic peptide
DTCYNNWKD

SEQ ID NO: 25645 - protein, 9 aa, Artificial Sequence
  Description of Artificial Sequence: Synthetic peptide
LSAQRLVGD

SEQ ID NO: 25646 - protein, 9 aa, Artificial Sequence
  Description of Artificial Sequence: Synthetic peptide
NLDMYSISQ

SEQ ID NO: 25647 - protein, 9 aa, Artificial Sequence
  Description of Artificial Sequence: Synthetic peptide
SILFYSETH

SEQ ID NO: 25648 - protein, 9 aa, Artificial Sequence
  Description of Artificial Sequence: Synthetic peptide
MDYDGMAVY

SEQ ID NO: 25649 - protein, 9 aa, Artificial Sequence
  Description of Artificial Sequence: Synthetic peptide
LCSDEVCWT

SEQ ID NO: 25650 - protein, 9 aa, Artificial Sequence
  Description of Artificial Sequence: Synthetic peptide
TIEGKSLYC

SEQ ID NO: 25651 - protein, 9 aa, Artificial Sequence
  Description of Artificial Sequence: Synthetic peptide
ETSMPMEHT

SEQ ID NO: 25652 - protein, 9 aa, Artificial Sequence
  Description of Artificial Sequence: Synthetic peptide
VEINAKWGN

SEQ ID NO: 25653 - protein, 9 aa, Artificial Sequence
  Description of Artificial Sequence: Synthetic peptide
IEPWDCQIP

SEQ ID NO: 25654 - protein, 9 aa, Artificial Sequence
  Description of Artificial Sequence: Synthetic peptide
EEPEFTGRG

SEQ ID NO: 25655 - protein, 9 aa, Artificial Sequence
  Description of Artificial Sequence: Synthetic peptide
ENDCRIRMA

SEQ ID NO: 25656 - protein, 9 aa, Artificial Sequence
  Description of Artificial Sequence: Synthetic peptide
CVMHVQCDH

SEQ ID NO: 25657 - protein, 9 aa, Artificial Sequence
  Description of Artificial Sequence: Synthetic peptide
AIATGWQDM

SEQ ID NO: 25658 - protein, 9 aa, Artificial Sequence
  Description of Artificial Sequence: Synthetic peptide
EYHGYLEHT

SEQ ID NO: 25659 - protein, 9 aa, Artificial Sequence
  Description of Artificial Sequence: Synthetic peptide
IQWVHGCLF

SEQ ID NO: 25660 - protein, 9 aa, Artificial Sequence
  Description of Artificial Sequence: Synthetic peptide
NDCSDCQTL

SEQ ID NO: 25661 - protein, 9 aa, Artificial Sequence
  Description of Artificial Sequence: Synthetic peptide
AGMEIIVQC

SEQ ID NO: 25662 - protein, 9 aa, Artificial Sequence
  Description of Artificial Sequence: Synthetic peptide
DHEMPESTF

SEQ ID NO: 25663 - protein, 9 aa, Artificial Sequence
  Description of Artificial Sequence: Synthetic peptide
VKCFPCQLE

SEQ ID NO: 25664 - protein, 9 aa, Artificial Sequence
  Description of Artificial Sequence: Synthetic peptide
NEPELKLQP

SEQ ID NO: 25665 - protein, 9 aa, Artificial Sequence
  Description of Artificial Sequence: Synthetic peptide
DTCQAMHGD

SEQ ID NO: 25666 - protein, 9 aa, Artificial Sequence
  Description of Artificial Sequence: Synthetic peptide
EWHFVNIGT

SEQ ID NO: 25667 - protein, 9 aa, Artificial Sequence
  Description of Artificial Sequence: Synthetic peptide
MVQQYNGSE

SEQ ID NO: 25668 - protein, 9 aa, Artificial Sequence
  Description of Artificial Sequence: Synthetic peptide
DIERFSTVC

SEQ ID NO: 25669 - protein, 9 aa, Artificial Sequence
  Description of Artificial Sequence: Synthetic peptide
NIAAHSPGP

SEQ ID NO: 25670 - protein, 9 aa, Artificial Sequence
  Description of Artificial Sequence: Synthetic peptide
HNPCWPFMI

SEQ ID NO: 25671 - protein, 9 aa, Artificial Sequence
  Description of Artificial Sequence: Synthetic peptide
IVDMPVRHP

SEQ ID NO: 25672 - protein, 9 aa, Artificial Sequence
  Description of Artificial Sequence: Synthetic peptide
SADEDKCGW

SEQ ID NO: 25673 - protein, 9 aa, Artificial Sequence
  Description of Artificial Sequence: Synthetic peptide
SFPEAWPIA

SEQ ID NO: 25674 - protein, 9 aa, Artificial Sequence
  Description of Artificial Sequence: Synthetic peptide
MIVSQQWVW

SEQ ID NO: 25675 - protein, 9 aa, Artificial Sequence
  Description of Artificial Sequence: Synthetic peptide
HIEYWDQRD

SEQ ID NO: 25676 - protein, 9 aa, Artificial Sequence
  Description of Artificial Sequence: Synthetic peptide
SLMYEDDYP

SEQ ID NO: 25677 - protein, 9 aa, Artificial Sequence
  Description of Artificial Sequence: Synthetic peptide
DAAIYVMLD

SEQ ID NO: 25678 - protein, 9 aa, Artificial Sequence
  Description of Artificial Sequence: Synthetic peptide
MQKNPPKRV

SEQ ID NO: 25679 - protein, 9 aa, Artificial Sequence
  Description of Artificial Sequence: Synthetic peptide
TMVDWELGK

SEQ ID NO: 25680 - protein, 9 aa, Artificial Sequence
  Description of Artificial Sequence: Synthetic peptide
QTGLNEYAP

SEQ ID NO: 25681 - protein, 9 aa, Artificial Sequence
  Description of Artificial Sequence: Synthetic peptide
DDMWCGGLY

SEQ ID NO: 25682 - protein, 9 aa, Artificial Sequence
  Description of Artificial Sequence: Synthetic peptide
VIYFVGLIA

SEQ ID NO: 25683 - protein, 9 aa, Artificial Sequence
  Description of Artificial Sequence: Synthetic peptide
HHACGTREH

SEQ ID NO: 25684 - protein, 9 aa, Artificial Sequence
  Description of Artificial Sequence: Synthetic peptide
DISSNIYDI

SEQ ID NO: 25685 - protein, 9 aa, Artificial Sequence
  Description of Artificial Sequence: Synthetic peptide
AIECYKMGS

SEQ ID NO: 25686 - protein, 9 aa, Artificial Sequence
  Description of Artificial Sequence: Synthetic peptide
EESNRGYQH

SEQ ID NO: 25687 - protein, 9 aa, Artificial Sequence
  Description of Artificial Sequence: Synthetic peptide
MTEVVVSSM

SEQ ID NO: 25688 - protein, 9 aa, Artificial Sequence
  Description of Artificial Sequence: Synthetic peptide
HEGHPHLSC

SEQ ID NO: 25689 - protein, 9 aa, Artificial Sequence
  Description of Artificial Sequence: Synthetic peptide
ESCTGEWWA

SEQ ID NO: 25690 - protein, 9 aa, Artificial Sequence
  Description of Artificial Sequence: Synthetic peptide
MTDTVQEYA

SEQ ID NO: 25691 - protein, 9 aa, Artificial Sequence
  Description of Artificial Sequence: Synthetic peptide
PRNGPYCDI

SEQ ID NO: 25692 - protein, 9 aa, Artificial Sequence
  Description of Artificial Sequence: Synthetic peptide
NKMTEARKH

SEQ ID NO: 25693 - protein, 9 aa, Artificial Sequence
  Description of Artificial Sequence: Synthetic peptide
DNGQVEETA

SEQ ID NO: 25694 - protein, 9 aa, Artificial Sequence
  Description of Artificial Sequence: Synthetic peptide
DAYVQQPSF

SEQ ID NO: 25695 - protein, 9 aa, Artificial Sequence
  Description of Artificial Sequence: Synthetic peptide
FVYEWSNLV

SEQ ID NO: 25696 - protein, 9 aa, Artificial Sequence
  Description of Artificial Sequence: Synthetic peptide
EVRGQGSHY

SEQ ID NO: 25697 - protein, 9 aa, Artificial Sequence
  Description of Artificial Sequence: Synthetic peptide
WFDCPPCCA

SEQ ID NO: 25698 - protein, 9 aa, Artificial Sequence
  Description of Artificial Sequence: Synthetic peptide
WREFSEWTF

SEQ ID NO: 25699 - protein, 9 aa, Artificial Sequence
  Description of Artificial Sequence: Synthetic peptide
QLFAPDMDW

SEQ ID NO: 25700 - protein, 9 aa, Artificial Sequence
  Description of Artificial Sequence: Synthetic peptide
TYNDFYTAF

SEQ ID NO: 25701 - protein, 9 aa, Artificial Sequence
  Description of Artificial Sequence: Synthetic peptide
EVGSMPQDW

SEQ ID NO: 25702 - protein, 9 aa, Artificial Sequence
  Description of Artificial Sequence: Synthetic peptide
SKELGSVET

SEQ ID NO: 25703 - protein, 9 aa, Artificial Sequence
  Description of Artificial Sequence: Synthetic peptide
DVTISMQAG

SEQ ID NO: 25704 - protein, 9 aa, Artificial Sequence
  Description of Artificial Sequence: Synthetic peptide
KYNFNLNKY

SEQ ID NO: 25705 - protein, 9 aa, Artificial Sequence
  Description of Artificial Sequence: Synthetic peptide
VSDWPQIKA

SEQ ID NO: 25706 - protein, 9 aa, Artificial Sequence
  Description of Artificial Sequence: Synthetic peptide
DTKSRQWDC

SEQ ID NO: 25707 - protein, 9 aa, Artificial Sequence
  Description of Artificial Sequence: Synthetic peptide
AYEGECIHY

SEQ ID NO: 25708 - protein, 9 aa, Artificial Sequence
  Description of Artificial Sequence: Synthetic peptide
MAEFEQWLE

SEQ ID NO: 25709 - protein, 9 aa, Artificial Sequence
  Description of Artificial Sequence: Synthetic peptide
CELHELFDG

SEQ ID NO: 25710 - protein, 9 aa, Artificial Sequence
  Description of Artificial Sequence: Synthetic peptide
TAEYIDISY

SEQ ID NO: 25711 - protein, 9 aa, Artificial Sequence
  Description of Artificial Sequence: Synthetic peptide
EIAQFSGVC

SEQ ID NO: 25712 - protein, 9 aa, Artificial Sequence
  Description of Artificial Sequence: Synthetic peptide
DWNEEMAHL

SEQ ID NO: 25713 - protein, 9 aa, Artificial Sequence
  Description of Artificial Sequence: Synthetic peptide
WQEYRMTDQ

SEQ ID NO: 25714 - protein, 9 aa, Artificial Sequence
  Description of Artificial Sequence: Synthetic peptide
SNENICPTC

SEQ ID NO: 25715 - protein, 9 aa, Artificial Sequence
  Description of Artificial Sequence: Synthetic peptide
LPVDVLVKT

SEQ ID NO: 25716 - protein, 9 aa, Artificial Sequence
  Description of Artificial Sequence: Synthetic peptide
SADWRHKSP

SEQ ID NO: 25717 - protein, 9 aa, Artificial Sequence
  Description of Artificial Sequence: Synthetic peptide
EDGQSMCVS

SEQ ID NO: 25718 - protein, 9 aa, Artificial Sequence
  Description of Artificial Sequence: Synthetic peptide
MHHEYAMAG

SEQ ID NO: 25719 - protein, 9 aa, Artificial Sequence
  Description of Artificial Sequence: Synthetic peptide
DDHDINGGP

SEQ ID NO: 25720 - protein, 9 aa, Artificial Sequence
  Description of Artificial Sequence: Synthetic peptide
MTEDQTWWQ

SEQ ID NO: 25721 - protein, 9 aa, Artificial Sequence
  Description of Artificial Sequence: Synthetic peptide
WNEPWYVRP

SEQ ID NO: 25722 - protein, 9 aa, Artificial Sequence
  Description of Artificial Sequence: Synthetic peptide
ECQQDSWHY

SEQ ID NO: 25723 - protein, 9 aa, Artificial Sequence
  Description of Artificial Sequence: Synthetic peptide
EVQRQMSNK

SEQ ID NO: 25724 - protein, 9 aa, Artificial Sequence
  Description of Artificial Sequence: Synthetic peptide
DMHSFKWWS

SEQ ID NO: 25725 - protein, 9 aa, Artificial Sequence
  Description of Artificial Sequence: Synthetic peptide
DHGEIPAFT

SEQ ID NO: 25726 - protein, 9 aa, Artificial Sequence
  Description of Artificial Sequence: Synthetic peptide
EYDKMMYAE

SEQ ID NO: 25727 - protein, 9 aa, Artificial Sequence
  Description of Artificial Sequence: Synthetic peptide
DADREDFWS

SEQ ID NO: 25728 - protein, 9 aa, Artificial Sequence
  Description of Artificial Sequence: Synthetic peptide
QQEAEHKGV

SEQ ID NO: 25729 - protein, 9 aa, Artificial Sequence
  Description of Artificial Sequence: Synthetic peptide
AHEVTFVRP

SEQ ID NO: 25730 - protein, 9 aa, Artificial Sequence
  Description of Artificial Sequence: Synthetic peptide
QPIDVSAAI

SEQ ID NO: 25731 - protein, 9 aa, Artificial Sequence
  Description of Artificial Sequence: Synthetic peptide
DIYLKCFIK

SEQ ID NO: 25732 - protein, 9 aa, Artificial Sequence
  Description of Artificial Sequence: Synthetic peptide
EIFLENRFP

SEQ ID NO: 25733 - protein, 9 aa, Artificial Sequence
  Description of Artificial Sequence: Synthetic peptide
FTKTNDHNT

SEQ ID NO: 25734 - protein, 9 aa, Artificial Sequence
  Description of Artificial Sequence: Synthetic peptide
WQALWCLVH

SEQ ID NO: 25735 - protein, 9 aa, Artificial Sequence
  Description of Artificial Sequence: Synthetic peptide
AFKALDVQC

SEQ ID NO: 25736 - protein, 9 aa, Artificial Sequence
  Description of Artificial Sequence: Synthetic peptide
DIHSTNWLA

SEQ ID NO: 25737 - protein, 9 aa, Artificial Sequence
  Description of Artificial Sequence: Synthetic peptide
NLTDKCTAD

SEQ ID NO: 25738 - protein, 9 aa, Artificial Sequence
  Description of Artificial Sequence: Synthetic peptide
NSEWWSSVL

SEQ ID NO: 25739 - protein, 9 aa, Artificial Sequence
  Description of Artificial Sequence: Synthetic peptide
TNEIMWCSP

SEQ ID NO: 25740 - protein, 9 aa, Artificial Sequence
  Description of Artificial Sequence: Synthetic peptide
MVAPSQALQ

SEQ ID NO: 25741 - protein, 9 aa, Artificial Sequence
  Description of Artificial Sequence: Synthetic peptide
APGEYMDVE

SEQ ID NO: 25742 - protein, 9 aa, Artificial Sequence
  Description of Artificial Sequence: Synthetic peptide
ECAKTEWNF

SEQ ID NO: 25743 - protein, 9 aa, Artificial Sequence
  Description of Artificial Sequence: Synthetic peptide
KDLHDAIHN

SEQ ID NO: 25744 - protein, 9 aa, Artificial Sequence
  Description of Artificial Sequence: Synthetic peptide
LAPCSKIYC

SEQ ID NO: 25745 - protein, 9 aa, Artificial Sequence
  Description of Artificial Sequence: Synthetic peptide
FMWPPQIVV

SEQ ID NO: 25746 - protein, 9 aa, Artificial Sequence
  Description of Artificial Sequence: Synthetic peptide
HMQEPSIAS

SEQ ID NO: 25747 - protein, 9 aa, Artificial Sequence
  Description of Artificial Sequence: Synthetic peptide
MEPVMHYLN

SEQ ID NO: 25748 - protein, 9 aa, Artificial Sequence
  Description of Artificial Sequence: Synthetic peptide
YCKCPTCNT

SEQ ID NO: 25749 - protein, 9 aa, Artificial Sequence
  Description of Artificial Sequence: Synthetic peptide
ADGPVLQMF

SEQ ID NO: 25750 - protein, 9 aa, Artificial Sequence
  Description of Artificial Sequence: Synthetic peptide
EVSSCDDFT

SEQ ID NO: 25751 - protein, 9 aa, Artificial Sequence
  Description of Artificial Sequence: Synthetic peptide
CNEEMEFSC

SEQ ID NO: 25752 - protein, 9 aa, Artificial Sequence
  Description of Artificial Sequence: Synthetic peptide
MLTESQQSM

SEQ ID NO: 25753 - protein, 9 aa, Artificial Sequence
  Description of Artificial Sequence: Synthetic peptide
WPGFEKLPS

SEQ ID NO: 25754 - protein, 9 aa, Artificial Sequence
  Description of Artificial Sequence: Synthetic peptide
SPYCDDRGN

SEQ ID NO: 25755 - protein, 9 aa, Artificial Sequence
  Description of Artificial Sequence: Synthetic peptide
QYCLTEASH

SEQ ID NO: 25756 - protein, 9 aa, Artificial Sequence
  Description of Artificial Sequence: Synthetic peptide
TSEWLWVDS

SEQ ID NO: 25757 - protein, 9 aa, Artificial Sequence
  Description of Artificial Sequence: Synthetic peptide
DNMVWRGAH

SEQ ID NO: 25758 - protein, 9 aa, Artificial Sequence
  Description of Artificial Sequence: Synthetic peptide
CDNDYLTAT

SEQ ID NO: 25759 - protein, 9 aa, Artificial Sequence
  Description of Artificial Sequence: Synthetic peptide
VIEYNSNIY

SEQ ID NO: 25760 - protein, 9 aa, Artificial Sequence
  Description of Artificial Sequence: Synthetic peptide
HVSAIEKAQ

SEQ ID NO: 25761 - protein, 9 aa, Artificial Sequence
  Description of Artificial Sequence: Synthetic peptide
QVATFECKQ

SEQ ID NO: 25762 - protein, 9 aa, Artificial Sequence
  Description of Artificial Sequence: Synthetic peptide
LHIHRDVTI

SEQ ID NO: 25763 - protein, 9 aa, Artificial Sequence
  Description of Artificial Sequence: Synthetic peptide
NHEETEFGY

SEQ ID NO: 25764 - protein, 9 aa, Artificial Sequence
  Description of Artificial Sequence: Synthetic peptide
MDSCYDYQS

SEQ ID NO: 25765 - protein, 9 aa, Artificial Sequence
  Description of Artificial Sequence: Synthetic peptide
EVLGCNYWP

SEQ ID NO: 25766 - protein, 9 aa, Artificial Sequence
  Description of Artificial Sequence: Synthetic peptide
STEDWATLH

SEQ ID NO: 25767 - protein, 9 aa, Artificial Sequence
  Description of Artificial Sequence: Synthetic peptide
CQTDKNATE

SEQ ID NO: 25768 - protein, 9 aa, Artificial Sequence
  Description of Artificial Sequence: Synthetic peptide
ALEQEMVKF

SEQ ID NO: 25769 - protein, 9 aa, Artificial Sequence
  Description of Artificial Sequence: Synthetic peptide
QVTFASASK

SEQ ID NO: 25770 - protein, 9 aa, Artificial Sequence
  Description of Artificial Sequence: Synthetic peptide
DDEVYVWGQ

SEQ ID NO: 25771 - protein, 9 aa, Artificial Sequence
  Description of Artificial Sequence: Synthetic peptide
QVMPRSIER

SEQ ID NO: 25772 - protein, 9 aa, Artificial Sequence
  Description of Artificial Sequence: Synthetic peptide
AVHTFQMWD

SEQ ID NO: 25773 - protein, 9 aa, Artificial Sequence
  Description of Artificial Sequence: Synthetic peptide
LVGNADHGQ

SEQ ID NO: 25774 - protein, 9 aa, Artificial Sequence
  Description of Artificial Sequence: Synthetic peptide
NVGLPSYFA

SEQ ID NO: 25775 - protein, 9 aa, Artificial Sequence
  Description of Artificial Sequence: Synthetic peptide
EDYSGTKWG

SEQ ID NO: 25776 - protein, 9 aa, Artificial Sequence
  Description of Artificial Sequence: Synthetic peptide
TVPLKTYGG

SEQ ID NO: 25777 - protein, 9 aa, Artificial Sequence
  Description of Artificial Sequence: Synthetic peptide
TYMPMDCKW

SEQ ID NO: 25778 - protein, 9 aa, Artificial Sequence
  Description of Artificial Sequence: Synthetic peptide
FIVQQSIWK

SEQ ID NO: 25779 - protein, 9 aa, Artificial Sequence
  Description of Artificial Sequence: Synthetic peptide
NEQHYEYWK

SEQ ID NO: 25780 - protein, 9 aa, Artificial Sequence
  Description of Artificial Sequence: Synthetic peptide
LDVTPQPEG

SEQ ID NO: 25781 - protein, 9 aa, Artificial Sequence
  Description of Artificial Sequence: Synthetic peptide
ETSLPHWQG

SEQ ID NO: 25782 - protein, 9 aa, Artificial Sequence
  Description of Artificial Sequence: Synthetic peptide
DSKPVMMAN

SEQ ID NO: 25783 - protein, 9 aa, Artificial Sequence
  Description of Artificial Sequence: Synthetic peptide
VYRHFDMTP

SEQ ID NO: 25784 - protein, 9 aa, Artificial Sequence
  Description of Artificial Sequence: Synthetic peptide
DSLAAWSDK

SEQ ID NO: 25785 - protein, 9 aa, Artificial Sequence
  Description of Artificial Sequence: Synthetic peptide
STIPTPIWL

SEQ ID NO: 25786 - protein, 9 aa, Artificial Sequence
  Description of Artificial Sequence: Synthetic peptide
VQVQDWLPE

SEQ ID NO: 25787 - protein, 9 aa, Artificial Sequence
  Description of Artificial Sequence: Synthetic peptide
DWNCAALKP

SEQ ID NO: 25788 - protein, 9 aa, Artificial Sequence
  Description of Artificial Sequence: Synthetic peptide
EVGPSWEQR

SEQ ID NO: 25789 - protein, 9 aa, Artificial Sequence
  Description of Artificial Sequence: Synthetic peptide
MHDFLTSAQ

SEQ ID NO: 25790 - protein, 9 aa, Artificial Sequence
  Description of Artificial Sequence: Synthetic peptide
NLPCSQQAM

SEQ ID NO: 25791 - protein, 9 aa, Artificial Sequence
  Description of Artificial Sequence: Synthetic peptide
DQRCNKAPG

SEQ ID NO: 25792 - protein, 9 aa, Artificial Sequence
  Description of Artificial Sequence: Synthetic peptide
PLAFSPVQR

SEQ ID NO: 25793 - protein, 9 aa, Artificial Sequence
  Description of Artificial Sequence: Synthetic peptide
ETDLAMKAE

SEQ ID NO: 25794 - protein, 9 aa, Artificial Sequence
  Description of Artificial Sequence: Synthetic peptide
NVEWRQACN

SEQ ID NO: 25795 - protein, 9 aa, Artificial Sequence
  Description of Artificial Sequence: Synthetic peptide
ETTTCWQYF

SEQ ID NO: 25796 - protein, 9 aa, Artificial Sequence
  Description of Artificial Sequence: Synthetic peptide
AMPYEEVPA

SEQ ID NO: 25797 - protein, 9 aa, Artificial Sequence
  Description of Artificial Sequence: Synthetic peptide
ESAQFVAYS

SEQ ID NO: 25798 - protein, 9 aa, Artificial Sequence
  Description of Artificial Sequence: Synthetic peptide
VLDCAMCNP

SEQ ID NO: 25799 - protein, 9 aa, Artificial Sequence
  Description of Artificial Sequence: Synthetic peptide
AEPHFQNKS

SEQ ID NO: 25800 - protein, 9 aa, Artificial Sequence
  Description of Artificial Sequence: Synthetic peptide
MNESFPTWN

SEQ ID NO: 25801 - protein, 9 aa, Artificial Sequence
  Description of Artificial Sequence: Synthetic peptide
EVQCDQIHP

SEQ ID NO: 25802 - protein, 9 aa, Artificial Sequence
  Description of Artificial Sequence: Synthetic peptide
MDQCFSYNQ

SEQ ID NO: 25803 - protein, 9 aa, Artificial Sequence
  Description of Artificial Sequence: Synthetic peptide
EVGSQRTAY

SEQ ID NO: 25804 - protein, 9 aa, Artificial Sequence
  Description of Artificial Sequence: Synthetic peptide
DHSPVKSAY

SEQ ID NO: 25805 - protein, 9 aa, Artificial Sequence
  Description of Artificial Sequence: Synthetic peptide
YICQQDLIM

SEQ ID NO: 25806 - protein, 9 aa, Artificial Sequence
  Description of Artificial Sequence: Synthetic peptide
KIDHEQDCY

SEQ ID NO: 25807 - protein, 9 aa, Artificial Sequence
  Description of Artificial Sequence: Synthetic peptide
LPVEPIDCE

SEQ ID NO: 25808 - protein, 9 aa, Artificial Sequence
  Description of Artificial Sequence: Synthetic peptide
GLMVGQWPH

SEQ ID NO: 25809 - protein, 9 aa, Artificial Sequence
  Description of Artificial Sequence: Synthetic peptide
AHIWDTLIP

SEQ ID NO: 25810 - protein, 9 aa, Artificial Sequence
  Description of Artificial Sequence: Synthetic peptide
ATIVGDSGN

SEQ ID NO: 25811 - protein, 9 aa, Artificial Sequence
  Description of Artificial Sequence: Synthetic peptide
TANDYGPTE

SEQ ID NO: 25812 - protein, 9 aa, Artificial Sequence
  Description of Artificial Sequence: Synthetic peptide
NVELPKIHE

SEQ ID NO: 25813 - protein, 9 aa, Artificial Sequence
  Description of Artificial Sequence: Synthetic peptide
MLPDHWVIT

SEQ ID NO: 25814 - protein, 9 aa, Artificial Sequence
  Description of Artificial Sequence: Synthetic peptide
HPFNEAVKH

SEQ ID NO: 25815 - protein, 9 aa, Artificial Sequence
  Description of Artificial Sequence: Synthetic peptide
IISSTTSTG

SEQ ID NO: 25816 - protein, 9 aa, Artificial Sequence
  Description of Artificial Sequence: Synthetic peptide
IKEHECRRI

SEQ ID NO: 25817 - protein, 9 aa, Artificial Sequence
  Description of Artificial Sequence: Synthetic peptide
AVHQINVAA

SEQ ID NO: 25818 - protein, 9 aa, Artificial Sequence
  Description of Artificial Sequence: Synthetic peptide
LVMEALPMA

SEQ ID NO: 25819 - protein, 9 aa, Artificial Sequence
  Description of Artificial Sequence: Synthetic peptide
GQIWAAMRR

SEQ ID NO: 25820 - protein, 9 aa, Artificial Sequence
  Description of Artificial Sequence: Synthetic peptide
MWVCKLFVC

SEQ ID NO: 25821 - protein, 9 aa, Artificial Sequence
  Description of Artificial Sequence: Synthetic peptide
PIHHGEHVY

SEQ ID NO: 25822 - protein, 9 aa, Artificial Sequence
  Description of Artificial Sequence: Synthetic peptide
NHQCNGLAQ

SEQ ID NO: 25823 - protein, 9 aa, Artificial Sequence
  Description of Artificial Sequence: Synthetic peptide
TCEEPYNFA

SEQ ID NO: 25824 - protein, 9 aa, Artificial Sequence
  Description of Artificial Sequence: Synthetic peptide
LVHEKWEQF

SEQ ID NO: 25825 - protein, 9 aa, Artificial Sequence
  Description of Artificial Sequence: Synthetic peptide
ALAKFRCWS

SEQ ID NO: 25826 - protein, 9 aa, Artificial Sequence
  Description of Artificial Sequence: Synthetic peptide
ITSVFDNKA

SEQ ID NO: 25827 - protein, 9 aa, Artificial Sequence
  Description of Artificial Sequence: Synthetic peptide
DVITHWIGQ

SEQ ID NO: 25828 - protein, 9 aa, Artificial Sequence
  Description of Artificial Sequence: Synthetic peptide
QQASSSGGF

SEQ ID NO: 25829 - protein, 9 aa, Artificial Sequence
  Description of Artificial Sequence: Synthetic peptide
EGDDLDRHY

SEQ ID NO: 25830 - protein, 9 aa, Artificial Sequence
  Description of Artificial Sequence: Synthetic peptide
MPELKFSYC

SEQ ID NO: 25831 - protein, 9 aa, Artificial Sequence
  Description of Artificial Sequence: Synthetic peptide
HQTHQHNIW

SEQ ID NO: 25832 - protein, 9 aa, Artificial Sequence
  Description of Artificial Sequence: Synthetic peptide
AFGTLEHEP

SEQ ID NO: 25833 - protein, 9 aa, Artificial Sequence
  Description of Artificial Sequence: Synthetic peptide
TKPTHDVGS

SEQ ID NO: 25834 - protein, 9 aa, Artificial Sequence
  Description of Artificial Sequence: Synthetic peptide
QVMQNESER

SEQ ID NO: 25835 - protein, 9 aa, Artificial Sequence
  Description of Artificial Sequence: Synthetic peptide
SDESNWFGQ

SEQ ID NO: 25836 - protein, 9 aa, Artificial Sequence
  Description of Artificial Sequence: Synthetic peptide
FSADVNNYD

SEQ ID NO: 25837 - protein, 9 aa, Artificial Sequence
  Description of Artificial Sequence: Synthetic peptide
LWCCTDTEC

SEQ ID NO: 25838 - protein, 9 aa, Artificial Sequence
  Description of Artificial Sequence: Synthetic peptide
SMEEWGCES

SEQ ID NO: 25839 - protein, 9 aa, Artificial Sequence
  Description of Artificial Sequence: Synthetic peptide
MHFCIWMRM

SEQ ID NO: 25840 - protein, 9 aa, Artificial Sequence
  Description of Artificial Sequence: Synthetic peptide
AHNESDDCG

SEQ ID NO: 25841 - protein, 9 aa, Artificial Sequence
  Description of Artificial Sequence: Synthetic peptide
SHQFVQPNN

SEQ ID NO: 25842 - protein, 9 aa, Artificial Sequence
  Description of Artificial Sequence: Synthetic peptide
AIHMFGQSE

SEQ ID NO: 25843 - protein, 9 aa, Artificial Sequence
  Description of Artificial Sequence: Synthetic peptide
PRKCSNEEV

SEQ ID NO: 25844 - protein, 9 aa, Artificial Sequence
  Description of Artificial Sequence: Synthetic peptide
HFPLGWLWL

SEQ ID NO: 25845 - protein, 9 aa, Artificial Sequence
  Description of Artificial Sequence: Synthetic peptide
QQLELDGSL

SEQ ID NO: 25846 - protein, 9 aa, Artificial Sequence
  Description of Artificial Sequence: Synthetic peptide
INHGWEKVA

SEQ ID NO: 25847 - protein, 9 aa, Artificial Sequence
  Description of Artificial Sequence: Synthetic peptide
HQHCAEFCH

SEQ ID NO: 25848 - protein, 9 aa, Artificial Sequence
  Description of Artificial Sequence: Synthetic peptide
DCSHNGMRE

SEQ ID NO: 25849 - protein, 9 aa, Artificial Sequence
  Description of Artificial Sequence: Synthetic peptide
WINQQTLQC

SEQ ID NO: 25850 - protein, 9 aa, Artificial Sequence
  Description of Artificial Sequence: Synthetic peptide
QERMFEMTA

SEQ ID NO: 25851 - protein, 9 aa, Artificial Sequence
  Description of Artificial Sequence: Synthetic peptide
QINMSMHES

SEQ ID NO: 25852 - protein, 9 aa, Artificial Sequence
  Description of Artificial Sequence: Synthetic peptide
MVTARCWLS

SEQ ID NO: 25853 - protein, 9 aa, Artificial Sequence
  Description of Artificial Sequence: Synthetic peptide
PLWFEPALN

SEQ ID NO: 25854 - protein, 9 aa, Artificial Sequence
  Description of Artificial Sequence: Synthetic peptide
EIGYRKVYN

SEQ ID NO: 25855 - protein, 9 aa, Artificial Sequence
  Description of Artificial Sequence: Synthetic peptide
ESVMEKSMF

SEQ ID NO: 25856 - protein, 9 aa, Artificial Sequence
  Description of Artificial Sequence: Synthetic peptide
NVNHFGMGD

SEQ ID NO: 25857 - protein, 9 aa, Artificial Sequence
  Description of Artificial Sequence: Synthetic peptide
SVNVDNAEM

SEQ ID NO: 25858 - protein, 9 aa, Artificial Sequence
  Description of Artificial Sequence: Synthetic peptide
NEQFQCDVH

SEQ ID NO: 25859 - protein, 9 aa, Artificial Sequence
  Description of Artificial Sequence: Synthetic peptide
NPNCTKQQY

SEQ ID NO: 25860 - protein, 9 aa, Artificial Sequence
  Description of Artificial Sequence: Synthetic peptide
QMGPHERHA

SEQ ID NO: 25861 - protein, 9 aa, Artificial Sequence
  Description of Artificial Sequence: Synthetic peptide
ETRMHMDAL

SEQ ID NO: 25862 - protein, 9 aa, Artificial Sequence
  Description of Artificial Sequence: Synthetic peptide
LNMYEASLS

SEQ ID NO: 25863 - protein, 9 aa, Artificial Sequence
  Description of Artificial Sequence: Synthetic peptide
MKVTDKLDD

SEQ ID NO: 25864 - protein, 9 aa, Artificial Sequence
  Description of Artificial Sequence: Synthetic peptide
ADETCAKKF

SEQ ID NO: 25865 - protein, 9 aa, Artificial Sequence
  Description of Artificial Sequence: Synthetic peptide
INQWLTCRW

SEQ ID NO: 25866 - protein, 9 aa, Artificial Sequence
  Description of Artificial Sequence: Synthetic peptide
HNVGDMFCN

SEQ ID NO: 25867 - protein, 9 aa, Artificial Sequence
  Description of Artificial Sequence: Synthetic peptide
SNQPQGQYC

SEQ ID NO: 25868 - protein, 9 aa, Artificial Sequence
  Description of Artificial Sequence: Synthetic peptide
LEKVINVLH

SEQ ID NO: 25869 - protein, 9 aa, Artificial Sequence
  Description of Artificial Sequence: Synthetic peptide
SFVHMFQGP

SEQ ID NO: 25870 - protein, 9 aa, Artificial Sequence
  Description of Artificial Sequence: Synthetic peptide
DASYYSPVP

SEQ ID NO: 25871 - protein, 9 aa, Artificial Sequence
  Description of Artificial Sequence: Synthetic peptide
VNDDIYQQG

SEQ ID NO: 25872 - protein, 9 aa, Artificial Sequence
  Description of Artificial Sequence: Synthetic peptide
LEMMGWPIG

SEQ ID NO: 25873 - protein, 9 aa, Artificial Sequence
  Description of Artificial Sequence: Synthetic peptide
MEHALCTRT

SEQ ID NO: 25874 - protein, 9 aa, Artificial Sequence
  Description of Artificial Sequence: Synthetic peptide
ECSCVKRGY

SEQ ID NO: 25875 - protein, 9 aa, Artificial Sequence
  Description of Artificial Sequence: Synthetic peptide
ESGFPNPYH

SEQ ID NO: 25876 - protein, 9 aa, Artificial Sequence
  Description of Artificial Sequence: Synthetic peptide
STDWSPSLG

SEQ ID NO: 25877 - protein, 9 aa, Artificial Sequence
  Description of Artificial Sequence: Synthetic peptide
ETDYIQMGA

SEQ ID NO: 25878 - protein, 9 aa, Artificial Sequence
  Description of Artificial Sequence: Synthetic peptide
DIVTVIKRT

SEQ ID NO: 25879 - protein, 9 aa, Artificial Sequence
  Description of Artificial Sequence: Synthetic peptide
LAWDNQQFN

SEQ ID NO: 25880 - protein, 9 aa, Artificial Sequence
  Description of Artificial Sequence: Synthetic peptide
DTDHRNKFP

SEQ ID NO: 25881 - protein, 9 aa, Artificial Sequence
  Description of Artificial Sequence: Synthetic peptide
MSNDRCSMG

SEQ ID NO: 25882 - protein, 9 aa, Artificial Sequence
  Description of Artificial Sequence: Synthetic peptide
FRQSVPHWA

SEQ ID NO: 25883 - protein, 9 aa, Artificial Sequence
  Description of Artificial Sequence: Synthetic peptide
QVGQEAKNC

SEQ ID NO: 25884 - protein, 9 aa, Artificial Sequence
  Description of Artificial Sequence: Synthetic peptide
YLEWDSWRC

SEQ ID NO: 25885 - protein, 9 aa, Artificial Sequence
  Description of Artificial Sequence: Synthetic peptide
MSDFPISTP

SEQ ID NO: 25886 - protein, 9 aa, Artificial Sequence
  Description of Artificial Sequence: Synthetic peptide
MQNLSSVTE

SEQ ID NO: 25887 - protein, 9 aa, Artificial Sequence
  Description of Artificial Sequence: Synthetic peptide
STEYRNALN

SEQ ID NO: 25888 - protein, 9 aa, Artificial Sequence
  Description of Artificial Sequence: Synthetic peptide
VIVGNNVGI

SEQ ID NO: 25889 - protein, 9 aa, Artificial Sequence
  Description of Artificial Sequence: Synthetic peptide
DGPCDQMTN

SEQ ID NO: 25890 - protein, 9 aa, Artificial Sequence
  Description of Artificial Sequence: Synthetic peptide
MDEYFCGFT

SEQ ID NO: 25891 - protein, 9 aa, Artificial Sequence
  Description of Artificial Sequence: Synthetic peptide
EPAQSQHGF

SEQ ID NO: 25892 - protein, 9 aa, Artificial Sequence
  Description of Artificial Sequence: Synthetic peptide
SFDYVMWGC

SEQ ID NO: 25893 - protein, 9 aa, Artificial Sequence
  Description of Artificial Sequence: Synthetic peptide
DVFKEHYHQ

SEQ ID NO: 25894 - protein, 9 aa, Artificial Sequence
  Description of Artificial Sequence: Synthetic peptide
HFVQPACEH

SEQ ID NO: 25895 - protein, 9 aa, Artificial Sequence
  Description of Artificial Sequence: Synthetic peptide
DVANLKHHV

SEQ ID NO: 25896 - protein, 9 aa, Artificial Sequence
  Description of Artificial Sequence: Synthetic peptide
VSEQIWNAD

SEQ ID NO: 25897 - protein, 9 aa, Artificial Sequence
  Description of Artificial Sequence: Synthetic peptide
IVPCLWPIP

SEQ ID NO: 25898 - protein, 9 aa, Artificial Sequence
  Description of Artificial Sequence: Synthetic peptide
GHQEFKGSE

SEQ ID NO: 25899 - protein, 9 aa, Artificial Sequence
  Description of Artificial Sequence: Synthetic peptide
ANCSSEIYV

SEQ ID NO: 25900 - protein, 9 aa, Artificial Sequence
  Description of Artificial Sequence: Synthetic peptide
DSTHDIAHS

SEQ ID NO: 25901 - protein, 9 aa, Artificial Sequence
  Description of Artificial Sequence: Synthetic peptide
TTDRQCTGH

SEQ ID NO: 25902 - protein, 9 aa, Artificial Sequence
  Description of Artificial Sequence: Synthetic peptide
VISAMNVYP

SEQ ID NO: 25903 - protein, 9 aa, Artificial Sequence
  Description of Artificial Sequence: Synthetic peptide
AHQFIQWLH

SEQ ID NO: 25904 - protein, 9 aa, Artificial Sequence
  Description of Artificial Sequence: Synthetic peptide
ETYRYGSQR

SEQ ID NO: 25905 - protein, 9 aa, Artificial Sequence
  Description of Artificial Sequence: Synthetic peptide
KGNPLAGDT

SEQ ID NO: 25906 - protein, 9 aa, Artificial Sequence
  Description of Artificial Sequence: Synthetic peptide
NTMQMPMIG

SEQ ID NO: 25907 - protein, 9 aa, Artificial Sequence
  Description of Artificial Sequence: Synthetic peptide
MYEVLNNDQ

SEQ ID NO: 25908 - protein, 9 aa, Artificial Sequence
  Description of Artificial Sequence: Synthetic peptide
ICLHDHFRN

SEQ ID NO: 25909 - protein, 9 aa, Artificial Sequence
  Description of Artificial Sequence: Synthetic peptide
EMKGTLYAY

SEQ ID NO: 25910 - protein, 9 aa, Artificial Sequence
  Description of Artificial Sequence: Synthetic peptide
APDFRMITR

SEQ ID NO: 25911 - protein, 9 aa, Artificial Sequence
  Description of Artificial Sequence: Synthetic peptide
PQWMPVNQI

SEQ ID NO: 25912 - protein, 9 aa, Artificial Sequence
  Description of Artificial Sequence: Synthetic peptide
EFKTQQFDP

SEQ ID NO: 25913 - protein, 9 aa, Artificial Sequence
  Description of Artificial Sequence: Synthetic peptide
VNEWLDSIY

SEQ ID NO: 25914 - protein, 9 aa, Artificial Sequence
  Description of Artificial Sequence: Synthetic peptide
GSIQSVMWE

SEQ ID NO: 25915 - protein, 9 aa, Artificial Sequence
  Description of Artificial Sequence: Synthetic peptide
DFMCDQFVC

SEQ ID NO: 25916 - protein, 9 aa, Artificial Sequence
  Description of Artificial Sequence: Synthetic peptide
PCSDSTELD

SEQ ID NO: 25917 - protein, 9 aa, Artificial Sequence
  Description of Artificial Sequence: Synthetic peptide
DQECWQSSQ

SEQ ID NO: 25918 - protein, 9 aa, Artificial Sequence
  Description of Artificial Sequence: Synthetic peptide
EEPLPSDQK

SEQ ID NO: 25919 - protein, 9 aa, Artificial Sequence
  Description of Artificial Sequence: Synthetic peptide
QTMKLEHLK

SEQ ID NO: 25920 - protein, 9 aa, Artificial Sequence
  Description of Artificial Sequence: Synthetic peptide
PGTHWWWDC

SEQ ID NO: 25921 - protein, 9 aa, Artificial Sequence
  Description of Artificial Sequence: Synthetic peptide
MTVSWDSWK

SEQ ID NO: 25922 - protein, 9 aa, Artificial Sequence
  Description of Artificial Sequence: Synthetic peptide
DAWKPHQFY

SEQ ID NO: 25923 - protein, 9 aa, Artificial Sequence
  Description of Artificial Sequence: Synthetic peptide
THEEYQLGS

SEQ ID NO: 25924 - protein, 9 aa, Artificial Sequence
  Description of Artificial Sequence: Synthetic peptide
TVIQTECNT

SEQ ID NO: 25925 - protein, 9 aa, Artificial Sequence
  Description of Artificial Sequence: Synthetic peptide
SNTFIDWQA

SEQ ID NO: 25926 - protein, 9 aa, Artificial Sequence
  Description of Artificial Sequence: Synthetic peptide
LYDWSCAQS

SEQ ID NO: 25927 - protein, 9 aa, Artificial Sequence
  Description of Artificial Sequence: Synthetic peptide
WREPNCHGL

SEQ ID NO: 25928 - protein, 9 aa, Artificial Sequence
  Description of Artificial Sequence: Synthetic peptide
TMAEMCGSP

SEQ ID NO: 25929 - protein, 9 aa, Artificial Sequence
  Description of Artificial Sequence: Synthetic peptide
SETDWQRKC

SEQ ID NO: 25930 - protein, 9 aa, Artificial Sequence
  Description of Artificial Sequence: Synthetic peptide
QVIIGYCES

SEQ ID NO: 25931 - protein, 9 aa, Artificial Sequence
  Description of Artificial Sequence: Synthetic peptide
GFDECMFWY

SEQ ID NO: 25932 - protein, 9 aa, Artificial Sequence
  Description of Artificial Sequence: Synthetic peptide
PCTQIGEIY

SEQ ID NO: 25933 - protein, 9 aa, Artificial Sequence
  Description of Artificial Sequence: Synthetic peptide
FMDFFGMAS

SEQ ID NO: 25934 - protein, 9 aa, Artificial Sequence
  Description of Artificial Sequence: Synthetic peptide
DQMLDNTAY

SEQ ID NO: 25935 - protein, 9 aa, Artificial Sequence
  Description of Artificial Sequence: Synthetic peptide
SQDCQEVGG

SEQ ID NO: 25936 - protein, 9 aa, Artificial Sequence
  Description of Artificial Sequence: Synthetic peptide
SDHMSERVD

SEQ ID NO: 25937 - protein, 9 aa, Artificial Sequence
  Description of Artificial Sequence: Synthetic peptide
DVLQREEIC

SEQ ID NO: 25938 - protein, 9 aa, Artificial Sequence
  Description of Artificial Sequence: Synthetic peptide
VIALYSLAY

SEQ ID NO: 25939 - protein, 9 aa, Artificial Sequence
  Description of Artificial Sequence: Synthetic peptide
EWNYGGLKC

SEQ ID NO: 25940 - protein, 9 aa, Artificial Sequence
  Description of Artificial Sequence: Synthetic peptide
EVQYGKYWA

SEQ ID NO: 25941 - protein, 9 aa, Artificial Sequence
  Description of Artificial Sequence: Synthetic peptide
DMTMYSNAV

SEQ ID NO: 25942 - protein, 9 aa, Artificial Sequence
  Description of Artificial Sequence: Synthetic peptide
VTNCHTFNN

SEQ ID NO: 25943 - protein, 9 aa, Artificial Sequence
  Description of Artificial Sequence: Synthetic peptide
SIPCNHCFE

SEQ ID NO: 25944 - protein, 9 aa, Artificial Sequence
  Description of Artificial Sequence: Synthetic peptide
MTQGYPSLM

SEQ ID NO: 25945 - protein, 9 aa, Artificial Sequence
  Description of Artificial Sequence: Synthetic peptide
DIASVRQTE

SEQ ID NO: 25946 - protein, 9 aa, Artificial Sequence
  Description of Artificial Sequence: Synthetic peptide
IVDSASVCQ

SEQ ID NO: 25947 - protein, 9 aa, Artificial Sequence
  Description of Artificial Sequence: Synthetic peptide
AIEAKMTQV

SEQ ID NO: 25948 - protein, 9 aa, Artificial Sequence
  Description of Artificial Sequence: Synthetic peptide
ALAKFQGWS

SEQ ID NO: 25949 - protein, 9 aa, Artificial Sequence
  Description of Artificial Sequence: Synthetic peptide
PAFLGACGF

SEQ ID NO: 25950 - protein, 9 aa, Artificial Sequence
  Description of Artificial Sequence: Synthetic peptide
ESEEHRVMS

SEQ ID NO: 25951 - protein, 9 aa, Artificial Sequence
  Description of Artificial Sequence: Synthetic peptide
CQGCVPFKG

SEQ ID NO: 25952 - protein, 9 aa, Artificial Sequence
  Description of Artificial Sequence: Synthetic peptide
FIEFDAVTW

SEQ ID NO: 25953 - protein, 9 aa, Artificial Sequence
  Description of Artificial Sequence: Synthetic peptide
TTCSSNREW

SEQ ID NO: 25954 - protein, 9 aa, Artificial Sequence
  Description of Artificial Sequence: Synthetic peptide
VCNELQKYF

SEQ ID NO: 25955 - protein, 9 aa, Artificial Sequence
  Description of Artificial Sequence: Synthetic peptide
VPCYHKGRW

SEQ ID NO: 25956 - protein, 9 aa, Artificial Sequence
  Description of Artificial Sequence: Synthetic peptide
DVKCEPDRG

SEQ ID NO: 25957 - protein, 9 aa, Artificial Sequence
  Description of Artificial Sequence: Synthetic peptide
LICWYQQGN

SEQ ID NO: 25958 - protein, 9 aa, Artificial Sequence
  Description of Artificial Sequence: Synthetic peptide
EMQTHYAAR

SEQ ID NO: 25959 - protein, 9 aa, Artificial Sequence
  Description of Artificial Sequence: Synthetic peptide
AETDHYIPT

SEQ ID NO: 25960 - protein, 9 aa, Artificial Sequence
  Description of Artificial Sequence: Synthetic peptide
PQSDDWAMP

SEQ ID NO: 25961 - protein, 9 aa, Artificial Sequence
  Description of Artificial Sequence: Synthetic peptide
NHQWTQRRY

SEQ ID NO: 25962 - protein, 9 aa, Artificial Sequence
  Description of Artificial Sequence: Synthetic peptide
FEGNYTATK

SEQ ID NO: 25963 - protein, 9 aa, Artificial Sequence
  Description of Artificial Sequence: Synthetic peptide
CNCPDQHPD

SEQ ID NO: 25964 - protein, 9 aa, Artificial Sequence
  Description of Artificial Sequence: Synthetic peptide
IFQCLYTGT

SEQ ID NO: 25965 - protein, 9 aa, Artificial Sequence
  Description of Artificial Sequence: Synthetic peptide
VETYQINDT

SEQ ID NO: 25966 - protein, 9 aa, Artificial Sequence
  Description of Artificial Sequence: Synthetic peptide
FFEWLLDTG

SEQ ID NO: 25967 - protein, 9 aa, Artificial Sequence
  Description of Artificial Sequence: Synthetic peptide
SDALGPEWW

SEQ ID NO: 25968 - protein, 9 aa, Artificial Sequence
  Description of Artificial Sequence: Synthetic peptide
MTNCKLHEQ

SEQ ID NO: 25969 - protein, 9 aa, Artificial Sequence
  Description of Artificial Sequence: Synthetic peptide
IYEACFWWL

SEQ ID NO: 25970 - protein, 9 aa, Artificial Sequence
  Description of Artificial Sequence: Synthetic peptide
WCMQEGTMS

SEQ ID NO: 25971 - protein, 9 aa, Artificial Sequence
  Description of Artificial Sequence: Synthetic peptide
EIRLEHDGG

SEQ ID NO: 25972 - protein, 9 aa, Artificial Sequence
  Description of Artificial Sequence: Synthetic peptide
HVELSLWNQ

SEQ ID NO: 25973 - protein, 9 aa, Artificial Sequence
  Description of Artificial Sequence: Synthetic peptide
CWMEFMAGN

SEQ ID NO: 25974 - protein, 9 aa, Artificial Sequence
  Description of Artificial Sequence: Synthetic peptide
AWDYWNSQW

SEQ ID NO: 25975 - protein, 9 aa, Artificial Sequence
  Description of Artificial Sequence: Synthetic peptide
NNITTPDAY

SEQ ID NO: 25976 - protein, 9 aa, Artificial Sequence
  Description of Artificial Sequence: Synthetic peptide
SVTMHSMEL

SEQ ID NO: 25977 - protein, 9 aa, Artificial Sequence
  Description of Artificial Sequence: Synthetic peptide
TYDHIKFAP

SEQ ID NO: 25978 - protein, 9 aa, Artificial Sequence
  Description of Artificial Sequence: Synthetic peptide
LQQMENASP

SEQ ID NO: 25979 - protein, 9 aa, Artificial Sequence
  Description of Artificial Sequence: Synthetic peptide
CTDDKMCPV

SEQ ID NO: 25980 - protein, 9 aa, Artificial Sequence
  Description of Artificial Sequence: Synthetic peptide
IDSCNTSLN

SEQ ID NO: 25981 - protein, 9 aa, Artificial Sequence
  Description of Artificial Sequence: Synthetic peptide
CKEMRMDQW

SEQ ID NO: 25982 - protein, 9 aa, Artificial Sequence
  Description of Artificial Sequence: Synthetic peptide
EPEHGAMDK

SEQ ID NO: 25983 - protein, 9 aa, Artificial Sequence
  Description of Artificial Sequence: Synthetic peptide
MVLPYQITN

SEQ ID NO: 25984 - protein, 9 aa, Artificial Sequence
  Description of Artificial Sequence: Synthetic peptide
ETHLINPGI

SEQ ID NO: 25985 - protein, 9 aa, Artificial Sequence
  Description of Artificial Sequence: Synthetic peptide
CDHDTKHPT

SEQ ID NO: 25986 - protein, 9 aa, Artificial Sequence
  Description of Artificial Sequence: Synthetic peptide
CSAEIIDTC

SEQ ID NO: 25987 - protein, 9 aa, Artificial Sequence
  Description of Artificial Sequence: Synthetic peptide
EVGFYMVPR

SEQ ID NO: 25988 - protein, 9 aa, Artificial Sequence
  Description of Artificial Sequence: Synthetic peptide
AIWSIEHES

SEQ ID NO: 25989 - protein, 9 aa, Artificial Sequence
  Description of Artificial Sequence: Synthetic peptide
MVNLGYAEC

SEQ ID NO: 25990 - protein, 9 aa, Artificial Sequence
  Description of Artificial Sequence: Synthetic peptide
ELEGMSRRE

SEQ ID NO: 25991 - protein, 9 aa, Artificial Sequence
  Description of Artificial Sequence: Synthetic peptide
VDATTGDYQ

SEQ ID NO: 25992 - protein, 9 aa, Artificial Sequence
  Description of Artificial Sequence: Synthetic peptide
TVGFGLKAS

SEQ ID NO: 25993 - protein, 9 aa, Artificial Sequence
  Description of Artificial Sequence: Synthetic peptide
WMEASITGP

SEQ ID NO: 25994 - protein, 9 aa, Artificial Sequence
  Description of Artificial Sequence: Synthetic peptide
WTDGWHTMC

SEQ ID NO: 25995 - protein, 9 aa, Artificial Sequence
  Description of Artificial Sequence: Synthetic peptide
SVTLGMKPN

SEQ ID NO: 25996 - protein, 9 aa, Artificial Sequence
  Description of Artificial Sequence: Synthetic peptide
GHVQESWNC

SEQ ID NO: 25997 - protein, 9 aa, Artificial Sequence
  Description of Artificial Sequence: Synthetic peptide
STVAADWDH

SEQ ID NO: 25998 - protein, 9 aa, Artificial Sequence
  Description of Artificial Sequence: Synthetic peptide
ESEIAISWN

SEQ ID NO: 25999 - protein, 9 aa, Artificial Sequence
  Description of Artificial Sequence: Synthetic peptide
NETLDSKHF

SEQ ID NO: 26000 - protein, 9 aa, Artificial Sequence
  Description of Artificial Sequence: Synthetic peptide
TFMWLDRVG

SEQ ID NO: 26001 - protein, 9 aa, Artificial Sequence
  Description of Artificial Sequence: Synthetic peptide
TTDSWMDVE

SEQ ID NO: 26002 - protein, 9 aa, Artificial Sequence
  Description of Artificial Sequence: Synthetic peptide
DEAEEHGCT

SEQ ID NO: 26003 - protein, 9 aa, Artificial Sequence
  Description of Artificial Sequence: Synthetic peptide
FTPPKLHYK

SEQ ID NO: 26004 - protein, 9 aa, Artificial Sequence
  Description of Artificial Sequence: Synthetic peptide
QYLTAEFTS

SEQ ID NO: 26005 - protein, 9 aa, Artificial Sequence
  Description of Artificial Sequence: Synthetic peptide
MSTNNCNIS

SEQ ID NO: 26006 - protein, 9 aa, Artificial Sequence
  Description of Artificial Sequence: Synthetic peptide
EAWSCGIYD

SEQ ID NO: 26007 - protein, 9 aa, Artificial Sequence
  Description of Artificial Sequence: Synthetic peptide
NYDTLLETH

SEQ ID NO: 26008 - protein, 9 aa, Artificial Sequence
  Description of Artificial Sequence: Synthetic peptide
NVEYVNWHW

SEQ ID NO: 26009 - protein, 9 aa, Artificial Sequence
  Description of Artificial Sequence: Synthetic peptide
FVMPISAQG

SEQ ID NO: 26010 - protein, 9 aa, Artificial Sequence
  Description of Artificial Sequence: Synthetic peptide
SQESHMTWH

SEQ ID NO: 26011 - protein, 9 aa, Artificial Sequence
  Description of Artificial Sequence: Synthetic peptide
GIVALDNAD

SEQ ID NO: 26012 - protein, 9 aa, Artificial Sequence
  Description of Artificial Sequence: Synthetic peptide
TVMWKDYID

SEQ ID NO: 26013 - protein, 9 aa, Artificial Sequence
  Description of Artificial Sequence: Synthetic peptide
PWCEDPGCS

SEQ ID NO: 26014 - protein, 9 aa, Artificial Sequence
  Description of Artificial Sequence: Synthetic peptide
TVIYVTDDA

SEQ ID NO: 26015 - protein, 9 aa, Artificial Sequence
  Description of Artificial Sequence: Synthetic peptide
TQDCSTMPS

SEQ ID NO: 26016 - protein, 9 aa, Artificial Sequence
  Description of Artificial Sequence: Synthetic peptide
SMCWLENGN

SEQ ID NO: 26017 - protein, 9 aa, Artificial Sequence
  Description of Artificial Sequence: Synthetic peptide
MVDLETTYV

SEQ ID NO: 26018 - protein, 9 aa, Artificial Sequence
  Description of Artificial Sequence: Synthetic peptide
DNTQKQNDP

SEQ ID NO: 26019 - protein, 9 aa, Artificial Sequence
  Description of Artificial Sequence: Synthetic peptide
NVDRCDSWQ

SEQ ID NO: 26020 - protein, 9 aa, Artificial Sequence
  Description of Artificial Sequence: Synthetic peptide
TYEPCSTSH

SEQ ID NO: 26021 - protein, 9 aa, Artificial Sequence
  Description of Artificial Sequence: Synthetic peptide
DFHCQTERQ

SEQ ID NO: 26022 - protein, 9 aa, Artificial Sequence
  Description of Artificial Sequence: Synthetic peptide
TTAPMEMSL

SEQ ID NO: 26023 - protein, 9 aa, Artificial Sequence
  Description of Artificial Sequence: Synthetic peptide
NAVEGQSHK

SEQ ID NO: 26024 - protein, 9 aa, Artificial Sequence
  Description of Artificial Sequence: Synthetic peptide
DNYSIKVGQ

SEQ ID NO: 26025 - protein, 9 aa, Artificial Sequence
  Description of Artificial Sequence: Synthetic peptide
FMMFHMGLD

SEQ ID NO: 26026 - protein, 9 aa, Artificial Sequence
  Description of Artificial Sequence: Synthetic peptide
ETRFDDRRA

SEQ ID NO: 26027 - protein, 9 aa, Artificial Sequence
  Description of Artificial Sequence: Synthetic peptide
NTGWQEAER

SEQ ID NO: 26028 - protein, 9 aa, Artificial Sequence
  Description of Artificial Sequence: Synthetic peptide
WVFMSWCDV

SEQ ID NO: 26029 - protein, 9 aa, Artificial Sequence
  Description of Artificial Sequence: Synthetic peptide
PCLITVAPH

SEQ ID NO: 26030 - protein, 9 aa, Artificial Sequence
  Description of Artificial Sequence: Synthetic peptide
DIAVIGAGA

SEQ ID NO: 26031 - protein, 9 aa, Artificial Sequence
  Description of Artificial Sequence: Synthetic peptide
EATLITYCS

SEQ ID NO: 26032 - protein, 9 aa, Artificial Sequence
  Description of Artificial Sequence: Synthetic peptide
TTEDMQCDM

SEQ ID NO: 26033 - protein, 9 aa, Artificial Sequence
  Description of Artificial Sequence: Synthetic peptide
ITMPRVRPT

SEQ ID NO: 26034 - protein, 9 aa, Artificial Sequence
  Description of Artificial Sequence: Synthetic peptide
LFVMPAAIE

SEQ ID NO: 26035 - protein, 9 aa, Artificial Sequence
  Description of Artificial Sequence: Synthetic peptide
ALEHTLFGT

SEQ ID NO: 26036 - protein, 9 aa, Artificial Sequence
  Description of Artificial Sequence: Synthetic peptide
MGCDVMKAS

SEQ ID NO: 26037 - protein, 9 aa, Artificial Sequence
  Description of Artificial Sequence: Synthetic peptide
DSWPTLMHD

SEQ ID NO: 26038 - protein, 9 aa, Artificial Sequence
  Description of Artificial Sequence: Synthetic peptide
CYHEECDGN

SEQ ID NO: 26039 - protein, 9 aa, Artificial Sequence
  Description of Artificial Sequence: Synthetic peptide
ITTPQTQSH

SEQ ID NO: 26040 - protein, 9 aa, Artificial Sequence
  Description of Artificial Sequence: Synthetic peptide
IHDWYEVGS

SEQ ID NO: 26041 - protein, 9 aa, Artificial Sequence
  Description of Artificial Sequence: Synthetic peptide
SMQMTSHYH

SEQ ID NO: 26042 - protein, 9 aa, Artificial Sequence
  Description of Artificial Sequence: Synthetic peptide
TVAVFSIAM

SEQ ID NO: 26043 - protein, 9 aa, Artificial Sequence
  Description of Artificial Sequence: Synthetic peptide
QGDEINEQA

SEQ ID NO: 26044 - protein, 9 aa, Artificial Sequence
  Description of Artificial Sequence: Synthetic peptide
PCSQYYPSC

SEQ ID NO: 26045 - protein, 9 aa, Artificial Sequence
  Description of Artificial Sequence: Synthetic peptide
PFAAVSMVF

SEQ ID NO: 26046 - protein, 9 aa, Artificial Sequence
  Description of Artificial Sequence: Synthetic peptide
MQLTNMEIE

SEQ ID NO: 26047 - protein, 9 aa, Artificial Sequence
  Description of Artificial Sequence: Synthetic peptide
VTESIDYVH

SEQ ID NO: 26048 - protein, 9 aa, Artificial Sequence
  Description of Artificial Sequence: Synthetic peptide
TIAPYTYMD

SEQ ID NO: 26049 - protein, 9 aa, Artificial Sequence
  Description of Artificial Sequence: Synthetic peptide
DIQLTHIHG

SEQ ID NO: 26050 - protein, 9 aa, Artificial Sequence
  Description of Artificial Sequence: Synthetic peptide
MYMTVQQNV

SEQ ID NO: 26051 - protein, 9 aa, Artificial Sequence
  Description of Artificial Sequence: Synthetic peptide
PFHERGLMQ

SEQ ID NO: 26052 - protein, 9 aa, Artificial Sequence
  Description of Artificial Sequence: Synthetic peptide
TYVNQGMGP

SEQ ID NO: 26053 - protein, 9 aa, Artificial Sequence
  Description of Artificial Sequence: Synthetic peptide
FVCELQSAN

SEQ ID NO: 26054 - protein, 9 aa, Artificial Sequence
  Description of Artificial Sequence: Synthetic peptide
ETKSHPVMV

SEQ ID NO: 26055 - protein, 9 aa, Artificial Sequence
  Description of Artificial Sequence: Synthetic peptide
ENDEASICM

SEQ ID NO: 26056 - protein, 9 aa, Artificial Sequence
  Description of Artificial Sequence: Synthetic peptide
VVHMFNDQM

SEQ ID NO: 26057 - protein, 9 aa, Artificial Sequence
  Description of Artificial Sequence: Synthetic peptide
NTFILETFD

SEQ ID NO: 26058 - protein, 9 aa, Artificial Sequence
  Description of Artificial Sequence: Synthetic peptide
HDFNWVTKE

SEQ ID NO: 26059 - protein, 9 aa, Artificial Sequence
  Description of Artificial Sequence: Synthetic peptide
WFVTQGAYM

SEQ ID NO: 26060 - protein, 9 aa, Artificial Sequence
  Description of Artificial Sequence: Synthetic peptide
FWATSHWGY

SEQ ID NO: 26061 - protein, 9 aa, Artificial Sequence
  Description of Artificial Sequence: Synthetic peptide
IPYTEKADI

SEQ ID NO: 26062 - protein, 9 aa, Artificial Sequence
  Description of Artificial Sequence: Synthetic peptide
HDEEEKNKA

SEQ ID NO: 26063 - protein, 9 aa, Artificial Sequence
  Description of Artificial Sequence: Synthetic peptide
WLHYVEDTL

SEQ ID NO: 26064 - protein, 9 aa, Artificial Sequence
  Description of Artificial Sequence: Synthetic peptide
NWAFNARHD

SEQ ID NO: 26065 - protein, 9 aa, Artificial Sequence
  Description of Artificial Sequence: Synthetic peptide
CSGYWMCMS

SEQ ID NO: 26066 - protein, 9 aa, Artificial Sequence
  Description of Artificial Sequence: Synthetic peptide
DFVLTGTIN

SEQ ID NO: 26067 - protein, 9 aa, Artificial Sequence
  Description of Artificial Sequence: Synthetic peptide
DVNQNAKYD

SEQ ID NO: 26068 - protein, 9 aa, Artificial Sequence
  Description of Artificial Sequence: Synthetic peptide
ITDIFHWSC

SEQ ID NO: 26069 - protein, 9 aa, Artificial Sequence
  Description of Artificial Sequence: Synthetic peptide
HMRTMDAFE

SEQ ID NO: 26070 - protein, 9 aa, Artificial Sequence
  Description of Artificial Sequence: Synthetic peptide
ESIQKHSVC

SEQ ID NO: 26071 - protein, 9 aa, Artificial Sequence
  Description of Artificial Sequence: Synthetic peptide
MSEMEKQQF

SEQ ID NO: 26072 - protein, 9 aa, Artificial Sequence
  Description of Artificial Sequence: Synthetic peptide
LMDEQPMWC

SEQ ID NO: 26073 - protein, 9 aa, Artificial Sequence
  Description of Artificial Sequence: Synthetic peptide
HWDVQVNNA

SEQ ID NO: 26074 - protein, 9 aa, Artificial Sequence
  Description of Artificial Sequence: Synthetic peptide
EQNHAQLMP

SEQ ID NO: 26075 - protein, 9 aa, Artificial Sequence
  Description of Artificial Sequence: Synthetic peptide
DTAKVVELC

SEQ ID NO: 26076 - protein, 9 aa, Artificial Sequence
  Description of Artificial Sequence: Synthetic peptide
ETSCGTLMC

SEQ ID NO: 26077 - protein, 9 aa, Artificial Sequence
  Description of Artificial Sequence: Synthetic peptide
EQQWIAPKH

SEQ ID NO: 26078 - protein, 9 aa, Artificial Sequence
  Description of Artificial Sequence: Synthetic peptide
EVKQATIWC

SEQ ID NO: 26079 - protein, 9 aa, Artificial Sequence
  Description of Artificial Sequence: Synthetic peptide
TYDPFWMQH

SEQ ID NO: 26080 - protein, 9 aa, Artificial Sequence
  Description of Artificial Sequence: Synthetic peptide
THDTTTFAF

SEQ ID NO: 26081 - protein, 9 aa, Artificial Sequence
  Description of Artificial Sequence: Synthetic peptide
WVFQADWNT

SEQ ID NO: 26082 - protein, 9 aa, Artificial Sequence
  Description of Artificial Sequence: Synthetic peptide
WVTPQCIHL

SEQ ID NO: 26083 - protein, 9 aa, Artificial Sequence
  Description of Artificial Sequence: Synthetic peptide
LGHDVNGHH

SEQ ID NO: 26084 - protein, 9 aa, Artificial Sequence
  Description of Artificial Sequence: Synthetic peptide
CHELIKKQW

SEQ ID NO: 26085 - protein, 9 aa, Artificial Sequence
  Description of Artificial Sequence: Synthetic peptide
SNWSKCAPT

SEQ ID NO: 26086 - protein, 9 aa, Artificial Sequence
  Description of Artificial Sequence: Synthetic peptide
LNDYTHHQA

SEQ ID NO: 26087 - protein, 9 aa, Artificial Sequence
  Description of Artificial Sequence: Synthetic peptide
ACEQENIQH

SEQ ID NO: 26088 - protein, 9 aa, Artificial Sequence
  Description of Artificial Sequence: Synthetic peptide
LYDYMHMGS

SEQ ID NO: 26089 - protein, 9 aa, Artificial Sequence
  Description of Artificial Sequence: Synthetic peptide
EVPLHTVCQ

SEQ ID NO: 26090 - protein, 9 aa, Artificial Sequence
  Description of Artificial Sequence: Synthetic peptide
VHGCGKQYH

SEQ ID NO: 26091 - protein, 9 aa, Artificial Sequence
  Description of Artificial Sequence: Synthetic peptide
MHMDQPTMC

SEQ ID NO: 26092 - protein, 9 aa, Artificial Sequence
  Description of Artificial Sequence: Synthetic peptide
VKFSNEMKW

SEQ ID NO: 26093 - protein, 9 aa, Artificial Sequence
  Description of Artificial Sequence: Synthetic peptide
MELHKCNSP

SEQ ID NO: 26094 - protein, 9 aa, Artificial Sequence
  Description of Artificial Sequence: Synthetic peptide
ELHGTYNSC

SEQ ID NO: 26095 - protein, 9 aa, Artificial Sequence
  Description of Artificial Sequence: Synthetic peptide
SEAEMDWIG

SEQ ID NO: 26096 - protein, 9 aa, Artificial Sequence
  Description of Artificial Sequence: Synthetic peptide
AFRTMDEVH

SEQ ID NO: 26097 - protein, 9 aa, Artificial Sequence
  Description of Artificial Sequence: Synthetic peptide
IIDNVLCNG

SEQ ID NO: 26098 - protein, 9 aa, Artificial Sequence
  Description of Artificial Sequence: Synthetic peptide
MKMCNCPYQ

SEQ ID NO: 26099 - protein, 9 aa, Artificial Sequence
  Description of Artificial Sequence: Synthetic peptide
MILVQQLQN

SEQ ID NO: 26100 - protein, 9 aa, Artificial Sequence
  Description of Artificial Sequence: Synthetic peptide
PSTGNIQFM

SEQ ID NO: 26101 - protein, 9 aa, Artificial Sequence
  Description of Artificial Sequence: Synthetic peptide
QHPGFGLVI

SEQ ID NO: 26102 - protein, 9 aa, Artificial Sequence
  Description of Artificial Sequence: Synthetic peptide
IWWEHMGPA

SEQ ID NO: 26103 - protein, 9 aa, Artificial Sequence
  Description of Artificial Sequence: Synthetic peptide
QWRWHKSAC

SEQ ID NO: 26104 - protein, 9 aa, Artificial Sequence
  Description of Artificial Sequence: Synthetic peptide
DSESRLCED

SEQ ID NO: 26105 - protein, 9 aa, Artificial Sequence
  Description of Artificial Sequence: Synthetic peptide
ETSAEFEQV

SEQ ID NO: 26106 - protein, 9 aa, Artificial Sequence
  Description of Artificial Sequence: Synthetic peptide
FLGSMWPRD

SEQ ID NO: 26107 - protein, 9 aa, Artificial Sequence
  Description of Artificial Sequence: Synthetic peptide
CVTLEQSSF

SEQ ID NO: 26108 - protein, 9 aa, Artificial Sequence
  Description of Artificial Sequence: Synthetic peptide
HMTAMCLAG

SEQ ID NO: 26109 - protein, 9 aa, Artificial Sequence
  Description of Artificial Sequence: Synthetic peptide
NVELRHHGY

SEQ ID NO: 26110 - protein, 9 aa, Artificial Sequence
  Description of Artificial Sequence: Synthetic peptide
MALDQRSKP

SEQ ID NO: 26111 - protein, 9 aa, Artificial Sequence
  Description of Artificial Sequence: Synthetic peptide
DFIYDGEDM

SEQ ID NO: 26112 - protein, 9 aa, Artificial Sequence
  Description of Artificial Sequence: Synthetic peptide
FDRHDKSCC

SEQ ID NO: 26113 - protein, 9 aa, Artificial Sequence
  Description of Artificial Sequence: Synthetic peptide
TIGQHCADF

SEQ ID NO: 26114 - protein, 9 aa, Artificial Sequence
  Description of Artificial Sequence: Synthetic peptide
HVANGTDAC

SEQ ID NO: 26115 - protein, 9 aa, Artificial Sequence
  Description of Artificial Sequence: Synthetic peptide
DSHTRRYDT

SEQ ID NO: 26116 - protein, 9 aa, Artificial Sequence
  Description of Artificial Sequence: Synthetic peptide
MIPQPVEPF

SEQ ID NO: 26117 - protein, 9 aa, Artificial Sequence
  Description of Artificial Sequence: Synthetic peptide
TVAHHFVET

SEQ ID NO: 26118 - protein, 9 aa, Artificial Sequence
  Description of Artificial Sequence: Synthetic peptide
CQGYEHSQE

SEQ ID NO: 26119 - protein, 9 aa, Artificial Sequence
  Description of Artificial Sequence: Synthetic peptide
CAHAMKWGS

SEQ ID NO: 26120 - protein, 9 aa, Artificial Sequence
  Description of Artificial Sequence: Synthetic peptide
CGGQVEFGW

SEQ ID NO: 26121 - protein, 9 aa, Artificial Sequence
  Description of Artificial Sequence: Synthetic peptide
CSSCYHRVF

SEQ ID NO: 26122 - protein, 9 aa, Artificial Sequence
  Description of Artificial Sequence: Synthetic peptide
CCCEALMPQ

SEQ ID NO: 26123 - protein, 9 aa, Artificial Sequence
  Description of Artificial Sequence: Synthetic peptide
CENPLCQSS

SEQ ID NO: 26124 - protein, 9 aa, Artificial Sequence
  Description of Artificial Sequence: Synthetic peptide
CFGPEGYAG

SEQ ID NO: 26125 - protein, 9 aa, Artificial Sequence
  Description of Artificial Sequence: Synthetic peptide
CHPQHHHSH

SEQ ID NO: 26126 - protein, 9 aa, Artificial Sequence
  Description of Artificial Sequence: Synthetic peptide
CSSFYHRVF

SEQ ID NO: 26127 - protein, 9 aa, Artificial Sequence
  Description of Artificial Sequence: Synthetic peptide
CKEPRKMRE

SEQ ID NO: 26128 - protein, 9 aa, Artificial Sequence
  Description of Artificial Sequence: Synthetic peptide
CPVHQMDFT

SEQ ID NO: 26129 - protein, 9 aa, Artificial Sequence
  Description of Artificial Sequence: Synthetic peptide
CIVKSNGSK

SEQ ID NO: 26130 - protein, 9 aa, Artificial Sequence
  Description of Artificial Sequence: Synthetic peptide
CPGLQFDTP

SEQ ID NO: 26131 - protein, 9 aa, Artificial Sequence
  Description of Artificial Sequence: Synthetic peptide
CHHFNMPSQ

SEQ ID NO: 26132 - protein, 9 aa, Artificial Sequence
  Description of Artificial Sequence: Synthetic peptide
CCRQIWVQY

SEQ ID NO: 26133 - protein, 9 aa, Artificial Sequence
  Description of Artificial Sequence: Synthetic peptide
CIIARSTAA

SEQ ID NO: 26134 - protein, 9 aa, Artificial Sequence
  Description of Artificial Sequence: Synthetic peptide
CAEKQEYVQ

SEQ ID NO: 26135 - protein, 9 aa, Artificial Sequence
  Description of Artificial Sequence: Synthetic peptide
CAHMQYAGP

SEQ ID NO: 26136 - protein, 9 aa, Artificial Sequence
  Description of Artificial Sequence: Synthetic peptide
CANPLWAQT

SEQ ID NO: 26137 - protein, 9 aa, Artificial Sequence
  Description of Artificial Sequence: Synthetic peptide
CAVKTHTCT

SEQ ID NO: 26138 - protein, 9 aa, Artificial Sequence
  Description of Artificial Sequence: Synthetic peptide
CCNRNWNQQ

SEQ ID NO: 26139 - protein, 9 aa, Artificial Sequence
  Description of Artificial Sequence: Synthetic peptide
CDYMHKLNE

SEQ ID NO: 26140 - protein, 9 aa, Artificial Sequence
  Description of Artificial Sequence: Synthetic peptide
CEGRHTWGK

SEQ ID NO: 26141 - protein, 9 aa, Artificial Sequence
  Description of Artificial Sequence: Synthetic peptide
CFHRHSTVP

SEQ ID NO: 26142 - protein, 9 aa, Artificial Sequence
  Description of Artificial Sequence: Synthetic peptide
CFIAADNRN

SEQ ID NO: 26143 - protein, 9 aa, Artificial Sequence
  Description of Artificial Sequence: Synthetic peptide
CFKHQMMMH

SEQ ID NO: 26144 - protein, 9 aa, Artificial Sequence
  Description of Artificial Sequence: Synthetic peptide
CFSDTDNAM

SEQ ID NO: 26145 - protein, 9 aa, Artificial Sequence
  Description of Artificial Sequence: Synthetic peptide
CFTNHWEMG

SEQ ID NO: 26146 - protein, 9 aa, Artificial Sequence
  Description of Artificial Sequence: Synthetic peptide
CFVPMFNHN

SEQ ID NO: 26147 - protein, 9 aa, Artificial Sequence
  Description of Artificial Sequence: Synthetic peptide
CFWLDWWCW

SEQ ID NO: 26148 - protein, 9 aa, Artificial Sequence
  Description of Artificial Sequence: Synthetic peptide
CGYMHKLNE

SEQ ID NO: 26149 - protein, 9 aa, Artificial Sequence
  Description of Artificial Sequence: Synthetic peptide
CHSIFNVKC

SEQ ID NO: 26150 - protein, 9 aa, Artificial Sequence
  Description of Artificial Sequence: Synthetic peptide
CISAGMKND

SEQ ID NO: 26151 - protein, 9 aa, Artificial Sequence
  Description of Artificial Sequence: Synthetic peptide
CKDLRCGCA

SEQ ID NO: 26152 - protein, 9 aa, Artificial Sequence
  Description of Artificial Sequence: Synthetic peptide
CLGQMWAQW

SEQ ID NO: 26153 - protein, 9 aa, Artificial Sequence
  Description of Artificial Sequence: Synthetic peptide
CLHQWLMPT

SEQ ID NO: 26154 - protein, 9 aa, Artificial Sequence
  Description of Artificial Sequence: Synthetic peptide
CLIAPPHMD

SEQ ID NO: 26155 - protein, 9 aa, Artificial Sequence
  Description of Artificial Sequence: Synthetic peptide
CLTSTSHCI

SEQ ID NO: 26156 - protein, 9 aa, Artificial Sequence
  Description of Artificial Sequence: Synthetic peptide
CMCPGKEYP

SEQ ID NO: 26157 - protein, 9 aa, Artificial Sequence
  Description of Artificial Sequence: Synthetic peptide
CMLAWQNDF

SEQ ID NO: 26158 - protein, 9 aa, Artificial Sequence
  Description of Artificial Sequence: Synthetic peptide
CNPKCDAMM

SEQ ID NO: 26159 - protein, 9 aa, Artificial Sequence
  Description of Artificial Sequence: Synthetic peptide
CNYDSHKMK

SEQ ID NO: 26160 - protein, 9 aa, Artificial Sequence
  Description of Artificial Sequence: Synthetic peptide
CPLFLPALP

SEQ ID NO: 26161 - protein, 9 aa, Artificial Sequence
  Description of Artificial Sequence: Synthetic peptide
CQNMKRIDW

SEQ ID NO: 26162 - protein, 9 aa, Artificial Sequence
  Description of Artificial Sequence: Synthetic peptide
CQQPPRPEK

SEQ ID NO: 26163 - protein, 9 aa, Artificial Sequence
  Description of Artificial Sequence: Synthetic peptide
CRIQSIHVH

SEQ ID NO: 26164 - protein, 9 aa, Artificial Sequence
  Description of Artificial Sequence: Synthetic peptide
CSAGDEWGG

SEQ ID NO: 26165 - protein, 9 aa, Artificial Sequence
  Description of Artificial Sequence: Synthetic peptide
CSKHATMAH

SEQ ID NO: 26166 - protein, 9 aa, Artificial Sequence
  Description of Artificial Sequence: Synthetic peptide
CSKHVTMAH

SEQ ID NO: 26167 - protein, 9 aa, Artificial Sequence
  Description of Artificial Sequence: Synthetic peptide
CSMLFHHTQ

SEQ ID NO: 26168 - protein, 9 aa, Artificial Sequence
  Description of Artificial Sequence: Synthetic peptide
CTILNHQDA

SEQ ID NO: 26169 - protein, 9 aa, Artificial Sequence
  Description of Artificial Sequence: Synthetic peptide
CTRPDEIKE

SEQ ID NO: 26170 - protein, 9 aa, Artificial Sequence
  Description of Artificial Sequence: Synthetic peptide
CVAICQDGL

SEQ ID NO: 26171 - protein, 9 aa, Artificial Sequence
  Description of Artificial Sequence: Synthetic peptide
CVHTISNCH

SEQ ID NO: 26172 - protein, 9 aa, Artificial Sequence
  Description of Artificial Sequence: Synthetic peptide
CVTWTNRKL

SEQ ID NO: 26173 - protein, 9 aa, Artificial Sequence
  Description of Artificial Sequence: Synthetic peptide
CVWSEDAGY

SEQ ID NO: 26174 - protein, 9 aa, Artificial Sequence
  Description of Artificial Sequence: Synthetic peptide
CWCEKSHLG

SEQ ID NO: 26175 - protein, 9 aa, Artificial Sequence
  Description of Artificial Sequence: Synthetic peptide
CWLCQCPRQ

SEQ ID NO: 26176 - protein, 9 aa, Artificial Sequence
  Description of Artificial Sequence: Synthetic peptide
CYDHFQMKD

SEQ ID NO: 26177 - protein, 9 aa, Artificial Sequence
  Description of Artificial Sequence: Synthetic peptide
CYQFHTGFW

SEQ ID NO: 26178 - protein, 9 aa, Artificial Sequence
  Description of Artificial Sequence: Synthetic peptide
CHAAVANLY

SEQ ID NO: 26179 - protein, 9 aa, Artificial Sequence
  Description of Artificial Sequence: Synthetic peptide
CTMCHDCSP

SEQ ID NO: 26180 - protein, 9 aa, Artificial Sequence
  Description of Artificial Sequence: Synthetic peptide
CADPQERCD

SEQ ID NO: 26181 - protein, 9 aa, Artificial Sequence
  Description of Artificial Sequence: Synthetic peptide
CMEVTCFVV

SEQ ID NO: 26182 - protein, 9 aa, Artificial Sequence
  Description of Artificial Sequence: Synthetic peptide
CIGPFHCAN

SEQ ID NO: 26183 - protein, 9 aa, Artificial Sequence
  Description of Artificial Sequence: Synthetic peptide
CWGPIMHPF

SEQ ID NO: 26184 - protein, 9 aa, Artificial Sequence
  Description of Artificial Sequence: Synthetic peptide
CSESYRGPD

SEQ ID NO: 26185 - protein, 9 aa, Artificial Sequence
  Description of Artificial Sequence: Synthetic peptide
CQQHFMFAP

SEQ ID NO: 26186 - protein, 9 aa, Artificial Sequence
  Description of Artificial Sequence: Synthetic peptide
CGHLLRRAE

SEQ ID NO: 26187 - protein, 9 aa, Artificial Sequence
  Description of Artificial Sequence: Synthetic peptide
CRRDGYAAM

SEQ ID NO: 26188 - protein, 9 aa, Artificial Sequence
  Description of Artificial Sequence: Synthetic peptide
CPEHNQVGV

SEQ ID NO: 26189 - protein, 9 aa, Artificial Sequence
  Description of Artificial Sequence: Synthetic peptide
CIHRFVSSP

SEQ ID NO: 26190 - protein, 9 aa, Artificial Sequence
  Description of Artificial Sequence: Synthetic peptide
CDWMANVSV

SEQ ID NO: 26191 - protein, 9 aa, Artificial Sequence
  Description of Artificial Sequence: Synthetic peptide
CCRMDNKKS

SEQ ID NO: 26192 - protein, 9 aa, Artificial Sequence
  Description of Artificial Sequence: Synthetic peptide
CLNNSTCRG

SEQ ID NO: 26193 - protein, 9 aa, Artificial Sequence
  Description of Artificial Sequence: Synthetic peptide
CDHVTKHPT

SEQ ID NO: 26194 - protein, 9 aa, Artificial Sequence
  Description of Artificial Sequence: Synthetic peptide
CKYAFKMEK

SEQ ID NO: 26195 - protein, 9 aa, Artificial Sequence
  Description of Artificial Sequence: Synthetic peptide
CDAEAEFRR

SEQ ID NO: 26196 - protein, 9 aa, Artificial Sequence
  Description of Artificial Sequence: Synthetic peptide
CPFKLYSKG

SEQ ID NO: 26197 - protein, 9 aa, Artificial Sequence
  Description of Artificial Sequence: Synthetic peptide
CSIQINNCR

SEQ ID NO: 26198 - protein, 9 aa, Artificial Sequence
  Description of Artificial Sequence: Synthetic peptide
CMVSTQKLA

SEQ ID NO: 26199 - protein, 9 aa, Artificial Sequence
  Description of Artificial Sequence: Synthetic peptide
CFCTYKIEH

SEQ ID NO: 26200 - protein, 9 aa, Artificial Sequence
  Description of Artificial Sequence: Synthetic peptide
CVCWFWFFW

SEQ ID NO: 26201 - protein, 9 aa, Artificial Sequence
  Description of Artificial Sequence: Synthetic peptide
CHMLNDCMS

SEQ ID NO: 26202 - protein, 9 aa, Artificial Sequence
  Description of Artificial Sequence: Synthetic peptide
CMAHIWEGH

SEQ ID NO: 26203 - protein, 9 aa, Artificial Sequence
  Description of Artificial Sequence: Synthetic peptide
CGCQVKCHT

SEQ ID NO: 26204 - protein, 9 aa, Artificial Sequence
  Description of Artificial Sequence: Synthetic peptide
CSMPQQCME

SEQ ID NO: 26205 - protein, 9 aa, Artificial Sequence
  Description of Artificial Sequence: Synthetic peptide
CWECCTDSG

SEQ ID NO: 26206 - protein, 9 aa, Artificial Sequence
  Description of Artificial Sequence: Synthetic peptide
CIMLNGCFQ

SEQ ID NO: 26207 - protein, 9 aa, Artificial Sequence
  Description of Artificial Sequence: Synthetic peptide
CIDVLFKHL

SEQ ID NO: 26208 - protein, 9 aa, Artificial Sequence
  Description of Artificial Sequence: Synthetic peptide
CQMLCRPPV

SEQ ID NO: 26209 - protein, 9 aa, Artificial Sequence
  Description of Artificial Sequence: Synthetic peptide
CAGIHLNEA

SEQ ID NO: 26210 - protein, 9 aa, Artificial Sequence
  Description of Artificial Sequence: Synthetic peptide
CYMNFIVDG

SEQ ID NO: 26211 - protein, 9 aa, Artificial Sequence
  Description of Artificial Sequence: Synthetic peptide
CYIRNMVNL

SEQ ID NO: 26212 - protein, 9 aa, Artificial Sequence
  Description of Artificial Sequence: Synthetic peptide
CPKQANRSG

SEQ ID NO: 26213 - protein, 9 aa, Artificial Sequence
  Description of Artificial Sequence: Synthetic peptide
CVLSRSTMR

SEQ ID NO: 26214 - protein, 9 aa, Artificial Sequence
  Description of Artificial Sequence: Synthetic peptide
CEAGWCRSD

SEQ ID NO: 26215 - protein, 9 aa, Artificial Sequence
  Description of Artificial Sequence: Synthetic peptide
CIQPTWDSY

SEQ ID NO: 26216 - protein, 9 aa, Artificial Sequence
  Description of Artificial Sequence: Synthetic peptide
CYWPMTNCT

SEQ ID NO: 26217 - protein, 9 aa, Artificial Sequence
  Description of Artificial Sequence: Synthetic peptide
CNGYWMCMS

SEQ ID NO: 26218 - protein, 9 aa, Artificial Sequence
  Description of Artificial Sequence: Synthetic peptide
CSVWMQRDR

SEQ ID NO: 26219 - protein, 9 aa, Artificial Sequence
  Description of Artificial Sequence: Synthetic peptide
CWILHHRCS

SEQ ID NO: 26220 - protein, 9 aa, Artificial Sequence
  Description of Artificial Sequence: Synthetic peptide
CYNQFHTDN

SEQ ID NO: 26221 - protein, 9 aa, Artificial Sequence
  Description of Artificial Sequence: Synthetic peptide
YAVMSPPAG

SEQ ID NO: 26222 - protein, 9 aa, Artificial Sequence
  Description of Artificial Sequence: Synthetic peptide
YAVMSQPAG

SEQ ID NO: 26223 - protein, 9 aa, Artificial Sequence
  Description of Artificial Sequence: Synthetic peptide
YAVMSRPAG

SEQ ID NO: 26224 - protein, 9 aa, Artificial Sequence
  Description of Artificial Sequence: Synthetic peptide
YAVVSHPAG

SEQ ID NO: 26225 - protein, 9 aa, Artificial Sequence
  Description of Artificial Sequence: Synthetic peptide
RAVEMQPCT

SEQ ID NO: 26226 - protein, 9 aa, Artificial Sequence
  Description of Artificial Sequence: Synthetic peptide
IAEEGWACP

SEQ ID NO: 26227 - protein, 9 aa, Artificial Sequence
  Description of Artificial Sequence: Synthetic peptide
QAPLATAIE

SEQ ID NO: 26228 - protein, 9 aa, Artificial Sequence
  Description of Artificial Sequence: Synthetic peptide
FAPEFDNHC

SEQ ID NO: 26229 - protein, 9 aa, Artificial Sequence
  Description of Artificial Sequence: Synthetic peptide
SAHMPKSVT

SEQ ID NO: 26230 - protein, 9 aa, Artificial Sequence
  Description of Artificial Sequence: Synthetic peptide
EAYLYNIPM

SEQ ID NO: 26231 - protein, 9 aa, Artificial Sequence
  Description of Artificial Sequence: Synthetic peptide
NAEQCMIGA

SEQ ID NO: 26232 - protein, 9 aa, Artificial Sequence
  Description of Artificial Sequence: Synthetic peptide
RASMCDCFE

SEQ ID NO: 26233 - protein, 9 aa, Artificial Sequence
  Description of Artificial Sequence: Synthetic peptide
SACPLWCGS

SEQ ID NO: 26234 - protein, 9 aa, Artificial Sequence
  Description of Artificial Sequence: Synthetic peptide
DAMHKWIFA

SEQ ID NO: 26235 - protein, 9 aa, Artificial Sequence
  Description of Artificial Sequence: Synthetic peptide
HAPCEQWAW

SEQ ID NO: 26236 - protein, 9 aa, Artificial Sequence
  Description of Artificial Sequence: Synthetic peptide
MASIDKQHV

SEQ ID NO: 26237 - protein, 9 aa, Artificial Sequence
  Description of Artificial Sequence: Synthetic peptide
AAQWPMEYT

SEQ ID NO: 26238 - protein, 9 aa, Artificial Sequence
  Description of Artificial Sequence: Synthetic peptide
TAEWKLCGE

SEQ ID NO: 26239 - protein, 9 aa, Artificial Sequence
  Description of Artificial Sequence: Synthetic peptide
QAEGGPNMP

SEQ ID NO: 26240 - protein, 9 aa, Artificial Sequence
  Description of Artificial Sequence: Synthetic peptide
IATEHPDEW

SEQ ID NO: 26241 - protein, 9 aa, Artificial Sequence
  Description of Artificial Sequence: Synthetic peptide
NALDEDCQH

SEQ ID NO: 26242 - protein, 9 aa, Artificial Sequence
  Description of Artificial Sequence: Synthetic peptide
AAMLYNACM

SEQ ID NO: 26243 - protein, 9 aa, Artificial Sequence
  Description of Artificial Sequence: Synthetic peptide
VADWIGHTP

SEQ ID NO: 26244 - protein, 9 aa, Artificial Sequence
  Description of Artificial Sequence: Synthetic peptide
VAIQCNRSY

SEQ ID NO: 26245 - protein, 9 aa, Artificial Sequence
  Description of Artificial Sequence: Synthetic peptide
GATTLTKCL

SEQ ID NO: 26246 - protein, 9 aa, Artificial Sequence
  Description of Artificial Sequence: Synthetic peptide
YASTMHSIP

SEQ ID NO: 26247 - protein, 9 aa, Artificial Sequence
  Description of Artificial Sequence: Synthetic peptide
QALVGNAAE

SEQ ID NO: 26248 - protein, 9 aa, Artificial Sequence
  Description of Artificial Sequence: Synthetic peptide
SAICQNYDA

SEQ ID NO: 26249 - protein, 9 aa, Artificial Sequence
  Description of Artificial Sequence: Synthetic peptide
DAHNDALAR

SEQ ID NO: 26250 - protein, 9 aa, Artificial Sequence
  Description of Artificial Sequence: Synthetic peptide
AADECMLHT

SEQ ID NO: 26251 - protein, 9 aa, Artificial Sequence
  Description of Artificial Sequence: Synthetic peptide
AAEKLFAWE

SEQ ID NO: 26252 - protein, 9 aa, Artificial Sequence
  Description of Artificial Sequence: Synthetic peptide
AAFLGQLSV

SEQ ID NO: 26253 - protein, 9 aa, Artificial Sequence
  Description of Artificial Sequence: Synthetic peptide
AANSRENDW

SEQ ID NO: 26254 - protein, 9 aa, Artificial Sequence
  Description of Artificial Sequence: Synthetic peptide
AATNMSNVH

SEQ ID NO: 26255 - protein, 9 aa, Artificial Sequence
  Description of Artificial Sequence: Synthetic peptide
DAEANGCDA

SEQ ID NO: 26256 - protein, 9 aa, Artificial Sequence
  Description of Artificial Sequence: Synthetic peptide
DAGKLGQHD

SEQ ID NO: 26257 - protein, 9 aa, Artificial Sequence
  Description of Artificial Sequence: Synthetic peptide
DAGWMNSWV

SEQ ID NO: 26258 - protein, 9 aa, Artificial Sequence
  Description of Artificial Sequence: Synthetic peptide
DALPMHGQR

SEQ ID NO: 26259 - protein, 9 aa, Artificial Sequence
  Description of Artificial Sequence: Synthetic peptide
DAMCSIRKD

SEQ ID NO: 26260 - protein, 9 aa, Artificial Sequence
  Description of Artificial Sequence: Synthetic peptide
DARANCDAA

SEQ ID NO: 26261 - protein, 9 aa, Artificial Sequence
  Description of Artificial Sequence: Synthetic peptide
EAEIAYGFM

SEQ ID NO: 26262 - protein, 9 aa, Artificial Sequence
  Description of Artificial Sequence: Synthetic peptide
EAGCINVPS

SEQ ID NO: 26263 - protein, 9 aa, Artificial Sequence
  Description of Artificial Sequence: Synthetic peptide
EAQLYSTKA

SEQ ID NO: 26264 - protein, 9 aa, Artificial Sequence
  Description of Artificial Sequence: Synthetic peptide
EASTYFIWD

SEQ ID NO: 26265 - protein, 9 aa, Artificial Sequence
  Description of Artificial Sequence: Synthetic peptide
FADTCPRHA

SEQ ID NO: 26266 - protein, 9 aa, Artificial Sequence
  Description of Artificial Sequence: Synthetic peptide
FAELHGMQG

SEQ ID NO: 26267 - protein, 9 aa, Artificial Sequence
  Description of Artificial Sequence: Synthetic peptide
FAHDSCESG

SEQ ID NO: 26268 - protein, 9 aa, Artificial Sequence
  Description of Artificial Sequence: Synthetic peptide
FANWLKSFP

SEQ ID NO: 26269 - protein, 9 aa, Artificial Sequence
  Description of Artificial Sequence: Synthetic peptide
FAQIIVHEH

SEQ ID NO: 26270 - protein, 9 aa, Artificial Sequence
  Description of Artificial Sequence: Synthetic peptide
FATGCKQGT

SEQ ID NO: 26271 - protein, 9 aa, Artificial Sequence
  Description of Artificial Sequence: Synthetic peptide
GANKTCCEG

SEQ ID NO: 26272 - protein, 9 aa, Artificial Sequence
  Description of Artificial Sequence: Synthetic peptide
GASPKLGPV

SEQ ID NO: 26273 - protein, 9 aa, Artificial Sequence
  Description of Artificial Sequence: Synthetic peptide
HADEPYEWR

SEQ ID NO: 26274 - protein, 9 aa, Artificial Sequence
  Description of Artificial Sequence: Synthetic peptide
HAEYQQQMG

SEQ ID NO: 26275 - protein, 9 aa, Artificial Sequence
  Description of Artificial Sequence: Synthetic peptide
HAGYIASPN

SEQ ID NO: 26276 - protein, 9 aa, Artificial Sequence
  Description of Artificial Sequence: Synthetic peptide
HAIPFNDSQ

SEQ ID NO: 26277 - protein, 9 aa, Artificial Sequence
  Description of Artificial Sequence: Synthetic peptide
IAFHRGADH

SEQ ID NO: 26278 - protein, 9 aa, Artificial Sequence
  Description of Artificial Sequence: Synthetic peptide
IAGPQQQMT

SEQ ID NO: 26279 - protein, 9 aa, Artificial Sequence
  Description of Artificial Sequence: Synthetic peptide
IAHHRGCHT

SEQ ID NO: 26280 - protein, 9 aa, Artificial Sequence
  Description of Artificial Sequence: Synthetic peptide
IAHVMDCLE

SEQ ID NO: 26281 - protein, 9 aa, Artificial Sequence
  Description of Artificial Sequence: Synthetic peptide
IALVMTSWE

SEQ ID NO: 26282 - protein, 9 aa, Artificial Sequence
  Description of Artificial Sequence: Synthetic peptide
IAMMENRQQ

SEQ ID NO: 26283 - protein, 9 aa, Artificial Sequence
  Description of Artificial Sequence: Synthetic peptide
KADMCPYII

SEQ ID NO: 26284 - protein, 9 aa, Artificial Sequence
  Description of Artificial Sequence: Synthetic peptide
KADMKNPCD

SEQ ID NO: 26285 - protein, 9 aa, Artificial Sequence
  Description of Artificial Sequence: Synthetic peptide
KAELGKLIE

SEQ ID NO: 26286 - protein, 9 aa, Artificial Sequence
  Description of Artificial Sequence: Synthetic peptide
LAMPKPDKQ

SEQ ID NO: 26287 - protein, 9 aa, Artificial Sequence
  Description of Artificial Sequence: Synthetic peptide
LANEQIDFT

SEQ ID NO: 26288 - protein, 9 aa, Artificial Sequence
  Description of Artificial Sequence: Synthetic peptide
LATMHSGQC

SEQ ID NO: 26289 - protein, 9 aa, Artificial Sequence
  Description of Artificial Sequence: Synthetic peptide
MAAWCHKSQ

SEQ ID NO: 26290 - protein, 9 aa, Artificial Sequence
  Description of Artificial Sequence: Synthetic peptide
NADPCMWMQ

SEQ ID NO: 26291 - protein, 9 aa, Artificial Sequence
  Description of Artificial Sequence: Synthetic peptide
NAFQKEACI

SEQ ID NO: 26292 - protein, 9 aa, Artificial Sequence
  Description of Artificial Sequence: Synthetic peptide
NAHMYTKHS

SEQ ID NO: 26293 - protein, 9 aa, Artificial Sequence
  Description of Artificial Sequence: Synthetic peptide
NAMWHTKVG

SEQ ID NO: 26294 - protein, 9 aa, Artificial Sequence
  Description of Artificial Sequence: Synthetic peptide
NANQKWYWS

SEQ ID NO: 26295 - protein, 9 aa, Artificial Sequence
  Description of Artificial Sequence: Synthetic peptide
NASFSNHQA

SEQ ID NO: 26296 - protein, 9 aa, Artificial Sequence
  Description of Artificial Sequence: Synthetic peptide
PAYYGPGSE

SEQ ID NO: 26297 - protein, 9 aa, Artificial Sequence
  Description of Artificial Sequence: Synthetic peptide
QAAPPCAMS

SEQ ID NO: 26298 - protein, 9 aa, Artificial Sequence
  Description of Artificial Sequence: Synthetic peptide
QAIRGTHDQ

SEQ ID NO: 26299 - protein, 9 aa, Artificial Sequence
  Description of Artificial Sequence: Synthetic peptide
QAMRFSENG

SEQ ID NO: 26300 - protein, 9 aa, Artificial Sequence
  Description of Artificial Sequence: Synthetic peptide
QATAEYACD

SEQ ID NO: 26301 - protein, 9 aa, Artificial Sequence
  Description of Artificial Sequence: Synthetic peptide
QAWMPVCHT

SEQ ID NO: 26302 - protein, 9 aa, Artificial Sequence
  Description of Artificial Sequence: Synthetic peptide
RAIMSDWEC

SEQ ID NO: 26303 - protein, 9 aa, Artificial Sequence
  Description of Artificial Sequence: Synthetic peptide
RALECNWFL

SEQ ID NO: 26304 - protein, 9 aa, Artificial Sequence
  Description of Artificial Sequence: Synthetic peptide
RALTFDCHK

SEQ ID NO: 26305 - protein, 9 aa, Artificial Sequence
  Description of Artificial Sequence: Synthetic peptide
SAEYSNDES

SEQ ID NO: 26306 - protein, 9 aa, Artificial Sequence
  Description of Artificial Sequence: Synthetic peptide
SAHTFCAPR

SEQ ID NO: 26307 - protein, 9 aa, Artificial Sequence
  Description of Artificial Sequence: Synthetic peptide
SAHVVLGEM

SEQ ID NO: 26308 - protein, 9 aa, Artificial Sequence
  Description of Artificial Sequence: Synthetic peptide
SALENVPKY

SEQ ID NO: 26309 - protein, 9 aa, Artificial Sequence
  Description of Artificial Sequence: Synthetic peptide
SAMTSSHQK

SEQ ID NO: 26310 - protein, 9 aa, Artificial Sequence
  Description of Artificial Sequence: Synthetic peptide
SAMYTENIS

SEQ ID NO: 26311 - protein, 9 aa, Artificial Sequence
  Description of Artificial Sequence: Synthetic peptide
SASTKVASE

SEQ ID NO: 26312 - protein, 9 aa, Artificial Sequence
  Description of Artificial Sequence: Synthetic peptide
TADLNHGEQ

SEQ ID NO: 26313 - protein, 9 aa, Artificial Sequence
  Description of Artificial Sequence: Synthetic peptide
TADVNLALD

SEQ ID NO: 26314 - protein, 9 aa, Artificial Sequence
  Description of Artificial Sequence: Synthetic peptide
TADVTAQWL

SEQ ID NO: 26315 - protein, 9 aa, Artificial Sequence
  Description of Artificial Sequence: Synthetic peptide
TAGHFKWEQ

SEQ ID NO: 26316 - protein, 9 aa, Artificial Sequence
  Description of Artificial Sequence: Synthetic peptide
TAIRADWQS

SEQ ID NO: 26317 - protein, 9 aa, Artificial Sequence
  Description of Artificial Sequence: Synthetic peptide
TANRMTNQP

SEQ ID NO: 26318 - protein, 9 aa, Artificial Sequence
  Description of Artificial Sequence: Synthetic peptide
TASEAHMEK

SEQ ID NO: 26319 - protein, 9 aa, Artificial Sequence
  Description of Artificial Sequence: Synthetic peptide
TATLWARGY

SEQ ID NO: 26320 - protein, 9 aa, Artificial Sequence
  Description of Artificial Sequence: Synthetic peptide
TATQRGMFQ

SEQ ID NO: 26321 - protein, 9 aa, Artificial Sequence
  Description of Artificial Sequence: Synthetic peptide
TAVHNTHVQ

SEQ ID NO: 26322 - protein, 9 aa, Artificial Sequence
  Description of Artificial Sequence: Synthetic peptide
VAFPAQLGA

SEQ ID NO: 26323 - protein, 9 aa, Artificial Sequence
  Description of Artificial Sequence: Synthetic peptide
VAISTSPTT

SEQ ID NO: 26324 - protein, 9 aa, Artificial Sequence
  Description of Artificial Sequence: Synthetic peptide
VASFNQICA

SEQ ID NO: 26325 - protein, 9 aa, Artificial Sequence
  Description of Artificial Sequence: Synthetic peptide
VATDRMWMC

SEQ ID NO: 26326 - protein, 9 aa, Artificial Sequence
  Description of Artificial Sequence: Synthetic peptide
VAWMMLAKD

SEQ ID NO: 26327 - protein, 9 aa, Artificial Sequence
  Description of Artificial Sequence: Synthetic peptide
YAEVFRFKG

SEQ ID NO: 26328 - protein, 9 aa, Artificial Sequence
  Description of Artificial Sequence: Synthetic peptide
YAIDSSRME

SEQ ID NO: 26329 - protein, 9 aa, Artificial Sequence
  Description of Artificial Sequence: Synthetic peptide
YANWLYDCT

SEQ ID NO: 26330 - protein, 9 aa, Artificial Sequence
  Description of Artificial Sequence: Synthetic peptide
NAELQQADI

SEQ ID NO: 26331 - protein, 9 aa, Artificial Sequence
  Description of Artificial Sequence: Synthetic peptide
TAAGYIVDA

SEQ ID NO: 26332 - protein, 9 aa, Artificial Sequence
  Description of Artificial Sequence: Synthetic peptide
SAFQSSDVP

SEQ ID NO: 26333 - protein, 9 aa, Artificial Sequence
  Description of Artificial Sequence: Synthetic peptide
EAYITYNKA

SEQ ID NO: 26334 - protein, 9 aa, Artificial Sequence
  Description of Artificial Sequence: Synthetic peptide
TAEVRWPCP

SEQ ID NO: 26335 - protein, 9 aa, Artificial Sequence
  Description of Artificial Sequence: Synthetic peptide
YAQRTCWPE

SEQ ID NO: 26336 - protein, 9 aa, Artificial Sequence
  Description of Artificial Sequence: Synthetic peptide
YAMPLYFCE

SEQ ID NO: 26337 - protein, 9 aa, Artificial Sequence
  Description of Artificial Sequence: Synthetic peptide
KAGYQEGSC

SEQ ID NO: 26338 - protein, 9 aa, Artificial Sequence
  Description of Artificial Sequence: Synthetic peptide
AAMWWQWDR

SEQ ID NO: 26339 - protein, 9 aa, Artificial Sequence
  Description of Artificial Sequence: Synthetic peptide
GAYSLHDWR

SEQ ID NO: 26340 - protein, 9 aa, Artificial Sequence
  Description of Artificial Sequence: Synthetic peptide
HAETDHVGL

SEQ ID NO: 26341 - protein, 9 aa, Artificial Sequence
  Description of Artificial Sequence: Synthetic peptide
FAQQDKQDR

SEQ ID NO: 26342 - protein, 9 aa, Artificial Sequence
  Description of Artificial Sequence: Synthetic peptide
YAYHPQCKP

SEQ ID NO: 26343 - protein, 9 aa, Artificial Sequence
  Description of Artificial Sequence: Synthetic peptide
QATGMHRWQ

SEQ ID NO: 26344 - protein, 9 aa, Artificial Sequence
  Description of Artificial Sequence: Synthetic peptide
IADGFAAVA

SEQ ID NO: 26345 - protein, 9 aa, Artificial Sequence
  Description of Artificial Sequence: Synthetic peptide
QAGNSMWAK

SEQ ID NO: 26346 - protein, 9 aa, Artificial Sequence
  Description of Artificial Sequence: Synthetic peptide
MAMWIADTH

SEQ ID NO: 26347 - protein, 9 aa, Artificial Sequence
  Description of Artificial Sequence: Synthetic peptide
MATCYMYAD

SEQ ID NO: 26348 - protein, 9 aa, Artificial Sequence
  Description of Artificial Sequence: Synthetic peptide
IAKIGNCVW

SEQ ID NO: 26349 - protein, 9 aa, Artificial Sequence
  Description of Artificial Sequence: Synthetic peptide
NANYWFYYD

SEQ ID NO: 26350 - protein, 9 aa, Artificial Sequence
  Description of Artificial Sequence: Synthetic peptide
EASWYYPAI

SEQ ID NO: 26351 - protein, 9 aa, Artificial Sequence
  Description of Artificial Sequence: Synthetic peptide
KACMSHQGR

SEQ ID NO: 26352 - protein, 9 aa, Artificial Sequence
  Description of Artificial Sequence: Synthetic peptide
QAEENSHWC

SEQ ID NO: 26353 - protein, 9 aa, Artificial Sequence
  Description of Artificial Sequence: Synthetic peptide
SAAWQFGGS

SEQ ID NO: 26354 - protein, 9 aa, Artificial Sequence
  Description of Artificial Sequence: Synthetic peptide
RACGMRGDY

SEQ ID NO: 26355 - protein, 9 aa, Artificial Sequence
  Description of Artificial Sequence: Synthetic peptide
DADAWWMMH

SEQ ID NO: 26356 - protein, 9 aa, Artificial Sequence
  Description of Artificial Sequence: Synthetic peptide
NACDWKNDY

SEQ ID NO: 26357 - protein, 9 aa, Artificial Sequence
  Description of Artificial Sequence: Synthetic peptide
SAIGKTKKM

SEQ ID NO: 26358 - protein, 9 aa, Artificial Sequence
  Description of Artificial Sequence: Synthetic peptide
QAVRRWWFF

SEQ ID NO: 26359 - protein, 9 aa, Artificial Sequence
  Description of Artificial Sequence: Synthetic peptide
AAIRYDPGF

SEQ ID NO: 26360 - protein, 9 aa, Artificial Sequence
  Description of Artificial Sequence: Synthetic peptide
NAGWQGQVD

SEQ ID NO: 26361 - protein, 9 aa, Artificial Sequence
  Description of Artificial Sequence: Synthetic peptide
NALPAQQHY

SEQ ID NO: 26362 - protein, 9 aa, Artificial Sequence
  Description of Artificial Sequence: Synthetic peptide
IAYHYDQQN

SEQ ID NO: 26363 - protein, 9 aa, Artificial Sequence
  Description of Artificial Sequence: Synthetic peptide
DATTSTECH

SEQ ID NO: 26364 - protein, 9 aa, Artificial Sequence
  Description of Artificial Sequence: Synthetic peptide
HAVNFDCKK

SEQ ID NO: 26365 - protein, 9 aa, Artificial Sequence
  Description of Artificial Sequence: Synthetic peptide
EASIQASWN

SEQ ID NO: 26366 - protein, 9 aa, Artificial Sequence
  Description of Artificial Sequence: Synthetic peptide
QAIPRENPM

SEQ ID NO: 26367 - protein, 9 aa, Artificial Sequence
  Description of Artificial Sequence: Synthetic peptide
DAHAFHCQP

SEQ ID NO: 26368 - protein, 9 aa, Artificial Sequence
  Description of Artificial Sequence: Synthetic peptide
LATTTSYHC

SEQ ID NO: 26369 - protein, 9 aa, Artificial Sequence
  Description of Artificial Sequence: Synthetic peptide
DASQIPITF

SEQ ID NO: 26370 - protein, 9 aa, Artificial Sequence
  Description of Artificial Sequence: Synthetic peptide
VAADSRMMI

SEQ ID NO: 26371 - protein, 9 aa, Artificial Sequence
  Description of Artificial Sequence: Synthetic peptide
PACKEWCFC

SEQ ID NO: 26372 - protein, 9 aa, Artificial Sequence
  Description of Artificial Sequence: Synthetic peptide
IAHWKCHYP

SEQ ID NO: 26373 - protein, 9 aa, Artificial Sequence
  Description of Artificial Sequence: Synthetic peptide
AAMHNLFET

SEQ ID NO: 26374 - protein, 9 aa, Artificial Sequence
  Description of Artificial Sequence: Synthetic peptide
FAQQIINAS

SEQ ID NO: 26375 - protein, 9 aa, Artificial Sequence
  Description of Artificial Sequence: Synthetic peptide
GAKYIQNTD

SEQ ID NO: 26376 - protein, 9 aa, Artificial Sequence
  Description of Artificial Sequence: Synthetic peptide
EAGPRKRDV

SEQ ID NO: 26377 - protein, 9 aa, Artificial Sequence
  Description of Artificial Sequence: Synthetic peptide
PAHINDQYM

SEQ ID NO: 26378 - protein, 9 aa, Artificial Sequence
  Description of Artificial Sequence: Synthetic peptide
MAHAPPNSD

SEQ ID NO: 26379 - protein, 9 aa, Artificial Sequence
  Description of Artificial Sequence: Synthetic peptide
MAMWAVWNK

SEQ ID NO: 26380 - protein, 9 aa, Artificial Sequence
  Description of Artificial Sequence: Synthetic peptide
MAEQMERDF

SEQ ID NO: 26381 - protein, 9 aa, Artificial Sequence
  Description of Artificial Sequence: Synthetic peptide
SATNCDLYP

SEQ ID NO: 26382 - protein, 9 aa, Artificial Sequence
  Description of Artificial Sequence: Synthetic peptide
HAKQANGMV

SEQ ID NO: 26383 - protein, 9 aa, Artificial Sequence
  Description of Artificial Sequence: Synthetic peptide
AADIFAIND

SEQ ID NO: 26384 - protein, 9 aa, Artificial Sequence
  Description of Artificial Sequence: Synthetic peptide
TATCGIEVE

SEQ ID NO: 26385 - protein, 9 aa, Artificial Sequence
  Description of Artificial Sequence: Synthetic peptide
AAIGNQTLA

SEQ ID NO: 26386 - protein, 9 aa, Artificial Sequence
  Description of Artificial Sequence: Synthetic peptide
AAQYMGIMK

SEQ ID NO: 26387 - protein, 9 aa, Artificial Sequence
  Description of Artificial Sequence: Synthetic peptide
KAPWAPMDS

SEQ ID NO: 26388 - protein, 9 aa, Artificial Sequence
  Description of Artificial Sequence: Synthetic peptide
NAENESSIG

SEQ ID NO: 26389 - protein, 9 aa, Artificial Sequence
  Description of Artificial Sequence: Synthetic peptide
QAKMILDGT

SEQ ID NO: 26390 - protein, 9 aa, Artificial Sequence
  Description of Artificial Sequence: Synthetic peptide
DMRKTWEAC

SEQ ID NO: 26391 - protein, 9 aa, Artificial Sequence
  Description of Artificial Sequence: Synthetic peptide
TGRIKDAGP

SEQ ID NO: 26392 - protein, 9 aa, Artificial Sequence
  Description of Artificial Sequence: Synthetic peptide
PWRCMQGYY

SEQ ID NO: 26393 - protein, 9 aa, Artificial Sequence
  Description of Artificial Sequence: Synthetic peptide
MVRQCDYKM

SEQ ID NO: 26394 - protein, 9 aa, Artificial Sequence
  Description of Artificial Sequence: Synthetic peptide
AIRTTMCDW

SEQ ID NO: 26395 - protein, 9 aa, Artificial Sequence
  Description of Artificial Sequence: Synthetic peptide
KSRRGKLTW

SEQ ID NO: 26396 - protein, 9 aa, Artificial Sequence
  Description of Artificial Sequence: Synthetic peptide
TDRQIDQYH

SEQ ID NO: 26397 - protein, 9 aa, Artificial Sequence
  Description of Artificial Sequence: Synthetic peptide
TSRSEAADL

SEQ ID NO: 26398 - protein, 9 aa, Artificial Sequence
  Description of Artificial Sequence: Synthetic peptide
IMRHCYSNG

SEQ ID NO: 26399 - protein, 9 aa, Artificial Sequence
  Description of Artificial Sequence: Synthetic peptide
KRRDGTRSY

SEQ ID NO: 26400 - protein, 9 aa, Artificial Sequence
  Description of Artificial Sequence: Synthetic peptide
YIRVGGNNE

SEQ ID NO: 26401 - protein, 9 aa, Artificial Sequence
  Description of Artificial Sequence: Synthetic peptide
QERSMNAWW

SEQ ID NO: 26402 - protein, 9 aa, Artificial Sequence
  Description of Artificial Sequence: Synthetic peptide
EKRESFDCG

SEQ ID NO: 26403 - protein, 9 aa, Artificial Sequence
  Description of Artificial Sequence: Synthetic peptide
DYREKYKCQ

SEQ ID NO: 26404 - protein, 9 aa, Artificial Sequence
  Description of Artificial Sequence: Synthetic peptide
DHRFKYYDH

SEQ ID NO: 26405 - protein, 9 aa, Artificial Sequence
  Description of Artificial Sequence: Synthetic peptide
DIRTTGCQT

SEQ ID NO: 26406 - protein, 9 aa, Artificial Sequence
  Description of Artificial Sequence: Synthetic peptide
DSRTETFFG

SEQ ID NO: 26407 - protein, 9 aa, Artificial Sequence
  Description of Artificial Sequence: Synthetic peptide
EDRITECGA

SEQ ID NO: 26408 - protein, 9 aa, Artificial Sequence
  Description of Artificial Sequence: Synthetic peptide
ESRNWDDTD

SEQ ID NO: 26409 - protein, 9 aa, Artificial Sequence
  Description of Artificial Sequence: Synthetic peptide
ESRTMNMYE

SEQ ID NO: 26410 - protein, 9 aa, Artificial Sequence
  Description of Artificial Sequence: Synthetic peptide
EVRSTRKNH

SEQ ID NO: 26411 - protein, 9 aa, Artificial Sequence
  Description of Artificial Sequence: Synthetic peptide
FPRQASSQQ

SEQ ID NO: 26412 - protein, 9 aa, Artificial Sequence
  Description of Artificial Sequence: Synthetic peptide
FWRQSGKLQ

SEQ ID NO: 26413 - protein, 9 aa, Artificial Sequence
  Description of Artificial Sequence: Synthetic peptide
HCRWVKYHK

SEQ ID NO: 26414 - protein, 9 aa, Artificial Sequence
  Description of Artificial Sequence: Synthetic peptide
HTRWPHIWH

SEQ ID NO: 26415 - protein, 9 aa, Artificial Sequence
  Description of Artificial Sequence: Synthetic peptide
IERVEYAVN

SEQ ID NO: 26416 - protein, 9 aa, Artificial Sequence
  Description of Artificial Sequence: Synthetic peptide
INRLLMTCD

SEQ ID NO: 26417 - protein, 9 aa, Artificial Sequence
  Description of Artificial Sequence: Synthetic peptide
INRVEFTTS

SEQ ID NO: 26418 - protein, 9 aa, Artificial Sequence
  Description of Artificial Sequence: Synthetic peptide
ITRMNSETV

SEQ ID NO: 26419 - protein, 9 aa, Artificial Sequence
  Description of Artificial Sequence: Synthetic peptide
KIRVYCTPE

SEQ ID NO: 26420 - protein, 9 aa, Artificial Sequence
  Description of Artificial Sequence: Synthetic peptide
LPRWADVQQ

SEQ ID NO: 26421 - protein, 9 aa, Artificial Sequence
  Description of Artificial Sequence: Synthetic peptide
MERWWLVEG

SEQ ID NO: 26422 - protein, 9 aa, Artificial Sequence
  Description of Artificial Sequence: Synthetic peptide
NCRPMEDMR

SEQ ID NO: 26423 - protein, 9 aa, Artificial Sequence
  Description of Artificial Sequence: Synthetic peptide
QERITGMVM

SEQ ID NO: 26424 - protein, 9 aa, Artificial Sequence
  Description of Artificial Sequence: Synthetic peptide
QSRTQGNDH

SEQ ID NO: 26425 - protein, 9 aa, Artificial Sequence
  Description of Artificial Sequence: Synthetic peptide
SDRTAMCAY

SEQ ID NO: 26426 - protein, 9 aa, Artificial Sequence
  Description of Artificial Sequence: Synthetic peptide
TCRWFAHYS

SEQ ID NO: 26427 - protein, 9 aa, Artificial Sequence
  Description of Artificial Sequence: Synthetic peptide
TGREVDHTS

SEQ ID NO: 26428 - protein, 9 aa, Artificial Sequence
  Description of Artificial Sequence: Synthetic peptide
VTRCIPTQW

SEQ ID NO: 26429 - protein, 9 aa, Artificial Sequence
  Description of Artificial Sequence: Synthetic peptide
WCRPQQPDF

SEQ ID NO: 26430 - protein, 9 aa, Artificial Sequence
  Description of Artificial Sequence: Synthetic peptide
YVRVIDDKW

SEQ ID NO: 26431 - protein, 9 aa, Artificial Sequence
  Description of Artificial Sequence: Synthetic peptide
GKRVEDTSC

SEQ ID NO: 26432 - protein, 9 aa, Artificial Sequence
  Description of Artificial Sequence: Synthetic peptide
WCRCKRFIE

SEQ ID NO: 26433 - protein, 9 aa, Artificial Sequence
  Description of Artificial Sequence: Synthetic peptide
EIRQFVKGA

SEQ ID NO: 26434 - protein, 9 aa, Artificial Sequence
  Description of Artificial Sequence: Synthetic peptide
DVRSHDEMT

SEQ ID NO: 26435 - protein, 9 aa, Artificial Sequence
  Description of Artificial Sequence: Synthetic peptide
WKRTAGVHF

SEQ ID NO: 26436 - protein, 9 aa, Artificial Sequence
  Description of Artificial Sequence: Synthetic peptide
GHRPKLCDQ

SEQ ID NO: 26437 - protein, 9 aa, Artificial Sequence
  Description of Artificial Sequence: Synthetic peptide
GPRHIEEDG

SEQ ID NO: 26438 - protein, 9 aa, Artificial Sequence
  Description of Artificial Sequence: Synthetic peptide
ENRSPNNPA

SEQ ID NO: 26439 - protein, 9 aa, Artificial Sequence
  Description of Artificial Sequence: Synthetic peptide
ASRSCMTQE

SEQ ID NO: 26440 - protein, 9 aa, Artificial Sequence
  Description of Artificial Sequence: Synthetic peptide
ECRMAVQSC

SEQ ID NO: 26441 - protein, 9 aa, Artificial Sequence
  Description of Artificial Sequence: Synthetic peptide
NNRRQFGYV

SEQ ID NO: 26442 - protein, 9 aa, Artificial Sequence
  Description of Artificial Sequence: Synthetic peptide
TCRYEELAD

SEQ ID NO: 26443 - protein, 9 aa, Artificial Sequence
  Description of Artificial Sequence: Synthetic peptide
APRDMDACV

SEQ ID NO: 26444 - protein, 9 aa, Artificial Sequence
  Description of Artificial Sequence: Synthetic peptide
PPRTVARFK

SEQ ID NO: 26445 - protein, 9 aa, Artificial Sequence
  Description of Artificial Sequence: Synthetic peptide
KERMQVSKA

SEQ ID NO: 26446 - protein, 9 aa, Artificial Sequence
  Description of Artificial Sequence: Synthetic peptide
TNRCHDDRG

SEQ ID NO: 26447 - protein, 9 aa, Artificial Sequence
  Description of Artificial Sequence: Synthetic peptide
EFRCRLIGS

SEQ ID NO: 26448 - protein, 9 aa, Artificial Sequence
  Description of Artificial Sequence: Synthetic peptide
GTRIYGKVS

SEQ ID NO: 26449 - protein, 9 aa, Artificial Sequence
  Description of Artificial Sequence: Synthetic peptide
KIRDCDGNV

SEQ ID NO: 26450 - protein, 9 aa, Artificial Sequence
  Description of Artificial Sequence: Synthetic peptide
TLRAEMSFH

SEQ ID NO: 26451 - protein, 9 aa, Artificial Sequence
  Description of Artificial Sequence: Synthetic peptide
VDRLFRMEY

SEQ ID NO: 26452 - protein, 9 aa, Artificial Sequence
  Description of Artificial Sequence: Synthetic peptide
KQRDWENFA

SEQ ID NO: 26453 - protein, 9 aa, Artificial Sequence
  Description of Artificial Sequence: Synthetic peptide
SCRMVYGRA

SEQ ID NO: 26454 - protein, 9 aa, Artificial Sequence
  Description of Artificial Sequence: Synthetic peptide
FFRICGSYI

SEQ ID NO: 26455 - protein, 9 aa, Artificial Sequence
  Description of Artificial Sequence: Synthetic peptide
EKRLFDRTY

SEQ ID NO: 26456 - protein, 9 aa, Artificial Sequence
  Description of Artificial Sequence: Synthetic peptide
ESRQVQDCY

SEQ ID NO: 26457 - protein, 9 aa, Artificial Sequence
  Description of Artificial Sequence: Synthetic peptide
PWRWHKSAC

SEQ ID NO: 26458 - protein, 9 aa, Artificial Sequence
  Description of Artificial Sequence: Synthetic peptide
MKRAPTLDY

SEQ ID NO: 26459 - protein, 9 aa, Artificial Sequence
  Description of Artificial Sequence: Synthetic peptide
AKRECTHIP

SEQ ID NO: 26460 - protein, 9 aa, Artificial Sequence
  Description of Artificial Sequence: Synthetic peptide
SYRALFNGW

SEQ ID NO: 26461 - protein, 9 aa, Artificial Sequence
  Description of Artificial Sequence: Synthetic peptide
DLRWLPYDL

SEQ ID NO: 26462 - protein, 9 aa, Artificial Sequence
  Description of Artificial Sequence: Synthetic peptide
IIRQSEQYH

SEQ ID NO: 26463 - protein, 9 aa, Artificial Sequence
  Description of Artificial Sequence: Synthetic peptide
IHRVVCRDH

SEQ ID NO: 26464 - protein, 9 aa, Artificial Sequence
  Description of Artificial Sequence: Synthetic peptide
EVRIQCKID

SEQ ID NO: 26465 - protein, 9 aa, Artificial Sequence
  Description of Artificial Sequence: Synthetic peptide
WERCLELNQ

SEQ ID NO: 26466 - protein, 9 aa, Artificial Sequence
  Description of Artificial Sequence: Synthetic peptide
EQRHISRAP

SEQ ID NO: 26467 - protein, 9 aa, Artificial Sequence
  Description of Artificial Sequence: Synthetic peptide
DSRTQGGLC

SEQ ID NO: 26468 - protein, 9 aa, Artificial Sequence
  Description of Artificial Sequence: Synthetic peptide
TQREVETSY

SEQ ID NO: 26469 - protein, 9 aa, Artificial Sequence
  Description of Artificial Sequence: Synthetic peptide
KQRIAYEWQ

SEQ ID NO: 26470 - protein, 9 aa, Artificial Sequence
  Description of Artificial Sequence: Synthetic peptide
NTRIVCDLS

SEQ ID NO: 26471 - protein, 9 aa, Artificial Sequence
  Description of Artificial Sequence: Synthetic peptide
KTYTHECVA

SEQ ID NO: 26472 - protein, 9 aa, Artificial Sequence
  Description of Artificial Sequence: Synthetic peptide
AVATTVMMC

SEQ ID NO: 26473 - protein, 9 aa, Artificial Sequence
  Description of Artificial Sequence: Synthetic peptide
EKMTHTCLQ

SEQ ID NO: 26474 - protein, 9 aa, Artificial Sequence
  Description of Artificial Sequence: Synthetic peptide
MQMTQEWMA

SEQ ID NO: 26475 - protein, 9 aa, Artificial Sequence
  Description of Artificial Sequence: Synthetic peptide
YTKTYVDCF

SEQ ID NO: 26476 - protein, 9 aa, Artificial Sequence
  Description of Artificial Sequence: Synthetic peptide
KSGTCGYGQ

SEQ ID NO: 26477 - protein, 9 aa, Artificial Sequence
  Description of Artificial Sequence: Synthetic peptide
SKNTVGIGH

SEQ ID NO: 26478 - protein, 9 aa, Artificial Sequence
  Description of Artificial Sequence: Synthetic peptide
TLTTDKTYS

SEQ ID NO: 26479 - protein, 9 aa, Artificial Sequence
  Description of Artificial Sequence: Synthetic peptide
ACGTGVMAL

SEQ ID NO: 26480 - protein, 9 aa, Artificial Sequence
  Description of Artificial Sequence: Synthetic peptide
YYDTISPDG

SEQ ID NO: 26481 - protein, 9 aa, Artificial Sequence
  Description of Artificial Sequence: Synthetic peptide
QMLTTAHNL

SEQ ID NO: 26482 - protein, 9 aa, Artificial Sequence
  Description of Artificial Sequence: Synthetic peptide
IKETWRVYF

SEQ ID NO: 26483 - protein, 9 aa, Artificial Sequence
  Description of Artificial Sequence: Synthetic peptide
QLDTYMEGR

SEQ ID NO: 26484 - protein, 9 aa, Artificial Sequence
  Description of Artificial Sequence: Synthetic peptide
ACDTPFQYH

SEQ ID NO: 26485 - protein, 9 aa, Artificial Sequence
  Description of Artificial Sequence: Synthetic peptide
AEGTGMGNF

SEQ ID NO: 26486 - protein, 9 aa, Artificial Sequence
  Description of Artificial Sequence: Synthetic peptide
ALNTQEMCN

SEQ ID NO: 26487 - protein, 9 aa, Artificial Sequence
  Description of Artificial Sequence: Synthetic peptide
ANFTFVRSE

SEQ ID NO: 26488 - protein, 9 aa, Artificial Sequence
  Description of Artificial Sequence: Synthetic peptide
ATGTGWLDN

SEQ ID NO: 26489 - protein, 9 aa, Artificial Sequence
  Description of Artificial Sequence: Synthetic peptide
DFSTHPGTE

SEQ ID NO: 26490 - protein, 9 aa, Artificial Sequence
  Description of Artificial Sequence: Synthetic peptide
DHMTPWERQ

SEQ ID NO: 26491 - protein, 9 aa, Artificial Sequence
  Description of Artificial Sequence: Synthetic peptide
DMITGMQGS

SEQ ID NO: 26492 - protein, 9 aa, Artificial Sequence
  Description of Artificial Sequence: Synthetic peptide
DPSTCCCFM

SEQ ID NO: 26493 - protein, 9 aa, Artificial Sequence
  Description of Artificial Sequence: Synthetic peptide
DSDTMMNHN

SEQ ID NO: 26494 - protein, 9 aa, Artificial Sequence
  Description of Artificial Sequence: Synthetic peptide
DWSTQEVNY

SEQ ID NO: 26495 - protein, 9 aa, Artificial Sequence
  Description of Artificial Sequence: Synthetic peptide
EFHTKNRDM

SEQ ID NO: 26496 - protein, 9 aa, Artificial Sequence
  Description of Artificial Sequence: Synthetic peptide
EMVTEDFWQ

SEQ ID NO: 26497 - protein, 9 aa, Artificial Sequence
  Description of Artificial Sequence: Synthetic peptide
EWMTQCGWH

SEQ ID NO: 26498 - protein, 9 aa, Artificial Sequence
  Description of Artificial Sequence: Synthetic peptide
GSHTCHLEV

SEQ ID NO: 26499 - protein, 9 aa, Artificial Sequence
  Description of Artificial Sequence: Synthetic peptide
GSLTQNDNL

SEQ ID NO: 26500 - protein, 9 aa, Artificial Sequence
  Description of Artificial Sequence: Synthetic peptide
GSNTIMTCL

SEQ ID NO: 26501 - protein, 9 aa, Artificial Sequence
  Description of Artificial Sequence: Synthetic peptide
GTGTHEDYD

SEQ ID NO: 26502 - protein, 9 aa, Artificial Sequence
  Description of Artificial Sequence: Synthetic peptide
IEGTCDRAG

SEQ ID NO: 26503 - protein, 9 aa, Artificial Sequence
  Description of Artificial Sequence: Synthetic peptide
IQTTEMTSQ

SEQ ID NO: 26504 - protein, 9 aa, Artificial Sequence
  Description of Artificial Sequence: Synthetic peptide
IWCTSCEIA

SEQ ID NO: 26505 - protein, 9 aa, Artificial Sequence
  Description of Artificial Sequence: Synthetic peptide
KICTFGRES

SEQ ID NO: 26506 - protein, 9 aa, Artificial Sequence
  Description of Artificial Sequence: Synthetic peptide
KIITFISPH

SEQ ID NO: 26507 - protein, 9 aa, Artificial Sequence
  Description of Artificial Sequence: Synthetic peptide
LCCTEECVN

SEQ ID NO: 26508 - protein, 9 aa, Artificial Sequence
  Description of Artificial Sequence: Synthetic peptide
LESTSMWMY

SEQ ID NO: 26509 - protein, 9 aa, Artificial Sequence
  Description of Artificial Sequence: Synthetic peptide
LGITMCTTM

SEQ ID NO: 26510 - protein, 9 aa, Artificial Sequence
  Description of Artificial Sequence: Synthetic peptide
LQSTGIFYA

SEQ ID NO: 26511 - protein, 9 aa, Artificial Sequence
  Description of Artificial Sequence: Synthetic peptide
LSQTHQKLH

SEQ ID NO: 26512 - protein, 9 aa, Artificial Sequence
  Description of Artificial Sequence: Synthetic peptide
LTPTTNAWH

SEQ ID NO: 26513 - protein, 9 aa, Artificial Sequence
  Description of Artificial Sequence: Synthetic peptide
MFCTSALRG

SEQ ID NO: 26514 - protein, 9 aa, Artificial Sequence
  Description of Artificial Sequence: Synthetic peptide
MQETNQFMR

SEQ ID NO: 26515 - protein, 9 aa, Artificial Sequence
  Description of Artificial Sequence: Synthetic peptide
MVATCFNND

SEQ ID NO: 26516 - protein, 9 aa, Artificial Sequence
  Description of Artificial Sequence: Synthetic peptide
NMNTGQQPG

SEQ ID NO: 26517 - protein, 9 aa, Artificial Sequence
  Description of Artificial Sequence: Synthetic peptide
NQGTCTQYS

SEQ ID NO: 26518 - protein, 9 aa, Artificial Sequence
  Description of Artificial Sequence: Synthetic peptide
NQQTQVCMT

SEQ ID NO: 26519 - protein, 9 aa, Artificial Sequence
  Description of Artificial Sequence: Synthetic peptide
PEATKPIKM

SEQ ID NO: 26520 - protein, 9 aa, Artificial Sequence
  Description of Artificial Sequence: Synthetic peptide
RPCTYEYQD

SEQ ID NO: 26521 - protein, 9 aa, Artificial Sequence
  Description of Artificial Sequence: Synthetic peptide
RWDTLYFDI

SEQ ID NO: 26522 - protein, 9 aa, Artificial Sequence
  Description of Artificial Sequence: Synthetic peptide
SDETGVPAK

SEQ ID NO: 26523 - protein, 9 aa, Artificial Sequence
  Description of Artificial Sequence: Synthetic peptide
SILTYQNVG

SEQ ID NO: 26524 - protein, 9 aa, Artificial Sequence
  Description of Artificial Sequence: Synthetic peptide
SMATNHWAE

SEQ ID NO: 26525 - protein, 9 aa, Artificial Sequence
  Description of Artificial Sequence: Synthetic peptide
SQFTQLTQA

SEQ ID NO: 26526 - protein, 9 aa, Artificial Sequence
  Description of Artificial Sequence: Synthetic peptide
THYTDVLVV

SEQ ID NO: 26527 - protein, 9 aa, Artificial Sequence
  Description of Artificial Sequence: Synthetic peptide
VCFTANLMG

SEQ ID NO: 26528 - protein, 9 aa, Artificial Sequence
  Description of Artificial Sequence: Synthetic peptide
VGTTTMQSQ

SEQ ID NO: 26529 - protein, 9 aa, Artificial Sequence
  Description of Artificial Sequence: Synthetic peptide
VHHTNTMAN

SEQ ID NO: 26530 - protein, 9 aa, Artificial Sequence
  Description of Artificial Sequence: Synthetic peptide
VMSTDISQI

SEQ ID NO: 26531 - protein, 9 aa, Artificial Sequence
  Description of Artificial Sequence: Synthetic peptide
VQTTYDRKG

SEQ ID NO: 26532 - protein, 9 aa, Artificial Sequence
  Description of Artificial Sequence: Synthetic peptide
VRWTYMTNA

SEQ ID NO: 26533 - protein, 9 aa, Artificial Sequence
  Description of Artificial Sequence: Synthetic peptide
VTPTLNRCQ

SEQ ID NO: 26534 - protein, 9 aa, Artificial Sequence
  Description of Artificial Sequence: Synthetic peptide
YTHTPHLRE

SEQ ID NO: 26535 - protein, 9 aa, Artificial Sequence
  Description of Artificial Sequence: Synthetic peptide
DMVTVNCID

SEQ ID NO: 26536 - protein, 9 aa, Artificial Sequence
  Description of Artificial Sequence: Synthetic peptide
DSATFKSAD

SEQ ID NO: 26537 - protein, 9 aa, Artificial Sequence
  Description of Artificial Sequence: Synthetic peptide
AVETGESAM

SEQ ID NO: 26538 - protein, 9 aa, Artificial Sequence
  Description of Artificial Sequence: Synthetic peptide
QTNTMQMLS

SEQ ID NO: 26539 - protein, 9 aa, Artificial Sequence
  Description of Artificial Sequence: Synthetic peptide
EIHTGRPGS

SEQ ID NO: 26540 - protein, 9 aa, Artificial Sequence
  Description of Artificial Sequence: Synthetic peptide
EPETLWYVG

SEQ ID NO: 26541 - protein, 9 aa, Artificial Sequence
  Description of Artificial Sequence: Synthetic peptide
ATDTYNLQE

SEQ ID NO: 26542 - protein, 9 aa, Artificial Sequence
  Description of Artificial Sequence: Synthetic peptide
MEHTMDFGV

SEQ ID NO: 26543 - protein, 9 aa, Artificial Sequence
  Description of Artificial Sequence: Synthetic peptide
EHITEQDLR

SEQ ID NO: 26544 - protein, 9 aa, Artificial Sequence
  Description of Artificial Sequence: Synthetic peptide
ETSTHCCKV

SEQ ID NO: 26545 - protein, 9 aa, Artificial Sequence
  Description of Artificial Sequence: Synthetic peptide
TYDTRNHCL

SEQ ID NO: 26546 - protein, 9 aa, Artificial Sequence
  Description of Artificial Sequence: Synthetic peptide
PSNTGKFCQ

SEQ ID NO: 26547 - protein, 9 aa, Artificial Sequence
  Description of Artificial Sequence: Synthetic peptide
KSQTVMYDF

SEQ ID NO: 26548 - protein, 9 aa, Artificial Sequence
  Description of Artificial Sequence: Synthetic peptide
AECTEDNDD

SEQ ID NO: 26549 - protein, 9 aa, Artificial Sequence
  Description of Artificial Sequence: Synthetic peptide
QNLTKEDQY

SEQ ID NO: 26550 - protein, 9 aa, Artificial Sequence
  Description of Artificial Sequence: Synthetic peptide
WVPTPWRTH

SEQ ID NO: 26551 - protein, 9 aa, Artificial Sequence
  Description of Artificial Sequence: Synthetic peptide
NWCTMYRYW

SEQ ID NO: 26552 - protein, 9 aa, Artificial Sequence
  Description of Artificial Sequence: Synthetic peptide
AKPTHDVGS

SEQ ID NO: 26553 - protein, 9 aa, Artificial Sequence
  Description of Artificial Sequence: Synthetic peptide
LFMTYSARN

SEQ ID NO: 26554 - protein, 9 aa, Artificial Sequence
  Description of Artificial Sequence: Synthetic peptide
DRTTMVGWY

SEQ ID NO: 26555 - protein, 9 aa, Artificial Sequence
  Description of Artificial Sequence: Synthetic peptide
GEMTRCFHN

SEQ ID NO: 26556 - protein, 9 aa, Artificial Sequence
  Description of Artificial Sequence: Synthetic peptide
NDCTCRAIM

SEQ ID NO: 26557 - protein, 9 aa, Artificial Sequence
  Description of Artificial Sequence: Synthetic peptide
IHFTSQSCL

SEQ ID NO: 26558 - protein, 9 aa, Artificial Sequence
  Description of Artificial Sequence: Synthetic peptide
NSHTIMNGM

SEQ ID NO: 26559 - protein, 9 aa, Artificial Sequence
  Description of Artificial Sequence: Synthetic peptide
YPDTADIFW

SEQ ID NO: 26560 - protein, 9 aa, Artificial Sequence
  Description of Artificial Sequence: Synthetic peptide
SSMTAERFT

SEQ ID NO: 26561 - protein, 9 aa, Artificial Sequence
  Description of Artificial Sequence: Synthetic peptide
SVNTMWYPD

SEQ ID NO: 26562 - protein, 9 aa, Artificial Sequence
  Description of Artificial Sequence: Synthetic peptide
GRHTAFATG

SEQ ID NO: 26563 - protein, 9 aa, Artificial Sequence
  Description of Artificial Sequence: Synthetic peptide
PWTTPENYT

SEQ ID NO: 26564 - protein, 9 aa, Artificial Sequence
  Description of Artificial Sequence: Synthetic peptide
IWITCPYAA

SEQ ID NO: 26565 - protein, 9 aa, Artificial Sequence
  Description of Artificial Sequence: Synthetic peptide
ACHTGQSGM

SEQ ID NO: 26566 - protein, 9 aa, Artificial Sequence
  Description of Artificial Sequence: Synthetic peptide
QMVTQLNWE

SEQ ID NO: 26567 - protein, 9 aa, Artificial Sequence
  Description of Artificial Sequence: Synthetic peptide
QWFTKGVGE

SEQ ID NO: 26568 - protein, 9 aa, Artificial Sequence
  Description of Artificial Sequence: Synthetic peptide
QIKTHSNVF

SEQ ID NO: 26569 - protein, 9 aa, Artificial Sequence
  Description of Artificial Sequence: Synthetic peptide
QTGTGHWFE

SEQ ID NO: 26570 - protein, 9 aa, Artificial Sequence
  Description of Artificial Sequence: Synthetic peptide
NHWTTCDYS

SEQ ID NO: 26571 - protein, 9 aa, Artificial Sequence
  Description of Artificial Sequence: Synthetic peptide
LMKTSPSYW

SEQ ID NO: 26572 - protein, 9 aa, Artificial Sequence
  Description of Artificial Sequence: Synthetic peptide
NVWTNIAEM

SEQ ID NO: 26573 - protein, 9 aa, Artificial Sequence
  Description of Artificial Sequence: Synthetic peptide
RQTTYDCLD

SEQ ID NO: 26574 - protein, 9 aa, Artificial Sequence
  Description of Artificial Sequence: Synthetic peptide
GQNTTDRSN

SEQ ID NO: 26575 - protein, 9 aa, Artificial Sequence
  Description of Artificial Sequence: Synthetic peptide
HVNTSCKQF

SEQ ID NO: 26576 - protein, 9 aa, Artificial Sequence
  Description of Artificial Sequence: Synthetic peptide
NTHTGNDRL

SEQ ID NO: 26577 - protein, 9 aa, Artificial Sequence
  Description of Artificial Sequence: Synthetic peptide
TYMTNLGDR

SEQ ID NO: 26578 - protein, 9 aa, Artificial Sequence
  Description of Artificial Sequence: Synthetic peptide
KQKTQNRNA

SEQ ID NO: 26579 - protein, 9 aa, Artificial Sequence
  Description of Artificial Sequence: Synthetic peptide
WKATPGGQC

SEQ ID NO: 26580 - protein, 9 aa, Artificial Sequence
  Description of Artificial Sequence: Synthetic peptide
VTMTTKSVW

SEQ ID NO: 26581 - protein, 9 aa, Artificial Sequence
  Description of Artificial Sequence: Synthetic peptide
TCLSVMNQY

SEQ ID NO: 26582 - protein, 9 aa, Artificial Sequence
  Description of Artificial Sequence: Synthetic peptide
QSDAVHEPA

SEQ ID NO: 26583 - protein, 9 aa, Artificial Sequence
  Description of Artificial Sequence: Synthetic peptide
YQERVRKDV

SEQ ID NO: 26584 - protein, 9 aa, Artificial Sequence
  Description of Artificial Sequence: Synthetic peptide
DDLDVWQTS

SEQ ID NO: 26585 - protein, 9 aa, Artificial Sequence
  Description of Artificial Sequence: Synthetic peptide
GCNHVHIGQ

SEQ ID NO: 26586 - protein, 9 aa, Artificial Sequence
  Description of Artificial Sequence: Synthetic peptide
GIANVDDWE

SEQ ID NO: 26587 - protein, 9 aa, Artificial Sequence
  Description of Artificial Sequence: Synthetic peptide
NQIDVQWLQ

SEQ ID NO: 26588 - protein, 9 aa, Artificial Sequence
  Description of Artificial Sequence: Synthetic peptide
REVMVCILR

SEQ ID NO: 26589 - protein, 9 aa, Artificial Sequence
  Description of Artificial Sequence: Synthetic peptide
LCHNVLDYY

SEQ ID NO: 26590 - protein, 9 aa, Artificial Sequence
  Description of Artificial Sequence: Synthetic peptide
NQPCVNTYW

SEQ ID NO: 26591 - protein, 9 aa, Artificial Sequence
  Description of Artificial Sequence: Synthetic peptide
TMAEVVINL

SEQ ID NO: 26592 - protein, 9 aa, Artificial Sequence
  Description of Artificial Sequence: Synthetic peptide
QRMIVDALQ

SEQ ID NO: 26593 - protein, 9 aa, Artificial Sequence
  Description of Artificial Sequence: Synthetic peptide
RMVRVSVHG

SEQ ID NO: 26594 - protein, 9 aa, Artificial Sequence
  Description of Artificial Sequence: Synthetic peptide
FTVYVGARE

SEQ ID NO: 26595 - protein, 9 aa, Artificial Sequence
  Description of Artificial Sequence: Synthetic peptide
ACAGVTWGI

SEQ ID NO: 26596 - protein, 9 aa, Artificial Sequence
  Description of Artificial Sequence: Synthetic peptide
AFTNVTRWC

SEQ ID NO: 26597 - protein, 9 aa, Artificial Sequence
  Description of Artificial Sequence: Synthetic peptide
ARNCVGSFC

SEQ ID NO: 26598 - protein, 9 aa, Artificial Sequence
  Description of Artificial Sequence: Synthetic peptide
AVQSVLGCR

SEQ ID NO: 26599 - protein, 9 aa, Artificial Sequence
  Description of Artificial Sequence: Synthetic peptide
DHCAVWNHE

SEQ ID NO: 26600 - protein, 9 aa, Artificial Sequence
  Description of Artificial Sequence: Synthetic peptide
DISPVNRWH

SEQ ID NO: 26601 - protein, 9 aa, Artificial Sequence
  Description of Artificial Sequence: Synthetic peptide
DSYRVLCLS

SEQ ID NO: 26602 - protein, 9 aa, Artificial Sequence
  Description of Artificial Sequence: Synthetic peptide
DVIPVPKSC

SEQ ID NO: 26603 - protein, 9 aa, Artificial Sequence
  Description of Artificial Sequence: Synthetic peptide
EQIHVTMAN

SEQ ID NO: 26604 - protein, 9 aa, Artificial Sequence
  Description of Artificial Sequence: Synthetic peptide
EVYNVKGSA

SEQ ID NO: 26605 - protein, 9 aa, Artificial Sequence
  Description of Artificial Sequence: Synthetic peptide
FLEFVHHGT

SEQ ID NO: 26606 - protein, 9 aa, Artificial Sequence
  Description of Artificial Sequence: Synthetic peptide
FYSSVQRDQ

SEQ ID NO: 26607 - protein, 9 aa, Artificial Sequence
  Description of Artificial Sequence: Synthetic peptide
GSHQVDILH

SEQ ID NO: 26608 - protein, 9 aa, Artificial Sequence
  Description of Artificial Sequence: Synthetic peptide
MGDSVLTAH

SEQ ID NO: 26609 - protein, 9 aa, Artificial Sequence
  Description of Artificial Sequence: Synthetic peptide
MMSNVPGEY

SEQ ID NO: 26610 - protein, 9 aa, Artificial Sequence
  Description of Artificial Sequence: Synthetic peptide
NHVPVVGAM

SEQ ID NO: 26611 - protein, 9 aa, Artificial Sequence
  Description of Artificial Sequence: Synthetic peptide
NTLLVDFDF

SEQ ID NO: 26612 - protein, 9 aa, Artificial Sequence
  Description of Artificial Sequence: Synthetic peptide
PFTNVTRWC

SEQ ID NO: 26613 - protein, 9 aa, Artificial Sequence
  Description of Artificial Sequence: Synthetic peptide
QNTCVIGAQ

SEQ ID NO: 26614 - protein, 9 aa, Artificial Sequence
  Description of Artificial Sequence: Synthetic peptide
QQDAVCVSH

SEQ ID NO: 26615 - protein, 9 aa, Artificial Sequence
  Description of Artificial Sequence: Synthetic peptide
QSFVVQGTY

SEQ ID NO: 26616 - protein, 9 aa, Artificial Sequence
  Description of Artificial Sequence: Synthetic peptide
QWHAVTTNE

SEQ ID NO: 26617 - protein, 9 aa, Artificial Sequence
  Description of Artificial Sequence: Synthetic peptide
RLDCVKESP

SEQ ID NO: 26618 - protein, 9 aa, Artificial Sequence
  Description of Artificial Sequence: Synthetic peptide
RVVEVHAQV

SEQ ID NO: 26619 - protein, 9 aa, Artificial Sequence
  Description of Artificial Sequence: Synthetic peptide
SDNFVITHS

SEQ ID NO: 26620 - protein, 9 aa, Artificial Sequence
  Description of Artificial Sequence: Synthetic peptide
SQQFVHHIY

SEQ ID NO: 26621 - protein, 9 aa, Artificial Sequence
  Description of Artificial Sequence: Synthetic peptide
SYYWVWMAG

SEQ ID NO: 26622 - protein, 9 aa, Artificial Sequence
  Description of Artificial Sequence: Synthetic peptide
TNNVVIEWG

SEQ ID NO: 26623 - protein, 9 aa, Artificial Sequence
  Description of Artificial Sequence: Synthetic peptide
TSMCVETQY

SEQ ID NO: 26624 - protein, 9 aa, Artificial Sequence
  Description of Artificial Sequence: Synthetic peptide
TVIDVVRWH

SEQ ID NO: 26625 - protein, 9 aa, Artificial Sequence
  Description of Artificial Sequence: Synthetic peptide
VFPDVSFWQ

SEQ ID NO: 26626 - protein, 9 aa, Artificial Sequence
  Description of Artificial Sequence: Synthetic peptide
VIAQVFKYH

SEQ ID NO: 26627 - protein, 9 aa, Artificial Sequence
  Description of Artificial Sequence: Synthetic peptide
VIGKVHHDN

SEQ ID NO: 26628 - protein, 9 aa, Artificial Sequence
  Description of Artificial Sequence: Synthetic peptide
VTNRVAMPI

SEQ ID NO: 26629 - protein, 9 aa, Artificial Sequence
  Description of Artificial Sequence: Synthetic peptide
VTSLVTNMG

SEQ ID NO: 26630 - protein, 9 aa, Artificial Sequence
  Description of Artificial Sequence: Synthetic peptide
WYVPVNHLY

SEQ ID NO: 26631 - protein, 9 aa, Artificial Sequence
  Description of Artificial Sequence: Synthetic peptide
WYVPVNQLY

SEQ ID NO: 26632 - protein, 9 aa, Artificial Sequence
  Description of Artificial Sequence: Synthetic peptide
RWDFVWYIQ

SEQ ID NO: 26633 - protein, 9 aa, Artificial Sequence
  Description of Artificial Sequence: Synthetic peptide
GVFYVGHWQ

SEQ ID NO: 26634 - protein, 9 aa, Artificial Sequence
  Description of Artificial Sequence: Synthetic peptide
HGNMVLVIG

SEQ ID NO: 26635 - protein, 9 aa, Artificial Sequence
  Description of Artificial Sequence: Synthetic peptide
NSVHVHASN

SEQ ID NO: 26636 - protein, 9 aa, Artificial Sequence
  Description of Artificial Sequence: Synthetic peptide
NKEAVTGSS

SEQ ID NO: 26637 - protein, 9 aa, Artificial Sequence
  Description of Artificial Sequence: Synthetic peptide
HPVKVDDFT

SEQ ID NO: 26638 - protein, 9 aa, Artificial Sequence
  Description of Artificial Sequence: Synthetic peptide
SRLPVHECP

SEQ ID NO: 26639 - protein, 9 aa, Artificial Sequence
  Description of Artificial Sequence: Synthetic peptide
WTLQVMKIN

SEQ ID NO: 26640 - protein, 9 aa, Artificial Sequence
  Description of Artificial Sequence: Synthetic peptide
MRVQVFSDA

SEQ ID NO: 26641 - protein, 9 aa, Artificial Sequence
  Description of Artificial Sequence: Synthetic peptide
SDSKVQWGM

SEQ ID NO: 26642 - protein, 9 aa, Artificial Sequence
  Description of Artificial Sequence: Synthetic peptide
KSAQVYWHP

SEQ ID NO: 26643 - protein, 9 aa, Artificial Sequence
  Description of Artificial Sequence: Synthetic peptide
QFMGVSSHS

SEQ ID NO: 26644 - protein, 9 aa, Artificial Sequence
  Description of Artificial Sequence: Synthetic peptide
LFIKVKDTS

SEQ ID NO: 26645 - protein, 9 aa, Artificial Sequence
  Description of Artificial Sequence: Synthetic peptide
HFHEVAWGS

SEQ ID NO: 26646 - protein, 9 aa, Artificial Sequence
  Description of Artificial Sequence: Synthetic peptide
ALDRVSMAC

SEQ ID NO: 26647 - protein, 9 aa, Artificial Sequence
  Description of Artificial Sequence: Synthetic peptide
WCEHVIMNP

SEQ ID NO: 26648 - protein, 9 aa, Artificial Sequence
  Description of Artificial Sequence: Synthetic peptide
TKQPVHFLG

SEQ ID NO: 26649 - protein, 9 aa, Artificial Sequence
  Description of Artificial Sequence: Synthetic peptide
YGNSVTCTS

SEQ ID NO: 26650 - protein, 9 aa, Artificial Sequence
  Description of Artificial Sequence: Synthetic peptide
ESCLVRRGW

SEQ ID NO: 26651 - protein, 9 aa, Artificial Sequence
  Description of Artificial Sequence: Synthetic peptide
EWEGVSQFR

SEQ ID NO: 26652 - protein, 9 aa, Artificial Sequence
  Description of Artificial Sequence: Synthetic peptide
AEHMVVDHE

SEQ ID NO: 26653 - protein, 9 aa, Artificial Sequence
  Description of Artificial Sequence: Synthetic peptide
TCNKVANMY

SEQ ID NO: 26654 - protein, 9 aa, Artificial Sequence
  Description of Artificial Sequence: Synthetic peptide
GSYIVQNHC

SEQ ID NO: 26655 - protein, 9 aa, Artificial Sequence
  Description of Artificial Sequence: Synthetic peptide
HHFHVNLDI

SEQ ID NO: 26656 - protein, 9 aa, Artificial Sequence
  Description of Artificial Sequence: Synthetic peptide
KTSNVMDQM

SEQ ID NO: 26657 - protein, 9 aa, Artificial Sequence
  Description of Artificial Sequence: Synthetic peptide
NVEDVGMIE

SEQ ID NO: 26658 - protein, 9 aa, Artificial Sequence
  Description of Artificial Sequence: Synthetic peptide
VDMGVHVGS

SEQ ID NO: 26659 - protein, 9 aa, Artificial Sequence
  Description of Artificial Sequence: Synthetic peptide
GGSYVSAPD

SEQ ID NO: 26660 - protein, 9 aa, Artificial Sequence
  Description of Artificial Sequence: Synthetic peptide
VEDRVFACC

SEQ ID NO: 26661 - protein, 9 aa, Artificial Sequence
  Description of Artificial Sequence: Synthetic peptide
WKAIVLEYW

SEQ ID NO: 26662 - protein, 9 aa, Artificial Sequence
  Description of Artificial Sequence: Synthetic peptide
ASVMVAITG

SEQ ID NO: 26663 - protein, 9 aa, Artificial Sequence
  Description of Artificial Sequence: Synthetic peptide
DSQSVGDSF

SEQ ID NO: 26664 - protein, 9 aa, Artificial Sequence
  Description of Artificial Sequence: Synthetic peptide
INMPVSKDQ

SEQ ID NO: 26665 - protein, 9 aa, Artificial Sequence
  Description of Artificial Sequence: Synthetic peptide
YRLHVWMKV

SEQ ID NO: 26666 - protein, 9 aa, Artificial Sequence
  Description of Artificial Sequence: Synthetic peptide
YWEKVPCMK

SEQ ID NO: 26667 - protein, 9 aa, Artificial Sequence
  Description of Artificial Sequence: Synthetic peptide
SGQPVDCMF

SEQ ID NO: 26668 - protein, 9 aa, Artificial Sequence
  Description of Artificial Sequence: Synthetic peptide
FNWFVRAYI

SEQ ID NO: 26669 - protein, 9 aa, Artificial Sequence
  Description of Artificial Sequence: Synthetic peptide
ACDQVNTVQ

SEQ ID NO: 26670 - protein, 9 aa, Artificial Sequence
  Description of Artificial Sequence: Synthetic peptide
QTNQVVVVE

SEQ ID NO: 26671 - protein, 9 aa, Artificial Sequence
  Description of Artificial Sequence: Synthetic peptide
FMMPVVDNY

SEQ ID NO: 26672 - protein, 9 aa, Artificial Sequence
  Description of Artificial Sequence: Synthetic peptide
WCEAVGDYA

SEQ ID NO: 26673 - protein, 9 aa, Artificial Sequence
  Description of Artificial Sequence: Synthetic peptide
SGFFVHTSN

SEQ ID NO: 26674 - protein, 9 aa, Artificial Sequence
  Description of Artificial Sequence: Synthetic peptide
HFSHVDQCM

SEQ ID NO: 26675 - protein, 9 aa, Artificial Sequence
  Description of Artificial Sequence: Synthetic peptide
NRCGVSKCC

SEQ ID NO: 26676 - protein, 9 aa, Artificial Sequence
  Description of Artificial Sequence: Synthetic peptide
TSTFANEFT

SEQ ID NO: 26677 - protein, 9 aa, Artificial Sequence
  Description of Artificial Sequence: Synthetic peptide
QRPIANDAM

SEQ ID NO: 26678 - protein, 9 aa, Artificial Sequence
  Description of Artificial Sequence: Synthetic peptide
VQDKINYSY

SEQ ID NO: 26679 - protein, 9 aa, Artificial Sequence
  Description of Artificial Sequence: Synthetic peptide
QTGHFNQRG

SEQ ID NO: 26680 - protein, 9 aa, Artificial Sequence
  Description of Artificial Sequence: Synthetic peptide
EGTLWNVCV

SEQ ID NO: 26681 - protein, 9 aa, Artificial Sequence
  Description of Artificial Sequence: Synthetic peptide
GVIPLNMPS

SEQ ID NO: 26682 - protein, 9 aa, Artificial Sequence
  Description of Artificial Sequence: Synthetic peptide
MWTEFNEDG

SEQ ID NO: 26683 - protein, 9 aa, Artificial Sequence
  Description of Artificial Sequence: Synthetic peptide
KMTNSNENS

SEQ ID NO: 26684 - protein, 9 aa, Artificial Sequence
  Description of Artificial Sequence: Synthetic peptide
GRAHGNVCI

SEQ ID NO: 26685 - protein, 9 aa, Artificial Sequence
  Description of Artificial Sequence: Synthetic peptide
QCEYSNCCY

SEQ ID NO: 26686 - protein, 9 aa, Artificial Sequence
  Description of Artificial Sequence: Synthetic peptide
DVISRNGRC

SEQ ID NO: 26687 - protein, 9 aa, Artificial Sequence
  Description of Artificial Sequence: Synthetic peptide
NMCEANHES

SEQ ID NO: 26688 - protein, 9 aa, Artificial Sequence
  Description of Artificial Sequence: Synthetic peptide
EVAGENGNY

SEQ ID NO: 26689 - protein, 9 aa, Artificial Sequence
  Description of Artificial Sequence: Synthetic peptide
YTGHTNSGR

SEQ ID NO: 26690 - protein, 9 aa, Artificial Sequence
  Description of Artificial Sequence: Synthetic peptide
ACDFGNLGR

SEQ ID NO: 26691 - protein, 9 aa, Artificial Sequence
  Description of Artificial Sequence: Synthetic peptide
ADVVTNINL

SEQ ID NO: 26692 - protein, 9 aa, Artificial Sequence
  Description of Artificial Sequence: Synthetic peptide
AIEASNGGG

SEQ ID NO: 26693 - protein, 9 aa, Artificial Sequence
  Description of Artificial Sequence: Synthetic peptide
ASESPNESG

SEQ ID NO: 26694 - protein, 9 aa, Artificial Sequence
  Description of Artificial Sequence: Synthetic peptide
ATCQSNKCP

SEQ ID NO: 26695 - protein, 9 aa, Artificial Sequence
  Description of Artificial Sequence: Synthetic peptide
ATTRHNTEA

SEQ ID NO: 26696 - protein, 9 aa, Artificial Sequence
  Description of Artificial Sequence: Synthetic peptide
DGWSGNKMA

SEQ ID NO: 26697 - protein, 9 aa, Artificial Sequence
  Description of Artificial Sequence: Synthetic peptide
DMKLQNDHP

SEQ ID NO: 26698 - protein, 9 aa, Artificial Sequence
  Description of Artificial Sequence: Synthetic peptide
DMLKHNNAR

SEQ ID NO: 26699 - protein, 9 aa, Artificial Sequence
  Description of Artificial Sequence: Synthetic peptide
DNNAMNDQQ

SEQ ID NO: 26700 - protein, 9 aa, Artificial Sequence
  Description of Artificial Sequence: Synthetic peptide
DQQYSNVCC

SEQ ID NO: 26701 - protein, 9 aa, Artificial Sequence
  Description of Artificial Sequence: Synthetic peptide
DRIWINWVG

SEQ ID NO: 26702 - protein, 9 aa, Artificial Sequence
  Description of Artificial Sequence: Synthetic peptide
DVQKKNDKS

SEQ ID NO: 26703 - protein, 9 aa, Artificial Sequence
  Description of Artificial Sequence: Synthetic peptide
EKDEINRAW

SEQ ID NO: 26704 - protein, 9 aa, Artificial Sequence
  Description of Artificial Sequence: Synthetic peptide
ERFMANTGL

SEQ ID NO: 26705 - protein, 9 aa, Artificial Sequence
  Description of Artificial Sequence: Synthetic peptide
ESSDTNYRQ

SEQ ID NO: 26706 - protein, 9 aa, Artificial Sequence
  Description of Artificial Sequence: Synthetic peptide
EYHGLNLMA

SEQ ID NO: 26707 - protein, 9 aa, Artificial Sequence
  Description of Artificial Sequence: Synthetic peptide
EYVWLNCGE

SEQ ID NO: 26708 - protein, 9 aa, Artificial Sequence
  Description of Artificial Sequence: Synthetic peptide
FMHAGNLDA

SEQ ID NO: 26709 - protein, 9 aa, Artificial Sequence
  Description of Artificial Sequence: Synthetic peptide
FVGCLNHYL

SEQ ID NO: 26710 - protein, 9 aa, Artificial Sequence
  Description of Artificial Sequence: Synthetic peptide
GHIKLNVLP

SEQ ID NO: 26711 - protein, 9 aa, Artificial Sequence
  Description of Artificial Sequence: Synthetic peptide
GIMQLNTEP

SEQ ID NO: 26712 - protein, 9 aa, Artificial Sequence
  Description of Artificial Sequence: Synthetic peptide
GNCFQNKSN

SEQ ID NO: 26713 - protein, 9 aa, Artificial Sequence
  Description of Artificial Sequence: Synthetic peptide
HPHVHNQKP

SEQ ID NO: 26714 - protein, 9 aa, Artificial Sequence
  Description of Artificial Sequence: Synthetic peptide
HTVDGNVFP

SEQ ID NO: 26715 - protein, 9 aa, Artificial Sequence
  Description of Artificial Sequence: Synthetic peptide
IDAVKNRND

SEQ ID NO: 26716 - protein, 9 aa, Artificial Sequence
  Description of Artificial Sequence: Synthetic peptide
KEMAKNYEP

SEQ ID NO: 26717 - protein, 9 aa, Artificial Sequence
  Description of Artificial Sequence: Synthetic peptide
KQDEWNCDR

SEQ ID NO: 26718 - protein, 9 aa, Artificial Sequence
  Description of Artificial Sequence: Synthetic peptide
KQNCANLCE

SEQ ID NO: 26719 - protein, 9 aa, Artificial Sequence
  Description of Artificial Sequence: Synthetic peptide
LLSDENTEC

SEQ ID NO: 26720 - protein, 9 aa, Artificial Sequence
  Description of Artificial Sequence: Synthetic peptide
MKMEENSAS

SEQ ID NO: 26721 - protein, 9 aa, Artificial Sequence
  Description of Artificial Sequence: Synthetic peptide
MLVQENNSY

SEQ ID NO: 26722 - protein, 9 aa, Artificial Sequence
  Description of Artificial Sequence: Synthetic peptide
NLERCNTMM

SEQ ID NO: 26723 - protein, 9 aa, Artificial Sequence
  Description of Artificial Sequence: Synthetic peptide
NQFFYNLQN

SEQ ID NO: 26724 - protein, 9 aa, Artificial Sequence
  Description of Artificial Sequence: Synthetic peptide
NSCYMNSIE

SEQ ID NO: 26725 - protein, 9 aa, Artificial Sequence
  Description of Artificial Sequence: Synthetic peptide
NYTQCNFSN

SEQ ID NO: 26726 - protein, 9 aa, Artificial Sequence
  Description of Artificial Sequence: Synthetic peptide
QMAWENWFG

SEQ ID NO: 26727 - protein, 9 aa, Artificial Sequence
  Description of Artificial Sequence: Synthetic peptide
QSCSDNYSG

SEQ ID NO: 26728 - protein, 9 aa, Artificial Sequence
  Description of Artificial Sequence: Synthetic peptide
RCDQMNLHF

SEQ ID NO: 26729 - protein, 9 aa, Artificial Sequence
  Description of Artificial Sequence: Synthetic peptide
RGDALNMVP

SEQ ID NO: 26730 - protein, 9 aa, Artificial Sequence
  Description of Artificial Sequence: Synthetic peptide
SSFLLNHQY

SEQ ID NO: 26731 - protein, 9 aa, Artificial Sequence
  Description of Artificial Sequence: Synthetic peptide
SWVFCNVGQ

SEQ ID NO: 26732 - protein, 9 aa, Artificial Sequence
  Description of Artificial Sequence: Synthetic peptide
TTLNTNCSH

SEQ ID NO: 26733 - protein, 9 aa, Artificial Sequence
  Description of Artificial Sequence: Synthetic peptide
YVYRMNGNC

SEQ ID NO: 26734 - protein, 9 aa, Artificial Sequence
  Description of Artificial Sequence: Synthetic peptide
LMQWYNRCW

SEQ ID NO: 26735 - protein, 9 aa, Artificial Sequence
  Description of Artificial Sequence: Synthetic peptide
VTEVFNQDV

SEQ ID NO: 26736 - protein, 9 aa, Artificial Sequence
  Description of Artificial Sequence: Synthetic peptide
GNKLKNDQM

SEQ ID NO: 26737 - protein, 9 aa, Artificial Sequence
  Description of Artificial Sequence: Synthetic peptide
YMGSTNIWM

SEQ ID NO: 26738 - protein, 9 aa, Artificial Sequence
  Description of Artificial Sequence: Synthetic peptide
QLEECNPLS

SEQ ID NO: 26739 - protein, 9 aa, Artificial Sequence
  Description of Artificial Sequence: Synthetic peptide
LVDCSNTCQ

SEQ ID NO: 26740 - protein, 9 aa, Artificial Sequence
  Description of Artificial Sequence: Synthetic peptide
KLYGLNHSC

SEQ ID NO: 26741 - protein, 9 aa, Artificial Sequence
  Description of Artificial Sequence: Synthetic peptide
SGALKNREE

SEQ ID NO: 26742 - protein, 9 aa, Artificial Sequence
  Description of Artificial Sequence: Synthetic peptide
MIKLINCVN

SEQ ID NO: 26743 - protein, 9 aa, Artificial Sequence
  Description of Artificial Sequence: Synthetic peptide
QPSRFNTAD

SEQ ID NO: 26744 - protein, 9 aa, Artificial Sequence
  Description of Artificial Sequence: Synthetic peptide
MQEHKNFYG

SEQ ID NO: 26745 - protein, 9 aa, Artificial Sequence
  Description of Artificial Sequence: Synthetic peptide
TTYPHNTHG

SEQ ID NO: 26746 - protein, 9 aa, Artificial Sequence
  Description of Artificial Sequence: Synthetic peptide
IYKWDNKFH

SEQ ID NO: 26747 - protein, 9 aa, Artificial Sequence
  Description of Artificial Sequence: Synthetic peptide
QRTQCNFSI

SEQ ID NO: 26748 - protein, 9 aa, Artificial Sequence
  Description of Artificial Sequence: Synthetic peptide
KYWCKNEWD

SEQ ID NO: 26749 - protein, 9 aa, Artificial Sequence
  Description of Artificial Sequence: Synthetic peptide
IEHCSNRYA

SEQ ID NO: 26750 - protein, 9 aa, Artificial Sequence
  Description of Artificial Sequence: Synthetic peptide
MINWGNKCT

SEQ ID NO: 26751 - protein, 9 aa, Artificial Sequence
  Description of Artificial Sequence: Synthetic peptide
VPLGFNFAG

SEQ ID NO: 26752 - protein, 9 aa, Artificial Sequence
  Description of Artificial Sequence: Synthetic peptide
RENGYNATM

SEQ ID NO: 26753 - protein, 9 aa, Artificial Sequence
  Description of Artificial Sequence: Synthetic peptide
QKSMLNSIQ

SEQ ID NO: 26754 - protein, 9 aa, Artificial Sequence
  Description of Artificial Sequence: Synthetic peptide
EGQYWNYMT

SEQ ID NO: 26755 - protein, 9 aa, Artificial Sequence
  Description of Artificial Sequence: Synthetic peptide
TFIYLNHFG

SEQ ID NO: 26756 - protein, 9 aa, Artificial Sequence
  Description of Artificial Sequence: Synthetic peptide
DYFQYNEAP

SEQ ID NO: 26757 - protein, 9 aa, Artificial Sequence
  Description of Artificial Sequence: Synthetic peptide
SCQLLNDGG

SEQ ID NO: 26758 - protein, 9 aa, Artificial Sequence
  Description of Artificial Sequence: Synthetic peptide
AHEDPNTWC

SEQ ID NO: 26759 - protein, 9 aa, Artificial Sequence
  Description of Artificial Sequence: Synthetic peptide
KNELENVIN

SEQ ID NO: 26760 - protein, 9 aa, Artificial Sequence
  Description of Artificial Sequence: Synthetic peptide
VGGYSNQWV

SEQ ID NO: 26761 - protein, 9 aa, Artificial Sequence
  Description of Artificial Sequence: Synthetic peptide
WDNWSNTQI

SEQ ID NO: 26762 - protein, 9 aa, Artificial Sequence
  Description of Artificial Sequence: Synthetic peptide
HQYVHNWRQ

SEQ ID NO: 26763 - protein, 9 aa, Artificial Sequence
  Description of Artificial Sequence: Synthetic peptide
VHHKTNRSY

SEQ ID NO: 26764 - protein, 9 aa, Artificial Sequence
  Description of Artificial Sequence: Synthetic peptide
TMWEDNQNM

SEQ ID NO: 26765 - protein, 9 aa, Artificial Sequence
  Description of Artificial Sequence: Synthetic peptide
DCDPYNMVD

SEQ ID NO: 26766 - protein, 9 aa, Artificial Sequence
  Description of Artificial Sequence: Synthetic peptide
QISAWNEFF

SEQ ID NO: 26767 - protein, 9 aa, Artificial Sequence
  Description of Artificial Sequence: Synthetic peptide
GNEDCNLAC

SEQ ID NO: 26768 - protein, 9 aa, Artificial Sequence
  Description of Artificial Sequence: Synthetic peptide
MIMGYNFEF

SEQ ID NO: 26769 - protein, 9 aa, Artificial Sequence
  Description of Artificial Sequence: Synthetic peptide
LPSHCNLGS

SEQ ID NO: 26770 - protein, 9 aa, Artificial Sequence
  Description of Artificial Sequence: Synthetic peptide
TIDLSNKVT

SEQ ID NO: 26771 - protein, 9 aa, Artificial Sequence
  Description of Artificial Sequence: Synthetic peptide
TTTITNRLC

SEQ ID NO: 26772 - protein, 9 aa, Artificial Sequence
  Description of Artificial Sequence: Synthetic peptide
QCTAHNTCM

SEQ ID NO: 26773 - protein, 9 aa, Artificial Sequence
  Description of Artificial Sequence: Synthetic peptide
DSMVYNRPQ

SEQ ID NO: 26774 - protein, 9 aa, Artificial Sequence
  Description of Artificial Sequence: Synthetic peptide
KIQPTNHHE

SEQ ID NO: 26775 - protein, 9 aa, Artificial Sequence
  Description of Artificial Sequence: Synthetic peptide
KGLIYNHHT

SEQ ID NO: 26776 - protein, 9 aa, Artificial Sequence
  Description of Artificial Sequence: Synthetic peptide
NYGCHNCKY

SEQ ID NO: 26777 - protein, 9 aa, Artificial Sequence
  Description of Artificial Sequence: Synthetic peptide
QIGRFAMSH

SEQ ID NO: 26778 - protein, 9 aa, Artificial Sequence
  Description of Artificial Sequence: Synthetic peptide
RTGDAGMSP

SEQ ID NO: 26779 - protein, 9 aa, Artificial Sequence
  Description of Artificial Sequence: Synthetic peptide
ILLPDDMLK

SEQ ID NO: 26780 - protein, 9 aa, Artificial Sequence
  Description of Artificial Sequence: Synthetic peptide
HLDCLKMEM

SEQ ID NO: 26781 - protein, 9 aa, Artificial Sequence
  Description of Artificial Sequence: Synthetic peptide
YSNSIQMSF

SEQ ID NO: 26782 - protein, 9 aa, Artificial Sequence
  Description of Artificial Sequence: Synthetic peptide
YREHRTMSD

SEQ ID NO: 26783 - protein, 9 aa, Artificial Sequence
  Description of Artificial Sequence: Synthetic peptide
GWYQKCMGD

SEQ ID NO: 26784 - protein, 9 aa, Artificial Sequence
  Description of Artificial Sequence: Synthetic peptide
PTNYGWMWR

SEQ ID NO: 26785 - protein, 9 aa, Artificial Sequence
  Description of Artificial Sequence: Synthetic peptide
GCYWNMMQP

SEQ ID NO: 26786 - protein, 9 aa, Artificial Sequence
  Description of Artificial Sequence: Synthetic peptide
PNGHYWMIP

SEQ ID NO: 26787 - protein, 9 aa, Artificial Sequence
  Description of Artificial Sequence: Synthetic peptide
ADYNNEMIQ

SEQ ID NO: 26788 - protein, 9 aa, Artificial Sequence
  Description of Artificial Sequence: Synthetic peptide
AGSQMHMLS

SEQ ID NO: 26789 - protein, 9 aa, Artificial Sequence
  Description of Artificial Sequence: Synthetic peptide
ASWSPQMNT

SEQ ID NO: 26790 - protein, 9 aa, Artificial Sequence
  Description of Artificial Sequence: Synthetic peptide
ATGNKTMSY

SEQ ID NO: 26791 - protein, 9 aa, Artificial Sequence
  Description of Artificial Sequence: Synthetic peptide
DLNQCQMYC

SEQ ID NO: 26792 - protein, 9 aa, Artificial Sequence
  Description of Artificial Sequence: Synthetic peptide
EEVHSAMEG

SEQ ID NO: 26793 - protein, 9 aa, Artificial Sequence
  Description of Artificial Sequence: Synthetic peptide
EGPALWMNT

SEQ ID NO: 26794 - protein, 9 aa, Artificial Sequence
  Description of Artificial Sequence: Synthetic peptide
EGVHLPMGN

SEQ ID NO: 26795 - protein, 9 aa, Artificial Sequence
  Description of Artificial Sequence: Synthetic peptide
EMEMEEMVG

SEQ ID NO: 26796 - protein, 9 aa, Artificial Sequence
  Description of Artificial Sequence: Synthetic peptide
EQGYRVMSF

SEQ ID NO: 26797 - protein, 9 aa, Artificial Sequence
  Description of Artificial Sequence: Synthetic peptide
EVFHDRMMG

SEQ ID NO: 26798 - protein, 9 aa, Artificial Sequence
  Description of Artificial Sequence: Synthetic peptide
FCSEMVMNQ

SEQ ID NO: 26799 - protein, 9 aa, Artificial Sequence
  Description of Artificial Sequence: Synthetic peptide
GNSKNDMHC

SEQ ID NO: 26800 - protein, 9 aa, Artificial Sequence
  Description of Artificial Sequence: Synthetic peptide
GQCNTMMWQ

SEQ ID NO: 26801 - protein, 9 aa, Artificial Sequence
  Description of Artificial Sequence: Synthetic peptide
HINAAVMHE

SEQ ID NO: 26802 - protein, 9 aa, Artificial Sequence
  Description of Artificial Sequence: Synthetic peptide
IEPDCPMIP

SEQ ID NO: 26803 - protein, 9 aa, Artificial Sequence
  Description of Artificial Sequence: Synthetic peptide
KIEAEEMHA

SEQ ID NO: 26804 - protein, 9 aa, Artificial Sequence
  Description of Artificial Sequence: Synthetic peptide
KLVSKTMHH

SEQ ID NO: 26805 - protein, 9 aa, Artificial Sequence
  Description of Artificial Sequence: Synthetic peptide
MMESALMDR

SEQ ID NO: 26806 - protein, 9 aa, Artificial Sequence
  Description of Artificial Sequence: Synthetic peptide
NQDIMVMGQ

SEQ ID NO: 26807 - protein, 9 aa, Artificial Sequence
  Description of Artificial Sequence: Synthetic peptide
NWACMGMGI

SEQ ID NO: 26808 - protein, 9 aa, Artificial Sequence
  Description of Artificial Sequence: Synthetic peptide
PDWYNWMED

SEQ ID NO: 26809 - protein, 9 aa, Artificial Sequence
  Description of Artificial Sequence: Synthetic peptide
PMKSPVMKD

SEQ ID NO: 26810 - protein, 9 aa, Artificial Sequence
  Description of Artificial Sequence: Synthetic peptide
PQEEFMMTQ

SEQ ID NO: 26811 - protein, 9 aa, Artificial Sequence
  Description of Artificial Sequence: Synthetic peptide
QELYLPMGC

SEQ ID NO: 26812 - protein, 9 aa, Artificial Sequence
  Description of Artificial Sequence: Synthetic peptide
RFKHQMMMH

SEQ ID NO: 26813 - protein, 9 aa, Artificial Sequence
  Description of Artificial Sequence: Synthetic peptide
RMDMKEMWG

SEQ ID NO: 26814 - protein, 9 aa, Artificial Sequence
  Description of Artificial Sequence: Synthetic peptide
SQQLECMGP

SEQ ID NO: 26815 - protein, 9 aa, Artificial Sequence
  Description of Artificial Sequence: Synthetic peptide
SRAEEYMPW

SEQ ID NO: 26816 - protein, 9 aa, Artificial Sequence
  Description of Artificial Sequence: Synthetic peptide
TRVPSMMYK

SEQ ID NO: 26817 - protein, 9 aa, Artificial Sequence
  Description of Artificial Sequence: Synthetic peptide
TYAANIMHV

SEQ ID NO: 26818 - protein, 9 aa, Artificial Sequence
  Description of Artificial Sequence: Synthetic peptide
VCTHYVMQR

SEQ ID NO: 26819 - protein, 9 aa, Artificial Sequence
  Description of Artificial Sequence: Synthetic peptide
VMKPCFMTP

SEQ ID NO: 26820 - protein, 9 aa, Artificial Sequence
  Description of Artificial Sequence: Synthetic peptide
SKNLYTMAG

SEQ ID NO: 26821 - protein, 9 aa, Artificial Sequence
  Description of Artificial Sequence: Synthetic peptide
LDGPIGMGT

SEQ ID NO: 26822 - protein, 9 aa, Artificial Sequence
  Description of Artificial Sequence: Synthetic peptide
FCNYAVMSP

SEQ ID NO: 26823 - protein, 9 aa, Artificial Sequence
  Description of Artificial Sequence: Synthetic peptide
TLPKMHMWP

SEQ ID NO: 26824 - protein, 9 aa, Artificial Sequence
  Description of Artificial Sequence: Synthetic peptide
TKPLEDMPT

SEQ ID NO: 26825 - protein, 9 aa, Artificial Sequence
  Description of Artificial Sequence: Synthetic peptide
ESAEPRMIP

SEQ ID NO: 26826 - protein, 9 aa, Artificial Sequence
  Description of Artificial Sequence: Synthetic peptide
AEVPYVMQQ

SEQ ID NO: 26827 - protein, 9 aa, Artificial Sequence
  Description of Artificial Sequence: Synthetic peptide
QHSRAYMWY

SEQ ID NO: 26828 - protein, 9 aa, Artificial Sequence
  Description of Artificial Sequence: Synthetic peptide
TNFPTSMHG

SEQ ID NO: 26829 - protein, 9 aa, Artificial Sequence
  Description of Artificial Sequence: Synthetic peptide
YISEYVMMV

SEQ ID NO: 26830 - protein, 9 aa, Artificial Sequence
  Description of Artificial Sequence: Synthetic peptide
TTTNQFMFQ

SEQ ID NO: 26831 - protein, 9 aa, Artificial Sequence
  Description of Artificial Sequence: Synthetic peptide
TVGIRHMKD

SEQ ID NO: 26832 - protein, 9 aa, Artificial Sequence
  Description of Artificial Sequence: Synthetic peptide
QCFSTEMCQ

SEQ ID NO: 26833 - protein, 9 aa, Artificial Sequence
  Description of Artificial Sequence: Synthetic peptide
ELEPDGMHV

SEQ ID NO: 26834 - protein, 9 aa, Artificial Sequence
  Description of Artificial Sequence: Synthetic peptide
THARFKMKS

SEQ ID NO: 26835 - protein, 9 aa, Artificial Sequence
  Description of Artificial Sequence: Synthetic peptide
YSVQAYMAN

SEQ ID NO: 26836 - protein, 9 aa, Artificial Sequence
  Description of Artificial Sequence: Synthetic peptide
FQWRTEMNN

SEQ ID NO: 26837 - protein, 9 aa, Artificial Sequence
  Description of Artificial Sequence: Synthetic peptide
PSIKHGMPK

SEQ ID NO: 26838 - protein, 9 aa, Artificial Sequence
  Description of Artificial Sequence: Synthetic peptide
DVDFLKMHC

SEQ ID NO: 26839 - protein, 9 aa, Artificial Sequence
  Description of Artificial Sequence: Synthetic peptide
IHSFMAMAQ

SEQ ID NO: 26840 - protein, 9 aa, Artificial Sequence
  Description of Artificial Sequence: Synthetic peptide
ENCMSRMKP

SEQ ID NO: 26841 - protein, 9 aa, Artificial Sequence
  Description of Artificial Sequence: Synthetic peptide
MLMHADMTQ

SEQ ID NO: 26842 - protein, 9 aa, Artificial Sequence
  Description of Artificial Sequence: Synthetic peptide
FTEPMCMQG

SEQ ID NO: 26843 - protein, 9 aa, Artificial Sequence
  Description of Artificial Sequence: Synthetic peptide
YHCCFAMQS

SEQ ID NO: 26844 - protein, 9 aa, Artificial Sequence
  Description of Artificial Sequence: Synthetic peptide
PGGCYRMME

SEQ ID NO: 26845 - protein, 9 aa, Artificial Sequence
  Description of Artificial Sequence: Synthetic peptide
SQKQFSMQN

SEQ ID NO: 26846 - protein, 9 aa, Artificial Sequence
  Description of Artificial Sequence: Synthetic peptide
HMLHAIMES

SEQ ID NO: 26847 - protein, 9 aa, Artificial Sequence
  Description of Artificial Sequence: Synthetic peptide
TNGVQIMHV

SEQ ID NO: 26848 - protein, 9 aa, Artificial Sequence
  Description of Artificial Sequence: Synthetic peptide
ETEIRQMDG

SEQ ID NO: 26849 - protein, 9 aa, Artificial Sequence
  Description of Artificial Sequence: Synthetic peptide
YSNSTIMNL

SEQ ID NO: 26850 - protein, 9 aa, Artificial Sequence
  Description of Artificial Sequence: Synthetic peptide
YVKMCSMRN

SEQ ID NO: 26851 - protein, 9 aa, Artificial Sequence
  Description of Artificial Sequence: Synthetic peptide
GTVECEMNA

SEQ ID NO: 26852 - protein, 9 aa, Artificial Sequence
  Description of Artificial Sequence: Synthetic peptide
FWGMESMSC

SEQ ID NO: 26853 - protein, 9 aa, Artificial Sequence
  Description of Artificial Sequence: Synthetic peptide
ASGHMTMCM

SEQ ID NO: 26854 - protein, 9 aa, Artificial Sequence
  Description of Artificial Sequence: Synthetic peptide
NTSELLMAQ

SEQ ID NO: 26855 - protein, 9 aa, Artificial Sequence
  Description of Artificial Sequence: Synthetic peptide
SEDCMDMYF

SEQ ID NO: 26856 - protein, 9 aa, Artificial Sequence
  Description of Artificial Sequence: Synthetic peptide
STEFWVQHT

SEQ ID NO: 26857 - protein, 9 aa, Artificial Sequence
  Description of Artificial Sequence: Synthetic peptide
WSSREYWHK

SEQ ID NO: 26858 - protein, 9 aa, Artificial Sequence
  Description of Artificial Sequence: Synthetic peptide
TVMSAWSHM

SEQ ID NO: 26859 - protein, 9 aa, Artificial Sequence
  Description of Artificial Sequence: Synthetic peptide
ETHYPYNHI

SEQ ID NO: 26860 - protein, 9 aa, Artificial Sequence
  Description of Artificial Sequence: Synthetic peptide
FQIRFDRHH

SEQ ID NO: 26861 - protein, 9 aa, Artificial Sequence
  Description of Artificial Sequence: Synthetic peptide
TSSHDEAHK

SEQ ID NO: 26862 - protein, 9 aa, Artificial Sequence
  Description of Artificial Sequence: Synthetic peptide
TSYLRKIHS

SEQ ID NO: 26863 - protein, 9 aa, Artificial Sequence
  Description of Artificial Sequence: Synthetic peptide
TRYRMRYHG

SEQ ID NO: 26864 - protein, 9 aa, Artificial Sequence
  Description of Artificial Sequence: Synthetic peptide
GIWRTREHY

SEQ ID NO: 26865 - protein, 9 aa, Artificial Sequence
  Description of Artificial Sequence: Synthetic peptide
RGSLMSFHE

SEQ ID NO: 26866 - protein, 9 aa, Artificial Sequence
  Description of Artificial Sequence: Synthetic peptide
SYAAFLHHG

SEQ ID NO: 26867 - protein, 9 aa, Artificial Sequence
  Description of Artificial Sequence: Synthetic peptide
LQFLTVVHL

SEQ ID NO: 26868 - protein, 9 aa, Artificial Sequence
  Description of Artificial Sequence: Synthetic peptide
GVSRLPYHA

SEQ ID NO: 26869 - protein, 9 aa, Artificial Sequence
  Description of Artificial Sequence: Synthetic peptide
AHFFEIPHS

SEQ ID NO: 26870 - protein, 9 aa, Artificial Sequence
  Description of Artificial Sequence: Synthetic peptide
AILVEFPHG

SEQ ID NO: 26871 - protein, 9 aa, Artificial Sequence
  Description of Artificial Sequence: Synthetic peptide
AWTPSHGHP

SEQ ID NO: 26872 - protein, 9 aa, Artificial Sequence
  Description of Artificial Sequence: Synthetic peptide
DGCKMFNHC

SEQ ID NO: 26873 - protein, 9 aa, Artificial Sequence
  Description of Artificial Sequence: Synthetic peptide
DGYIYHTHL

SEQ ID NO: 26874 - protein, 9 aa, Artificial Sequence
  Description of Artificial Sequence: Synthetic peptide
DIGNQDRHS

SEQ ID NO: 26875 - protein, 9 aa, Artificial Sequence
  Description of Artificial Sequence: Synthetic peptide
EDMPAVDHN

SEQ ID NO: 26876 - protein, 9 aa, Artificial Sequence
  Description of Artificial Sequence: Synthetic peptide
EFDQYMTHC

SEQ ID NO: 26877 - protein, 9 aa, Artificial Sequence
  Description of Artificial Sequence: Synthetic peptide
ERVPRYVHH

SEQ ID NO: 26878 - protein, 9 aa, Artificial Sequence
  Description of Artificial Sequence: Synthetic peptide
ESVMQANHT

SEQ ID NO: 26879 - protein, 9 aa, Artificial Sequence
  Description of Artificial Sequence: Synthetic peptide
EVCIYCSHV

SEQ ID NO: 26880 - protein, 9 aa, Artificial Sequence
  Description of Artificial Sequence: Synthetic peptide
GEDEAWQHT

SEQ ID NO: 26881 - protein, 9 aa, Artificial Sequence
  Description of Artificial Sequence: Synthetic peptide
GIVVADRHV

SEQ ID NO: 26882 - protein, 9 aa, Artificial Sequence
  Description of Artificial Sequence: Synthetic peptide
GSLPWKNHV

SEQ ID NO: 26883 - protein, 9 aa, Artificial Sequence
  Description of Artificial Sequence: Synthetic peptide
HIADKSTHR

SEQ ID NO: 26884 - protein, 9 aa, Artificial Sequence
  Description of Artificial Sequence: Synthetic peptide
HILYAWWHS

SEQ ID NO: 26885 - protein, 9 aa, Artificial Sequence
  Description of Artificial Sequence: Synthetic peptide
HSPFFMNHA

SEQ ID NO: 26886 - protein, 9 aa, Artificial Sequence
  Description of Artificial Sequence: Synthetic peptide
HTYPLDHHF

SEQ ID NO: 26887 - protein, 9 aa, Artificial Sequence
  Description of Artificial Sequence: Synthetic peptide
IYSDNQYHH

SEQ ID NO: 26888 - protein, 9 aa, Artificial Sequence
  Description of Artificial Sequence: Synthetic peptide
KIVECVSHI

SEQ ID NO: 26889 - protein, 9 aa, Artificial Sequence
  Description of Artificial Sequence: Synthetic peptide
KSMWSERHC

SEQ ID NO: 26890 - protein, 9 aa, Artificial Sequence
  Description of Artificial Sequence: Synthetic peptide
KWWWAYTHK

SEQ ID NO: 26891 - protein, 9 aa, Artificial Sequence
  Description of Artificial Sequence: Synthetic peptide
LIAMRIVHD

SEQ ID NO: 26892 - protein, 9 aa, Artificial Sequence
  Description of Artificial Sequence: Synthetic peptide
LYCSPPNHC

SEQ ID NO: 26893 - protein, 9 aa, Artificial Sequence
  Description of Artificial Sequence: Synthetic peptide
MEKRCGVHQ

SEQ ID NO: 26894 - protein, 9 aa, Artificial Sequence
  Description of Artificial Sequence: Synthetic peptide
MIACDKVHY

SEQ ID NO: 26895 - protein, 9 aa, Artificial Sequence
  Description of Artificial Sequence: Synthetic peptide
MMAKHTNHE

SEQ ID NO: 26896 - protein, 9 aa, Artificial Sequence
  Description of Artificial Sequence: Synthetic peptide
NCVQWKYHQ

SEQ ID NO: 26897 - protein, 9 aa, Artificial Sequence
  Description of Artificial Sequence: Synthetic peptide
NGCCLMTHL

SEQ ID NO: 26898 - protein, 9 aa, Artificial Sequence
  Description of Artificial Sequence: Synthetic peptide
NYICTRKHP

SEQ ID NO: 26899 - protein, 9 aa, Artificial Sequence
  Description of Artificial Sequence: Synthetic peptide
NYQNKLLHG

SEQ ID NO: 26900 - protein, 9 aa, Artificial Sequence
  Description of Artificial Sequence: Synthetic peptide
QHMIREAHG

SEQ ID NO: 26901 - protein, 9 aa, Artificial Sequence
  Description of Artificial Sequence: Synthetic peptide
QLSMLGVHF

SEQ ID NO: 26902 - protein, 9 aa, Artificial Sequence
  Description of Artificial Sequence: Synthetic peptide
SCNMCVSHE

SEQ ID NO: 26903 - protein, 9 aa, Artificial Sequence
  Description of Artificial Sequence: Synthetic peptide
SHKFMHYHW

SEQ ID NO: 26904 - protein, 9 aa, Artificial Sequence
  Description of Artificial Sequence: Synthetic peptide
SHLNNITHQ

SEQ ID NO: 26905 - protein, 9 aa, Artificial Sequence
  Description of Artificial Sequence: Synthetic peptide
SRNGSKRHA

SEQ ID NO: 26906 - protein, 9 aa, Artificial Sequence
  Description of Artificial Sequence: Synthetic peptide
STKPWPEHN

SEQ ID NO: 26907 - protein, 9 aa, Artificial Sequence
  Description of Artificial Sequence: Synthetic peptide
SWFECFHHE

SEQ ID NO: 26908 - protein, 9 aa, Artificial Sequence
  Description of Artificial Sequence: Synthetic peptide
TIMMGVEHM

SEQ ID NO: 26909 - protein, 9 aa, Artificial Sequence
  Description of Artificial Sequence: Synthetic peptide
VMFYTVHHE

SEQ ID NO: 26910 - protein, 9 aa, Artificial Sequence
  Description of Artificial Sequence: Synthetic peptide
YSMEEHFHN

SEQ ID NO: 26911 - protein, 9 aa, Artificial Sequence
  Description of Artificial Sequence: Synthetic peptide
YYVFMQLHA

SEQ ID NO: 26912 - protein, 9 aa, Artificial Sequence
  Description of Artificial Sequence: Synthetic peptide
HWELIRCHD

SEQ ID NO: 26913 - protein, 9 aa, Artificial Sequence
  Description of Artificial Sequence: Synthetic peptide
YEICKHGHF

SEQ ID NO: 26914 - protein, 9 aa, Artificial Sequence
  Description of Artificial Sequence: Synthetic peptide
TCNVSWEHE

SEQ ID NO: 26915 - protein, 9 aa, Artificial Sequence
  Description of Artificial Sequence: Synthetic peptide
HGNSFLVHW

SEQ ID NO: 26916 - protein, 9 aa, Artificial Sequence
  Description of Artificial Sequence: Synthetic peptide
YITCQYSHH

SEQ ID NO: 26917 - protein, 9 aa, Artificial Sequence
  Description of Artificial Sequence: Synthetic peptide
QVVIDPAHY

SEQ ID NO: 26918 - protein, 9 aa, Artificial Sequence
  Description of Artificial Sequence: Synthetic peptide
RVWSLEWHL

SEQ ID NO: 26919 - protein, 9 aa, Artificial Sequence
  Description of Artificial Sequence: Synthetic peptide
KYSPFQEHN

SEQ ID NO: 26920 - protein, 9 aa, Artificial Sequence
  Description of Artificial Sequence: Synthetic peptide
YPQPCSCHS

SEQ ID NO: 26921 - protein, 9 aa, Artificial Sequence
  Description of Artificial Sequence: Synthetic peptide
QVWSDGQHV

SEQ ID NO: 26922 - protein, 9 aa, Artificial Sequence
  Description of Artificial Sequence: Synthetic peptide
SVTYHEWHP

SEQ ID NO: 26923 - protein, 9 aa, Artificial Sequence
  Description of Artificial Sequence: Synthetic peptide
TCNVSWKHE

SEQ ID NO: 26924 - protein, 9 aa, Artificial Sequence
  Description of Artificial Sequence: Synthetic peptide
MLFDFEEHN

SEQ ID NO: 26925 - protein, 9 aa, Artificial Sequence
  Description of Artificial Sequence: Synthetic peptide
QTMCITIHP

SEQ ID NO: 26926 - protein, 9 aa, Artificial Sequence
  Description of Artificial Sequence: Synthetic peptide
KTEKWASHE

SEQ ID NO: 26927 - protein, 9 aa, Artificial Sequence
  Description of Artificial Sequence: Synthetic peptide
FCKCFMKHC

SEQ ID NO: 26928 - protein, 9 aa, Artificial Sequence
  Description of Artificial Sequence: Synthetic peptide
QMSWGKYHQ

SEQ ID NO: 26929 - protein, 9 aa, Artificial Sequence
  Description of Artificial Sequence: Synthetic peptide
KYINFDHHQ

SEQ ID NO: 26930 - protein, 9 aa, Artificial Sequence
  Description of Artificial Sequence: Synthetic peptide
MKGYFVHHS

SEQ ID NO: 26931 - protein, 9 aa, Artificial Sequence
  Description of Artificial Sequence: Synthetic peptide
NKPAMMQHE

SEQ ID NO: 26932 - protein, 9 aa, Artificial Sequence
  Description of Artificial Sequence: Synthetic peptide
ITTDATGHF

SEQ ID NO: 26933 - protein, 9 aa, Artificial Sequence
  Description of Artificial Sequence: Synthetic peptide
RDQKGLGHM

SEQ ID NO: 26934 - protein, 9 aa, Artificial Sequence
  Description of Artificial Sequence: Synthetic peptide
MYLSFPVHE

SEQ ID NO: 26935 - protein, 9 aa, Artificial Sequence
  Description of Artificial Sequence: Synthetic peptide
DVKYATLHD

SEQ ID NO: 26936 - protein, 9 aa, Artificial Sequence
  Description of Artificial Sequence: Synthetic peptide
MYAGWLNHG

SEQ ID NO: 26937 - protein, 9 aa, Artificial Sequence
  Description of Artificial Sequence: Synthetic peptide
AVIHEKPHG

SEQ ID NO: 26938 - protein, 9 aa, Artificial Sequence
  Description of Artificial Sequence: Synthetic peptide
GTIRMPEHR

SEQ ID NO: 26939 - protein, 9 aa, Artificial Sequence
  Description of Artificial Sequence: Synthetic peptide
QKHMILCHF

SEQ ID NO: 26940 - protein, 9 aa, Artificial Sequence
  Description of Artificial Sequence: Synthetic peptide
QEAGYTRHN

SEQ ID NO: 26941 - protein, 9 aa, Artificial Sequence
  Description of Artificial Sequence: Synthetic peptide
AKEHMPHHM

SEQ ID NO: 26942 - protein, 9 aa, Artificial Sequence
  Description of Artificial Sequence: Synthetic peptide
TKQFFTAHC

SEQ ID NO: 26943 - protein, 9 aa, Artificial Sequence
  Description of Artificial Sequence: Synthetic peptide
AFGLTTGHT

SEQ ID NO: 26944 - protein, 9 aa, Artificial Sequence
  Description of Artificial Sequence: Synthetic peptide
YLESKTIHA

SEQ ID NO: 26945 - protein, 9 aa, Artificial Sequence
  Description of Artificial Sequence: Synthetic peptide
TRDPFWHHD

SEQ ID NO: 26946 - protein, 9 aa, Artificial Sequence
  Description of Artificial Sequence: Synthetic peptide
GVWMQGFHP

SEQ ID NO: 26947 - protein, 9 aa, Artificial Sequence
  Description of Artificial Sequence: Synthetic peptide
AVQMQQQHI

SEQ ID NO: 26948 - protein, 9 aa, Artificial Sequence
  Description of Artificial Sequence: Synthetic peptide
VKAWWHDHQ

SEQ ID NO: 26949 - protein, 9 aa, Artificial Sequence
  Description of Artificial Sequence: Synthetic peptide
GIHQLIHHC

SEQ ID NO: 26950 - protein, 9 aa, Artificial Sequence
  Description of Artificial Sequence: Synthetic peptide
TRQWMCVHC

SEQ ID NO: 26951 - protein, 9 aa, Artificial Sequence
  Description of Artificial Sequence: Synthetic peptide
ILANPIRQI

SEQ ID NO: 26952 - protein, 9 aa, Artificial Sequence
  Description of Artificial Sequence: Synthetic peptide
KHNPSRHDI

SEQ ID NO: 26953 - protein, 9 aa, Artificial Sequence
  Description of Artificial Sequence: Synthetic peptide
NFYLSGFLI

SEQ ID NO: 26954 - protein, 9 aa, Artificial Sequence
  Description of Artificial Sequence: Synthetic peptide
KQCSLAPTI

SEQ ID NO: 26955 - protein, 9 aa, Artificial Sequence
  Description of Artificial Sequence: Synthetic peptide
GFHNTKLPI

SEQ ID NO: 26956 - protein, 9 aa, Artificial Sequence
  Description of Artificial Sequence: Synthetic peptide
TILQQMEEI

SEQ ID NO: 26957 - protein, 9 aa, Artificial Sequence
  Description of Artificial Sequence: Synthetic peptide
ACNPFWHSI

SEQ ID NO: 26958 - protein, 9 aa, Artificial Sequence
  Description of Artificial Sequence: Synthetic peptide
AFTETKCSI

SEQ ID NO: 26959 - protein, 9 aa, Artificial Sequence
  Description of Artificial Sequence: Synthetic peptide
AGSHFGRRI

SEQ ID NO: 26960 - protein, 9 aa, Artificial Sequence
  Description of Artificial Sequence: Synthetic peptide
EVTRTQVQI

SEQ ID NO: 26961 - protein, 9 aa, Artificial Sequence
  Description of Artificial Sequence: Synthetic peptide
FYLCNYGAI

SEQ ID NO: 26962 - protein, 9 aa, Artificial Sequence
  Description of Artificial Sequence: Synthetic peptide
LEAKWQCSI

SEQ ID NO: 26963 - protein, 9 aa, Artificial Sequence
  Description of Artificial Sequence: Synthetic peptide
LWMWQLSCI

SEQ ID NO: 26964 - protein, 9 aa, Artificial Sequence
  Description of Artificial Sequence: Synthetic peptide
MKDRMHQVI

SEQ ID NO: 26965 - protein, 9 aa, Artificial Sequence
  Description of Artificial Sequence: Synthetic peptide
NVAQPDFQI

SEQ ID NO: 26966 - protein, 9 aa, Artificial Sequence
  Description of Artificial Sequence: Synthetic peptide
QITSGCHCI

SEQ ID NO: 26967 - protein, 9 aa, Artificial Sequence
  Description of Artificial Sequence: Synthetic peptide
VTCPIQRTI

SEQ ID NO: 26968 - protein, 9 aa, Artificial Sequence
  Description of Artificial Sequence: Synthetic peptide
VTHKLVDAI

SEQ ID NO: 26969 - protein, 9 aa, Artificial Sequence
  Description of Artificial Sequence: Synthetic peptide
YPHKKCRCI

SEQ ID NO: 26970 - protein, 9 aa, Artificial Sequence
  Description of Artificial Sequence: Synthetic peptide
YSLEKRFQI

SEQ ID NO: 26971 - protein, 9 aa, Artificial Sequence
  Description of Artificial Sequence: Synthetic peptide
EPLYSWVGI

SEQ ID NO: 26972 - protein, 9 aa, Artificial Sequence
  Description of Artificial Sequence: Synthetic peptide
ASIATMDRI

SEQ ID NO: 26973 - protein, 9 aa, Artificial Sequence
  Description of Artificial Sequence: Synthetic peptide
TCGHTRFFI

SEQ ID NO: 26974 - protein, 9 aa, Artificial Sequence
  Description of Artificial Sequence: Synthetic peptide
EHKGCMQAI

SEQ ID NO: 26975 - protein, 9 aa, Artificial Sequence
  Description of Artificial Sequence: Synthetic peptide
VNDDYECGI

SEQ ID NO: 26976 - protein, 9 aa, Artificial Sequence
  Description of Artificial Sequence: Synthetic peptide
NMPSLRTRI

SEQ ID NO: 26977 - protein, 9 aa, Artificial Sequence
  Description of Artificial Sequence: Synthetic peptide
FKIEWSQDI

SEQ ID NO: 26978 - protein, 9 aa, Artificial Sequence
  Description of Artificial Sequence: Synthetic peptide
EFVLGCQGI

SEQ ID NO: 26979 - protein, 9 aa, Artificial Sequence
  Description of Artificial Sequence: Synthetic peptide
WDAYYTNGI

SEQ ID NO: 26980 - protein, 9 aa, Artificial Sequence
  Description of Artificial Sequence: Synthetic peptide
QSMVACYTI

SEQ ID NO: 26981 - protein, 9 aa, Artificial Sequence
  Description of Artificial Sequence: Synthetic peptide
ATNKYANAI

SEQ ID NO: 26982 - protein, 9 aa, Artificial Sequence
  Description of Artificial Sequence: Synthetic peptide
WHFLMIFYI

SEQ ID NO: 26983 - protein, 9 aa, Artificial Sequence
  Description of Artificial Sequence: Synthetic peptide
QQEAYILRI

SEQ ID NO: 26984 - protein, 9 aa, Artificial Sequence
  Description of Artificial Sequence: Synthetic peptide
GGALARSSI

SEQ ID NO: 26985 - protein, 9 aa, Artificial Sequence
  Description of Artificial Sequence: Synthetic peptide
EFDWLLGTI

SEQ ID NO: 26986 - protein, 9 aa, Artificial Sequence
  Description of Artificial Sequence: Synthetic peptide
RRTDHGEPI

SEQ ID NO: 26987 - protein, 9 aa, Artificial Sequence
  Description of Artificial Sequence: Synthetic peptide
WPNIKHQPI

SEQ ID NO: 26988 - protein, 9 aa, Artificial Sequence
  Description of Artificial Sequence: Synthetic peptide
HQCQSRSYI

SEQ ID NO: 26989 - protein, 9 aa, Artificial Sequence
  Description of Artificial Sequence: Synthetic peptide
EICMRSGFI

SEQ ID NO: 26990 - protein, 9 aa, Artificial Sequence
  Description of Artificial Sequence: Synthetic peptide
IECSPRESI

SEQ ID NO: 26991 - protein, 9 aa, Artificial Sequence
  Description of Artificial Sequence: Synthetic peptide
AAYLYNVPM

SEQ ID NO: 26992 - protein, 9 aa, Artificial Sequence
  Description of Artificial Sequence: Synthetic peptide
AIRIAMCDW

SEQ ID NO: 26993 - protein, 9 aa, Artificial Sequence
  Description of Artificial Sequence: Synthetic peptide
AIRTAMCDW

SEQ ID NO: 26994 - protein, 9 aa, Artificial Sequence
  Description of Artificial Sequence: Synthetic peptide
AIRTTMCHW

SEQ ID NO: 26995 - protein, 9 aa, Artificial Sequence
  Description of Artificial Sequence: Synthetic peptide
ANGCAIEYH

SEQ ID NO: 26996 - protein, 9 aa, Artificial Sequence
  Description of Artificial Sequence: Synthetic peptide
ANGCTIENH

SEQ ID NO: 26997 - protein, 9 aa, Artificial Sequence
  Description of Artificial Sequence: Synthetic peptide
ANGGAIENH

SEQ ID NO: 26998 - protein, 9 aa, Artificial Sequence
  Description of Artificial Sequence: Synthetic peptide
ANGGAIENN

SEQ ID NO: 26999 - protein, 9 aa, Artificial Sequence
  Description of Artificial Sequence: Synthetic peptide
ARYRMRYHG

SEQ ID NO: 27000 - protein, 9 aa, Artificial Sequence
  Description of Artificial Sequence: Synthetic peptide
ASGCAIENH

SEQ ID NO: 27001 - protein, 9 aa, Artificial Sequence
  Description of Artificial Sequence: Synthetic peptide
ATFGWMNWF

SEQ ID NO: 27002 - protein, 9 aa, Artificial Sequence
  Description of Artificial Sequence: Synthetic peptide
ATSRQAVWA

SEQ ID NO: 27003 - protein, 9 aa, Artificial Sequence
  Description of Artificial Sequence: Synthetic peptide
ATYLYNIPM

SEQ ID NO: 27004 - protein, 9 aa, Artificial Sequence
  Description of Artificial Sequence: Synthetic peptide
AVLLWCEVQ

SEQ ID NO: 27005 - protein, 9 aa, Artificial Sequence
  Description of Artificial Sequence: Synthetic peptide
AYPRNAKYI

SEQ ID NO: 27006 - protein, 9 aa, Artificial Sequence
  Description of Artificial Sequence: Synthetic peptide
AYSRNAKYT

SEQ ID NO: 27007 - protein, 9 aa, Artificial Sequence
  Description of Artificial Sequence: Synthetic peptide
CADWPCMSL

SEQ ID NO: 27008 - protein, 9 aa, Artificial Sequence
  Description of Artificial Sequence: Synthetic peptide
CAGWACMSL

SEQ ID NO: 27009 - protein, 9 aa, Artificial Sequence
  Description of Artificial Sequence: Synthetic peptide
CAKFNNAIH

SEQ ID NO: 27010 - protein, 9 aa, Artificial Sequence
  Description of Artificial Sequence: Synthetic peptide
CAKFTNAIY

SEQ ID NO: 27011 - protein, 9 aa, Artificial Sequence
  Description of Artificial Sequence: Synthetic peptide
CAKFTNTIH

SEQ ID NO: 27012 - protein, 9 aa, Artificial Sequence
  Description of Artificial Sequence: Synthetic peptide
CAKFTTAIH

SEQ ID NO: 27013 - protein, 9 aa, Artificial Sequence
  Description of Artificial Sequence: Synthetic peptide
CANWACMSL

SEQ ID NO: 27014 - protein, 9 aa, Artificial Sequence
  Description of Artificial Sequence: Synthetic peptide
CCCEALMPK

SEQ ID NO: 27015 - protein, 9 aa, Artificial Sequence
  Description of Artificial Sequence: Synthetic peptide
CCCEALMSQ

SEQ ID NO: 27016 - protein, 9 aa, Artificial Sequence
  Description of Artificial Sequence: Synthetic peptide
CCCEAMMPQ

SEQ ID NO: 27017 - protein, 9 aa, Artificial Sequence
  Description of Artificial Sequence: Synthetic peptide
CCCEAVMPQ

SEQ ID NO: 27018 - protein, 9 aa, Artificial Sequence
  Description of Artificial Sequence: Synthetic peptide
CCCEVLMPQ

SEQ ID NO: 27019 - protein, 9 aa, Artificial Sequence
  Description of Artificial Sequence: Synthetic peptide
CCCPDATNN

SEQ ID NO: 27020 - protein, 9 aa, Artificial Sequence
  Description of Artificial Sequence: Synthetic peptide
CCCSDATNN

SEQ ID NO: 27021 - protein, 9 aa, Artificial Sequence
  Description of Artificial Sequence: Synthetic peptide
CCGQVEFGW

SEQ ID NO: 27022 - protein, 9 aa, Artificial Sequence
  Description of Artificial Sequence: Synthetic peptide
CCSGALMPQ

SEQ ID NO: 27023 - protein, 9 aa, Artificial Sequence
  Description of Artificial Sequence: Synthetic peptide
CDGQVEFGW

SEQ ID NO: 27024 - protein, 9 aa, Artificial Sequence
  Description of Artificial Sequence: Synthetic peptide
CEDPLCQSS

SEQ ID NO: 27025 - protein, 9 aa, Artificial Sequence
  Description of Artificial Sequence: Synthetic peptide
CEDWACMSL

SEQ ID NO: 27026 - protein, 9 aa, Artificial Sequence
  Description of Artificial Sequence: Synthetic peptide
CEHPLCQSS

SEQ ID NO: 27027 - protein, 9 aa, Artificial Sequence
  Description of Artificial Sequence: Synthetic peptide
CEIPLCQSS

SEQ ID NO: 27028 - protein, 9 aa, Artificial Sequence
  Description of Artificial Sequence: Synthetic peptide
CENPLCKSS

SEQ ID NO: 27029 - protein, 9 aa, Artificial Sequence
  Description of Artificial Sequence: Synthetic peptide
CENPLCPSS

SEQ ID NO: 27030 - protein, 9 aa, Artificial Sequence
  Description of Artificial Sequence: Synthetic peptide
CENPLCQSN

SEQ ID NO: 27031 - protein, 9 aa, Artificial Sequence
  Description of Artificial Sequence: Synthetic peptide
CENPLGQSS

SEQ ID NO: 27032 - protein, 9 aa, Artificial Sequence
  Description of Artificial Sequence: Synthetic peptide
CENPLRQSS

SEQ ID NO: 27033 - protein, 9 aa, Artificial Sequence
  Description of Artificial Sequence: Synthetic peptide
CENPLWQSS

SEQ ID NO: 27034 - protein, 9 aa, Artificial Sequence
  Description of Artificial Sequence: Synthetic peptide
CENPQCQSS

SEQ ID NO: 27035 - protein, 9 aa, Artificial Sequence
  Description of Artificial Sequence: Synthetic peptide
CENSLCQSS

SEQ ID NO: 27036 - protein, 9 aa, Artificial Sequence
  Description of Artificial Sequence: Synthetic peptide
CETPLCQSS

SEQ ID NO: 27037 - protein, 9 aa, Artificial Sequence
  Description of Artificial Sequence: Synthetic peptide
CEVNEEYDW

SEQ ID NO: 27038 - protein, 9 aa, Artificial Sequence
  Description of Artificial Sequence: Synthetic peptide
CFAEPITDC

SEQ ID NO: 27039 - protein, 9 aa, Artificial Sequence
  Description of Artificial Sequence: Synthetic peptide
CFGAEGYAG

SEQ ID NO: 27040 - protein, 9 aa, Artificial Sequence
  Description of Artificial Sequence: Synthetic peptide
CFNEPITDC

SEQ ID NO: 27041 - protein, 9 aa, Artificial Sequence
  Description of Artificial Sequence: Synthetic peptide
CFTAPITDC

SEQ ID NO: 27042 - protein, 9 aa, Artificial Sequence
  Description of Artificial Sequence: Synthetic peptide
CFTEPIADC

SEQ ID NO: 27043 - protein, 9 aa, Artificial Sequence
  Description of Artificial Sequence: Synthetic peptide
CFTEPINDC

SEQ ID NO: 27044 - protein, 9 aa, Artificial Sequence
  Description of Artificial Sequence: Synthetic peptide
CFTEPITDR

SEQ ID NO: 27045 - protein, 9 aa, Artificial Sequence
  Description of Artificial Sequence: Synthetic peptide
CFTEPITNC

SEQ ID NO: 27046 - protein, 9 aa, Artificial Sequence
  Description of Artificial Sequence: Synthetic peptide
CFTESITDC

SEQ ID NO: 27047 - protein, 9 aa, Artificial Sequence
  Description of Artificial Sequence: Synthetic peptide
CFTETITDC

SEQ ID NO: 27048 - protein, 9 aa, Artificial Sequence
  Description of Artificial Sequence: Synthetic peptide
CGGKVEFGW

SEQ ID NO: 27049 - protein, 9 aa, Artificial Sequence
  Description of Artificial Sequence: Synthetic peptide
CGGQAEFGW

SEQ ID NO: 27050 - protein, 9 aa, Artificial Sequence
  Description of Artificial Sequence: Synthetic peptide
CGGQFEFGW

SEQ ID NO: 27051 - protein, 9 aa, Artificial Sequence
  Description of Artificial Sequence: Synthetic peptide
CGGQIEFGW

SEQ ID NO: 27052 - protein, 9 aa, Artificial Sequence
  Description of Artificial Sequence: Synthetic peptide
CGGQIEVGW

SEQ ID NO: 27053 - protein, 9 aa, Artificial Sequence
  Description of Artificial Sequence: Synthetic peptide
CGGQVEAGW

SEQ ID NO: 27054 - protein, 9 aa, Artificial Sequence
  Description of Artificial Sequence: Synthetic peptide
CGGQVECGW

SEQ ID NO: 27055 - protein, 9 aa, Artificial Sequence
  Description of Artificial Sequence: Synthetic peptide
CGGQVEFDW

SEQ ID NO: 27056 - protein, 9 aa, Artificial Sequence
  Description of Artificial Sequence: Synthetic peptide
CGGQVEFSL

SEQ ID NO: 27057 - protein, 9 aa, Artificial Sequence
  Description of Artificial Sequence: Synthetic peptide
CGGQVEFSW

SEQ ID NO: 27058 - protein, 9 aa, Artificial Sequence
  Description of Artificial Sequence: Synthetic peptide
CGGQVEFVW

SEQ ID NO: 27059 - protein, 9 aa, Artificial Sequence
  Description of Artificial Sequence: Synthetic peptide
CGGQVEIGW

SEQ ID NO: 27060 - protein, 9 aa, Artificial Sequence
  Description of Artificial Sequence: Synthetic peptide
CGGQVKFGW

SEQ ID NO: 27061 - protein, 9 aa, Artificial Sequence
  Description of Artificial Sequence: Synthetic peptide
CGGQVQFGW

SEQ ID NO: 27062 - protein, 9 aa, Artificial Sequence
  Description of Artificial Sequence: Synthetic peptide
CGKFTNAIH

SEQ ID NO: 27063 - protein, 9 aa, Artificial Sequence
  Description of Artificial Sequence: Synthetic peptide
CGVQVEFGW

SEQ ID NO: 27064 - protein, 9 aa, Artificial Sequence
  Description of Artificial Sequence: Synthetic peptide
CHPQHHYSH

SEQ ID NO: 27065 - protein, 9 aa, Artificial Sequence
  Description of Artificial Sequence: Synthetic peptide
CHPQHRHSH

SEQ ID NO: 27066 - protein, 9 aa, Artificial Sequence
  Description of Artificial Sequence: Synthetic peptide
CHPQLHHSH

SEQ ID NO: 27067 - protein, 9 aa, Artificial Sequence
  Description of Artificial Sequence: Synthetic peptide
CKDTRKMRE

SEQ ID NO: 27068 - protein, 9 aa, Artificial Sequence
  Description of Artificial Sequence: Synthetic peptide
CKEHRKMRE

SEQ ID NO: 27069 - protein, 9 aa, Artificial Sequence
  Description of Artificial Sequence: Synthetic peptide
CKEPGKMRE

SEQ ID NO: 27070 - protein, 9 aa, Artificial Sequence
  Description of Artificial Sequence: Synthetic peptide
CKEPRKMRA

SEQ ID NO: 27071 - protein, 9 aa, Artificial Sequence
  Description of Artificial Sequence: Synthetic peptide
CKEPRKMRK

SEQ ID NO: 27072 - protein, 9 aa, Artificial Sequence
  Description of Artificial Sequence: Synthetic peptide
CKEPRQMRE

SEQ ID NO: 27073 - protein, 9 aa, Artificial Sequence
  Description of Artificial Sequence: Synthetic peptide
CKEPRRMRE

SEQ ID NO: 27074 - protein, 9 aa, Artificial Sequence
  Description of Artificial Sequence: Synthetic peptide
CKETRKMRE

SEQ ID NO: 27075 - protein, 9 aa, Artificial Sequence
  Description of Artificial Sequence: Synthetic peptide
CKKPRKMRE

SEQ ID NO: 27076 - protein, 9 aa, Artificial Sequence
  Description of Artificial Sequence: Synthetic peptide
CKVNEEYDW

SEQ ID NO: 27077 - protein, 9 aa, Artificial Sequence
  Description of Artificial Sequence: Synthetic peptide
CQIRFDRHH

SEQ ID NO: 27078 - protein, 9 aa, Artificial Sequence
  Description of Artificial Sequence: Synthetic peptide
CQNPLCQSS

SEQ ID NO: 27079 - protein, 9 aa, Artificial Sequence
  Description of Artificial Sequence: Synthetic peptide
CQVNAEYDW

SEQ ID NO: 27080 - protein, 9 aa, Artificial Sequence
  Description of Artificial Sequence: Synthetic peptide
CQVNEAYDW

SEQ ID NO: 27081 - protein, 9 aa, Artificial Sequence
  Description of Artificial Sequence: Synthetic peptide
CQVNEEDDW

SEQ ID NO: 27082 - protein, 9 aa, Artificial Sequence
  Description of Artificial Sequence: Synthetic peptide
CQVNEEFDW

SEQ ID NO: 27083 - protein, 9 aa, Artificial Sequence
  Description of Artificial Sequence: Synthetic peptide
CQVNEEYNW

SEQ ID NO: 27084 - protein, 9 aa, Artificial Sequence
  Description of Artificial Sequence: Synthetic peptide
CRCKDAWNM

SEQ ID NO: 27085 - protein, 9 aa, Artificial Sequence
  Description of Artificial Sequence: Synthetic peptide
CRCNAAWNM

SEQ ID NO: 27086 - protein, 9 aa, Artificial Sequence
  Description of Artificial Sequence: Synthetic peptide
CRCNDAGNM

SEQ ID NO: 27087 - protein, 9 aa, Artificial Sequence
  Description of Artificial Sequence: Synthetic peptide
CRCNDAWHR

SEQ ID NO: 27088 - protein, 9 aa, Artificial Sequence
  Description of Artificial Sequence: Synthetic peptide
CRCNDAWNK

SEQ ID NO: 27089 - protein, 9 aa, Artificial Sequence
  Description of Artificial Sequence: Synthetic peptide
CRCNDAWNR

SEQ ID NO: 27090 - protein, 9 aa, Artificial Sequence
  Description of Artificial Sequence: Synthetic peptide
CRCNDAWNV

SEQ ID NO: 27091 - protein, 9 aa, Artificial Sequence
  Description of Artificial Sequence: Synthetic peptide
CRCNDAWTM

SEQ ID NO: 27092 - protein, 9 aa, Artificial Sequence
  Description of Artificial Sequence: Synthetic peptide
CRCNDEWNM

SEQ ID NO: 27093 - protein, 9 aa, Artificial Sequence
  Description of Artificial Sequence: Synthetic peptide
CRCNEAWNM

SEQ ID NO: 27094 - protein, 9 aa, Artificial Sequence
  Description of Artificial Sequence: Synthetic peptide
CRCNGAWNM

SEQ ID NO: 27095 - protein, 9 aa, Artificial Sequence
  Description of Artificial Sequence: Synthetic peptide
CRCSDAWNM

SEQ ID NO: 27096 - protein, 9 aa, Artificial Sequence
  Description of Artificial Sequence: Synthetic peptide
CRFNDAWNM

SEQ ID NO: 27097 - protein, 9 aa, Artificial Sequence
  Description of Artificial Sequence: Synthetic peptide
CRGQVEFGW

SEQ ID NO: 27098 - protein, 9 aa, Artificial Sequence
  Description of Artificial Sequence: Synthetic peptide
CRVNEEYDW

SEQ ID NO: 27099 - protein, 9 aa, Artificial Sequence
  Description of Artificial Sequence: Synthetic peptide
CSSCNHRVF

SEQ ID NO: 27100 - protein, 9 aa, Artificial Sequence
  Description of Artificial Sequence: Synthetic peptide
CVFGWNNYQ

SEQ ID NO: 27101 - protein, 9 aa, Artificial Sequence
  Description of Artificial Sequence: Synthetic peptide
CVGQVEFDW

SEQ ID NO: 27102 - protein, 9 aa, Artificial Sequence
  Description of Artificial Sequence: Synthetic peptide
CVGQVEFGW

SEQ ID NO: 27103 - protein, 9 aa, Artificial Sequence
  Description of Artificial Sequence: Synthetic peptide
CVKFTNAIH

SEQ ID NO: 27104 - protein, 9 aa, Artificial Sequence
  Description of Artificial Sequence: Synthetic peptide
CVWSVGTEW

SEQ ID NO: 27105 - protein, 9 aa, Artificial Sequence
  Description of Artificial Sequence: Synthetic peptide
CWAADSKPC

SEQ ID NO: 27106 - protein, 9 aa, Artificial Sequence
  Description of Artificial Sequence: Synthetic peptide
CYPQHHHSH

SEQ ID NO: 27107 - protein, 9 aa, Artificial Sequence
  Description of Artificial Sequence: Synthetic peptide
DDLDAWQTS

SEQ ID NO: 27108 - protein, 9 aa, Artificial Sequence
  Description of Artificial Sequence: Synthetic peptide
DDLDLWQTS

SEQ ID NO: 27109 - protein, 9 aa, Artificial Sequence
  Description of Artificial Sequence: Synthetic peptide
DDLDVGQTS

SEQ ID NO: 27110 - protein, 9 aa, Artificial Sequence
  Description of Artificial Sequence: Synthetic peptide
DDLDVWETS

SEQ ID NO: 27111 - protein, 9 aa, Artificial Sequence
  Description of Artificial Sequence: Synthetic peptide
DDLDVWKTS

SEQ ID NO: 27112 - protein, 9 aa, Artificial Sequence
  Description of Artificial Sequence: Synthetic peptide
DDLDVWRTS

SEQ ID NO: 27113 - protein, 9 aa, Artificial Sequence
  Description of Artificial Sequence: Synthetic peptide
DDMDVWQTS

SEQ ID NO: 27114 - protein, 9 aa, Artificial Sequence
  Description of Artificial Sequence: Synthetic peptide
DDQDVWQTS

SEQ ID NO: 27115 - protein, 9 aa, Artificial Sequence
  Description of Artificial Sequence: Synthetic peptide
DDRDVWQTS

SEQ ID NO: 27116 - protein, 9 aa, Artificial Sequence
  Description of Artificial Sequence: Synthetic peptide
DFEMWDWVG

SEQ ID NO: 27117 - protein, 9 aa, Artificial Sequence
  Description of Artificial Sequence: Synthetic peptide
DFEVWDWFG

SEQ ID NO: 27118 - protein, 9 aa, Artificial Sequence
  Description of Artificial Sequence: Synthetic peptide
DFNHIGWWQ

SEQ ID NO: 27119 - protein, 9 aa, Artificial Sequence
  Description of Artificial Sequence: Synthetic peptide
DFSHIAWWQ

SEQ ID NO: 27120 - protein, 9 aa, Artificial Sequence
  Description of Artificial Sequence: Synthetic peptide
DFTHIAWWQ

SEQ ID NO: 27121 - protein, 9 aa, Artificial Sequence
  Description of Artificial Sequence: Synthetic peptide
DFYFSGFLI

SEQ ID NO: 27122 - protein, 9 aa, Artificial Sequence
  Description of Artificial Sequence: Synthetic peptide
DFYISGFLI

SEQ ID NO: 27123 - protein, 9 aa, Artificial Sequence
  Description of Artificial Sequence: Synthetic peptide
DFYLSGFLI

SEQ ID NO: 27124 - protein, 9 aa, Artificial Sequence
  Description of Artificial Sequence: Synthetic peptide
DPADKPSNS

SEQ ID NO: 27125 - protein, 9 aa, Artificial Sequence
  Description of Artificial Sequence: Synthetic peptide
DPQDKPSNS

SEQ ID NO: 27126 - protein, 9 aa, Artificial Sequence
  Description of Artificial Sequence: Synthetic peptide
DRIMISIQP

SEQ ID NO: 27127 - protein, 9 aa, Artificial Sequence
  Description of Artificial Sequence: Synthetic peptide
DRVMISIQQ

SEQ ID NO: 27128 - protein, 9 aa, Artificial Sequence
  Description of Artificial Sequence: Synthetic peptide
DRVMVSIQP

SEQ ID NO: 27129 - protein, 9 aa, Artificial Sequence
  Description of Artificial Sequence: Synthetic peptide
DVMMPALKV

SEQ ID NO: 27130 - protein, 9 aa, Artificial Sequence
  Description of Artificial Sequence: Synthetic peptide
DVMMRGLKV

SEQ ID NO: 27131 - protein, 9 aa, Artificial Sequence
  Description of Artificial Sequence: Synthetic peptide
DVMMSGLKV

SEQ ID NO: 27132 - protein, 9 aa, Artificial Sequence
  Description of Artificial Sequence: Synthetic peptide
DWRMVCVHC

SEQ ID NO: 27133 - protein, 9 aa, Artificial Sequence
  Description of Artificial Sequence: Synthetic peptide
EACLYNIPM

SEQ ID NO: 27134 - protein, 9 aa, Artificial Sequence
  Description of Artificial Sequence: Synthetic peptide
EAYFYNIPM

SEQ ID NO: 27135 - protein, 9 aa, Artificial Sequence
  Description of Artificial Sequence: Synthetic peptide
EAYLCNIPM

SEQ ID NO: 27136 - protein, 9 aa, Artificial Sequence
  Description of Artificial Sequence: Synthetic peptide
EAYLYHIPM

SEQ ID NO: 27137 - protein, 9 aa, Artificial Sequence
  Description of Artificial Sequence: Synthetic peptide
EAYLYMIPM

SEQ ID NO: 27138 - protein, 9 aa, Artificial Sequence
  Description of Artificial Sequence: Synthetic peptide
EAYLYNFPM

SEQ ID NO: 27139 - protein, 9 aa, Artificial Sequence
  Description of Artificial Sequence: Synthetic peptide
EAYLYNIRM

SEQ ID NO: 27140 - protein, 9 aa, Artificial Sequence
  Description of Artificial Sequence: Synthetic peptide
EAYLYNISM

SEQ ID NO: 27141 - protein, 9 aa, Artificial Sequence
  Description of Artificial Sequence: Synthetic peptide
EAYLYNVPM

SEQ ID NO: 27142 - protein, 9 aa, Artificial Sequence
  Description of Artificial Sequence: Synthetic peptide
EAYLYSIPM

SEQ ID NO: 27143 - protein, 9 aa, Artificial Sequence
  Description of Artificial Sequence: Synthetic peptide
EAYMYNIPM

SEQ ID NO: 27144 - protein, 9 aa, Artificial Sequence
  Description of Artificial Sequence: Synthetic peptide
EEYLYNIPM

SEQ ID NO: 27145 - protein, 9 aa, Artificial Sequence
  Description of Artificial Sequence: Synthetic peptide
EFKRMTCNR

SEQ ID NO: 27146 - protein, 9 aa, Artificial Sequence
  Description of Artificial Sequence: Synthetic peptide
EGSRKWFAC

SEQ ID NO: 27147 - protein, 9 aa, Artificial Sequence
  Description of Artificial Sequence: Synthetic peptide
EGYLYNIPM

SEQ ID NO: 27148 - protein, 9 aa, Artificial Sequence
  Description of Artificial Sequence: Synthetic peptide
EIGIMRHGH

SEQ ID NO: 27149 - protein, 9 aa, Artificial Sequence
  Description of Artificial Sequence: Synthetic peptide
EIILDDEQR

SEQ ID NO: 27150 - protein, 9 aa, Artificial Sequence
  Description of Artificial Sequence: Synthetic peptide
EIILDDQKR

SEQ ID NO: 27151 - protein, 9 aa, Artificial Sequence
  Description of Artificial Sequence: Synthetic peptide
EIIVDDQQR

SEQ ID NO: 27152 - protein, 9 aa, Artificial Sequence
  Description of Artificial Sequence: Synthetic peptide
EIIVDEQQR

SEQ ID NO: 27153 - protein, 9 aa, Artificial Sequence
  Description of Artificial Sequence: Synthetic peptide
EIMLDDQQR

SEQ ID NO: 27154 - protein, 9 aa, Artificial Sequence
  Description of Artificial Sequence: Synthetic peptide
EIVLDDQQR

SEQ ID NO: 27155 - protein, 9 aa, Artificial Sequence
  Description of Artificial Sequence: Synthetic peptide
EKMIDTCLQ

SEQ ID NO: 27156 - protein, 9 aa, Artificial Sequence
  Description of Artificial Sequence: Synthetic peptide
EKMRHTCLQ

SEQ ID NO: 27157 - protein, 9 aa, Artificial Sequence
  Description of Artificial Sequence: Synthetic peptide
EKMTHPCLQ

SEQ ID NO: 27158 - protein, 9 aa, Artificial Sequence
  Description of Artificial Sequence: Synthetic peptide
EKMTHTCLE

SEQ ID NO: 27159 - protein, 9 aa, Artificial Sequence
  Description of Artificial Sequence: Synthetic peptide
EKMTHTCLK

SEQ ID NO: 27160 - protein, 9 aa, Artificial Sequence
  Description of Artificial Sequence: Synthetic peptide
EKMTHTCLR

SEQ ID NO: 27161 - protein, 9 aa, Artificial Sequence
  Description of Artificial Sequence: Synthetic peptide
EKMTHTCVQ

SEQ ID NO: 27162 - protein, 9 aa, Artificial Sequence
  Description of Artificial Sequence: Synthetic peptide
EKMTHTCVR

SEQ ID NO: 27163 - protein, 9 aa, Artificial Sequence
  Description of Artificial Sequence: Synthetic peptide
EKMTHTWLQ

SEQ ID NO: 27164 - protein, 9 aa, Artificial Sequence
  Description of Artificial Sequence: Synthetic peptide
EPYLYNIPM

SEQ ID NO: 27165 - protein, 9 aa, Artificial Sequence
  Description of Artificial Sequence: Synthetic peptide
EQMTHTCLP

SEQ ID NO: 27166 - protein, 9 aa, Artificial Sequence
  Description of Artificial Sequence: Synthetic peptide
EQMTHTCLQ

SEQ ID NO: 27167 - protein, 9 aa, Artificial Sequence
  Description of Artificial Sequence: Synthetic peptide
ERMTHTCLR

SEQ ID NO: 27168 - protein, 9 aa, Artificial Sequence
  Description of Artificial Sequence: Synthetic peptide
ESHVRPLNM

SEQ ID NO: 27169 - protein, 9 aa, Artificial Sequence
  Description of Artificial Sequence: Synthetic peptide
ETMKHKKRE

SEQ ID NO: 27170 - protein, 9 aa, Artificial Sequence
  Description of Artificial Sequence: Synthetic peptide
ETMQYKKRE

SEQ ID NO: 27171 - protein, 9 aa, Artificial Sequence
  Description of Artificial Sequence: Synthetic peptide
EWTRRMAAP

SEQ ID NO: 27172 - protein, 9 aa, Artificial Sequence
  Description of Artificial Sequence: Synthetic peptide
EWTRRMEAS

SEQ ID NO: 27173 - protein, 9 aa, Artificial Sequence
  Description of Artificial Sequence: Synthetic peptide
EWTRRMEAT

SEQ ID NO: 27174 - protein, 9 aa, Artificial Sequence
  Description of Artificial Sequence: Synthetic peptide
EWTRRMEDP

SEQ ID NO: 27175 - protein, 9 aa, Artificial Sequence
  Description of Artificial Sequence: Synthetic peptide
FAAANQNHM

SEQ ID NO: 27176 - protein, 9 aa, Artificial Sequence
  Description of Artificial Sequence: Synthetic peptide
FAPIVKRHH

SEQ ID NO: 27177 - protein, 9 aa, Artificial Sequence
  Description of Artificial Sequence: Synthetic peptide
FDLSFCYHQ

SEQ ID NO: 27178 - protein, 9 aa, Artificial Sequence
  Description of Artificial Sequence: Synthetic peptide
FEKNSSQMR

SEQ ID NO: 27179 - protein, 9 aa, Artificial Sequence
  Description of Artificial Sequence: Synthetic peptide
FGGQVELGW

SEQ ID NO: 27180 - protein, 9 aa, Artificial Sequence
  Description of Artificial Sequence: Synthetic peptide
FHPYFPTYK

SEQ ID NO: 27181 - protein, 9 aa, Artificial Sequence
  Description of Artificial Sequence: Synthetic peptide
FHVRFDRHH

SEQ ID NO: 27182 - protein, 9 aa, Artificial Sequence
  Description of Artificial Sequence: Synthetic peptide
FIAANQNHM

SEQ ID NO: 27183 - protein, 9 aa, Artificial Sequence
  Description of Artificial Sequence: Synthetic peptide
FKEPRKMRE

SEQ ID NO: 27184 - protein, 9 aa, Artificial Sequence
  Description of Artificial Sequence: Synthetic peptide
FKIRFDRHH

SEQ ID NO: 27185 - protein, 9 aa, Artificial Sequence
  Description of Artificial Sequence: Synthetic peptide
FKMDCGSCG

SEQ ID NO: 27186 - protein, 9 aa, Artificial Sequence
  Description of Artificial Sequence: Synthetic peptide
FKMDCHGCG

SEQ ID NO: 27187 - protein, 9 aa, Artificial Sequence
  Description of Artificial Sequence: Synthetic peptide
FKMDCHSCC

SEQ ID NO: 27188 - protein, 9 aa, Artificial Sequence
  Description of Artificial Sequence: Synthetic peptide
FKMDCHSFG

SEQ ID NO: 27189 - protein, 9 aa, Artificial Sequence
  Description of Artificial Sequence: Synthetic peptide
FKMDCHSGG

SEQ ID NO: 27190 - protein, 9 aa, Artificial Sequence
  Description of Artificial Sequence: Synthetic peptide
FKMDCHTCG

SEQ ID NO: 27191 - protein, 9 aa, Artificial Sequence
  Description of Artificial Sequence: Synthetic peptide
FKMDGHSCG

SEQ ID NO: 27192 - protein, 9 aa, Artificial Sequence
  Description of Artificial Sequence: Synthetic peptide
FKMDWHSCG

SEQ ID NO: 27193 - protein, 9 aa, Artificial Sequence
  Description of Artificial Sequence: Synthetic peptide
FKMGCHSCG

SEQ ID NO: 27194 - protein, 9 aa, Artificial Sequence
  Description of Artificial Sequence: Synthetic peptide
FKMVCHSCG

SEQ ID NO: 27195 - protein, 9 aa, Artificial Sequence
  Description of Artificial Sequence: Synthetic peptide
FKRDCHSCG

SEQ ID NO: 27196 - protein, 9 aa, Artificial Sequence
  Description of Artificial Sequence: Synthetic peptide
FKRICLEAG

SEQ ID NO: 27197 - protein, 9 aa, Artificial Sequence
  Description of Artificial Sequence: Synthetic peptide
FKRICWEAA

SEQ ID NO: 27198 - protein, 9 aa, Artificial Sequence
  Description of Artificial Sequence: Synthetic peptide
FKRICWEGG

SEQ ID NO: 27199 - protein, 9 aa, Artificial Sequence
  Description of Artificial Sequence: Synthetic peptide
FKRICWEPG

SEQ ID NO: 27200 - protein, 9 aa, Artificial Sequence
  Description of Artificial Sequence: Synthetic peptide
FKRICWEVG

SEQ ID NO: 27201 - protein, 9 aa, Artificial Sequence
  Description of Artificial Sequence: Synthetic peptide
FKRICWGAG

SEQ ID NO: 27202 - protein, 9 aa, Artificial Sequence
  Description of Artificial Sequence: Synthetic peptide
FKRICWQAG

SEQ ID NO: 27203 - protein, 9 aa, Artificial Sequence
  Description of Artificial Sequence: Synthetic peptide
FKRMCWEAG

SEQ ID NO: 27204 - protein, 9 aa, Artificial Sequence
  Description of Artificial Sequence: Synthetic peptide
FKRTCWEAG

SEQ ID NO: 27205 - protein, 9 aa, Artificial Sequence
  Description of Artificial Sequence: Synthetic peptide
FKRVCWEAG

SEQ ID NO: 27206 - protein, 9 aa, Artificial Sequence
  Description of Artificial Sequence: Synthetic peptide
FKVDCHSCG

SEQ ID NO: 27207 - protein, 9 aa, Artificial Sequence
  Description of Artificial Sequence: Synthetic peptide
FKVNRDDSW

SEQ ID NO: 27208 - protein, 9 aa, Artificial Sequence
  Description of Artificial Sequence: Synthetic peptide
FKVRFDRHH

SEQ ID NO: 27209 - protein, 9 aa, Artificial Sequence
  Description of Artificial Sequence: Synthetic peptide
FLIRFDRHH

SEQ ID NO: 27210 - protein, 9 aa, Artificial Sequence
  Description of Artificial Sequence: Synthetic peptide
FNAGPLAYN

SEQ ID NO: 27211 - protein, 9 aa, Artificial Sequence
  Description of Artificial Sequence: Synthetic peptide
FNLPFCYHQ

SEQ ID NO: 27212 - protein, 9 aa, Artificial Sequence
  Description of Artificial Sequence: Synthetic peptide
FNLSFCYHL

SEQ ID NO: 27213 - protein, 9 aa, Artificial Sequence
  Description of Artificial Sequence: Synthetic peptide
FNLSICYHQ

SEQ ID NO: 27214 - protein, 9 aa, Artificial Sequence
  Description of Artificial Sequence: Synthetic peptide
FPGVMEAEI

SEQ ID NO: 27215 - protein, 9 aa, Artificial Sequence
  Description of Artificial Sequence: Synthetic peptide
FPGVMQGEI

SEQ ID NO: 27216 - protein, 9 aa, Artificial Sequence
  Description of Artificial Sequence: Synthetic peptide
FPHIVKRHH

SEQ ID NO: 27217 - protein, 9 aa, Artificial Sequence
  Description of Artificial Sequence: Synthetic peptide
FPIRFDRHH

SEQ ID NO: 27218 - protein, 9 aa, Artificial Sequence
  Description of Artificial Sequence: Synthetic peptide
FPIRFDRHL

SEQ ID NO: 27219 - protein, 9 aa, Artificial Sequence
  Description of Artificial Sequence: Synthetic peptide
FPIRFDRHR

SEQ ID NO: 27220 - protein, 9 aa, Artificial Sequence
  Description of Artificial Sequence: Synthetic peptide
FPIRFDRPH

SEQ ID NO: 27221 - protein, 9 aa, Artificial Sequence
  Description of Artificial Sequence: Synthetic peptide
FPPIVKQHH

SEQ ID NO: 27222 - protein, 9 aa, Artificial Sequence
  Description of Artificial Sequence: Synthetic peptide
FPPIVKRHY

SEQ ID NO: 27223 - protein, 9 aa, Artificial Sequence
  Description of Artificial Sequence: Synthetic peptide
FPPTVKRHH

SEQ ID NO: 27224 - protein, 9 aa, Artificial Sequence
  Description of Artificial Sequence: Synthetic peptide
FQIGFDRHH

SEQ ID NO: 27225 - protein, 9 aa, Artificial Sequence
  Description of Artificial Sequence: Synthetic peptide
FQIKFDRHH

SEQ ID NO: 27226 - protein, 9 aa, Artificial Sequence
  Description of Artificial Sequence: Synthetic peptide
FQILFDRHH

SEQ ID NO: 27227 - protein, 9 aa, Artificial Sequence
  Description of Artificial Sequence: Synthetic peptide
FQIPFDRHH

SEQ ID NO: 27228 - protein, 9 aa, Artificial Sequence
  Description of Artificial Sequence: Synthetic peptide
FQIQFDRHH

SEQ ID NO: 27229 - protein, 9 aa, Artificial Sequence
  Description of Artificial Sequence: Synthetic peptide
FQIQIDRHH

SEQ ID NO: 27230 - protein, 9 aa, Artificial Sequence
  Description of Artificial Sequence: Synthetic peptide
FQIRFARHH

SEQ ID NO: 27231 - protein, 9 aa, Artificial Sequence
  Description of Artificial Sequence: Synthetic peptide
FQIRFDGHH

SEQ ID NO: 27232 - protein, 9 aa, Artificial Sequence
  Description of Artificial Sequence: Synthetic peptide
FQIRFDRDH

SEQ ID NO: 27233 - protein, 9 aa, Artificial Sequence
  Description of Artificial Sequence: Synthetic peptide
FQIRFDRHC

SEQ ID NO: 27234 - protein, 9 aa, Artificial Sequence
  Description of Artificial Sequence: Synthetic peptide
FQIRFDRHD

SEQ ID NO: 27235 - protein, 9 aa, Artificial Sequence
  Description of Artificial Sequence: Synthetic peptide
FQIRFDRHR

SEQ ID NO: 27236 - protein, 9 aa, Artificial Sequence
  Description of Artificial Sequence: Synthetic peptide
FQIRFDRNR

SEQ ID NO: 27237 - protein, 9 aa, Artificial Sequence
  Description of Artificial Sequence: Synthetic peptide
FQIRFDRPH

SEQ ID NO: 27238 - protein, 9 aa, Artificial Sequence
  Description of Artificial Sequence: Synthetic peptide
FQIRFDRRQ

SEQ ID NO: 27239 - protein, 9 aa, Artificial Sequence
  Description of Artificial Sequence: Synthetic peptide
FQIRFDRYH

SEQ ID NO: 27240 - protein, 9 aa, Artificial Sequence
  Description of Artificial Sequence: Synthetic peptide
FQIRFGLHH

SEQ ID NO: 27241 - protein, 9 aa, Artificial Sequence
  Description of Artificial Sequence: Synthetic peptide
FQIRFHRHH

SEQ ID NO: 27242 - protein, 9 aa, Artificial Sequence
  Description of Artificial Sequence: Synthetic peptide
FQIRFNRHH

SEQ ID NO: 27243 - protein, 9 aa, Artificial Sequence
  Description of Artificial Sequence: Synthetic peptide
FQIRFYRHH

SEQ ID NO: 27244 - protein, 9 aa, Artificial Sequence
  Description of Artificial Sequence: Synthetic peptide
FQLRFDRHH

SEQ ID NO: 27245 - protein, 9 aa, Artificial Sequence
  Description of Artificial Sequence: Synthetic peptide
FQMRFDRHQ

SEQ ID NO: 27246 - protein, 9 aa, Artificial Sequence
  Description of Artificial Sequence: Synthetic peptide
FQSRFDRHH

SEQ ID NO: 27247 - protein, 9 aa, Artificial Sequence
  Description of Artificial Sequence: Synthetic peptide
FQSRFDRHR

SEQ ID NO: 27248 - protein, 9 aa, Artificial Sequence
  Description of Artificial Sequence: Synthetic peptide
FQTRFDRHH

SEQ ID NO: 27249 - protein, 9 aa, Artificial Sequence
  Description of Artificial Sequence: Synthetic peptide
FQVRFDRHH

SEQ ID NO: 27250 - protein, 9 aa, Artificial Sequence
  Description of Artificial Sequence: Synthetic peptide
FRIRFDRHH

SEQ ID NO: 27251 - protein, 9 aa, Artificial Sequence
  Description of Artificial Sequence: Synthetic peptide
FRIRFDRHY

SEQ ID NO: 27252 - protein, 9 aa, Artificial Sequence
  Description of Artificial Sequence: Synthetic peptide
FSAGALAYN

SEQ ID NO: 27253 - protein, 9 aa, Artificial Sequence
  Description of Artificial Sequence: Synthetic peptide
FSAGGLAYN

SEQ ID NO: 27254 - protein, 9 aa, Artificial Sequence
  Description of Artificial Sequence: Synthetic peptide
FSAGPLAYC

SEQ ID NO: 27255 - protein, 9 aa, Artificial Sequence
  Description of Artificial Sequence: Synthetic peptide
FSAGPLAYY

SEQ ID NO: 27256 - protein, 9 aa, Artificial Sequence
  Description of Artificial Sequence: Synthetic peptide
FSAGPLDYN

SEQ ID NO: 27257 - protein, 9 aa, Artificial Sequence
  Description of Artificial Sequence: Synthetic peptide
FSAGPLSYI

SEQ ID NO: 27258 - protein, 9 aa, Artificial Sequence
  Description of Artificial Sequence: Synthetic peptide
FSAGPLVYN

SEQ ID NO: 27259 - protein, 9 aa, Artificial Sequence
  Description of Artificial Sequence: Synthetic peptide
FSAGPMDYN

SEQ ID NO: 27260 - protein, 9 aa, Artificial Sequence
  Description of Artificial Sequence: Synthetic peptide
FSAGSLAYN

SEQ ID NO: 27261 - protein, 9 aa, Artificial Sequence
  Description of Artificial Sequence: Synthetic peptide
FSAGTLAYS

SEQ ID NO: 27262 - protein, 9 aa, Artificial Sequence
  Description of Artificial Sequence: Synthetic peptide
FSDGPLAYN

SEQ ID NO: 27263 - protein, 9 aa, Artificial Sequence
  Description of Artificial Sequence: Synthetic peptide
FSIRFDRHH

SEQ ID NO: 27264 - protein, 9 aa, Artificial Sequence
  Description of Artificial Sequence: Synthetic peptide
FSPGPLAYN

SEQ ID NO: 27265 - protein, 9 aa, Artificial Sequence
  Description of Artificial Sequence: Synthetic peptide
FSTGPLSYN

SEQ ID NO: 27266 - protein, 9 aa, Artificial Sequence
  Description of Artificial Sequence: Synthetic peptide
FSVGPLAYN

SEQ ID NO: 27267 - protein, 9 aa, Artificial Sequence
  Description of Artificial Sequence: Synthetic peptide
FTPIVKRHH

SEQ ID NO: 27268 - protein, 9 aa, Artificial Sequence
  Description of Artificial Sequence: Synthetic peptide
FTPQKDNSC

SEQ ID NO: 27269 - protein, 9 aa, Artificial Sequence
  Description of Artificial Sequence: Synthetic peptide
FTPQKDTSC

SEQ ID NO: 27270 - protein, 9 aa, Artificial Sequence
  Description of Artificial Sequence: Synthetic peptide
FTQEKDTSC

SEQ ID NO: 27271 - protein, 9 aa, Artificial Sequence
  Description of Artificial Sequence: Synthetic peptide
FTQQKDASC

SEQ ID NO: 27272 - protein, 9 aa, Artificial Sequence
  Description of Artificial Sequence: Synthetic peptide
FVAANQNNM

SEQ ID NO: 27273 - protein, 9 aa, Artificial Sequence
  Description of Artificial Sequence: Synthetic peptide
GAHNELVGY

SEQ ID NO: 27274 - protein, 9 aa, Artificial Sequence
  Description of Artificial Sequence: Synthetic peptide
GASRQAVWA

SEQ ID NO: 27275 - protein, 9 aa, Artificial Sequence
  Description of Artificial Sequence: Synthetic peptide
GAYLYNIPM

SEQ ID NO: 27276 - protein, 9 aa, Artificial Sequence
  Description of Artificial Sequence: Synthetic peptide
GAYLYNLPM

SEQ ID NO: 27277 - protein, 9 aa, Artificial Sequence
  Description of Artificial Sequence: Synthetic peptide
GCCSDATNN

SEQ ID NO: 27278 - protein, 9 aa, Artificial Sequence
  Description of Artificial Sequence: Synthetic peptide
GEVVVCILR

SEQ ID NO: 27279 - protein, 9 aa, Artificial Sequence
  Description of Artificial Sequence: Synthetic peptide
GFAADSKPC

SEQ ID NO: 27280 - protein, 9 aa, Artificial Sequence
  Description of Artificial Sequence: Synthetic peptide
GFNHIAWWQ

SEQ ID NO: 27281 - protein, 9 aa, Artificial Sequence
  Description of Artificial Sequence: Synthetic peptide
GFTGMSDQD

SEQ ID NO: 27282 - protein, 9 aa, Artificial Sequence
  Description of Artificial Sequence: Synthetic peptide
GFYLTREKK

SEQ ID NO: 27283 - protein, 9 aa, Artificial Sequence
  Description of Artificial Sequence: Synthetic peptide
GGGQVEIGW

SEQ ID NO: 27284 - protein, 9 aa, Artificial Sequence
  Description of Artificial Sequence: Synthetic peptide
GIANDDDRE

SEQ ID NO: 27285 - protein, 9 aa, Artificial Sequence
  Description of Artificial Sequence: Synthetic peptide
GIANDDDWA

SEQ ID NO: 27286 - protein, 9 aa, Artificial Sequence
  Description of Artificial Sequence: Synthetic peptide
GIANDDDWE

SEQ ID NO: 27287 - protein, 9 aa, Artificial Sequence
  Description of Artificial Sequence: Synthetic peptide
GIANLDDWE

SEQ ID NO: 27288 - protein, 9 aa, Artificial Sequence
  Description of Artificial Sequence: Synthetic peptide
GIANVADWA

SEQ ID NO: 27289 - protein, 9 aa, Artificial Sequence
  Description of Artificial Sequence: Synthetic peptide
GIANVADWE

SEQ ID NO: 27290 - protein, 9 aa, Artificial Sequence
  Description of Artificial Sequence: Synthetic peptide
GIANVDAWV

SEQ ID NO: 27291 - protein, 9 aa, Artificial Sequence
  Description of Artificial Sequence: Synthetic peptide
GIANVDDLE

SEQ ID NO: 27292 - protein, 9 aa, Artificial Sequence
  Description of Artificial Sequence: Synthetic peptide
GIANVDDWK

SEQ ID NO: 27293 - protein, 9 aa, Artificial Sequence
  Description of Artificial Sequence: Synthetic peptide
GIANVDDWR

SEQ ID NO: 27294 - protein, 9 aa, Artificial Sequence
  Description of Artificial Sequence: Synthetic peptide
GIANVDDWT

SEQ ID NO: 27295 - protein, 9 aa, Artificial Sequence
  Description of Artificial Sequence: Synthetic peptide
GIANVDEWK

SEQ ID NO: 27296 - protein, 9 aa, Artificial Sequence
  Description of Artificial Sequence: Synthetic peptide
GIANVDHWE

SEQ ID NO: 27297 - protein, 9 aa, Artificial Sequence
  Description of Artificial Sequence: Synthetic peptide
GIANVDNWE

SEQ ID NO: 27298 - protein, 9 aa, Artificial Sequence
  Description of Artificial Sequence: Synthetic peptide
GIANVDYWE

SEQ ID NO: 27299 - protein, 9 aa, Artificial Sequence
  Description of Artificial Sequence: Synthetic peptide
GIANVEAWE

SEQ ID NO: 27300 - protein, 9 aa, Artificial Sequence
  Description of Artificial Sequence: Synthetic peptide
GIANVGDWG

SEQ ID NO: 27301 - protein, 9 aa, Artificial Sequence
  Description of Artificial Sequence: Synthetic peptide
GIDNFDDWE

SEQ ID NO: 27302 - protein, 9 aa, Artificial Sequence
  Description of Artificial Sequence: Synthetic peptide
GIDNVDDLE

SEQ ID NO: 27303 - protein, 9 aa, Artificial Sequence
  Description of Artificial Sequence: Synthetic peptide
GIDNVDDWG

SEQ ID NO: 27304 - protein, 9 aa, Artificial Sequence
  Description of Artificial Sequence: Synthetic peptide
GIDNVDEWE

SEQ ID NO: 27305 - protein, 9 aa, Artificial Sequence
  Description of Artificial Sequence: Synthetic peptide
GIDNVDGWE

SEQ ID NO: 27306 - protein, 9 aa, Artificial Sequence
  Description of Artificial Sequence: Synthetic peptide
GIDNVDYWE

SEQ ID NO: 27307 - protein, 9 aa, Artificial Sequence
  Description of Artificial Sequence: Synthetic peptide
GIGNVDDWE

SEQ ID NO: 27308 - protein, 9 aa, Artificial Sequence
  Description of Artificial Sequence: Synthetic peptide
GIPNVDGWE

SEQ ID NO: 27309 - protein, 9 aa, Artificial Sequence
  Description of Artificial Sequence: Synthetic peptide
GISNVDDWE

SEQ ID NO: 27310 - protein, 9 aa, Artificial Sequence
  Description of Artificial Sequence: Synthetic peptide
GISNVDDWG

SEQ ID NO: 27311 - protein, 9 aa, Artificial Sequence
  Description of Artificial Sequence: Synthetic peptide
GISRQAVWA

SEQ ID NO: 27312 - protein, 9 aa, Artificial Sequence
  Description of Artificial Sequence: Synthetic peptide
GITNVDDWE

SEQ ID NO: 27313 - protein, 9 aa, Artificial Sequence
  Description of Artificial Sequence: Synthetic peptide
GITNVDGWE

SEQ ID NO: 27314 - protein, 9 aa, Artificial Sequence
  Description of Artificial Sequence: Synthetic peptide
GIVNVDDWE

SEQ ID NO: 27315 - protein, 9 aa, Artificial Sequence
  Description of Artificial Sequence: Synthetic peptide
GIWRSREHY

SEQ ID NO: 27316 - protein, 9 aa, Artificial Sequence
  Description of Artificial Sequence: Synthetic peptide
GIWRTREHH

SEQ ID NO: 27317 - protein, 9 aa, Artificial Sequence
  Description of Artificial Sequence: Synthetic peptide
GKANDDDWE

SEQ ID NO: 27318 - protein, 9 aa, Artificial Sequence
  Description of Artificial Sequence: Synthetic peptide
GKANVDDRE

SEQ ID NO: 27319 - protein, 9 aa, Artificial Sequence
  Description of Artificial Sequence: Synthetic peptide
GLPNVDDWE

SEQ ID NO: 27320 - protein, 9 aa, Artificial Sequence
  Description of Artificial Sequence: Synthetic peptide
GNWRTREHY

SEQ ID NO: 27321 - protein, 9 aa, Artificial Sequence
  Description of Artificial Sequence: Synthetic peptide
GRANVDDCE

SEQ ID NO: 27322 - protein, 9 aa, Artificial Sequence
  Description of Artificial Sequence: Synthetic peptide
GRCNDAWNM

SEQ ID NO: 27323 - protein, 9 aa, Artificial Sequence
  Description of Artificial Sequence: Synthetic peptide
GSHARPLNM

SEQ ID NO: 27324 - protein, 9 aa, Artificial Sequence
  Description of Artificial Sequence: Synthetic peptide
GSHVGPLNM

SEQ ID NO: 27325 - protein, 9 aa, Artificial Sequence
  Description of Artificial Sequence: Synthetic peptide
GSHVGTLNM

SEQ ID NO: 27326 - protein, 9 aa, Artificial Sequence
  Description of Artificial Sequence: Synthetic peptide
GSHVQPLNM

SEQ ID NO: 27327 - protein, 9 aa, Artificial Sequence
  Description of Artificial Sequence: Synthetic peptide
GSHVRPLHM

SEQ ID NO: 27328 - protein, 9 aa, Artificial Sequence
  Description of Artificial Sequence: Synthetic peptide
GSHVRPLSM

SEQ ID NO: 27329 - protein, 9 aa, Artificial Sequence
  Description of Artificial Sequence: Synthetic peptide
GSHVRSLNM

SEQ ID NO: 27330 - protein, 9 aa, Artificial Sequence
  Description of Artificial Sequence: Synthetic peptide
GTANVDDLE

SEQ ID NO: 27331 - protein, 9 aa, Artificial Sequence
  Description of Artificial Sequence: Synthetic peptide
GTHNELVGY

SEQ ID NO: 27332 - protein, 9 aa, Artificial Sequence
  Description of Artificial Sequence: Synthetic peptide
GTSRQALWA

SEQ ID NO: 27333 - protein, 9 aa, Artificial Sequence
  Description of Artificial Sequence: Synthetic peptide
GTSRQAVWS

SEQ ID NO: 27334 - protein, 9 aa, Artificial Sequence
  Description of Artificial Sequence: Synthetic peptide
GTSRRAVWA

SEQ ID NO: 27335 - protein, 9 aa, Artificial Sequence
  Description of Artificial Sequence: Synthetic peptide
GVTDLQNIC

SEQ ID NO: 27336 - protein, 9 aa, Artificial Sequence
  Description of Artificial Sequence: Synthetic peptide
GVVNVDDWE

SEQ ID NO: 27337 - protein, 9 aa, Artificial Sequence
  Description of Artificial Sequence: Synthetic peptide
GVYRSMFQE

SEQ ID NO: 27338 - protein, 9 aa, Artificial Sequence
  Description of Artificial Sequence: Synthetic peptide
GWAADAKPC

SEQ ID NO: 27339 - protein, 9 aa, Artificial Sequence
  Description of Artificial Sequence: Synthetic peptide
GWAADSEHC

SEQ ID NO: 27340 - protein, 9 aa, Artificial Sequence
  Description of Artificial Sequence: Synthetic peptide
GWAADSEPC

SEQ ID NO: 27341 - protein, 9 aa, Artificial Sequence
  Description of Artificial Sequence: Synthetic peptide
GWAADSKAC

SEQ ID NO: 27342 - protein, 9 aa, Artificial Sequence
  Description of Artificial Sequence: Synthetic peptide
GWAADSKHC

SEQ ID NO: 27343 - protein, 9 aa, Artificial Sequence
  Description of Artificial Sequence: Synthetic peptide
GWAADSKLC

SEQ ID NO: 27344 - protein, 9 aa, Artificial Sequence
  Description of Artificial Sequence: Synthetic peptide
GWAADSKRC

SEQ ID NO: 27345 - protein, 9 aa, Artificial Sequence
  Description of Artificial Sequence: Synthetic peptide
GWAADSKSC

SEQ ID NO: 27346 - protein, 9 aa, Artificial Sequence
  Description of Artificial Sequence: Synthetic peptide
GWAADSKTC

SEQ ID NO: 27347 - protein, 9 aa, Artificial Sequence
  Description of Artificial Sequence: Synthetic peptide
GWAADSRPC

SEQ ID NO: 27348 - protein, 9 aa, Artificial Sequence
  Description of Artificial Sequence: Synthetic peptide
GWAADSTPC

SEQ ID NO: 27349 - protein, 9 aa, Artificial Sequence
  Description of Artificial Sequence: Synthetic peptide
GWAADTKPC

SEQ ID NO: 27350 - protein, 9 aa, Artificial Sequence
  Description of Artificial Sequence: Synthetic peptide
GWAAEAKPC

SEQ ID NO: 27351 - protein, 9 aa, Artificial Sequence
  Description of Artificial Sequence: Synthetic peptide
GWAAGSTPC

SEQ ID NO: 27352 - protein, 9 aa, Artificial Sequence
  Description of Artificial Sequence: Synthetic peptide
GWAANSKPC

SEQ ID NO: 27353 - protein, 9 aa, Artificial Sequence
  Description of Artificial Sequence: Synthetic peptide
GWADDSKPC

SEQ ID NO: 27354 - protein, 9 aa, Artificial Sequence
  Description of Artificial Sequence: Synthetic peptide
GWADDSKTC

SEQ ID NO: 27355 - protein, 9 aa, Artificial Sequence
  Description of Artificial Sequence: Synthetic peptide
GWAGDSKPC

SEQ ID NO: 27356 - protein, 9 aa, Artificial Sequence
  Description of Artificial Sequence: Synthetic peptide
GWASDSKPC

SEQ ID NO: 27357 - protein, 9 aa, Artificial Sequence
  Description of Artificial Sequence: Synthetic peptide
GWATDSKPC

SEQ ID NO: 27358 - protein, 9 aa, Artificial Sequence
  Description of Artificial Sequence: Synthetic peptide
GWAVDSKPC

SEQ ID NO: 27359 - protein, 9 aa, Artificial Sequence
  Description of Artificial Sequence: Synthetic peptide
GWAVNSKPC

SEQ ID NO: 27360 - protein, 9 aa, Artificial Sequence
  Description of Artificial Sequence: Synthetic peptide
GWDDDSKPC

SEQ ID NO: 27361 - protein, 9 aa, Artificial Sequence
  Description of Artificial Sequence: Synthetic peptide
GWGVDSKPC

SEQ ID NO: 27362 - protein, 9 aa, Artificial Sequence
  Description of Artificial Sequence: Synthetic peptide
GWHQKCMGD

SEQ ID NO: 27363 - protein, 9 aa, Artificial Sequence
  Description of Artificial Sequence: Synthetic peptide
GWSADSKPC

SEQ ID NO: 27364 - protein, 9 aa, Artificial Sequence
  Description of Artificial Sequence: Synthetic peptide
GWTADSKPC

SEQ ID NO: 27365 - protein, 9 aa, Artificial Sequence
  Description of Artificial Sequence: Synthetic peptide
GWYKKCMGD

SEQ ID NO: 27366 - protein, 9 aa, Artificial Sequence
  Description of Artificial Sequence: Synthetic peptide
GWYQKCMGN

SEQ ID NO: 27367 - protein, 9 aa, Artificial Sequence
  Description of Artificial Sequence: Synthetic peptide
GWYQKCVGD

SEQ ID NO: 27368 - protein, 9 aa, Artificial Sequence
  Description of Artificial Sequence: Synthetic peptide
GWYQKYMGD

SEQ ID NO: 27369 - protein, 9 aa, Artificial Sequence
  Description of Artificial Sequence: Synthetic peptide
HFNINIYNC

SEQ ID NO: 27370 - protein, 9 aa, Artificial Sequence
  Description of Artificial Sequence: Synthetic peptide
HFYVSGFLI

SEQ ID NO: 27371 - protein, 9 aa, Artificial Sequence
  Description of Artificial Sequence: Synthetic peptide
HGSRNWFAC

SEQ ID NO: 27372 - protein, 9 aa, Artificial Sequence
  Description of Artificial Sequence: Synthetic peptide
HLACLKMEM

SEQ ID NO: 27373 - protein, 9 aa, Artificial Sequence
  Description of Artificial Sequence: Synthetic peptide
HLDCLKMQM

SEQ ID NO: 27374 - protein, 9 aa, Artificial Sequence
  Description of Artificial Sequence: Synthetic peptide
HLDCLQMEM

SEQ ID NO: 27375 - protein, 9 aa, Artificial Sequence
  Description of Artificial Sequence: Synthetic peptide
HLDCLRMEM

SEQ ID NO: 27376 - protein, 9 aa, Artificial Sequence
  Description of Artificial Sequence: Synthetic peptide
HLNCLKMEM

SEQ ID NO: 27377 - protein, 9 aa, Artificial Sequence
  Description of Artificial Sequence: Synthetic peptide
HMDCLKMEM

SEQ ID NO: 27378 - protein, 9 aa, Artificial Sequence
  Description of Artificial Sequence: Synthetic peptide
HQDCLKMEM

SEQ ID NO: 27379 - protein, 9 aa, Artificial Sequence
  Description of Artificial Sequence: Synthetic peptide
HWRMACVHC

SEQ ID NO: 27380 - protein, 9 aa, Artificial Sequence
  Description of Artificial Sequence: Synthetic peptide
HWRMGCVHC

SEQ ID NO: 27381 - protein, 9 aa, Artificial Sequence
  Description of Artificial Sequence: Synthetic peptide
HWRMVCVHG

SEQ ID NO: 27382 - protein, 9 aa, Artificial Sequence
  Description of Artificial Sequence: Synthetic peptide
HWRMVCVYC

SEQ ID NO: 27383 - protein, 9 aa, Artificial Sequence
  Description of Artificial Sequence: Synthetic peptide
IRDWQAYWL

SEQ ID NO: 27384 - protein, 9 aa, Artificial Sequence
  Description of Artificial Sequence: Synthetic peptide
IRDWQCYWL

SEQ ID NO: 27385 - protein, 9 aa, Artificial Sequence
  Description of Artificial Sequence: Synthetic peptide
IRDWQGHWL

SEQ ID NO: 27386 - protein, 9 aa, Artificial Sequence
  Description of Artificial Sequence: Synthetic peptide
IWGIYVHYC

SEQ ID NO: 27387 - protein, 9 aa, Artificial Sequence
  Description of Artificial Sequence: Synthetic peptide
IWGIYVLYF

SEQ ID NO: 27388 - protein, 9 aa, Artificial Sequence
  Description of Artificial Sequence: Synthetic peptide
IWGIYVYYF

SEQ ID NO: 27389 - protein, 9 aa, Artificial Sequence
  Description of Artificial Sequence: Synthetic peptide
KAGCFVDVW

SEQ ID NO: 27390 - protein, 9 aa, Artificial Sequence
  Description of Artificial Sequence: Synthetic peptide
KARFHRERS

SEQ ID NO: 27391 - protein, 9 aa, Artificial Sequence
  Description of Artificial Sequence: Synthetic peptide
KDLDVWQTS

SEQ ID NO: 27392 - protein, 9 aa, Artificial Sequence
  Description of Artificial Sequence: Synthetic peptide
KDRQIDQYH

SEQ ID NO: 27393 - protein, 9 aa, Artificial Sequence
  Description of Artificial Sequence: Synthetic peptide
KENNTNRID

SEQ ID NO: 27394 - protein, 9 aa, Artificial Sequence
  Description of Artificial Sequence: Synthetic peptide
KGAENIHWG

SEQ ID NO: 27395 - protein, 9 aa, Artificial Sequence
  Description of Artificial Sequence: Synthetic peptide
KGAPWAYNC

SEQ ID NO: 27396 - protein, 9 aa, Artificial Sequence
  Description of Artificial Sequence: Synthetic peptide
KGDAYIHWG

SEQ ID NO: 27397 - protein, 9 aa, Artificial Sequence
  Description of Artificial Sequence: Synthetic peptide
KGDENIHWC

SEQ ID NO: 27398 - protein, 9 aa, Artificial Sequence
  Description of Artificial Sequence: Synthetic peptide
KGDEYIHWA

SEQ ID NO: 27399 - protein, 9 aa, Artificial Sequence
  Description of Artificial Sequence: Synthetic peptide
KGDEYIHWC

SEQ ID NO: 27400 - protein, 9 aa, Artificial Sequence
  Description of Artificial Sequence: Synthetic peptide
KGDEYIQGG

SEQ ID NO: 27401 - protein, 9 aa, Artificial Sequence
  Description of Artificial Sequence: Synthetic peptide
KGDEYIRWG

SEQ ID NO: 27402 - protein, 9 aa, Artificial Sequence
  Description of Artificial Sequence: Synthetic peptide
KGDEYIYWG

SEQ ID NO: 27403 - protein, 9 aa, Artificial Sequence
  Description of Artificial Sequence: Synthetic peptide
KGDEYVHWG

SEQ ID NO: 27404 - protein, 9 aa, Artificial Sequence
  Description of Artificial Sequence: Synthetic peptide
KGDGYIHWG

SEQ ID NO: 27405 - protein, 9 aa, Artificial Sequence
  Description of Artificial Sequence: Synthetic peptide
KGDVHIHWG

SEQ ID NO: 27406 - protein, 9 aa, Artificial Sequence
  Description of Artificial Sequence: Synthetic peptide
KGDVYIHWG

SEQ ID NO: 27407 - protein, 9 aa, Artificial Sequence
  Description of Artificial Sequence: Synthetic peptide
KGGAYIHWG

SEQ ID NO: 27408 - protein, 9 aa, Artificial Sequence
  Description of Artificial Sequence: Synthetic peptide
KGGCFVDVW

SEQ ID NO: 27409 - protein, 9 aa, Artificial Sequence
  Description of Artificial Sequence: Synthetic peptide
KGGEYIHWC

SEQ ID NO: 27410 - protein, 9 aa, Artificial Sequence
  Description of Artificial Sequence: Synthetic peptide
KGGLWAYNC

SEQ ID NO: 27411 - protein, 9 aa, Artificial Sequence
  Description of Artificial Sequence: Synthetic peptide
KGGPLAYNC

SEQ ID NO: 27412 - protein, 9 aa, Artificial Sequence
  Description of Artificial Sequence: Synthetic peptide
KGGPWAHNC

SEQ ID NO: 27413 - protein, 9 aa, Artificial Sequence
  Description of Artificial Sequence: Synthetic peptide
KGGPWGYNC

SEQ ID NO: 27414 - protein, 9 aa, Artificial Sequence
  Description of Artificial Sequence: Synthetic peptide
KGGQWAYNC

SEQ ID NO: 27415 - protein, 9 aa, Artificial Sequence
  Description of Artificial Sequence: Synthetic peptide
KGGRWAYNC

SEQ ID NO: 27416 - protein, 9 aa, Artificial Sequence
  Description of Artificial Sequence: Synthetic peptide
KGGVYIHWG

SEQ ID NO: 27417 - protein, 9 aa, Artificial Sequence
  Description of Artificial Sequence: Synthetic peptide
KGHEYIHWG

SEQ ID NO: 27418 - protein, 9 aa, Artificial Sequence
  Description of Artificial Sequence: Synthetic peptide
KGNEYIHWG

SEQ ID NO: 27419 - protein, 9 aa, Artificial Sequence
  Description of Artificial Sequence: Synthetic peptide
KGPEYIHWG

SEQ ID NO: 27420 - protein, 9 aa, Artificial Sequence
  Description of Artificial Sequence: Synthetic peptide
KGTEYIHWG

SEQ ID NO: 27421 - protein, 9 aa, Artificial Sequence
  Description of Artificial Sequence: Synthetic peptide
KGVAYIHWG

SEQ ID NO: 27422 - protein, 9 aa, Artificial Sequence
  Description of Artificial Sequence: Synthetic peptide
KPRFHRERS

SEQ ID NO: 27423 - protein, 9 aa, Artificial Sequence
  Description of Artificial Sequence: Synthetic peptide
KSGRGKLTW

SEQ ID NO: 27424 - protein, 9 aa, Artificial Sequence
  Description of Artificial Sequence: Synthetic peptide
KSRLGKLTW

SEQ ID NO: 27425 - protein, 9 aa, Artificial Sequence
  Description of Artificial Sequence: Synthetic peptide
KSRRAKLTW

SEQ ID NO: 27426 - protein, 9 aa, Artificial Sequence
  Description of Artificial Sequence: Synthetic peptide
KSRRGKLAW

SEQ ID NO: 27427 - protein, 9 aa, Artificial Sequence
  Description of Artificial Sequence: Synthetic peptide
KSRRGKLKW

SEQ ID NO: 27428 - protein, 9 aa, Artificial Sequence
  Description of Artificial Sequence: Synthetic peptide
KSRRGKLPL

SEQ ID NO: 27429 - protein, 9 aa, Artificial Sequence
  Description of Artificial Sequence: Synthetic peptide
KSRRGKLPW

SEQ ID NO: 27430 - protein, 9 aa, Artificial Sequence
  Description of Artificial Sequence: Synthetic peptide
KSRRGKLRW

SEQ ID NO: 27431 - protein, 9 aa, Artificial Sequence
  Description of Artificial Sequence: Synthetic peptide
KSRRGKLSW

SEQ ID NO: 27432 - protein, 9 aa, Artificial Sequence
  Description of Artificial Sequence: Synthetic peptide
KSRRGKLTL

SEQ ID NO: 27433 - protein, 9 aa, Artificial Sequence
  Description of Artificial Sequence: Synthetic peptide
KSRRGKMTW

SEQ ID NO: 27434 - protein, 9 aa, Artificial Sequence
  Description of Artificial Sequence: Synthetic peptide
KSRRGKRTW

SEQ ID NO: 27435 - protein, 9 aa, Artificial Sequence
  Description of Artificial Sequence: Synthetic peptide
KSRRGKVTW

SEQ ID NO: 27436 - protein, 9 aa, Artificial Sequence
  Description of Artificial Sequence: Synthetic peptide
KSRRVKLTW

SEQ ID NO: 27437 - protein, 9 aa, Artificial Sequence
  Description of Artificial Sequence: Synthetic peptide
KSWGWVDTA

SEQ ID NO: 27438 - protein, 9 aa, Artificial Sequence
  Description of Artificial Sequence: Synthetic peptide
KTGHFNQRG

SEQ ID NO: 27439 - protein, 9 aa, Artificial Sequence
  Description of Artificial Sequence: Synthetic peptide
KTRFHREPS

SEQ ID NO: 27440 - protein, 9 aa, Artificial Sequence
  Description of Artificial Sequence: Synthetic peptide
KTRFHRERN

SEQ ID NO: 27441 - protein, 9 aa, Artificial Sequence
  Description of Artificial Sequence: Synthetic peptide
KTRFHRERT

SEQ ID NO: 27442 - protein, 9 aa, Artificial Sequence
  Description of Artificial Sequence: Synthetic peptide
KTRRGRLTW

SEQ ID NO: 27443 - protein, 9 aa, Artificial Sequence
  Description of Artificial Sequence: Synthetic peptide
KTWFHRERS

SEQ ID NO: 27444 - protein, 9 aa, Artificial Sequence
  Description of Artificial Sequence: Synthetic peptide
KVGCSVDVW

SEQ ID NO: 27445 - protein, 9 aa, Artificial Sequence
  Description of Artificial Sequence: Synthetic peptide
KVGCVVDVW

SEQ ID NO: 27446 - protein, 9 aa, Artificial Sequence
  Description of Artificial Sequence: Synthetic peptide
LEKNGSQMR

SEQ ID NO: 27447 - protein, 9 aa, Artificial Sequence
  Description of Artificial Sequence: Synthetic peptide
LEKNSAQMR

SEQ ID NO: 27448 - protein, 9 aa, Artificial Sequence
  Description of Artificial Sequence: Synthetic peptide
LEKNSSEMR

SEQ ID NO: 27449 - protein, 9 aa, Artificial Sequence
  Description of Artificial Sequence: Synthetic peptide
LEKNSSKMR

SEQ ID NO: 27450 - protein, 9 aa, Artificial Sequence
  Description of Artificial Sequence: Synthetic peptide
LEKNSSLMR

SEQ ID NO: 27451 - protein, 9 aa, Artificial Sequence
  Description of Artificial Sequence: Synthetic peptide
LEKNSSPMR

SEQ ID NO: 27452 - protein, 9 aa, Artificial Sequence
  Description of Artificial Sequence: Synthetic peptide
LEKNSSQMK

SEQ ID NO: 27453 - protein, 9 aa, Artificial Sequence
  Description of Artificial Sequence: Synthetic peptide
LEKNSSQTR

SEQ ID NO: 27454 - protein, 9 aa, Artificial Sequence
  Description of Artificial Sequence: Synthetic peptide
LEKNSSQVR

SEQ ID NO: 27455 - protein, 9 aa, Artificial Sequence
  Description of Artificial Sequence: Synthetic peptide
LEKNTSQMR

SEQ ID NO: 27456 - protein, 9 aa, Artificial Sequence
  Description of Artificial Sequence: Synthetic peptide
LEQNSSQMR

SEQ ID NO: 27457 - protein, 9 aa, Artificial Sequence
  Description of Artificial Sequence: Synthetic peptide
LERNSSQMR

SEQ ID NO: 27458 - protein, 9 aa, Artificial Sequence
  Description of Artificial Sequence: Synthetic peptide
LLDCLKMEM

SEQ ID NO: 27459 - protein, 9 aa, Artificial Sequence
  Description of Artificial Sequence: Synthetic peptide
LMENHEFQD

SEQ ID NO: 27460 - protein, 9 aa, Artificial Sequence
  Description of Artificial Sequence: Synthetic peptide
LQDNINYSY

SEQ ID NO: 27461 - protein, 9 aa, Artificial Sequence
  Description of Artificial Sequence: Synthetic peptide
LYLPLCHRI

SEQ ID NO: 27462 - protein, 9 aa, Artificial Sequence
  Description of Artificial Sequence: Synthetic peptide
MASIDKQNV

SEQ ID NO: 27463 - protein, 9 aa, Artificial Sequence
  Description of Artificial Sequence: Synthetic peptide
MCTGELDGT

SEQ ID NO: 27464 - protein, 9 aa, Artificial Sequence
  Description of Artificial Sequence: Synthetic peptide
MCTGELSGT

SEQ ID NO: 27465 - protein, 9 aa, Artificial Sequence
  Description of Artificial Sequence: Synthetic peptide
MCTGEWNGT

SEQ ID NO: 27466 - protein, 9 aa, Artificial Sequence
  Description of Artificial Sequence: Synthetic peptide
MCTGKLNGT

SEQ ID NO: 27467 - protein, 9 aa, Artificial Sequence
  Description of Artificial Sequence: Synthetic peptide
MCTRELNGT

SEQ ID NO: 27468 - protein, 9 aa, Artificial Sequence
  Description of Artificial Sequence: Synthetic peptide
MEKNSSQMR

SEQ ID NO: 27469 - protein, 9 aa, Artificial Sequence
  Description of Artificial Sequence: Synthetic peptide
MEMTQEWMA

SEQ ID NO: 27470 - protein, 9 aa, Artificial Sequence
  Description of Artificial Sequence: Synthetic peptide
MEQNLQLTM

SEQ ID NO: 27471 - protein, 9 aa, Artificial Sequence
  Description of Artificial Sequence: Synthetic peptide
MFTGELNGT

SEQ ID NO: 27472 - protein, 9 aa, Artificial Sequence
  Description of Artificial Sequence: Synthetic peptide
MICGTHDNV

SEQ ID NO: 27473 - protein, 9 aa, Artificial Sequence
  Description of Artificial Sequence: Synthetic peptide
MIFGTHDHV

SEQ ID NO: 27474 - protein, 9 aa, Artificial Sequence
  Description of Artificial Sequence: Synthetic peptide
MIFGTHDNF

SEQ ID NO: 27475 - protein, 9 aa, Artificial Sequence
  Description of Artificial Sequence: Synthetic peptide
MIFGTHDNI

SEQ ID NO: 27476 - protein, 9 aa, Artificial Sequence
  Description of Artificial Sequence: Synthetic peptide
MIIGTHDNV

SEQ ID NO: 27477 - protein, 9 aa, Artificial Sequence
  Description of Artificial Sequence: Synthetic peptide
MMVTKEFNI

SEQ ID NO: 27478 - protein, 9 aa, Artificial Sequence
  Description of Artificial Sequence: Synthetic peptide
MMVTKEFNL

SEQ ID NO: 27479 - protein, 9 aa, Artificial Sequence
  Description of Artificial Sequence: Synthetic peptide
MNLCYSSMM

SEQ ID NO: 27480 - protein, 9 aa, Artificial Sequence
  Description of Artificial Sequence: Synthetic peptide
MQIRFDRHH

SEQ ID NO: 27481 - protein, 9 aa, Artificial Sequence
  Description of Artificial Sequence: Synthetic peptide
MQMAQEWMA

SEQ ID NO: 27482 - protein, 9 aa, Artificial Sequence
  Description of Artificial Sequence: Synthetic peptide
MQMMQMCVP

SEQ ID NO: 27483 - protein, 9 aa, Artificial Sequence
  Description of Artificial Sequence: Synthetic peptide
MQMTQEWMG

SEQ ID NO: 27484 - protein, 9 aa, Artificial Sequence
  Description of Artificial Sequence: Synthetic peptide
MQMTQKWMA

SEQ ID NO: 27485 - protein, 9 aa, Artificial Sequence
  Description of Artificial Sequence: Synthetic peptide
MTAYFKALC

SEQ ID NO: 27486 - protein, 9 aa, Artificial Sequence
  Description of Artificial Sequence: Synthetic peptide
MWTGELNGT

SEQ ID NO: 27487 - protein, 9 aa, Artificial Sequence
  Description of Artificial Sequence: Synthetic peptide
NDLDVWQTS

SEQ ID NO: 27488 - protein, 9 aa, Artificial Sequence
  Description of Artificial Sequence: Synthetic peptide
NELLWCEVQ

SEQ ID NO: 27489 - protein, 9 aa, Artificial Sequence
  Description of Artificial Sequence: Synthetic peptide
NEMLWCEVQ

SEQ ID NO: 27490 - protein, 9 aa, Artificial Sequence
  Description of Artificial Sequence: Synthetic peptide
NFCHSGFLI

SEQ ID NO: 27491 - protein, 9 aa, Artificial Sequence
  Description of Artificial Sequence: Synthetic peptide
NFDLSGFLI

SEQ ID NO: 27492 - protein, 9 aa, Artificial Sequence
  Description of Artificial Sequence: Synthetic peptide
NFEMWDWFG

SEQ ID NO: 27493 - protein, 9 aa, Artificial Sequence
  Description of Artificial Sequence: Synthetic peptide
NFHINIYNC

SEQ ID NO: 27494 - protein, 9 aa, Artificial Sequence
  Description of Artificial Sequence: Synthetic peptide
NFHLSGFLI

SEQ ID NO: 27495 - protein, 9 aa, Artificial Sequence
  Description of Artificial Sequence: Synthetic peptide
NFNIHIYNC

SEQ ID NO: 27496 - protein, 9 aa, Artificial Sequence
  Description of Artificial Sequence: Synthetic peptide
NFNINIFNC

SEQ ID NO: 27497 - protein, 9 aa, Artificial Sequence
  Description of Artificial Sequence: Synthetic peptide
NFNINISNC

SEQ ID NO: 27498 - protein, 9 aa, Artificial Sequence
  Description of Artificial Sequence: Synthetic peptide
NFNINTYNC

SEQ ID NO: 27499 - protein, 9 aa, Artificial Sequence
  Description of Artificial Sequence: Synthetic peptide
NFNINVYNC

SEQ ID NO: 27500 - protein, 9 aa, Artificial Sequence
  Description of Artificial Sequence: Synthetic peptide
NFNITIYNC

SEQ ID NO: 27501 - protein, 9 aa, Artificial Sequence
  Description of Artificial Sequence: Synthetic peptide
NFNLSGFLI

SEQ ID NO: 27502 - protein, 9 aa, Artificial Sequence
  Description of Artificial Sequence: Synthetic peptide
NFNMNIYNC

SEQ ID NO: 27503 - protein, 9 aa, Artificial Sequence
  Description of Artificial Sequence: Synthetic peptide
NFSINIYNC

SEQ ID NO: 27504 - protein, 9 aa, Artificial Sequence
  Description of Artificial Sequence: Synthetic peptide
NFSTNIYNC

SEQ ID NO: 27505 - protein, 9 aa, Artificial Sequence
  Description of Artificial Sequence: Synthetic peptide
NFTINIYNC

SEQ ID NO: 27506 - protein, 9 aa, Artificial Sequence
  Description of Artificial Sequence: Synthetic peptide
NFYCSGFLI

SEQ ID NO: 27507 - protein, 9 aa, Artificial Sequence
  Description of Artificial Sequence: Synthetic peptide
NFYFSGFLL

SEQ ID NO: 27508 - protein, 9 aa, Artificial Sequence
  Description of Artificial Sequence: Synthetic peptide
NFYHSGFLI

SEQ ID NO: 27509 - protein, 9 aa, Artificial Sequence
  Description of Artificial Sequence: Synthetic peptide
NFYISGFLI

SEQ ID NO: 27510 - protein, 9 aa, Artificial Sequence
  Description of Artificial Sequence: Synthetic peptide
NFYLGGFLI

SEQ ID NO: 27511 - protein, 9 aa, Artificial Sequence
  Description of Artificial Sequence: Synthetic peptide
NFYLIGFLI

SEQ ID NO: 27512 - protein, 9 aa, Artificial Sequence
  Description of Artificial Sequence: Synthetic peptide
NFYLSGFLM

SEQ ID NO: 27513 - protein, 9 aa, Artificial Sequence
  Description of Artificial Sequence: Synthetic peptide
NFYLSGFVI

SEQ ID NO: 27514 - protein, 9 aa, Artificial Sequence
  Description of Artificial Sequence: Synthetic peptide
NFYLTGFLI

SEQ ID NO: 27515 - protein, 9 aa, Artificial Sequence
  Description of Artificial Sequence: Synthetic peptide
NFYLTGYLI

SEQ ID NO: 27516 - protein, 9 aa, Artificial Sequence
  Description of Artificial Sequence: Synthetic peptide
NFYVSGFLI

SEQ ID NO: 27517 - protein, 9 aa, Artificial Sequence
  Description of Artificial Sequence: Synthetic peptide
NKIDVQWLQ

SEQ ID NO: 27518 - protein, 9 aa, Artificial Sequence
  Description of Artificial Sequence: Synthetic peptide
NMECEKFLT

SEQ ID NO: 27519 - protein, 9 aa, Artificial Sequence
  Description of Artificial Sequence: Synthetic peptide
NMECERFLT

SEQ ID NO: 27520 - protein, 9 aa, Artificial Sequence
  Description of Artificial Sequence: Synthetic peptide
NMECQQFLT

SEQ ID NO: 27521 - protein, 9 aa, Artificial Sequence
  Description of Artificial Sequence: Synthetic peptide
NQIDVQWIQ

SEQ ID NO: 27522 - protein, 9 aa, Artificial Sequence
  Description of Artificial Sequence: Synthetic peptide
NQIDVQWLK

SEQ ID NO: 27523 - protein, 9 aa, Artificial Sequence
  Description of Artificial Sequence: Synthetic peptide
NQLDVQWLQ

SEQ ID NO: 27524 - protein, 9 aa, Artificial Sequence
  Description of Artificial Sequence: Synthetic peptide
NQPCINTYW

SEQ ID NO: 27525 - protein, 9 aa, Artificial Sequence
  Description of Artificial Sequence: Synthetic peptide
NQPCVNTCW

SEQ ID NO: 27526 - protein, 9 aa, Artificial Sequence
  Description of Artificial Sequence: Synthetic peptide
NSRRGRLTW

SEQ ID NO: 27527 - protein, 9 aa, Artificial Sequence
  Description of Artificial Sequence: Synthetic peptide
NVMMPGLKV

SEQ ID NO: 27528 - protein, 9 aa, Artificial Sequence
  Description of Artificial Sequence: Synthetic peptide
PELLWCEVQ

SEQ ID NO: 27529 - protein, 9 aa, Artificial Sequence
  Description of Artificial Sequence: Synthetic peptide
PEVMVCILR

SEQ ID NO: 27530 - protein, 9 aa, Artificial Sequence
  Description of Artificial Sequence: Synthetic peptide
PIFGWMNWF

SEQ ID NO: 27531 - protein, 9 aa, Artificial Sequence
  Description of Artificial Sequence: Synthetic peptide
PKYAWSTSP

SEQ ID NO: 27532 - protein, 9 aa, Artificial Sequence
  Description of Artificial Sequence: Synthetic peptide
PKYHWHMYH

SEQ ID NO: 27533 - protein, 9 aa, Artificial Sequence
  Description of Artificial Sequence: Synthetic peptide
PRLQIRKYL

SEQ ID NO: 27534 - protein, 9 aa, Artificial Sequence
  Description of Artificial Sequence: Synthetic peptide
PSCVTQESI

SEQ ID NO: 27535 - protein, 9 aa, Artificial Sequence
  Description of Artificial Sequence: Synthetic peptide
PSTTVMNVM

SEQ ID NO: 27536 - protein, 9 aa, Artificial Sequence
  Description of Artificial Sequence: Synthetic peptide
PTFGWMDWF

SEQ ID NO: 27537 - protein, 9 aa, Artificial Sequence
  Description of Artificial Sequence: Synthetic peptide
PTFGWMNLF

SEQ ID NO: 27538 - protein, 9 aa, Artificial Sequence
  Description of Artificial Sequence: Synthetic peptide
PTFGWMNWV

SEQ ID NO: 27539 - protein, 9 aa, Artificial Sequence
  Description of Artificial Sequence: Synthetic peptide
PTFGWMNWY

SEQ ID NO: 27540 - protein, 9 aa, Artificial Sequence
  Description of Artificial Sequence: Synthetic peptide
PTFVWMNWF

SEQ ID NO: 27541 - protein, 9 aa, Artificial Sequence
  Description of Artificial Sequence: Synthetic peptide
PTYGWMNWF

SEQ ID NO: 27542 - protein, 9 aa, Artificial Sequence
  Description of Artificial Sequence: Synthetic peptide
PWGDMKDPQ

SEQ ID NO: 27543 - protein, 9 aa, Artificial Sequence
  Description of Artificial Sequence: Synthetic peptide
PWGDMKDSH

SEQ ID NO: 27544 - protein, 9 aa, Artificial Sequence
  Description of Artificial Sequence: Synthetic peptide
PWGVMKDPH

SEQ ID NO: 27545 - protein, 9 aa, Artificial Sequence
  Description of Artificial Sequence: Synthetic peptide
PWGYMKDPH

SEQ ID NO: 27546 - protein, 9 aa, Artificial Sequence
  Description of Artificial Sequence: Synthetic peptide
QAYLYNIPM

SEQ ID NO: 27547 - protein, 9 aa, Artificial Sequence
  Description of Artificial Sequence: Synthetic peptide
QCRLHMQCP

SEQ ID NO: 27548 - protein, 9 aa, Artificial Sequence
  Description of Artificial Sequence: Synthetic peptide
QCRQSHEQE

SEQ ID NO: 27549 - protein, 9 aa, Artificial Sequence
  Description of Artificial Sequence: Synthetic peptide
QCSRNWFAC

SEQ ID NO: 27550 - protein, 9 aa, Artificial Sequence
  Description of Artificial Sequence: Synthetic peptide
QDSRNWFAC

SEQ ID NO: 27551 - protein, 9 aa, Artificial Sequence
  Description of Artificial Sequence: Synthetic peptide
QGGRNWFAC

SEQ ID NO: 27552 - protein, 9 aa, Artificial Sequence
  Description of Artificial Sequence: Synthetic peptide
QGSGNWFAC

SEQ ID NO: 27553 - protein, 9 aa, Artificial Sequence
  Description of Artificial Sequence: Synthetic peptide
QGSRNWFGC

SEQ ID NO: 27554 - protein, 9 aa, Artificial Sequence
  Description of Artificial Sequence: Synthetic peptide
QGSRNWFSC

SEQ ID NO: 27555 - protein, 9 aa, Artificial Sequence
  Description of Artificial Sequence: Synthetic peptide
QGSRNWYAC

SEQ ID NO: 27556 - protein, 9 aa, Artificial Sequence
  Description of Artificial Sequence: Synthetic peptide
QGTRNWFAC

SEQ ID NO: 27557 - protein, 9 aa, Artificial Sequence
  Description of Artificial Sequence: Synthetic peptide
QIGRFAMAH

SEQ ID NO: 27558 - protein, 9 aa, Artificial Sequence
  Description of Artificial Sequence: Synthetic peptide
QIGRFAMPH

SEQ ID NO: 27559 - protein, 9 aa, Artificial Sequence
  Description of Artificial Sequence: Synthetic peptide
QIGRFAMYH

SEQ ID NO: 27560 - protein, 9 aa, Artificial Sequence
  Description of Artificial Sequence: Synthetic peptide
QIGRFTMSH

SEQ ID NO: 27561 - protein, 9 aa, Artificial Sequence
  Description of Artificial Sequence: Synthetic peptide
QNSRHRYAW

SEQ ID NO: 27562 - protein, 9 aa, Artificial Sequence
  Description of Artificial Sequence: Synthetic peptide
QSRRGKLTW

SEQ ID NO: 27563 - protein, 9 aa, Artificial Sequence
  Description of Artificial Sequence: Synthetic peptide
QSSRNWFAC

SEQ ID NO: 27564 - protein, 9 aa, Artificial Sequence
  Description of Artificial Sequence: Synthetic peptide
QTLGWAMGT

SEQ ID NO: 27565 - protein, 9 aa, Artificial Sequence
  Description of Artificial Sequence: Synthetic peptide
RAEGWFKYD

SEQ ID NO: 27566 - protein, 9 aa, Artificial Sequence
  Description of Artificial Sequence: Synthetic peptide
RAHNGLVGY

SEQ ID NO: 27567 - protein, 9 aa, Artificial Sequence
  Description of Artificial Sequence: Synthetic peptide
RANMCDCFE

SEQ ID NO: 27568 - protein, 9 aa, Artificial Sequence
  Description of Artificial Sequence: Synthetic peptide
RANNWTRRH

SEQ ID NO: 27569 - protein, 9 aa, Artificial Sequence
  Description of Artificial Sequence: Synthetic peptide
RASICDYFE

SEQ ID NO: 27570 - protein, 9 aa, Artificial Sequence
  Description of Artificial Sequence: Synthetic peptide
RASMCDFFE

SEQ ID NO: 27571 - protein, 9 aa, Artificial Sequence
  Description of Artificial Sequence: Synthetic peptide
RASMCDGFE

SEQ ID NO: 27572 - protein, 9 aa, Artificial Sequence
  Description of Artificial Sequence: Synthetic peptide
RASMCDYFE

SEQ ID NO: 27573 - protein, 9 aa, Artificial Sequence
  Description of Artificial Sequence: Synthetic peptide
RASMWDCFE

SEQ ID NO: 27574 - protein, 9 aa, Artificial Sequence
  Description of Artificial Sequence: Synthetic peptide
RCHNELVGY

SEQ ID NO: 27575 - protein, 9 aa, Artificial Sequence
  Description of Artificial Sequence: Synthetic peptide
RDSMCDCFE

SEQ ID NO: 27576 - protein, 9 aa, Artificial Sequence
  Description of Artificial Sequence: Synthetic peptide
RDVIVCILR

SEQ ID NO: 27577 - protein, 9 aa, Artificial Sequence
  Description of Artificial Sequence: Synthetic peptide
REAMVCILR

SEQ ID NO: 27578 - protein, 9 aa, Artificial Sequence
  Description of Artificial Sequence: Synthetic peptide
REDMACILR

SEQ ID NO: 27579 - protein, 9 aa, Artificial Sequence
  Description of Artificial Sequence: Synthetic peptide
REDMGCILR

SEQ ID NO: 27580 - protein, 9 aa, Artificial Sequence
  Description of Artificial Sequence: Synthetic peptide
REDMLCILR

SEQ ID NO: 27581 - protein, 9 aa, Artificial Sequence
  Description of Artificial Sequence: Synthetic peptide
REDMVCMLR

SEQ ID NO: 27582 - protein, 9 aa, Artificial Sequence
  Description of Artificial Sequence: Synthetic peptide
REDMVGILR

SEQ ID NO: 27583 - protein, 9 aa, Artificial Sequence
  Description of Artificial Sequence: Synthetic peptide
REDTVCILR

SEQ ID NO: 27584 - protein, 9 aa, Artificial Sequence
  Description of Artificial Sequence: Synthetic peptide
REFMVCILR

SEQ ID NO: 27585 - protein, 9 aa, Artificial Sequence
  Description of Artificial Sequence: Synthetic peptide
REGMLCILR

SEQ ID NO: 27586 - protein, 9 aa, Artificial Sequence
  Description of Artificial Sequence: Synthetic peptide
REGMVCILR

SEQ ID NO: 27587 - protein, 9 aa, Artificial Sequence
  Description of Artificial Sequence: Synthetic peptide
REGVVCILR

SEQ ID NO: 27588 - protein, 9 aa, Artificial Sequence
  Description of Artificial Sequence: Synthetic peptide
REIMVCILR

SEQ ID NO: 27589 - protein, 9 aa, Artificial Sequence
  Description of Artificial Sequence: Synthetic peptide
RELMVCILR

SEQ ID NO: 27590 - protein, 9 aa, Artificial Sequence
  Description of Artificial Sequence: Synthetic peptide
RETMVCILR

SEQ ID NO: 27591 - protein, 9 aa, Artificial Sequence
  Description of Artificial Sequence: Synthetic peptide
REVKVCILR

SEQ ID NO: 27592 - protein, 9 aa, Artificial Sequence
  Description of Artificial Sequence: Synthetic peptide
REVLVCILK

SEQ ID NO: 27593 - protein, 9 aa, Artificial Sequence
  Description of Artificial Sequence: Synthetic peptide
REVMACILR

SEQ ID NO: 27594 - protein, 9 aa, Artificial Sequence
  Description of Artificial Sequence: Synthetic peptide
REVMCCILR

SEQ ID NO: 27595 - protein, 9 aa, Artificial Sequence
  Description of Artificial Sequence: Synthetic peptide
REVMFCILR

SEQ ID NO: 27596 - protein, 9 aa, Artificial Sequence
  Description of Artificial Sequence: Synthetic peptide
REVMGCILR

SEQ ID NO: 27597 - protein, 9 aa, Artificial Sequence
  Description of Artificial Sequence: Synthetic peptide
REVMGCMLR

SEQ ID NO: 27598 - protein, 9 aa, Artificial Sequence
  Description of Artificial Sequence: Synthetic peptide
REVMICILR

SEQ ID NO: 27599 - protein, 9 aa, Artificial Sequence
  Description of Artificial Sequence: Synthetic peptide
REVMLCILR

SEQ ID NO: 27600 - protein, 9 aa, Artificial Sequence
  Description of Artificial Sequence: Synthetic peptide
REVMVCIII

SEQ ID NO: 27601 - protein, 9 aa, Artificial Sequence
  Description of Artificial Sequence: Synthetic peptide
REVMVCIIK

SEQ ID NO: 27602 - protein, 9 aa, Artificial Sequence
  Description of Artificial Sequence: Synthetic peptide
REVMVCIIR

SEQ ID NO: 27603 - protein, 9 aa, Artificial Sequence
  Description of Artificial Sequence: Synthetic peptide
REVMVCIIT

SEQ ID NO: 27604 - protein, 9 aa, Artificial Sequence
  Description of Artificial Sequence: Synthetic peptide
REVMVCILG

SEQ ID NO: 27605 - protein, 9 aa, Artificial Sequence
  Description of Artificial Sequence: Synthetic peptide
REVMVCILK

SEQ ID NO: 27606 - protein, 9 aa, Artificial Sequence
  Description of Artificial Sequence: Synthetic peptide
REVMVCIPR

SEQ ID NO: 27607 - protein, 9 aa, Artificial Sequence
  Description of Artificial Sequence: Synthetic peptide
REVMVCIRR

SEQ ID NO: 27608 - protein, 9 aa, Artificial Sequence
  Description of Artificial Sequence: Synthetic peptide
REVMVCIVI

SEQ ID NO: 27609 - protein, 9 aa, Artificial Sequence
  Description of Artificial Sequence: Synthetic peptide
REVMVCIVR

SEQ ID NO: 27610 - protein, 9 aa, Artificial Sequence
  Description of Artificial Sequence: Synthetic peptide
REVMVCLLR

SEQ ID NO: 27611 - protein, 9 aa, Artificial Sequence
  Description of Artificial Sequence: Synthetic peptide
REVMVCTLR

SEQ ID NO: 27612 - protein, 9 aa, Artificial Sequence
  Description of Artificial Sequence: Synthetic peptide
REVMVCVLK

SEQ ID NO: 27613 - protein, 9 aa, Artificial Sequence
  Description of Artificial Sequence: Synthetic peptide
REVMVCVLR

SEQ ID NO: 27614 - protein, 9 aa, Artificial Sequence
  Description of Artificial Sequence: Synthetic peptide
RFIGMSDQD

SEQ ID NO: 27615 - protein, 9 aa, Artificial Sequence
  Description of Artificial Sequence: Synthetic peptide
RFNGMSDQD

SEQ ID NO: 27616 - protein, 9 aa, Artificial Sequence
  Description of Artificial Sequence: Synthetic peptide
RFPGMSDQD

SEQ ID NO: 27617 - protein, 9 aa, Artificial Sequence
  Description of Artificial Sequence: Synthetic peptide
RFTGMGDQD

SEQ ID NO: 27618 - protein, 9 aa, Artificial Sequence
  Description of Artificial Sequence: Synthetic peptide
RFTGMNDQD

SEQ ID NO: 27619 - protein, 9 aa, Artificial Sequence
  Description of Artificial Sequence: Synthetic peptide
RFTGMSAQD

SEQ ID NO: 27620 - protein, 9 aa, Artificial Sequence
  Description of Artificial Sequence: Synthetic peptide
RFTGMSDED

SEQ ID NO: 27621 - protein, 9 aa, Artificial Sequence
  Description of Artificial Sequence: Synthetic peptide
RFTGMSDKD

SEQ ID NO: 27622 - protein, 9 aa, Artificial Sequence
  Description of Artificial Sequence: Synthetic peptide
RFTGMSDKV

SEQ ID NO: 27623 - protein, 9 aa, Artificial Sequence
  Description of Artificial Sequence: Synthetic peptide
RFTGMSDQY

SEQ ID NO: 27624 - protein, 9 aa, Artificial Sequence
  Description of Artificial Sequence: Synthetic peptide
RFTGMSDRD

SEQ ID NO: 27625 - protein, 9 aa, Artificial Sequence
  Description of Artificial Sequence: Synthetic peptide
RFTGMSGQD

SEQ ID NO: 27626 - protein, 9 aa, Artificial Sequence
  Description of Artificial Sequence: Synthetic peptide
RFTGMSHQD

SEQ ID NO: 27627 - protein, 9 aa, Artificial Sequence
  Description of Artificial Sequence: Synthetic peptide
RFTGMSYQD

SEQ ID NO: 27628 - protein, 9 aa, Artificial Sequence
  Description of Artificial Sequence: Synthetic peptide
RFTGMTDQD

SEQ ID NO: 27629 - protein, 9 aa, Artificial Sequence
  Description of Artificial Sequence: Synthetic peptide
RFTGVSDQD

SEQ ID NO: 27630 - protein, 9 aa, Artificial Sequence
  Description of Artificial Sequence: Synthetic peptide
RGHNGKGPM

SEQ ID NO: 27631 - protein, 9 aa, Artificial Sequence
  Description of Artificial Sequence: Synthetic peptide
RGSMCDCFE

SEQ ID NO: 27632 - protein, 9 aa, Artificial Sequence
  Description of Artificial Sequence: Synthetic peptide
RGVMQQMNH

SEQ ID NO: 27633 - protein, 9 aa, Artificial Sequence
  Description of Artificial Sequence: Synthetic peptide
RIANVDEWE

SEQ ID NO: 27634 - protein, 9 aa, Artificial Sequence
  Description of Artificial Sequence: Synthetic peptide
RIHNELVGY

SEQ ID NO: 27635 - protein, 9 aa, Artificial Sequence
  Description of Artificial Sequence: Synthetic peptide
RIPNVDDWE

SEQ ID NO: 27636 - protein, 9 aa, Artificial Sequence
  Description of Artificial Sequence: Synthetic peptide
RLDCLKMEM

SEQ ID NO: 27637 - protein, 9 aa, Artificial Sequence
  Description of Artificial Sequence: Synthetic peptide
RMSGMLCTV

SEQ ID NO: 27638 - protein, 9 aa, Artificial Sequence
  Description of Artificial Sequence: Synthetic peptide
RMSGMLFTL

SEQ ID NO: 27639 - protein, 9 aa, Artificial Sequence
  Description of Artificial Sequence: Synthetic peptide
RMSGMVCTL

SEQ ID NO: 27640 - protein, 9 aa, Artificial Sequence
  Description of Artificial Sequence: Synthetic peptide
RNHNEIVGY

SEQ ID NO: 27641 - protein, 9 aa, Artificial Sequence
  Description of Artificial Sequence: Synthetic peptide
RNHNELVGC

SEQ ID NO: 27642 - protein, 9 aa, Artificial Sequence
  Description of Artificial Sequence: Synthetic peptide
RNHNELVGY

SEQ ID NO: 27643 - protein, 9 aa, Artificial Sequence
  Description of Artificial Sequence: Synthetic peptide
RNSRHKYAW

SEQ ID NO: 27644 - protein, 9 aa, Artificial Sequence
  Description of Artificial Sequence: Synthetic peptide
RPDLNEIVC

SEQ ID NO: 27645 - protein, 9 aa, Artificial Sequence
  Description of Artificial Sequence: Synthetic peptide
RPDLNEVEC

SEQ ID NO: 27646 - protein, 9 aa, Artificial Sequence
  Description of Artificial Sequence: Synthetic peptide
RPGLNEIEC

SEQ ID NO: 27647 - protein, 9 aa, Artificial Sequence
  Description of Artificial Sequence: Synthetic peptide
RPHNELVGY

SEQ ID NO: 27648 - protein, 9 aa, Artificial Sequence
  Description of Artificial Sequence: Synthetic peptide
RPHNGLVGY

SEQ ID NO: 27649 - protein, 9 aa, Artificial Sequence
  Description of Artificial Sequence: Synthetic peptide
RSHNGLVGY

SEQ ID NO: 27650 - protein, 9 aa, Artificial Sequence
  Description of Artificial Sequence: Synthetic peptide
RSHVQPLNM

SEQ ID NO: 27651 - protein, 9 aa, Artificial Sequence
  Description of Artificial Sequence: Synthetic peptide
RSRRGKLTW

SEQ ID NO: 27652 - protein, 9 aa, Artificial Sequence
  Description of Artificial Sequence: Synthetic peptide
RSRRGKMTW

SEQ ID NO: 27653 - protein, 9 aa, Artificial Sequence
  Description of Artificial Sequence: Synthetic peptide
RSSMCDCFE

SEQ ID NO: 27654 - protein, 9 aa, Artificial Sequence
  Description of Artificial Sequence: Synthetic peptide
RSWRGKLTW

SEQ ID NO: 27655 - protein, 9 aa, Artificial Sequence
  Description of Artificial Sequence: Synthetic peptide
RTDNEIVGY

SEQ ID NO: 27656 - protein, 9 aa, Artificial Sequence
  Description of Artificial Sequence: Synthetic peptide
RTDNELVGD

SEQ ID NO: 27657 - protein, 9 aa, Artificial Sequence
  Description of Artificial Sequence: Synthetic peptide
RTDNGLVGY

SEQ ID NO: 27658 - protein, 9 aa, Artificial Sequence
  Description of Artificial Sequence: Synthetic peptide
RTEGWFEYD

SEQ ID NO: 27659 - protein, 9 aa, Artificial Sequence
  Description of Artificial Sequence: Synthetic peptide
RTEGWFKSD

SEQ ID NO: 27660 - protein, 9 aa, Artificial Sequence
  Description of Artificial Sequence: Synthetic peptide
RTEGWFKYA

SEQ ID NO: 27661 - protein, 9 aa, Artificial Sequence
  Description of Artificial Sequence: Synthetic peptide
RTEGWFKYE

SEQ ID NO: 27662 - protein, 9 aa, Artificial Sequence
  Description of Artificial Sequence: Synthetic peptide
RTEGWVKYD

SEQ ID NO: 27663 - protein, 9 aa, Artificial Sequence
  Description of Artificial Sequence: Synthetic peptide
RTHIELVGY

SEQ ID NO: 27664 - protein, 9 aa, Artificial Sequence
  Description of Artificial Sequence: Synthetic peptide
RTHNALVCY

SEQ ID NO: 27665 - protein, 9 aa, Artificial Sequence
  Description of Artificial Sequence: Synthetic peptide
RTHNALVSY

SEQ ID NO: 27666 - protein, 9 aa, Artificial Sequence
  Description of Artificial Sequence: Synthetic peptide
RTHNALVVY

SEQ ID NO: 27667 - protein, 9 aa, Artificial Sequence
  Description of Artificial Sequence: Synthetic peptide
RTHNDLVGH

SEQ ID NO: 27668 - protein, 9 aa, Artificial Sequence
  Description of Artificial Sequence: Synthetic peptide
RTHNDLVVY

SEQ ID NO: 27669 - protein, 9 aa, Artificial Sequence
  Description of Artificial Sequence: Synthetic peptide
RTHNEFVGY

SEQ ID NO: 27670 - protein, 9 aa, Artificial Sequence
  Description of Artificial Sequence: Synthetic peptide
RTHNEIFGY

SEQ ID NO: 27671 - protein, 9 aa, Artificial Sequence
  Description of Artificial Sequence: Synthetic peptide
RTHNEIIGY

SEQ ID NO: 27672 - protein, 9 aa, Artificial Sequence
  Description of Artificial Sequence: Synthetic peptide
RTHNEIVGF

SEQ ID NO: 27673 - protein, 9 aa, Artificial Sequence
  Description of Artificial Sequence: Synthetic peptide
RTHNEIVGS

SEQ ID NO: 27674 - protein, 9 aa, Artificial Sequence
  Description of Artificial Sequence: Synthetic peptide
RTHNEIVGY

SEQ ID NO: 27675 - protein, 9 aa, Artificial Sequence
  Description of Artificial Sequence: Synthetic peptide
RTHNELFGH

SEQ ID NO: 27676 - protein, 9 aa, Artificial Sequence
  Description of Artificial Sequence: Synthetic peptide
RTHNELFGS

SEQ ID NO: 27677 - protein, 9 aa, Artificial Sequence
  Description of Artificial Sequence: Synthetic peptide
RTHNELFGY

SEQ ID NO: 27678 - protein, 9 aa, Artificial Sequence
  Description of Artificial Sequence: Synthetic peptide
RTHNELGGY

SEQ ID NO: 27679 - protein, 9 aa, Artificial Sequence
  Description of Artificial Sequence: Synthetic peptide
RTHNELHGY

SEQ ID NO: 27680 - protein, 9 aa, Artificial Sequence
  Description of Artificial Sequence: Synthetic peptide
RTHNELIGY

SEQ ID NO: 27681 - protein, 9 aa, Artificial Sequence
  Description of Artificial Sequence: Synthetic peptide
RTHNELLCY

SEQ ID NO: 27682 - protein, 9 aa, Artificial Sequence
  Description of Artificial Sequence: Synthetic peptide
RTHNELLGF

SEQ ID NO: 27683 - protein, 9 aa, Artificial Sequence
  Description of Artificial Sequence: Synthetic peptide
RTHNELVAH

SEQ ID NO: 27684 - protein, 9 aa, Artificial Sequence
  Description of Artificial Sequence: Synthetic peptide
RTHNELVCD

SEQ ID NO: 27685 - protein, 9 aa, Artificial Sequence
  Description of Artificial Sequence: Synthetic peptide
RTHNELVCH

SEQ ID NO: 27686 - protein, 9 aa, Artificial Sequence
  Description of Artificial Sequence: Synthetic peptide
RTHNELVCS

SEQ ID NO: 27687 - protein, 9 aa, Artificial Sequence
  Description of Artificial Sequence: Synthetic peptide
RTHNELVCY

SEQ ID NO: 27688 - protein, 9 aa, Artificial Sequence
  Description of Artificial Sequence: Synthetic peptide
RTHNELVFY

SEQ ID NO: 27689 - protein, 9 aa, Artificial Sequence
  Description of Artificial Sequence: Synthetic peptide
RTHNELVGE

SEQ ID NO: 27690 - protein, 9 aa, Artificial Sequence
  Description of Artificial Sequence: Synthetic peptide
RTHNELVGF

SEQ ID NO: 27691 - protein, 9 aa, Artificial Sequence
  Description of Artificial Sequence: Synthetic peptide
RTHNELVGG

SEQ ID NO: 27692 - protein, 9 aa, Artificial Sequence
  Description of Artificial Sequence: Synthetic peptide
RTHNELVGH

SEQ ID NO: 27693 - protein, 9 aa, Artificial Sequence
  Description of Artificial Sequence: Synthetic peptide
RTHNELVGQ

SEQ ID NO: 27694 - protein, 9 aa, Artificial Sequence
  Description of Artificial Sequence: Synthetic peptide
RTHNELVGV

SEQ ID NO: 27695 - protein, 9 aa, Artificial Sequence
  Description of Artificial Sequence: Synthetic peptide
RTHNELVIY

SEQ ID NO: 27696 - protein, 9 aa, Artificial Sequence
  Description of Artificial Sequence: Synthetic peptide
RTHNELVRH

SEQ ID NO: 27697 - protein, 9 aa, Artificial Sequence
  Description of Artificial Sequence: Synthetic peptide
RTHNELVRY

SEQ ID NO: 27698 - protein, 9 aa, Artificial Sequence
  Description of Artificial Sequence: Synthetic peptide
RTHNELVSF

SEQ ID NO: 27699 - protein, 9 aa, Artificial Sequence
  Description of Artificial Sequence: Synthetic peptide
RTHNELVSY

SEQ ID NO: 27700 - protein, 9 aa, Artificial Sequence
  Description of Artificial Sequence: Synthetic peptide
RTHNELVVF

SEQ ID NO: 27701 - protein, 9 aa, Artificial Sequence
  Description of Artificial Sequence: Synthetic peptide
RTHNELVVY

SEQ ID NO: 27702 - protein, 9 aa, Artificial Sequence
  Description of Artificial Sequence: Synthetic peptide
RTHNEPVGY

SEQ ID NO: 27703 - protein, 9 aa, Artificial Sequence
  Description of Artificial Sequence: Synthetic peptide
RTHNEVVGC

SEQ ID NO: 27704 - protein, 9 aa, Artificial Sequence
  Description of Artificial Sequence: Synthetic peptide
RTHNEVVGD

SEQ ID NO: 27705 - protein, 9 aa, Artificial Sequence
  Description of Artificial Sequence: Synthetic peptide
RTHNEVVGS

SEQ ID NO: 27706 - protein, 9 aa, Artificial Sequence
  Description of Artificial Sequence: Synthetic peptide
RTHNGLVGF

SEQ ID NO: 27707 - protein, 9 aa, Artificial Sequence
  Description of Artificial Sequence: Synthetic peptide
RTHNGLVGS

SEQ ID NO: 27708 - protein, 9 aa, Artificial Sequence
  Description of Artificial Sequence: Synthetic peptide
RTHNKLGGY

SEQ ID NO: 27709 - protein, 9 aa, Artificial Sequence
  Description of Artificial Sequence: Synthetic peptide
RTHNKLVGN

SEQ ID NO: 27710 - protein, 9 aa, Artificial Sequence
  Description of Artificial Sequence: Synthetic peptide
RTHNKLVGY

SEQ ID NO: 27711 - protein, 9 aa, Artificial Sequence
  Description of Artificial Sequence: Synthetic peptide
RTHNQLVGC

SEQ ID NO: 27712 - protein, 9 aa, Artificial Sequence
  Description of Artificial Sequence: Synthetic peptide
RTHNQLVGY

SEQ ID NO: 27713 - protein, 9 aa, Artificial Sequence
  Description of Artificial Sequence: Synthetic peptide
RTHNVLVGS

SEQ ID NO: 27714 - protein, 9 aa, Artificial Sequence
  Description of Artificial Sequence: Synthetic peptide
RTHNWLVGY

SEQ ID NO: 27715 - protein, 9 aa, Artificial Sequence
  Description of Artificial Sequence: Synthetic peptide
RTHSELVGY

SEQ ID NO: 27716 - protein, 9 aa, Artificial Sequence
  Description of Artificial Sequence: Synthetic peptide
RTHSQLVGY

SEQ ID NO: 27717 - protein, 9 aa, Artificial Sequence
  Description of Artificial Sequence: Synthetic peptide
RTHTKLVGY

SEQ ID NO: 27718 - protein, 9 aa, Artificial Sequence
  Description of Artificial Sequence: Synthetic peptide
RTMGQFYYE

SEQ ID NO: 27719 - protein, 9 aa, Artificial Sequence
  Description of Artificial Sequence: Synthetic peptide
RTNNEIVGY

SEQ ID NO: 27720 - protein, 9 aa, Artificial Sequence
  Description of Artificial Sequence: Synthetic peptide
RTNNELAGY

SEQ ID NO: 27721 - protein, 9 aa, Artificial Sequence
  Description of Artificial Sequence: Synthetic peptide
RTNNELIGY

SEQ ID NO: 27722 - protein, 9 aa, Artificial Sequence
  Description of Artificial Sequence: Synthetic peptide
RTNNELVGS

SEQ ID NO: 27723 - protein, 9 aa, Artificial Sequence
  Description of Artificial Sequence: Synthetic peptide
RTPNALVGY

SEQ ID NO: 27724 - protein, 9 aa, Artificial Sequence
  Description of Artificial Sequence: Synthetic peptide
RTQGWFKYD

SEQ ID NO: 27725 - protein, 9 aa, Artificial Sequence
  Description of Artificial Sequence: Synthetic peptide
RTQNELVGS

SEQ ID NO: 27726 - protein, 9 aa, Artificial Sequence
  Description of Artificial Sequence: Synthetic peptide
RTQNELVVY

SEQ ID NO: 27727 - protein, 9 aa, Artificial Sequence
  Description of Artificial Sequence: Synthetic peptide
RTQNGLVGY

SEQ ID NO: 27728 - protein, 9 aa, Artificial Sequence
  Description of Artificial Sequence: Synthetic peptide
RTRNELFGY

SEQ ID NO: 27729 - protein, 9 aa, Artificial Sequence
  Description of Artificial Sequence: Synthetic peptide
RTRNELLGY

SEQ ID NO: 27730 - protein, 9 aa, Artificial Sequence
  Description of Artificial Sequence: Synthetic peptide
RTRNELVGY

SEQ ID NO: 27731 - protein, 9 aa, Artificial Sequence
  Description of Artificial Sequence: Synthetic peptide
RTRNELVVY

SEQ ID NO: 27732 - protein, 9 aa, Artificial Sequence
  Description of Artificial Sequence: Synthetic peptide
RTRNKLVGY

SEQ ID NO: 27733 - protein, 9 aa, Artificial Sequence
  Description of Artificial Sequence: Synthetic peptide
RTRSELVGY

SEQ ID NO: 27734 - protein, 9 aa, Artificial Sequence
  Description of Artificial Sequence: Synthetic peptide
RTYNELVGY

SEQ ID NO: 27735 - protein, 9 aa, Artificial Sequence
  Description of Artificial Sequence: Synthetic peptide
RVGMQQMNH

SEQ ID NO: 27736 - protein, 9 aa, Artificial Sequence
  Description of Artificial Sequence: Synthetic peptide
RVMAEMVWE

SEQ ID NO: 27737 - protein, 9 aa, Artificial Sequence
  Description of Artificial Sequence: Synthetic peptide
RVSGMLCTL

SEQ ID NO: 27738 - protein, 9 aa, Artificial Sequence
  Description of Artificial Sequence: Synthetic peptide
RVVMQPMNH

SEQ ID NO: 27739 - protein, 9 aa, Artificial Sequence
  Description of Artificial Sequence: Synthetic peptide
RVVMVCILR

SEQ ID NO: 27740 - protein, 9 aa, Artificial Sequence
  Description of Artificial Sequence: Synthetic peptide
RWAADSKPC

SEQ ID NO: 27741 - protein, 9 aa, Artificial Sequence
  Description of Artificial Sequence: Synthetic peptide
RWDNGKGPM

SEQ ID NO: 27742 - protein, 9 aa, Artificial Sequence
  Description of Artificial Sequence: Synthetic peptide
RWGDMKDPH

SEQ ID NO: 27743 - protein, 9 aa, Artificial Sequence
  Description of Artificial Sequence: Synthetic peptide
RWHNGKAPM

SEQ ID NO: 27744 - protein, 9 aa, Artificial Sequence
  Description of Artificial Sequence: Synthetic peptide
RWHNGKEPM

SEQ ID NO: 27745 - protein, 9 aa, Artificial Sequence
  Description of Artificial Sequence: Synthetic peptide
RWHNGKGHM

SEQ ID NO: 27746 - protein, 9 aa, Artificial Sequence
  Description of Artificial Sequence: Synthetic peptide
RWHNGKGPK

SEQ ID NO: 27747 - protein, 9 aa, Artificial Sequence
  Description of Artificial Sequence: Synthetic peptide
RWHNGKGRM

SEQ ID NO: 27748 - protein, 9 aa, Artificial Sequence
  Description of Artificial Sequence: Synthetic peptide
RWHNGKGSM

SEQ ID NO: 27749 - protein, 9 aa, Artificial Sequence
  Description of Artificial Sequence: Synthetic peptide
RWHNGKVPM

SEQ ID NO: 27750 - protein, 9 aa, Artificial Sequence
  Description of Artificial Sequence: Synthetic peptide
RWHNGQGPM

SEQ ID NO: 27751 - protein, 9 aa, Artificial Sequence
  Description of Artificial Sequence: Synthetic peptide
RWHNGRGPM

SEQ ID NO: 27752 - protein, 9 aa, Artificial Sequence
  Description of Artificial Sequence: Synthetic peptide
RWHTGKGPM

SEQ ID NO: 27753 - protein, 9 aa, Artificial Sequence
  Description of Artificial Sequence: Synthetic peptide
RWNNGKGPM

SEQ ID NO: 27754 - protein, 9 aa, Artificial Sequence
  Description of Artificial Sequence: Synthetic peptide
RWRMVCVHC

SEQ ID NO: 27755 - protein, 9 aa, Artificial Sequence
  Description of Artificial Sequence: Synthetic peptide
RYGNVAHHA

SEQ ID NO: 27756 - protein, 9 aa, Artificial Sequence
  Description of Artificial Sequence: Synthetic peptide
RYSNVAHYA

SEQ ID NO: 27757 - protein, 9 aa, Artificial Sequence
  Description of Artificial Sequence: Synthetic peptide
RYTGMSDQD

SEQ ID NO: 27758 - protein, 9 aa, Artificial Sequence
  Description of Artificial Sequence: Synthetic peptide
SATNWECSK

SEQ ID NO: 27759 - protein, 9 aa, Artificial Sequence
  Description of Artificial Sequence: Synthetic peptide
SCCADATNN

SEQ ID NO: 27760 - protein, 9 aa, Artificial Sequence
  Description of Artificial Sequence: Synthetic peptide
SCCSDAANK

SEQ ID NO: 27761 - protein, 9 aa, Artificial Sequence
  Description of Artificial Sequence: Synthetic peptide
SCCSDAANN

SEQ ID NO: 27762 - protein, 9 aa, Artificial Sequence
  Description of Artificial Sequence: Synthetic peptide
SCCSDANNN

SEQ ID NO: 27763 - protein, 9 aa, Artificial Sequence
  Description of Artificial Sequence: Synthetic peptide
SCCSDATDN

SEQ ID NO: 27764 - protein, 9 aa, Artificial Sequence
  Description of Artificial Sequence: Synthetic peptide
SCCSDATNH

SEQ ID NO: 27765 - protein, 9 aa, Artificial Sequence
  Description of Artificial Sequence: Synthetic peptide
SCCSDATQN

SEQ ID NO: 27766 - protein, 9 aa, Artificial Sequence
  Description of Artificial Sequence: Synthetic peptide
SCCSDATSN

SEQ ID NO: 27767 - protein, 9 aa, Artificial Sequence
  Description of Artificial Sequence: Synthetic peptide
SCCYDATNN

SEQ ID NO: 27768 - protein, 9 aa, Artificial Sequence
  Description of Artificial Sequence: Synthetic peptide
SCTTRVWIC

SEQ ID NO: 27769 - protein, 9 aa, Artificial Sequence
  Description of Artificial Sequence: Synthetic peptide
SCWSDATNN

SEQ ID NO: 27770 - protein, 9 aa, Artificial Sequence
  Description of Artificial Sequence: Synthetic peptide
SCYSDATNN

SEQ ID NO: 27771 - protein, 9 aa, Artificial Sequence
  Description of Artificial Sequence: Synthetic peptide
SEVMVCVLR

SEQ ID NO: 27772 - protein, 9 aa, Artificial Sequence
  Description of Artificial Sequence: Synthetic peptide
SEYHWHMYH

SEQ ID NO: 27773 - protein, 9 aa, Artificial Sequence
  Description of Artificial Sequence: Synthetic peptide
SFCSDATNN

SEQ ID NO: 27774 - protein, 9 aa, Artificial Sequence
  Description of Artificial Sequence: Synthetic peptide
SFCSDATNS

SEQ ID NO: 27775 - protein, 9 aa, Artificial Sequence
  Description of Artificial Sequence: Synthetic peptide
SFYLSGFLI

SEQ ID NO: 27776 - protein, 9 aa, Artificial Sequence
  Description of Artificial Sequence: Synthetic peptide
SKCHWHMYH

SEQ ID NO: 27777 - protein, 9 aa, Artificial Sequence
  Description of Artificial Sequence: Synthetic peptide
SKFAWSTSP

SEQ ID NO: 27778 - protein, 9 aa, Artificial Sequence
  Description of Artificial Sequence: Synthetic peptide
SKFHWHMYH

SEQ ID NO: 27779 - protein, 9 aa, Artificial Sequence
  Description of Artificial Sequence: Synthetic peptide
SKYAWSTAP

SEQ ID NO: 27780 - protein, 9 aa, Artificial Sequence
  Description of Artificial Sequence: Synthetic peptide
SKYAWSTSQ

SEQ ID NO: 27781 - protein, 9 aa, Artificial Sequence
  Description of Artificial Sequence: Synthetic peptide
SKYAWSTSS

SEQ ID NO: 27782 - protein, 9 aa, Artificial Sequence
  Description of Artificial Sequence: Synthetic peptide
SKYAWSTTP

SEQ ID NO: 27783 - protein, 9 aa, Artificial Sequence
  Description of Artificial Sequence: Synthetic peptide
SKYDWSTSP

SEQ ID NO: 27784 - protein, 9 aa, Artificial Sequence
  Description of Artificial Sequence: Synthetic peptide
SKYGWSTSP

SEQ ID NO: 27785 - protein, 9 aa, Artificial Sequence
  Description of Artificial Sequence: Synthetic peptide
SKYHWDMYH

SEQ ID NO: 27786 - protein, 9 aa, Artificial Sequence
  Description of Artificial Sequence: Synthetic peptide
SKYHWHIYP

SEQ ID NO: 27787 - protein, 9 aa, Artificial Sequence
  Description of Artificial Sequence: Synthetic peptide
SKYHWHMYL

SEQ ID NO: 27788 - protein, 9 aa, Artificial Sequence
  Description of Artificial Sequence: Synthetic peptide
SKYHWHMYR

SEQ ID NO: 27789 - protein, 9 aa, Artificial Sequence
  Description of Artificial Sequence: Synthetic peptide
SKYHWNMYH

SEQ ID NO: 27790 - protein, 9 aa, Artificial Sequence
  Description of Artificial Sequence: Synthetic peptide
SKYHWPMYH

SEQ ID NO: 27791 - protein, 9 aa, Artificial Sequence
  Description of Artificial Sequence: Synthetic peptide
SKYHWQIYH

SEQ ID NO: 27792 - protein, 9 aa, Artificial Sequence
  Description of Artificial Sequence: Synthetic peptide
SKYHWRMYH

SEQ ID NO: 27793 - protein, 9 aa, Artificial Sequence
  Description of Artificial Sequence: Synthetic peptide
SKYLWHMYH

SEQ ID NO: 27794 - protein, 9 aa, Artificial Sequence
  Description of Artificial Sequence: Synthetic peptide
SKYNWHMYH

SEQ ID NO: 27795 - protein, 9 aa, Artificial Sequence
  Description of Artificial Sequence: Synthetic peptide
SKYNWHMYQ

SEQ ID NO: 27796 - protein, 9 aa, Artificial Sequence
  Description of Artificial Sequence: Synthetic peptide
SKYPWSTSP

SEQ ID NO: 27797 - protein, 9 aa, Artificial Sequence
  Description of Artificial Sequence: Synthetic peptide
SKYQWHMYH

SEQ ID NO: 27798 - protein, 9 aa, Artificial Sequence
  Description of Artificial Sequence: Synthetic peptide
SKYRWHMYH

SEQ ID NO: 27799 - protein, 9 aa, Artificial Sequence
  Description of Artificial Sequence: Synthetic peptide
SKYSWSTSP

SEQ ID NO: 27800 - protein, 9 aa, Artificial Sequence
  Description of Artificial Sequence: Synthetic peptide
SKYTWSTSP

SEQ ID NO: 27801 - protein, 9 aa, Artificial Sequence
  Description of Artificial Sequence: Synthetic peptide
SKYVWSTSP

SEQ ID NO: 27802 - protein, 9 aa, Artificial Sequence
  Description of Artificial Sequence: Synthetic peptide
SKYYWHMYH

SEQ ID NO: 27803 - protein, 9 aa, Artificial Sequence
  Description of Artificial Sequence: Synthetic peptide
SPTNWECSN

SEQ ID NO: 27804 - protein, 9 aa, Artificial Sequence
  Description of Artificial Sequence: Synthetic peptide
SRYAWSTSQ

SEQ ID NO: 27805 - protein, 9 aa, Artificial Sequence
  Description of Artificial Sequence: Synthetic peptide
SRYHWHMYH

SEQ ID NO: 27806 - protein, 9 aa, Artificial Sequence
  Description of Artificial Sequence: Synthetic peptide
STFGWMNWF

SEQ ID NO: 27807 - protein, 9 aa, Artificial Sequence
  Description of Artificial Sequence: Synthetic peptide
STMTDAPCG

SEQ ID NO: 27808 - protein, 9 aa, Artificial Sequence
  Description of Artificial Sequence: Synthetic peptide
STTNWECSN

SEQ ID NO: 27809 - protein, 9 aa, Artificial Sequence
  Description of Artificial Sequence: Synthetic peptide
SVCSDATNN

SEQ ID NO: 27810 - protein, 9 aa, Artificial Sequence
  Description of Artificial Sequence: Synthetic peptide
SVMMSPHLM

SEQ ID NO: 27811 - protein, 9 aa, Artificial Sequence
  Description of Artificial Sequence: Synthetic peptide
SWAADSKPC

SEQ ID NO: 27812 - protein, 9 aa, Artificial Sequence
  Description of Artificial Sequence: Synthetic peptide
SYARKAYDC

SEQ ID NO: 27813 - protein, 9 aa, Artificial Sequence
  Description of Artificial Sequence: Synthetic peptide
SYPRRVYDC

SEQ ID NO: 27814 - protein, 9 aa, Artificial Sequence
  Description of Artificial Sequence: Synthetic peptide
TALLWCEVL

SEQ ID NO: 27815 - protein, 9 aa, Artificial Sequence
  Description of Artificial Sequence: Synthetic peptide
TAYMTAMYC

SEQ ID NO: 27816 - protein, 9 aa, Artificial Sequence
  Description of Artificial Sequence: Synthetic peptide
TCCSDATNN

SEQ ID NO: 27817 - protein, 9 aa, Artificial Sequence
  Description of Artificial Sequence: Synthetic peptide
TDLLWCELQ

SEQ ID NO: 27818 - protein, 9 aa, Artificial Sequence
  Description of Artificial Sequence: Synthetic peptide
TDLLWCEVH

SEQ ID NO: 27819 - protein, 9 aa, Artificial Sequence
  Description of Artificial Sequence: Synthetic peptide
TDRQIAQYH

SEQ ID NO: 27820 - protein, 9 aa, Artificial Sequence
  Description of Artificial Sequence: Synthetic peptide
TDRQIDQYL

SEQ ID NO: 27821 - protein, 9 aa, Artificial Sequence
  Description of Artificial Sequence: Synthetic peptide
TDRQIDQYR

SEQ ID NO: 27822 - protein, 9 aa, Artificial Sequence
  Description of Artificial Sequence: Synthetic peptide
TDRQIGQYH

SEQ ID NO: 27823 - protein, 9 aa, Artificial Sequence
  Description of Artificial Sequence: Synthetic peptide
TDRQIHQYH

SEQ ID NO: 27824 - protein, 9 aa, Artificial Sequence
  Description of Artificial Sequence: Synthetic peptide
TDRQVDQYH

SEQ ID NO: 27825 - protein, 9 aa, Artificial Sequence
  Description of Artificial Sequence: Synthetic peptide
TELFWCDVQ

SEQ ID NO: 27826 - protein, 9 aa, Artificial Sequence
  Description of Artificial Sequence: Synthetic peptide
TELFWCEVL

SEQ ID NO: 27827 - protein, 9 aa, Artificial Sequence
  Description of Artificial Sequence: Synthetic peptide
TELLLCEVH

SEQ ID NO: 27828 - protein, 9 aa, Artificial Sequence
  Description of Artificial Sequence: Synthetic peptide
TELLWCAVQ

SEQ ID NO: 27829 - protein, 9 aa, Artificial Sequence
  Description of Artificial Sequence: Synthetic peptide
TELLWCEIK

SEQ ID NO: 27830 - protein, 9 aa, Artificial Sequence
  Description of Artificial Sequence: Synthetic peptide
TELLWCEIQ

SEQ ID NO: 27831 - protein, 9 aa, Artificial Sequence
  Description of Artificial Sequence: Synthetic peptide
TELLWCELQ

SEQ ID NO: 27832 - protein, 9 aa, Artificial Sequence
  Description of Artificial Sequence: Synthetic peptide
TELLWCELR

SEQ ID NO: 27833 - protein, 9 aa, Artificial Sequence
  Description of Artificial Sequence: Synthetic peptide
TELLWCEVA

SEQ ID NO: 27834 - protein, 9 aa, Artificial Sequence
  Description of Artificial Sequence: Synthetic peptide
TELLWCEVE

SEQ ID NO: 27835 - protein, 9 aa, Artificial Sequence
  Description of Artificial Sequence: Synthetic peptide
TELLWCEVG

SEQ ID NO: 27836 - protein, 9 aa, Artificial Sequence
  Description of Artificial Sequence: Synthetic peptide
TELLWCGVQ

SEQ ID NO: 27837 - protein, 9 aa, Artificial Sequence
  Description of Artificial Sequence: Synthetic peptide
TELLWCKVQ

SEQ ID NO: 27838 - protein, 9 aa, Artificial Sequence
  Description of Artificial Sequence: Synthetic peptide
TELLWCQVQ

SEQ ID NO: 27839 - protein, 9 aa, Artificial Sequence
  Description of Artificial Sequence: Synthetic peptide
TELLWCVVQ

SEQ ID NO: 27840 - protein, 9 aa, Artificial Sequence
  Description of Artificial Sequence: Synthetic peptide
TELLWFEVQ

SEQ ID NO: 27841 - protein, 9 aa, Artificial Sequence
  Description of Artificial Sequence: Synthetic peptide
TELLWGEVQ

SEQ ID NO: 27842 - protein, 9 aa, Artificial Sequence
  Description of Artificial Sequence: Synthetic peptide
TELLWREVQ

SEQ ID NO: 27843 - protein, 9 aa, Artificial Sequence
  Description of Artificial Sequence: Synthetic peptide
TELLWSEIQ

SEQ ID NO: 27844 - protein, 9 aa, Artificial Sequence
  Description of Artificial Sequence: Synthetic peptide
TELSWCEVQ

SEQ ID NO: 27845 - protein, 9 aa, Artificial Sequence
  Description of Artificial Sequence: Synthetic peptide
TELVWCEVK

SEQ ID NO: 27846 - protein, 9 aa, Artificial Sequence
  Description of Artificial Sequence: Synthetic peptide
TEMLWCEVK

SEQ ID NO: 27847 - protein, 9 aa, Artificial Sequence
  Description of Artificial Sequence: Synthetic peptide
TEMLWCEVL

SEQ ID NO: 27848 - protein, 9 aa, Artificial Sequence
  Description of Artificial Sequence: Synthetic peptide
TEMLWCEVQ

SEQ ID NO: 27849 - protein, 9 aa, Artificial Sequence
  Description of Artificial Sequence: Synthetic peptide
TERLWCEVL

SEQ ID NO: 27850 - protein, 9 aa, Artificial Sequence
  Description of Artificial Sequence: Synthetic peptide
TFNINIYNC

SEQ ID NO: 27851 - protein, 9 aa, Artificial Sequence
  Description of Artificial Sequence: Synthetic peptide
TFWMPDDNC

SEQ ID NO: 27852 - protein, 9 aa, Artificial Sequence
  Description of Artificial Sequence: Synthetic peptide
TFWMPGNNC

SEQ ID NO: 27853 - protein, 9 aa, Artificial Sequence
  Description of Artificial Sequence: Synthetic peptide
TFYLSGFLI

SEQ ID NO: 27854 - protein, 9 aa, Artificial Sequence
  Description of Artificial Sequence: Synthetic peptide
TGLLWCEVQ

SEQ ID NO: 27855 - protein, 9 aa, Artificial Sequence
  Description of Artificial Sequence: Synthetic peptide
TISHDEAHK

SEQ ID NO: 27856 - protein, 9 aa, Artificial Sequence
  Description of Artificial Sequence: Synthetic peptide
TKLLWCEVK

SEQ ID NO: 27857 - protein, 9 aa, Artificial Sequence
  Description of Artificial Sequence: Synthetic peptide
TKYAWSTSP

SEQ ID NO: 27858 - protein, 9 aa, Artificial Sequence
  Description of Artificial Sequence: Synthetic peptide
TKYHWHMYH

SEQ ID NO: 27859 - protein, 9 aa, Artificial Sequence
  Description of Artificial Sequence: Synthetic peptide
TMGEVVINL

SEQ ID NO: 27860 - protein, 9 aa, Artificial Sequence
  Description of Artificial Sequence: Synthetic peptide
TMSEVVINL

SEQ ID NO: 27861 - protein, 9 aa, Artificial Sequence
  Description of Artificial Sequence: Synthetic peptide
TNGCAIENH

SEQ ID NO: 27862 - protein, 9 aa, Artificial Sequence
  Description of Artificial Sequence: Synthetic peptide
TPGIHRHCC

SEQ ID NO: 27863 - protein, 9 aa, Artificial Sequence
  Description of Artificial Sequence: Synthetic peptide
TPGISRHCC

SEQ ID NO: 27864 - protein, 9 aa, Artificial Sequence
  Description of Artificial Sequence: Synthetic peptide
TPGITRHCC

SEQ ID NO: 27865 - protein, 9 aa, Artificial Sequence
  Description of Artificial Sequence: Synthetic peptide
TPGIYRHCC

SEQ ID NO: 27866 - protein, 9 aa, Artificial Sequence
  Description of Artificial Sequence: Synthetic peptide
TPGLNRHCC

SEQ ID NO: 27867 - protein, 9 aa, Artificial Sequence
  Description of Artificial Sequence: Synthetic peptide
TQLLWCEVQ

SEQ ID NO: 27868 - protein, 9 aa, Artificial Sequence
  Description of Artificial Sequence: Synthetic peptide
TRRSWECSP

SEQ ID NO: 27869 - protein, 9 aa, Artificial Sequence
  Description of Artificial Sequence: Synthetic peptide
TRYRMPYHG

SEQ ID NO: 27870 - protein, 9 aa, Artificial Sequence
  Description of Artificial Sequence: Synthetic peptide
TRYRMRYHC

SEQ ID NO: 27871 - protein, 9 aa, Artificial Sequence
  Description of Artificial Sequence: Synthetic peptide
TRYRMRYHS

SEQ ID NO: 27872 - protein, 9 aa, Artificial Sequence
  Description of Artificial Sequence: Synthetic peptide
TRYRMRYNG

SEQ ID NO: 27873 - protein, 9 aa, Artificial Sequence
  Description of Artificial Sequence: Synthetic peptide
TSCGYHDNN

SEQ ID NO: 27874 - protein, 9 aa, Artificial Sequence
  Description of Artificial Sequence: Synthetic peptide
TSCGYNDNS

SEQ ID NO: 27875 - protein, 9 aa, Artificial Sequence
  Description of Artificial Sequence: Synthetic peptide
TSCRYNDNN

SEQ ID NO: 27876 - protein, 9 aa, Artificial Sequence
  Description of Artificial Sequence: Synthetic peptide
TSRSAAADL

SEQ ID NO: 27877 - protein, 9 aa, Artificial Sequence
  Description of Artificial Sequence: Synthetic peptide
TSRTEAADL

SEQ ID NO: 27878 - protein, 9 aa, Artificial Sequence
  Description of Artificial Sequence: Synthetic peptide
TSSHDEAHR

SEQ ID NO: 27879 - protein, 9 aa, Artificial Sequence
  Description of Artificial Sequence: Synthetic peptide
TTFGWMNWF

SEQ ID NO: 27880 - protein, 9 aa, Artificial Sequence
  Description of Artificial Sequence: Synthetic peptide
TTGINRHCC

SEQ ID NO: 27881 - protein, 9 aa, Artificial Sequence
  Description of Artificial Sequence: Synthetic peptide
TTMPDAPCR

SEQ ID NO: 27882 - protein, 9 aa, Artificial Sequence
  Description of Artificial Sequence: Synthetic peptide
TTSHDEAHK

SEQ ID NO: 27883 - protein, 9 aa, Artificial Sequence
  Description of Artificial Sequence: Synthetic peptide
TVLLWCDVQ

SEQ ID NO: 27884 - protein, 9 aa, Artificial Sequence
  Description of Artificial Sequence: Synthetic peptide
TVLLWCEVH

SEQ ID NO: 27885 - protein, 9 aa, Artificial Sequence
  Description of Artificial Sequence: Synthetic peptide
TVLLWCEVQ

SEQ ID NO: 27886 - protein, 9 aa, Artificial Sequence
  Description of Artificial Sequence: Synthetic peptide
TWEIQIDCI

SEQ ID NO: 27887 - protein, 9 aa, Artificial Sequence
  Description of Artificial Sequence: Synthetic peptide
TWETQIDCI

SEQ ID NO: 27888 - protein, 9 aa, Artificial Sequence
  Description of Artificial Sequence: Synthetic peptide
TWGSQIDCI

SEQ ID NO: 27889 - protein, 9 aa, Artificial Sequence
  Description of Artificial Sequence: Synthetic peptide
TWQSQIDCI

SEQ ID NO: 27890 - protein, 9 aa, Artificial Sequence
  Description of Artificial Sequence: Synthetic peptide
TYPRNAKYT

SEQ ID NO: 27891 - protein, 9 aa, Artificial Sequence
  Description of Artificial Sequence: Synthetic peptide
VEDKINYSY

SEQ ID NO: 27892 - protein, 9 aa, Artificial Sequence
  Description of Artificial Sequence: Synthetic peptide
VEKNSSQMR

SEQ ID NO: 27893 - protein, 9 aa, Artificial Sequence
  Description of Artificial Sequence: Synthetic peptide
VGYRSMFQE

SEQ ID NO: 27894 - protein, 9 aa, Artificial Sequence
  Description of Artificial Sequence: Synthetic peptide
VIGIIRHGH

SEQ ID NO: 27895 - protein, 9 aa, Artificial Sequence
  Description of Artificial Sequence: Synthetic peptide
VISNVDDWE

SEQ ID NO: 27896 - protein, 9 aa, Artificial Sequence
  Description of Artificial Sequence: Synthetic peptide
VLYRSMFQE

SEQ ID NO: 27897 - protein, 9 aa, Artificial Sequence
  Description of Artificial Sequence: Synthetic peptide
VQAQINYSY

SEQ ID NO: 27898 - protein, 9 aa, Artificial Sequence
  Description of Artificial Sequence: Synthetic peptide
VQDEINYSY

SEQ ID NO: 27899 - protein, 9 aa, Artificial Sequence
  Description of Artificial Sequence: Synthetic peptide
VQDKFNYSY

SEQ ID NO: 27900 - protein, 9 aa, Artificial Sequence
  Description of Artificial Sequence: Synthetic peptide
VQDKINFSY

SEQ ID NO: 27901 - protein, 9 aa, Artificial Sequence
  Description of Artificial Sequence: Synthetic peptide
VQDKINYGY

SEQ ID NO: 27902 - protein, 9 aa, Artificial Sequence
  Description of Artificial Sequence: Synthetic peptide
VQDKINYNY

SEQ ID NO: 27903 - protein, 9 aa, Artificial Sequence
  Description of Artificial Sequence: Synthetic peptide
VQDKINYSH

SEQ ID NO: 27904 - protein, 9 aa, Artificial Sequence
  Description of Artificial Sequence: Synthetic peptide
VQDKISYSY

SEQ ID NO: 27905 - protein, 9 aa, Artificial Sequence
  Description of Artificial Sequence: Synthetic peptide
VQDKITYSY

SEQ ID NO: 27906 - protein, 9 aa, Artificial Sequence
  Description of Artificial Sequence: Synthetic peptide
VQDKLNYSH

SEQ ID NO: 27907 - protein, 9 aa, Artificial Sequence
  Description of Artificial Sequence: Synthetic peptide
VQDKLNYSY

SEQ ID NO: 27908 - protein, 9 aa, Artificial Sequence
  Description of Artificial Sequence: Synthetic peptide
VQDKRNYSY

SEQ ID NO: 27909 - protein, 9 aa, Artificial Sequence
  Description of Artificial Sequence: Synthetic peptide
VQDKSNYSY

SEQ ID NO: 27910 - protein, 9 aa, Artificial Sequence
  Description of Artificial Sequence: Synthetic peptide
VQDKVNYSY

SEQ ID NO: 27911 - protein, 9 aa, Artificial Sequence
  Description of Artificial Sequence: Synthetic peptide
VQDMLNYSY

SEQ ID NO: 27912 - protein, 9 aa, Artificial Sequence
  Description of Artificial Sequence: Synthetic peptide
VQDMVNYSY

SEQ ID NO: 27913 - protein, 9 aa, Artificial Sequence
  Description of Artificial Sequence: Synthetic peptide
VQDNINYSH

SEQ ID NO: 27914 - protein, 9 aa, Artificial Sequence
  Description of Artificial Sequence: Synthetic peptide
VQDQINYSY

SEQ ID NO: 27915 - protein, 9 aa, Artificial Sequence
  Description of Artificial Sequence: Synthetic peptide
VQDRINYSY

SEQ ID NO: 27916 - protein, 9 aa, Artificial Sequence
  Description of Artificial Sequence: Synthetic peptide
VQDRVNYSY

SEQ ID NO: 27917 - protein, 9 aa, Artificial Sequence
  Description of Artificial Sequence: Synthetic peptide
VQDTINFSY

SEQ ID NO: 27918 - protein, 9 aa, Artificial Sequence
  Description of Artificial Sequence: Synthetic peptide
VQDTINYSF

SEQ ID NO: 27919 - protein, 9 aa, Artificial Sequence
  Description of Artificial Sequence: Synthetic peptide
VQDTINYSY

SEQ ID NO: 27920 - protein, 9 aa, Artificial Sequence
  Description of Artificial Sequence: Synthetic peptide
VQDTVNYSY

SEQ ID NO: 27921 - protein, 9 aa, Artificial Sequence
  Description of Artificial Sequence: Synthetic peptide
VQENINYSY

SEQ ID NO: 27922 - protein, 9 aa, Artificial Sequence
  Description of Artificial Sequence: Synthetic peptide
VQGRINYSY

SEQ ID NO: 27923 - protein, 9 aa, Artificial Sequence
  Description of Artificial Sequence: Synthetic peptide
VQGTINYSY

SEQ ID NO: 27924 - protein, 9 aa, Artificial Sequence
  Description of Artificial Sequence: Synthetic peptide
VQNKINYSY

SEQ ID NO: 27925 - protein, 9 aa, Artificial Sequence
  Description of Artificial Sequence: Synthetic peptide
VQVKINYSY

SEQ ID NO: 27926 - protein, 9 aa, Artificial Sequence
  Description of Artificial Sequence: Synthetic peptide
VQVRINYSY

SEQ ID NO: 27927 - protein, 9 aa, Artificial Sequence
  Description of Artificial Sequence: Synthetic peptide
VQVTINYSY

SEQ ID NO: 27928 - protein, 9 aa, Artificial Sequence
  Description of Artificial Sequence: Synthetic peptide
VRDKINYSY

SEQ ID NO: 27929 - protein, 9 aa, Artificial Sequence
  Description of Artificial Sequence: Synthetic peptide
VRDWQGYWL

SEQ ID NO: 27930 - protein, 9 aa, Artificial Sequence
  Description of Artificial Sequence: Synthetic peptide
VSRRGKLTW

SEQ ID NO: 27931 - protein, 9 aa, Artificial Sequence
  Description of Artificial Sequence: Synthetic peptide
VTMPDAPCG

SEQ ID NO: 27932 - protein, 9 aa, Artificial Sequence
  Description of Artificial Sequence: Synthetic peptide
VWEANPPFR

SEQ ID NO: 27933 - protein, 9 aa, Artificial Sequence
  Description of Artificial Sequence: Synthetic peptide
VWEDNAPFR

SEQ ID NO: 27934 - protein, 9 aa, Artificial Sequence
  Description of Artificial Sequence: Synthetic peptide
VWEDNPPVR

SEQ ID NO: 27935 - protein, 9 aa, Artificial Sequence
  Description of Artificial Sequence: Synthetic peptide
VWENNPPFR

SEQ ID NO: 27936 - protein, 9 aa, Artificial Sequence
  Description of Artificial Sequence: Synthetic peptide
WEKNSSQMR

SEQ ID NO: 27937 - protein, 9 aa, Artificial Sequence
  Description of Artificial Sequence: Synthetic peptide
WEVMVCILR

SEQ ID NO: 27938 - protein, 9 aa, Artificial Sequence
  Description of Artificial Sequence: Synthetic peptide
WHAMVNSGP

SEQ ID NO: 27939 - protein, 9 aa, Artificial Sequence
  Description of Artificial Sequence: Synthetic peptide
WHDMGNSGP

SEQ ID NO: 27940 - protein, 9 aa, Artificial Sequence
  Description of Artificial Sequence: Synthetic peptide
WMCDFSCIQ

SEQ ID NO: 27941 - protein, 9 aa, Artificial Sequence
  Description of Artificial Sequence: Synthetic peptide
WMCEFSCIK

SEQ ID NO: 27942 - protein, 9 aa, Artificial Sequence
  Description of Artificial Sequence: Synthetic peptide
WRDMVNSGP

SEQ ID NO: 27943 - protein, 9 aa, Artificial Sequence
  Description of Artificial Sequence: Synthetic peptide
YAEVAVQKE

SEQ ID NO: 27944 - protein, 9 aa, Artificial Sequence
  Description of Artificial Sequence: Synthetic peptide
YANSIQMSF

SEQ ID NO: 27945 - protein, 9 aa, Artificial Sequence
  Description of Artificial Sequence: Synthetic peptide
YAQVAVQQE

SEQ ID NO: 27946 - protein, 9 aa, Artificial Sequence
  Description of Artificial Sequence: Synthetic peptide
YGGQVEFGW

SEQ ID NO: 27947 - protein, 9 aa, Artificial Sequence
  Description of Artificial Sequence: Synthetic peptide
YHGVICKEL

SEQ ID NO: 27948 - protein, 9 aa, Artificial Sequence
  Description of Artificial Sequence: Synthetic peptide
YHPHFPTYK

SEQ ID NO: 27949 - protein, 9 aa, Artificial Sequence
  Description of Artificial Sequence: Synthetic peptide
YHPYFPAYK

SEQ ID NO: 27950 - protein, 9 aa, Artificial Sequence
  Description of Artificial Sequence: Synthetic peptide
YHPYFPTHK

SEQ ID NO: 27951 - protein, 9 aa, Artificial Sequence
  Description of Artificial Sequence: Synthetic peptide
YHPYFPTNK

SEQ ID NO: 27952 - protein, 9 aa, Artificial Sequence
  Description of Artificial Sequence: Synthetic peptide
YHPYFPTYQ

SEQ ID NO: 27953 - protein, 9 aa, Artificial Sequence
  Description of Artificial Sequence: Synthetic peptide
YHPYFPTYR

SEQ ID NO: 27954 - protein, 9 aa, Artificial Sequence
  Description of Artificial Sequence: Synthetic peptide
YHPYFSTYK

SEQ ID NO: 27955 - protein, 9 aa, Artificial Sequence
  Description of Artificial Sequence: Synthetic peptide
YHPYVPTYR

SEQ ID NO: 27956 - protein, 9 aa, Artificial Sequence
  Description of Artificial Sequence: Synthetic peptide
YIANPCANC

SEQ ID NO: 27957 - protein, 9 aa, Artificial Sequence
  Description of Artificial Sequence: Synthetic peptide
YIDNPCGNC

SEQ ID NO: 27958 - protein, 9 aa, Artificial Sequence
  Description of Artificial Sequence: Synthetic peptide
YIDNPCTNC

SEQ ID NO: 27959 - protein, 9 aa, Artificial Sequence
  Description of Artificial Sequence: Synthetic peptide
YIDTPCANC

SEQ ID NO: 27960 - protein, 9 aa, Artificial Sequence
  Description of Artificial Sequence: Synthetic peptide
YIHNPCANC

SEQ ID NO: 27961 - protein, 9 aa, Artificial Sequence
  Description of Artificial Sequence: Synthetic peptide
YKLNRDDSW

SEQ ID NO: 27962 - protein, 9 aa, Artificial Sequence
  Description of Artificial Sequence: Synthetic peptide
YKMDCHSCG

SEQ ID NO: 27963 - protein, 9 aa, Artificial Sequence
  Description of Artificial Sequence: Synthetic peptide
YKVNGDDSW

SEQ ID NO: 27964 - protein, 9 aa, Artificial Sequence
  Description of Artificial Sequence: Synthetic peptide
YKVNLDDSW

SEQ ID NO: 27965 - protein, 9 aa, Artificial Sequence
  Description of Artificial Sequence: Synthetic peptide
YKVNQDDSW

SEQ ID NO: 27966 - protein, 9 aa, Artificial Sequence
  Description of Artificial Sequence: Synthetic peptide
YKVNRDASW

SEQ ID NO: 27967 - protein, 9 aa, Artificial Sequence
  Description of Artificial Sequence: Synthetic peptide
YKVNRDGSW

SEQ ID NO: 27968 - protein, 9 aa, Artificial Sequence
  Description of Artificial Sequence: Synthetic peptide
YKVNRDVSW

SEQ ID NO: 27969 - protein, 9 aa, Artificial Sequence
  Description of Artificial Sequence: Synthetic peptide
YKVNRDYSW

SEQ ID NO: 27970 - protein, 9 aa, Artificial Sequence
  Description of Artificial Sequence: Synthetic peptide
YKVNRNDSW

SEQ ID NO: 27971 - protein, 9 aa, Artificial Sequence
  Description of Artificial Sequence: Synthetic peptide
YNGGICKEL

SEQ ID NO: 27972 - protein, 9 aa, Artificial Sequence
  Description of Artificial Sequence: Synthetic peptide
YNGVFCKEL

SEQ ID NO: 27973 - protein, 9 aa, Artificial Sequence
  Description of Artificial Sequence: Synthetic peptide
YNGVICKVL

SEQ ID NO: 27974 - protein, 9 aa, Artificial Sequence
  Description of Artificial Sequence: Synthetic peptide
YNGVICQEL

SEQ ID NO: 27975 - protein, 9 aa, Artificial Sequence
  Description of Artificial Sequence: Synthetic peptide
YNGVICREL

SEQ ID NO: 27976 - protein, 9 aa, Artificial Sequence
  Description of Artificial Sequence: Synthetic peptide
YNGVIGKEL

SEQ ID NO: 27977 - protein, 9 aa, Artificial Sequence
  Description of Artificial Sequence: Synthetic peptide
YNGVLCKEL

SEQ ID NO: 27978 - protein, 9 aa, Artificial Sequence
  Description of Artificial Sequence: Synthetic peptide
YNGVMCKEL

SEQ ID NO: 27979 - protein, 9 aa, Artificial Sequence
  Description of Artificial Sequence: Synthetic peptide
YNGVTCKEL

SEQ ID NO: 27980 - protein, 9 aa, Artificial Sequence
  Description of Artificial Sequence: Synthetic peptide
YNGVVCKEL

SEQ ID NO: 27981 - protein, 9 aa, Artificial Sequence
  Description of Artificial Sequence: Synthetic peptide
YQIRFDRHH

SEQ ID NO: 27982 - protein, 9 aa, Artificial Sequence
  Description of Artificial Sequence: Synthetic peptide
YRVNRDDSW

SEQ ID NO: 27983 - protein, 9 aa, Artificial Sequence
  Description of Artificial Sequence: Synthetic peptide
YSAGPLAYN

SEQ ID NO: 27984 - protein, 9 aa, Artificial Sequence
  Description of Artificial Sequence: Synthetic peptide
YSNSIKMSL

SEQ ID NO: 27985 - protein, 9 aa, Artificial Sequence
  Description of Artificial Sequence: Synthetic peptide
YSNSVQMSF

SEQ ID NO: 27986 - protein, 9 aa, Artificial Sequence
  Description of Artificial Sequence: Synthetic peptide
YSNTIQMSL

SEQ ID NO: 27987 - protein, 9 aa, Artificial Sequence
  Description of Artificial Sequence: Synthetic peptide
YTGVICQEL

SEQ ID NO: 27988 - protein, 9 aa, Artificial Sequence
  Description of Artificial Sequence: Synthetic peptide
YWRMVCVHC

SEQ ID NO: 27989 - protein, 9 aa, Artificial Sequence
  Description of Artificial Sequence: Synthetic peptide
YYMHWINSG

SEQ ID NO: 27990 - protein, 9 aa, Artificial Sequence
  Description of Artificial Sequence: Synthetic peptide
YYMHWVNAG

SEQ ID NO: 27991 - protein, 9 aa, Artificial Sequence
  Description of Artificial Sequence: Synthetic peptide
EIILDDQQR

SEQ ID NO: 27992 - protein, 9 aa, Artificial Sequence
  Description of Artificial Sequence: Synthetic peptide
LDDNAWRHR

SEQ ID NO: 27993 - protein, 9 aa, Artificial Sequence
  Description of Artificial Sequence: Synthetic peptide
LGGKPYALD

SEQ ID NO: 27994 - protein, 9 aa, Artificial Sequence
  Description of Artificial Sequence: Synthetic peptide
GSQQTTLSC

SEQ ID NO: 27995 - protein, 9 aa, Artificial Sequence
  Description of Artificial Sequence: Synthetic peptide
TWESQIDCI

SEQ ID NO: 27996 - protein, 9 aa, Artificial Sequence
  Description of Artificial Sequence: Synthetic peptide
VVGLKPMHM

SEQ ID NO: 27997 - protein, 9 aa, Artificial Sequence
  Description of Artificial Sequence: Synthetic peptide
NFNINIYNC

SEQ ID NO: 27998 - protein, 9 aa, Artificial Sequence
  Description of Artificial Sequence: Synthetic peptide
ANHATGGQS

SEQ ID NO: 27999 - protein, 9 aa, Artificial Sequence
  Description of Artificial Sequence: Synthetic peptide
EFKRMTCNK

SEQ ID NO: 28000 - protein, 9 aa, Artificial Sequence
  Description of Artificial Sequence: Synthetic peptide
NKHQGMHRM

SEQ ID NO: 28001 - protein, 9 aa, Artificial Sequence
  Description of Artificial Sequence: Synthetic peptide
KGGPWAYNC

SEQ ID NO: 28002 - protein, 9 aa, Artificial Sequence
  Description of Artificial Sequence: Synthetic peptide
VLIPIGQHY

SEQ ID NO: 28003 - protein, 9 aa, Artificial Sequence
  Description of Artificial Sequence: Synthetic peptide
DPFECTVWP

SEQ ID NO: 28004 - protein, 9 aa, Artificial Sequence
  Description of Artificial Sequence: Synthetic peptide
TVQWNFAHM

SEQ ID NO: 28005 - protein, 9 aa, Artificial Sequence
  Description of Artificial Sequence: Synthetic peptide
TAYMTDMYC

SEQ ID NO: 28006 - protein, 9 aa, Artificial Sequence
  Description of Artificial Sequence: Synthetic peptide
SATNWECSN

SEQ ID NO: 28007 - protein, 9 aa, Artificial Sequence
  Description of Artificial Sequence: Synthetic peptide
KVDAEGFHF

SEQ ID NO: 28008 - protein, 9 aa, Artificial Sequence
  Description of Artificial Sequence: Synthetic peptide
VWEDNPPFR

SEQ ID NO: 28009 - protein, 9 aa, Artificial Sequence
  Description of Artificial Sequence: Synthetic peptide
SVLMSPHLM

SEQ ID NO: 28010 - protein, 9 aa, Artificial Sequence
  Description of Artificial Sequence: Synthetic peptide
LEKNSSQMR

SEQ ID NO: 28011 - protein, 9 aa, Artificial Sequence
  Description of Artificial Sequence: Synthetic peptide
CRCNDAWNM

SEQ ID NO: 28012 - protein, 9 aa, Artificial Sequence
  Description of Artificial Sequence: Synthetic peptide
AAPFMWRDL

SEQ ID NO: 28013 - protein, 9 aa, Artificial Sequence
  Description of Artificial Sequence: Synthetic peptide
ACKYPPHVR

SEQ ID NO: 28014 - protein, 9 aa, Artificial Sequence
  Description of Artificial Sequence: Synthetic peptide
ANKMFMEQA

SEQ ID NO: 28015 - protein, 9 aa, Artificial Sequence
  Description of Artificial Sequence: Synthetic peptide
ANKMFMGQA

SEQ ID NO: 28016 - protein, 9 aa, Artificial Sequence
  Description of Artificial Sequence: Synthetic peptide
ANKMVMEQA

SEQ ID NO: 28017 - protein, 9 aa, Artificial Sequence
  Description of Artificial Sequence: Synthetic peptide
AWSEFQWFD

SEQ ID NO: 28018 - protein, 9 aa, Artificial Sequence
  Description of Artificial Sequence: Synthetic peptide
CYRCLPPEA

SEQ ID NO: 28019 - protein, 9 aa, Artificial Sequence
  Description of Artificial Sequence: Synthetic peptide
DIDRHAHFD

SEQ ID NO: 28020 - protein, 9 aa, Artificial Sequence
  Description of Artificial Sequence: Synthetic peptide
DKGYSLYQP

SEQ ID NO: 28021 - protein, 9 aa, Artificial Sequence
  Description of Artificial Sequence: Synthetic peptide
DRDWSDVRR

SEQ ID NO: 28022 - protein, 9 aa, Artificial Sequence
  Description of Artificial Sequence: Synthetic peptide
DRGWSDVRR

SEQ ID NO: 28023 - protein, 9 aa, Artificial Sequence
  Description of Artificial Sequence: Synthetic peptide
EHGYMRCTK

SEQ ID NO: 28024 - protein, 9 aa, Artificial Sequence
  Description of Artificial Sequence: Synthetic peptide
EHGYMRCTR

SEQ ID NO: 28025 - protein, 9 aa, Artificial Sequence
  Description of Artificial Sequence: Synthetic peptide
EHGYMRCTT

SEQ ID NO: 28026 - protein, 9 aa, Artificial Sequence
  Description of Artificial Sequence: Synthetic peptide
EHGYMRYTK

SEQ ID NO: 28027 - protein, 9 aa, Artificial Sequence
  Description of Artificial Sequence: Synthetic peptide
EIECLQTVA

SEQ ID NO: 28028 - protein, 9 aa, Artificial Sequence
  Description of Artificial Sequence: Synthetic peptide
EIEFLQTVA

SEQ ID NO: 28029 - protein, 9 aa, Artificial Sequence
  Description of Artificial Sequence: Synthetic peptide
EIEFLQTVS

SEQ ID NO: 28030 - protein, 9 aa, Artificial Sequence
  Description of Artificial Sequence: Synthetic peptide
EIEFLQTVV

SEQ ID NO: 28031 - protein, 9 aa, Artificial Sequence
  Description of Artificial Sequence: Synthetic peptide
EIEILQTVA

SEQ ID NO: 28032 - protein, 9 aa, Artificial Sequence
  Description of Artificial Sequence: Synthetic peptide
EIEVLQTVA

SEQ ID NO: 28033 - protein, 9 aa, Artificial Sequence
  Description of Artificial Sequence: Synthetic peptide
EIFLDDQQR

SEQ ID NO: 28034 - protein, 9 aa, Artificial Sequence
  Description of Artificial Sequence: Synthetic peptide
EIILDAQQR

SEQ ID NO: 28035 - protein, 9 aa, Artificial Sequence
  Description of Artificial Sequence: Synthetic peptide
EIILDDEQR

SEQ ID NO: 28036 - protein, 9 aa, Artificial Sequence
  Description of Artificial Sequence: Synthetic peptide
EIILDDQQC

SEQ ID NO: 28037 - protein, 9 aa, Artificial Sequence
  Description of Artificial Sequence: Synthetic peptide
EIILDDQQH

SEQ ID NO: 28038 - protein, 9 aa, Artificial Sequence
  Description of Artificial Sequence: Synthetic peptide
EIILDDQRR

SEQ ID NO: 28039 - protein, 9 aa, Artificial Sequence
  Description of Artificial Sequence: Synthetic peptide
EIILDGQQR

SEQ ID NO: 28040 - protein, 9 aa, Artificial Sequence
  Description of Artificial Sequence: Synthetic peptide
EIILDVQQR

SEQ ID NO: 28041 - protein, 9 aa, Artificial Sequence
  Description of Artificial Sequence: Synthetic peptide
EIILGDQQR

SEQ ID NO: 28042 - protein, 9 aa, Artificial Sequence
  Description of Artificial Sequence: Synthetic peptide
ELALGVLWK

SEQ ID NO: 28043 - protein, 9 aa, Artificial Sequence
  Description of Artificial Sequence: Synthetic peptide
FPPFCALCT

SEQ ID NO: 28044 - protein, 9 aa, Artificial Sequence
  Description of Artificial Sequence: Synthetic peptide
FPPFYALCT

SEQ ID NO: 28045 - protein, 9 aa, Artificial Sequence
  Description of Artificial Sequence: Synthetic peptide
FPPFYAPCT

SEQ ID NO: 28046 - protein, 9 aa, Artificial Sequence
  Description of Artificial Sequence: Synthetic peptide
FPPFYTLCT

SEQ ID NO: 28047 - protein, 9 aa, Artificial Sequence
  Description of Artificial Sequence: Synthetic peptide
FTAYPQAVM

SEQ ID NO: 28048 - protein, 9 aa, Artificial Sequence
  Description of Artificial Sequence: Synthetic peptide
GAIVFDLCD

SEQ ID NO: 28049 - protein, 9 aa, Artificial Sequence
  Description of Artificial Sequence: Synthetic peptide
GAWDYMYEC

SEQ ID NO: 28050 - protein, 9 aa, Artificial Sequence
  Description of Artificial Sequence: Synthetic peptide
GCFWAANSC

SEQ ID NO: 28051 - protein, 9 aa, Artificial Sequence
  Description of Artificial Sequence: Synthetic peptide
GCFWAANSG

SEQ ID NO: 28052 - protein, 9 aa, Artificial Sequence
  Description of Artificial Sequence: Synthetic peptide
GCFWATNSG

SEQ ID NO: 28053 - protein, 9 aa, Artificial Sequence
  Description of Artificial Sequence: Synthetic peptide
GIILDDQQR

SEQ ID NO: 28054 - protein, 9 aa, Artificial Sequence
  Description of Artificial Sequence: Synthetic peptide
GMPTNHQYI

SEQ ID NO: 28055 - protein, 9 aa, Artificial Sequence
  Description of Artificial Sequence: Synthetic peptide
GMPTNRQYI

SEQ ID NO: 28056 - protein, 9 aa, Artificial Sequence
  Description of Artificial Sequence: Synthetic peptide
GMSTNRQYI

SEQ ID NO: 28057 - protein, 9 aa, Artificial Sequence
  Description of Artificial Sequence: Synthetic peptide
GNLIDWQHI

SEQ ID NO: 28058 - protein, 9 aa, Artificial Sequence
  Description of Artificial Sequence: Synthetic peptide
GNLIDWRHI

SEQ ID NO: 28059 - protein, 9 aa, Artificial Sequence
  Description of Artificial Sequence: Synthetic peptide
HADFERHSQ

SEQ ID NO: 28060 - protein, 9 aa, Artificial Sequence
  Description of Artificial Sequence: Synthetic peptide
HADFGRHSQ

SEQ ID NO: 28061 - protein, 9 aa, Artificial Sequence
  Description of Artificial Sequence: Synthetic peptide
HLSFMDLGS

SEQ ID NO: 28062 - protein, 9 aa, Artificial Sequence
  Description of Artificial Sequence: Synthetic peptide
HLSFMNLCS

SEQ ID NO: 28063 - protein, 9 aa, Artificial Sequence
  Description of Artificial Sequence: Synthetic peptide
HLSFMNLDS

SEQ ID NO: 28064 - protein, 9 aa, Artificial Sequence
  Description of Artificial Sequence: Synthetic peptide
HLSFMNLGI

SEQ ID NO: 28065 - protein, 9 aa, Artificial Sequence
  Description of Artificial Sequence: Synthetic peptide
HLSFMNLGS

SEQ ID NO: 28066 - protein, 9 aa, Artificial Sequence
  Description of Artificial Sequence: Synthetic peptide
HLSFMSLGS

SEQ ID NO: 28067 - protein, 9 aa, Artificial Sequence
  Description of Artificial Sequence: Synthetic peptide
HLSFVNLGS

SEQ ID NO: 28068 - protein, 9 aa, Artificial Sequence
  Description of Artificial Sequence: Synthetic peptide
IALTVTRFP

SEQ ID NO: 28069 - protein, 9 aa, Artificial Sequence
  Description of Artificial Sequence: Synthetic peptide
IQHWMSHSH

SEQ ID NO: 28070 - protein, 9 aa, Artificial Sequence
  Description of Artificial Sequence: Synthetic peptide
IQHWMSHSR

SEQ ID NO: 28071 - protein, 9 aa, Artificial Sequence
  Description of Artificial Sequence: Synthetic peptide
ISHCHFDHK

SEQ ID NO: 28072 - protein, 9 aa, Artificial Sequence
  Description of Artificial Sequence: Synthetic peptide
ISHSHFDHK

SEQ ID NO: 28073 - protein, 9 aa, Artificial Sequence
  Description of Artificial Sequence: Synthetic peptide
ISHYHFDHE

SEQ ID NO: 28074 - protein, 9 aa, Artificial Sequence
  Description of Artificial Sequence: Synthetic peptide
ISHYHFDHK

SEQ ID NO: 28075 - protein, 9 aa, Artificial Sequence
  Description of Artificial Sequence: Synthetic peptide
ISHYHFDHR

SEQ ID NO: 28076 - protein, 9 aa, Artificial Sequence
  Description of Artificial Sequence: Synthetic peptide
ISHYHFDQK

SEQ ID NO: 28077 - protein, 9 aa, Artificial Sequence
  Description of Artificial Sequence: Synthetic peptide
ISHYHFGHK

SEQ ID NO: 28078 - protein, 9 aa, Artificial Sequence
  Description of Artificial Sequence: Synthetic peptide
ITQCTMMGV

SEQ ID NO: 28079 - protein, 9 aa, Artificial Sequence
  Description of Artificial Sequence: Synthetic peptide
KLPGSHAER

SEQ ID NO: 28080 - protein, 9 aa, Artificial Sequence
  Description of Artificial Sequence: Synthetic peptide
KLPGSHTER

SEQ ID NO: 28081 - protein, 9 aa, Artificial Sequence
  Description of Artificial Sequence: Synthetic peptide
KLPGSRAER

SEQ ID NO: 28082 - protein, 9 aa, Artificial Sequence
  Description of Artificial Sequence: Synthetic peptide
KYASVLEQA

SEQ ID NO: 28083 - protein, 9 aa, Artificial Sequence
  Description of Artificial Sequence: Synthetic peptide
KYASVPEQA

SEQ ID NO: 28084 - protein, 9 aa, Artificial Sequence
  Description of Artificial Sequence: Synthetic peptide
LDLKWWCTF

SEQ ID NO: 28085 - protein, 9 aa, Artificial Sequence
  Description of Artificial Sequence: Synthetic peptide
MFFQKPKWS

SEQ ID NO: 28086 - protein, 9 aa, Artificial Sequence
  Description of Artificial Sequence: Synthetic peptide
MIALRMEGN

SEQ ID NO: 28087 - protein, 9 aa, Artificial Sequence
  Description of Artificial Sequence: Synthetic peptide
MIDLRMEGN

SEQ ID NO: 28088 - protein, 9 aa, Artificial Sequence
  Description of Artificial Sequence: Synthetic peptide
MIDLRMEGT

SEQ ID NO: 28089 - protein, 9 aa, Artificial Sequence
  Description of Artificial Sequence: Synthetic peptide
MIDLRMGGN

SEQ ID NO: 28090 - protein, 9 aa, Artificial Sequence
  Description of Artificial Sequence: Synthetic peptide
MIDLRVEGN

SEQ ID NO: 28091 - protein, 9 aa, Artificial Sequence
  Description of Artificial Sequence: Synthetic peptide
MIDLWMEGN

SEQ ID NO: 28092 - protein, 9 aa, Artificial Sequence
  Description of Artificial Sequence: Synthetic peptide
MQEQQKAYE

SEQ ID NO: 28093 - protein, 9 aa, Artificial Sequence
  Description of Artificial Sequence: Synthetic peptide
MQEQQKTYA

SEQ ID NO: 28094 - protein, 9 aa, Artificial Sequence
  Description of Artificial Sequence: Synthetic peptide
MQEQQKTYE

SEQ ID NO: 28095 - protein, 9 aa, Artificial Sequence
  Description of Artificial Sequence: Synthetic peptide
MQEQQRTYE

SEQ ID NO: 28096 - protein, 9 aa, Artificial Sequence
  Description of Artificial Sequence: Synthetic peptide
MQQSEQCYP

SEQ ID NO: 28097 - protein, 9 aa, Artificial Sequence
  Description of Artificial Sequence: Synthetic peptide
MQQSEQCYQ

SEQ ID NO: 28098 - protein, 9 aa, Artificial Sequence
  Description of Artificial Sequence: Synthetic peptide
MQQSEQFYQ

SEQ ID NO: 28099 - protein, 9 aa, Artificial Sequence
  Description of Artificial Sequence: Synthetic peptide
MQQSGQCYQ

SEQ ID NO: 28100 - protein, 9 aa, Artificial Sequence
  Description of Artificial Sequence: Synthetic peptide
MREQQKTYE

SEQ ID NO: 28101 - protein, 9 aa, Artificial Sequence
  Description of Artificial Sequence: Synthetic peptide
MSFQEPKWS

SEQ ID NO: 28102 - protein, 9 aa, Artificial Sequence
  Description of Artificial Sequence: Synthetic peptide
MSFQKPKWS

SEQ ID NO: 28103 - protein, 9 aa, Artificial Sequence
  Description of Artificial Sequence: Synthetic peptide
MSFQKPMWS

SEQ ID NO: 28104 - protein, 9 aa, Artificial Sequence
  Description of Artificial Sequence: Synthetic peptide
MSFQKPRWS

SEQ ID NO: 28105 - protein, 9 aa, Artificial Sequence
  Description of Artificial Sequence: Synthetic peptide
MSFQKTKWS

SEQ ID NO: 28106 - protein, 9 aa, Artificial Sequence
  Description of Artificial Sequence: Synthetic peptide
NCLPWGQFC

SEQ ID NO: 28107 - protein, 9 aa, Artificial Sequence
  Description of Artificial Sequence: Synthetic peptide
NCLPWSQFC

SEQ ID NO: 28108 - protein, 9 aa, Artificial Sequence
  Description of Artificial Sequence: Synthetic peptide
NCLSWSQFC

SEQ ID NO: 28109 - protein, 9 aa, Artificial Sequence
  Description of Artificial Sequence: Synthetic peptide
NLRECTIMN

SEQ ID NO: 28110 - protein, 9 aa, Artificial Sequence
  Description of Artificial Sequence: Synthetic peptide
NLREGTIMN

SEQ ID NO: 28111 - protein, 9 aa, Artificial Sequence
  Description of Artificial Sequence: Synthetic peptide
NLWECTIMN

SEQ ID NO: 28112 - protein, 9 aa, Artificial Sequence
  Description of Artificial Sequence: Synthetic peptide
NRGCSDRIS

SEQ ID NO: 28113 - protein, 9 aa, Artificial Sequence
  Description of Artificial Sequence: Synthetic peptide
NWLPWSQFC

SEQ ID NO: 28114 - protein, 9 aa, Artificial Sequence
  Description of Artificial Sequence: Synthetic peptide
NYIEACAMN

SEQ ID NO: 28115 - protein, 9 aa, Artificial Sequence
  Description of Artificial Sequence: Synthetic peptide
PREICWSHS

SEQ ID NO: 28116 - protein, 9 aa, Artificial Sequence
  Description of Artificial Sequence: Synthetic peptide
PVCSTHFWQ

SEQ ID NO: 28117 - protein, 9 aa, Artificial Sequence
  Description of Artificial Sequence: Synthetic peptide
PVSMGTKRE

SEQ ID NO: 28118 - protein, 9 aa, Artificial Sequence
  Description of Artificial Sequence: Synthetic peptide
PVSMGTRRE

SEQ ID NO: 28119 - protein, 9 aa, Artificial Sequence
  Description of Artificial Sequence: Synthetic peptide
QCRHEGSNG

SEQ ID NO: 28120 - protein, 9 aa, Artificial Sequence
  Description of Artificial Sequence: Synthetic peptide
QCRHEWSNG

SEQ ID NO: 28121 - protein, 9 aa, Artificial Sequence
  Description of Artificial Sequence: Synthetic peptide
QCYTFNDTK

SEQ ID NO: 28122 - protein, 9 aa, Artificial Sequence
  Description of Artificial Sequence: Synthetic peptide
QHNYVSVVE

SEQ ID NO: 28123 - protein, 9 aa, Artificial Sequence
  Description of Artificial Sequence: Synthetic peptide
QHNYVSVVG

SEQ ID NO: 28124 - protein, 9 aa, Artificial Sequence
  Description of Artificial Sequence: Synthetic peptide
QHVGLQAEK

SEQ ID NO: 28125 - protein, 9 aa, Artificial Sequence
  Description of Artificial Sequence: Synthetic peptide
RENTFDQIR

SEQ ID NO: 28126 - protein, 9 aa, Artificial Sequence
  Description of Artificial Sequence: Synthetic peptide
RHGHGHHYD

SEQ ID NO: 28127 - protein, 9 aa, Artificial Sequence
  Description of Artificial Sequence: Synthetic peptide
RHSHGHHYD

SEQ ID NO: 28128 - protein, 9 aa, Artificial Sequence
  Description of Artificial Sequence: Synthetic peptide
RHSHGHHYG

SEQ ID NO: 28129 - protein, 9 aa, Artificial Sequence
  Description of Artificial Sequence: Synthetic peptide
RHSHGHHYY

SEQ ID NO: 28130 - protein, 9 aa, Artificial Sequence
  Description of Artificial Sequence: Synthetic peptide
RHSHGPHYD

SEQ ID NO: 28131 - protein, 9 aa, Artificial Sequence
  Description of Artificial Sequence: Synthetic peptide
RLSFMNLGS

SEQ ID NO: 28132 - protein, 9 aa, Artificial Sequence
  Description of Artificial Sequence: Synthetic peptide
SIEVRPPLC

SEQ ID NO: 28133 - protein, 9 aa, Artificial Sequence
  Description of Artificial Sequence: Synthetic peptide
SIEVWPPLC

SEQ ID NO: 28134 - protein, 9 aa, Artificial Sequence
  Description of Artificial Sequence: Synthetic peptide
SKAKYKTQM

SEQ ID NO: 28135 - protein, 9 aa, Artificial Sequence
  Description of Artificial Sequence: Synthetic peptide
SMEFEDQCV

SEQ ID NO: 28136 - protein, 9 aa, Artificial Sequence
  Description of Artificial Sequence: Synthetic peptide
SMEFGDQCV

SEQ ID NO: 28137 - protein, 9 aa, Artificial Sequence
  Description of Artificial Sequence: Synthetic peptide
SMEVEDQCV

SEQ ID NO: 28138 - protein, 9 aa, Artificial Sequence
  Description of Artificial Sequence: Synthetic peptide
SVEVRPPLC

SEQ ID NO: 28139 - protein, 9 aa, Artificial Sequence
  Description of Artificial Sequence: Synthetic peptide
TFCFVQTLV

SEQ ID NO: 28140 - protein, 9 aa, Artificial Sequence
  Description of Artificial Sequence: Synthetic peptide
TFCFVQTRV

SEQ ID NO: 28141 - protein, 9 aa, Artificial Sequence
  Description of Artificial Sequence: Synthetic peptide
TFKFNWMDN

SEQ ID NO: 28142 - protein, 9 aa, Artificial Sequence
  Description of Artificial Sequence: Synthetic peptide
TFKFNWMDS

SEQ ID NO: 28143 - protein, 9 aa, Artificial Sequence
  Description of Artificial Sequence: Synthetic peptide
TFKFNWMDT

SEQ ID NO: 28144 - protein, 9 aa, Artificial Sequence
  Description of Artificial Sequence: Synthetic peptide
TFKFNWMGN

SEQ ID NO: 28145 - protein, 9 aa, Artificial Sequence
  Description of Artificial Sequence: Synthetic peptide
TFKFNWMYN

SEQ ID NO: 28146 - protein, 9 aa, Artificial Sequence
  Description of Artificial Sequence: Synthetic peptide
TFKVNWMDN

SEQ ID NO: 28147 - protein, 9 aa, Artificial Sequence
  Description of Artificial Sequence: Synthetic peptide
TFRFNWMDN

SEQ ID NO: 28148 - protein, 9 aa, Artificial Sequence
  Description of Artificial Sequence: Synthetic peptide
TFTFNWMDN

SEQ ID NO: 28149 - protein, 9 aa, Artificial Sequence
  Description of Artificial Sequence: Synthetic peptide
THCPFQHDI

SEQ ID NO: 28150 - protein, 9 aa, Artificial Sequence
  Description of Artificial Sequence: Synthetic peptide
THCQFPHDI

SEQ ID NO: 28151 - protein, 9 aa, Artificial Sequence
  Description of Artificial Sequence: Synthetic peptide
THCQFQHDI

SEQ ID NO: 28152 - protein, 9 aa, Artificial Sequence
  Description of Artificial Sequence: Synthetic peptide
THCQFQHDM

SEQ ID NO: 28153 - protein, 9 aa, Artificial Sequence
  Description of Artificial Sequence: Synthetic peptide
TNKMFMEQA

SEQ ID NO: 28154 - protein, 9 aa, Artificial Sequence
  Description of Artificial Sequence: Synthetic peptide
VAIVFDLCD

SEQ ID NO: 28155 - protein, 9 aa, Artificial Sequence
  Description of Artificial Sequence: Synthetic peptide
VAIVFGLCD

SEQ ID NO: 28156 - protein, 9 aa, Artificial Sequence
  Description of Artificial Sequence: Synthetic peptide
VAWDCMYEC

SEQ ID NO: 28157 - protein, 9 aa, Artificial Sequence
  Description of Artificial Sequence: Synthetic peptide
VAWDDMYEC

SEQ ID NO: 28158 - protein, 9 aa, Artificial Sequence
  Description of Artificial Sequence: Synthetic peptide
VAWDYMYEC

SEQ ID NO: 28159 - protein, 9 aa, Artificial Sequence
  Description of Artificial Sequence: Synthetic peptide
VAWDYMYEG

SEQ ID NO: 28160 - protein, 9 aa, Artificial Sequence
  Description of Artificial Sequence: Synthetic peptide
VAWGYMYEC

SEQ ID NO: 28161 - protein, 9 aa, Artificial Sequence
  Description of Artificial Sequence: Synthetic peptide
WANLRQMDL

SEQ ID NO: 28162 - protein, 9 aa, Artificial Sequence
  Description of Artificial Sequence: Synthetic peptide
WGNLRQMDL

SEQ ID NO: 28163 - protein, 9 aa, Artificial Sequence
  Description of Artificial Sequence: Synthetic peptide
WSSREYLHK

SEQ ID NO: 28164 - protein, 9 aa, Artificial Sequence
  Description of Artificial Sequence: Synthetic peptide
WVNLRQMDL

SEQ ID NO: 28165 - protein, 9 aa, Artificial Sequence
  Description of Artificial Sequence: Synthetic peptide
WVNLRQMGL

SEQ ID NO: 28166 - protein, 9 aa, Artificial Sequence
  Description of Artificial Sequence: Synthetic peptide
WVNLWQMDL

SEQ ID NO: 28167 - protein, 9 aa, Artificial Sequence
  Description of Artificial Sequence: Synthetic peptide
YYYSSKSSV

SEQ ID NO: 28168 - protein, 9 aa, Artificial Sequence
  Description of Artificial Sequence: Synthetic peptide
YYYSSTSSV

SEQ ID NO: 28169 - protein, 9 aa, Artificial Sequence
  Description of Artificial Sequence: Synthetic peptide
WSSREYWHR

SEQ ID NO: 28170 - protein, 9 aa, Artificial Sequence
  Description of Artificial Sequence: Synthetic peptide
WSSRGYWHK

SEQ ID NO: 28171 - protein, 9 aa, Artificial Sequence
  Description of Artificial Sequence: Synthetic peptide
WSSREDWHK

SEQ ID NO: 28172 - protein, 9 aa, Artificial Sequence
  Description of Artificial Sequence: Synthetic peptide
MHNPLWFSS

SEQ ID NO: 28173 - protein, 9 aa, Artificial Sequence
  Description of Artificial Sequence: Synthetic peptide
ACVDHMFER

SEQ ID NO: 28174 - protein, 9 aa, Artificial Sequence
  Description of Artificial Sequence: Synthetic peptide
AGYTIHTVA

SEQ ID NO: 28175 - protein, 9 aa, Artificial Sequence
  Description of Artificial Sequence: Synthetic peptide
AGYTIHTVE

SEQ ID NO: 28176 - protein, 9 aa, Artificial Sequence
  Description of Artificial Sequence: Synthetic peptide
AIHLPSACW

SEQ ID NO: 28177 - protein, 9 aa, Artificial Sequence
  Description of Artificial Sequence: Synthetic peptide
AITMDAQPN

SEQ ID NO: 28178 - protein, 9 aa, Artificial Sequence
  Description of Artificial Sequence: Synthetic peptide
ATIDHNSPG

SEQ ID NO: 28179 - protein, 9 aa, Artificial Sequence
  Description of Artificial Sequence: Synthetic peptide
AVGSEDSSD

SEQ ID NO: 28180 - protein, 9 aa, Artificial Sequence
  Description of Artificial Sequence: Synthetic peptide
CAHIMDELG

SEQ ID NO: 28181 - protein, 9 aa, Artificial Sequence
  Description of Artificial Sequence: Synthetic peptide
CDINVLIMM

SEQ ID NO: 28182 - protein, 9 aa, Artificial Sequence
  Description of Artificial Sequence: Synthetic peptide
CDINVLIMV

SEQ ID NO: 28183 - protein, 9 aa, Artificial Sequence
  Description of Artificial Sequence: Synthetic peptide
CDKLDKPAV

SEQ ID NO: 28184 - protein, 9 aa, Artificial Sequence
  Description of Artificial Sequence: Synthetic peptide
CDKLDKPTV

SEQ ID NO: 28185 - protein, 9 aa, Artificial Sequence
  Description of Artificial Sequence: Synthetic peptide
CFAHMQIAN

SEQ ID NO: 28186 - protein, 9 aa, Artificial Sequence
  Description of Artificial Sequence: Synthetic peptide
CISNHNSTY

SEQ ID NO: 28187 - protein, 9 aa, Artificial Sequence
  Description of Artificial Sequence: Synthetic peptide
CLSMFVGNT

SEQ ID NO: 28188 - protein, 9 aa, Artificial Sequence
  Description of Artificial Sequence: Synthetic peptide
CVKLYVNED

SEQ ID NO: 28189 - protein, 9 aa, Artificial Sequence
  Description of Artificial Sequence: Synthetic peptide
CVKLYVNGD

SEQ ID NO: 28190 - protein, 9 aa, Artificial Sequence
  Description of Artificial Sequence: Synthetic peptide
CVRKCDLCG

SEQ ID NO: 28191 - protein, 9 aa, Artificial Sequence
  Description of Artificial Sequence: Synthetic peptide
DMPWVDYMG

SEQ ID NO: 28192 - protein, 9 aa, Artificial Sequence
  Description of Artificial Sequence: Synthetic peptide
DMTFEAYPT

SEQ ID NO: 28193 - protein, 9 aa, Artificial Sequence
  Description of Artificial Sequence: Synthetic peptide
DMTFEPYPT

SEQ ID NO: 28194 - protein, 9 aa, Artificial Sequence
  Description of Artificial Sequence: Synthetic peptide
DMTFETYPT

SEQ ID NO: 28195 - protein, 9 aa, Artificial Sequence
  Description of Artificial Sequence: Synthetic peptide
DNDVEMAAK

SEQ ID NO: 28196 - protein, 9 aa, Artificial Sequence
  Description of Artificial Sequence: Synthetic peptide
DSDNGPNIF

SEQ ID NO: 28197 - protein, 9 aa, Artificial Sequence
  Description of Artificial Sequence: Synthetic peptide
EAHPHMMSQ

SEQ ID NO: 28198 - protein, 9 aa, Artificial Sequence
  Description of Artificial Sequence: Synthetic peptide
EAQPHMMSQ

SEQ ID NO: 28199 - protein, 9 aa, Artificial Sequence
  Description of Artificial Sequence: Synthetic peptide
ECGRYGVFS

SEQ ID NO: 28200 - protein, 9 aa, Artificial Sequence
  Description of Artificial Sequence: Synthetic peptide
EFMEVMDQV

SEQ ID NO: 28201 - protein, 9 aa, Artificial Sequence
  Description of Artificial Sequence: Synthetic peptide
EGGFQDFCE

SEQ ID NO: 28202 - protein, 9 aa, Artificial Sequence
  Description of Artificial Sequence: Synthetic peptide
EGGFRDFWE

SEQ ID NO: 28203 - protein, 9 aa, Artificial Sequence
  Description of Artificial Sequence: Synthetic peptide
EMLRCCDCT

SEQ ID NO: 28204 - protein, 9 aa, Artificial Sequence
  Description of Artificial Sequence: Synthetic peptide
EQLDVQEVY

SEQ ID NO: 28205 - protein, 9 aa, Artificial Sequence
  Description of Artificial Sequence: Synthetic peptide
EVDVSNDNC

SEQ ID NO: 28206 - protein, 9 aa, Artificial Sequence
  Description of Artificial Sequence: Synthetic peptide
EVDVSNNNC

SEQ ID NO: 28207 - protein, 9 aa, Artificial Sequence
  Description of Artificial Sequence: Synthetic peptide
EVSDGTPTV

SEQ ID NO: 28208 - protein, 9 aa, Artificial Sequence
  Description of Artificial Sequence: Synthetic peptide
FALWSNCAE

SEQ ID NO: 28209 - protein, 9 aa, Artificial Sequence
  Description of Artificial Sequence: Synthetic peptide
FALWSNCGE

SEQ ID NO: 28210 - protein, 9 aa, Artificial Sequence
  Description of Artificial Sequence: Synthetic peptide
FALWSNCVE

SEQ ID NO: 28211 - protein, 9 aa, Artificial Sequence
  Description of Artificial Sequence: Synthetic peptide
FDCHNASKP

SEQ ID NO: 28212 - protein, 9 aa, Artificial Sequence
  Description of Artificial Sequence: Synthetic peptide
FLTEMQWHA

SEQ ID NO: 28213 - protein, 9 aa, Artificial Sequence
  Description of Artificial Sequence: Synthetic peptide
FLTGMQWHA

SEQ ID NO: 28214 - protein, 9 aa, Artificial Sequence
  Description of Artificial Sequence: Synthetic peptide
FVADWIWPA

SEQ ID NO: 28215 - protein, 9 aa, Artificial Sequence
  Description of Artificial Sequence: Synthetic peptide
FVADWIWPT

SEQ ID NO: 28216 - protein, 9 aa, Artificial Sequence
  Description of Artificial Sequence: Synthetic peptide
FVADWIWSA

SEQ ID NO: 28217 - protein, 9 aa, Artificial Sequence
  Description of Artificial Sequence: Synthetic peptide
GCFTFWDHQ

SEQ ID NO: 28218 - protein, 9 aa, Artificial Sequence
  Description of Artificial Sequence: Synthetic peptide
GCLQVNQME

SEQ ID NO: 28219 - protein, 9 aa, Artificial Sequence
  Description of Artificial Sequence: Synthetic peptide
GCNMIPKHD

SEQ ID NO: 28220 - protein, 9 aa, Artificial Sequence
  Description of Artificial Sequence: Synthetic peptide
GDMPERETG

SEQ ID NO: 28221 - protein, 9 aa, Artificial Sequence
  Description of Artificial Sequence: Synthetic peptide
GHVSTSNQG

SEQ ID NO: 28222 - protein, 9 aa, Artificial Sequence
  Description of Artificial Sequence: Synthetic peptide
GQHSLVTMY

SEQ ID NO: 28223 - protein, 9 aa, Artificial Sequence
  Description of Artificial Sequence: Synthetic peptide
GVQFRYSMP

SEQ ID NO: 28224 - protein, 9 aa, Artificial Sequence
  Description of Artificial Sequence: Synthetic peptide
GVRVQDSHH

SEQ ID NO: 28225 - protein, 9 aa, Artificial Sequence
  Description of Artificial Sequence: Synthetic peptide
GVTHKAKHE

SEQ ID NO: 28226 - protein, 9 aa, Artificial Sequence
  Description of Artificial Sequence: Synthetic peptide
GVWVQDSHH

SEQ ID NO: 28227 - protein, 9 aa, Artificial Sequence
  Description of Artificial Sequence: Synthetic peptide
HSDYEMNDD

SEQ ID NO: 28228 - protein, 9 aa, Artificial Sequence
  Description of Artificial Sequence: Synthetic peptide
HYTEGYRQT

SEQ ID NO: 28229 - protein, 9 aa, Artificial Sequence
  Description of Artificial Sequence: Synthetic peptide
IADHFLAHF

SEQ ID NO: 28230 - protein, 9 aa, Artificial Sequence
  Description of Artificial Sequence: Synthetic peptide
IADLCNCEN

SEQ ID NO: 28231 - protein, 9 aa, Artificial Sequence
  Description of Artificial Sequence: Synthetic peptide
IGAPVDTIN

SEQ ID NO: 28232 - protein, 9 aa, Artificial Sequence
  Description of Artificial Sequence: Synthetic peptide
IGTAFRNSG

SEQ ID NO: 28233 - protein, 9 aa, Artificial Sequence
  Description of Artificial Sequence: Synthetic peptide
KCESDYLPE

SEQ ID NO: 28234 - protein, 9 aa, Artificial Sequence
  Description of Artificial Sequence: Synthetic peptide
KTNWWDGQC

SEQ ID NO: 28235 - protein, 9 aa, Artificial Sequence
  Description of Artificial Sequence: Synthetic peptide
LAIRKIANH

SEQ ID NO: 28236 - protein, 9 aa, Artificial Sequence
  Description of Artificial Sequence: Synthetic peptide
LAIRKITNH

SEQ ID NO: 28237 - protein, 9 aa, Artificial Sequence
  Description of Artificial Sequence: Synthetic peptide
LARYCEKTP

SEQ ID NO: 28238 - protein, 9 aa, Artificial Sequence
  Description of Artificial Sequence: Synthetic peptide
LCMESIMMI

SEQ ID NO: 28239 - protein, 9 aa, Artificial Sequence
  Description of Artificial Sequence: Synthetic peptide
LCMESLMMI

SEQ ID NO: 28240 - protein, 9 aa, Artificial Sequence
  Description of Artificial Sequence: Synthetic peptide
LCTESLMMI

SEQ ID NO: 28241 - protein, 9 aa, Artificial Sequence
  Description of Artificial Sequence: Synthetic peptide
LDRRSSAYS

SEQ ID NO: 28242 - protein, 9 aa, Artificial Sequence
  Description of Artificial Sequence: Synthetic peptide
LFSAWNDFA

SEQ ID NO: 28243 - protein, 9 aa, Artificial Sequence
  Description of Artificial Sequence: Synthetic peptide
LFSAWNDFV

SEQ ID NO: 28244 - protein, 9 aa, Artificial Sequence
  Description of Artificial Sequence: Synthetic peptide
LMCYMQKIT

SEQ ID NO: 28245 - protein, 9 aa, Artificial Sequence
  Description of Artificial Sequence: Synthetic peptide
LMGYMQKIT

SEQ ID NO: 28246 - protein, 9 aa, Artificial Sequence
  Description of Artificial Sequence: Synthetic peptide
LMSTMFNTF

SEQ ID NO: 28247 - protein, 9 aa, Artificial Sequence
  Description of Artificial Sequence: Synthetic peptide
LQVHWWLLL

SEQ ID NO: 28248 - protein, 9 aa, Artificial Sequence
  Description of Artificial Sequence: Synthetic peptide
LTIPLHAWS

SEQ ID NO: 28249 - protein, 9 aa, Artificial Sequence
  Description of Artificial Sequence: Synthetic peptide
LYGQVVAID

SEQ ID NO: 28250 - protein, 9 aa, Artificial Sequence
  Description of Artificial Sequence: Synthetic peptide
MAIFDSAAV

SEQ ID NO: 28251 - protein, 9 aa, Artificial Sequence
  Description of Artificial Sequence: Synthetic peptide
MFWSGNKQG

SEQ ID NO: 28252 - protein, 9 aa, Artificial Sequence
  Description of Artificial Sequence: Synthetic peptide
MQCDFLHDT

SEQ ID NO: 28253 - protein, 9 aa, Artificial Sequence
  Description of Artificial Sequence: Synthetic peptide
MQKDVEQMW

SEQ ID NO: 28254 - protein, 9 aa, Artificial Sequence
  Description of Artificial Sequence: Synthetic peptide
MSMCYGIKG

SEQ ID NO: 28255 - protein, 9 aa, Artificial Sequence
  Description of Artificial Sequence: Synthetic peptide
NAMTQGNHQ

SEQ ID NO: 28256 - protein, 9 aa, Artificial Sequence
  Description of Artificial Sequence: Synthetic peptide
NAMTQINHQ

SEQ ID NO: 28257 - protein, 9 aa, Artificial Sequence
  Description of Artificial Sequence: Synthetic peptide
NAMTQVNHQ

SEQ ID NO: 28258 - protein, 9 aa, Artificial Sequence
  Description of Artificial Sequence: Synthetic peptide
NAMTQVNHR

SEQ ID NO: 28259 - protein, 9 aa, Artificial Sequence
  Description of Artificial Sequence: Synthetic peptide
NHNPTNRNC

SEQ ID NO: 28260 - protein, 9 aa, Artificial Sequence
  Description of Artificial Sequence: Synthetic peptide
NKPCKYMYK

SEQ ID NO: 28261 - protein, 9 aa, Artificial Sequence
  Description of Artificial Sequence: Synthetic peptide
NPTTVCLKM

SEQ ID NO: 28262 - protein, 9 aa, Artificial Sequence
  Description of Artificial Sequence: Synthetic peptide
NTHEGTDGN

SEQ ID NO: 28263 - protein, 9 aa, Artificial Sequence
  Description of Artificial Sequence: Synthetic peptide
NTTPNCNSW

SEQ ID NO: 28264 - protein, 9 aa, Artificial Sequence
  Description of Artificial Sequence: Synthetic peptide
NTWPYPENS

SEQ ID NO: 28265 - protein, 9 aa, Artificial Sequence
  Description of Artificial Sequence: Synthetic peptide
NYLQFGHKQ

SEQ ID NO: 28266 - protein, 9 aa, Artificial Sequence
  Description of Artificial Sequence: Synthetic peptide
PGTQPYMGW

SEQ ID NO: 28267 - protein, 9 aa, Artificial Sequence
  Description of Artificial Sequence: Synthetic peptide
PQEIKSTSC

SEQ ID NO: 28268 - protein, 9 aa, Artificial Sequence
  Description of Artificial Sequence: Synthetic peptide
PRECHQSHQ

SEQ ID NO: 28269 - protein, 9 aa, Artificial Sequence
  Description of Artificial Sequence: Synthetic peptide
QASFKQMGD

SEQ ID NO: 28270 - protein, 9 aa, Artificial Sequence
  Description of Artificial Sequence: Synthetic peptide
QASFKQMGG

SEQ ID NO: 28271 - protein, 9 aa, Artificial Sequence
  Description of Artificial Sequence: Synthetic peptide
QATCYDTSP

SEQ ID NO: 28272 - protein, 9 aa, Artificial Sequence
  Description of Artificial Sequence: Synthetic peptide
QFTHNQAAN

SEQ ID NO: 28273 - protein, 9 aa, Artificial Sequence
  Description of Artificial Sequence: Synthetic peptide
QGIQIGKCQ

SEQ ID NO: 28274 - protein, 9 aa, Artificial Sequence
  Description of Artificial Sequence: Synthetic peptide
QHVAFNRWH

SEQ ID NO: 28275 - protein, 9 aa, Artificial Sequence
  Description of Artificial Sequence: Synthetic peptide
QILDQQEPP

SEQ ID NO: 28276 - protein, 9 aa, Artificial Sequence
  Description of Artificial Sequence: Synthetic peptide
QINNVVDNR

SEQ ID NO: 28277 - protein, 9 aa, Artificial Sequence
  Description of Artificial Sequence: Synthetic peptide
QISMNVAFR

SEQ ID NO: 28278 - protein, 9 aa, Artificial Sequence
  Description of Artificial Sequence: Synthetic peptide
QMAEFTYYG

SEQ ID NO: 28279 - protein, 9 aa, Artificial Sequence
  Description of Artificial Sequence: Synthetic peptide
QMFDTWKCW

SEQ ID NO: 28280 - protein, 9 aa, Artificial Sequence
  Description of Artificial Sequence: Synthetic peptide
QTSSYDAHC

SEQ ID NO: 28281 - protein, 9 aa, Artificial Sequence
  Description of Artificial Sequence: Synthetic peptide
QTSSYDTHC

SEQ ID NO: 28282 - protein, 9 aa, Artificial Sequence
  Description of Artificial Sequence: Synthetic peptide
QVTGIPWFY

SEQ ID NO: 28283 - protein, 9 aa, Artificial Sequence
  Description of Artificial Sequence: Synthetic peptide
QWEDRTQMS

SEQ ID NO: 28284 - protein, 9 aa, Artificial Sequence
  Description of Artificial Sequence: Synthetic peptide
RATCYDTSP

SEQ ID NO: 28285 - protein, 9 aa, Artificial Sequence
  Description of Artificial Sequence: Synthetic peptide
REMEYQGER

SEQ ID NO: 28286 - protein, 9 aa, Artificial Sequence
  Description of Artificial Sequence: Synthetic peptide
RPPNRVATG

SEQ ID NO: 28287 - protein, 9 aa, Artificial Sequence
  Description of Artificial Sequence: Synthetic peptide
SAMPETTIF

SEQ ID NO: 28288 - protein, 9 aa, Artificial Sequence
  Description of Artificial Sequence: Synthetic peptide
SAMPGTTIF

SEQ ID NO: 28289 - protein, 9 aa, Artificial Sequence
  Description of Artificial Sequence: Synthetic peptide
SQPMLKVNA

SEQ ID NO: 28290 - protein, 9 aa, Artificial Sequence
  Description of Artificial Sequence: Synthetic peptide
SSSDLCQNR

SEQ ID NO: 28291 - protein, 9 aa, Artificial Sequence
  Description of Artificial Sequence: Synthetic peptide
TCMPFGTSQ

SEQ ID NO: 28292 - protein, 9 aa, Artificial Sequence
  Description of Artificial Sequence: Synthetic peptide
TFKLTTGGE

SEQ ID NO: 28293 - protein, 9 aa, Artificial Sequence
  Description of Artificial Sequence: Synthetic peptide
THDDCQWWE

SEQ ID NO: 28294 - protein, 9 aa, Artificial Sequence
  Description of Artificial Sequence: Synthetic peptide
TIHLPSACW

SEQ ID NO: 28295 - protein, 9 aa, Artificial Sequence
  Description of Artificial Sequence: Synthetic peptide
TIKLTTGGE

SEQ ID NO: 28296 - protein, 9 aa, Artificial Sequence
  Description of Artificial Sequence: Synthetic peptide
VIMWNYEHY

SEQ ID NO: 28297 - protein, 9 aa, Artificial Sequence
  Description of Artificial Sequence: Synthetic peptide
VSVSIYSGW

SEQ ID NO: 28298 - protein, 9 aa, Artificial Sequence
  Description of Artificial Sequence: Synthetic peptide
VTMVKRKGT

SEQ ID NO: 28299 - protein, 9 aa, Artificial Sequence
  Description of Artificial Sequence: Synthetic peptide
YDDWYSNVY

SEQ ID NO: 28300 - protein, 9 aa, Artificial Sequence
  Description of Artificial Sequence: Synthetic peptide
YPMPMCCQP

SEQ ID NO: 28301 - protein, 9 aa, Artificial Sequence
  Description of Artificial Sequence: Synthetic peptide
YPMPMCCQS

SEQ ID NO: 28302 - protein, 9 aa, Artificial Sequence
  Description of Artificial Sequence: Synthetic peptide
WCRTPQREN

SEQ ID NO: 28303 - protein, 9 aa, Artificial Sequence
  Description of Artificial Sequence: Synthetic peptide
GMTNEVQAA

SEQ ID NO: 28304 - protein, 9 aa, Artificial Sequence
  Description of Artificial Sequence: Synthetic peptide
EGGFRDFCE

SEQ ID NO: 28305 - protein, 9 aa, Artificial Sequence
  Description of Artificial Sequence: Synthetic peptide
RYEISERRC

SEQ ID NO: 28306 - protein, 9 aa, Artificial Sequence
  Description of Artificial Sequence: Synthetic peptide
SAISCQCAK

SEQ ID NO: 28307 - protein, 9 aa, Artificial Sequence
  Description of Artificial Sequence: Synthetic peptide
EVQRNIYSP

SEQ ID NO: 28308 - protein, 9 aa, Artificial Sequence
  Description of Artificial Sequence: Synthetic peptide
HCTEGYRQT

SEQ ID NO: 28309 - protein, 9 aa, Artificial Sequence
  Description of Artificial Sequence: Synthetic peptide
SAPEFSVIC

SEQ ID NO: 28310 - protein, 9 aa, Artificial Sequence
  Description of Artificial Sequence: Synthetic peptide
MFRQFYIQG

SEQ ID NO: 28311 - protein, 9 aa, Artificial Sequence
  Description of Artificial Sequence: Synthetic peptide
STVGQNHCG

SEQ ID NO: 28312 - protein, 9 aa, Artificial Sequence
  Description of Artificial Sequence: Synthetic peptide
EFCHQHSAI

SEQ ID NO: 28313 - protein, 9 aa, Artificial Sequence
  Description of Artificial Sequence: Synthetic peptide
TGWNFPVSC

SEQ ID NO: 28314 - protein, 9 aa, Artificial Sequence
  Description of Artificial Sequence: Synthetic peptide
GCLTSECAY

SEQ ID NO: 28315 - protein, 9 aa, Artificial Sequence
  Description of Artificial Sequence: Synthetic peptide
TMFYCHGPN

SEQ ID NO: 28316 - protein, 9 aa, Artificial Sequence
  Description of Artificial Sequence: Synthetic peptide
HITPMITMW

SEQ ID NO: 28317 - protein, 9 aa, Artificial Sequence
  Description of Artificial Sequence: Synthetic peptide
AITRHVADT

SEQ ID NO: 28318 - protein, 9 aa, Artificial Sequence
  Description of Artificial Sequence: Synthetic peptide
QRSVFHQRS

SEQ ID NO: 28319 - protein, 9 aa, Artificial Sequence
  Description of Artificial Sequence: Synthetic peptide
VKRLENEWH

SEQ ID NO: 28320 - protein, 9 aa, Artificial Sequence
  Description of Artificial Sequence: Synthetic peptide
MMAMKQGFY

SEQ ID NO: 28321 - protein, 9 aa, Artificial Sequence
  Description of Artificial Sequence: Synthetic peptide
EGRTISYGN

SEQ ID NO: 28322 - protein, 9 aa, Artificial Sequence
  Description of Artificial Sequence: Synthetic peptide
STCYPFAMG

SEQ ID NO: 28323 - protein, 9 aa, Artificial Sequence
  Description of Artificial Sequence: Synthetic peptide
QIIYRCRST

SEQ ID NO: 28324 - protein, 9 aa, Artificial Sequence
  Description of Artificial Sequence: Synthetic peptide
GTAVSRQSK

SEQ ID NO: 28325 - protein, 9 aa, Artificial Sequence
  Description of Artificial Sequence: Synthetic peptide
GCEEVGRCQ

SEQ ID NO: 28326 - protein, 9 aa, Artificial Sequence
  Description of Artificial Sequence: Synthetic peptide
QHCFRAMED

SEQ ID NO: 28327 - protein, 9 aa, Artificial Sequence
  Description of Artificial Sequence: Synthetic peptide
MNSFYRAEW

SEQ ID NO: 28328 - protein, 9 aa, Artificial Sequence
  Description of Artificial Sequence: Synthetic peptide
VCHNPDPFT

SEQ ID NO: 28329 - protein, 9 aa, Artificial Sequence
  Description of Artificial Sequence: Synthetic peptide
NGYLVHACQ

SEQ ID NO: 28330 - protein, 9 aa, Artificial Sequence
  Description of Artificial Sequence: Synthetic peptide
NPGWQTIGQ

SEQ ID NO: 28331 - protein, 9 aa, Artificial Sequence
  Description of Artificial Sequence: Synthetic peptide
LCAVCGDCD

SEQ ID NO: 28332 - protein, 9 aa, Artificial Sequence
  Description of Artificial Sequence: Synthetic peptide
ATLMSDGGG

SEQ ID NO: 28333 - protein, 9 aa, Artificial Sequence
  Description of Artificial Sequence: Synthetic peptide
YFPSIQCYE

SEQ ID NO: 28334 - protein, 9 aa, Artificial Sequence
  Description of Artificial Sequence: Synthetic peptide
GAANRIQSW

SEQ ID NO: 28335 - protein, 9 aa, Artificial Sequence
  Description of Artificial Sequence: Synthetic peptide
MFMTNVNSF

SEQ ID NO: 28336 - protein, 9 aa, Artificial Sequence
  Description of Artificial Sequence: Synthetic peptide
VSVQSRAQL

SEQ ID NO: 28337 - protein, 9 aa, Artificial Sequence
  Description of Artificial Sequence: Synthetic peptide
PLTIEVNCT

SEQ ID NO: 28338 - protein, 9 aa, Artificial Sequence
  Description of Artificial Sequence: Synthetic peptide
KTMGIGGGP

SEQ ID NO: 28339 - protein, 9 aa, Artificial Sequence
  Description of Artificial Sequence: Synthetic peptide
NRIQMTDFQ

SEQ ID NO: 28340 - protein, 9 aa, Artificial Sequence
  Description of Artificial Sequence: Synthetic peptide
DFNGSNWLP

SEQ ID NO: 28341 - protein, 9 aa, Artificial Sequence
  Description of Artificial Sequence: Synthetic peptide
FAIWKRNES

SEQ ID NO: 28342 - protein, 9 aa, Artificial Sequence
  Description of Artificial Sequence: Synthetic peptide
HFQPVFMQP

SEQ ID NO: 28343 - protein, 9 aa, Artificial Sequence
  Description of Artificial Sequence: Synthetic peptide
DQEAQVVTG

SEQ ID NO: 28344 - protein, 9 aa, Artificial Sequence
  Description of Artificial Sequence: Synthetic peptide
SECEVLCSL

SEQ ID NO: 28345 - protein, 9 aa, Artificial Sequence
  Description of Artificial Sequence: Synthetic peptide
AAMESCAEI

SEQ ID NO: 28346 - protein, 9 aa, Artificial Sequence
  Description of Artificial Sequence: Synthetic peptide
NQREWHGLA

SEQ ID NO: 28347 - protein, 9 aa, Artificial Sequence
  Description of Artificial Sequence: Synthetic peptide
NYVNQGMGP

SEQ ID NO: 28348 - protein, 9 aa, Artificial Sequence
  Description of Artificial Sequence: Synthetic peptide
NISPYEMAV

SEQ ID NO: 28349 - protein, 9 aa, Artificial Sequence
  Description of Artificial Sequence: Synthetic peptide
ATGTYNLQE

SEQ ID NO: 28350 - protein, 9 aa, Artificial Sequence
  Description of Artificial Sequence: Synthetic peptide
HATGLVNFM

SEQ ID NO: 28351 - protein, 9 aa, Artificial Sequence
  Description of Artificial Sequence: Synthetic peptide
NAIPYFVQA

SEQ ID NO: 28352 - protein, 9 aa, Artificial Sequence
  Description of Artificial Sequence: Synthetic peptide
CVEQYVEQG

SEQ ID NO: 28353 - protein, 9 aa, Artificial Sequence
  Description of Artificial Sequence: Synthetic peptide
AVAEIRPEP

SEQ ID NO: 28354 - protein, 9 aa, Artificial Sequence
  Description of Artificial Sequence: Synthetic peptide
ASKQGTHDY

SEQ ID NO: 28355 - protein, 9 aa, Artificial Sequence
  Description of Artificial Sequence: Synthetic peptide
SSEYSQFAI

SEQ ID NO: 28356 - protein, 9 aa, Artificial Sequence
  Description of Artificial Sequence: Synthetic peptide
TMTVRMEQP

SEQ ID NO: 28357 - protein, 9 aa, Artificial Sequence
  Description of Artificial Sequence: Synthetic peptide
MWGCKLFVC

SEQ ID NO: 28358 - protein, 9 aa, Artificial Sequence
  Description of Artificial Sequence: Synthetic peptide
AGMYKCQED

SEQ ID NO: 28359 - protein, 9 aa, Artificial Sequence
  Description of Artificial Sequence: Synthetic peptide
TYESLQNSW

SEQ ID NO: 28360 - protein, 9 aa, Artificial Sequence
  Description of Artificial Sequence: Synthetic peptide
TKMIIFDSW

SEQ ID NO: 28361 - protein, 9 aa, Artificial Sequence
  Description of Artificial Sequence: Synthetic peptide
LCKFANGAA

SEQ ID NO: 28362 - protein, 9 aa, Artificial Sequence
  Description of Artificial Sequence: Synthetic peptide
INYISFVDR

SEQ ID NO: 28363 - protein, 9 aa, Artificial Sequence
  Description of Artificial Sequence: Synthetic peptide
RQAWPKDGM

SEQ ID NO: 28364 - protein, 9 aa, Artificial Sequence
  Description of Artificial Sequence: Synthetic peptide
QSAHPEPMC

SEQ ID NO: 28365 - protein, 9 aa, Artificial Sequence
  Description of Artificial Sequence: Synthetic peptide
YCECGHWPN

SEQ ID NO: 28366 - protein, 9 aa, Artificial Sequence
  Description of Artificial Sequence: Synthetic peptide
SQERMDYDG

SEQ ID NO: 28367 - protein, 9 aa, Artificial Sequence
  Description of Artificial Sequence: Synthetic peptide
WINEANCLM

SEQ ID NO: 28368 - protein, 9 aa, Artificial Sequence
  Description of Artificial Sequence: Synthetic peptide
SNVACIQAF

SEQ ID NO: 28369 - protein, 9 aa, Artificial Sequence
  Description of Artificial Sequence: Synthetic peptide
YTKYNWKAA

SEQ ID NO: 28370 - protein, 9 aa, Artificial Sequence
  Description of Artificial Sequence: Synthetic peptide
NYAMRRDSY

SEQ ID NO: 28371 - protein, 9 aa, Artificial Sequence
  Description of Artificial Sequence: Synthetic peptide
PVICVWHDN

SEQ ID NO: 28372 - protein, 9 aa, Artificial Sequence
  Description of Artificial Sequence: Synthetic peptide
SFKSVSQYN

SEQ ID NO: 28373 - protein, 9 aa, Artificial Sequence
  Description of Artificial Sequence: Synthetic peptide
ENTMWQSSQ

SEQ ID NO: 28374 - protein, 9 aa, Artificial Sequence
  Description of Artificial Sequence: Synthetic peptide
NAYYDSHCE

SEQ ID NO: 28375 - protein, 9 aa, Artificial Sequence
  Description of Artificial Sequence: Synthetic peptide
KCADLIIRS

SEQ ID NO: 28376 - protein, 9 aa, Artificial Sequence
  Description of Artificial Sequence: Synthetic peptide
EKRLEGWVY

SEQ ID NO: 28377 - protein, 9 aa, Artificial Sequence
  Description of Artificial Sequence: Synthetic peptide
KDGRNPHCL

SEQ ID NO: 28378 - protein, 9 aa, Artificial Sequence
  Description of Artificial Sequence: Synthetic peptide
QSRCVDNTV

SEQ ID NO: 28379 - protein, 9 aa, Artificial Sequence
  Description of Artificial Sequence: Synthetic peptide
ATMNLSWGL

SEQ ID NO: 28380 - protein, 9 aa, Artificial Sequence
  Description of Artificial Sequence: Synthetic peptide
YSDPKNMSI

SEQ ID NO: 28381 - protein, 9 aa, Artificial Sequence
  Description of Artificial Sequence: Synthetic peptide
PDLWYEKSS

SEQ ID NO: 28382 - protein, 9 aa, Artificial Sequence
  Description of Artificial Sequence: Synthetic peptide
TFVRKPSLM

SEQ ID NO: 28383 - protein, 9 aa, Artificial Sequence
  Description of Artificial Sequence: Synthetic peptide
PYGPIEYDE

SEQ ID NO: 28384 - protein, 9 aa, Artificial Sequence
  Description of Artificial Sequence: Synthetic peptide
EPRLYCAQE

SEQ ID NO: 28385 - protein, 9 aa, Artificial Sequence
  Description of Artificial Sequence: Synthetic peptide
DRKQADQIY

SEQ ID NO: 28386 - protein, 9 aa, Artificial Sequence
  Description of Artificial Sequence: Synthetic peptide
KGNPLDGDT

SEQ ID NO: 28387 - protein, 9 aa, Artificial Sequence
  Description of Artificial Sequence: Synthetic peptide
GLFEGSPGA

SEQ ID NO: 28388 - protein, 9 aa, Artificial Sequence
  Description of Artificial Sequence: Synthetic peptide
DIEFLDCEN

SEQ ID NO: 28389 - protein, 9 aa, Artificial Sequence
  Description of Artificial Sequence: Synthetic peptide
EIHMFGQSE

SEQ ID NO: 28390 - protein, 9 aa, Artificial Sequence
  Description of Artificial Sequence: Synthetic peptide
WGGMPNNQG

SEQ ID NO: 28391 - protein, 9 aa, Artificial Sequence
  Description of Artificial Sequence: Synthetic peptide
SVLHVQALA

SEQ ID NO: 28392 - protein, 9 aa, Artificial Sequence
  Description of Artificial Sequence: Synthetic peptide
ASMHEETCL

SEQ ID NO: 28393 - protein, 9 aa, Artificial Sequence
  Description of Artificial Sequence: Synthetic peptide
MHGIARMQQ

SEQ ID NO: 28394 - protein, 9 aa, Artificial Sequence
  Description of Artificial Sequence: Synthetic peptide
EAGCKMWPT

SEQ ID NO: 28395 - protein, 9 aa, Artificial Sequence
  Description of Artificial Sequence: Synthetic peptide
KMAGIGCWY

SEQ ID NO: 28396 - protein, 9 aa, Artificial Sequence
  Description of Artificial Sequence: Synthetic peptide
AVYLDHVFS

SEQ ID NO: 28397 - protein, 9 aa, Artificial Sequence
  Description of Artificial Sequence: Synthetic peptide
GHLFNNNEW

SEQ ID NO: 28398 - protein, 9 aa, Artificial Sequence
  Description of Artificial Sequence: Synthetic peptide
SNSHPFQSH

SEQ ID NO: 28399 - protein, 9 aa, Artificial Sequence
  Description of Artificial Sequence: Synthetic peptide
LSAQRLVCD

SEQ ID NO: 28400 - protein, 9 aa, Artificial Sequence
  Description of Artificial Sequence: Synthetic peptide
TVNWYSGFG

SEQ ID NO: 28401 - protein, 9 aa, Artificial Sequence
  Description of Artificial Sequence: Synthetic peptide
YIGMKSCSG

SEQ ID NO: 28402 - protein, 9 aa, Artificial Sequence
  Description of Artificial Sequence: Synthetic peptide
NHSLCWDSK

SEQ ID NO: 28403 - protein, 9 aa, Artificial Sequence
  Description of Artificial Sequence: Synthetic peptide
PIWQGYWPW

SEQ ID NO: 28404 - protein, 9 aa, Artificial Sequence
  Description of Artificial Sequence: Synthetic peptide
AELFYDAMY

SEQ ID NO: 28405 - protein, 9 aa, Artificial Sequence
  Description of Artificial Sequence: Synthetic peptide
CQVNEEYDW

SEQ ID NO: 28406 - protein, 9 aa, Artificial Sequence
  Description of Artificial Sequence: Synthetic peptide
DTEAIMVVD

SEQ ID NO: 28407 - protein, 9 aa, Artificial Sequence
  Description of Artificial Sequence: Synthetic peptide
ESWRTLCQI

SEQ ID NO: 28408 - protein, 9 aa, Artificial Sequence
  Description of Artificial Sequence: Synthetic peptide
GHHNTPDMQ

SEQ ID NO: 28409 - protein, 9 aa, Artificial Sequence
  Description of Artificial Sequence: Synthetic peptide
GWDKKQNCG

SEQ ID NO: 28410 - protein, 9 aa, Artificial Sequence
  Description of Artificial Sequence: Synthetic peptide
IKADVDAME

SEQ ID NO: 28411 - protein, 9 aa, Artificial Sequence
  Description of Artificial Sequence: Synthetic peptide
LTTTVPTKQ

SEQ ID NO: 28412 - protein, 9 aa, Artificial Sequence
  Description of Artificial Sequence: Synthetic peptide
MAEPVKRCK

SEQ ID NO: 28413 - protein, 9 aa, Artificial Sequence
  Description of Artificial Sequence: Synthetic peptide
MCHKVMDII

SEQ ID NO: 28414 - protein, 9 aa, Artificial Sequence
  Description of Artificial Sequence: Synthetic peptide
MSECKNPAY

SEQ ID NO: 28415 - protein, 9 aa, Artificial Sequence
  Description of Artificial Sequence: Synthetic peptide
TEVEISASF

SEQ ID NO: 28416 - protein, 9 aa, Artificial Sequence
  Description of Artificial Sequence: Synthetic peptide
TTVAGPHTT

SEQ ID NO: 28417 - protein, 9 aa, Artificial Sequence
  Description of Artificial Sequence: Synthetic peptide
VSFWYDCHH

SEQ ID NO: 28418 - protein, 9 aa, Artificial Sequence
  Description of Artificial Sequence: Synthetic peptide
AACYDYKDH

SEQ ID NO: 28419 - protein, 9 aa, Artificial Sequence
  Description of Artificial Sequence: Synthetic peptide
AAKLPVAKG

SEQ ID NO: 28420 - protein, 9 aa, Artificial Sequence
  Description of Artificial Sequence: Synthetic peptide
AEFLTYEQK

SEQ ID NO: 28421 - protein, 9 aa, Artificial Sequence
  Description of Artificial Sequence: Synthetic peptide
AFWQDLYYV

SEQ ID NO: 28422 - protein, 9 aa, Artificial Sequence
  Description of Artificial Sequence: Synthetic peptide
AGGGSVQCN

SEQ ID NO: 28423 - protein, 9 aa, Artificial Sequence
  Description of Artificial Sequence: Synthetic peptide
AHLNCDKSM

SEQ ID NO: 28424 - protein, 9 aa, Artificial Sequence
  Description of Artificial Sequence: Synthetic peptide
AMATCQMQH

SEQ ID NO: 28425 - protein, 9 aa, Artificial Sequence
  Description of Artificial Sequence: Synthetic peptide
AMGRLHDSK

SEQ ID NO: 28426 - protein, 9 aa, Artificial Sequence
  Description of Artificial Sequence: Synthetic peptide
AMMLTDLML

SEQ ID NO: 28427 - protein, 9 aa, Artificial Sequence
  Description of Artificial Sequence: Synthetic peptide
APHWMEISS

SEQ ID NO: 28428 - protein, 9 aa, Artificial Sequence
  Description of Artificial Sequence: Synthetic peptide
AVMWTVLHF

SEQ ID NO: 28429 - protein, 9 aa, Artificial Sequence
  Description of Artificial Sequence: Synthetic peptide
CADWACMSL

SEQ ID NO: 28430 - protein, 9 aa, Artificial Sequence
  Description of Artificial Sequence: Synthetic peptide
CAVKQASAM

SEQ ID NO: 28431 - protein, 9 aa, Artificial Sequence
  Description of Artificial Sequence: Synthetic peptide
CCWFVYEST

SEQ ID NO: 28432 - protein, 9 aa, Artificial Sequence
  Description of Artificial Sequence: Synthetic peptide
CFTESITDC

SEQ ID NO: 28433 - protein, 9 aa, Artificial Sequence
  Description of Artificial Sequence: Synthetic peptide
CIIVRSTAA

SEQ ID NO: 28434 - protein, 9 aa, Artificial Sequence
  Description of Artificial Sequence: Synthetic peptide
CIKYNSSIG

SEQ ID NO: 28435 - protein, 9 aa, Artificial Sequence
  Description of Artificial Sequence: Synthetic peptide
CQSNKQQFC

SEQ ID NO: 28436 - protein, 9 aa, Artificial Sequence
  Description of Artificial Sequence: Synthetic peptide
CVFSWNNYQ

SEQ ID NO: 28437 - protein, 9 aa, Artificial Sequence
  Description of Artificial Sequence: Synthetic peptide
CYEITMNQG

SEQ ID NO: 28438 - protein, 9 aa, Artificial Sequence
  Description of Artificial Sequence: Synthetic peptide
DCLTSECAY

SEQ ID NO: 28439 - protein, 9 aa, Artificial Sequence
  Description of Artificial Sequence: Synthetic peptide
DFETWDWFG

SEQ ID NO: 28440 - protein, 9 aa, Artificial Sequence
  Description of Artificial Sequence: Synthetic peptide
DFNHIAWWQ

SEQ ID NO: 28441 - protein, 9 aa, Artificial Sequence
  Description of Artificial Sequence: Synthetic peptide
DHHGIDTTL

SEQ ID NO: 28442 - protein, 9 aa, Artificial Sequence
  Description of Artificial Sequence: Synthetic peptide
DIWLWDTFA

SEQ ID NO: 28443 - protein, 9 aa, Artificial Sequence
  Description of Artificial Sequence: Synthetic peptide
DRPNHSTDG

SEQ ID NO: 28444 - protein, 9 aa, Artificial Sequence
  Description of Artificial Sequence: Synthetic peptide
DSMFIIMNF

SEQ ID NO: 28445 - protein, 9 aa, Artificial Sequence
  Description of Artificial Sequence: Synthetic peptide
DSMFTIMNF

SEQ ID NO: 28446 - protein, 9 aa, Artificial Sequence
  Description of Artificial Sequence: Synthetic peptide
DVASWCQCP

SEQ ID NO: 28447 - protein, 9 aa, Artificial Sequence
  Description of Artificial Sequence: Synthetic peptide
DYENCFESY

SEQ ID NO: 28448 - protein, 9 aa, Artificial Sequence
  Description of Artificial Sequence: Synthetic peptide
DYGYVSINF

SEQ ID NO: 28449 - protein, 9 aa, Artificial Sequence
  Description of Artificial Sequence: Synthetic peptide
DYTTHWQYA

SEQ ID NO: 28450 - protein, 9 aa, Artificial Sequence
  Description of Artificial Sequence: Synthetic peptide
EEKYQPCLK

SEQ ID NO: 28451 - protein, 9 aa, Artificial Sequence
  Description of Artificial Sequence: Synthetic peptide
EFKRMTRNK

SEQ ID NO: 28452 - protein, 9 aa, Artificial Sequence
  Description of Artificial Sequence: Synthetic peptide
EGTQTHSAT

SEQ ID NO: 28453 - protein, 9 aa, Artificial Sequence
  Description of Artificial Sequence: Synthetic peptide
EIKFPACGL

SEQ ID NO: 28454 - protein, 9 aa, Artificial Sequence
  Description of Artificial Sequence: Synthetic peptide
EKLNKTWAG

SEQ ID NO: 28455 - protein, 9 aa, Artificial Sequence
  Description of Artificial Sequence: Synthetic peptide
ENDHRDYNI

SEQ ID NO: 28456 - protein, 9 aa, Artificial Sequence
  Description of Artificial Sequence: Synthetic peptide
ENYMCYHSL

SEQ ID NO: 28457 - protein, 9 aa, Artificial Sequence
  Description of Artificial Sequence: Synthetic peptide
EQAPLDVMF

SEQ ID NO: 28458 - protein, 9 aa, Artificial Sequence
  Description of Artificial Sequence: Synthetic peptide
ETMEHKKRE

SEQ ID NO: 28459 - protein, 9 aa, Artificial Sequence
  Description of Artificial Sequence: Synthetic peptide
ETMQHKKRA

SEQ ID NO: 28460 - protein, 9 aa, Artificial Sequence
  Description of Artificial Sequence: Synthetic peptide
ETMQHKKRE

SEQ ID NO: 28461 - protein, 9 aa, Artificial Sequence
  Description of Artificial Sequence: Synthetic peptide
EVADENGNY

SEQ ID NO: 28462 - protein, 9 aa, Artificial Sequence
  Description of Artificial Sequence: Synthetic peptide
EVCMAVVDN

SEQ ID NO: 28463 - protein, 9 aa, Artificial Sequence
  Description of Artificial Sequence: Synthetic peptide
FKRICWEAG

SEQ ID NO: 28464 - protein, 9 aa, Artificial Sequence
  Description of Artificial Sequence: Synthetic peptide
FNLSSCYHQ

SEQ ID NO: 28465 - protein, 9 aa, Artificial Sequence
  Description of Artificial Sequence: Synthetic peptide
FTEYEHRAS

SEQ ID NO: 28466 - protein, 9 aa, Artificial Sequence
  Description of Artificial Sequence: Synthetic peptide
FVAANQNHM

SEQ ID NO: 28467 - protein, 9 aa, Artificial Sequence
  Description of Artificial Sequence: Synthetic peptide
GAAVSRKGY

SEQ ID NO: 28468 - protein, 9 aa, Artificial Sequence
  Description of Artificial Sequence: Synthetic peptide
GAEQHTNWP

SEQ ID NO: 28469 - protein, 9 aa, Artificial Sequence
  Description of Artificial Sequence: Synthetic peptide
GDIRTYPAE

SEQ ID NO: 28470 - protein, 9 aa, Artificial Sequence
  Description of Artificial Sequence: Synthetic peptide
GFTQNYAQN

SEQ ID NO: 28471 - protein, 9 aa, Artificial Sequence
  Description of Artificial Sequence: Synthetic peptide
GLIHSTHTV

SEQ ID NO: 28472 - protein, 9 aa, Artificial Sequence
  Description of Artificial Sequence: Synthetic peptide
GMTNEDQAA

SEQ ID NO: 28473 - protein, 9 aa, Artificial Sequence
  Description of Artificial Sequence: Synthetic peptide
GNPHLIEHC

SEQ ID NO: 28474 - protein, 9 aa, Artificial Sequence
  Description of Artificial Sequence: Synthetic peptide
GRAHGNVRI

SEQ ID NO: 28475 - protein, 9 aa, Artificial Sequence
  Description of Artificial Sequence: Synthetic peptide
GRVLLMAQD

SEQ ID NO: 28476 - protein, 9 aa, Artificial Sequence
  Description of Artificial Sequence: Synthetic peptide
GSFPCYSLG

SEQ ID NO: 28477 - protein, 9 aa, Artificial Sequence
  Description of Artificial Sequence: Synthetic peptide
GSFPCYSLS

SEQ ID NO: 28478 - protein, 9 aa, Artificial Sequence
  Description of Artificial Sequence: Synthetic peptide
GSTEVFYMI

SEQ ID NO: 28479 - protein, 9 aa, Artificial Sequence
  Description of Artificial Sequence: Synthetic peptide
GTAVSKQSK

SEQ ID NO: 28480 - protein, 9 aa, Artificial Sequence
  Description of Artificial Sequence: Synthetic peptide
GTNHSAEVY

SEQ ID NO: 28481 - protein, 9 aa, Artificial Sequence
  Description of Artificial Sequence: Synthetic peptide
GTRATKHHV

SEQ ID NO: 28482 - protein, 9 aa, Artificial Sequence
  Description of Artificial Sequence: Synthetic peptide
HAPPHGTWA

SEQ ID NO: 28483 - protein, 9 aa, Artificial Sequence
  Description of Artificial Sequence: Synthetic peptide
HAVNDHSWM

SEQ ID NO: 28484 - protein, 9 aa, Artificial Sequence
  Description of Artificial Sequence: Synthetic peptide
HCKVKECQY

SEQ ID NO: 28485 - protein, 9 aa, Artificial Sequence
  Description of Artificial Sequence: Synthetic peptide
HDEWLGHGM

SEQ ID NO: 28486 - protein, 9 aa, Artificial Sequence
  Description of Artificial Sequence: Synthetic peptide
HIDRPPCCM

SEQ ID NO: 28487 - protein, 9 aa, Artificial Sequence
  Description of Artificial Sequence: Synthetic peptide
HWMEQPPYG

SEQ ID NO: 28488 - protein, 9 aa, Artificial Sequence
  Description of Artificial Sequence: Synthetic peptide
IQCNLCEAW

SEQ ID NO: 28489 - protein, 9 aa, Artificial Sequence
  Description of Artificial Sequence: Synthetic peptide
IQYNLCEAW

SEQ ID NO: 28490 - protein, 9 aa, Artificial Sequence
  Description of Artificial Sequence: Synthetic peptide
IWGICVHYF

SEQ ID NO: 28491 - protein, 9 aa, Artificial Sequence
  Description of Artificial Sequence: Synthetic peptide
KENTTNRID

SEQ ID NO: 28492 - protein, 9 aa, Artificial Sequence
  Description of Artificial Sequence: Synthetic peptide
KHHMFVDKH

SEQ ID NO: 28493 - protein, 9 aa, Artificial Sequence
  Description of Artificial Sequence: Synthetic peptide
KKDEWHCYP

SEQ ID NO: 28494 - protein, 9 aa, Artificial Sequence
  Description of Artificial Sequence: Synthetic peptide
KMCWWPEAM

SEQ ID NO: 28495 - protein, 9 aa, Artificial Sequence
  Description of Artificial Sequence: Synthetic peptide
KQNASDQVH

SEQ ID NO: 28496 - protein, 9 aa, Artificial Sequence
  Description of Artificial Sequence: Synthetic peptide
KQVDPLDFW

SEQ ID NO: 28497 - protein, 9 aa, Artificial Sequence
  Description of Artificial Sequence: Synthetic peptide
KSDFRVLHQ

SEQ ID NO: 28498 - protein, 9 aa, Artificial Sequence
  Description of Artificial Sequence: Synthetic peptide
KSEYVVGVP

SEQ ID NO: 28499 - protein, 9 aa, Artificial Sequence
  Description of Artificial Sequence: Synthetic peptide
KTRFHRERS

SEQ ID NO: 28500 - protein, 9 aa, Artificial Sequence
  Description of Artificial Sequence: Synthetic peptide
KVDAEGSHF

SEQ ID NO: 28501 - protein, 9 aa, Artificial Sequence
  Description of Artificial Sequence: Synthetic peptide
KVMVVDSVY

SEQ ID NO: 28502 - protein, 9 aa, Artificial Sequence
  Description of Artificial Sequence: Synthetic peptide
LATMWFCAD

SEQ ID NO: 28503 - protein, 9 aa, Artificial Sequence
  Description of Artificial Sequence: Synthetic peptide
LCYHFWKVN

SEQ ID NO: 28504 - protein, 9 aa, Artificial Sequence
  Description of Artificial Sequence: Synthetic peptide
LEMHYKDNC

SEQ ID NO: 28505 - protein, 9 aa, Artificial Sequence
  Description of Artificial Sequence: Synthetic peptide
LFRSHWDAQ

SEQ ID NO: 28506 - protein, 9 aa, Artificial Sequence
  Description of Artificial Sequence: Synthetic peptide
LKASLREQW

SEQ ID NO: 28507 - protein, 9 aa, Artificial Sequence
  Description of Artificial Sequence: Synthetic peptide
LMENYEIQD

SEQ ID NO: 28508 - protein, 9 aa, Artificial Sequence
  Description of Artificial Sequence: Synthetic peptide
LMQKWMRTC

SEQ ID NO: 28509 - protein, 9 aa, Artificial Sequence
  Description of Artificial Sequence: Synthetic peptide
LYLPHCHRI

SEQ ID NO: 28510 - protein, 9 aa, Artificial Sequence
  Description of Artificial Sequence: Synthetic peptide
LYLSHCHRI

SEQ ID NO: 28511 - protein, 9 aa, Artificial Sequence
  Description of Artificial Sequence: Synthetic peptide
LYMWQNQHV

SEQ ID NO: 28512 - protein, 9 aa, Artificial Sequence
  Description of Artificial Sequence: Synthetic peptide
MATCYMYVD

SEQ ID NO: 28513 - protein, 9 aa, Artificial Sequence
  Description of Artificial Sequence: Synthetic peptide
MCSYFNNRE

SEQ ID NO: 28514 - protein, 9 aa, Artificial Sequence
  Description of Artificial Sequence: Synthetic peptide
MEFYGRAGN

SEQ ID NO: 28515 - protein, 9 aa, Artificial Sequence
  Description of Artificial Sequence: Synthetic peptide
MESGTLLGV

SEQ ID NO: 28516 - protein, 9 aa, Artificial Sequence
  Description of Artificial Sequence: Synthetic peptide
MFCEFPKCG

SEQ ID NO: 28517 - protein, 9 aa, Artificial Sequence
  Description of Artificial Sequence: Synthetic peptide
MFGTKMSQY

SEQ ID NO: 28518 - protein, 9 aa, Artificial Sequence
  Description of Artificial Sequence: Synthetic peptide
MFREFPKCG

SEQ ID NO: 28519 - protein, 9 aa, Artificial Sequence
  Description of Artificial Sequence: Synthetic peptide
MIDLGNRGF

SEQ ID NO: 28520 - protein, 9 aa, Artificial Sequence
  Description of Artificial Sequence: Synthetic peptide
MIDWGGEWG

SEQ ID NO: 28521 - protein, 9 aa, Artificial Sequence
  Description of Artificial Sequence: Synthetic peptide
MMLHKQKDY

SEQ ID NO: 28522 - protein, 9 aa, Artificial Sequence
  Description of Artificial Sequence: Synthetic peptide
MMWKENAGW

SEQ ID NO: 28523 - protein, 9 aa, Artificial Sequence
  Description of Artificial Sequence: Synthetic peptide
MSECKNHAY

SEQ ID NO: 28524 - protein, 9 aa, Artificial Sequence
  Description of Artificial Sequence: Synthetic peptide
MSNYHITHE

SEQ ID NO: 28525 - protein, 9 aa, Artificial Sequence
  Description of Artificial Sequence: Synthetic peptide
MTAHKENHP

SEQ ID NO: 28526 - protein, 9 aa, Artificial Sequence
  Description of Artificial Sequence: Synthetic peptide
MTAQSPLIP

SEQ ID NO: 28527 - protein, 9 aa, Artificial Sequence
  Description of Artificial Sequence: Synthetic peptide
MTDYFKALC

SEQ ID NO: 28528 - protein, 9 aa, Artificial Sequence
  Description of Artificial Sequence: Synthetic peptide
NCDHWFGTL

SEQ ID NO: 28529 - protein, 9 aa, Artificial Sequence
  Description of Artificial Sequence: Synthetic peptide
NDKSWLKHC

SEQ ID NO: 28530 - protein, 9 aa, Artificial Sequence
  Description of Artificial Sequence: Synthetic peptide
NETDVGTDV

SEQ ID NO: 28531 - protein, 9 aa, Artificial Sequence
  Description of Artificial Sequence: Synthetic peptide
NQREWHGLS

SEQ ID NO: 28532 - protein, 9 aa, Artificial Sequence
  Description of Artificial Sequence: Synthetic peptide
NRGYANVAW

SEQ ID NO: 28533 - protein, 9 aa, Artificial Sequence
  Description of Artificial Sequence: Synthetic peptide
NTFVKNEFW

SEQ ID NO: 28534 - protein, 9 aa, Artificial Sequence
  Description of Artificial Sequence: Synthetic peptide
NTLTMQSYL

SEQ ID NO: 28535 - protein, 9 aa, Artificial Sequence
  Description of Artificial Sequence: Synthetic peptide
NTLTMRSYL

SEQ ID NO: 28536 - protein, 9 aa, Artificial Sequence
  Description of Artificial Sequence: Synthetic peptide
NTNYWFYYD

SEQ ID NO: 28537 - protein, 9 aa, Artificial Sequence
  Description of Artificial Sequence: Synthetic peptide
NVEGTRMRP

SEQ ID NO: 28538 - protein, 9 aa, Artificial Sequence
  Description of Artificial Sequence: Synthetic peptide
NVEHSHCVG

SEQ ID NO: 28539 - protein, 9 aa, Artificial Sequence
  Description of Artificial Sequence: Synthetic peptide
PKLCSHQTE

SEQ ID NO: 28540 - protein, 9 aa, Artificial Sequence
  Description of Artificial Sequence: Synthetic peptide
PRLQSRKYL

SEQ ID NO: 28541 - protein, 9 aa, Artificial Sequence
  Description of Artificial Sequence: Synthetic peptide
PSCLTQESI

SEQ ID NO: 28542 - protein, 9 aa, Artificial Sequence
  Description of Artificial Sequence: Synthetic peptide
PSTTIMNVM

SEQ ID NO: 28543 - protein, 9 aa, Artificial Sequence
  Description of Artificial Sequence: Synthetic peptide
PTFGWMNWF

SEQ ID NO: 28544 - protein, 9 aa, Artificial Sequence
  Description of Artificial Sequence: Synthetic peptide
QCERYHAAD

SEQ ID NO: 28545 - protein, 9 aa, Artificial Sequence
  Description of Artificial Sequence: Synthetic peptide
QCRLDMQCP

SEQ ID NO: 28546 - protein, 9 aa, Artificial Sequence
  Description of Artificial Sequence: Synthetic peptide
QFEDYWAIN

SEQ ID NO: 28547 - protein, 9 aa, Artificial Sequence
  Description of Artificial Sequence: Synthetic peptide
QGQKQNTTM

SEQ ID NO: 28548 - protein, 9 aa, Artificial Sequence
  Description of Artificial Sequence: Synthetic peptide
QHFVQGTYP

SEQ ID NO: 28549 - protein, 9 aa, Artificial Sequence
  Description of Artificial Sequence: Synthetic peptide
QICPQSMMP

SEQ ID NO: 28550 - protein, 9 aa, Artificial Sequence
  Description of Artificial Sequence: Synthetic peptide
QKDERHCYP

SEQ ID NO: 28551 - protein, 9 aa, Artificial Sequence
  Description of Artificial Sequence: Synthetic peptide
QMFMQMSGH

SEQ ID NO: 28552 - protein, 9 aa, Artificial Sequence
  Description of Artificial Sequence: Synthetic peptide
QNSRHKYAW

SEQ ID NO: 28553 - protein, 9 aa, Artificial Sequence
  Description of Artificial Sequence: Synthetic peptide
QTLGCEMGT

SEQ ID NO: 28554 - protein, 9 aa, Artificial Sequence
  Description of Artificial Sequence: Synthetic peptide
QTLGWEMGT

SEQ ID NO: 28555 - protein, 9 aa, Artificial Sequence
  Description of Artificial Sequence: Synthetic peptide
QTVETYAAH

SEQ ID NO: 28556 - protein, 9 aa, Artificial Sequence
  Description of Artificial Sequence: Synthetic peptide
QVGQYQNTI

SEQ ID NO: 28557 - protein, 9 aa, Artificial Sequence
  Description of Artificial Sequence: Synthetic peptide
RANDGYYIN

SEQ ID NO: 28558 - protein, 9 aa, Artificial Sequence
  Description of Artificial Sequence: Synthetic peptide
RDGFQEFTP

SEQ ID NO: 28559 - protein, 9 aa, Artificial Sequence
  Description of Artificial Sequence: Synthetic peptide
RFTGMSDQD

SEQ ID NO: 28560 - protein, 9 aa, Artificial Sequence
  Description of Artificial Sequence: Synthetic peptide
RNMSRQEGM

SEQ ID NO: 28561 - protein, 9 aa, Artificial Sequence
  Description of Artificial Sequence: Synthetic peptide
RRFVQGTYP

SEQ ID NO: 28562 - protein, 9 aa, Artificial Sequence
  Description of Artificial Sequence: Synthetic peptide
RTMGMDWFT

SEQ ID NO: 28563 - protein, 9 aa, Artificial Sequence
  Description of Artificial Sequence: Synthetic peptide
RVAMQQMNH

SEQ ID NO: 28564 - protein, 9 aa, Artificial Sequence
  Description of Artificial Sequence: Synthetic peptide
SAWQWAQMN

SEQ ID NO: 28565 - protein, 9 aa, Artificial Sequence
  Description of Artificial Sequence: Synthetic peptide
SCAVCGDCD

SEQ ID NO: 28566 - protein, 9 aa, Artificial Sequence
  Description of Artificial Sequence: Synthetic peptide
SCTARAWIC

SEQ ID NO: 28567 - protein, 9 aa, Artificial Sequence
  Description of Artificial Sequence: Synthetic peptide
SESQEGVYG

SEQ ID NO: 28568 - protein, 9 aa, Artificial Sequence
  Description of Artificial Sequence: Synthetic peptide
SGALKNREG

SEQ ID NO: 28569 - protein, 9 aa, Artificial Sequence
  Description of Artificial Sequence: Synthetic peptide
SKYHWHMYH

SEQ ID NO: 28570 - protein, 9 aa, Artificial Sequence
  Description of Artificial Sequence: Synthetic peptide
SRDAAAYSA

SEQ ID NO: 28571 - protein, 9 aa, Artificial Sequence
  Description of Artificial Sequence: Synthetic peptide
STEWAALGV

SEQ ID NO: 28572 - protein, 9 aa, Artificial Sequence
  Description of Artificial Sequence: Synthetic peptide
STFISSGIR

SEQ ID NO: 28573 - protein, 9 aa, Artificial Sequence
  Description of Artificial Sequence: Synthetic peptide
SYIPFDTQK

SEQ ID NO: 28574 - protein, 9 aa, Artificial Sequence
  Description of Artificial Sequence: Synthetic peptide
TAAGYIVDV

SEQ ID NO: 28575 - protein, 9 aa, Artificial Sequence
  Description of Artificial Sequence: Synthetic peptide
TAYMIDMYC

SEQ ID NO: 28576 - protein, 9 aa, Artificial Sequence
  Description of Artificial Sequence: Synthetic peptide
TCNVSWKHA

SEQ ID NO: 28577 - protein, 9 aa, Artificial Sequence
  Description of Artificial Sequence: Synthetic peptide
TCSYFNNRE

SEQ ID NO: 28578 - protein, 9 aa, Artificial Sequence
  Description of Artificial Sequence: Synthetic peptide
TGKVDGMQY

SEQ ID NO: 28579 - protein, 9 aa, Artificial Sequence
  Description of Artificial Sequence: Synthetic peptide
TLPKMYMWP

SEQ ID NO: 28580 - protein, 9 aa, Artificial Sequence
  Description of Artificial Sequence: Synthetic peptide
TMRTTMCIK

SEQ ID NO: 28581 - protein, 9 aa, Artificial Sequence
  Description of Artificial Sequence: Synthetic peptide
TMRTTMCIT

SEQ ID NO: 28582 - protein, 9 aa, Artificial Sequence
  Description of Artificial Sequence: Synthetic peptide
TPGINRHCC

SEQ ID NO: 28583 - protein, 9 aa, Artificial Sequence
  Description of Artificial Sequence: Synthetic peptide
TTFITETMD

SEQ ID NO: 28584 - protein, 9 aa, Artificial Sequence
  Description of Artificial Sequence: Synthetic peptide
TTHQTAFEW

SEQ ID NO: 28585 - protein, 9 aa, Artificial Sequence
  Description of Artificial Sequence: Synthetic peptide
TVNEALTCH

SEQ ID NO: 28586 - protein, 9 aa, Artificial Sequence
  Description of Artificial Sequence: Synthetic peptide
TVRWCHWCL

SEQ ID NO: 28587 - protein, 9 aa, Artificial Sequence
  Description of Artificial Sequence: Synthetic peptide
TWAMHPSHE

SEQ ID NO: 28588 - protein, 9 aa, Artificial Sequence
  Description of Artificial Sequence: Synthetic peptide
VAWSCDKFA

SEQ ID NO: 28589 - protein, 9 aa, Artificial Sequence
  Description of Artificial Sequence: Synthetic peptide
VEDMGQVEA

SEQ ID NO: 28590 - protein, 9 aa, Artificial Sequence
  Description of Artificial Sequence: Synthetic peptide
VGQNFNTGR

SEQ ID NO: 28591 - protein, 9 aa, Artificial Sequence
  Description of Artificial Sequence: Synthetic peptide
VGTDCATSL

SEQ ID NO: 28592 - protein, 9 aa, Artificial Sequence
  Description of Artificial Sequence: Synthetic peptide
VPSLNTSAG

SEQ ID NO: 28593 - protein, 9 aa, Artificial Sequence
  Description of Artificial Sequence: Synthetic peptide
VQKITDEVC

SEQ ID NO: 28594 - protein, 9 aa, Artificial Sequence
  Description of Artificial Sequence: Synthetic peptide
VSDDYECGI

SEQ ID NO: 28595 - protein, 9 aa, Artificial Sequence
  Description of Artificial Sequence: Synthetic peptide
VTQWKYGDT

SEQ ID NO: 28596 - protein, 9 aa, Artificial Sequence
  Description of Artificial Sequence: Synthetic peptide
VTRNEIWFP

SEQ ID NO: 28597 - protein, 9 aa, Artificial Sequence
  Description of Artificial Sequence: Synthetic peptide
VTYTNGMAE

SEQ ID NO: 28598 - protein, 9 aa, Artificial Sequence
  Description of Artificial Sequence: Synthetic peptide
VVTVHVRGH

SEQ ID NO: 28599 - protein, 9 aa, Artificial Sequence
  Description of Artificial Sequence: Synthetic peptide
WQIGGCPEE

SEQ ID NO: 28600 - protein, 9 aa, Artificial Sequence
  Description of Artificial Sequence: Synthetic peptide
WTHTYATGR

SEQ ID NO: 28601 - protein, 9 aa, Artificial Sequence
  Description of Artificial Sequence: Synthetic peptide
YAEVAVQQE

SEQ ID NO: 28602 - protein, 9 aa, Artificial Sequence
  Description of Artificial Sequence: Synthetic peptide
YAMPLYFWE

SEQ ID NO: 28603 - protein, 9 aa, Artificial Sequence
  Description of Artificial Sequence: Synthetic peptide
YAPQNEKPE

SEQ ID NO: 28604 - protein, 9 aa, Artificial Sequence
  Description of Artificial Sequence: Synthetic peptide
DFKFHSTGS

SEQ ID NO: 28605 - protein, 9 aa, Artificial Sequence
  Description of Artificial Sequence: Synthetic peptide
MMVTKEVNL

SEQ ID NO: 28606 - protein, 9 aa, Artificial Sequence
  Description of Artificial Sequence: Synthetic peptide
RTEGWFKYD

SEQ ID NO: 28607 - protein, 9 aa, Artificial Sequence
  Description of Artificial Sequence: Synthetic peptide
TSMWGLETS

SEQ ID NO: 28608 - protein, 9 aa, Artificial Sequence
  Description of Artificial Sequence: Synthetic peptide
FPGVMEGEI

SEQ ID NO: 28609 - protein, 9 aa, Artificial Sequence
  Description of Artificial Sequence: Synthetic peptide
TAKQHFMVW

SEQ ID NO: 28610 - protein, 9 aa, Artificial Sequence
  Description of Artificial Sequence: Synthetic peptide
FKMDCHSCG

SEQ ID NO: 28611 - protein, 9 aa, Artificial Sequence
  Description of Artificial Sequence: Synthetic peptide
ATWPERWQN

SEQ ID NO: 28612 - protein, 9 aa, Artificial Sequence
  Description of Artificial Sequence: Synthetic peptide
LMENYEFQD

SEQ ID NO: 28613 - protein, 9 aa, Artificial Sequence
  Description of Artificial Sequence: Synthetic peptide
ESYHYKLMT

SEQ ID NO: 28614 - protein, 9 aa, Artificial Sequence
  Description of Artificial Sequence: Synthetic peptide
QPIHFQQRD

SEQ ID NO: 28615 - protein, 9 aa, Artificial Sequence
  Description of Artificial Sequence: Synthetic peptide
VVNQQEFYY

SEQ ID NO: 28616 - protein, 9 aa, Artificial Sequence
  Description of Artificial Sequence: Synthetic peptide
AQKITDEVC

SEQ ID NO: 28617 - protein, 9 aa, Artificial Sequence
  Description of Artificial Sequence: Synthetic peptide
DVRSSMDHC

SEQ ID NO: 28618 - protein, 9 aa, Artificial Sequence
  Description of Artificial Sequence: Synthetic peptide
FNLSFCYHQ

SEQ ID NO: 28619 - protein, 9 aa, Artificial Sequence
  Description of Artificial Sequence: Synthetic peptide
RWHNGKGPM

SEQ ID NO: 28620 - protein, 9 aa, Artificial Sequence
  Description of Artificial Sequence: Synthetic peptide
RYSNVAHHA

SEQ ID NO: 28621 - protein, 9 aa, Artificial Sequence
  Description of Artificial Sequence: Synthetic peptide
FAMEQVKCD

SEQ ID NO: 28622 - protein, 9 aa, Artificial Sequence
  Description of Artificial Sequence: Synthetic peptide
DRVMISIQP

SEQ ID NO: 28623 - protein, 9 aa, Artificial Sequence
  Description of Artificial Sequence: Synthetic peptide
AGSGSVQCN

SEQ ID NO: 28624 - protein, 9 aa, Artificial Sequence
  Description of Artificial Sequence: Synthetic peptide
LPTLRVADK

SEQ ID NO: 28625 - protein, 9 aa, Artificial Sequence
  Description of Artificial Sequence: Synthetic peptide
DTDDWTCVF

SEQ ID NO: 28626 - protein, 9 aa, Artificial Sequence
  Description of Artificial Sequence: Synthetic peptide
SWHNNWTMD

SEQ ID NO: 28627 - protein, 9 aa, Artificial Sequence
  Description of Artificial Sequence: Synthetic peptide
WHDMVNSGP

SEQ ID NO: 28628 - protein, 9 aa, Artificial Sequence
  Description of Artificial Sequence: Synthetic peptide
RQCTDEECW

SEQ ID NO: 28629 - protein, 9 aa, Artificial Sequence
  Description of Artificial Sequence: Synthetic peptide
RVVMQQMNH

SEQ ID NO: 28630 - protein, 9 aa, Artificial Sequence
  Description of Artificial Sequence: Synthetic peptide
DRLNHSTDG

SEQ ID NO: 28631 - protein, 9 aa, Artificial Sequence
  Description of Artificial Sequence: Synthetic peptide
FLIQGDLTF

SEQ ID NO: 28632 - protein, 9 aa, Artificial Sequence
  Description of Artificial Sequence: Synthetic peptide
FPPIVKRHH

SEQ ID NO: 28633 - protein, 9 aa, Artificial Sequence
  Description of Artificial Sequence: Synthetic peptide
LCEGQQWHA

SEQ ID NO: 28634 - protein, 9 aa, Artificial Sequence
  Description of Artificial Sequence: Synthetic peptide
SGSIYHHMC

SEQ ID NO: 28635 - protein, 9 aa, Artificial Sequence
  Description of Artificial Sequence: Synthetic peptide
VVMWQFDSQ

SEQ ID NO: 28636 - protein, 9 aa, Artificial Sequence
  Description of Artificial Sequence: Synthetic peptide
RPDLNEIEC

SEQ ID NO: 28637 - protein, 9 aa, Artificial Sequence
  Description of Artificial Sequence: Synthetic peptide
SADNKIGGP

SEQ ID NO: 28638 - protein, 9 aa, Artificial Sequence
  Description of Artificial Sequence: Synthetic peptide
HAYQTMSEQ

SEQ ID NO: 28639 - protein, 9 aa, Artificial Sequence
  Description of Artificial Sequence: Synthetic peptide
CFTEPITDC

SEQ ID NO: 28640 - protein, 9 aa, Artificial Sequence
  Description of Artificial Sequence: Synthetic peptide
MTFVCNFGT

SEQ ID NO: 28641 - protein, 9 aa, Artificial Sequence
  Description of Artificial Sequence: Synthetic peptide
TSCGYNDNN

SEQ ID NO: 28642 - protein, 9 aa, Artificial Sequence
  Description of Artificial Sequence: Synthetic peptide
HPMFPNTED

SEQ ID NO: 28643 - protein, 9 aa, Artificial Sequence
  Description of Artificial Sequence: Synthetic peptide
AFAAYCSRE

SEQ ID NO: 28644 - protein, 9 aa, Artificial Sequence
  Description of Artificial Sequence: Synthetic peptide
CAKFTNAIH

SEQ ID NO: 28645 - protein, 9 aa, Artificial Sequence
  Description of Artificial Sequence: Synthetic peptide
NHQDNSAYP

SEQ ID NO: 28646 - protein, 9 aa, Artificial Sequence
  Description of Artificial Sequence: Synthetic peptide
IWGIYVHYF

SEQ ID NO: 28647 - protein, 9 aa, Artificial Sequence
  Description of Artificial Sequence: Synthetic peptide
YWWGFCWGL

SEQ ID NO: 28648 - protein, 9 aa, Artificial Sequence
  Description of Artificial Sequence: Synthetic peptide
KVEGYGWTR

SEQ ID NO: 28649 - protein, 9 aa, Artificial Sequence
  Description of Artificial Sequence: Synthetic peptide
YDQYGDRTM

SEQ ID NO: 28650 - protein, 9 aa, Artificial Sequence
  Description of Artificial Sequence: Synthetic peptide
EIGIIRHGH

SEQ ID NO: 28651 - protein, 9 aa, Artificial Sequence
  Description of Artificial Sequence: Synthetic peptide
VDHTLDFYH

SEQ ID NO: 28652 - protein, 9 aa, Artificial Sequence
  Description of Artificial Sequence: Synthetic peptide
TVVINACLE

SEQ ID NO: 28653 - protein, 9 aa, Artificial Sequence
  Description of Artificial Sequence: Synthetic peptide
LRHWFFSNM

SEQ ID NO: 28654 - protein, 9 aa, Artificial Sequence
  Description of Artificial Sequence: Synthetic peptide
AMTRQNGWM

SEQ ID NO: 28655 - protein, 9 aa, Artificial Sequence
  Description of Artificial Sequence: Synthetic peptide
WMCEFSCIQ

SEQ ID NO: 28656 - protein, 9 aa, Artificial Sequence
  Description of Artificial Sequence: Synthetic peptide
LTTKDDKEQ

SEQ ID NO: 28657 - protein, 9 aa, Artificial Sequence
  Description of Artificial Sequence: Synthetic peptide
PECKGAVDP

SEQ ID NO: 28658 - protein, 9 aa, Artificial Sequence
  Description of Artificial Sequence: Synthetic peptide
FQTPVANVC

SEQ ID NO: 28659 - protein, 9 aa, Artificial Sequence
  Description of Artificial Sequence: Synthetic peptide
QVGQYQNMI

SEQ ID NO: 28660 - protein, 9 aa, Artificial Sequence
  Description of Artificial Sequence: Synthetic peptide
QNADQAMSG

SEQ ID NO: 28661 - protein, 9 aa, Artificial Sequence
  Description of Artificial Sequence: Synthetic peptide
RFVLCDYME

SEQ ID NO: 28662 - protein, 9 aa, Artificial Sequence
  Description of Artificial Sequence: Synthetic peptide
HSEMHNHHA

SEQ ID NO: 28663 - protein, 9 aa, Artificial Sequence
  Description of Artificial Sequence: Synthetic peptide
TAFANAHTF

SEQ ID NO: 28664 - protein, 9 aa, Artificial Sequence
  Description of Artificial Sequence: Synthetic peptide
KVGCFVDVW

SEQ ID NO: 28665 - protein, 9 aa, Artificial Sequence
  Description of Artificial Sequence: Synthetic peptide
NWRMVHGRW

SEQ ID NO: 28666 - protein, 9 aa, Artificial Sequence
  Description of Artificial Sequence: Synthetic peptide
GVNDLQNIC

SEQ ID NO: 28667 - protein, 9 aa, Artificial Sequence
  Description of Artificial Sequence: Synthetic peptide
CVVNRGSIT

SEQ ID NO: 28668 - protein, 9 aa, Artificial Sequence
  Description of Artificial Sequence: Synthetic peptide
DTHTCSGFS

SEQ ID NO: 28669 - protein, 9 aa, Artificial Sequence
  Description of Artificial Sequence: Synthetic peptide
DFEMWDWFG

SEQ ID NO: 28670 - protein, 9 aa, Artificial Sequence
  Description of Artificial Sequence: Synthetic peptide
TRRSWECAP

SEQ ID NO: 28671 - protein, 9 aa, Artificial Sequence
  Description of Artificial Sequence: Synthetic peptide
SCTTRAWIC

SEQ ID NO: 28672 - protein, 9 aa, Artificial Sequence
  Description of Artificial Sequence: Synthetic peptide
MIEPNDHGK

SEQ ID NO: 28673 - protein, 9 aa, Artificial Sequence
  Description of Artificial Sequence: Synthetic peptide
KKDERHCYP

SEQ ID NO: 28674 - protein, 9 aa, Artificial Sequence
  Description of Artificial Sequence: Synthetic peptide
CHCQMEAEW

SEQ ID NO: 28675 - protein, 9 aa, Artificial Sequence
  Description of Artificial Sequence: Synthetic peptide
RVEMQYWEN

SEQ ID NO: 28676 - protein, 9 aa, Artificial Sequence
  Description of Artificial Sequence: Synthetic peptide
DWTINDGWS

SEQ ID NO: 28677 - protein, 9 aa, Artificial Sequence
  Description of Artificial Sequence: Synthetic peptide
TVREDCCIN

SEQ ID NO: 28678 - protein, 9 aa, Artificial Sequence
  Description of Artificial Sequence: Synthetic peptide
SSQKYKDWE

SEQ ID NO: 28679 - protein, 9 aa, Artificial Sequence
  Description of Artificial Sequence: Synthetic peptide
CVWSVGAEW

SEQ ID NO: 28680 - protein, 9 aa, Artificial Sequence
  Description of Artificial Sequence: Synthetic peptide
DTAATMEPK

SEQ ID NO: 28681 - protein, 9 aa, Artificial Sequence
  Description of Artificial Sequence: Synthetic peptide
EPRPETEGC

SEQ ID NO: 28682 - protein, 9 aa, Artificial Sequence
  Description of Artificial Sequence: Synthetic peptide
MVTERKPWS

SEQ ID NO: 28683 - protein, 9 aa, Artificial Sequence
  Description of Artificial Sequence: Synthetic peptide
SYDKEHAVW

SEQ ID NO: 28684 - protein, 9 aa, Artificial Sequence
  Description of Artificial Sequence: Synthetic peptide
RANTWTRRH

SEQ ID NO: 28685 - protein, 9 aa, Artificial Sequence
  Description of Artificial Sequence: Synthetic peptide
HLTILHCPE

SEQ ID NO: 28686 - protein, 9 aa, Artificial Sequence
  Description of Artificial Sequence: Synthetic peptide
YCGWKEFRR

SEQ ID NO: 28687 - protein, 9 aa, Artificial Sequence
  Description of Artificial Sequence: Synthetic peptide
MASFVEHCI

SEQ ID NO: 28688 - protein, 9 aa, Artificial Sequence
  Description of Artificial Sequence: Synthetic peptide
KAMGMLEWA

SEQ ID NO: 28689 - protein, 9 aa, Artificial Sequence
  Description of Artificial Sequence: Synthetic peptide
EEKDPHMDS

SEQ ID NO: 28690 - protein, 9 aa, Artificial Sequence
  Description of Artificial Sequence: Synthetic peptide
MDNNYHQFG

SEQ ID NO: 28691 - protein, 9 aa, Artificial Sequence
  Description of Artificial Sequence: Synthetic peptide
WIQWVRKMG

SEQ ID NO: 28692 - protein, 9 aa, Artificial Sequence
  Description of Artificial Sequence: Synthetic peptide
NEWSRWLTG

SEQ ID NO: 28693 - protein, 9 aa, Artificial Sequence
  Description of Artificial Sequence: Synthetic peptide
FQNVEIEKF

SEQ ID NO: 28694 - protein, 9 aa, Artificial Sequence
  Description of Artificial Sequence: Synthetic peptide
QNMFGNQPY

SEQ ID NO: 28695 - protein, 9 aa, Artificial Sequence
  Description of Artificial Sequence: Synthetic peptide
CKQRNCDGN

SEQ ID NO: 28696 - protein, 9 aa, Artificial Sequence
  Description of Artificial Sequence: Synthetic peptide
LCNNADMRC

SEQ ID NO: 28697 - protein, 9 aa, Artificial Sequence
  Description of Artificial Sequence: Synthetic peptide
VKQSMPMKG

SEQ ID NO: 28698 - protein, 9 aa, Artificial Sequence
  Description of Artificial Sequence: Synthetic peptide
MANLKHQLA

SEQ ID NO: 28699 - protein, 9 aa, Artificial Sequence
  Description of Artificial Sequence: Synthetic peptide
EDFVTTSEL

SEQ ID NO: 28700 - protein, 9 aa, Artificial Sequence
  Description of Artificial Sequence: Synthetic peptide
LKRTVGVCQ

SEQ ID NO: 28701 - protein, 9 aa, Artificial Sequence
  Description of Artificial Sequence: Synthetic peptide
ALILYARKH

SEQ ID NO: 28702 - protein, 9 aa, Artificial Sequence
  Description of Artificial Sequence: Synthetic peptide
ASIKFEGQE

SEQ ID NO: 28703 - protein, 9 aa, Artificial Sequence
  Description of Artificial Sequence: Synthetic peptide
SQKQFSMQH

SEQ ID NO: 28704 - protein, 9 aa, Artificial Sequence
  Description of Artificial Sequence: Synthetic peptide
CDNAGEFGQ

SEQ ID NO: 28705 - protein, 9 aa, Artificial Sequence
  Description of Artificial Sequence: Synthetic peptide
NRCQFGKDW

SEQ ID NO: 28706 - protein, 9 aa, Artificial Sequence
  Description of Artificial Sequence: Synthetic peptide
VTNIFNGPR

SEQ ID NO: 28707 - protein, 9 aa, Artificial Sequence
  Description of Artificial Sequence: Synthetic peptide
GYKCGCVCC

SEQ ID NO: 28708 - protein, 9 aa, Artificial Sequence
  Description of Artificial Sequence: Synthetic peptide
ACEQIFEGI

SEQ ID NO: 28709 - protein, 9 aa, Artificial Sequence
  Description of Artificial Sequence: Synthetic peptide
AHGWSQGAS

SEQ ID NO: 28710 - protein, 9 aa, Artificial Sequence
  Description of Artificial Sequence: Synthetic peptide
AHGWSQGES

SEQ ID NO: 28711 - protein, 9 aa, Artificial Sequence
  Description of Artificial Sequence: Synthetic peptide
AHRWSQGES

SEQ ID NO: 28712 - protein, 9 aa, Artificial Sequence
  Description of Artificial Sequence: Synthetic peptide
AIHEVQSSF

SEQ ID NO: 28713 - protein, 9 aa, Artificial Sequence
  Description of Artificial Sequence: Synthetic peptide
AILKITKVL

SEQ ID NO: 28714 - protein, 9 aa, Artificial Sequence
  Description of Artificial Sequence: Synthetic peptide
AMINPKNDH

SEQ ID NO: 28715 - protein, 9 aa, Artificial Sequence
  Description of Artificial Sequence: Synthetic peptide
AMINPNNDH

SEQ ID NO: 28716 - protein, 9 aa, Artificial Sequence
  Description of Artificial Sequence: Synthetic peptide
AMTNPNNDH

SEQ ID NO: 28717 - protein, 9 aa, Artificial Sequence
  Description of Artificial Sequence: Synthetic peptide
ANEEMMAAD

SEQ ID NO: 28718 - protein, 9 aa, Artificial Sequence
  Description of Artificial Sequence: Synthetic peptide
APAPTLREW

SEQ ID NO: 28719 - protein, 9 aa, Artificial Sequence
  Description of Artificial Sequence: Synthetic peptide
AQSPGIHQE

SEQ ID NO: 28720 - protein, 9 aa, Artificial Sequence
  Description of Artificial Sequence: Synthetic peptide
AQSPGMHQE

SEQ ID NO: 28721 - protein, 9 aa, Artificial Sequence
  Description of Artificial Sequence: Synthetic peptide
ATDQPANLC

SEQ ID NO: 28722 - protein, 9 aa, Artificial Sequence
  Description of Artificial Sequence: Synthetic peptide
ATDQPVNLC

SEQ ID NO: 28723 - protein, 9 aa, Artificial Sequence
  Description of Artificial Sequence: Synthetic peptide
ATGTQLNQD

SEQ ID NO: 28724 - protein, 9 aa, Artificial Sequence
  Description of Artificial Sequence: Synthetic peptide
AVHNVKDVH

SEQ ID NO: 28725 - protein, 9 aa, Artificial Sequence
  Description of Artificial Sequence: Synthetic peptide
CASSYPRDL

SEQ ID NO: 28726 - protein, 9 aa, Artificial Sequence
  Description of Artificial Sequence: Synthetic peptide
CASYYPRAL

SEQ ID NO: 28727 - protein, 9 aa, Artificial Sequence
  Description of Artificial Sequence: Synthetic peptide
CASYYPRDL

SEQ ID NO: 28728 - protein, 9 aa, Artificial Sequence
  Description of Artificial Sequence: Synthetic peptide
CEFEKMDYG

SEQ ID NO: 28729 - protein, 9 aa, Artificial Sequence
  Description of Artificial Sequence: Synthetic peptide
CEFKKMDYG

SEQ ID NO: 28730 - protein, 9 aa, Artificial Sequence
  Description of Artificial Sequence: Synthetic peptide
CEFKKVDYG

SEQ ID NO: 28731 - protein, 9 aa, Artificial Sequence
  Description of Artificial Sequence: Synthetic peptide
CFCKYDMQM

SEQ ID NO: 28732 - protein, 9 aa, Artificial Sequence
  Description of Artificial Sequence: Synthetic peptide
CFCKYEMQM

SEQ ID NO: 28733 - protein, 9 aa, Artificial Sequence
  Description of Artificial Sequence: Synthetic peptide
CFCTYDMQM

SEQ ID NO: 28734 - protein, 9 aa, Artificial Sequence
  Description of Artificial Sequence: Synthetic peptide
CGMCHECTL

SEQ ID NO: 28735 - protein, 9 aa, Artificial Sequence
  Description of Artificial Sequence: Synthetic peptide
CGTAYWTAY

SEQ ID NO: 28736 - protein, 9 aa, Artificial Sequence
  Description of Artificial Sequence: Synthetic peptide
CGTTYWTAY

SEQ ID NO: 28737 - protein, 9 aa, Artificial Sequence
  Description of Artificial Sequence: Synthetic peptide
CPKAWEKAA

SEQ ID NO: 28738 - protein, 9 aa, Artificial Sequence
  Description of Artificial Sequence: Synthetic peptide
CPKDWAKAA

SEQ ID NO: 28739 - protein, 9 aa, Artificial Sequence
  Description of Artificial Sequence: Synthetic peptide
CPKDWEKAA

SEQ ID NO: 28740 - protein, 9 aa, Artificial Sequence
  Description of Artificial Sequence: Synthetic peptide
CPKDWGKAA

SEQ ID NO: 28741 - protein, 9 aa, Artificial Sequence
  Description of Artificial Sequence: Synthetic peptide
CPKGWEKAA

SEQ ID NO: 28742 - protein, 9 aa, Artificial Sequence
  Description of Artificial Sequence: Synthetic peptide
CQMLLHAFK

SEQ ID NO: 28743 - protein, 9 aa, Artificial Sequence
  Description of Artificial Sequence: Synthetic peptide
CQMLLRAFK

SEQ ID NO: 28744 - protein, 9 aa, Artificial Sequence
  Description of Artificial Sequence: Synthetic peptide
CQTETILCG

SEQ ID NO: 28745 - protein, 9 aa, Artificial Sequence
  Description of Artificial Sequence: Synthetic peptide
CQTKTILCG

SEQ ID NO: 28746 - protein, 9 aa, Artificial Sequence
  Description of Artificial Sequence: Synthetic peptide
CQTKTMLCG

SEQ ID NO: 28747 - protein, 9 aa, Artificial Sequence
  Description of Artificial Sequence: Synthetic peptide
CTKECMLWP

SEQ ID NO: 28748 - protein, 9 aa, Artificial Sequence
  Description of Artificial Sequence: Synthetic peptide
CTKEYMLWP

SEQ ID NO: 28749 - protein, 9 aa, Artificial Sequence
  Description of Artificial Sequence: Synthetic peptide
CVECNQPVR

SEQ ID NO: 28750 - protein, 9 aa, Artificial Sequence
  Description of Artificial Sequence: Synthetic peptide
CVMCHACTL

SEQ ID NO: 28751 - protein, 9 aa, Artificial Sequence
  Description of Artificial Sequence: Synthetic peptide
CVMCHECTL

SEQ ID NO: 28752 - protein, 9 aa, Artificial Sequence
  Description of Artificial Sequence: Synthetic peptide
DAGCMGGWF

SEQ ID NO: 28753 - protein, 9 aa, Artificial Sequence
  Description of Artificial Sequence: Synthetic peptide
DCARQHYYA

SEQ ID NO: 28754 - protein, 9 aa, Artificial Sequence
  Description of Artificial Sequence: Synthetic peptide
DICLEPAQT

SEQ ID NO: 28755 - protein, 9 aa, Artificial Sequence
  Description of Artificial Sequence: Synthetic peptide
DICLETAQT

SEQ ID NO: 28756 - protein, 9 aa, Artificial Sequence
  Description of Artificial Sequence: Synthetic peptide
DICLETTQT

SEQ ID NO: 28757 - protein, 9 aa, Artificial Sequence
  Description of Artificial Sequence: Synthetic peptide
DICSETAQT

SEQ ID NO: 28758 - protein, 9 aa, Artificial Sequence
  Description of Artificial Sequence: Synthetic peptide
DKSHVDQDK

SEQ ID NO: 28759 - protein, 9 aa, Artificial Sequence
  Description of Artificial Sequence: Synthetic peptide
DLYTYIMEN

SEQ ID NO: 28760 - protein, 9 aa, Artificial Sequence
  Description of Artificial Sequence: Synthetic peptide
DLYTYIMGN

SEQ ID NO: 28761 - protein, 9 aa, Artificial Sequence
  Description of Artificial Sequence: Synthetic peptide
DLYTYLMEN

SEQ ID NO: 28762 - protein, 9 aa, Artificial Sequence
  Description of Artificial Sequence: Synthetic peptide
DLYTYMMEN

SEQ ID NO: 28763 - protein, 9 aa, Artificial Sequence
  Description of Artificial Sequence: Synthetic peptide
DLYTYVMEN

SEQ ID NO: 28764 - protein, 9 aa, Artificial Sequence
  Description of Artificial Sequence: Synthetic peptide
DMEEHTHSC

SEQ ID NO: 28765 - protein, 9 aa, Artificial Sequence
  Description of Artificial Sequence: Synthetic peptide
DNLCIGAFG

SEQ ID NO: 28766 - protein, 9 aa, Artificial Sequence
  Description of Artificial Sequence: Synthetic peptide
DNLCIGASG

SEQ ID NO: 28767 - protein, 9 aa, Artificial Sequence
  Description of Artificial Sequence: Synthetic peptide
DNPCIGAFG

SEQ ID NO: 28768 - protein, 9 aa, Artificial Sequence
  Description of Artificial Sequence: Synthetic peptide
DQRMLLKEL

SEQ ID NO: 28769 - protein, 9 aa, Artificial Sequence
  Description of Artificial Sequence: Synthetic peptide
DQRMLLKGL

SEQ ID NO: 28770 - protein, 9 aa, Artificial Sequence
  Description of Artificial Sequence: Synthetic peptide
DSCSIKCDE

SEQ ID NO: 28771 - protein, 9 aa, Artificial Sequence
  Description of Artificial Sequence: Synthetic peptide
DSCSITCDE

SEQ ID NO: 28772 - protein, 9 aa, Artificial Sequence
  Description of Artificial Sequence: Synthetic peptide
DSCTHHEGF

SEQ ID NO: 28773 - protein, 9 aa, Artificial Sequence
  Description of Artificial Sequence: Synthetic peptide
DSHTANFRG

SEQ ID NO: 28774 - protein, 9 aa, Artificial Sequence
  Description of Artificial Sequence: Synthetic peptide
DSHTVNFRG

SEQ ID NO: 28775 - protein, 9 aa, Artificial Sequence
  Description of Artificial Sequence: Synthetic peptide
DSYTHHEGF

SEQ ID NO: 28776 - protein, 9 aa, Artificial Sequence
  Description of Artificial Sequence: Synthetic peptide
DYASLAGQA

SEQ ID NO: 28777 - protein, 9 aa, Artificial Sequence
  Description of Artificial Sequence: Synthetic peptide
DYASLEGQA

SEQ ID NO: 28778 - protein, 9 aa, Artificial Sequence
  Description of Artificial Sequence: Synthetic peptide
DYASLEGRA

SEQ ID NO: 28779 - protein, 9 aa, Artificial Sequence
  Description of Artificial Sequence: Synthetic peptide
DYASLGGQA

SEQ ID NO: 28780 - protein, 9 aa, Artificial Sequence
  Description of Artificial Sequence: Synthetic peptide
DYASLVGQA

SEQ ID NO: 28781 - protein, 9 aa, Artificial Sequence
  Description of Artificial Sequence: Synthetic peptide
DYGPKDFFA

SEQ ID NO: 28782 - protein, 9 aa, Artificial Sequence
  Description of Artificial Sequence: Synthetic peptide
DYGPKEFFA

SEQ ID NO: 28783 - protein, 9 aa, Artificial Sequence
  Description of Artificial Sequence: Synthetic peptide
EAIFAMTST

SEQ ID NO: 28784 - protein, 9 aa, Artificial Sequence
  Description of Artificial Sequence: Synthetic peptide
EAYAMKQNT

SEQ ID NO: 28785 - protein, 9 aa, Artificial Sequence
  Description of Artificial Sequence: Synthetic peptide
EDQVASHWI

SEQ ID NO: 28786 - protein, 9 aa, Artificial Sequence
  Description of Artificial Sequence: Synthetic peptide
EFMCVDQLE

SEQ ID NO: 28787 - protein, 9 aa, Artificial Sequence
  Description of Artificial Sequence: Synthetic peptide
EFMCVDQSE

SEQ ID NO: 28788 - protein, 9 aa, Artificial Sequence
  Description of Artificial Sequence: Synthetic peptide
EGVIISLLE

SEQ ID NO: 28789 - protein, 9 aa, Artificial Sequence
  Description of Artificial Sequence: Synthetic peptide
EMMQTCVQH

SEQ ID NO: 28790 - protein, 9 aa, Artificial Sequence
  Description of Artificial Sequence: Synthetic peptide
EMMRTCVQH

SEQ ID NO: 28791 - protein, 9 aa, Artificial Sequence
  Description of Artificial Sequence: Synthetic peptide
EQICSEIDQ

SEQ ID NO: 28792 - protein, 9 aa, Artificial Sequence
  Description of Artificial Sequence: Synthetic peptide
EQVMDTWQL

SEQ ID NO: 28793 - protein, 9 aa, Artificial Sequence
  Description of Artificial Sequence: Synthetic peptide
ESLSGGEHP

SEQ ID NO: 28794 - protein, 9 aa, Artificial Sequence
  Description of Artificial Sequence: Synthetic peptide
ESLSNGEHP

SEQ ID NO: 28795 - protein, 9 aa, Artificial Sequence
  Description of Artificial Sequence: Synthetic peptide
ESLSSGEHP

SEQ ID NO: 28796 - protein, 9 aa, Artificial Sequence
  Description of Artificial Sequence: Synthetic peptide
ESLYSGEHP

SEQ ID NO: 28797 - protein, 9 aa, Artificial Sequence
  Description of Artificial Sequence: Synthetic peptide
ESQSSGEHP

SEQ ID NO: 28798 - protein, 9 aa, Artificial Sequence
  Description of Artificial Sequence: Synthetic peptide
ETQYWYARQ

SEQ ID NO: 28799 - protein, 9 aa, Artificial Sequence
  Description of Artificial Sequence: Synthetic peptide
EVFLESQDE

SEQ ID NO: 28800 - protein, 9 aa, Artificial Sequence
  Description of Artificial Sequence: Synthetic peptide
EVFRESQDE

SEQ ID NO: 28801 - protein, 9 aa, Artificial Sequence
  Description of Artificial Sequence: Synthetic peptide
EVKYKGNYN

SEQ ID NO: 28802 - protein, 9 aa, Artificial Sequence
  Description of Artificial Sequence: Synthetic peptide
FADLILSDG

SEQ ID NO: 28803 - protein, 9 aa, Artificial Sequence
  Description of Artificial Sequence: Synthetic peptide
FGDKMTVTS

SEQ ID NO: 28804 - protein, 9 aa, Artificial Sequence
  Description of Artificial Sequence: Synthetic peptide
FSPNTPRSD

SEQ ID NO: 28805 - protein, 9 aa, Artificial Sequence
  Description of Artificial Sequence: Synthetic peptide
FSPNTQRSD

SEQ ID NO: 28806 - protein, 9 aa, Artificial Sequence
  Description of Artificial Sequence: Synthetic peptide
FWSHVGLQE

SEQ ID NO: 28807 - protein, 9 aa, Artificial Sequence
  Description of Artificial Sequence: Synthetic peptide
FWSPVGLQE

SEQ ID NO: 28808 - protein, 9 aa, Artificial Sequence
  Description of Artificial Sequence: Synthetic peptide
GASYFSQPV

SEQ ID NO: 28809 - protein, 9 aa, Artificial Sequence
  Description of Artificial Sequence: Synthetic peptide
GCTWEQHAE

SEQ ID NO: 28810 - protein, 9 aa, Artificial Sequence
  Description of Artificial Sequence: Synthetic peptide
GCTWEQHGE

SEQ ID NO: 28811 - protein, 9 aa, Artificial Sequence
  Description of Artificial Sequence: Synthetic peptide
GCTWEQHVE

SEQ ID NO: 28812 - protein, 9 aa, Artificial Sequence
  Description of Artificial Sequence: Synthetic peptide
GKSHVDQDK

SEQ ID NO: 28813 - protein, 9 aa, Artificial Sequence
  Description of Artificial Sequence: Synthetic peptide
GKSHVEQDK

SEQ ID NO: 28814 - protein, 9 aa, Artificial Sequence
  Description of Artificial Sequence: Synthetic peptide
GKSHVNQDK

SEQ ID NO: 28815 - protein, 9 aa, Artificial Sequence
  Description of Artificial Sequence: Synthetic peptide
GKSPVDQDK

SEQ ID NO: 28816 - protein, 9 aa, Artificial Sequence
  Description of Artificial Sequence: Synthetic peptide
GQDCWGLAM

SEQ ID NO: 28817 - protein, 9 aa, Artificial Sequence
  Description of Artificial Sequence: Synthetic peptide
GRRYPECTT

SEQ ID NO: 28818 - protein, 9 aa, Artificial Sequence
  Description of Artificial Sequence: Synthetic peptide
GRWYPECTT

SEQ ID NO: 28819 - protein, 9 aa, Artificial Sequence
  Description of Artificial Sequence: Synthetic peptide
GSSYFGQPV

SEQ ID NO: 28820 - protein, 9 aa, Artificial Sequence
  Description of Artificial Sequence: Synthetic peptide
GSSYFIQPV

SEQ ID NO: 28821 - protein, 9 aa, Artificial Sequence
  Description of Artificial Sequence: Synthetic peptide
GSSYFNQPV

SEQ ID NO: 28822 - protein, 9 aa, Artificial Sequence
  Description of Artificial Sequence: Synthetic peptide
GSSYFSQPV

SEQ ID NO: 28823 - protein, 9 aa, Artificial Sequence
  Description of Artificial Sequence: Synthetic peptide
GTSYFSQPV

SEQ ID NO: 28824 - protein, 9 aa, Artificial Sequence
  Description of Artificial Sequence: Synthetic peptide
GTYGSSFYM

SEQ ID NO: 28825 - protein, 9 aa, Artificial Sequence
  Description of Artificial Sequence: Synthetic peptide
GVAHYHHHP

SEQ ID NO: 28826 - protein, 9 aa, Artificial Sequence
  Description of Artificial Sequence: Synthetic peptide
GVAHYHHHQ

SEQ ID NO: 28827 - protein, 9 aa, Artificial Sequence
  Description of Artificial Sequence: Synthetic peptide
GVAHYHHRQ

SEQ ID NO: 28828 - protein, 9 aa, Artificial Sequence
  Description of Artificial Sequence: Synthetic peptide
GVAHYQHHQ

SEQ ID NO: 28829 - protein, 9 aa, Artificial Sequence
  Description of Artificial Sequence: Synthetic peptide
GVAHYRHHQ

SEQ ID NO: 28830 - protein, 9 aa, Artificial Sequence
  Description of Artificial Sequence: Synthetic peptide
GVAPYHHHQ

SEQ ID NO: 28831 - protein, 9 aa, Artificial Sequence
  Description of Artificial Sequence: Synthetic peptide
GVFECSTCQ

SEQ ID NO: 28832 - protein, 9 aa, Artificial Sequence
  Description of Artificial Sequence: Synthetic peptide
GYTWEQHVE

SEQ ID NO: 28833 - protein, 9 aa, Artificial Sequence
  Description of Artificial Sequence: Synthetic peptide
HAVWRQSSH

SEQ ID NO: 28834 - protein, 9 aa, Artificial Sequence
  Description of Artificial Sequence: Synthetic peptide
HCWGHAFFF

SEQ ID NO: 28835 - protein, 9 aa, Artificial Sequence
  Description of Artificial Sequence: Synthetic peptide
HCWGHEFFF

SEQ ID NO: 28836 - protein, 9 aa, Artificial Sequence
  Description of Artificial Sequence: Synthetic peptide
HCWGHGFFF

SEQ ID NO: 28837 - protein, 9 aa, Artificial Sequence
  Description of Artificial Sequence: Synthetic peptide
HCYSTSEME

SEQ ID NO: 28838 - protein, 9 aa, Artificial Sequence
  Description of Artificial Sequence: Synthetic peptide
HCYSTSETE

SEQ ID NO: 28839 - protein, 9 aa, Artificial Sequence
  Description of Artificial Sequence: Synthetic peptide
HTDDLKKVI

SEQ ID NO: 28840 - protein, 9 aa, Artificial Sequence
  Description of Artificial Sequence: Synthetic peptide
HTIITNQPY

SEQ ID NO: 28841 - protein, 9 aa, Artificial Sequence
  Description of Artificial Sequence: Synthetic peptide
HVFSANVDK

SEQ ID NO: 28842 - protein, 9 aa, Artificial Sequence
  Description of Artificial Sequence: Synthetic peptide
HVFSANVNK

SEQ ID NO: 28843 - protein, 9 aa, Artificial Sequence
  Description of Artificial Sequence: Synthetic peptide
HVVWRQSSH

SEQ ID NO: 28844 - protein, 9 aa, Artificial Sequence
  Description of Artificial Sequence: Synthetic peptide
IAHAAMHDG

SEQ ID NO: 28845 - protein, 9 aa, Artificial Sequence
  Description of Artificial Sequence: Synthetic peptide
IAHEAMHDG

SEQ ID NO: 28846 - protein, 9 aa, Artificial Sequence
  Description of Artificial Sequence: Synthetic peptide
IAHEAMRDG

SEQ ID NO: 28847 - protein, 9 aa, Artificial Sequence
  Description of Artificial Sequence: Synthetic peptide
IAHEAMYDG

SEQ ID NO: 28848 - protein, 9 aa, Artificial Sequence
  Description of Artificial Sequence: Synthetic peptide
IAHGAMHDG

SEQ ID NO: 28849 - protein, 9 aa, Artificial Sequence
  Description of Artificial Sequence: Synthetic peptide
ICFQHQIRK

SEQ ID NO: 28850 - protein, 9 aa, Artificial Sequence
  Description of Artificial Sequence: Synthetic peptide
ICFQYQIRK

SEQ ID NO: 28851 - protein, 9 aa, Artificial Sequence
  Description of Artificial Sequence: Synthetic peptide
ICMAKNGWW

SEQ ID NO: 28852 - protein, 9 aa, Artificial Sequence
  Description of Artificial Sequence: Synthetic peptide
ICMDKHGWW

SEQ ID NO: 28853 - protein, 9 aa, Artificial Sequence
  Description of Artificial Sequence: Synthetic peptide
ICMDKNGWW

SEQ ID NO: 28854 - protein, 9 aa, Artificial Sequence
  Description of Artificial Sequence: Synthetic peptide
ICMDKSGWW

SEQ ID NO: 28855 - protein, 9 aa, Artificial Sequence
  Description of Artificial Sequence: Synthetic peptide
IIGFMPPTG

SEQ ID NO: 28856 - protein, 9 aa, Artificial Sequence
  Description of Artificial Sequence: Synthetic peptide
ISNPLMTQM

SEQ ID NO: 28857 - protein, 9 aa, Artificial Sequence
  Description of Artificial Sequence: Synthetic peptide
ITTAYPECD

SEQ ID NO: 28858 - protein, 9 aa, Artificial Sequence
  Description of Artificial Sequence: Synthetic peptide
IVAIAHGEH

SEQ ID NO: 28859 - protein, 9 aa, Artificial Sequence
  Description of Artificial Sequence: Synthetic peptide
IVASAHGEH

SEQ ID NO: 28860 - protein, 9 aa, Artificial Sequence
  Description of Artificial Sequence: Synthetic peptide
KAIPQGSSC

SEQ ID NO: 28861 - protein, 9 aa, Artificial Sequence
  Description of Artificial Sequence: Synthetic peptide
KARQDDVNT

SEQ ID NO: 28862 - protein, 9 aa, Artificial Sequence
  Description of Artificial Sequence: Synthetic peptide
KHDIYHTYT

SEQ ID NO: 28863 - protein, 9 aa, Artificial Sequence
  Description of Artificial Sequence: Synthetic peptide
KHNPSRHGI

SEQ ID NO: 28864 - protein, 9 aa, Artificial Sequence
  Description of Artificial Sequence: Synthetic peptide
KQVNFNAKN

SEQ ID NO: 28865 - protein, 9 aa, Artificial Sequence
  Description of Artificial Sequence: Synthetic peptide
KSDTQCRFF

SEQ ID NO: 28866 - protein, 9 aa, Artificial Sequence
  Description of Artificial Sequence: Synthetic peptide
KSDTQWRFF

SEQ ID NO: 28867 - protein, 9 aa, Artificial Sequence
  Description of Artificial Sequence: Synthetic peptide
KTVPECESS

SEQ ID NO: 28868 - protein, 9 aa, Artificial Sequence
  Description of Artificial Sequence: Synthetic peptide
KTVQECESS

SEQ ID NO: 28869 - protein, 9 aa, Artificial Sequence
  Description of Artificial Sequence: Synthetic peptide
KTVQEGESS

SEQ ID NO: 28870 - protein, 9 aa, Artificial Sequence
  Description of Artificial Sequence: Synthetic peptide
KTVQEWESS

SEQ ID NO: 28871 - protein, 9 aa, Artificial Sequence
  Description of Artificial Sequence: Synthetic peptide
LAAMQQGPW

SEQ ID NO: 28872 - protein, 9 aa, Artificial Sequence
  Description of Artificial Sequence: Synthetic peptide
LAMRRFDNF

SEQ ID NO: 28873 - protein, 9 aa, Artificial Sequence
  Description of Artificial Sequence: Synthetic peptide
LCFQHQIRK

SEQ ID NO: 28874 - protein, 9 aa, Artificial Sequence
  Description of Artificial Sequence: Synthetic peptide
LFNKNDCSM

SEQ ID NO: 28875 - protein, 9 aa, Artificial Sequence
  Description of Artificial Sequence: Synthetic peptide
LFNKNGCSM

SEQ ID NO: 28876 - protein, 9 aa, Artificial Sequence
  Description of Artificial Sequence: Synthetic peptide
LFNKNGCSV

SEQ ID NO: 28877 - protein, 9 aa, Artificial Sequence
  Description of Artificial Sequence: Synthetic peptide
LFRAYAWFQ

SEQ ID NO: 28878 - protein, 9 aa, Artificial Sequence
  Description of Artificial Sequence: Synthetic peptide
LGRKPYALD

SEQ ID NO: 28879 - protein, 9 aa, Artificial Sequence
  Description of Artificial Sequence: Synthetic peptide
LGSDFNARD

SEQ ID NO: 28880 - protein, 9 aa, Artificial Sequence
  Description of Artificial Sequence: Synthetic peptide
LLTGQNSSH

SEQ ID NO: 28881 - protein, 9 aa, Artificial Sequence
  Description of Artificial Sequence: Synthetic peptide
LMWIALEAW

SEQ ID NO: 28882 - protein, 9 aa, Artificial Sequence
  Description of Artificial Sequence: Synthetic peptide
LPWIHTNAN

SEQ ID NO: 28883 - protein, 9 aa, Artificial Sequence
  Description of Artificial Sequence: Synthetic peptide
LSHKPADPT

SEQ ID NO: 28884 - protein, 9 aa, Artificial Sequence
  Description of Artificial Sequence: Synthetic peptide
LSMQWAVIH

SEQ ID NO: 28885 - protein, 9 aa, Artificial Sequence
  Description of Artificial Sequence: Synthetic peptide
LSMQWAVLH

SEQ ID NO: 28886 - protein, 9 aa, Artificial Sequence
  Description of Artificial Sequence: Synthetic peptide
LSMQWVVLH

SEQ ID NO: 28887 - protein, 9 aa, Artificial Sequence
  Description of Artificial Sequence: Synthetic peptide
LTCYHNELS

SEQ ID NO: 28888 - protein, 9 aa, Artificial Sequence
  Description of Artificial Sequence: Synthetic peptide
LVMRRFDNF

SEQ ID NO: 28889 - protein, 9 aa, Artificial Sequence
  Description of Artificial Sequence: Synthetic peptide
MADLIVEHD

SEQ ID NO: 28890 - protein, 9 aa, Artificial Sequence
  Description of Artificial Sequence: Synthetic peptide
MAEHRKQEH

SEQ ID NO: 28891 - protein, 9 aa, Artificial Sequence
  Description of Artificial Sequence: Synthetic peptide
MCHRASDQN

SEQ ID NO: 28892 - protein, 9 aa, Artificial Sequence
  Description of Artificial Sequence: Synthetic peptide
MCQRASDQN

SEQ ID NO: 28893 - protein, 9 aa, Artificial Sequence
  Description of Artificial Sequence: Synthetic peptide
MDGQAWKEA

SEQ ID NO: 28894 - protein, 9 aa, Artificial Sequence
  Description of Artificial Sequence: Synthetic peptide
MGHKPVLSS

SEQ ID NO: 28895 - protein, 9 aa, Artificial Sequence
  Description of Artificial Sequence: Synthetic peptide
MIRADIRLI

SEQ ID NO: 28896 - protein, 9 aa, Artificial Sequence
  Description of Artificial Sequence: Synthetic peptide
MIRAVIRLI

SEQ ID NO: 28897 - protein, 9 aa, Artificial Sequence
  Description of Artificial Sequence: Synthetic peptide
MIREAIRLI

SEQ ID NO: 28898 - protein, 9 aa, Artificial Sequence
  Description of Artificial Sequence: Synthetic peptide
MIREDIRLI

SEQ ID NO: 28899 - protein, 9 aa, Artificial Sequence
  Description of Artificial Sequence: Synthetic peptide
MIREGIRLI

SEQ ID NO: 28900 - protein, 9 aa, Artificial Sequence
  Description of Artificial Sequence: Synthetic peptide
MIREVIRLI

SEQ ID NO: 28901 - protein, 9 aa, Artificial Sequence
  Description of Artificial Sequence: Synthetic peptide
MIREVMRLI

SEQ ID NO: 28902 - protein, 9 aa, Artificial Sequence
  Description of Artificial Sequence: Synthetic peptide
MIRGVIRLI

SEQ ID NO: 28903 - protein, 9 aa, Artificial Sequence
  Description of Artificial Sequence: Synthetic peptide
MIRVVIRLI

SEQ ID NO: 28904 - protein, 9 aa, Artificial Sequence
  Description of Artificial Sequence: Synthetic peptide
MLTGQNSSH

SEQ ID NO: 28905 - protein, 9 aa, Artificial Sequence
  Description of Artificial Sequence: Synthetic peptide
MLYICMMAT

SEQ ID NO: 28906 - protein, 9 aa, Artificial Sequence
  Description of Artificial Sequence: Synthetic peptide
MNMCFGQST

SEQ ID NO: 28907 - protein, 9 aa, Artificial Sequence
  Description of Artificial Sequence: Synthetic peptide
MSMQWAVLH

SEQ ID NO: 28908 - protein, 9 aa, Artificial Sequence
  Description of Artificial Sequence: Synthetic peptide
MTTVIYDSC

SEQ ID NO: 28909 - protein, 9 aa, Artificial Sequence
  Description of Artificial Sequence: Synthetic peptide
MVEMDHWAK

SEQ ID NO: 28910 - protein, 9 aa, Artificial Sequence
  Description of Artificial Sequence: Synthetic peptide
MVETDHWAK

SEQ ID NO: 28911 - protein, 9 aa, Artificial Sequence
  Description of Artificial Sequence: Synthetic peptide
MYQRASDQN

SEQ ID NO: 28912 - protein, 9 aa, Artificial Sequence
  Description of Artificial Sequence: Synthetic peptide
NATSIYDID

SEQ ID NO: 28913 - protein, 9 aa, Artificial Sequence
  Description of Artificial Sequence: Synthetic peptide
NATSIYDVD

SEQ ID NO: 28914 - protein, 9 aa, Artificial Sequence
  Description of Artificial Sequence: Synthetic peptide
NFEMQPRAD

SEQ ID NO: 28915 - protein, 9 aa, Artificial Sequence
  Description of Artificial Sequence: Synthetic peptide
NFMLVNGPL

SEQ ID NO: 28916 - protein, 9 aa, Artificial Sequence
  Description of Artificial Sequence: Synthetic peptide
NNEPYQKFN

SEQ ID NO: 28917 - protein, 9 aa, Artificial Sequence
  Description of Artificial Sequence: Synthetic peptide
NNEPYRKFN

SEQ ID NO: 28918 - protein, 9 aa, Artificial Sequence
  Description of Artificial Sequence: Synthetic peptide
NNFNDAAGL

SEQ ID NO: 28919 - protein, 9 aa, Artificial Sequence
  Description of Artificial Sequence: Synthetic peptide
NNFNDEAGL

SEQ ID NO: 28920 - protein, 9 aa, Artificial Sequence
  Description of Artificial Sequence: Synthetic peptide
NPDYRNEMP

SEQ ID NO: 28921 - protein, 9 aa, Artificial Sequence
  Description of Artificial Sequence: Synthetic peptide
NTRPFEKDI

SEQ ID NO: 28922 - protein, 9 aa, Artificial Sequence
  Description of Artificial Sequence: Synthetic peptide
PERRIGQWY

SEQ ID NO: 28923 - protein, 9 aa, Artificial Sequence
  Description of Artificial Sequence: Synthetic peptide
PGICKANWT

SEQ ID NO: 28924 - protein, 9 aa, Artificial Sequence
  Description of Artificial Sequence: Synthetic peptide
PGIRKANWT

SEQ ID NO: 28925 - protein, 9 aa, Artificial Sequence
  Description of Artificial Sequence: Synthetic peptide
PMFPDSMSS

SEQ ID NO: 28926 - protein, 9 aa, Artificial Sequence
  Description of Artificial Sequence: Synthetic peptide
PMSPDSMSS

SEQ ID NO: 28927 - protein, 9 aa, Artificial Sequence
  Description of Artificial Sequence: Synthetic peptide
QCSYCQQVY

SEQ ID NO: 28928 - protein, 9 aa, Artificial Sequence
  Description of Artificial Sequence: Synthetic peptide
QHVPVGPPA

SEQ ID NO: 28929 - protein, 9 aa, Artificial Sequence
  Description of Artificial Sequence: Synthetic peptide
QHVQVGPPA

SEQ ID NO: 28930 - protein, 9 aa, Artificial Sequence
  Description of Artificial Sequence: Synthetic peptide
QIMWFPPEE

SEQ ID NO: 28931 - protein, 9 aa, Artificial Sequence
  Description of Artificial Sequence: Synthetic peptide
QLCSPPMLD

SEQ ID NO: 28932 - protein, 9 aa, Artificial Sequence
  Description of Artificial Sequence: Synthetic peptide
QLCYPPMLD

SEQ ID NO: 28933 - protein, 9 aa, Artificial Sequence
  Description of Artificial Sequence: Synthetic peptide
QLERTGVHP

SEQ ID NO: 28934 - protein, 9 aa, Artificial Sequence
  Description of Artificial Sequence: Synthetic peptide
QLHYYNVGH

SEQ ID NO: 28935 - protein, 9 aa, Artificial Sequence
  Description of Artificial Sequence: Synthetic peptide
QMFQGLWSH

SEQ ID NO: 28936 - protein, 9 aa, Artificial Sequence
  Description of Artificial Sequence: Synthetic peptide
QPERTGVHP

SEQ ID NO: 28937 - protein, 9 aa, Artificial Sequence
  Description of Artificial Sequence: Synthetic peptide
QQERFPHSW

SEQ ID NO: 28938 - protein, 9 aa, Artificial Sequence
  Description of Artificial Sequence: Synthetic peptide
QRVQVGPPA

SEQ ID NO: 28939 - protein, 9 aa, Artificial Sequence
  Description of Artificial Sequence: Synthetic peptide
QSDTQCRFF

SEQ ID NO: 28940 - protein, 9 aa, Artificial Sequence
  Description of Artificial Sequence: Synthetic peptide
RHVQVGPPA

SEQ ID NO: 28941 - protein, 9 aa, Artificial Sequence
  Description of Artificial Sequence: Synthetic peptide
RIHYELYIC

SEQ ID NO: 28942 - protein, 9 aa, Artificial Sequence
  Description of Artificial Sequence: Synthetic peptide
RPEAVICWN

SEQ ID NO: 28943 - protein, 9 aa, Artificial Sequence
  Description of Artificial Sequence: Synthetic peptide
RPEDVICWN

SEQ ID NO: 28944 - protein, 9 aa, Artificial Sequence
  Description of Artificial Sequence: Synthetic peptide
SAAAVPSWH

SEQ ID NO: 28945 - protein, 9 aa, Artificial Sequence
  Description of Artificial Sequence: Synthetic peptide
SAADVPSWH

SEQ ID NO: 28946 - protein, 9 aa, Artificial Sequence
  Description of Artificial Sequence: Synthetic peptide
SAAVKSEPP

SEQ ID NO: 28947 - protein, 9 aa, Artificial Sequence
  Description of Artificial Sequence: Synthetic peptide
SADVKSEPP

SEQ ID NO: 28948 - protein, 9 aa, Artificial Sequence
  Description of Artificial Sequence: Synthetic peptide
SAHMYHAGY

SEQ ID NO: 28949 - protein, 9 aa, Artificial Sequence
  Description of Artificial Sequence: Synthetic peptide
SATQNWNEH

SEQ ID NO: 28950 - protein, 9 aa, Artificial Sequence
  Description of Artificial Sequence: Synthetic peptide
SATVKSEPP

SEQ ID NO: 28951 - protein, 9 aa, Artificial Sequence
  Description of Artificial Sequence: Synthetic peptide
SDTWAMYHH

SEQ ID NO: 28952 - protein, 9 aa, Artificial Sequence
  Description of Artificial Sequence: Synthetic peptide
SGTWAMYHH

SEQ ID NO: 28953 - protein, 9 aa, Artificial Sequence
  Description of Artificial Sequence: Synthetic peptide
SHATFMMGN

SEQ ID NO: 28954 - protein, 9 aa, Artificial Sequence
  Description of Artificial Sequence: Synthetic peptide
SKSHVDQDK

SEQ ID NO: 28955 - protein, 9 aa, Artificial Sequence
  Description of Artificial Sequence: Synthetic peptide
SRDWPASMN

SEQ ID NO: 28956 - protein, 9 aa, Artificial Sequence
  Description of Artificial Sequence: Synthetic peptide
SRDWPESMN

SEQ ID NO: 28957 - protein, 9 aa, Artificial Sequence
  Description of Artificial Sequence: Synthetic peptide
SRDWSESMN

SEQ ID NO: 28958 - protein, 9 aa, Artificial Sequence
  Description of Artificial Sequence: Synthetic peptide
SSPNTQRSD

SEQ ID NO: 28959 - protein, 9 aa, Artificial Sequence
  Description of Artificial Sequence: Synthetic peptide
STHIYWICP

SEQ ID NO: 28960 - protein, 9 aa, Artificial Sequence
  Description of Artificial Sequence: Synthetic peptide
STHIYWICS

SEQ ID NO: 28961 - protein, 9 aa, Artificial Sequence
  Description of Artificial Sequence: Synthetic peptide
STHVYWICP

SEQ ID NO: 28962 - protein, 9 aa, Artificial Sequence
  Description of Artificial Sequence: Synthetic peptide
STVPQMRWT

SEQ ID NO: 28963 - protein, 9 aa, Artificial Sequence
  Description of Artificial Sequence: Synthetic peptide
SVSPHTPMH

SEQ ID NO: 28964 - protein, 9 aa, Artificial Sequence
  Description of Artificial Sequence: Synthetic peptide
SVSQHTPMH

SEQ ID NO: 28965 - protein, 9 aa, Artificial Sequence
  Description of Artificial Sequence: Synthetic peptide
SYCPVVQWD

SEQ ID NO: 28966 - protein, 9 aa, Artificial Sequence
  Description of Artificial Sequence: Synthetic peptide
SYCQVVQWD

SEQ ID NO: 28967 - protein, 9 aa, Artificial Sequence
  Description of Artificial Sequence: Synthetic peptide
TDPLVMMEH

SEQ ID NO: 28968 - protein, 9 aa, Artificial Sequence
  Description of Artificial Sequence: Synthetic peptide
TECLCVYNF

SEQ ID NO: 28969 - protein, 9 aa, Artificial Sequence
  Description of Artificial Sequence: Synthetic peptide
TLSSGARDM

SEQ ID NO: 28970 - protein, 9 aa, Artificial Sequence
  Description of Artificial Sequence: Synthetic peptide
TMMFEQNSK

SEQ ID NO: 28971 - protein, 9 aa, Artificial Sequence
  Description of Artificial Sequence: Synthetic peptide
TTDQPANLC

SEQ ID NO: 28972 - protein, 9 aa, Artificial Sequence
  Description of Artificial Sequence: Synthetic peptide
TVETDHWAK

SEQ ID NO: 28973 - protein, 9 aa, Artificial Sequence
  Description of Artificial Sequence: Synthetic peptide
VAEHRKQEH

SEQ ID NO: 28974 - protein, 9 aa, Artificial Sequence
  Description of Artificial Sequence: Synthetic peptide
VAEHRQQEH

SEQ ID NO: 28975 - protein, 9 aa, Artificial Sequence
  Description of Artificial Sequence: Synthetic peptide
VDGQAWKEA

SEQ ID NO: 28976 - protein, 9 aa, Artificial Sequence
  Description of Artificial Sequence: Synthetic peptide
VKEQTYAAN

SEQ ID NO: 28977 - protein, 9 aa, Artificial Sequence
  Description of Artificial Sequence: Synthetic peptide
VLAGLECQY

SEQ ID NO: 28978 - protein, 9 aa, Artificial Sequence
  Description of Artificial Sequence: Synthetic peptide
VNEEMMAAD

SEQ ID NO: 28979 - protein, 9 aa, Artificial Sequence
  Description of Artificial Sequence: Synthetic peptide
VTDRNAWVG

SEQ ID NO: 28980 - protein, 9 aa, Artificial Sequence
  Description of Artificial Sequence: Synthetic peptide
VTEHRKQEH

SEQ ID NO: 28981 - protein, 9 aa, Artificial Sequence
  Description of Artificial Sequence: Synthetic peptide
VTGTQLNQD

SEQ ID NO: 28982 - protein, 9 aa, Artificial Sequence
  Description of Artificial Sequence: Synthetic peptide
VTNRWKRKS

SEQ ID NO: 28983 - protein, 9 aa, Artificial Sequence
  Description of Artificial Sequence: Synthetic peptide
VTNRWKRMS

SEQ ID NO: 28984 - protein, 9 aa, Artificial Sequence
  Description of Artificial Sequence: Synthetic peptide
VVECASHSG

SEQ ID NO: 28985 - protein, 9 aa, Artificial Sequence
  Description of Artificial Sequence: Synthetic peptide
VVNQFEHWM

SEQ ID NO: 28986 - protein, 9 aa, Artificial Sequence
  Description of Artificial Sequence: Synthetic peptide
WIHSELYIC

SEQ ID NO: 28987 - protein, 9 aa, Artificial Sequence
  Description of Artificial Sequence: Synthetic peptide
WIHYELYIC

SEQ ID NO: 28988 - protein, 9 aa, Artificial Sequence
  Description of Artificial Sequence: Synthetic peptide
WSFSERPGS

SEQ ID NO: 28989 - protein, 9 aa, Artificial Sequence
  Description of Artificial Sequence: Synthetic peptide
WTGYSWSVA

SEQ ID NO: 28990 - protein, 9 aa, Artificial Sequence
  Description of Artificial Sequence: Synthetic peptide
YAVMSHPAG

SEQ ID NO: 28991 - protein, 9 aa, Artificial Sequence
  Description of Artificial Sequence: Synthetic peptide
QAEIVCNSK

SEQ ID NO: 28992 - protein, 9 aa, Artificial Sequence
  Description of Artificial Sequence: Synthetic peptide
QANGSMDHH

SEQ ID NO: 28993 - protein, 9 aa, Artificial Sequence
  Description of Artificial Sequence: Synthetic peptide
QANWWVDAG

SEQ ID NO: 28994 - protein, 9 aa, Artificial Sequence
  Description of Artificial Sequence: Synthetic peptide
QARTMDERP

SEQ ID NO: 28995 - protein, 9 aa, Artificial Sequence
  Description of Artificial Sequence: Synthetic peptide
QAWEGCAGE

SEQ ID NO: 28996 - protein, 9 aa, Artificial Sequence
  Description of Artificial Sequence: Synthetic peptide
QCAFIPNSA

SEQ ID NO: 28997 - protein, 9 aa, Artificial Sequence
  Description of Artificial Sequence: Synthetic peptide
QCGNVMLMP

SEQ ID NO: 28998 - protein, 9 aa, Artificial Sequence
  Description of Artificial Sequence: Synthetic peptide
QCHFLRTCK

SEQ ID NO: 28999 - protein, 9 aa, Artificial Sequence
  Description of Artificial Sequence: Synthetic peptide
QCMCVEIAA

SEQ ID NO: 29000 - protein, 9 aa, Artificial Sequence
  Description of Artificial Sequence: Synthetic peptide
QCNAQAELF

SEQ ID NO: 29001 - protein, 9 aa, Artificial Sequence
  Description of Artificial Sequence: Synthetic peptide
QCQLTVSMS

SEQ ID NO: 29002 - protein, 9 aa, Artificial Sequence
  Description of Artificial Sequence: Synthetic peptide
QCQWQKMEH

SEQ ID NO: 29003 - protein, 9 aa, Artificial Sequence
  Description of Artificial Sequence: Synthetic peptide
QECYEKMEC

SEQ ID NO: 29004 - protein, 9 aa, Artificial Sequence
  Description of Artificial Sequence: Synthetic peptide
QEHCMNYGP

SEQ ID NO: 29005 - protein, 9 aa, Artificial Sequence
  Description of Artificial Sequence: Synthetic peptide
QEMFIQARG

SEQ ID NO: 29006 - protein, 9 aa, Artificial Sequence
  Description of Artificial Sequence: Synthetic peptide
QENLTNGDN

SEQ ID NO: 29007 - protein, 9 aa, Artificial Sequence
  Description of Artificial Sequence: Synthetic peptide
QFIMLGETN

SEQ ID NO: 29008 - protein, 9 aa, Artificial Sequence
  Description of Artificial Sequence: Synthetic peptide
QHVQIMAGQ

SEQ ID NO: 29009 - protein, 9 aa, Artificial Sequence
  Description of Artificial Sequence: Synthetic peptide
QIEGVNHAN

SEQ ID NO: 29010 - protein, 9 aa, Artificial Sequence
  Description of Artificial Sequence: Synthetic peptide
QIERYWHAT

SEQ ID NO: 29011 - protein, 9 aa, Artificial Sequence
  Description of Artificial Sequence: Synthetic peptide
QIHGVTIWQ

SEQ ID NO: 29012 - protein, 9 aa, Artificial Sequence
  Description of Artificial Sequence: Synthetic peptide
QIHIWDGQS

SEQ ID NO: 29013 - protein, 9 aa, Artificial Sequence
  Description of Artificial Sequence: Synthetic peptide
QIHLRECSF

SEQ ID NO: 29014 - protein, 9 aa, Artificial Sequence
  Description of Artificial Sequence: Synthetic peptide
QIRAMLDSS

SEQ ID NO: 29015 - protein, 9 aa, Artificial Sequence
  Description of Artificial Sequence: Synthetic peptide
QISIADCYN

SEQ ID NO: 29016 - protein, 9 aa, Artificial Sequence
  Description of Artificial Sequence: Synthetic peptide
QIWNEVHAQ

SEQ ID NO: 29017 - protein, 9 aa, Artificial Sequence
  Description of Artificial Sequence: Synthetic peptide
QKNEYWTAF

SEQ ID NO: 29018 - protein, 9 aa, Artificial Sequence
  Description of Artificial Sequence: Synthetic peptide
QKNLVPSYW

SEQ ID NO: 29019 - protein, 9 aa, Artificial Sequence
  Description of Artificial Sequence: Synthetic peptide
QKSFPGDGI

SEQ ID NO: 29020 - protein, 9 aa, Artificial Sequence
  Description of Artificial Sequence: Synthetic peptide
QLMVYMYES

SEQ ID NO: 29021 - protein, 9 aa, Artificial Sequence
  Description of Artificial Sequence: Synthetic peptide
QMEYTWMGG

SEQ ID NO: 29022 - protein, 9 aa, Artificial Sequence
  Description of Artificial Sequence: Synthetic peptide
QMFQDHNQP

SEQ ID NO: 29023 - protein, 9 aa, Artificial Sequence
  Description of Artificial Sequence: Synthetic peptide
QMHHWDVWG

SEQ ID NO: 29024 - protein, 9 aa, Artificial Sequence
  Description of Artificial Sequence: Synthetic peptide
QMQPTCGQF

SEQ ID NO: 29025 - protein, 9 aa, Artificial Sequence
  Description of Artificial Sequence: Synthetic peptide
QNENVVWMS

SEQ ID NO: 29026 - protein, 9 aa, Artificial Sequence
  Description of Artificial Sequence: Synthetic peptide
QPMHQQVTF

SEQ ID NO: 29027 - protein, 9 aa, Artificial Sequence
  Description of Artificial Sequence: Synthetic peptide
QPMSFNWKN

SEQ ID NO: 29028 - protein, 9 aa, Artificial Sequence
  Description of Artificial Sequence: Synthetic peptide
QPNYVEHCG

SEQ ID NO: 29029 - protein, 9 aa, Artificial Sequence
  Description of Artificial Sequence: Synthetic peptide
QPTMHMPRG

SEQ ID NO: 29030 - protein, 9 aa, Artificial Sequence
  Description of Artificial Sequence: Synthetic peptide
QPVVTWQSH

SEQ ID NO: 29031 - protein, 9 aa, Artificial Sequence
  Description of Artificial Sequence: Synthetic peptide
QQITTEHSG

SEQ ID NO: 29032 - protein, 9 aa, Artificial Sequence
  Description of Artificial Sequence: Synthetic peptide
QQLCQLDRK

SEQ ID NO: 29033 - protein, 9 aa, Artificial Sequence
  Description of Artificial Sequence: Synthetic peptide
QQYLCMSSD

SEQ ID NO: 29034 - protein, 9 aa, Artificial Sequence
  Description of Artificial Sequence: Synthetic peptide
QSCATTSAQ

SEQ ID NO: 29035 - protein, 9 aa, Artificial Sequence
  Description of Artificial Sequence: Synthetic peptide
QSFQAPRLA

SEQ ID NO: 29036 - protein, 9 aa, Artificial Sequence
  Description of Artificial Sequence: Synthetic peptide
QSHRVMDIP

SEQ ID NO: 29037 - protein, 9 aa, Artificial Sequence
  Description of Artificial Sequence: Synthetic peptide
QSHYCHTFS

SEQ ID NO: 29038 - protein, 9 aa, Artificial Sequence
  Description of Artificial Sequence: Synthetic peptide
QSMSYQKEG

SEQ ID NO: 29039 - protein, 9 aa, Artificial Sequence
  Description of Artificial Sequence: Synthetic peptide
QSNLKSMYC

SEQ ID NO: 29040 - protein, 9 aa, Artificial Sequence
  Description of Artificial Sequence: Synthetic peptide
QSSSMACDN

SEQ ID NO: 29041 - protein, 9 aa, Artificial Sequence
  Description of Artificial Sequence: Synthetic peptide
QSSWAWMAE

SEQ ID NO: 29042 - protein, 9 aa, Artificial Sequence
  Description of Artificial Sequence: Synthetic peptide
QTGNWWQYG

SEQ ID NO: 29043 - protein, 9 aa, Artificial Sequence
  Description of Artificial Sequence: Synthetic peptide
QTIFWLNVG

SEQ ID NO: 29044 - protein, 9 aa, Artificial Sequence
  Description of Artificial Sequence: Synthetic peptide
QTISGFQDK

SEQ ID NO: 29045 - protein, 9 aa, Artificial Sequence
  Description of Artificial Sequence: Synthetic peptide
QTLHLHTNM

SEQ ID NO: 29046 - protein, 9 aa, Artificial Sequence
  Description of Artificial Sequence: Synthetic peptide
QTMRLEPYH

SEQ ID NO: 29047 - protein, 9 aa, Artificial Sequence
  Description of Artificial Sequence: Synthetic peptide
QTNLLVDTS

SEQ ID NO: 29048 - protein, 9 aa, Artificial Sequence
  Description of Artificial Sequence: Synthetic peptide
QTTAILKLD

SEQ ID NO: 29049 - protein, 9 aa, Artificial Sequence
  Description of Artificial Sequence: Synthetic peptide
QTTLKMKED

SEQ ID NO: 29050 - protein, 9 aa, Artificial Sequence
  Description of Artificial Sequence: Synthetic peptide
QVETPWSGA

SEQ ID NO: 29051 - protein, 9 aa, Artificial Sequence
  Description of Artificial Sequence: Synthetic peptide
QVQNVWCPK

SEQ ID NO: 29052 - protein, 9 aa, Artificial Sequence
  Description of Artificial Sequence: Synthetic peptide
QVVTMPDPL

SEQ ID NO: 29053 - protein, 9 aa, Artificial Sequence
  Description of Artificial Sequence: Synthetic peptide
QVWDMNDNA

SEQ ID NO: 29054 - protein, 9 aa, Artificial Sequence
  Description of Artificial Sequence: Synthetic peptide
QWFRQANYK

SEQ ID NO: 29055 - protein, 9 aa, Artificial Sequence
  Description of Artificial Sequence: Synthetic peptide
QWLLLCHGN

SEQ ID NO: 29056 - protein, 9 aa, Artificial Sequence
  Description of Artificial Sequence: Synthetic peptide
QYERLHTNM

SEQ ID NO: 29057 - protein, 9 aa, Artificial Sequence
  Description of Artificial Sequence: Synthetic peptide
QYIPFERYW

SEQ ID NO: 29058 - protein, 9 aa, Artificial Sequence
  Description of Artificial Sequence: Synthetic peptide
QYMTQAKKD

SEQ ID NO: 29059 - protein, 9 aa, Artificial Sequence
  Description of Artificial Sequence: Synthetic peptide
QPSRFNTAD

SEQ ID NO: 29060 - protein, 9 aa, Artificial Sequence
  Description of Artificial Sequence: Synthetic peptide
QKTANGWCH

SEQ ID NO: 29061 - protein, 9 aa, Artificial Sequence
  Description of Artificial Sequence: Synthetic peptide
QMCVWMTRQ

SEQ ID NO: 29062 - protein, 9 aa, Artificial Sequence
  Description of Artificial Sequence: Synthetic peptide
QAKMILDGT

SEQ ID NO: 29063 - protein, 9 aa, Artificial Sequence
  Description of Artificial Sequence: Synthetic peptide
QTAEWYCGA

SEQ ID NO: 29064 - protein, 9 aa, Artificial Sequence
  Description of Artificial Sequence: Synthetic peptide
QTNGHPYFP

SEQ ID NO: 29065 - protein, 9 aa, Artificial Sequence
  Description of Artificial Sequence: Synthetic peptide
QFAQLWCAK

SEQ ID NO: 29066 - protein, 9 aa, Artificial Sequence
  Description of Artificial Sequence: Synthetic peptide
QCTAHNTCM

SEQ ID NO: 29067 - protein, 9 aa, Artificial Sequence
  Description of Artificial Sequence: Synthetic peptide
QAADSASAS

SEQ ID NO: 29068 - protein, 9 aa, Artificial Sequence
  Description of Artificial Sequence: Synthetic peptide
QADRDGCYA

SEQ ID NO: 29069 - protein, 9 aa, Artificial Sequence
  Description of Artificial Sequence: Synthetic peptide
QAGWINTLN

SEQ ID NO: 29070 - protein, 9 aa, Artificial Sequence
  Description of Artificial Sequence: Synthetic peptide
QATFHATQK

SEQ ID NO: 29071 - protein, 9 aa, Artificial Sequence
  Description of Artificial Sequence: Synthetic peptide
QCADKNVLE

SEQ ID NO: 29072 - protein, 9 aa, Artificial Sequence
  Description of Artificial Sequence: Synthetic peptide
QCFNTCPCD

SEQ ID NO: 29073 - protein, 9 aa, Artificial Sequence
  Description of Artificial Sequence: Synthetic peptide
QCKTVIMGA

SEQ ID NO: 29074 - protein, 9 aa, Artificial Sequence
  Description of Artificial Sequence: Synthetic peptide
QDFQFDEVW

SEQ ID NO: 29075 - protein, 9 aa, Artificial Sequence
  Description of Artificial Sequence: Synthetic peptide
QDTMMTYMS

SEQ ID NO: 29076 - protein, 9 aa, Artificial Sequence
  Description of Artificial Sequence: Synthetic peptide
QDWFNLAHW

SEQ ID NO: 29077 - protein, 9 aa, Artificial Sequence
  Description of Artificial Sequence: Synthetic peptide
QEEHQKFGM

SEQ ID NO: 29078 - protein, 9 aa, Artificial Sequence
  Description of Artificial Sequence: Synthetic peptide
QEENENMGC

SEQ ID NO: 29079 - protein, 9 aa, Artificial Sequence
  Description of Artificial Sequence: Synthetic peptide
QETQAAMRQ

SEQ ID NO: 29080 - protein, 9 aa, Artificial Sequence
  Description of Artificial Sequence: Synthetic peptide
QEVTTTDPQ

SEQ ID NO: 29081 - protein, 9 aa, Artificial Sequence
  Description of Artificial Sequence: Synthetic peptide
QFMVKNSNH

SEQ ID NO: 29082 - protein, 9 aa, Artificial Sequence
  Description of Artificial Sequence: Synthetic peptide
QFNLTDYFH

SEQ ID NO: 29083 - protein, 9 aa, Artificial Sequence
  Description of Artificial Sequence: Synthetic peptide
QFRGLEHMV

SEQ ID NO: 29084 - protein, 9 aa, Artificial Sequence
  Description of Artificial Sequence: Synthetic peptide
QFVSTHHEA

SEQ ID NO: 29085 - protein, 9 aa, Artificial Sequence
  Description of Artificial Sequence: Synthetic peptide
QGNTCHKDA

SEQ ID NO: 29086 - protein, 9 aa, Artificial Sequence
  Description of Artificial Sequence: Synthetic peptide
QGRIYDQAT

SEQ ID NO: 29087 - protein, 9 aa, Artificial Sequence
  Description of Artificial Sequence: Synthetic peptide
QGSWNFCPP

SEQ ID NO: 29088 - protein, 9 aa, Artificial Sequence
  Description of Artificial Sequence: Synthetic peptide
QHAPLHNFI

SEQ ID NO: 29089 - protein, 9 aa, Artificial Sequence
  Description of Artificial Sequence: Synthetic peptide
QHCPIVEQD

SEQ ID NO: 29090 - protein, 9 aa, Artificial Sequence
  Description of Artificial Sequence: Synthetic peptide
QHREIVKLQ

SEQ ID NO: 29091 - protein, 9 aa, Artificial Sequence
  Description of Artificial Sequence: Synthetic peptide
QHSTDSGDK

SEQ ID NO: 29092 - protein, 9 aa, Artificial Sequence
  Description of Artificial Sequence: Synthetic peptide
QHVELQVMK

SEQ ID NO: 29093 - protein, 9 aa, Artificial Sequence
  Description of Artificial Sequence: Synthetic peptide
QIACLQKQG

SEQ ID NO: 29094 - protein, 9 aa, Artificial Sequence
  Description of Artificial Sequence: Synthetic peptide
QIHDQLKGN

SEQ ID NO: 29095 - protein, 9 aa, Artificial Sequence
  Description of Artificial Sequence: Synthetic peptide
QIQEVQSSV

SEQ ID NO: 29096 - protein, 9 aa, Artificial Sequence
  Description of Artificial Sequence: Synthetic peptide
QISIGCNSQ

SEQ ID NO: 29097 - protein, 9 aa, Artificial Sequence
  Description of Artificial Sequence: Synthetic peptide
QISSSRDMY

SEQ ID NO: 29098 - protein, 9 aa, Artificial Sequence
  Description of Artificial Sequence: Synthetic peptide
QITDWENFH

SEQ ID NO: 29099 - protein, 9 aa, Artificial Sequence
  Description of Artificial Sequence: Synthetic peptide
QKDPLHVHS

SEQ ID NO: 29100 - protein, 9 aa, Artificial Sequence
  Description of Artificial Sequence: Synthetic peptide
QKDQVWHAW

SEQ ID NO: 29101 - protein, 9 aa, Artificial Sequence
  Description of Artificial Sequence: Synthetic peptide
QKEEQPKMG

SEQ ID NO: 29102 - protein, 9 aa, Artificial Sequence
  Description of Artificial Sequence: Synthetic peptide
QKPELEQGP

SEQ ID NO: 29103 - protein, 9 aa, Artificial Sequence
  Description of Artificial Sequence: Synthetic peptide
QLCNPLAPM

SEQ ID NO: 29104 - protein, 9 aa, Artificial Sequence
  Description of Artificial Sequence: Synthetic peptide
QLPGIKMWD

SEQ ID NO: 29105 - protein, 9 aa, Artificial Sequence
  Description of Artificial Sequence: Synthetic peptide
QMFGFQPGN

SEQ ID NO: 29106 - protein, 9 aa, Artificial Sequence
  Description of Artificial Sequence: Synthetic peptide
QMHPMIRFF

SEQ ID NO: 29107 - protein, 9 aa, Artificial Sequence
  Description of Artificial Sequence: Synthetic peptide
QMHSMTNCN

SEQ ID NO: 29108 - protein, 9 aa, Artificial Sequence
  Description of Artificial Sequence: Synthetic peptide
QMRIWRMMW

SEQ ID NO: 29109 - protein, 9 aa, Artificial Sequence
  Description of Artificial Sequence: Synthetic peptide
QMVPATPCN

SEQ ID NO: 29110 - protein, 9 aa, Artificial Sequence
  Description of Artificial Sequence: Synthetic peptide
QNAFMDLLA

SEQ ID NO: 29111 - protein, 9 aa, Artificial Sequence
  Description of Artificial Sequence: Synthetic peptide
QNCFRYECP

SEQ ID NO: 29112 - protein, 9 aa, Artificial Sequence
  Description of Artificial Sequence: Synthetic peptide
QNETRQHCW

SEQ ID NO: 29113 - protein, 9 aa, Artificial Sequence
  Description of Artificial Sequence: Synthetic peptide
QNMPVMQYR

SEQ ID NO: 29114 - protein, 9 aa, Artificial Sequence
  Description of Artificial Sequence: Synthetic peptide
QNRPTECIG

SEQ ID NO: 29115 - protein, 9 aa, Artificial Sequence
  Description of Artificial Sequence: Synthetic peptide
QNVKEYSAS

SEQ ID NO: 29116 - protein, 9 aa, Artificial Sequence
  Description of Artificial Sequence: Synthetic peptide
QPADPNDGG

SEQ ID NO: 29117 - protein, 9 aa, Artificial Sequence
  Description of Artificial Sequence: Synthetic peptide
QPAPGHRGQ

SEQ ID NO: 29118 - protein, 9 aa, Artificial Sequence
  Description of Artificial Sequence: Synthetic peptide
QPILPNIWE

SEQ ID NO: 29119 - protein, 9 aa, Artificial Sequence
  Description of Artificial Sequence: Synthetic peptide
QPQVTYDVR

SEQ ID NO: 29120 - protein, 9 aa, Artificial Sequence
  Description of Artificial Sequence: Synthetic peptide
QQLFWDIGV

SEQ ID NO: 29121 - protein, 9 aa, Artificial Sequence
  Description of Artificial Sequence: Synthetic peptide
QQPLMRTEE

SEQ ID NO: 29122 - protein, 9 aa, Artificial Sequence
  Description of Artificial Sequence: Synthetic peptide
QQSTKMKWH

SEQ ID NO: 29123 - protein, 9 aa, Artificial Sequence
  Description of Artificial Sequence: Synthetic peptide
QSDKKNRCA

SEQ ID NO: 29124 - protein, 9 aa, Artificial Sequence
  Description of Artificial Sequence: Synthetic peptide
QSDQLSRIQ

SEQ ID NO: 29125 - protein, 9 aa, Artificial Sequence
  Description of Artificial Sequence: Synthetic peptide
QSELGHELP

SEQ ID NO: 29126 - protein, 9 aa, Artificial Sequence
  Description of Artificial Sequence: Synthetic peptide
QSLWQQLSM

SEQ ID NO: 29127 - protein, 9 aa, Artificial Sequence
  Description of Artificial Sequence: Synthetic peptide
QSQPEWNEK

SEQ ID NO: 29128 - protein, 9 aa, Artificial Sequence
  Description of Artificial Sequence: Synthetic peptide
QSSTDQEAW

SEQ ID NO: 29129 - protein, 9 aa, Artificial Sequence
  Description of Artificial Sequence: Synthetic peptide
QSTENNWYS

SEQ ID NO: 29130 - protein, 9 aa, Artificial Sequence
  Description of Artificial Sequence: Synthetic peptide
QSVQPCDDP

SEQ ID NO: 29131 - protein, 9 aa, Artificial Sequence
  Description of Artificial Sequence: Synthetic peptide
QSVSQLTCC

SEQ ID NO: 29132 - protein, 9 aa, Artificial Sequence
  Description of Artificial Sequence: Synthetic peptide
QTAATMTED

SEQ ID NO: 29133 - protein, 9 aa, Artificial Sequence
  Description of Artificial Sequence: Synthetic peptide
QTAVKNIDN

SEQ ID NO: 29134 - protein, 9 aa, Artificial Sequence
  Description of Artificial Sequence: Synthetic peptide
QTCNAEVFT

SEQ ID NO: 29135 - protein, 9 aa, Artificial Sequence
  Description of Artificial Sequence: Synthetic peptide
QTCNCGKAF

SEQ ID NO: 29136 - protein, 9 aa, Artificial Sequence
  Description of Artificial Sequence: Synthetic peptide
QTGQYATLK

SEQ ID NO: 29137 - protein, 9 aa, Artificial Sequence
  Description of Artificial Sequence: Synthetic peptide
QTIPREAEC

SEQ ID NO: 29138 - protein, 9 aa, Artificial Sequence
  Description of Artificial Sequence: Synthetic peptide
QTNLPVVKN

SEQ ID NO: 29139 - protein, 9 aa, Artificial Sequence
  Description of Artificial Sequence: Synthetic peptide
QTQTWERQD

SEQ ID NO: 29140 - protein, 9 aa, Artificial Sequence
  Description of Artificial Sequence: Synthetic peptide
QTWCKRIHF

SEQ ID NO: 29141 - protein, 9 aa, Artificial Sequence
  Description of Artificial Sequence: Synthetic peptide
QTYMPHHAH

SEQ ID NO: 29142 - protein, 9 aa, Artificial Sequence
  Description of Artificial Sequence: Synthetic peptide
QVCSMFGNA

SEQ ID NO: 29143 - protein, 9 aa, Artificial Sequence
  Description of Artificial Sequence: Synthetic peptide
QVINVHGRW

SEQ ID NO: 29144 - protein, 9 aa, Artificial Sequence
  Description of Artificial Sequence: Synthetic peptide
QVIRHECQY

SEQ ID NO: 29145 - protein, 9 aa, Artificial Sequence
  Description of Artificial Sequence: Synthetic peptide
QVSNTATCL

SEQ ID NO: 29146 - protein, 9 aa, Artificial Sequence
  Description of Artificial Sequence: Synthetic peptide
QVTQVQALG

SEQ ID NO: 29147 - protein, 9 aa, Artificial Sequence
  Description of Artificial Sequence: Synthetic peptide
QVVEKHENR

SEQ ID NO: 29148 - protein, 9 aa, Artificial Sequence
  Description of Artificial Sequence: Synthetic peptide
QVYHYCRRH

SEQ ID NO: 29149 - protein, 9 aa, Artificial Sequence
  Description of Artificial Sequence: Synthetic peptide
QWHVGGTSA

SEQ ID NO: 29150 - protein, 9 aa, Artificial Sequence
  Description of Artificial Sequence: Synthetic peptide
QWKCDKQSN

SEQ ID NO: 29151 - protein, 9 aa, Artificial Sequence
  Description of Artificial Sequence: Synthetic peptide
QWRNPIYGP

SEQ ID NO: 29152 - protein, 9 aa, Artificial Sequence
  Description of Artificial Sequence: Synthetic peptide
QWTQGYASP

SEQ ID NO: 29153 - protein, 9 aa, Artificial Sequence
  Description of Artificial Sequence: Synthetic peptide
QYEWLNTCD

SEQ ID NO: 29154 - protein, 9 aa, Artificial Sequence
  Description of Artificial Sequence: Synthetic peptide
QYFRFGFDP

SEQ ID NO: 29155 - protein, 9 aa, Artificial Sequence
  Description of Artificial Sequence: Synthetic peptide
QYGNSLNAG

SEQ ID NO: 29156 - protein, 9 aa, Artificial Sequence
  Description of Artificial Sequence: Synthetic peptide
QYVPAGYFA

SEQ ID NO: 29157 - protein, 9 aa, Artificial Sequence
  Description of Artificial Sequence: Synthetic peptide
QADRIGQCL

SEQ ID NO: 29158 - protein, 9 aa, Artificial Sequence
  Description of Artificial Sequence: Synthetic peptide
QANAMAEFP

SEQ ID NO: 29159 - protein, 9 aa, Artificial Sequence
  Description of Artificial Sequence: Synthetic peptide
QCACTITMK

SEQ ID NO: 29160 - protein, 9 aa, Artificial Sequence
  Description of Artificial Sequence: Synthetic peptide
QCASTMSMT

SEQ ID NO: 29161 - protein, 9 aa, Artificial Sequence
  Description of Artificial Sequence: Synthetic peptide
QCELLNVLC

SEQ ID NO: 29162 - protein, 9 aa, Artificial Sequence
  Description of Artificial Sequence: Synthetic peptide
QCIEYEATE

SEQ ID NO: 29163 - protein, 9 aa, Artificial Sequence
  Description of Artificial Sequence: Synthetic peptide
QDGMEAKNR

SEQ ID NO: 29164 - protein, 9 aa, Artificial Sequence
  Description of Artificial Sequence: Synthetic peptide
QDIKKWCSE

SEQ ID NO: 29165 - protein, 9 aa, Artificial Sequence
  Description of Artificial Sequence: Synthetic peptide
QGFMEQQHT

SEQ ID NO: 29166 - protein, 9 aa, Artificial Sequence
  Description of Artificial Sequence: Synthetic peptide
QHQAEMEGF

SEQ ID NO: 29167 - protein, 9 aa, Artificial Sequence
  Description of Artificial Sequence: Synthetic peptide
QHTEMDCSN

SEQ ID NO: 29168 - protein, 9 aa, Artificial Sequence
  Description of Artificial Sequence: Synthetic peptide
QIGGFQYYY

SEQ ID NO: 29169 - protein, 9 aa, Artificial Sequence
  Description of Artificial Sequence: Synthetic peptide
QIKLQQWYD

SEQ ID NO: 29170 - protein, 9 aa, Artificial Sequence
  Description of Artificial Sequence: Synthetic peptide
QKDEYLNWH

SEQ ID NO: 29171 - protein, 9 aa, Artificial Sequence
  Description of Artificial Sequence: Synthetic peptide
QKDMHAYPL

SEQ ID NO: 29172 - protein, 9 aa, Artificial Sequence
  Description of Artificial Sequence: Synthetic peptide
QKPRWFCCP

SEQ ID NO: 29173 - protein, 9 aa, Artificial Sequence
  Description of Artificial Sequence: Synthetic peptide
QMSSGEWVR

SEQ ID NO: 29174 - protein, 9 aa, Artificial Sequence
  Description of Artificial Sequence: Synthetic peptide
QNELRESYE

SEQ ID NO: 29175 - protein, 9 aa, Artificial Sequence
  Description of Artificial Sequence: Synthetic peptide
QSKPMEHVQ

SEQ ID NO: 29176 - protein, 9 aa, Artificial Sequence
  Description of Artificial Sequence: Synthetic peptide
QTDWSMFLP

SEQ ID NO: 29177 - protein, 9 aa, Artificial Sequence
  Description of Artificial Sequence: Synthetic peptide
QTYFPWHWF

SEQ ID NO: 29178 - protein, 9 aa, Artificial Sequence
  Description of Artificial Sequence: Synthetic peptide
QVCSRWTKS

SEQ ID NO: 29179 - protein, 9 aa, Artificial Sequence
  Description of Artificial Sequence: Synthetic peptide
QWVEWPFPC

SEQ ID NO: 29180 - protein, 9 aa, Artificial Sequence
  Description of Artificial Sequence: Synthetic peptide
AVEKVMEVQ

SEQ ID NO: 29181 - protein, 9 aa, Artificial Sequence
  Description of Artificial Sequence: Synthetic peptide
AVKLNQTYK

SEQ ID NO: 29182 - protein, 9 aa, Artificial Sequence
  Description of Artificial Sequence: Synthetic peptide
AVNGNVYGR

SEQ ID NO: 29183 - protein, 9 aa, Artificial Sequence
  Description of Artificial Sequence: Synthetic peptide
CVEGMVFVP

SEQ ID NO: 29184 - protein, 9 aa, Artificial Sequence
  Description of Artificial Sequence: Synthetic peptide
CVGQYNNDM

SEQ ID NO: 29185 - protein, 9 aa, Artificial Sequence
  Description of Artificial Sequence: Synthetic peptide
CVLRQYDGG

SEQ ID NO: 29186 - protein, 9 aa, Artificial Sequence
  Description of Artificial Sequence: Synthetic peptide
CVNVRGRSS

SEQ ID NO: 29187 - protein, 9 aa, Artificial Sequence
  Description of Artificial Sequence: Synthetic peptide
CVRQKAETE

SEQ ID NO: 29188 - protein, 9 aa, Artificial Sequence
  Description of Artificial Sequence: Synthetic peptide
CVTAASPWN

SEQ ID NO: 29189 - protein, 9 aa, Artificial Sequence
  Description of Artificial Sequence: Synthetic peptide
DVAERHMHE

SEQ ID NO: 29190 - protein, 9 aa, Artificial Sequence
  Description of Artificial Sequence: Synthetic peptide
DVCMATIGQ

SEQ ID NO: 29191 - protein, 9 aa, Artificial Sequence
  Description of Artificial Sequence: Synthetic peptide
DVDPLPCEP

SEQ ID NO: 29192 - protein, 9 aa, Artificial Sequence
  Description of Artificial Sequence: Synthetic peptide
DVGYQMKKQ

SEQ ID NO: 29193 - protein, 9 aa, Artificial Sequence
  Description of Artificial Sequence: Synthetic peptide
DVICYSDHR

SEQ ID NO: 29194 - protein, 9 aa, Artificial Sequence
  Description of Artificial Sequence: Synthetic peptide
DVISMSLMG

SEQ ID NO: 29195 - protein, 9 aa, Artificial Sequence
  Description of Artificial Sequence: Synthetic peptide
DVLIDHDFF

SEQ ID NO: 29196 - protein, 9 aa, Artificial Sequence
  Description of Artificial Sequence: Synthetic peptide
DVMHFLDLA

SEQ ID NO: 29197 - protein, 9 aa, Artificial Sequence
  Description of Artificial Sequence: Synthetic peptide
DVQNMDIGV

SEQ ID NO: 29198 - protein, 9 aa, Artificial Sequence
  Description of Artificial Sequence: Synthetic peptide
DVRDDEFGN

SEQ ID NO: 29199 - protein, 9 aa, Artificial Sequence
  Description of Artificial Sequence: Synthetic peptide
EVCGMECSG

SEQ ID NO: 29200 - protein, 9 aa, Artificial Sequence
  Description of Artificial Sequence: Synthetic peptide
EVDDKPSGH

SEQ ID NO: 29201 - protein, 9 aa, Artificial Sequence
  Description of Artificial Sequence: Synthetic peptide
EVEYEAKTV

SEQ ID NO: 29202 - protein, 9 aa, Artificial Sequence
  Description of Artificial Sequence: Synthetic peptide
EVFVADNNI

SEQ ID NO: 29203 - protein, 9 aa, Artificial Sequence
  Description of Artificial Sequence: Synthetic peptide
EVGAWGASY

SEQ ID NO: 29204 - protein, 9 aa, Artificial Sequence
  Description of Artificial Sequence: Synthetic peptide
EVKAANWQV

SEQ ID NO: 29205 - protein, 9 aa, Artificial Sequence
  Description of Artificial Sequence: Synthetic peptide
EVQHHYVSG

SEQ ID NO: 29206 - protein, 9 aa, Artificial Sequence
  Description of Artificial Sequence: Synthetic peptide
EVRMCNATH

SEQ ID NO: 29207 - protein, 9 aa, Artificial Sequence
  Description of Artificial Sequence: Synthetic peptide
EVVKKPWDG

SEQ ID NO: 29208 - protein, 9 aa, Artificial Sequence
  Description of Artificial Sequence: Synthetic peptide
FVFTHIDDY

SEQ ID NO: 29209 - protein, 9 aa, Artificial Sequence
  Description of Artificial Sequence: Synthetic peptide
GVEPISRAA

SEQ ID NO: 29210 - protein, 9 aa, Artificial Sequence
  Description of Artificial Sequence: Synthetic peptide
GVGQKCGHQ

SEQ ID NO: 29211 - protein, 9 aa, Artificial Sequence
  Description of Artificial Sequence: Synthetic peptide
GVLAQQAQW

SEQ ID NO: 29212 - protein, 9 aa, Artificial Sequence
  Description of Artificial Sequence: Synthetic peptide
GVLLPHHWM

SEQ ID NO: 29213 - protein, 9 aa, Artificial Sequence
  Description of Artificial Sequence: Synthetic peptide
HVNQWGRYG

SEQ ID NO: 29214 - protein, 9 aa, Artificial Sequence
  Description of Artificial Sequence: Synthetic peptide
HVQSIIHAE

SEQ ID NO: 29215 - protein, 9 aa, Artificial Sequence
  Description of Artificial Sequence: Synthetic peptide
IVDWSNVLH

SEQ ID NO: 29216 - protein, 9 aa, Artificial Sequence
  Description of Artificial Sequence: Synthetic peptide
IVGMANQEH

SEQ ID NO: 29217 - protein, 9 aa, Artificial Sequence
  Description of Artificial Sequence: Synthetic peptide
IVHSLDAPG

SEQ ID NO: 29218 - protein, 9 aa, Artificial Sequence
  Description of Artificial Sequence: Synthetic peptide
IVSFGYAQG

SEQ ID NO: 29219 - protein, 9 aa, Artificial Sequence
  Description of Artificial Sequence: Synthetic peptide
IVSYLKTND

SEQ ID NO: 29220 - protein, 9 aa, Artificial Sequence
  Description of Artificial Sequence: Synthetic peptide
IVYDMMADV

SEQ ID NO: 29221 - protein, 9 aa, Artificial Sequence
  Description of Artificial Sequence: Synthetic peptide
KVDTQWKSV

SEQ ID NO: 29222 - protein, 9 aa, Artificial Sequence
  Description of Artificial Sequence: Synthetic peptide
KVRPPCIYI

SEQ ID NO: 29223 - protein, 9 aa, Artificial Sequence
  Description of Artificial Sequence: Synthetic peptide
LVDPHRPMM

SEQ ID NO: 29224 - protein, 9 aa, Artificial Sequence
  Description of Artificial Sequence: Synthetic peptide
LVNHGDSYC

SEQ ID NO: 29225 - protein, 9 aa, Artificial Sequence
  Description of Artificial Sequence: Synthetic peptide
LVTGNSWEQ

SEQ ID NO: 29226 - protein, 9 aa, Artificial Sequence
  Description of Artificial Sequence: Synthetic peptide
MVIGTSLLA

SEQ ID NO: 29227 - protein, 9 aa, Artificial Sequence
  Description of Artificial Sequence: Synthetic peptide
NVMGHDWVH

SEQ ID NO: 29228 - protein, 9 aa, Artificial Sequence
  Description of Artificial Sequence: Synthetic peptide
NVQWFEQNI

SEQ ID NO: 29229 - protein, 9 aa, Artificial Sequence
  Description of Artificial Sequence: Synthetic peptide
NVVWGMLYG

SEQ ID NO: 29230 - protein, 9 aa, Artificial Sequence
  Description of Artificial Sequence: Synthetic peptide
NVYINLASS

SEQ ID NO: 29231 - protein, 9 aa, Artificial Sequence
  Description of Artificial Sequence: Synthetic peptide
PVPHNYQWW

SEQ ID NO: 29232 - protein, 9 aa, Artificial Sequence
  Description of Artificial Sequence: Synthetic peptide
PVRHCSVWF

SEQ ID NO: 29233 - protein, 9 aa, Artificial Sequence
  Description of Artificial Sequence: Synthetic peptide
RVCTFCCCF

SEQ ID NO: 29234 - protein, 9 aa, Artificial Sequence
  Description of Artificial Sequence: Synthetic peptide
RVDFNVYCK

SEQ ID NO: 29235 - protein, 9 aa, Artificial Sequence
  Description of Artificial Sequence: Synthetic peptide
RVFMLEMYA

SEQ ID NO: 29236 - protein, 9 aa, Artificial Sequence
  Description of Artificial Sequence: Synthetic peptide
RVNMNDIGE

SEQ ID NO: 29237 - protein, 9 aa, Artificial Sequence
  Description of Artificial Sequence: Synthetic peptide
SVAMRQLDN

SEQ ID NO: 29238 - protein, 9 aa, Artificial Sequence
  Description of Artificial Sequence: Synthetic peptide
SVFWPEHNP

SEQ ID NO: 29239 - protein, 9 aa, Artificial Sequence
  Description of Artificial Sequence: Synthetic peptide
SVHICEDGW

SEQ ID NO: 29240 - protein, 9 aa, Artificial Sequence
  Description of Artificial Sequence: Synthetic peptide
SVLSFVAQK

SEQ ID NO: 29241 - protein, 9 aa, Artificial Sequence
  Description of Artificial Sequence: Synthetic peptide
SVNPYPHGI

SEQ ID NO: 29242 - protein, 9 aa, Artificial Sequence
  Description of Artificial Sequence: Synthetic peptide
SVRTHMHLP

SEQ ID NO: 29243 - protein, 9 aa, Artificial Sequence
  Description of Artificial Sequence: Synthetic peptide
SVTFDVGGP

SEQ ID NO: 29244 - protein, 9 aa, Artificial Sequence
  Description of Artificial Sequence: Synthetic peptide
SVYICNMDQ

SEQ ID NO: 29245 - protein, 9 aa, Artificial Sequence
  Description of Artificial Sequence: Synthetic peptide
TVAVNEHLA

SEQ ID NO: 29246 - protein, 9 aa, Artificial Sequence
  Description of Artificial Sequence: Synthetic peptide
TVFVYDNPG

SEQ ID NO: 29247 - protein, 9 aa, Artificial Sequence
  Description of Artificial Sequence: Synthetic peptide
TVLDAWTAE

SEQ ID NO: 29248 - protein, 9 aa, Artificial Sequence
  Description of Artificial Sequence: Synthetic peptide
TVNSNRTGD

SEQ ID NO: 29249 - protein, 9 aa, Artificial Sequence
  Description of Artificial Sequence: Synthetic peptide
TVNVFPIHE

SEQ ID NO: 29250 - protein, 9 aa, Artificial Sequence
  Description of Artificial Sequence: Synthetic peptide
TVYDVNAFS

SEQ ID NO: 29251 - protein, 9 aa, Artificial Sequence
  Description of Artificial Sequence: Synthetic peptide
VVMDAHCNL

SEQ ID NO: 29252 - protein, 9 aa, Artificial Sequence
  Description of Artificial Sequence: Synthetic peptide
VVTDYMVGA

SEQ ID NO: 29253 - protein, 9 aa, Artificial Sequence
  Description of Artificial Sequence: Synthetic peptide
WVKFANDCQ

SEQ ID NO: 29254 - protein, 9 aa, Artificial Sequence
  Description of Artificial Sequence: Synthetic peptide
WVRMRNLEK

SEQ ID NO: 29255 - protein, 9 aa, Artificial Sequence
  Description of Artificial Sequence: Synthetic peptide
YVAGLFNNR

SEQ ID NO: 29256 - protein, 9 aa, Artificial Sequence
  Description of Artificial Sequence: Synthetic peptide
YVKFSVNIN

SEQ ID NO: 29257 - protein, 9 aa, Artificial Sequence
  Description of Artificial Sequence: Synthetic peptide
YVQLRIADD

SEQ ID NO: 29258 - protein, 9 aa, Artificial Sequence
  Description of Artificial Sequence: Synthetic peptide
YVQTTAHSS

SEQ ID NO: 29259 - protein, 9 aa, Artificial Sequence
  Description of Artificial Sequence: Synthetic peptide
MVTERKPWS

SEQ ID NO: 29260 - protein, 9 aa, Artificial Sequence
  Description of Artificial Sequence: Synthetic peptide
SVLHVQALA

SEQ ID NO: 29261 - protein, 9 aa, Artificial Sequence
  Description of Artificial Sequence: Synthetic peptide
WVHPYSYCA

SEQ ID NO: 29262 - protein, 9 aa, Artificial Sequence
  Description of Artificial Sequence: Synthetic peptide
DVKSWAVCD

SEQ ID NO: 29263 - protein, 9 aa, Artificial Sequence
  Description of Artificial Sequence: Synthetic peptide
LVVTKFTYV

SEQ ID NO: 29264 - protein, 9 aa, Artificial Sequence
  Description of Artificial Sequence: Synthetic peptide
RVNGSTCRH

SEQ ID NO: 29265 - protein, 9 aa, Artificial Sequence
  Description of Artificial Sequence: Synthetic peptide
AVESSKGYV

SEQ ID NO: 29266 - protein, 9 aa, Artificial Sequence
  Description of Artificial Sequence: Synthetic peptide
AVGCFGKEP

SEQ ID NO: 29267 - protein, 9 aa, Artificial Sequence
  Description of Artificial Sequence: Synthetic peptide
AVMEYILYK

SEQ ID NO: 29268 - protein, 9 aa, Artificial Sequence
  Description of Artificial Sequence: Synthetic peptide
AVNDQWQWG

SEQ ID NO: 29269 - protein, 9 aa, Artificial Sequence
  Description of Artificial Sequence: Synthetic peptide
AVQLGNSMF

SEQ ID NO: 29270 - protein, 9 aa, Artificial Sequence
  Description of Artificial Sequence: Synthetic peptide
AVSAPLSKE

SEQ ID NO: 29271 - protein, 9 aa, Artificial Sequence
  Description of Artificial Sequence: Synthetic peptide
AVVQGMLYP

SEQ ID NO: 29272 - protein, 9 aa, Artificial Sequence
  Description of Artificial Sequence: Synthetic peptide
CVAHFDQCF

SEQ ID NO: 29273 - protein, 9 aa, Artificial Sequence
  Description of Artificial Sequence: Synthetic peptide
CVDYHRREQ

SEQ ID NO: 29274 - protein, 9 aa, Artificial Sequence
  Description of Artificial Sequence: Synthetic peptide
CVESGTGHQ

SEQ ID NO: 29275 - protein, 9 aa, Artificial Sequence
  Description of Artificial Sequence: Synthetic peptide
CVIHRMDMP

SEQ ID NO: 29276 - protein, 9 aa, Artificial Sequence
  Description of Artificial Sequence: Synthetic peptide
CVMNVIWDA

SEQ ID NO: 29277 - protein, 9 aa, Artificial Sequence
  Description of Artificial Sequence: Synthetic peptide
CVNETDTAA

SEQ ID NO: 29278 - protein, 9 aa, Artificial Sequence
  Description of Artificial Sequence: Synthetic peptide
CVSYNPSIR

SEQ ID NO: 29279 - protein, 9 aa, Artificial Sequence
  Description of Artificial Sequence: Synthetic peptide
CVTINTISG

SEQ ID NO: 29280 - protein, 9 aa, Artificial Sequence
  Description of Artificial Sequence: Synthetic peptide
DVNCCITCG

SEQ ID NO: 29281 - protein, 9 aa, Artificial Sequence
  Description of Artificial Sequence: Synthetic peptide
DVNTYANRD

SEQ ID NO: 29282 - protein, 9 aa, Artificial Sequence
  Description of Artificial Sequence: Synthetic peptide
DVRAMTNDW

SEQ ID NO: 29283 - protein, 9 aa, Artificial Sequence
  Description of Artificial Sequence: Synthetic peptide
DVVEKCSWF

SEQ ID NO: 29284 - protein, 9 aa, Artificial Sequence
  Description of Artificial Sequence: Synthetic peptide
DVVHMWWWS

SEQ ID NO: 29285 - protein, 9 aa, Artificial Sequence
  Description of Artificial Sequence: Synthetic peptide
EVACYDMTG

SEQ ID NO: 29286 - protein, 9 aa, Artificial Sequence
  Description of Artificial Sequence: Synthetic peptide
EVAMMINNN

SEQ ID NO: 29287 - protein, 9 aa, Artificial Sequence
  Description of Artificial Sequence: Synthetic peptide
EVGTECQWL

SEQ ID NO: 29288 - protein, 9 aa, Artificial Sequence
  Description of Artificial Sequence: Synthetic peptide
EVGTNHKQH

SEQ ID NO: 29289 - protein, 9 aa, Artificial Sequence
  Description of Artificial Sequence: Synthetic peptide
EVKMFYKQY

SEQ ID NO: 29290 - protein, 9 aa, Artificial Sequence
  Description of Artificial Sequence: Synthetic peptide
EVLDHISAG

SEQ ID NO: 29291 - protein, 9 aa, Artificial Sequence
  Description of Artificial Sequence: Synthetic peptide
EVREEGVLT

SEQ ID NO: 29292 - protein, 9 aa, Artificial Sequence
  Description of Artificial Sequence: Synthetic peptide
EVTHQLKNA

SEQ ID NO: 29293 - protein, 9 aa, Artificial Sequence
  Description of Artificial Sequence: Synthetic peptide
EVTVFIAPW

SEQ ID NO: 29294 - protein, 9 aa, Artificial Sequence
  Description of Artificial Sequence: Synthetic peptide
EVWNEESMF

SEQ ID NO: 29295 - protein, 9 aa, Artificial Sequence
  Description of Artificial Sequence: Synthetic peptide
EVYIKQQYY

SEQ ID NO: 29296 - protein, 9 aa, Artificial Sequence
  Description of Artificial Sequence: Synthetic peptide
FVPPSCYNY

SEQ ID NO: 29297 - protein, 9 aa, Artificial Sequence
  Description of Artificial Sequence: Synthetic peptide
GVAAQPCSP

SEQ ID NO: 29298 - protein, 9 aa, Artificial Sequence
  Description of Artificial Sequence: Synthetic peptide
GVAPKPDFE

SEQ ID NO: 29299 - protein, 9 aa, Artificial Sequence
  Description of Artificial Sequence: Synthetic peptide
GVASCNRFD

SEQ ID NO: 29300 - protein, 9 aa, Artificial Sequence
  Description of Artificial Sequence: Synthetic peptide
GVMPKYFFG

SEQ ID NO: 29301 - protein, 9 aa, Artificial Sequence
  Description of Artificial Sequence: Synthetic peptide
GVNAKQQTR

SEQ ID NO: 29302 - protein, 9 aa, Artificial Sequence
  Description of Artificial Sequence: Synthetic peptide
GVYFMCDFM

SEQ ID NO: 29303 - protein, 9 aa, Artificial Sequence
  Description of Artificial Sequence: Synthetic peptide
HVQTAEWIP

SEQ ID NO: 29304 - protein, 9 aa, Artificial Sequence
  Description of Artificial Sequence: Synthetic peptide
IVDWPANRY

SEQ ID NO: 29305 - protein, 9 aa, Artificial Sequence
  Description of Artificial Sequence: Synthetic peptide
IVIGRWYSC

SEQ ID NO: 29306 - protein, 9 aa, Artificial Sequence
  Description of Artificial Sequence: Synthetic peptide
IVMRALANN

SEQ ID NO: 29307 - protein, 9 aa, Artificial Sequence
  Description of Artificial Sequence: Synthetic peptide
IVMSFHRNH

SEQ ID NO: 29308 - protein, 9 aa, Artificial Sequence
  Description of Artificial Sequence: Synthetic peptide
IVTDCRDGL

SEQ ID NO: 29309 - protein, 9 aa, Artificial Sequence
  Description of Artificial Sequence: Synthetic peptide
IVTTKQLCR

SEQ ID NO: 29310 - protein, 9 aa, Artificial Sequence
  Description of Artificial Sequence: Synthetic peptide
KVDDHICPG

SEQ ID NO: 29311 - protein, 9 aa, Artificial Sequence
  Description of Artificial Sequence: Synthetic peptide
KVGWIEWYA

SEQ ID NO: 29312 - protein, 9 aa, Artificial Sequence
  Description of Artificial Sequence: Synthetic peptide
KVYPLDFKM

SEQ ID NO: 29313 - protein, 9 aa, Artificial Sequence
  Description of Artificial Sequence: Synthetic peptide
LVDGCVWMH

SEQ ID NO: 29314 - protein, 9 aa, Artificial Sequence
  Description of Artificial Sequence: Synthetic peptide
LVDYTGNED

SEQ ID NO: 29315 - protein, 9 aa, Artificial Sequence
  Description of Artificial Sequence: Synthetic peptide
LVFYTSVRG

SEQ ID NO: 29316 - protein, 9 aa, Artificial Sequence
  Description of Artificial Sequence: Synthetic peptide
LVTKEDCAY

SEQ ID NO: 29317 - protein, 9 aa, Artificial Sequence
  Description of Artificial Sequence: Synthetic peptide
MVAVDGTEP

SEQ ID NO: 29318 - protein, 9 aa, Artificial Sequence
  Description of Artificial Sequence: Synthetic peptide
MVDMKQLMF

SEQ ID NO: 29319 - protein, 9 aa, Artificial Sequence
  Description of Artificial Sequence: Synthetic peptide
MVEANEHAM

SEQ ID NO: 29320 - protein, 9 aa, Artificial Sequence
  Description of Artificial Sequence: Synthetic peptide
MVEIHPDYD

SEQ ID NO: 29321 - protein, 9 aa, Artificial Sequence
  Description of Artificial Sequence: Synthetic peptide
MVHLRGDGE

SEQ ID NO: 29322 - protein, 9 aa, Artificial Sequence
  Description of Artificial Sequence: Synthetic peptide
NVDSSPFLT

SEQ ID NO: 29323 - protein, 9 aa, Artificial Sequence
  Description of Artificial Sequence: Synthetic peptide
NVHGIMWDN

SEQ ID NO: 29324 - protein, 9 aa, Artificial Sequence
  Description of Artificial Sequence: Synthetic peptide
NVQTKMHLP

SEQ ID NO: 29325 - protein, 9 aa, Artificial Sequence
  Description of Artificial Sequence: Synthetic peptide
NVTPHEFQA

SEQ ID NO: 29326 - protein, 9 aa, Artificial Sequence
  Description of Artificial Sequence: Synthetic peptide
NVTTIEPAH

SEQ ID NO: 29327 - protein, 9 aa, Artificial Sequence
  Description of Artificial Sequence: Synthetic peptide
NVVQVTQNA

SEQ ID NO: 29328 - protein, 9 aa, Artificial Sequence
  Description of Artificial Sequence: Synthetic peptide
NVVSKDHGG

SEQ ID NO: 29329 - protein, 9 aa, Artificial Sequence
  Description of Artificial Sequence: Synthetic peptide
NVWHGYWLN

SEQ ID NO: 29330 - protein, 9 aa, Artificial Sequence
  Description of Artificial Sequence: Synthetic peptide
PVAHVPFGM

SEQ ID NO: 29331 - protein, 9 aa, Artificial Sequence
  Description of Artificial Sequence: Synthetic peptide
PVTAPGFAH

SEQ ID NO: 29332 - protein, 9 aa, Artificial Sequence
  Description of Artificial Sequence: Synthetic peptide
RVYNPMYWH

SEQ ID NO: 29333 - protein, 9 aa, Artificial Sequence
  Description of Artificial Sequence: Synthetic peptide
SVAQEMEST

SEQ ID NO: 29334 - protein, 9 aa, Artificial Sequence
  Description of Artificial Sequence: Synthetic peptide
SVCEDAFFD

SEQ ID NO: 29335 - protein, 9 aa, Artificial Sequence
  Description of Artificial Sequence: Synthetic peptide
SVDAQAFVY

SEQ ID NO: 29336 - protein, 9 aa, Artificial Sequence
  Description of Artificial Sequence: Synthetic peptide
SVDQESAYR

SEQ ID NO: 29337 - protein, 9 aa, Artificial Sequence
  Description of Artificial Sequence: Synthetic peptide
SVERHGSDK

SEQ ID NO: 29338 - protein, 9 aa, Artificial Sequence
  Description of Artificial Sequence: Synthetic peptide
SVHQWCDVT

SEQ ID NO: 29339 - protein, 9 aa, Artificial Sequence
  Description of Artificial Sequence: Synthetic peptide
SVIAFHIHV

SEQ ID NO: 29340 - protein, 9 aa, Artificial Sequence
  Description of Artificial Sequence: Synthetic peptide
SVLHTMMVK

SEQ ID NO: 29341 - protein, 9 aa, Artificial Sequence
  Description of Artificial Sequence: Synthetic peptide
SVNEVIDQV

SEQ ID NO: 29342 - protein, 9 aa, Artificial Sequence
  Description of Artificial Sequence: Synthetic peptide
SVNQESAYR

SEQ ID NO: 29343 - protein, 9 aa, Artificial Sequence
  Description of Artificial Sequence: Synthetic peptide
SVNSKNHTQ

SEQ ID NO: 29344 - protein, 9 aa, Artificial Sequence
  Description of Artificial Sequence: Synthetic peptide
SVSYGNHSV

SEQ ID NO: 29345 - protein, 9 aa, Artificial Sequence
  Description of Artificial Sequence: Synthetic peptide
SVTDRDHQY

SEQ ID NO: 29346 - protein, 9 aa, Artificial Sequence
  Description of Artificial Sequence: Synthetic peptide
TVAPQSSLW

SEQ ID NO: 29347 - protein, 9 aa, Artificial Sequence
  Description of Artificial Sequence: Synthetic peptide
TVCMDANFK

SEQ ID NO: 29348 - protein, 9 aa, Artificial Sequence
  Description of Artificial Sequence: Synthetic peptide
TVKDLRVVT

SEQ ID NO: 29349 - protein, 9 aa, Artificial Sequence
  Description of Artificial Sequence: Synthetic peptide
TVLWKHDKA

SEQ ID NO: 29350 - protein, 9 aa, Artificial Sequence
  Description of Artificial Sequence: Synthetic peptide
TVSQCSFFP

SEQ ID NO: 29351 - protein, 9 aa, Artificial Sequence
  Description of Artificial Sequence: Synthetic peptide
TVTLSEKWH

SEQ ID NO: 29352 - protein, 9 aa, Artificial Sequence
  Description of Artificial Sequence: Synthetic peptide
TVYGFPNEV

SEQ ID NO: 29353 - protein, 9 aa, Artificial Sequence
  Description of Artificial Sequence: Synthetic peptide
VVGVAPVMP

SEQ ID NO: 29354 - protein, 9 aa, Artificial Sequence
  Description of Artificial Sequence: Synthetic peptide
WVKAVTLEQ

SEQ ID NO: 29355 - protein, 9 aa, Artificial Sequence
  Description of Artificial Sequence: Synthetic peptide
WVVQTFTFD

SEQ ID NO: 29356 - protein, 9 aa, Artificial Sequence
  Description of Artificial Sequence: Synthetic peptide
YVDCRNDAG

SEQ ID NO: 29357 - protein, 9 aa, Artificial Sequence
  Description of Artificial Sequence: Synthetic peptide
YVELYIVDQ

SEQ ID NO: 29358 - protein, 9 aa, Artificial Sequence
  Description of Artificial Sequence: Synthetic peptide
YVRDTALCF

SEQ ID NO: 29359 - protein, 9 aa, Artificial Sequence
  Description of Artificial Sequence: Synthetic peptide
YVTSALDTF

SEQ ID NO: 29360 - protein, 9 aa, Artificial Sequence
  Description of Artificial Sequence: Synthetic peptide
CVSFDACFA

SEQ ID NO: 29361 - protein, 9 aa, Artificial Sequence
  Description of Artificial Sequence: Synthetic peptide
DVDRLCSIP

SEQ ID NO: 29362 - protein, 9 aa, Artificial Sequence
  Description of Artificial Sequence: Synthetic peptide
DVSQTNFSE

SEQ ID NO: 29363 - protein, 9 aa, Artificial Sequence
  Description of Artificial Sequence: Synthetic peptide
DVVWSTKDQ

SEQ ID NO: 29364 - protein, 9 aa, Artificial Sequence
  Description of Artificial Sequence: Synthetic peptide
DVWSSISDS

SEQ ID NO: 29365 - protein, 9 aa, Artificial Sequence
  Description of Artificial Sequence: Synthetic peptide
EVDGGGKMQ

SEQ ID NO: 29366 - protein, 9 aa, Artificial Sequence
  Description of Artificial Sequence: Synthetic peptide
EVFLAGLMS

SEQ ID NO: 29367 - protein, 9 aa, Artificial Sequence
  Description of Artificial Sequence: Synthetic peptide
EVLLAGIGP

SEQ ID NO: 29368 - protein, 9 aa, Artificial Sequence
  Description of Artificial Sequence: Synthetic peptide
EVTPMYCSD

SEQ ID NO: 29369 - protein, 9 aa, Artificial Sequence
  Description of Artificial Sequence: Synthetic peptide
FVRGNLQTP

SEQ ID NO: 29370 - protein, 9 aa, Artificial Sequence
  Description of Artificial Sequence: Synthetic peptide
GVCHNTGCT

SEQ ID NO: 29371 - protein, 9 aa, Artificial Sequence
  Description of Artificial Sequence: Synthetic peptide
HVFILDRTC

SEQ ID NO: 29372 - protein, 9 aa, Artificial Sequence
  Description of Artificial Sequence: Synthetic peptide
HVIPDPRPA

SEQ ID NO: 29373 - protein, 9 aa, Artificial Sequence
  Description of Artificial Sequence: Synthetic peptide
IVETDGSLM

SEQ ID NO: 29374 - protein, 9 aa, Artificial Sequence
  Description of Artificial Sequence: Synthetic peptide
IVKFECCNH

SEQ ID NO: 29375 - protein, 9 aa, Artificial Sequence
  Description of Artificial Sequence: Synthetic peptide
LVYHSFVHE

SEQ ID NO: 29376 - protein, 9 aa, Artificial Sequence
  Description of Artificial Sequence: Synthetic peptide
MVCREQENG

SEQ ID NO: 29377 - protein, 9 aa, Artificial Sequence
  Description of Artificial Sequence: Synthetic peptide
MVEVATMPH

SEQ ID NO: 29378 - protein, 9 aa, Artificial Sequence
  Description of Artificial Sequence: Synthetic peptide
RVDDYERTF

SEQ ID NO: 29379 - protein, 9 aa, Artificial Sequence
  Description of Artificial Sequence: Synthetic peptide
SVIHYSWAL

SEQ ID NO: 29380 - protein, 9 aa, Artificial Sequence
  Description of Artificial Sequence: Synthetic peptide
SVSAWNPMS

SEQ ID NO: 29381 - protein, 9 aa, Artificial Sequence
  Description of Artificial Sequence: Synthetic peptide
DKPFEWDLL

SEQ ID NO: 29382 - protein, 9 aa, Artificial Sequence
  Description of Artificial Sequence: Synthetic peptide
EQPHDPSST

SEQ ID NO: 29383 - protein, 9 aa, Artificial Sequence
  Description of Artificial Sequence: Synthetic peptide
FDPNRSQDV

SEQ ID NO: 29384 - protein, 9 aa, Artificial Sequence
  Description of Artificial Sequence: Synthetic peptide
GEPKCVMME

SEQ ID NO: 29385 - protein, 9 aa, Artificial Sequence
  Description of Artificial Sequence: Synthetic peptide
GGPDIKHYI

SEQ ID NO: 29386 - protein, 9 aa, Artificial Sequence
  Description of Artificial Sequence: Synthetic peptide
GGPSEQPRP

SEQ ID NO: 29387 - protein, 9 aa, Artificial Sequence
  Description of Artificial Sequence: Synthetic peptide
HHPKFAEKG

SEQ ID NO: 29388 - protein, 9 aa, Artificial Sequence
  Description of Artificial Sequence: Synthetic peptide
HHPQVLRGM

SEQ ID NO: 29389 - protein, 9 aa, Artificial Sequence
  Description of Artificial Sequence: Synthetic peptide
HNPVWVQQE

SEQ ID NO: 29390 - protein, 9 aa, Artificial Sequence
  Description of Artificial Sequence: Synthetic peptide
ICPLEQYEM

SEQ ID NO: 29391 - protein, 9 aa, Artificial Sequence
  Description of Artificial Sequence: Synthetic peptide
IGPMGQYGR

SEQ ID NO: 29392 - protein, 9 aa, Artificial Sequence
  Description of Artificial Sequence: Synthetic peptide
IMPEAKNTP

SEQ ID NO: 29393 - protein, 9 aa, Artificial Sequence
  Description of Artificial Sequence: Synthetic peptide
KCPDEMNNI

SEQ ID NO: 29394 - protein, 9 aa, Artificial Sequence
  Description of Artificial Sequence: Synthetic peptide
KTPFTRWLR

SEQ ID NO: 29395 - protein, 9 aa, Artificial Sequence
  Description of Artificial Sequence: Synthetic peptide
KTPLMVASI

SEQ ID NO: 29396 - protein, 9 aa, Artificial Sequence
  Description of Artificial Sequence: Synthetic peptide
MLPSFGDEM

SEQ ID NO: 29397 - protein, 9 aa, Artificial Sequence
  Description of Artificial Sequence: Synthetic peptide
NGPQGLMAC

SEQ ID NO: 29398 - protein, 9 aa, Artificial Sequence
  Description of Artificial Sequence: Synthetic peptide
NNPTNTEAR

SEQ ID NO: 29399 - protein, 9 aa, Artificial Sequence
  Description of Artificial Sequence: Synthetic peptide
PCPDHHRWL

SEQ ID NO: 29400 - protein, 9 aa, Artificial Sequence
  Description of Artificial Sequence: Synthetic peptide
PLPCPRSGY

SEQ ID NO: 29401 - protein, 9 aa, Artificial Sequence
  Description of Artificial Sequence: Synthetic peptide
RIPPMMIML

SEQ ID NO: 29402 - protein, 9 aa, Artificial Sequence
  Description of Artificial Sequence: Synthetic peptide
SSPPWGHPF

SEQ ID NO: 29403 - protein, 9 aa, Artificial Sequence
  Description of Artificial Sequence: Synthetic peptide
SSPSHAEYL

SEQ ID NO: 29404 - protein, 9 aa, Artificial Sequence
  Description of Artificial Sequence: Synthetic peptide
WMPLYCMHV

SEQ ID NO: 29405 - protein, 9 aa, Artificial Sequence
  Description of Artificial Sequence: Synthetic peptide
WQPSHAYHF

SEQ ID NO: 29406 - protein, 9 aa, Artificial Sequence
  Description of Artificial Sequence: Synthetic peptide
FCPCGQEMC

SEQ ID NO: 29407 - protein, 9 aa, Artificial Sequence
  Description of Artificial Sequence: Synthetic peptide
SWPLPERPS

SEQ ID NO: 29408 - protein, 9 aa, Artificial Sequence
  Description of Artificial Sequence: Synthetic peptide
LSPWPQTDQ

SEQ ID NO: 29409 - protein, 9 aa, Artificial Sequence
  Description of Artificial Sequence: Synthetic peptide
EQPNMGDYG

SEQ ID NO: 29410 - protein, 9 aa, Artificial Sequence
  Description of Artificial Sequence: Synthetic peptide
MLPLEMKNL

SEQ ID NO: 29411 - protein, 9 aa, Artificial Sequence
  Description of Artificial Sequence: Synthetic peptide
FPPREGPEW

SEQ ID NO: 29412 - protein, 9 aa, Artificial Sequence
  Description of Artificial Sequence: Synthetic peptide
AHPHCCRHP

SEQ ID NO: 29413 - protein, 9 aa, Artificial Sequence
  Description of Artificial Sequence: Synthetic peptide
CAPQFNWQY

SEQ ID NO: 29414 - protein, 9 aa, Artificial Sequence
  Description of Artificial Sequence: Synthetic peptide
CQPRYHWCY

SEQ ID NO: 29415 - protein, 9 aa, Artificial Sequence
  Description of Artificial Sequence: Synthetic peptide
ESPNWGYMD

SEQ ID NO: 29416 - protein, 9 aa, Artificial Sequence
  Description of Artificial Sequence: Synthetic peptide
GQPQQIWQA

SEQ ID NO: 29417 - protein, 9 aa, Artificial Sequence
  Description of Artificial Sequence: Synthetic peptide
HHPHQANIY

SEQ ID NO: 29418 - protein, 9 aa, Artificial Sequence
  Description of Artificial Sequence: Synthetic peptide
KDPLGESKW

SEQ ID NO: 29419 - protein, 9 aa, Artificial Sequence
  Description of Artificial Sequence: Synthetic peptide
KMPLKQADF

SEQ ID NO: 29420 - protein, 9 aa, Artificial Sequence
  Description of Artificial Sequence: Synthetic peptide
MFPQAPADG

SEQ ID NO: 29421 - protein, 9 aa, Artificial Sequence
  Description of Artificial Sequence: Synthetic peptide
MFPVCQDRD

SEQ ID NO: 29422 - protein, 9 aa, Artificial Sequence
  Description of Artificial Sequence: Synthetic peptide
MGPMKPMMD

SEQ ID NO: 29423 - protein, 9 aa, Artificial Sequence
  Description of Artificial Sequence: Synthetic peptide
NPPLCQEYG

SEQ ID NO: 29424 - protein, 9 aa, Artificial Sequence
  Description of Artificial Sequence: Synthetic peptide
PGPEQITAG

SEQ ID NO: 29425 - protein, 9 aa, Artificial Sequence
  Description of Artificial Sequence: Synthetic peptide
PPPWFQSRS

SEQ ID NO: 29426 - protein, 9 aa, Artificial Sequence
  Description of Artificial Sequence: Synthetic peptide
PQPCSWPAQ

SEQ ID NO: 29427 - protein, 9 aa, Artificial Sequence
  Description of Artificial Sequence: Synthetic peptide
SGPWCGSAW

SEQ ID NO: 29428 - protein, 9 aa, Artificial Sequence
  Description of Artificial Sequence: Synthetic peptide
SSPNVHDLD

SEQ ID NO: 29429 - protein, 9 aa, Artificial Sequence
  Description of Artificial Sequence: Synthetic peptide
SWPFSWLIV

SEQ ID NO: 29430 - protein, 9 aa, Artificial Sequence
  Description of Artificial Sequence: Synthetic peptide
TKPDSANWD

SEQ ID NO: 29431 - protein, 9 aa, Artificial Sequence
  Description of Artificial Sequence: Synthetic peptide
VNPQEEFFD

SEQ ID NO: 29432 - protein, 9 aa, Artificial Sequence
  Description of Artificial Sequence: Synthetic peptide
VQPPYIAMV

SEQ ID NO: 29433 - protein, 9 aa, Artificial Sequence
  Description of Artificial Sequence: Synthetic peptide
VSPRDLHHM

SEQ ID NO: 29434 - protein, 9 aa, Artificial Sequence
  Description of Artificial Sequence: Synthetic peptide
YFPQESENS

SEQ ID NO: 29435 - protein, 9 aa, Artificial Sequence
  Description of Artificial Sequence: Synthetic peptide
YQPNWRSQT

SEQ ID NO: 29436 - protein, 9 aa, Artificial Sequence
  Description of Artificial Sequence: Synthetic peptide
AHPWCLTPN

SEQ ID NO: 29437 - protein, 9 aa, Artificial Sequence
  Description of Artificial Sequence: Synthetic peptide
DNPWLLTFR

SEQ ID NO: 29438 - protein, 9 aa, Artificial Sequence
  Description of Artificial Sequence: Synthetic peptide
KQPTSASPI

SEQ ID NO: 29439 - protein, 9 aa, Artificial Sequence
  Description of Artificial Sequence: Synthetic peptide
MDPLGPAAD

SEQ ID NO: 29440 - protein, 9 aa, Artificial Sequence
  Description of Artificial Sequence: Synthetic peptide
NEPQICRKC

SEQ ID NO: 29441 - protein, 9 aa, Artificial Sequence
  Description of Artificial Sequence: Synthetic peptide
NQPGRFRTV

SEQ ID NO: 29442 - protein, 9 aa, Artificial Sequence
  Description of Artificial Sequence: Synthetic peptide
VPPRMTIEL

SEQ ID NO: 29443 - protein, 9 aa, Artificial Sequence
  Description of Artificial Sequence: Synthetic peptide
YSPTTNGGP

SEQ ID NO: 29444 - protein, 9 aa, Artificial Sequence
  Description of Artificial Sequence: Synthetic peptide
AISEHFWNV

SEQ ID NO: 29445 - protein, 9 aa, Artificial Sequence
  Description of Artificial Sequence: Synthetic peptide
ANVELMTIK

SEQ ID NO: 29446 - protein, 9 aa, Artificial Sequence
  Description of Artificial Sequence: Synthetic peptide
ATHEQGGQL

SEQ ID NO: 29447 - protein, 9 aa, Artificial Sequence
  Description of Artificial Sequence: Synthetic peptide
CFCECSFCE

SEQ ID NO: 29448 - protein, 9 aa, Artificial Sequence
  Description of Artificial Sequence: Synthetic peptide
CFDEFMLWG

SEQ ID NO: 29449 - protein, 9 aa, Artificial Sequence
  Description of Artificial Sequence: Synthetic peptide
CITELINYT

SEQ ID NO: 29450 - protein, 9 aa, Artificial Sequence
  Description of Artificial Sequence: Synthetic peptide
CLAEQITCQ

SEQ ID NO: 29451 - protein, 9 aa, Artificial Sequence
  Description of Artificial Sequence: Synthetic peptide
CRSEGWIHT

SEQ ID NO: 29452 - protein, 9 aa, Artificial Sequence
  Description of Artificial Sequence: Synthetic peptide
DGMEWDLCG

SEQ ID NO: 29453 - protein, 9 aa, Artificial Sequence
  Description of Artificial Sequence: Synthetic peptide
DHVEIQHMS

SEQ ID NO: 29454 - protein, 9 aa, Artificial Sequence
  Description of Artificial Sequence: Synthetic peptide
DTTEQMQIY

SEQ ID NO: 29455 - protein, 9 aa, Artificial Sequence
  Description of Artificial Sequence: Synthetic peptide
EACEGAMLE

SEQ ID NO: 29456 - protein, 9 aa, Artificial Sequence
  Description of Artificial Sequence: Synthetic peptide
ECEEPSLMK

SEQ ID NO: 29457 - protein, 9 aa, Artificial Sequence
  Description of Artificial Sequence: Synthetic peptide
EEVESGHFG

SEQ ID NO: 29458 - protein, 9 aa, Artificial Sequence
  Description of Artificial Sequence: Synthetic peptide
EILEEQESC

SEQ ID NO: 29459 - protein, 9 aa, Artificial Sequence
  Description of Artificial Sequence: Synthetic peptide
ELIEKVYRW

SEQ ID NO: 29460 - protein, 9 aa, Artificial Sequence
  Description of Artificial Sequence: Synthetic peptide
FTREDKDRC

SEQ ID NO: 29461 - protein, 9 aa, Artificial Sequence
  Description of Artificial Sequence: Synthetic peptide
GAVEKMVQE

SEQ ID NO: 29462 - protein, 9 aa, Artificial Sequence
  Description of Artificial Sequence: Synthetic peptide
GMEEVEREG

SEQ ID NO: 29463 - protein, 9 aa, Artificial Sequence
  Description of Artificial Sequence: Synthetic peptide
HGEEIHWKD

SEQ ID NO: 29464 - protein, 9 aa, Artificial Sequence
  Description of Artificial Sequence: Synthetic peptide
IWTEAAENC

SEQ ID NO: 29465 - protein, 9 aa, Artificial Sequence
  Description of Artificial Sequence: Synthetic peptide
KGEEMYECG

SEQ ID NO: 29466 - protein, 9 aa, Artificial Sequence
  Description of Artificial Sequence: Synthetic peptide
LREEYKLAG

SEQ ID NO: 29467 - protein, 9 aa, Artificial Sequence
  Description of Artificial Sequence: Synthetic peptide
LTCENQQIP

SEQ ID NO: 29468 - protein, 9 aa, Artificial Sequence
  Description of Artificial Sequence: Synthetic peptide
LWTESVMGN

SEQ ID NO: 29469 - protein, 9 aa, Artificial Sequence
  Description of Artificial Sequence: Synthetic peptide
MALERCDVD

SEQ ID NO: 29470 - protein, 9 aa, Artificial Sequence
  Description of Artificial Sequence: Synthetic peptide
MEEEYMFTA

SEQ ID NO: 29471 - protein, 9 aa, Artificial Sequence
  Description of Artificial Sequence: Synthetic peptide
MMSEQCHLT

SEQ ID NO: 29472 - protein, 9 aa, Artificial Sequence
  Description of Artificial Sequence: Synthetic peptide
MNIERDRNH

SEQ ID NO: 29473 - protein, 9 aa, Artificial Sequence
  Description of Artificial Sequence: Synthetic peptide
NTCEPVQMI

SEQ ID NO: 29474 - protein, 9 aa, Artificial Sequence
  Description of Artificial Sequence: Synthetic peptide
PTLEFLNLM

SEQ ID NO: 29475 - protein, 9 aa, Artificial Sequence
  Description of Artificial Sequence: Synthetic peptide
RPNEPLDYS

SEQ ID NO: 29476 - protein, 9 aa, Artificial Sequence
  Description of Artificial Sequence: Synthetic peptide
SKREIENCH

SEQ ID NO: 29477 - protein, 9 aa, Artificial Sequence
  Description of Artificial Sequence: Synthetic peptide
SLCEMMQPH

SEQ ID NO: 29478 - protein, 9 aa, Artificial Sequence
  Description of Artificial Sequence: Synthetic peptide
SMTEIVVAW

SEQ ID NO: 29479 - protein, 9 aa, Artificial Sequence
  Description of Artificial Sequence: Synthetic peptide
SSNEGGCWM

SEQ ID NO: 29480 - protein, 9 aa, Artificial Sequence
  Description of Artificial Sequence: Synthetic peptide
STKEDFDMF

SEQ ID NO: 29481 - protein, 9 aa, Artificial Sequence
  Description of Artificial Sequence: Synthetic peptide
STVEKMQTL

SEQ ID NO: 29482 - protein, 9 aa, Artificial Sequence
  Description of Artificial Sequence: Synthetic peptide
TTDECHGHP

SEQ ID NO: 29483 - protein, 9 aa, Artificial Sequence
  Description of Artificial Sequence: Synthetic peptide
TTVEMECGM

SEQ ID NO: 29484 - protein, 9 aa, Artificial Sequence
  Description of Artificial Sequence: Synthetic peptide
VEEERPFWS

SEQ ID NO: 29485 - protein, 9 aa, Artificial Sequence
  Description of Artificial Sequence: Synthetic peptide
VRGERLSDL

SEQ ID NO: 29486 - protein, 9 aa, Artificial Sequence
  Description of Artificial Sequence: Synthetic peptide
VTIERNIWQ

SEQ ID NO: 29487 - protein, 9 aa, Artificial Sequence
  Description of Artificial Sequence: Synthetic peptide
VTRELWLPQ

SEQ ID NO: 29488 - protein, 9 aa, Artificial Sequence
  Description of Artificial Sequence: Synthetic peptide
WCTEFSTRQ

SEQ ID NO: 29489 - protein, 9 aa, Artificial Sequence
  Description of Artificial Sequence: Synthetic peptide
WNVETFLGY

SEQ ID NO: 29490 - protein, 9 aa, Artificial Sequence
  Description of Artificial Sequence: Synthetic peptide
YIAEMEFMN

SEQ ID NO: 29491 - protein, 9 aa, Artificial Sequence
  Description of Artificial Sequence: Synthetic peptide
KQHELMVRV

SEQ ID NO: 29492 - protein, 9 aa, Artificial Sequence
  Description of Artificial Sequence: Synthetic peptide
PKHEDMRWW

SEQ ID NO: 29493 - protein, 9 aa, Artificial Sequence
  Description of Artificial Sequence: Synthetic peptide
NQREWHGLA

SEQ ID NO: 29494 - protein, 9 aa, Artificial Sequence
  Description of Artificial Sequence: Synthetic peptide
SECEVLCSL

SEQ ID NO: 29495 - protein, 9 aa, Artificial Sequence
  Description of Artificial Sequence: Synthetic peptide
PHAETHWYT

SEQ ID NO: 29496 - protein, 9 aa, Artificial Sequence
  Description of Artificial Sequence: Synthetic peptide
AAMESCAEI

SEQ ID NO: 29497 - protein, 9 aa, Artificial Sequence
  Description of Artificial Sequence: Synthetic peptide
AEGEIEMWT

SEQ ID NO: 29498 - protein, 9 aa, Artificial Sequence
  Description of Artificial Sequence: Synthetic peptide
AFVEFSDVT

SEQ ID NO: 29499 - protein, 9 aa, Artificial Sequence
  Description of Artificial Sequence: Synthetic peptide
AGCETWNAP

SEQ ID NO: 29500 - protein, 9 aa, Artificial Sequence
  Description of Artificial Sequence: Synthetic peptide
AMHEATDAQ

SEQ ID NO: 29501 - protein, 9 aa, Artificial Sequence
  Description of Artificial Sequence: Synthetic peptide
AQSEWGSAT

SEQ ID NO: 29502 - protein, 9 aa, Artificial Sequence
  Description of Artificial Sequence: Synthetic peptide
ARDESAEEH

SEQ ID NO: 29503 - protein, 9 aa, Artificial Sequence
  Description of Artificial Sequence: Synthetic peptide
ATHEMHLDA

SEQ ID NO: 29504 - protein, 9 aa, Artificial Sequence
  Description of Artificial Sequence: Synthetic peptide
CKKESGSYE

SEQ ID NO: 29505 - protein, 9 aa, Artificial Sequence
  Description of Artificial Sequence: Synthetic peptide
DCDECQDDQ

SEQ ID NO: 29506 - protein, 9 aa, Artificial Sequence
  Description of Artificial Sequence: Synthetic peptide
DKDERAEGM

SEQ ID NO: 29507 - protein, 9 aa, Artificial Sequence
  Description of Artificial Sequence: Synthetic peptide
DQWEYEVQF

SEQ ID NO: 29508 - protein, 9 aa, Artificial Sequence
  Description of Artificial Sequence: Synthetic peptide
EELEQQMCT

SEQ ID NO: 29509 - protein, 9 aa, Artificial Sequence
  Description of Artificial Sequence: Synthetic peptide
EMHEWSRAN

SEQ ID NO: 29510 - protein, 9 aa, Artificial Sequence
  Description of Artificial Sequence: Synthetic peptide
ESEEMHAYE

SEQ ID NO: 29511 - protein, 9 aa, Artificial Sequence
  Description of Artificial Sequence: Synthetic peptide
GKIEARETD

SEQ ID NO: 29512 - protein, 9 aa, Artificial Sequence
  Description of Artificial Sequence: Synthetic peptide
HMFERPRTQ

SEQ ID NO: 29513 - protein, 9 aa, Artificial Sequence
  Description of Artificial Sequence: Synthetic peptide
HPSEECSWR

SEQ ID NO: 29514 - protein, 9 aa, Artificial Sequence
  Description of Artificial Sequence: Synthetic peptide
KLVEMQESK

SEQ ID NO: 29515 - protein, 9 aa, Artificial Sequence
  Description of Artificial Sequence: Synthetic peptide
KWCEVLWQP

SEQ ID NO: 29516 - protein, 9 aa, Artificial Sequence
  Description of Artificial Sequence: Synthetic peptide
LEGEAYAQE

SEQ ID NO: 29517 - protein, 9 aa, Artificial Sequence
  Description of Artificial Sequence: Synthetic peptide
LFSEFFEYE

SEQ ID NO: 29518 - protein, 9 aa, Artificial Sequence
  Description of Artificial Sequence: Synthetic peptide
LSNEMTIDA

SEQ ID NO: 29519 - protein, 9 aa, Artificial Sequence
  Description of Artificial Sequence: Synthetic peptide
LTIENPHDQ

SEQ ID NO: 29520 - protein, 9 aa, Artificial Sequence
  Description of Artificial Sequence: Synthetic peptide
LYKEIGENI

SEQ ID NO: 29521 - protein, 9 aa, Artificial Sequence
  Description of Artificial Sequence: Synthetic peptide
NAEEWWSCD

SEQ ID NO: 29522 - protein, 9 aa, Artificial Sequence
  Description of Artificial Sequence: Synthetic peptide
NCVEAGSFA

SEQ ID NO: 29523 - protein, 9 aa, Artificial Sequence
  Description of Artificial Sequence: Synthetic peptide
NMMEYERFS

SEQ ID NO: 29524 - protein, 9 aa, Artificial Sequence
  Description of Artificial Sequence: Synthetic peptide
NNMEDRWGT

SEQ ID NO: 29525 - protein, 9 aa, Artificial Sequence
  Description of Artificial Sequence: Synthetic peptide
NSNEHGAMW

SEQ ID NO: 29526 - protein, 9 aa, Artificial Sequence
  Description of Artificial Sequence: Synthetic peptide
PTCEVPENC

SEQ ID NO: 29527 - protein, 9 aa, Artificial Sequence
  Description of Artificial Sequence: Synthetic peptide
SFIEFPAMT

SEQ ID NO: 29528 - protein, 9 aa, Artificial Sequence
  Description of Artificial Sequence: Synthetic peptide
SIDEQTFPP

SEQ ID NO: 29529 - protein, 9 aa, Artificial Sequence
  Description of Artificial Sequence: Synthetic peptide
SKEEVQYIF

SEQ ID NO: 29530 - protein, 9 aa, Artificial Sequence
  Description of Artificial Sequence: Synthetic peptide
SWTEISSVK

SEQ ID NO: 29531 - protein, 9 aa, Artificial Sequence
  Description of Artificial Sequence: Synthetic peptide
TAAEMIYEY

SEQ ID NO: 29532 - protein, 9 aa, Artificial Sequence
  Description of Artificial Sequence: Synthetic peptide
TWDEQTAQV

SEQ ID NO: 29533 - protein, 9 aa, Artificial Sequence
  Description of Artificial Sequence: Synthetic peptide
TWRECQSSH

SEQ ID NO: 29534 - protein, 9 aa, Artificial Sequence
  Description of Artificial Sequence: Synthetic peptide
VGNEDKCDP

SEQ ID NO: 29535 - protein, 9 aa, Artificial Sequence
  Description of Artificial Sequence: Synthetic peptide
VMIEKTMMH

SEQ ID NO: 29536 - protein, 9 aa, Artificial Sequence
  Description of Artificial Sequence: Synthetic peptide
VPVEVHKQA

SEQ ID NO: 29537 - protein, 9 aa, Artificial Sequence
  Description of Artificial Sequence: Synthetic peptide
WGAENHGPW

SEQ ID NO: 29538 - protein, 9 aa, Artificial Sequence
  Description of Artificial Sequence: Synthetic peptide
WKDEYTVDD

SEQ ID NO: 29539 - protein, 9 aa, Artificial Sequence
  Description of Artificial Sequence: Synthetic peptide
YAREFGNMY

SEQ ID NO: 29540 - protein, 9 aa, Artificial Sequence
  Description of Artificial Sequence: Synthetic peptide
YTDERAMLN

SEQ ID NO: 29541 - protein, 9 aa, Artificial Sequence
  Description of Artificial Sequence: Synthetic peptide
CDAENSDGG

SEQ ID NO: 29542 - protein, 9 aa, Artificial Sequence
  Description of Artificial Sequence: Synthetic peptide
CLDEPRTDF

SEQ ID NO: 29543 - protein, 9 aa, Artificial Sequence
  Description of Artificial Sequence: Synthetic peptide
GHEEYWEHV

SEQ ID NO: 29544 - protein, 9 aa, Artificial Sequence
  Description of Artificial Sequence: Synthetic peptide
HHREQKDHS

SEQ ID NO: 29545 - protein, 9 aa, Artificial Sequence
  Description of Artificial Sequence: Synthetic peptide
HSAEQVLME

SEQ ID NO: 29546 - protein, 9 aa, Artificial Sequence
  Description of Artificial Sequence: Synthetic peptide
MIQEIKEDN

SEQ ID NO: 29547 - protein, 9 aa, Artificial Sequence
  Description of Artificial Sequence: Synthetic peptide
MWCEVMHCS

SEQ ID NO: 29548 - protein, 9 aa, Artificial Sequence
  Description of Artificial Sequence: Synthetic peptide
SCRECDECP

SEQ ID NO: 29549 - protein, 9 aa, Artificial Sequence
  Description of Artificial Sequence: Synthetic peptide
TPDEQSHYD

SEQ ID NO: 29550 - protein, 9 aa, Artificial Sequence
  Description of Artificial Sequence: Synthetic peptide
TTAEYGMSI

SEQ ID NO: 29551 - protein, 9 aa, Artificial Sequence
  Description of Artificial Sequence: Synthetic peptide
AFHHLGEFQ

SEQ ID NO: 29552 - protein, 9 aa, Artificial Sequence
  Description of Artificial Sequence: Synthetic peptide
ALMPLTRWN

SEQ ID NO: 29553 - protein, 9 aa, Artificial Sequence
  Description of Artificial Sequence: Synthetic peptide
AMHSLHYMF

SEQ ID NO: 29554 - protein, 9 aa, Artificial Sequence
  Description of Artificial Sequence: Synthetic peptide
ASEYLASPM

SEQ ID NO: 29555 - protein, 9 aa, Artificial Sequence
  Description of Artificial Sequence: Synthetic peptide
ATTLLHYKN

SEQ ID NO: 29556 - protein, 9 aa, Artificial Sequence
  Description of Artificial Sequence: Synthetic peptide
AWWWLNAQG

SEQ ID NO: 29557 - protein, 9 aa, Artificial Sequence
  Description of Artificial Sequence: Synthetic peptide
CNIQLHTHY

SEQ ID NO: 29558 - protein, 9 aa, Artificial Sequence
  Description of Artificial Sequence: Synthetic peptide
DRVRLMMVA

SEQ ID NO: 29559 - protein, 9 aa, Artificial Sequence
  Description of Artificial Sequence: Synthetic peptide
DWGYLRIWC

SEQ ID NO: 29560 - protein, 9 aa, Artificial Sequence
  Description of Artificial Sequence: Synthetic peptide
DYSKLDVHY

SEQ ID NO: 29561 - protein, 9 aa, Artificial Sequence
  Description of Artificial Sequence: Synthetic peptide
ERSTLPMSR

SEQ ID NO: 29562 - protein, 9 aa, Artificial Sequence
  Description of Artificial Sequence: Synthetic peptide
FADYLAAAS

SEQ ID NO: 29563 - protein, 9 aa, Artificial Sequence
  Description of Artificial Sequence: Synthetic peptide
FPYHLWVGG

SEQ ID NO: 29564 - protein, 9 aa, Artificial Sequence
  Description of Artificial Sequence: Synthetic peptide
GAEKLHLVH

SEQ ID NO: 29565 - protein, 9 aa, Artificial Sequence
  Description of Artificial Sequence: Synthetic peptide
GGIDLTLMM

SEQ ID NO: 29566 - protein, 9 aa, Artificial Sequence
  Description of Artificial Sequence: Synthetic peptide
HADCLELSC

SEQ ID NO: 29567 - protein, 9 aa, Artificial Sequence
  Description of Artificial Sequence: Synthetic peptide
HGEDLNEFL

SEQ ID NO: 29568 - protein, 9 aa, Artificial Sequence
  Description of Artificial Sequence: Synthetic peptide
HHDDLAPWQ

SEQ ID NO: 29569 - protein, 9 aa, Artificial Sequence
  Description of Artificial Sequence: Synthetic peptide
IICTLSLDS

SEQ ID NO: 29570 - protein, 9 aa, Artificial Sequence
  Description of Artificial Sequence: Synthetic peptide
ILNVLESWE

SEQ ID NO: 29571 - protein, 9 aa, Artificial Sequence
  Description of Artificial Sequence: Synthetic peptide
KERRLWSGV

SEQ ID NO: 29572 - protein, 9 aa, Artificial Sequence
  Description of Artificial Sequence: Synthetic peptide
LFDRLKLNE

SEQ ID NO: 29573 - protein, 9 aa, Artificial Sequence
  Description of Artificial Sequence: Synthetic peptide
LRSMLASYD

SEQ ID NO: 29574 - protein, 9 aa, Artificial Sequence
  Description of Artificial Sequence: Synthetic peptide
MHGHLTQSI

SEQ ID NO: 29575 - protein, 9 aa, Artificial Sequence
  Description of Artificial Sequence: Synthetic peptide
MSISLWGNA

SEQ ID NO: 29576 - protein, 9 aa, Artificial Sequence
  Description of Artificial Sequence: Synthetic peptide
PENPLVTMS

SEQ ID NO: 29577 - protein, 9 aa, Artificial Sequence
  Description of Artificial Sequence: Synthetic peptide
RNTCLNTGD

SEQ ID NO: 29578 - protein, 9 aa, Artificial Sequence
  Description of Artificial Sequence: Synthetic peptide
SLSRLYWSN

SEQ ID NO: 29579 - protein, 9 aa, Artificial Sequence
  Description of Artificial Sequence: Synthetic peptide
TIRSLEMVW

SEQ ID NO: 29580 - protein, 9 aa, Artificial Sequence
  Description of Artificial Sequence: Synthetic peptide
VGIPLQAHC

SEQ ID NO: 29581 - protein, 9 aa, Artificial Sequence
  Description of Artificial Sequence: Synthetic peptide
VMDGLGLVL

SEQ ID NO: 29582 - protein, 9 aa, Artificial Sequence
  Description of Artificial Sequence: Synthetic peptide
VTGFLMIPT

SEQ ID NO: 29583 - protein, 9 aa, Artificial Sequence
  Description of Artificial Sequence: Synthetic peptide
VTRDLQKEQ

SEQ ID NO: 29584 - protein, 9 aa, Artificial Sequence
  Description of Artificial Sequence: Synthetic peptide
VYDYLINGA

SEQ ID NO: 29585 - protein, 9 aa, Artificial Sequence
  Description of Artificial Sequence: Synthetic peptide
WHGRLMITC

SEQ ID NO: 29586 - protein, 9 aa, Artificial Sequence
  Description of Artificial Sequence: Synthetic peptide
WYQFLDNQL

SEQ ID NO: 29587 - protein, 9 aa, Artificial Sequence
  Description of Artificial Sequence: Synthetic peptide
YACLLDTLG

SEQ ID NO: 29588 - protein, 9 aa, Artificial Sequence
  Description of Artificial Sequence: Synthetic peptide
YSYSLMSGW

SEQ ID NO: 29589 - protein, 9 aa, Artificial Sequence
  Description of Artificial Sequence: Synthetic peptide
DKINLAVSY

SEQ ID NO: 29590 - protein, 9 aa, Artificial Sequence
  Description of Artificial Sequence: Synthetic peptide
HMEWLEEQA

SEQ ID NO: 29591 - protein, 9 aa, Artificial Sequence
  Description of Artificial Sequence: Synthetic peptide
ITVALNQGW

SEQ ID NO: 29592 - protein, 9 aa, Artificial Sequence
  Description of Artificial Sequence: Synthetic peptide
KCADLIIRS

SEQ ID NO: 29593 - protein, 9 aa, Artificial Sequence
  Description of Artificial Sequence: Synthetic peptide
HATGLVNFM

SEQ ID NO: 29594 - protein, 9 aa, Artificial Sequence
  Description of Artificial Sequence: Synthetic peptide
ATMNLSWGL

SEQ ID NO: 29595 - protein, 9 aa, Artificial Sequence
  Description of Artificial Sequence: Synthetic peptide
TYESLQNSW

SEQ ID NO: 29596 - protein, 9 aa, Artificial Sequence
  Description of Artificial Sequence: Synthetic peptide
NLSNLVSCR

SEQ ID NO: 29597 - protein, 9 aa, Artificial Sequence
  Description of Artificial Sequence: Synthetic peptide
ALDALHYCS

SEQ ID NO: 29598 - protein, 9 aa, Artificial Sequence
  Description of Artificial Sequence: Synthetic peptide
ANIGLETGV

SEQ ID NO: 29599 - protein, 9 aa, Artificial Sequence
  Description of Artificial Sequence: Synthetic peptide
ARVDLMSHQ

SEQ ID NO: 29600 - protein, 9 aa, Artificial Sequence
  Description of Artificial Sequence: Synthetic peptide
AWTGLHVCN

SEQ ID NO: 29601 - protein, 9 aa, Artificial Sequence
  Description of Artificial Sequence: Synthetic peptide
CRDGLPHTV

SEQ ID NO: 29602 - protein, 9 aa, Artificial Sequence
  Description of Artificial Sequence: Synthetic peptide
CTFWLYFFR

SEQ ID NO: 29603 - protein, 9 aa, Artificial Sequence
  Description of Artificial Sequence: Synthetic peptide
DFNYLNWFC

SEQ ID NO: 29604 - protein, 9 aa, Artificial Sequence
  Description of Artificial Sequence: Synthetic peptide
DILDLVNSF

SEQ ID NO: 29605 - protein, 9 aa, Artificial Sequence
  Description of Artificial Sequence: Synthetic peptide
DIYQLHPSY

SEQ ID NO: 29606 - protein, 9 aa, Artificial Sequence
  Description of Artificial Sequence: Synthetic peptide
DLFCLNYDF

SEQ ID NO: 29607 - protein, 9 aa, Artificial Sequence
  Description of Artificial Sequence: Synthetic peptide
DQHKLTVEN

SEQ ID NO: 29608 - protein, 9 aa, Artificial Sequence
  Description of Artificial Sequence: Synthetic peptide
DTDTLMNSG

SEQ ID NO: 29609 - protein, 9 aa, Artificial Sequence
  Description of Artificial Sequence: Synthetic peptide
DTELLLVQE

SEQ ID NO: 29610 - protein, 9 aa, Artificial Sequence
  Description of Artificial Sequence: Synthetic peptide
DYMLLQGVY

SEQ ID NO: 29611 - protein, 9 aa, Artificial Sequence
  Description of Artificial Sequence: Synthetic peptide
ECHLLEEQR

SEQ ID NO: 29612 - protein, 9 aa, Artificial Sequence
  Description of Artificial Sequence: Synthetic peptide
ECRSLCFQH

SEQ ID NO: 29613 - protein, 9 aa, Artificial Sequence
  Description of Artificial Sequence: Synthetic peptide
EDRDLSWTF

SEQ ID NO: 29614 - protein, 9 aa, Artificial Sequence
  Description of Artificial Sequence: Synthetic peptide
EGMILDHTP

SEQ ID NO: 29615 - protein, 9 aa, Artificial Sequence
  Description of Artificial Sequence: Synthetic peptide
EKANLTYGV

SEQ ID NO: 29616 - protein, 9 aa, Artificial Sequence
  Description of Artificial Sequence: Synthetic peptide
EKRSLPACM

SEQ ID NO: 29617 - protein, 9 aa, Artificial Sequence
  Description of Artificial Sequence: Synthetic peptide
EPHSLDICL

SEQ ID NO: 29618 - protein, 9 aa, Artificial Sequence
  Description of Artificial Sequence: Synthetic peptide
EYFVLHVYD

SEQ ID NO: 29619 - protein, 9 aa, Artificial Sequence
  Description of Artificial Sequence: Synthetic peptide
EYNSLLCHF

SEQ ID NO: 29620 - protein, 9 aa, Artificial Sequence
  Description of Artificial Sequence: Synthetic peptide
FRKLLTRRF

SEQ ID NO: 29621 - protein, 9 aa, Artificial Sequence
  Description of Artificial Sequence: Synthetic peptide
FWCYLVLMV

SEQ ID NO: 29622 - protein, 9 aa, Artificial Sequence
  Description of Artificial Sequence: Synthetic peptide
GEDTLAAWG

SEQ ID NO: 29623 - protein, 9 aa, Artificial Sequence
  Description of Artificial Sequence: Synthetic peptide
GGEFLAVAY

SEQ ID NO: 29624 - protein, 9 aa, Artificial Sequence
  Description of Artificial Sequence: Synthetic peptide
HHMQLLRSG

SEQ ID NO: 29625 - protein, 9 aa, Artificial Sequence
  Description of Artificial Sequence: Synthetic peptide
HPGKLFETH

SEQ ID NO: 29626 - protein, 9 aa, Artificial Sequence
  Description of Artificial Sequence: Synthetic peptide
IGTALERQG

SEQ ID NO: 29627 - protein, 9 aa, Artificial Sequence
  Description of Artificial Sequence: Synthetic peptide
KIVVLAKGE

SEQ ID NO: 29628 - protein, 9 aa, Artificial Sequence
  Description of Artificial Sequence: Synthetic peptide
KQTVLHVHH

SEQ ID NO: 29629 - protein, 9 aa, Artificial Sequence
  Description of Artificial Sequence: Synthetic peptide
KSLPLHDHF

SEQ ID NO: 29630 - protein, 9 aa, Artificial Sequence
  Description of Artificial Sequence: Synthetic peptide
LFTCLQEQE

SEQ ID NO: 29631 - protein, 9 aa, Artificial Sequence
  Description of Artificial Sequence: Synthetic peptide
LSGWLSQFG

SEQ ID NO: 29632 - protein, 9 aa, Artificial Sequence
  Description of Artificial Sequence: Synthetic peptide
LTTHLPEWN

SEQ ID NO: 29633 - protein, 9 aa, Artificial Sequence
  Description of Artificial Sequence: Synthetic peptide
MKTVLYVGD

SEQ ID NO: 29634 - protein, 9 aa, Artificial Sequence
  Description of Artificial Sequence: Synthetic peptide
MNLHLPQWG

SEQ ID NO: 29635 - protein, 9 aa, Artificial Sequence
  Description of Artificial Sequence: Synthetic peptide
NFHSLESTP

SEQ ID NO: 29636 - protein, 9 aa, Artificial Sequence
  Description of Artificial Sequence: Synthetic peptide
NTVTLVQHE

SEQ ID NO: 29637 - protein, 9 aa, Artificial Sequence
  Description of Artificial Sequence: Synthetic peptide
NYGKLGKSY

SEQ ID NO: 29638 - protein, 9 aa, Artificial Sequence
  Description of Artificial Sequence: Synthetic peptide
PMDSLTRVY

SEQ ID NO: 29639 - protein, 9 aa, Artificial Sequence
  Description of Artificial Sequence: Synthetic peptide
PWQNLAVNH

SEQ ID NO: 29640 - protein, 9 aa, Artificial Sequence
  Description of Artificial Sequence: Synthetic peptide
RWQDLLNTG

SEQ ID NO: 29641 - protein, 9 aa, Artificial Sequence
  Description of Artificial Sequence: Synthetic peptide
SQMHLFTSW

SEQ ID NO: 29642 - protein, 9 aa, Artificial Sequence
  Description of Artificial Sequence: Synthetic peptide
SSFILLDHQ

SEQ ID NO: 29643 - protein, 9 aa, Artificial Sequence
  Description of Artificial Sequence: Synthetic peptide
TFNKLSCMW

SEQ ID NO: 29644 - protein, 9 aa, Artificial Sequence
  Description of Artificial Sequence: Synthetic peptide
THAMLDRNF

SEQ ID NO: 29645 - protein, 9 aa, Artificial Sequence
  Description of Artificial Sequence: Synthetic peptide
TQEALMDGQ

SEQ ID NO: 29646 - protein, 9 aa, Artificial Sequence
  Description of Artificial Sequence: Synthetic peptide
TQTNLAECA

SEQ ID NO: 29647 - protein, 9 aa, Artificial Sequence
  Description of Artificial Sequence: Synthetic peptide
TSQLLMHGN

SEQ ID NO: 29648 - protein, 9 aa, Artificial Sequence
  Description of Artificial Sequence: Synthetic peptide
TWGLLWKQY

SEQ ID NO: 29649 - protein, 9 aa, Artificial Sequence
  Description of Artificial Sequence: Synthetic peptide
VKLKLSEGQ

SEQ ID NO: 29650 - protein, 9 aa, Artificial Sequence
  Description of Artificial Sequence: Synthetic peptide
YTYALAHAT

SEQ ID NO: 29651 - protein, 9 aa, Artificial Sequence
  Description of Artificial Sequence: Synthetic peptide
YYNNLNIHT

SEQ ID NO: 29652 - protein, 9 aa, Artificial Sequence
  Description of Artificial Sequence: Synthetic peptide
AHAMLDRNF

SEQ ID NO: 29653 - protein, 9 aa, Artificial Sequence
  Description of Artificial Sequence: Synthetic peptide
DYKYLSCQY

SEQ ID NO: 29654 - protein, 9 aa, Artificial Sequence
  Description of Artificial Sequence: Synthetic peptide
EEMHLDNAL

SEQ ID NO: 29655 - protein, 9 aa, Artificial Sequence
  Description of Artificial Sequence: Synthetic peptide
ENHNLENHG

SEQ ID NO: 29656 - protein, 9 aa, Artificial Sequence
  Description of Artificial Sequence: Synthetic peptide
EQTVLHVHH

SEQ ID NO: 29657 - protein, 9 aa, Artificial Sequence
  Description of Artificial Sequence: Synthetic peptide
HNIDLQNWD

SEQ ID NO: 29658 - protein, 9 aa, Artificial Sequence
  Description of Artificial Sequence: Synthetic peptide
IDTLLYHAI

SEQ ID NO: 29659 - protein, 9 aa, Artificial Sequence
  Description of Artificial Sequence: Synthetic peptide
KCEWLQWVP

SEQ ID NO: 29660 - protein, 9 aa, Artificial Sequence
  Description of Artificial Sequence: Synthetic peptide
KPHPLDPFR

SEQ ID NO: 29661 - protein, 9 aa, Artificial Sequence
  Description of Artificial Sequence: Synthetic peptide
LCSILVHWS

SEQ ID NO: 29662 - protein, 9 aa, Artificial Sequence
  Description of Artificial Sequence: Synthetic peptide
MHGPLYCAE

SEQ ID NO: 29663 - protein, 9 aa, Artificial Sequence
  Description of Artificial Sequence: Synthetic peptide
MWGGLDMVY

SEQ ID NO: 29664 - protein, 9 aa, Artificial Sequence
  Description of Artificial Sequence: Synthetic peptide
NRAQLCRCN

SEQ ID NO: 29665 - protein, 9 aa, Artificial Sequence
  Description of Artificial Sequence: Synthetic peptide
TAMWLHNMV

SEQ ID NO: 29666 - protein, 9 aa, Artificial Sequence
  Description of Artificial Sequence: Synthetic peptide
TAVALFEMD

SEQ ID NO: 29667 - protein, 9 aa, Artificial Sequence
  Description of Artificial Sequence: Synthetic peptide
TNVGLIDGS

SEQ ID NO: 29668 - protein, 9 aa, Artificial Sequence
  Description of Artificial Sequence: Synthetic peptide
VQEWLGLYC

SEQ ID NO: 29669 - protein, 9 aa, Artificial Sequence
  Description of Artificial Sequence: Synthetic peptide
CDGHDPFWY

SEQ ID NO: 29670 - protein, 9 aa, Artificial Sequence
  Description of Artificial Sequence: Synthetic peptide
CEEKTPVWC

SEQ ID NO: 29671 - protein, 9 aa, Artificial Sequence
  Description of Artificial Sequence: Synthetic peptide
CIYLKPDYQ

SEQ ID NO: 29672 - protein, 9 aa, Artificial Sequence
  Description of Artificial Sequence: Synthetic peptide
CLQHMPRLQ

SEQ ID NO: 29673 - protein, 9 aa, Artificial Sequence
  Description of Artificial Sequence: Synthetic peptide
DARSSPDCL

SEQ ID NO: 29674 - protein, 9 aa, Artificial Sequence
  Description of Artificial Sequence: Synthetic peptide
DPWHEPSMG

SEQ ID NO: 29675 - protein, 9 aa, Artificial Sequence
  Description of Artificial Sequence: Synthetic peptide
DRHTKPNST

SEQ ID NO: 29676 - protein, 9 aa, Artificial Sequence
  Description of Artificial Sequence: Synthetic peptide
ETMYWPAMD

SEQ ID NO: 29677 - protein, 9 aa, Artificial Sequence
  Description of Artificial Sequence: Synthetic peptide
FFRDCPYEY

SEQ ID NO: 29678 - protein, 9 aa, Artificial Sequence
  Description of Artificial Sequence: Synthetic peptide
GNNRNPTYW

SEQ ID NO: 29679 - protein, 9 aa, Artificial Sequence
  Description of Artificial Sequence: Synthetic peptide
GTSDFPEAV

SEQ ID NO: 29680 - protein, 9 aa, Artificial Sequence
  Description of Artificial Sequence: Synthetic peptide
HNLKIPMME

SEQ ID NO: 29681 - protein, 9 aa, Artificial Sequence
  Description of Artificial Sequence: Synthetic peptide
IASHNPSKQ

SEQ ID NO: 29682 - protein, 9 aa, Artificial Sequence
  Description of Artificial Sequence: Synthetic peptide
IDFRPPNNT

SEQ ID NO: 29683 - protein, 9 aa, Artificial Sequence
  Description of Artificial Sequence: Synthetic peptide
IPNGPPNNQ

SEQ ID NO: 29684 - protein, 9 aa, Artificial Sequence
  Description of Artificial Sequence: Synthetic peptide
LGFRKPFTR

SEQ ID NO: 29685 - protein, 9 aa, Artificial Sequence
  Description of Artificial Sequence: Synthetic peptide
LQYTFPIGQ

SEQ ID NO: 29686 - protein, 9 aa, Artificial Sequence
  Description of Artificial Sequence: Synthetic peptide
LTEATPKWA

SEQ ID NO: 29687 - protein, 9 aa, Artificial Sequence
  Description of Artificial Sequence: Synthetic peptide
MFQYYPYCD

SEQ ID NO: 29688 - protein, 9 aa, Artificial Sequence
  Description of Artificial Sequence: Synthetic peptide
MGEDRPSMT

SEQ ID NO: 29689 - protein, 9 aa, Artificial Sequence
  Description of Artificial Sequence: Synthetic peptide
MHFKYPQGG

SEQ ID NO: 29690 - protein, 9 aa, Artificial Sequence
  Description of Artificial Sequence: Synthetic peptide
MPDMDPAAL

SEQ ID NO: 29691 - protein, 9 aa, Artificial Sequence
  Description of Artificial Sequence: Synthetic peptide
PQHISPDPT

SEQ ID NO: 29692 - protein, 9 aa, Artificial Sequence
  Description of Artificial Sequence: Synthetic peptide
PYDMIPCNR

SEQ ID NO: 29693 - protein, 9 aa, Artificial Sequence
  Description of Artificial Sequence: Synthetic peptide
SAAFQPRAS

SEQ ID NO: 29694 - protein, 9 aa, Artificial Sequence
  Description of Artificial Sequence: Synthetic peptide
SRQPVPLSK

SEQ ID NO: 29695 - protein, 9 aa, Artificial Sequence
  Description of Artificial Sequence: Synthetic peptide
STARQPALE

SEQ ID NO: 29696 - protein, 9 aa, Artificial Sequence
  Description of Artificial Sequence: Synthetic peptide
SWYMPPMYC

SEQ ID NO: 29697 - protein, 9 aa, Artificial Sequence
  Description of Artificial Sequence: Synthetic peptide
TIFQPPFHY

SEQ ID NO: 29698 - protein, 9 aa, Artificial Sequence
  Description of Artificial Sequence: Synthetic peptide
VMDTTPLHF

SEQ ID NO: 29699 - protein, 9 aa, Artificial Sequence
  Description of Artificial Sequence: Synthetic peptide
WAVLGPQKF

SEQ ID NO: 29700 - protein, 9 aa, Artificial Sequence
  Description of Artificial Sequence: Synthetic peptide
WSGFHPPTM

SEQ ID NO: 29701 - protein, 9 aa, Artificial Sequence
  Description of Artificial Sequence: Synthetic peptide
WTVLGPQKF

SEQ ID NO: 29702 - protein, 9 aa, Artificial Sequence
  Description of Artificial Sequence: Synthetic peptide
YANFSPLWS

SEQ ID NO: 29703 - protein, 9 aa, Artificial Sequence
  Description of Artificial Sequence: Synthetic peptide
SNTPMPYHG

SEQ ID NO: 29704 - protein, 9 aa, Artificial Sequence
  Description of Artificial Sequence: Synthetic peptide
TFVRKPSLM

SEQ ID NO: 29705 - protein, 9 aa, Artificial Sequence
  Description of Artificial Sequence: Synthetic peptide
KDGRNPHCL

SEQ ID NO: 29706 - protein, 9 aa, Artificial Sequence
  Description of Artificial Sequence: Synthetic peptide
TCEDDPSLR

SEQ ID NO: 29707 - protein, 9 aa, Artificial Sequence
  Description of Artificial Sequence: Synthetic peptide
CWMIVPAWH

SEQ ID NO: 29708 - protein, 9 aa, Artificial Sequence
  Description of Artificial Sequence: Synthetic peptide
AAEPIPTWP

SEQ ID NO: 29709 - protein, 9 aa, Artificial Sequence
  Description of Artificial Sequence: Synthetic peptide
CHCMWPSGV

SEQ ID NO: 29710 - protein, 9 aa, Artificial Sequence
  Description of Artificial Sequence: Synthetic peptide
CSENEPFHR

SEQ ID NO: 29711 - protein, 9 aa, Artificial Sequence
  Description of Artificial Sequence: Synthetic peptide
DMGHCPHDM

SEQ ID NO: 29712 - protein, 9 aa, Artificial Sequence
  Description of Artificial Sequence: Synthetic peptide
DSDNIPYCP

SEQ ID NO: 29713 - protein, 9 aa, Artificial Sequence
  Description of Artificial Sequence: Synthetic peptide
DSWRFPGHP

SEQ ID NO: 29714 - protein, 9 aa, Artificial Sequence
  Description of Artificial Sequence: Synthetic peptide
DSYVTPYFT

SEQ ID NO: 29715 - protein, 9 aa, Artificial Sequence
  Description of Artificial Sequence: Synthetic peptide
DTGSTPVGT

SEQ ID NO: 29716 - protein, 9 aa, Artificial Sequence
  Description of Artificial Sequence: Synthetic peptide
EINPEPNWK

SEQ ID NO: 29717 - protein, 9 aa, Artificial Sequence
  Description of Artificial Sequence: Synthetic peptide
FKLWNPDSI

SEQ ID NO: 29718 - protein, 9 aa, Artificial Sequence
  Description of Artificial Sequence: Synthetic peptide
FWRSVPEYW

SEQ ID NO: 29719 - protein, 9 aa, Artificial Sequence
  Description of Artificial Sequence: Synthetic peptide
GISSWPSAH

SEQ ID NO: 29720 - protein, 9 aa, Artificial Sequence
  Description of Artificial Sequence: Synthetic peptide
GPNTHPHMA

SEQ ID NO: 29721 - protein, 9 aa, Artificial Sequence
  Description of Artificial Sequence: Synthetic peptide
GSSYVPICF

SEQ ID NO: 29722 - protein, 9 aa, Artificial Sequence
  Description of Artificial Sequence: Synthetic peptide
GTDACPLHL

SEQ ID NO: 29723 - protein, 9 aa, Artificial Sequence
  Description of Artificial Sequence: Synthetic peptide
GTNGVPKVN

SEQ ID NO: 29724 - protein, 9 aa, Artificial Sequence
  Description of Artificial Sequence: Synthetic peptide
HDYPTPKMY

SEQ ID NO: 29725 - protein, 9 aa, Artificial Sequence
  Description of Artificial Sequence: Synthetic peptide
HMTFKPTAQ

SEQ ID NO: 29726 - protein, 9 aa, Artificial Sequence
  Description of Artificial Sequence: Synthetic peptide
HQYNEPHVS

SEQ ID NO: 29727 - protein, 9 aa, Artificial Sequence
  Description of Artificial Sequence: Synthetic peptide
ICTNYPKMD

SEQ ID NO: 29728 - protein, 9 aa, Artificial Sequence
  Description of Artificial Sequence: Synthetic peptide
IHLMKPAHI

SEQ ID NO: 29729 - protein, 9 aa, Artificial Sequence
  Description of Artificial Sequence: Synthetic peptide
IHNKFPLTM

SEQ ID NO: 29730 - protein, 9 aa, Artificial Sequence
  Description of Artificial Sequence: Synthetic peptide
LKDFDPAIH

SEQ ID NO: 29731 - protein, 9 aa, Artificial Sequence
  Description of Artificial Sequence: Synthetic peptide
LKVLWPTEM

SEQ ID NO: 29732 - protein, 9 aa, Artificial Sequence
  Description of Artificial Sequence: Synthetic peptide
MHLRDPHQH

SEQ ID NO: 29733 - protein, 9 aa, Artificial Sequence
  Description of Artificial Sequence: Synthetic peptide
MMHGYPFYP

SEQ ID NO: 29734 - protein, 9 aa, Artificial Sequence
  Description of Artificial Sequence: Synthetic peptide
MNWLVPYSD

SEQ ID NO: 29735 - protein, 9 aa, Artificial Sequence
  Description of Artificial Sequence: Synthetic peptide
NAMAIPKEC

SEQ ID NO: 29736 - protein, 9 aa, Artificial Sequence
  Description of Artificial Sequence: Synthetic peptide
NDAGEPTRE

SEQ ID NO: 29737 - protein, 9 aa, Artificial Sequence
  Description of Artificial Sequence: Synthetic peptide
RAMMRPHGE

SEQ ID NO: 29738 - protein, 9 aa, Artificial Sequence
  Description of Artificial Sequence: Synthetic peptide
RMEYPPEQF

SEQ ID NO: 29739 - protein, 9 aa, Artificial Sequence
  Description of Artificial Sequence: Synthetic peptide
SCTHDPTQL

SEQ ID NO: 29740 - protein, 9 aa, Artificial Sequence
  Description of Artificial Sequence: Synthetic peptide
SSQPVPVPV

SEQ ID NO: 29741 - protein, 9 aa, Artificial Sequence
  Description of Artificial Sequence: Synthetic peptide
STYHTPFNN

SEQ ID NO: 29742 - protein, 9 aa, Artificial Sequence
  Description of Artificial Sequence: Synthetic peptide
TCVMEPCIC

SEQ ID NO: 29743 - protein, 9 aa, Artificial Sequence
  Description of Artificial Sequence: Synthetic peptide
TIQRYPDYG

SEQ ID NO: 29744 - protein, 9 aa, Artificial Sequence
  Description of Artificial Sequence: Synthetic peptide
TNQPFPSSE

SEQ ID NO: 29745 - protein, 9 aa, Artificial Sequence
  Description of Artificial Sequence: Synthetic peptide
TQNLEPHWN

SEQ ID NO: 29746 - protein, 9 aa, Artificial Sequence
  Description of Artificial Sequence: Synthetic peptide
TSDQYPSSY

SEQ ID NO: 29747 - protein, 9 aa, Artificial Sequence
  Description of Artificial Sequence: Synthetic peptide
TTARRPTYD

SEQ ID NO: 29748 - protein, 9 aa, Artificial Sequence
  Description of Artificial Sequence: Synthetic peptide
VAMAHPMTV

SEQ ID NO: 29749 - protein, 9 aa, Artificial Sequence
  Description of Artificial Sequence: Synthetic peptide
VAVDSPHEM

SEQ ID NO: 29750 - protein, 9 aa, Artificial Sequence
  Description of Artificial Sequence: Synthetic peptide
VLGRSPQVM

SEQ ID NO: 29751 - protein, 9 aa, Artificial Sequence
  Description of Artificial Sequence: Synthetic peptide
WTYAPPLNY

SEQ ID NO: 29752 - protein, 9 aa, Artificial Sequence
  Description of Artificial Sequence: Synthetic peptide
AHSHMPVCL

SEQ ID NO: 29753 - protein, 9 aa, Artificial Sequence
  Description of Artificial Sequence: Synthetic peptide
CKDLSPYKF

SEQ ID NO: 29754 - protein, 9 aa, Artificial Sequence
  Description of Artificial Sequence: Synthetic peptide
EEMQYPMFM

SEQ ID NO: 29755 - protein, 9 aa, Artificial Sequence
  Description of Artificial Sequence: Synthetic peptide
ETCKMPLSD

SEQ ID NO: 29756 - protein, 9 aa, Artificial Sequence
  Description of Artificial Sequence: Synthetic peptide
HHELDPDWE

SEQ ID NO: 29757 - protein, 9 aa, Artificial Sequence
  Description of Artificial Sequence: Synthetic peptide
IPHNEPKAG

SEQ ID NO: 29758 - protein, 9 aa, Artificial Sequence
  Description of Artificial Sequence: Synthetic peptide
KECFIPCAF

SEQ ID NO: 29759 - protein, 9 aa, Artificial Sequence
  Description of Artificial Sequence: Synthetic peptide
MTRIRPDAN

SEQ ID NO: 29760 - protein, 9 aa, Artificial Sequence
  Description of Artificial Sequence: Synthetic peptide
WKAPGPITR

SEQ ID NO: 29761 - protein, 9 aa, Artificial Sequence
  Description of Artificial Sequence: Synthetic peptide
AEHSPHHDF

SEQ ID NO: 29762 - protein, 9 aa, Artificial Sequence
  Description of Artificial Sequence: Synthetic peptide
ASALHCHNQ

SEQ ID NO: 29763 - protein, 9 aa, Artificial Sequence
  Description of Artificial Sequence: Synthetic peptide
ATADNHHPR

SEQ ID NO: 29764 - protein, 9 aa, Artificial Sequence
  Description of Artificial Sequence: Synthetic peptide
CSSLYSHMP

SEQ ID NO: 29765 - protein, 9 aa, Artificial Sequence
  Description of Artificial Sequence: Synthetic peptide
DMCKYSHFV

SEQ ID NO: 29766 - protein, 9 aa, Artificial Sequence
  Description of Artificial Sequence: Synthetic peptide
ETHTRAHDC

SEQ ID NO: 29767 - protein, 9 aa, Artificial Sequence
  Description of Artificial Sequence: Synthetic peptide
ETIFVDHLN

SEQ ID NO: 29768 - protein, 9 aa, Artificial Sequence
  Description of Artificial Sequence: Synthetic peptide
FNIHICHFI

SEQ ID NO: 29769 - protein, 9 aa, Artificial Sequence
  Description of Artificial Sequence: Synthetic peptide
GEASMEHMQ

SEQ ID NO: 29770 - protein, 9 aa, Artificial Sequence
  Description of Artificial Sequence: Synthetic peptide
GRIFSKHPD

SEQ ID NO: 29771 - protein, 9 aa, Artificial Sequence
  Description of Artificial Sequence: Synthetic peptide
GSNQIQHGN

SEQ ID NO: 29772 - protein, 9 aa, Artificial Sequence
  Description of Artificial Sequence: Synthetic peptide
GYQPDQHCP

SEQ ID NO: 29773 - protein, 9 aa, Artificial Sequence
  Description of Artificial Sequence: Synthetic peptide
HRLIEQHDT

SEQ ID NO: 29774 - protein, 9 aa, Artificial Sequence
  Description of Artificial Sequence: Synthetic peptide
IMMLMSHLE

SEQ ID NO: 29775 - protein, 9 aa, Artificial Sequence
  Description of Artificial Sequence: Synthetic peptide
ITCKFTHNG

SEQ ID NO: 29776 - protein, 9 aa, Artificial Sequence
  Description of Artificial Sequence: Synthetic peptide
ITQHMNHFQ

SEQ ID NO: 29777 - protein, 9 aa, Artificial Sequence
  Description of Artificial Sequence: Synthetic peptide
ITSWMAHPQ

SEQ ID NO: 29778 - protein, 9 aa, Artificial Sequence
  Description of Artificial Sequence: Synthetic peptide
KEAVMNHWT

SEQ ID NO: 29779 - protein, 9 aa, Artificial Sequence
  Description of Artificial Sequence: Synthetic peptide
KLFPWEHFG

SEQ ID NO: 29780 - protein, 9 aa, Artificial Sequence
  Description of Artificial Sequence: Synthetic peptide
KLMFWIHHT

SEQ ID NO: 29781 - protein, 9 aa, Artificial Sequence
  Description of Artificial Sequence: Synthetic peptide
KRMQPEHCA

SEQ ID NO: 29782 - protein, 9 aa, Artificial Sequence
  Description of Artificial Sequence: Synthetic peptide
KTDHERHAY

SEQ ID NO: 29783 - protein, 9 aa, Artificial Sequence
  Description of Artificial Sequence: Synthetic peptide
KTWLPYHTW

SEQ ID NO: 29784 - protein, 9 aa, Artificial Sequence
  Description of Artificial Sequence: Synthetic peptide
KWLWNWHDW

SEQ ID NO: 29785 - protein, 9 aa, Artificial Sequence
  Description of Artificial Sequence: Synthetic peptide
LCLSACHFE

SEQ ID NO: 29786 - protein, 9 aa, Artificial Sequence
  Description of Artificial Sequence: Synthetic peptide
LHDNYCHET

SEQ ID NO: 29787 - protein, 9 aa, Artificial Sequence
  Description of Artificial Sequence: Synthetic peptide
LSQDVHHDT

SEQ ID NO: 29788 - protein, 9 aa, Artificial Sequence
  Description of Artificial Sequence: Synthetic peptide
MAFFSMHQG

SEQ ID NO: 29789 - protein, 9 aa, Artificial Sequence
  Description of Artificial Sequence: Synthetic peptide
MCTDYGHEG

SEQ ID NO: 29790 - protein, 9 aa, Artificial Sequence
  Description of Artificial Sequence: Synthetic peptide
MLKCNFHHQ

SEQ ID NO: 29791 - protein, 9 aa, Artificial Sequence
  Description of Artificial Sequence: Synthetic peptide
MPEPRIHTR

SEQ ID NO: 29792 - protein, 9 aa, Artificial Sequence
  Description of Artificial Sequence: Synthetic peptide
MSCPHFHVG

SEQ ID NO: 29793 - protein, 9 aa, Artificial Sequence
  Description of Artificial Sequence: Synthetic peptide
NFEVCQHCE

SEQ ID NO: 29794 - protein, 9 aa, Artificial Sequence
  Description of Artificial Sequence: Synthetic peptide
NHQNWMHMD

SEQ ID NO: 29795 - protein, 9 aa, Artificial Sequence
  Description of Artificial Sequence: Synthetic peptide
RFILELHDS

SEQ ID NO: 29796 - protein, 9 aa, Artificial Sequence
  Description of Artificial Sequence: Synthetic peptide
RPVNGVHLH

SEQ ID NO: 29797 - protein, 9 aa, Artificial Sequence
  Description of Artificial Sequence: Synthetic peptide
SAGQIMHNS

SEQ ID NO: 29798 - protein, 9 aa, Artificial Sequence
  Description of Artificial Sequence: Synthetic peptide
SWTWDWHVA

SEQ ID NO: 29799 - protein, 9 aa, Artificial Sequence
  Description of Artificial Sequence: Synthetic peptide
THQADEHDA

SEQ ID NO: 29800 - protein, 9 aa, Artificial Sequence
  Description of Artificial Sequence: Synthetic peptide
TTIQSNHCK

SEQ ID NO: 29801 - protein, 9 aa, Artificial Sequence
  Description of Artificial Sequence: Synthetic peptide
TTMQQGHDL

SEQ ID NO: 29802 - protein, 9 aa, Artificial Sequence
  Description of Artificial Sequence: Synthetic peptide
WSANQMHSH

SEQ ID NO: 29803 - protein, 9 aa, Artificial Sequence
  Description of Artificial Sequence: Synthetic peptide
YIERTNHTP

SEQ ID NO: 29804 - protein, 9 aa, Artificial Sequence
  Description of Artificial Sequence: Synthetic peptide
FRDVCMHDV

SEQ ID NO: 29805 - protein, 9 aa, Artificial Sequence
  Description of Artificial Sequence: Synthetic peptide
FANDFTHNM

SEQ ID NO: 29806 - protein, 9 aa, Artificial Sequence
  Description of Artificial Sequence: Synthetic peptide
GQLSTQHHM

SEQ ID NO: 29807 - protein, 9 aa, Artificial Sequence
  Description of Artificial Sequence: Synthetic peptide
ASKQGTHDY

SEQ ID NO: 29808 - protein, 9 aa, Artificial Sequence
  Description of Artificial Sequence: Synthetic peptide
AAEPYKHSK

SEQ ID NO: 29809 - protein, 9 aa, Artificial Sequence
  Description of Artificial Sequence: Synthetic peptide
ASNTYDHSL

SEQ ID NO: 29810 - protein, 9 aa, Artificial Sequence
  Description of Artificial Sequence: Synthetic peptide
CAMPGSHQI

SEQ ID NO: 29811 - protein, 9 aa, Artificial Sequence
  Description of Artificial Sequence: Synthetic peptide
CDVKDAHHD

SEQ ID NO: 29812 - protein, 9 aa, Artificial Sequence
  Description of Artificial Sequence: Synthetic peptide
DGCDMTHTR

SEQ ID NO: 29813 - protein, 9 aa, Artificial Sequence
  Description of Artificial Sequence: Synthetic peptide
DGWLYQHTY

SEQ ID NO: 29814 - protein, 9 aa, Artificial Sequence
  Description of Artificial Sequence: Synthetic peptide
DTMSKNHCT

SEQ ID NO: 29815 - protein, 9 aa, Artificial Sequence
  Description of Artificial Sequence: Synthetic peptide
DTYAAGHSA

SEQ ID NO: 29816 - protein, 9 aa, Artificial Sequence
  Description of Artificial Sequence: Synthetic peptide
EDTLTLHEN

SEQ ID NO: 29817 - protein, 9 aa, Artificial Sequence
  Description of Artificial Sequence: Synthetic peptide
EFTLFQHEN

SEQ ID NO: 29818 - protein, 9 aa, Artificial Sequence
  Description of Artificial Sequence: Synthetic peptide
ENVDRQHHM

SEQ ID NO: 29819 - protein, 9 aa, Artificial Sequence
  Description of Artificial Sequence: Synthetic peptide
EPNMCCHHR

SEQ ID NO: 29820 - protein, 9 aa, Artificial Sequence
  Description of Artificial Sequence: Synthetic peptide
EYTDVMHDA

SEQ ID NO: 29821 - protein, 9 aa, Artificial Sequence
  Description of Artificial Sequence: Synthetic peptide
FAAVCHHPI

SEQ ID NO: 29822 - protein, 9 aa, Artificial Sequence
  Description of Artificial Sequence: Synthetic peptide
FDTFSVHRL

SEQ ID NO: 29823 - protein, 9 aa, Artificial Sequence
  Description of Artificial Sequence: Synthetic peptide
FTDCMGHTM

SEQ ID NO: 29824 - protein, 9 aa, Artificial Sequence
  Description of Artificial Sequence: Synthetic peptide
GAYQPCHYP

SEQ ID NO: 29825 - protein, 9 aa, Artificial Sequence
  Description of Artificial Sequence: Synthetic peptide
GSWHCVHCP

SEQ ID NO: 29826 - protein, 9 aa, Artificial Sequence
  Description of Artificial Sequence: Synthetic peptide
HAAPQCHYS

SEQ ID NO: 29827 - protein, 9 aa, Artificial Sequence
  Description of Artificial Sequence: Synthetic peptide
KMEFQLHPG

SEQ ID NO: 29828 - protein, 9 aa, Artificial Sequence
  Description of Artificial Sequence: Synthetic peptide
LDGAMSHMC

SEQ ID NO: 29829 - protein, 9 aa, Artificial Sequence
  Description of Artificial Sequence: Synthetic peptide
MHVTPRHPP

SEQ ID NO: 29830 - protein, 9 aa, Artificial Sequence
  Description of Artificial Sequence: Synthetic peptide
MQLIDHHGP

SEQ ID NO: 29831 - protein, 9 aa, Artificial Sequence
  Description of Artificial Sequence: Synthetic peptide
MSKVDRHCA

SEQ ID NO: 29832 - protein, 9 aa, Artificial Sequence
  Description of Artificial Sequence: Synthetic peptide
MTMLGGHCI

SEQ ID NO: 29833 - protein, 9 aa, Artificial Sequence
  Description of Artificial Sequence: Synthetic peptide
NCMYEMHWQ

SEQ ID NO: 29834 - protein, 9 aa, Artificial Sequence
  Description of Artificial Sequence: Synthetic peptide
NFYDSLHCF

SEQ ID NO: 29835 - protein, 9 aa, Artificial Sequence
  Description of Artificial Sequence: Synthetic peptide
NGNLTAHPN

SEQ ID NO: 29836 - protein, 9 aa, Artificial Sequence
  Description of Artificial Sequence: Synthetic peptide
NIELRDHGQ

SEQ ID NO: 29837 - protein, 9 aa, Artificial Sequence
  Description of Artificial Sequence: Synthetic peptide
PCHRKKHPK

SEQ ID NO: 29838 - protein, 9 aa, Artificial Sequence
  Description of Artificial Sequence: Synthetic peptide
RCGRTAHNH

SEQ ID NO: 29839 - protein, 9 aa, Artificial Sequence
  Description of Artificial Sequence: Synthetic peptide
REWYHCHYM

SEQ ID NO: 29840 - protein, 9 aa, Artificial Sequence
  Description of Artificial Sequence: Synthetic peptide
SKYPINHVQ

SEQ ID NO: 29841 - protein, 9 aa, Artificial Sequence
  Description of Artificial Sequence: Synthetic peptide
SSEFAVHCG

SEQ ID NO: 29842 - protein, 9 aa, Artificial Sequence
  Description of Artificial Sequence: Synthetic peptide
TINVKHHFG

SEQ ID NO: 29843 - protein, 9 aa, Artificial Sequence
  Description of Artificial Sequence: Synthetic peptide
WDWFSYHAE

SEQ ID NO: 29844 - protein, 9 aa, Artificial Sequence
  Description of Artificial Sequence: Synthetic peptide
WEAKCAHSV

SEQ ID NO: 29845 - protein, 9 aa, Artificial Sequence
  Description of Artificial Sequence: Synthetic peptide
WPVLNDHEH

SEQ ID NO: 29846 - protein, 9 aa, Artificial Sequence
  Description of Artificial Sequence: Synthetic peptide
WPVLNDHGH

SEQ ID NO: 29847 - protein, 9 aa, Artificial Sequence
  Description of Artificial Sequence: Synthetic peptide
YHEKSCHFG

SEQ ID NO: 29848 - protein, 9 aa, Artificial Sequence
  Description of Artificial Sequence: Synthetic peptide
CQVSYQHYP

SEQ ID NO: 29849 - protein, 9 aa, Artificial Sequence
  Description of Artificial Sequence: Synthetic peptide
DGTVCVHMG

SEQ ID NO: 29850 - protein, 9 aa, Artificial Sequence
  Description of Artificial Sequence: Synthetic peptide
GAESCCHFG

SEQ ID NO: 29851 - protein, 9 aa, Artificial Sequence
  Description of Artificial Sequence: Synthetic peptide
GELMHRHMD

SEQ ID NO: 29852 - protein, 9 aa, Artificial Sequence
  Description of Artificial Sequence: Synthetic peptide
HTQHHSHHL

SEQ ID NO: 29853 - protein, 9 aa, Artificial Sequence
  Description of Artificial Sequence: Synthetic peptide
ISSNFDHFE

SEQ ID NO: 29854 - protein, 9 aa, Artificial Sequence
  Description of Artificial Sequence: Synthetic peptide
KMQNCAHQH

SEQ ID NO: 29855 - protein, 9 aa, Artificial Sequence
  Description of Artificial Sequence: Synthetic peptide
LSSLHDHPE

SEQ ID NO: 29856 - protein, 9 aa, Artificial Sequence
  Description of Artificial Sequence: Synthetic peptide
NTQWEAHSP

SEQ ID NO: 29857 - protein, 9 aa, Artificial Sequence
  Description of Artificial Sequence: Synthetic peptide
SFSSNAHLQ

SEQ ID NO: 29858 - protein, 9 aa, Artificial Sequence
  Description of Artificial Sequence: Synthetic peptide
STECYYHGI

SEQ ID NO: 29859 - protein, 9 aa, Artificial Sequence
  Description of Artificial Sequence: Synthetic peptide
TSTHIEHDT

SEQ ID NO: 29860 - protein, 9 aa, Artificial Sequence
  Description of Artificial Sequence: Synthetic peptide
YRVNCGHPN

SEQ ID NO: 29861 - protein, 9 aa, Artificial Sequence
  Description of Artificial Sequence: Synthetic peptide
AKDLISKPH

SEQ ID NO: 29862 - protein, 9 aa, Artificial Sequence
  Description of Artificial Sequence: Synthetic peptide
AMCNDIAPW

SEQ ID NO: 29863 - protein, 9 aa, Artificial Sequence
  Description of Artificial Sequence: Synthetic peptide
DILPKVYPE

SEQ ID NO: 29864 - protein, 9 aa, Artificial Sequence
  Description of Artificial Sequence: Synthetic peptide
DLEWQHCPP

SEQ ID NO: 29865 - protein, 9 aa, Artificial Sequence
  Description of Artificial Sequence: Synthetic peptide
DMEPQYWPA

SEQ ID NO: 29866 - protein, 9 aa, Artificial Sequence
  Description of Artificial Sequence: Synthetic peptide
DTLGPEAPH

SEQ ID NO: 29867 - protein, 9 aa, Artificial Sequence
  Description of Artificial Sequence: Synthetic peptide
EAMMMYQPN

SEQ ID NO: 29868 - protein, 9 aa, Artificial Sequence
  Description of Artificial Sequence: Synthetic peptide
EIMAAWTPP

SEQ ID NO: 29869 - protein, 9 aa, Artificial Sequence
  Description of Artificial Sequence: Synthetic peptide
EQGSVWTPP

SEQ ID NO: 29870 - protein, 9 aa, Artificial Sequence
  Description of Artificial Sequence: Synthetic peptide
EWFHQMSPH

SEQ ID NO: 29871 - protein, 9 aa, Artificial Sequence
  Description of Artificial Sequence: Synthetic peptide
FMEDNTKPR

SEQ ID NO: 29872 - protein, 9 aa, Artificial Sequence
  Description of Artificial Sequence: Synthetic peptide
HTIWSHDPW

SEQ ID NO: 29873 - protein, 9 aa, Artificial Sequence
  Description of Artificial Sequence: Synthetic peptide
LATQICFPT

SEQ ID NO: 29874 - protein, 9 aa, Artificial Sequence
  Description of Artificial Sequence: Synthetic peptide
LRMDCVPPY

SEQ ID NO: 29875 - protein, 9 aa, Artificial Sequence
  Description of Artificial Sequence: Synthetic peptide
LTGPNLSPA

SEQ ID NO: 29876 - protein, 9 aa, Artificial Sequence
  Description of Artificial Sequence: Synthetic peptide
MGNRSGSPS

SEQ ID NO: 29877 - protein, 9 aa, Artificial Sequence
  Description of Artificial Sequence: Synthetic peptide
MPSHWYRPI

SEQ ID NO: 29878 - protein, 9 aa, Artificial Sequence
  Description of Artificial Sequence: Synthetic peptide
MTHKDIGPS

SEQ ID NO: 29879 - protein, 9 aa, Artificial Sequence
  Description of Artificial Sequence: Synthetic peptide
NFCKGMNPY

SEQ ID NO: 29880 - protein, 9 aa, Artificial Sequence
  Description of Artificial Sequence: Synthetic peptide
PATKTHDPF

SEQ ID NO: 29881 - protein, 9 aa, Artificial Sequence
  Description of Artificial Sequence: Synthetic peptide
SALNAAPPP

SEQ ID NO: 29882 - protein, 9 aa, Artificial Sequence
  Description of Artificial Sequence: Synthetic peptide
SWCRYHEPL

SEQ ID NO: 29883 - protein, 9 aa, Artificial Sequence
  Description of Artificial Sequence: Synthetic peptide
TFMHESEPH

SEQ ID NO: 29884 - protein, 9 aa, Artificial Sequence
  Description of Artificial Sequence: Synthetic peptide
WQYTQNCPA

SEQ ID NO: 29885 - protein, 9 aa, Artificial Sequence
  Description of Artificial Sequence: Synthetic peptide
YLGWICAPC

SEQ ID NO: 29886 - protein, 9 aa, Artificial Sequence
  Description of Artificial Sequence: Synthetic peptide
YCECGHWPN

SEQ ID NO: 29887 - protein, 9 aa, Artificial Sequence
  Description of Artificial Sequence: Synthetic peptide
MPWLDKPPC

SEQ ID NO: 29888 - protein, 9 aa, Artificial Sequence
  Description of Artificial Sequence: Synthetic peptide
CQMLCRPPV

SEQ ID NO: 29889 - protein, 9 aa, Artificial Sequence
  Description of Artificial Sequence: Synthetic peptide
PIWQGYWPW

SEQ ID NO: 29890 - protein, 9 aa, Artificial Sequence
  Description of Artificial Sequence: Synthetic peptide
YDYWMQAPT

SEQ ID NO: 29891 - protein, 9 aa, Artificial Sequence
  Description of Artificial Sequence: Synthetic peptide
EWVVQQIPQ

SEQ ID NO: 29892 - protein, 9 aa, Artificial Sequence
  Description of Artificial Sequence: Synthetic peptide
ADHWEKGPF

SEQ ID NO: 29893 - protein, 9 aa, Artificial Sequence
  Description of Artificial Sequence: Synthetic peptide
AIDPINRPN

SEQ ID NO: 29894 - protein, 9 aa, Artificial Sequence
  Description of Artificial Sequence: Synthetic peptide
AMEKPTLPI

SEQ ID NO: 29895 - protein, 9 aa, Artificial Sequence
  Description of Artificial Sequence: Synthetic peptide
CTNFVNRPG

SEQ ID NO: 29896 - protein, 9 aa, Artificial Sequence
  Description of Artificial Sequence: Synthetic peptide
DIVNHESPG

SEQ ID NO: 29897 - protein, 9 aa, Artificial Sequence
  Description of Artificial Sequence: Synthetic peptide
GDESGLVPE

SEQ ID NO: 29898 - protein, 9 aa, Artificial Sequence
  Description of Artificial Sequence: Synthetic peptide
GNESGLVPE

SEQ ID NO: 29899 - protein, 9 aa, Artificial Sequence
  Description of Artificial Sequence: Synthetic peptide
GPKWGRSPL

SEQ ID NO: 29900 - protein, 9 aa, Artificial Sequence
  Description of Artificial Sequence: Synthetic peptide
HDAPMFTPG

SEQ ID NO: 29901 - protein, 9 aa, Artificial Sequence
  Description of Artificial Sequence: Synthetic peptide
ICMICATPI

SEQ ID NO: 29902 - protein, 9 aa, Artificial Sequence
  Description of Artificial Sequence: Synthetic peptide
KWEHGFMPF

SEQ ID NO: 29903 - protein, 9 aa, Artificial Sequence
  Description of Artificial Sequence: Synthetic peptide
LCKVGMEPE

SEQ ID NO: 29904 - protein, 9 aa, Artificial Sequence
  Description of Artificial Sequence: Synthetic peptide
MEETVTRPG

SEQ ID NO: 29905 - protein, 9 aa, Artificial Sequence
  Description of Artificial Sequence: Synthetic peptide
MEKRKGQPV

SEQ ID NO: 29906 - protein, 9 aa, Artificial Sequence
  Description of Artificial Sequence: Synthetic peptide
NDLSPAEPT

SEQ ID NO: 29907 - protein, 9 aa, Artificial Sequence
  Description of Artificial Sequence: Synthetic peptide
NMAMAKQPG

SEQ ID NO: 29908 - protein, 9 aa, Artificial Sequence
  Description of Artificial Sequence: Synthetic peptide
RCSKVKWPA

SEQ ID NO: 29909 - protein, 9 aa, Artificial Sequence
  Description of Artificial Sequence: Synthetic peptide
RFVVASYPY

SEQ ID NO: 29910 - protein, 9 aa, Artificial Sequence
  Description of Artificial Sequence: Synthetic peptide
RHVSIMPPV

SEQ ID NO: 29911 - protein, 9 aa, Artificial Sequence
  Description of Artificial Sequence: Synthetic peptide
SAVNKCVPG

SEQ ID NO: 29912 - protein, 9 aa, Artificial Sequence
  Description of Artificial Sequence: Synthetic peptide
SETRNNFPY

SEQ ID NO: 29913 - protein, 9 aa, Artificial Sequence
  Description of Artificial Sequence: Synthetic peptide
SIMRCKFPN

SEQ ID NO: 29914 - protein, 9 aa, Artificial Sequence
  Description of Artificial Sequence: Synthetic peptide
STGPILDPP

SEQ ID NO: 29915 - protein, 9 aa, Artificial Sequence
  Description of Artificial Sequence: Synthetic peptide
TDCCVGPPQ

SEQ ID NO: 29916 - protein, 9 aa, Artificial Sequence
  Description of Artificial Sequence: Synthetic peptide
VGNVIARPV

SEQ ID NO: 29917 - protein, 9 aa, Artificial Sequence
  Description of Artificial Sequence: Synthetic peptide
YCVCIQRPF

SEQ ID NO: 29918 - protein, 9 aa, Artificial Sequence
  Description of Artificial Sequence: Synthetic peptide
GLIKIVKPW

SEQ ID NO: 29919 - protein, 9 aa, Artificial Sequence
  Description of Artificial Sequence: Synthetic peptide
HEHTAFRPE

SEQ ID NO: 29920 - protein, 9 aa, Artificial Sequence
  Description of Artificial Sequence: Synthetic peptide
IQIRANCPN

SEQ ID NO: 29921 - protein, 9 aa, Artificial Sequence
  Description of Artificial Sequence: Synthetic peptide
MEGHTGNPC

SEQ ID NO: 29922 - protein, 9 aa, Artificial Sequence
  Description of Artificial Sequence: Synthetic peptide
TPCIWHSPF

SEQ ID NO: 29923 - protein, 9 aa, Artificial Sequence
  Description of Artificial Sequence: Synthetic peptide
AMEIQYMSM

SEQ ID NO: 29924 - protein, 9 aa, Artificial Sequence
  Description of Artificial Sequence: Synthetic peptide
ASTNEEKSM

SEQ ID NO: 29925 - protein, 9 aa, Artificial Sequence
  Description of Artificial Sequence: Synthetic peptide
CIEQKHLCM

SEQ ID NO: 29926 - protein, 9 aa, Artificial Sequence
  Description of Artificial Sequence: Synthetic peptide
EAGIRAEDM

SEQ ID NO: 29927 - protein, 9 aa, Artificial Sequence
  Description of Artificial Sequence: Synthetic peptide
EMSSSNMAM

SEQ ID NO: 29928 - protein, 9 aa, Artificial Sequence
  Description of Artificial Sequence: Synthetic peptide
FFCKYNEVM

SEQ ID NO: 29929 - protein, 9 aa, Artificial Sequence
  Description of Artificial Sequence: Synthetic peptide
FHHNSRLDM

SEQ ID NO: 29930 - protein, 9 aa, Artificial Sequence
  Description of Artificial Sequence: Synthetic peptide
GGHSMTKAM

SEQ ID NO: 29931 - protein, 9 aa, Artificial Sequence
  Description of Artificial Sequence: Synthetic peptide
GIVRQCCIM

SEQ ID NO: 29932 - protein, 9 aa, Artificial Sequence
  Description of Artificial Sequence: Synthetic peptide
GIYYEQDGM

SEQ ID NO: 29933 - protein, 9 aa, Artificial Sequence
  Description of Artificial Sequence: Synthetic peptide
GRRAELGLM

SEQ ID NO: 29934 - protein, 9 aa, Artificial Sequence
  Description of Artificial Sequence: Synthetic peptide
GTMQVTGAM

SEQ ID NO: 29935 - protein, 9 aa, Artificial Sequence
  Description of Artificial Sequence: Synthetic peptide
GYSSTHVQM

SEQ ID NO: 29936 - protein, 9 aa, Artificial Sequence
  Description of Artificial Sequence: Synthetic peptide
IAVQTGSDM

SEQ ID NO: 29937 - protein, 9 aa, Artificial Sequence
  Description of Artificial Sequence: Synthetic peptide
KCMPNVGWM

SEQ ID NO: 29938 - protein, 9 aa, Artificial Sequence
  Description of Artificial Sequence: Synthetic peptide
KLKPICMKM

SEQ ID NO: 29939 - protein, 9 aa, Artificial Sequence
  Description of Artificial Sequence: Synthetic peptide
LCWMAGAQM

SEQ ID NO: 29940 - protein, 9 aa, Artificial Sequence
  Description of Artificial Sequence: Synthetic peptide
NAICTLEEM

SEQ ID NO: 29941 - protein, 9 aa, Artificial Sequence
  Description of Artificial Sequence: Synthetic peptide
NCEFWKMFM

SEQ ID NO: 29942 - protein, 9 aa, Artificial Sequence
  Description of Artificial Sequence: Synthetic peptide
NCVQTNSEM

SEQ ID NO: 29943 - protein, 9 aa, Artificial Sequence
  Description of Artificial Sequence: Synthetic peptide
SADSEEGHM

SEQ ID NO: 29944 - protein, 9 aa, Artificial Sequence
  Description of Artificial Sequence: Synthetic peptide
SKMSNQDAM

SEQ ID NO: 29945 - protein, 9 aa, Artificial Sequence
  Description of Artificial Sequence: Synthetic peptide
SKSDVQSMM

SEQ ID NO: 29946 - protein, 9 aa, Artificial Sequence
  Description of Artificial Sequence: Synthetic peptide
SPLNRNCLM

SEQ ID NO: 29947 - protein, 9 aa, Artificial Sequence
  Description of Artificial Sequence: Synthetic peptide
VWLQSLDRM

SEQ ID NO: 29948 - protein, 9 aa, Artificial Sequence
  Description of Artificial Sequence: Synthetic peptide
WMGHKHKQM

SEQ ID NO: 29949 - protein, 9 aa, Artificial Sequence
  Description of Artificial Sequence: Synthetic peptide
MLTPVQATM

SEQ ID NO: 29950 - protein, 9 aa, Artificial Sequence
  Description of Artificial Sequence: Synthetic peptide
KTSNVMDQM

SEQ ID NO: 29951 - protein, 9 aa, Artificial Sequence
  Description of Artificial Sequence: Synthetic peptide
AKCDVTGGM

SEQ ID NO: 29952 - protein, 9 aa, Artificial Sequence
  Description of Artificial Sequence: Synthetic peptide
AYMAYHTEM

SEQ ID NO: 29953 - protein, 9 aa, Artificial Sequence
  Description of Artificial Sequence: Synthetic peptide
CTTASMSYM

SEQ ID NO: 29954 - protein, 9 aa, Artificial Sequence
  Description of Artificial Sequence: Synthetic peptide
EIGSRNRRM

SEQ ID NO: 29955 - protein, 9 aa, Artificial Sequence
  Description of Artificial Sequence: Synthetic peptide
ERSFHNSIM

SEQ ID NO: 29956 - protein, 9 aa, Artificial Sequence
  Description of Artificial Sequence: Synthetic peptide
ESRIGQECM

SEQ ID NO: 29957 - protein, 9 aa, Artificial Sequence
  Description of Artificial Sequence: Synthetic peptide
EYFNILRNM

SEQ ID NO: 29958 - protein, 9 aa, Artificial Sequence
  Description of Artificial Sequence: Synthetic peptide
FATWHLYDM

SEQ ID NO: 29959 - protein, 9 aa, Artificial Sequence
  Description of Artificial Sequence: Synthetic peptide
FDCWANNNM

SEQ ID NO: 29960 - protein, 9 aa, Artificial Sequence
  Description of Artificial Sequence: Synthetic peptide
FIWDCGDIM

SEQ ID NO: 29961 - protein, 9 aa, Artificial Sequence
  Description of Artificial Sequence: Synthetic peptide
FKTFGSREM

SEQ ID NO: 29962 - protein, 9 aa, Artificial Sequence
  Description of Artificial Sequence: Synthetic peptide
GDDHRVLTM

SEQ ID NO: 29963 - protein, 9 aa, Artificial Sequence
  Description of Artificial Sequence: Synthetic peptide
GGYHKFPVM

SEQ ID NO: 29964 - protein, 9 aa, Artificial Sequence
  Description of Artificial Sequence: Synthetic peptide
GNDIFMVIM

SEQ ID NO: 29965 - protein, 9 aa, Artificial Sequence
  Description of Artificial Sequence: Synthetic peptide
GNTPCRGLM

SEQ ID NO: 29966 - protein, 9 aa, Artificial Sequence
  Description of Artificial Sequence: Synthetic peptide
LIACRENEM

SEQ ID NO: 29967 - protein, 9 aa, Artificial Sequence
  Description of Artificial Sequence: Synthetic peptide
LKATYEYVM

SEQ ID NO: 29968 - protein, 9 aa, Artificial Sequence
  Description of Artificial Sequence: Synthetic peptide
LNDIKWYVM

SEQ ID NO: 29969 - protein, 9 aa, Artificial Sequence
  Description of Artificial Sequence: Synthetic peptide
LQIRAWEYM

SEQ ID NO: 29970 - protein, 9 aa, Artificial Sequence
  Description of Artificial Sequence: Synthetic peptide
MLKVQCTHM

SEQ ID NO: 29971 - protein, 9 aa, Artificial Sequence
  Description of Artificial Sequence: Synthetic peptide
PQDFKHNYM

SEQ ID NO: 29972 - protein, 9 aa, Artificial Sequence
  Description of Artificial Sequence: Synthetic peptide
REFCGALMM

SEQ ID NO: 29973 - protein, 9 aa, Artificial Sequence
  Description of Artificial Sequence: Synthetic peptide
RFGREAGGM

SEQ ID NO: 29974 - protein, 9 aa, Artificial Sequence
  Description of Artificial Sequence: Synthetic peptide
RFTGHMGAM

SEQ ID NO: 29975 - protein, 9 aa, Artificial Sequence
  Description of Artificial Sequence: Synthetic peptide
RHESINRYM

SEQ ID NO: 29976 - protein, 9 aa, Artificial Sequence
  Description of Artificial Sequence: Synthetic peptide
RSDLKVCAM

SEQ ID NO: 29977 - protein, 9 aa, Artificial Sequence
  Description of Artificial Sequence: Synthetic peptide
RYNLQIMWM

SEQ ID NO: 29978 - protein, 9 aa, Artificial Sequence
  Description of Artificial Sequence: Synthetic peptide
SFMLKWWAM

SEQ ID NO: 29979 - protein, 9 aa, Artificial Sequence
  Description of Artificial Sequence: Synthetic peptide
SMFGDRQAM

SEQ ID NO: 29980 - protein, 9 aa, Artificial Sequence
  Description of Artificial Sequence: Synthetic peptide
SNCDNWSAM

SEQ ID NO: 29981 - protein, 9 aa, Artificial Sequence
  Description of Artificial Sequence: Synthetic peptide
SPLHYLVQM

SEQ ID NO: 29982 - protein, 9 aa, Artificial Sequence
  Description of Artificial Sequence: Synthetic peptide
SYRPFRKMM

SEQ ID NO: 29983 - protein, 9 aa, Artificial Sequence
  Description of Artificial Sequence: Synthetic peptide
TLMQPGYQM

SEQ ID NO: 29984 - protein, 9 aa, Artificial Sequence
  Description of Artificial Sequence: Synthetic peptide
VPDHIVGMM

SEQ ID NO: 29985 - protein, 9 aa, Artificial Sequence
  Description of Artificial Sequence: Synthetic peptide
VSSSDGWNM

SEQ ID NO: 29986 - protein, 9 aa, Artificial Sequence
  Description of Artificial Sequence: Synthetic peptide
WTAHMYTNM

SEQ ID NO: 29987 - protein, 9 aa, Artificial Sequence
  Description of Artificial Sequence: Synthetic peptide
WTYHSMAQM

SEQ ID NO: 29988 - protein, 9 aa, Artificial Sequence
  Description of Artificial Sequence: Synthetic peptide
WWWGNFMFM

SEQ ID NO: 29989 - protein, 9 aa, Artificial Sequence
  Description of Artificial Sequence: Synthetic peptide
YCNQQQWTM

SEQ ID NO: 29990 - protein, 9 aa, Artificial Sequence
  Description of Artificial Sequence: Synthetic peptide
YEQVITVMM

SEQ ID NO: 29991 - protein, 9 aa, Artificial Sequence
  Description of Artificial Sequence: Synthetic peptide
AAGDIGSVM

SEQ ID NO: 29992 - protein, 9 aa, Artificial Sequence
  Description of Artificial Sequence: Synthetic peptide
AAGNIGSVM

SEQ ID NO: 29993 - protein, 9 aa, Artificial Sequence
  Description of Artificial Sequence: Synthetic peptide
AANLLWRLW

SEQ ID NO: 29994 - protein, 9 aa, Artificial Sequence
  Description of Artificial Sequence: Synthetic peptide
AANLLWRLY

SEQ ID NO: 29995 - protein, 9 aa, Artificial Sequence
  Description of Artificial Sequence: Synthetic peptide
ACAWIESFT

SEQ ID NO: 29996 - protein, 9 aa, Artificial Sequence
  Description of Artificial Sequence: Synthetic peptide
ACPDHHRWL

SEQ ID NO: 29997 - protein, 9 aa, Artificial Sequence
  Description of Artificial Sequence: Synthetic peptide
ACPNVWWHM

SEQ ID NO: 29998 - protein, 9 aa, Artificial Sequence
  Description of Artificial Sequence: Synthetic peptide
ACQCKVIGQ

SEQ ID NO: 29999 - protein, 9 aa, Artificial Sequence
  Description of Artificial Sequence: Synthetic peptide
ACQCRVIWQ

SEQ ID NO: 30000 - protein, 9 aa, Artificial Sequence
  Description of Artificial Sequence: Synthetic peptide
ACTWPGVGQ

SEQ ID NO: 30001 - protein, 9 aa, Artificial Sequence
  Description of Artificial Sequence: Synthetic peptide
ACWDTHQSI

SEQ ID NO: 30002 - protein, 9 aa, Artificial Sequence
  Description of Artificial Sequence: Synthetic peptide
ACWDTKQSI

SEQ ID NO: 30003 - protein, 9 aa, Artificial Sequence
  Description of Artificial Sequence: Synthetic peptide
ACWDTLQSI

SEQ ID NO: 30004 - protein, 9 aa, Artificial Sequence
  Description of Artificial Sequence: Synthetic peptide
ACWDTQKSI

SEQ ID NO: 30005 - protein, 9 aa, Artificial Sequence
  Description of Artificial Sequence: Synthetic peptide
ACWDTQQGI

SEQ ID NO: 30006 - protein, 9 aa, Artificial Sequence
  Description of Artificial Sequence: Synthetic peptide
ACWRHVQWN

SEQ ID NO: 30007 - protein, 9 aa, Artificial Sequence
  Description of Artificial Sequence: Synthetic peptide
AFGEFDNHS

SEQ ID NO: 30008 - protein, 9 aa, Artificial Sequence
  Description of Artificial Sequence: Synthetic peptide
AFIHIDREC

SEQ ID NO: 30009 - protein, 9 aa, Artificial Sequence
  Description of Artificial Sequence: Synthetic peptide
AGGHCTYVA

SEQ ID NO: 30010 - protein, 9 aa, Artificial Sequence
  Description of Artificial Sequence: Synthetic peptide
AGWIGACMA

SEQ ID NO: 30011 - protein, 9 aa, Artificial Sequence
  Description of Artificial Sequence: Synthetic peptide
AHWNAIMRW

SEQ ID NO: 30012 - protein, 9 aa, Artificial Sequence
  Description of Artificial Sequence: Synthetic peptide
AIFEPHRWH

SEQ ID NO: 30013 - protein, 9 aa, Artificial Sequence
  Description of Artificial Sequence: Synthetic peptide
AIFEPRRWP

SEQ ID NO: 30014 - protein, 9 aa, Artificial Sequence
  Description of Artificial Sequence: Synthetic peptide
AIIEPRRWH

SEQ ID NO: 30015 - protein, 9 aa, Artificial Sequence
  Description of Artificial Sequence: Synthetic peptide
AIKWRSQDK

SEQ ID NO: 30016 - protein, 9 aa, Artificial Sequence
  Description of Artificial Sequence: Synthetic peptide
AIRVDDSTI

SEQ ID NO: 30017 - protein, 9 aa, Artificial Sequence
  Description of Artificial Sequence: Synthetic peptide
AIVSMDDWH

SEQ ID NO: 30018 - protein, 9 aa, Artificial Sequence
  Description of Artificial Sequence: Synthetic peptide
AKREIENCH

SEQ ID NO: 30019 - protein, 9 aa, Artificial Sequence
  Description of Artificial Sequence: Synthetic peptide
AMHKRWTND

SEQ ID NO: 30020 - protein, 9 aa, Artificial Sequence
  Description of Artificial Sequence: Synthetic peptide
ANNVYCVKK

SEQ ID NO: 30021 - protein, 9 aa, Artificial Sequence
  Description of Artificial Sequence: Synthetic peptide
APANTPWRK

SEQ ID NO: 30022 - protein, 9 aa, Artificial Sequence
  Description of Artificial Sequence: Synthetic peptide
APRPPRSAR

SEQ ID NO: 30023 - protein, 9 aa, Artificial Sequence
  Description of Artificial Sequence: Synthetic peptide
ARDNESNLI

SEQ ID NO: 30024 - protein, 9 aa, Artificial Sequence
  Description of Artificial Sequence: Synthetic peptide
ARSGAQSMM

SEQ ID NO: 30025 - protein, 9 aa, Artificial Sequence
  Description of Artificial Sequence: Synthetic peptide
ARSGFASNT

SEQ ID NO: 30026 - protein, 9 aa, Artificial Sequence
  Description of Artificial Sequence: Synthetic peptide
ARSSFASNN

SEQ ID NO: 30027 - protein, 9 aa, Artificial Sequence
  Description of Artificial Sequence: Synthetic peptide
ARSSFASNS

SEQ ID NO: 30028 - protein, 9 aa, Artificial Sequence
  Description of Artificial Sequence: Synthetic peptide
ARSSFPSNT

SEQ ID NO: 30029 - protein, 9 aa, Artificial Sequence
  Description of Artificial Sequence: Synthetic peptide
ARSSFSSNT

SEQ ID NO: 30030 - protein, 9 aa, Artificial Sequence
  Description of Artificial Sequence: Synthetic peptide
ARSSFTSNT

SEQ ID NO: 30031 - protein, 9 aa, Artificial Sequence
  Description of Artificial Sequence: Synthetic peptide
ARSSVASNT

SEQ ID NO: 30032 - protein, 9 aa, Artificial Sequence
  Description of Artificial Sequence: Synthetic peptide
ASTEVFYMI

SEQ ID NO: 30033 - protein, 9 aa, Artificial Sequence
  Description of Artificial Sequence: Synthetic peptide
ATGIDNNAT

SEQ ID NO: 30034 - protein, 9 aa, Artificial Sequence
  Description of Artificial Sequence: Synthetic peptide
AWSCVHADV

SEQ ID NO: 30035 - protein, 9 aa, Artificial Sequence
  Description of Artificial Sequence: Synthetic peptide
AWWARCKQQ

SEQ ID NO: 30036 - protein, 9 aa, Artificial Sequence
  Description of Artificial Sequence: Synthetic peptide
AWWTPCKQQ

SEQ ID NO: 30037 - protein, 9 aa, Artificial Sequence
  Description of Artificial Sequence: Synthetic peptide
AWWTRCKQL

SEQ ID NO: 30038 - protein, 9 aa, Artificial Sequence
  Description of Artificial Sequence: Synthetic peptide
CADVRENAN

SEQ ID NO: 30039 - protein, 9 aa, Artificial Sequence
  Description of Artificial Sequence: Synthetic peptide
CCEIWLASA

SEQ ID NO: 30040 - protein, 9 aa, Artificial Sequence
  Description of Artificial Sequence: Synthetic peptide
CCELWLASS

SEQ ID NO: 30041 - protein, 9 aa, Artificial Sequence
  Description of Artificial Sequence: Synthetic peptide
CCRHWRPTT

SEQ ID NO: 30042 - protein, 9 aa, Artificial Sequence
  Description of Artificial Sequence: Synthetic peptide
CCRYWRPTP

SEQ ID NO: 30043 - protein, 9 aa, Artificial Sequence
  Description of Artificial Sequence: Synthetic peptide
CGGKIDIGL

SEQ ID NO: 30044 - protein, 9 aa, Artificial Sequence
  Description of Artificial Sequence: Synthetic peptide
CHQENFIFR

SEQ ID NO: 30045 - protein, 9 aa, Artificial Sequence
  Description of Artificial Sequence: Synthetic peptide
CHQENFVFH

SEQ ID NO: 30046 - protein, 9 aa, Artificial Sequence
  Description of Artificial Sequence: Synthetic peptide
CHQENFVFP

SEQ ID NO: 30047 - protein, 9 aa, Artificial Sequence
  Description of Artificial Sequence: Synthetic peptide
CIETGLLNG

SEQ ID NO: 30048 - protein, 9 aa, Artificial Sequence
  Description of Artificial Sequence: Synthetic peptide
CIRQYDAIH

SEQ ID NO: 30049 - protein, 9 aa, Artificial Sequence
  Description of Artificial Sequence: Synthetic peptide
CITYEGWAD

SEQ ID NO: 30050 - protein, 9 aa, Artificial Sequence
  Description of Artificial Sequence: Synthetic peptide
CKVSESAKN

SEQ ID NO: 30051 - protein, 9 aa, Artificial Sequence
  Description of Artificial Sequence: Synthetic peptide
CPPICEGGT

SEQ ID NO: 30052 - protein, 9 aa, Artificial Sequence
  Description of Artificial Sequence: Synthetic peptide
CTETTVRWP

SEQ ID NO: 30053 - protein, 9 aa, Artificial Sequence
  Description of Artificial Sequence: Synthetic peptide
CTKTTVRWP

SEQ ID NO: 30054 - protein, 9 aa, Artificial Sequence
  Description of Artificial Sequence: Synthetic peptide
CTPTTVRWP

SEQ ID NO: 30055 - protein, 9 aa, Artificial Sequence
  Description of Artificial Sequence: Synthetic peptide
CTQSSVRWP

SEQ ID NO: 30056 - protein, 9 aa, Artificial Sequence
  Description of Artificial Sequence: Synthetic peptide
CTQTAVRWP

SEQ ID NO: 30057 - protein, 9 aa, Artificial Sequence
  Description of Artificial Sequence: Synthetic peptide
CTQTTIRWP

SEQ ID NO: 30058 - protein, 9 aa, Artificial Sequence
  Description of Artificial Sequence: Synthetic peptide
CTQTTVRWR

SEQ ID NO: 30059 - protein, 9 aa, Artificial Sequence
  Description of Artificial Sequence: Synthetic peptide
CTQTTVRYP

SEQ ID NO: 30060 - protein, 9 aa, Artificial Sequence
  Description of Artificial Sequence: Synthetic peptide
CTRSTVRWP

SEQ ID NO: 30061 - protein, 9 aa, Artificial Sequence
  Description of Artificial Sequence: Synthetic peptide
CTRTTVRWP

SEQ ID NO: 30062 - protein, 9 aa, Artificial Sequence
  Description of Artificial Sequence: Synthetic peptide
CVGMDSYNG

SEQ ID NO: 30063 - protein, 9 aa, Artificial Sequence
  Description of Artificial Sequence: Synthetic peptide
CYGHLTAMC

SEQ ID NO: 30064 - protein, 9 aa, Artificial Sequence
  Description of Artificial Sequence: Synthetic peptide
DARASPDCL

SEQ ID NO: 30065 - protein, 9 aa, Artificial Sequence
  Description of Artificial Sequence: Synthetic peptide
DARPQWDIP

SEQ ID NO: 30066 - protein, 9 aa, Artificial Sequence
  Description of Artificial Sequence: Synthetic peptide
DARSSPDCI

SEQ ID NO: 30067 - protein, 9 aa, Artificial Sequence
  Description of Artificial Sequence: Synthetic peptide
DCEEFDRTT

SEQ ID NO: 30068 - protein, 9 aa, Artificial Sequence
  Description of Artificial Sequence: Synthetic peptide
DCLVQKAAL

SEQ ID NO: 30069 - protein, 9 aa, Artificial Sequence
  Description of Artificial Sequence: Synthetic peptide
DCNVNPACF

SEQ ID NO: 30070 - protein, 9 aa, Artificial Sequence
  Description of Artificial Sequence: Synthetic peptide
DCWAIHSSW

SEQ ID NO: 30071 - protein, 9 aa, Artificial Sequence
  Description of Artificial Sequence: Synthetic peptide
DCWDTQQSI

SEQ ID NO: 30072 - protein, 9 aa, Artificial Sequence
  Description of Artificial Sequence: Synthetic peptide
DEVHGFLSG

SEQ ID NO: 30073 - protein, 9 aa, Artificial Sequence
  Description of Artificial Sequence: Synthetic peptide
DEVYSFLSG

SEQ ID NO: 30074 - protein, 9 aa, Artificial Sequence
  Description of Artificial Sequence: Synthetic peptide
DFHSYCMSF

SEQ ID NO: 30075 - protein, 9 aa, Artificial Sequence
  Description of Artificial Sequence: Synthetic peptide
DFIHVGDWE

SEQ ID NO: 30076 - protein, 9 aa, Artificial Sequence
  Description of Artificial Sequence: Synthetic peptide
DFTHVGDWD

SEQ ID NO: 30077 - protein, 9 aa, Artificial Sequence
  Description of Artificial Sequence: Synthetic peptide
DGDPNFRIQ

SEQ ID NO: 30078 - protein, 9 aa, Artificial Sequence
  Description of Artificial Sequence: Synthetic peptide
DHGYRNNSM

SEQ ID NO: 30079 - protein, 9 aa, Artificial Sequence
  Description of Artificial Sequence: Synthetic peptide
DILIDHDFF

SEQ ID NO: 30080 - protein, 9 aa, Artificial Sequence
  Description of Artificial Sequence: Synthetic peptide
DKQHDCRAS

SEQ ID NO: 30081 - protein, 9 aa, Artificial Sequence
  Description of Artificial Sequence: Synthetic peptide
DKQQDCRAY

SEQ ID NO: 30082 - protein, 9 aa, Artificial Sequence
  Description of Artificial Sequence: Synthetic peptide
DQQHDCRAY

SEQ ID NO: 30083 - protein, 9 aa, Artificial Sequence
  Description of Artificial Sequence: Synthetic peptide
DRSSLCADE

SEQ ID NO: 30084 - protein, 9 aa, Artificial Sequence
  Description of Artificial Sequence: Synthetic peptide
DRYSLCADA

SEQ ID NO: 30085 - protein, 9 aa, Artificial Sequence
  Description of Artificial Sequence: Synthetic peptide
DSGRIYAWI

SEQ ID NO: 30086 - protein, 9 aa, Artificial Sequence
  Description of Artificial Sequence: Synthetic peptide
DSNVQFCID

SEQ ID NO: 30087 - protein, 9 aa, Artificial Sequence
  Description of Artificial Sequence: Synthetic peptide
DSRSSPDCL

SEQ ID NO: 30088 - protein, 9 aa, Artificial Sequence
  Description of Artificial Sequence: Synthetic peptide
DSTLQFCID

SEQ ID NO: 30089 - protein, 9 aa, Artificial Sequence
  Description of Artificial Sequence: Synthetic peptide
DTRKWMKWH

SEQ ID NO: 30090 - protein, 9 aa, Artificial Sequence
  Description of Artificial Sequence: Synthetic peptide
DVPIDHDFF

SEQ ID NO: 30091 - protein, 9 aa, Artificial Sequence
  Description of Artificial Sequence: Synthetic peptide
DVVGDAACP

SEQ ID NO: 30092 - protein, 9 aa, Artificial Sequence
  Description of Artificial Sequence: Synthetic peptide
DWWTRCKQQ

SEQ ID NO: 30093 - protein, 9 aa, Artificial Sequence
  Description of Artificial Sequence: Synthetic peptide
EARLQWDIP

SEQ ID NO: 30094 - protein, 9 aa, Artificial Sequence
  Description of Artificial Sequence: Synthetic peptide
EARPHWDIP

SEQ ID NO: 30095 - protein, 9 aa, Artificial Sequence
  Description of Artificial Sequence: Synthetic peptide
EARPQWDIL

SEQ ID NO: 30096 - protein, 9 aa, Artificial Sequence
  Description of Artificial Sequence: Synthetic peptide
EARPQWDIS

SEQ ID NO: 30097 - protein, 9 aa, Artificial Sequence
  Description of Artificial Sequence: Synthetic peptide
EARPQWDIT

SEQ ID NO: 30098 - protein, 9 aa, Artificial Sequence
  Description of Artificial Sequence: Synthetic peptide
EARPQWDLP

SEQ ID NO: 30099 - protein, 9 aa, Artificial Sequence
  Description of Artificial Sequence: Synthetic peptide
EARPQWDSP

SEQ ID NO: 30100 - protein, 9 aa, Artificial Sequence
  Description of Artificial Sequence: Synthetic peptide
EARPQWDVP

SEQ ID NO: 30101 - protein, 9 aa, Artificial Sequence
  Description of Artificial Sequence: Synthetic peptide
ECWQHVQWN

SEQ ID NO: 30102 - protein, 9 aa, Artificial Sequence
  Description of Artificial Sequence: Synthetic peptide
ECWRHVKWN

SEQ ID NO: 30103 - protein, 9 aa, Artificial Sequence
  Description of Artificial Sequence: Synthetic peptide
ECWRHVQLN

SEQ ID NO: 30104 - protein, 9 aa, Artificial Sequence
  Description of Artificial Sequence: Synthetic peptide
ECWRHVQWI

SEQ ID NO: 30105 - protein, 9 aa, Artificial Sequence
  Description of Artificial Sequence: Synthetic peptide
ECWRHVQWK

SEQ ID NO: 30106 - protein, 9 aa, Artificial Sequence
  Description of Artificial Sequence: Synthetic peptide
ECWRHVQWS

SEQ ID NO: 30107 - protein, 9 aa, Artificial Sequence
  Description of Artificial Sequence: Synthetic peptide
ECWRQVQWN

SEQ ID NO: 30108 - protein, 9 aa, Artificial Sequence
  Description of Artificial Sequence: Synthetic peptide
ECYRKVVFR

SEQ ID NO: 30109 - protein, 9 aa, Artificial Sequence
  Description of Artificial Sequence: Synthetic peptide
ECYSIYCEQ

SEQ ID NO: 30110 - protein, 9 aa, Artificial Sequence
  Description of Artificial Sequence: Synthetic peptide
EDNIRMMMI

SEQ ID NO: 30111 - protein, 9 aa, Artificial Sequence
  Description of Artificial Sequence: Synthetic peptide
EFAMDWVSD

SEQ ID NO: 30112 - protein, 9 aa, Artificial Sequence
  Description of Artificial Sequence: Synthetic peptide
EFWGSMRNG

SEQ ID NO: 30113 - protein, 9 aa, Artificial Sequence
  Description of Artificial Sequence: Synthetic peptide
EFWSSMRTG

SEQ ID NO: 30114 - protein, 9 aa, Artificial Sequence
  Description of Artificial Sequence: Synthetic peptide
EGRPQWDIP

SEQ ID NO: 30115 - protein, 9 aa, Artificial Sequence
  Description of Artificial Sequence: Synthetic peptide
EILAAWTPP

SEQ ID NO: 30116 - protein, 9 aa, Artificial Sequence
  Description of Artificial Sequence: Synthetic peptide
EKCFQWTSP

SEQ ID NO: 30117 - protein, 9 aa, Artificial Sequence
  Description of Artificial Sequence: Synthetic peptide
EKCFQWTSS

SEQ ID NO: 30118 - protein, 9 aa, Artificial Sequence
  Description of Artificial Sequence: Synthetic peptide
EKCYQWTSA

SEQ ID NO: 30119 - protein, 9 aa, Artificial Sequence
  Description of Artificial Sequence: Synthetic peptide
EKDLSHATF

SEQ ID NO: 30120 - protein, 9 aa, Artificial Sequence
  Description of Artificial Sequence: Synthetic peptide
EKDLSQDTF

SEQ ID NO: 30121 - protein, 9 aa, Artificial Sequence
  Description of Artificial Sequence: Synthetic peptide
EKTSRHWKT

SEQ ID NO: 30122 - protein, 9 aa, Artificial Sequence
  Description of Artificial Sequence: Synthetic peptide
EKVHCMWLH

SEQ ID NO: 30123 - protein, 9 aa, Artificial Sequence
  Description of Artificial Sequence: Synthetic peptide
EQEGDYVDM

SEQ ID NO: 30124 - protein, 9 aa, Artificial Sequence
  Description of Artificial Sequence: Synthetic peptide
EQGAVWTPP

SEQ ID NO: 30125 - protein, 9 aa, Artificial Sequence
  Description of Artificial Sequence: Synthetic peptide
EQGTVWTPP

SEQ ID NO: 30126 - protein, 9 aa, Artificial Sequence
  Description of Artificial Sequence: Synthetic peptide
EQVRAFRQI

SEQ ID NO: 30127 - protein, 9 aa, Artificial Sequence
  Description of Artificial Sequence: Synthetic peptide
ERAGFKMMD

SEQ ID NO: 30128 - protein, 9 aa, Artificial Sequence
  Description of Artificial Sequence: Synthetic peptide
ERAGFQMMH

SEQ ID NO: 30129 - protein, 9 aa, Artificial Sequence
  Description of Artificial Sequence: Synthetic peptide
ERAGVKMMH

SEQ ID NO: 30130 - protein, 9 aa, Artificial Sequence
  Description of Artificial Sequence: Synthetic peptide
ERAGYKMMH

SEQ ID NO: 30131 - protein, 9 aa, Artificial Sequence
  Description of Artificial Sequence: Synthetic peptide
ERASFKMMH

SEQ ID NO: 30132 - protein, 9 aa, Artificial Sequence
  Description of Artificial Sequence: Synthetic peptide
ERDGFKMMH

SEQ ID NO: 30133 - protein, 9 aa, Artificial Sequence
  Description of Artificial Sequence: Synthetic peptide
ERGGFKMMH

SEQ ID NO: 30134 - protein, 9 aa, Artificial Sequence
  Description of Artificial Sequence: Synthetic peptide
ERVGFKMMH

SEQ ID NO: 30135 - protein, 9 aa, Artificial Sequence
  Description of Artificial Sequence: Synthetic peptide
ESRPQWDIP

SEQ ID NO: 30136 - protein, 9 aa, Artificial Sequence
  Description of Artificial Sequence: Synthetic peptide
ETCEMFTPG

SEQ ID NO: 30137 - protein, 9 aa, Artificial Sequence
  Description of Artificial Sequence: Synthetic peptide
ETGNDNNAT

SEQ ID NO: 30138 - protein, 9 aa, Artificial Sequence
  Description of Artificial Sequence: Synthetic peptide
ETPINSEKG

SEQ ID NO: 30139 - protein, 9 aa, Artificial Sequence
  Description of Artificial Sequence: Synthetic peptide
EVGTDPSKN

SEQ ID NO: 30140 - protein, 9 aa, Artificial Sequence
  Description of Artificial Sequence: Synthetic peptide
EVRPQWDIP

SEQ ID NO: 30141 - protein, 9 aa, Artificial Sequence
  Description of Artificial Sequence: Synthetic peptide
FAGKIDIGL

SEQ ID NO: 30142 - protein, 9 aa, Artificial Sequence
  Description of Artificial Sequence: Synthetic peptide
FAGPNSYWP

SEQ ID NO: 30143 - protein, 9 aa, Artificial Sequence
  Description of Artificial Sequence: Synthetic peptide
FAMFASPDD

SEQ ID NO: 30144 - protein, 9 aa, Artificial Sequence
  Description of Artificial Sequence: Synthetic peptide
FAVMIHYHN

SEQ ID NO: 30145 - protein, 9 aa, Artificial Sequence
  Description of Artificial Sequence: Synthetic peptide
FAVMVHYPN

SEQ ID NO: 30146 - protein, 9 aa, Artificial Sequence
  Description of Artificial Sequence: Synthetic peptide
FAVMVRYHN

SEQ ID NO: 30147 - protein, 9 aa, Artificial Sequence
  Description of Artificial Sequence: Synthetic peptide
FCAAEWGCL

SEQ ID NO: 30148 - protein, 9 aa, Artificial Sequence
  Description of Artificial Sequence: Synthetic peptide
FCPAEWACL

SEQ ID NO: 30149 - protein, 9 aa, Artificial Sequence
  Description of Artificial Sequence: Synthetic peptide
FCPAEWGCV

SEQ ID NO: 30150 - protein, 9 aa, Artificial Sequence
  Description of Artificial Sequence: Synthetic peptide
FCPAEWGGL

SEQ ID NO: 30151 - protein, 9 aa, Artificial Sequence
  Description of Artificial Sequence: Synthetic peptide
FCPAEWGYL

SEQ ID NO: 30152 - protein, 9 aa, Artificial Sequence
  Description of Artificial Sequence: Synthetic peptide
FCPAKWGCL

SEQ ID NO: 30153 - protein, 9 aa, Artificial Sequence
  Description of Artificial Sequence: Synthetic peptide
FCPEHWFDI

SEQ ID NO: 30154 - protein, 9 aa, Artificial Sequence
  Description of Artificial Sequence: Synthetic peptide
FCPEHWFNM

SEQ ID NO: 30155 - protein, 9 aa, Artificial Sequence
  Description of Artificial Sequence: Synthetic peptide
FCPEHWFNN

SEQ ID NO: 30156 - protein, 9 aa, Artificial Sequence
  Description of Artificial Sequence: Synthetic peptide
FCPEHWFNS

SEQ ID NO: 30157 - protein, 9 aa, Artificial Sequence
  Description of Artificial Sequence: Synthetic peptide
FCPEHWLNI

SEQ ID NO: 30158 - protein, 9 aa, Artificial Sequence
  Description of Artificial Sequence: Synthetic peptide
FCPEHWVNI

SEQ ID NO: 30159 - protein, 9 aa, Artificial Sequence
  Description of Artificial Sequence: Synthetic peptide
FCPQHWFNI

SEQ ID NO: 30160 - protein, 9 aa, Artificial Sequence
  Description of Artificial Sequence: Synthetic peptide
FCSAEWGCL

SEQ ID NO: 30161 - protein, 9 aa, Artificial Sequence
  Description of Artificial Sequence: Synthetic peptide
FCTAEWGCL

SEQ ID NO: 30162 - protein, 9 aa, Artificial Sequence
  Description of Artificial Sequence: Synthetic peptide
FCTEHWFNI

SEQ ID NO: 30163 - protein, 9 aa, Artificial Sequence
  Description of Artificial Sequence: Synthetic peptide
FDLFASPDD

SEQ ID NO: 30164 - protein, 9 aa, Artificial Sequence
  Description of Artificial Sequence: Synthetic peptide
FDMFASPAD

SEQ ID NO: 30165 - protein, 9 aa, Artificial Sequence
  Description of Artificial Sequence: Synthetic peptide
FDMFASPDA

SEQ ID NO: 30166 - protein, 9 aa, Artificial Sequence
  Description of Artificial Sequence: Synthetic peptide
FDMFASPGD

SEQ ID NO: 30167 - protein, 9 aa, Artificial Sequence
  Description of Artificial Sequence: Synthetic peptide
FDVFASPDD

SEQ ID NO: 30168 - protein, 9 aa, Artificial Sequence
  Description of Artificial Sequence: Synthetic peptide
FFELSKTVF

SEQ ID NO: 30169 - protein, 9 aa, Artificial Sequence
  Description of Artificial Sequence: Synthetic peptide
FFELSQTEF

SEQ ID NO: 30170 - protein, 9 aa, Artificial Sequence
  Description of Artificial Sequence: Synthetic peptide
FFRDCPYES

SEQ ID NO: 30171 - protein, 9 aa, Artificial Sequence
  Description of Artificial Sequence: Synthetic peptide
FFRDYPYEY

SEQ ID NO: 30172 - protein, 9 aa, Artificial Sequence
  Description of Artificial Sequence: Synthetic peptide
FGGKFDIGL

SEQ ID NO: 30173 - protein, 9 aa, Artificial Sequence
  Description of Artificial Sequence: Synthetic peptide
FGGKIAIGL

SEQ ID NO: 30174 - protein, 9 aa, Artificial Sequence
  Description of Artificial Sequence: Synthetic peptide
FGGKIDIGV

SEQ ID NO: 30175 - protein, 9 aa, Artificial Sequence
  Description of Artificial Sequence: Synthetic peptide
FGGKIDIVL

SEQ ID NO: 30176 - protein, 9 aa, Artificial Sequence
  Description of Artificial Sequence: Synthetic peptide
FGGKIDVGL

SEQ ID NO: 30177 - protein, 9 aa, Artificial Sequence
  Description of Artificial Sequence: Synthetic peptide
FGGKIHIGL

SEQ ID NO: 30178 - protein, 9 aa, Artificial Sequence
  Description of Artificial Sequence: Synthetic peptide
FGGKINIGL

SEQ ID NO: 30179 - protein, 9 aa, Artificial Sequence
  Description of Artificial Sequence: Synthetic peptide
FGGKLDIGL

SEQ ID NO: 30180 - protein, 9 aa, Artificial Sequence
  Description of Artificial Sequence: Synthetic peptide
FGGTIDIGL

SEQ ID NO: 30181 - protein, 9 aa, Artificial Sequence
  Description of Artificial Sequence: Synthetic peptide
FGLVHQKNA

SEQ ID NO: 30182 - protein, 9 aa, Artificial Sequence
  Description of Artificial Sequence: Synthetic peptide
FGRKIDIGL

SEQ ID NO: 30183 - protein, 9 aa, Artificial Sequence
  Description of Artificial Sequence: Synthetic peptide
FGVVHQKDA

SEQ ID NO: 30184 - protein, 9 aa, Artificial Sequence
  Description of Artificial Sequence: Synthetic peptide
FHHLTEYHG

SEQ ID NO: 30185 - protein, 9 aa, Artificial Sequence
  Description of Artificial Sequence: Synthetic peptide
FHHQPEYHG

SEQ ID NO: 30186 - protein, 9 aa, Artificial Sequence
  Description of Artificial Sequence: Synthetic peptide
FHHQTEYRG

SEQ ID NO: 30187 - protein, 9 aa, Artificial Sequence
  Description of Artificial Sequence: Synthetic peptide
FHHQTGYHG

SEQ ID NO: 30188 - protein, 9 aa, Artificial Sequence
  Description of Artificial Sequence: Synthetic peptide
FHHQTQYHG

SEQ ID NO: 30189 - protein, 9 aa, Artificial Sequence
  Description of Artificial Sequence: Synthetic peptide
FHKWGINLG

SEQ ID NO: 30190 - protein, 9 aa, Artificial Sequence
  Description of Artificial Sequence: Synthetic peptide
FHKWWIHLG

SEQ ID NO: 30191 - protein, 9 aa, Artificial Sequence
  Description of Artificial Sequence: Synthetic peptide
FHKWWINLA

SEQ ID NO: 30192 - protein, 9 aa, Artificial Sequence
  Description of Artificial Sequence: Synthetic peptide
FHKWWINLS

SEQ ID NO: 30193 - protein, 9 aa, Artificial Sequence
  Description of Artificial Sequence: Synthetic peptide
FHKWWINQG

SEQ ID NO: 30194 - protein, 9 aa, Artificial Sequence
  Description of Artificial Sequence: Synthetic peptide
FHKWWISLG

SEQ ID NO: 30195 - protein, 9 aa, Artificial Sequence
  Description of Artificial Sequence: Synthetic peptide
FHKWWITLG

SEQ ID NO: 30196 - protein, 9 aa, Artificial Sequence
  Description of Artificial Sequence: Synthetic peptide
FHKWWLNLG

SEQ ID NO: 30197 - protein, 9 aa, Artificial Sequence
  Description of Artificial Sequence: Synthetic peptide
FHRQTEYHG

SEQ ID NO: 30198 - protein, 9 aa, Artificial Sequence
  Description of Artificial Sequence: Synthetic peptide
FLKWWINLG

SEQ ID NO: 30199 - protein, 9 aa, Artificial Sequence
  Description of Artificial Sequence: Synthetic peptide
FMGATIPED

SEQ ID NO: 30200 - protein, 9 aa, Artificial Sequence
  Description of Artificial Sequence: Synthetic peptide
FMGVTIPAD

SEQ ID NO: 30201 - protein, 9 aa, Artificial Sequence
  Description of Artificial Sequence: Synthetic peptide
FMGVTIPEG

SEQ ID NO: 30202 - protein, 9 aa, Artificial Sequence
  Description of Artificial Sequence: Synthetic peptide
FMGVTIPKD

SEQ ID NO: 30203 - protein, 9 aa, Artificial Sequence
  Description of Artificial Sequence: Synthetic peptide
FMGVTIPVD

SEQ ID NO: 30204 - protein, 9 aa, Artificial Sequence
  Description of Artificial Sequence: Synthetic peptide
FMKCENFNS

SEQ ID NO: 30205 - protein, 9 aa, Artificial Sequence
  Description of Artificial Sequence: Synthetic peptide
FMKCENVNT

SEQ ID NO: 30206 - protein, 9 aa, Artificial Sequence
  Description of Artificial Sequence: Synthetic peptide
FMKCESVNS

SEQ ID NO: 30207 - protein, 9 aa, Artificial Sequence
  Description of Artificial Sequence: Synthetic peptide
FMKGENVNS

SEQ ID NO: 30208 - protein, 9 aa, Artificial Sequence
  Description of Artificial Sequence: Synthetic peptide
FMTCENVNS

SEQ ID NO: 30209 - protein, 9 aa, Artificial Sequence
  Description of Artificial Sequence: Synthetic peptide
FMWHANSCG

SEQ ID NO: 30210 - protein, 9 aa, Artificial Sequence
  Description of Artificial Sequence: Synthetic peptide
FMWHANSGA

SEQ ID NO: 30211 - protein, 9 aa, Artificial Sequence
  Description of Artificial Sequence: Synthetic peptide
FMWYANSCA

SEQ ID NO: 30212 - protein, 9 aa, Artificial Sequence
  Description of Artificial Sequence: Synthetic peptide
FNINAQDWD

SEQ ID NO: 30213 - protein, 9 aa, Artificial Sequence
  Description of Artificial Sequence: Synthetic peptide
FNVTAQDWD

SEQ ID NO: 30214 - protein, 9 aa, Artificial Sequence
  Description of Artificial Sequence: Synthetic peptide
FPHHLWVGG

SEQ ID NO: 30215 - protein, 9 aa, Artificial Sequence
  Description of Artificial Sequence: Synthetic peptide
FPYHLWIGG

SEQ ID NO: 30216 - protein, 9 aa, Artificial Sequence
  Description of Artificial Sequence: Synthetic peptide
FPYHLWVAG

SEQ ID NO: 30217 - protein, 9 aa, Artificial Sequence
  Description of Artificial Sequence: Synthetic peptide
FPYHVWVGG

SEQ ID NO: 30218 - protein, 9 aa, Artificial Sequence
  Description of Artificial Sequence: Synthetic peptide
FPYRLWVGG

SEQ ID NO: 30219 - protein, 9 aa, Artificial Sequence
  Description of Artificial Sequence: Synthetic peptide
FRECLQIVN

SEQ ID NO: 30220 - protein, 9 aa, Artificial Sequence
  Description of Artificial Sequence: Synthetic peptide
FRECLQLVT

SEQ ID NO: 30221 - protein, 9 aa, Artificial Sequence
  Description of Artificial Sequence: Synthetic peptide
FRECMQIVT

SEQ ID NO: 30222 - protein, 9 aa, Artificial Sequence
  Description of Artificial Sequence: Synthetic peptide
FREGLQIVT

SEQ ID NO: 30223 - protein, 9 aa, Artificial Sequence
  Description of Artificial Sequence: Synthetic peptide
FRGCLQIVT

SEQ ID NO: 30224 - protein, 9 aa, Artificial Sequence
  Description of Artificial Sequence: Synthetic peptide
FRGIETEQG

SEQ ID NO: 30225 - protein, 9 aa, Artificial Sequence
  Description of Artificial Sequence: Synthetic peptide
FRGIETGEG

SEQ ID NO: 30226 - protein, 9 aa, Artificial Sequence
  Description of Artificial Sequence: Synthetic peptide
FRGIETGQV

SEQ ID NO: 30227 - protein, 9 aa, Artificial Sequence
  Description of Artificial Sequence: Synthetic peptide
FRGIETVQG

SEQ ID NO: 30228 - protein, 9 aa, Artificial Sequence
  Description of Artificial Sequence: Synthetic peptide
FRGTETGQG

SEQ ID NO: 30229 - protein, 9 aa, Artificial Sequence
  Description of Artificial Sequence: Synthetic peptide
FRGVETGQG

SEQ ID NO: 30230 - protein, 9 aa, Artificial Sequence
  Description of Artificial Sequence: Synthetic peptide
FRKCLQIVT

SEQ ID NO: 30231 - protein, 9 aa, Artificial Sequence
  Description of Artificial Sequence: Synthetic peptide
FRRWQSNTT

SEQ ID NO: 30232 - protein, 9 aa, Artificial Sequence
  Description of Artificial Sequence: Synthetic peptide
FTETTVRWP

SEQ ID NO: 30233 - protein, 9 aa, Artificial Sequence
  Description of Artificial Sequence: Synthetic peptide
FTQPTVRWP

SEQ ID NO: 30234 - protein, 9 aa, Artificial Sequence
  Description of Artificial Sequence: Synthetic peptide
FVLVHQKDA

SEQ ID NO: 30235 - protein, 9 aa, Artificial Sequence
  Description of Artificial Sequence: Synthetic peptide
FWKFALLSF

SEQ ID NO: 30236 - protein, 9 aa, Artificial Sequence
  Description of Artificial Sequence: Synthetic peptide
FWKLALHSF

SEQ ID NO: 30237 - protein, 9 aa, Artificial Sequence
  Description of Artificial Sequence: Synthetic peptide
FWPQIQYRM

SEQ ID NO: 30238 - protein, 9 aa, Artificial Sequence
  Description of Artificial Sequence: Synthetic peptide
FYGKSAPVG

SEQ ID NO: 30239 - protein, 9 aa, Artificial Sequence
  Description of Artificial Sequence: Synthetic peptide
FYGKTALVG

SEQ ID NO: 30240 - protein, 9 aa, Artificial Sequence
  Description of Artificial Sequence: Synthetic peptide
FYGKTAPVA

SEQ ID NO: 30241 - protein, 9 aa, Artificial Sequence
  Description of Artificial Sequence: Synthetic peptide
FYGPVTKSC

SEQ ID NO: 30242 - protein, 9 aa, Artificial Sequence
  Description of Artificial Sequence: Synthetic peptide
FYGQLTKSC

SEQ ID NO: 30243 - protein, 9 aa, Artificial Sequence
  Description of Artificial Sequence: Synthetic peptide
FYGQTAPVG

SEQ ID NO: 30244 - protein, 9 aa, Artificial Sequence
  Description of Artificial Sequence: Synthetic peptide
FYGQVTESC

SEQ ID NO: 30245 - protein, 9 aa, Artificial Sequence
  Description of Artificial Sequence: Synthetic peptide
FYGQVTMSC

SEQ ID NO: 30246 - protein, 9 aa, Artificial Sequence
  Description of Artificial Sequence: Synthetic peptide
FYGQVTQSC

SEQ ID NO: 30247 - protein, 9 aa, Artificial Sequence
  Description of Artificial Sequence: Synthetic peptide
FYGQVTTSC

SEQ ID NO: 30248 - protein, 9 aa, Artificial Sequence
  Description of Artificial Sequence: Synthetic peptide
FYKWWINLG

SEQ ID NO: 30249 - protein, 9 aa, Artificial Sequence
  Description of Artificial Sequence: Synthetic peptide
GARPQWDIP

SEQ ID NO: 30250 - protein, 9 aa, Artificial Sequence
  Description of Artificial Sequence: Synthetic peptide
GARSSPDCL

SEQ ID NO: 30251 - protein, 9 aa, Artificial Sequence
  Description of Artificial Sequence: Synthetic peptide
GASWHDREH

SEQ ID NO: 30252 - protein, 9 aa, Artificial Sequence
  Description of Artificial Sequence: Synthetic peptide
GATEVFYMI

SEQ ID NO: 30253 - protein, 9 aa, Artificial Sequence
  Description of Artificial Sequence: Synthetic peptide
GCDMDAYSN

SEQ ID NO: 30254 - protein, 9 aa, Artificial Sequence
  Description of Artificial Sequence: Synthetic peptide
GCDVDAYSN

SEQ ID NO: 30255 - protein, 9 aa, Artificial Sequence
  Description of Artificial Sequence: Synthetic peptide
GDCGASNCY

SEQ ID NO: 30256 - protein, 9 aa, Artificial Sequence
  Description of Artificial Sequence: Synthetic peptide
GFHNTELPI

SEQ ID NO: 30257 - protein, 9 aa, Artificial Sequence
  Description of Artificial Sequence: Synthetic peptide
GGAKALRFN

SEQ ID NO: 30258 - protein, 9 aa, Artificial Sequence
  Description of Artificial Sequence: Synthetic peptide
GGARALRFI

SEQ ID NO: 30259 - protein, 9 aa, Artificial Sequence
  Description of Artificial Sequence: Synthetic peptide
GGARALRFS

SEQ ID NO: 30260 - protein, 9 aa, Artificial Sequence
  Description of Artificial Sequence: Synthetic peptide
GGGCEDWPM

SEQ ID NO: 30261 - protein, 9 aa, Artificial Sequence
  Description of Artificial Sequence: Synthetic peptide
GGPEIKHYI

SEQ ID NO: 30262 - protein, 9 aa, Artificial Sequence
  Description of Artificial Sequence: Synthetic peptide
GHWNAIMRW

SEQ ID NO: 30263 - protein, 9 aa, Artificial Sequence
  Description of Artificial Sequence: Synthetic peptide
GIDWEDVWE

SEQ ID NO: 30264 - protein, 9 aa, Artificial Sequence
  Description of Artificial Sequence: Synthetic peptide
GIKWRSQDK

SEQ ID NO: 30265 - protein, 9 aa, Artificial Sequence
  Description of Artificial Sequence: Synthetic peptide
GIRDDDSTI

SEQ ID NO: 30266 - protein, 9 aa, Artificial Sequence
  Description of Artificial Sequence: Synthetic peptide
GIRGDDSTI

SEQ ID NO: 30267 - protein, 9 aa, Artificial Sequence
  Description of Artificial Sequence: Synthetic peptide
GIRVDDNTI

SEQ ID NO: 30268 - protein, 9 aa, Artificial Sequence
  Description of Artificial Sequence: Synthetic peptide
GIRVDDSTK

SEQ ID NO: 30269 - protein, 9 aa, Artificial Sequence
  Description of Artificial Sequence: Synthetic peptide
GIRVDDSTV

SEQ ID NO: 30270 - protein, 9 aa, Artificial Sequence
  Description of Artificial Sequence: Synthetic peptide
GMDEVEREG

SEQ ID NO: 30271 - protein, 9 aa, Artificial Sequence
  Description of Artificial Sequence: Synthetic peptide
GMEEGEREG

SEQ ID NO: 30272 - protein, 9 aa, Artificial Sequence
  Description of Artificial Sequence: Synthetic peptide
GMEELEREG

SEQ ID NO: 30273 - protein, 9 aa, Artificial Sequence
  Description of Artificial Sequence: Synthetic peptide
GNIYHFNNV

SEQ ID NO: 30274 - protein, 9 aa, Artificial Sequence
  Description of Artificial Sequence: Synthetic peptide
GPDGAKLNK

SEQ ID NO: 30275 - protein, 9 aa, Artificial Sequence
  Description of Artificial Sequence: Synthetic peptide
GPDGAKRHK

SEQ ID NO: 30276 - protein, 9 aa, Artificial Sequence
  Description of Artificial Sequence: Synthetic peptide
GPDGARRNK

SEQ ID NO: 30277 - protein, 9 aa, Artificial Sequence
  Description of Artificial Sequence: Synthetic peptide
GPDKCTVNL

SEQ ID NO: 30278 - protein, 9 aa, Artificial Sequence
  Description of Artificial Sequence: Synthetic peptide
GPGLKAWPC

SEQ ID NO: 30279 - protein, 9 aa, Artificial Sequence
  Description of Artificial Sequence: Synthetic peptide
GPLATTDPV

SEQ ID NO: 30280 - protein, 9 aa, Artificial Sequence
  Description of Artificial Sequence: Synthetic peptide
GPTEVFYMI

SEQ ID NO: 30281 - protein, 9 aa, Artificial Sequence
  Description of Artificial Sequence: Synthetic peptide
GRDWAFCDY

SEQ ID NO: 30282 - protein, 9 aa, Artificial Sequence
  Description of Artificial Sequence: Synthetic peptide
GRHWACCDY

SEQ ID NO: 30283 - protein, 9 aa, Artificial Sequence
  Description of Artificial Sequence: Synthetic peptide
GRHWAFCDD

SEQ ID NO: 30284 - protein, 9 aa, Artificial Sequence
  Description of Artificial Sequence: Synthetic peptide
GRHWAFCDF

SEQ ID NO: 30285 - protein, 9 aa, Artificial Sequence
  Description of Artificial Sequence: Synthetic peptide
GRHWAFCDH

SEQ ID NO: 30286 - protein, 9 aa, Artificial Sequence
  Description of Artificial Sequence: Synthetic peptide
GRHWAFCDN

SEQ ID NO: 30287 - protein, 9 aa, Artificial Sequence
  Description of Artificial Sequence: Synthetic peptide
GRHWAFCGY

SEQ ID NO: 30288 - protein, 9 aa, Artificial Sequence
  Description of Artificial Sequence: Synthetic peptide
GRHWAFCHY

SEQ ID NO: 30289 - protein, 9 aa, Artificial Sequence
  Description of Artificial Sequence: Synthetic peptide
GRHWAFFDY

SEQ ID NO: 30290 - protein, 9 aa, Artificial Sequence
  Description of Artificial Sequence: Synthetic peptide
GRHWAFGDY

SEQ ID NO: 30291 - protein, 9 aa, Artificial Sequence
  Description of Artificial Sequence: Synthetic peptide
GRHWAVCDY

SEQ ID NO: 30292 - protein, 9 aa, Artificial Sequence
  Description of Artificial Sequence: Synthetic peptide
GRHWDFCDY

SEQ ID NO: 30293 - protein, 9 aa, Artificial Sequence
  Description of Artificial Sequence: Synthetic peptide
GRHWSFCDY

SEQ ID NO: 30294 - protein, 9 aa, Artificial Sequence
  Description of Artificial Sequence: Synthetic peptide
GRHWTFCDY

SEQ ID NO: 30295 - protein, 9 aa, Artificial Sequence
  Description of Artificial Sequence: Synthetic peptide
GRPWAFCDY

SEQ ID NO: 30296 - protein, 9 aa, Artificial Sequence
  Description of Artificial Sequence: Synthetic peptide
GRQWAVCDY

SEQ ID NO: 30297 - protein, 9 aa, Artificial Sequence
  Description of Artificial Sequence: Synthetic peptide
GRRWAFCDY

SEQ ID NO: 30298 - protein, 9 aa, Artificial Sequence
  Description of Artificial Sequence: Synthetic peptide
GRVSGHVHW

SEQ ID NO: 30299 - protein, 9 aa, Artificial Sequence
  Description of Artificial Sequence: Synthetic peptide
GRYSLCADE

SEQ ID NO: 30300 - protein, 9 aa, Artificial Sequence
  Description of Artificial Sequence: Synthetic peptide
GRYWAFCDY

SEQ ID NO: 30301 - protein, 9 aa, Artificial Sequence
  Description of Artificial Sequence: Synthetic peptide
GSAEVFYMI

SEQ ID NO: 30302 - protein, 9 aa, Artificial Sequence
  Description of Artificial Sequence: Synthetic peptide
GSNEVFYMI

SEQ ID NO: 30303 - protein, 9 aa, Artificial Sequence
  Description of Artificial Sequence: Synthetic peptide
GSPEVFYMI

SEQ ID NO: 30304 - protein, 9 aa, Artificial Sequence
  Description of Artificial Sequence: Synthetic peptide
GSTELFYMI

SEQ ID NO: 30305 - protein, 9 aa, Artificial Sequence
  Description of Artificial Sequence: Synthetic peptide
GSTEVFCMI

SEQ ID NO: 30306 - protein, 9 aa, Artificial Sequence
  Description of Artificial Sequence: Synthetic peptide
GSTEVFYMV

SEQ ID NO: 30307 - protein, 9 aa, Artificial Sequence
  Description of Artificial Sequence: Synthetic peptide
GSTEVFYVI

SEQ ID NO: 30308 - protein, 9 aa, Artificial Sequence
  Description of Artificial Sequence: Synthetic peptide
GSTKVFYMI

SEQ ID NO: 30309 - protein, 9 aa, Artificial Sequence
  Description of Artificial Sequence: Synthetic peptide
GVEPMSRAA

SEQ ID NO: 30310 - protein, 9 aa, Artificial Sequence
  Description of Artificial Sequence: Synthetic peptide
GVRDAVHWC

SEQ ID NO: 30311 - protein, 9 aa, Artificial Sequence
  Description of Artificial Sequence: Synthetic peptide
GWSARSVNM

SEQ ID NO: 30312 - protein, 9 aa, Artificial Sequence
  Description of Artificial Sequence: Synthetic peptide
HAISVGEWD

SEQ ID NO: 30313 - protein, 9 aa, Artificial Sequence
  Description of Artificial Sequence: Synthetic peptide
HARGIWDFH

SEQ ID NO: 30314 - protein, 9 aa, Artificial Sequence
  Description of Artificial Sequence: Synthetic peptide
HCAHYWMQD

SEQ ID NO: 30315 - protein, 9 aa, Artificial Sequence
  Description of Artificial Sequence: Synthetic peptide
HCIRHFCEV

SEQ ID NO: 30316 - protein, 9 aa, Artificial Sequence
  Description of Artificial Sequence: Synthetic peptide
HCLLQKAAL

SEQ ID NO: 30317 - protein, 9 aa, Artificial Sequence
  Description of Artificial Sequence: Synthetic peptide
HCSCHFCEV

SEQ ID NO: 30318 - protein, 9 aa, Artificial Sequence
  Description of Artificial Sequence: Synthetic peptide
HCSHHFCEV

SEQ ID NO: 30319 - protein, 9 aa, Artificial Sequence
  Description of Artificial Sequence: Synthetic peptide
HCSRHFCEA

SEQ ID NO: 30320 - protein, 9 aa, Artificial Sequence
  Description of Artificial Sequence: Synthetic peptide
HCSRHFCKV

SEQ ID NO: 30321 - protein, 9 aa, Artificial Sequence
  Description of Artificial Sequence: Synthetic peptide
HCSRHFCQV

SEQ ID NO: 30322 - protein, 9 aa, Artificial Sequence
  Description of Artificial Sequence: Synthetic peptide
HCSRHFGEV

SEQ ID NO: 30323 - protein, 9 aa, Artificial Sequence
  Description of Artificial Sequence: Synthetic peptide
HCSRHYCEV

SEQ ID NO: 30324 - protein, 9 aa, Artificial Sequence
  Description of Artificial Sequence: Synthetic peptide
HCTRHFCEV

SEQ ID NO: 30325 - protein, 9 aa, Artificial Sequence
  Description of Artificial Sequence: Synthetic peptide
HCTRYWMQD

SEQ ID NO: 30326 - protein, 9 aa, Artificial Sequence
  Description of Artificial Sequence: Synthetic peptide
HCYRKVVFR

SEQ ID NO: 30327 - protein, 9 aa, Artificial Sequence
  Description of Artificial Sequence: Synthetic peptide
HDIDGWQMA

SEQ ID NO: 30328 - protein, 9 aa, Artificial Sequence
  Description of Artificial Sequence: Synthetic peptide
HDIWQWSIK

SEQ ID NO: 30329 - protein, 9 aa, Artificial Sequence
  Description of Artificial Sequence: Synthetic peptide
HDMLQWSIK

SEQ ID NO: 30330 - protein, 9 aa, Artificial Sequence
  Description of Artificial Sequence: Synthetic peptide
HDMWQWTIK

SEQ ID NO: 30331 - protein, 9 aa, Artificial Sequence
  Description of Artificial Sequence: Synthetic peptide
HDQVKCLRK

SEQ ID NO: 30332 - protein, 9 aa, Artificial Sequence
  Description of Artificial Sequence: Synthetic peptide
HDTWQWSIK

SEQ ID NO: 30333 - protein, 9 aa, Artificial Sequence
  Description of Artificial Sequence: Synthetic peptide
HEIDGWQTA

SEQ ID NO: 30334 - protein, 9 aa, Artificial Sequence
  Description of Artificial Sequence: Synthetic peptide
HEIDVWQMA

SEQ ID NO: 30335 - protein, 9 aa, Artificial Sequence
  Description of Artificial Sequence: Synthetic peptide
HEVDGWQMA

SEQ ID NO: 30336 - protein, 9 aa, Artificial Sequence
  Description of Artificial Sequence: Synthetic peptide
HEVHSFLSG

SEQ ID NO: 30337 - protein, 9 aa, Artificial Sequence
  Description of Artificial Sequence: Synthetic peptide
HKRNLYALQ

SEQ ID NO: 30338 - protein, 9 aa, Artificial Sequence
  Description of Artificial Sequence: Synthetic peptide
HLHFHWGLW

SEQ ID NO: 30339 - protein, 9 aa, Artificial Sequence
  Description of Artificial Sequence: Synthetic peptide
HLWRTFEAQ

SEQ ID NO: 30340 - protein, 9 aa, Artificial Sequence
  Description of Artificial Sequence: Synthetic peptide
HLYSDYWFG

SEQ ID NO: 30341 - protein, 9 aa, Artificial Sequence
  Description of Artificial Sequence: Synthetic peptide
HLYSEYWFD

SEQ ID NO: 30342 - protein, 9 aa, Artificial Sequence
  Description of Artificial Sequence: Synthetic peptide
HRDAHLLME

SEQ ID NO: 30343 - protein, 9 aa, Artificial Sequence
  Description of Artificial Sequence: Synthetic peptide
HRYSLCADE

SEQ ID NO: 30344 - protein, 9 aa, Artificial Sequence
  Description of Artificial Sequence: Synthetic peptide
HSHFHWGLW

SEQ ID NO: 30345 - protein, 9 aa, Artificial Sequence
  Description of Artificial Sequence: Synthetic peptide
HTCSEIVDG

SEQ ID NO: 30346 - protein, 9 aa, Artificial Sequence
  Description of Artificial Sequence: Synthetic peptide
HTCSELVEG

SEQ ID NO: 30347 - protein, 9 aa, Artificial Sequence
  Description of Artificial Sequence: Synthetic peptide
HTILSHDPW

SEQ ID NO: 30348 - protein, 9 aa, Artificial Sequence
  Description of Artificial Sequence: Synthetic peptide
HTIWSHDQW

SEQ ID NO: 30349 - protein, 9 aa, Artificial Sequence
  Description of Artificial Sequence: Synthetic peptide
HTLLLSREP

SEQ ID NO: 30350 - protein, 9 aa, Artificial Sequence
  Description of Artificial Sequence: Synthetic peptide
IACMKCPNI

SEQ ID NO: 30351 - protein, 9 aa, Artificial Sequence
  Description of Artificial Sequence: Synthetic peptide
IANNDLRFG

SEQ ID NO: 30352 - protein, 9 aa, Artificial Sequence
  Description of Artificial Sequence: Synthetic peptide
ICEMGPYHG

SEQ ID NO: 30353 - protein, 9 aa, Artificial Sequence
  Description of Artificial Sequence: Synthetic peptide
ICMSQEKRC

SEQ ID NO: 30354 - protein, 9 aa, Artificial Sequence
  Description of Artificial Sequence: Synthetic peptide
IDVGAYVWS

SEQ ID NO: 30355 - protein, 9 aa, Artificial Sequence
  Description of Artificial Sequence: Synthetic peptide
IFEQCQRMR

SEQ ID NO: 30356 - protein, 9 aa, Artificial Sequence
  Description of Artificial Sequence: Synthetic peptide
IFRDCPYEY

SEQ ID NO: 30357 - protein, 9 aa, Artificial Sequence
  Description of Artificial Sequence: Synthetic peptide
IGIVFQRDF

SEQ ID NO: 30358 - protein, 9 aa, Artificial Sequence
  Description of Artificial Sequence: Synthetic peptide
IGLVFQRDF

SEQ ID NO: 30359 - protein, 9 aa, Artificial Sequence
  Description of Artificial Sequence: Synthetic peptide
IGVVFPRDF

SEQ ID NO: 30360 - protein, 9 aa, Artificial Sequence
  Description of Artificial Sequence: Synthetic peptide
IGVVFQRDC

SEQ ID NO: 30361 - protein, 9 aa, Artificial Sequence
  Description of Artificial Sequence: Synthetic peptide
IGVVFQRDI

SEQ ID NO: 30362 - protein, 9 aa, Artificial Sequence
  Description of Artificial Sequence: Synthetic peptide
IGVVFQRDV

SEQ ID NO: 30363 - protein, 9 aa, Artificial Sequence
  Description of Artificial Sequence: Synthetic peptide
IGVVFQRDY

SEQ ID NO: 30364 - protein, 9 aa, Artificial Sequence
  Description of Artificial Sequence: Synthetic peptide
IGVVFQRVF

SEQ ID NO: 30365 - protein, 9 aa, Artificial Sequence
  Description of Artificial Sequence: Synthetic peptide
IHVEYFDAW

SEQ ID NO: 30366 - protein, 9 aa, Artificial Sequence
  Description of Artificial Sequence: Synthetic peptide
IHWNAIMRW

SEQ ID NO: 30367 - protein, 9 aa, Artificial Sequence
  Description of Artificial Sequence: Synthetic peptide
IIKWRSQDK

SEQ ID NO: 30368 - protein, 9 aa, Artificial Sequence
  Description of Artificial Sequence: Synthetic peptide
IINKDHDKF

SEQ ID NO: 30369 - protein, 9 aa, Artificial Sequence
  Description of Artificial Sequence: Synthetic peptide
IINKHHDRF

SEQ ID NO: 30370 - protein, 9 aa, Artificial Sequence
  Description of Artificial Sequence: Synthetic peptide
IINKRHDKF

SEQ ID NO: 30371 - protein, 9 aa, Artificial Sequence
  Description of Artificial Sequence: Synthetic peptide
INQMARHPK

SEQ ID NO: 30372 - protein, 9 aa, Artificial Sequence
  Description of Artificial Sequence: Synthetic peptide
INVEYFDTW

SEQ ID NO: 30373 - protein, 9 aa, Artificial Sequence
  Description of Artificial Sequence: Synthetic peptide
INVEYFEAW

SEQ ID NO: 30374 - protein, 9 aa, Artificial Sequence
  Description of Artificial Sequence: Synthetic peptide
INVEYFVAW

SEQ ID NO: 30375 - protein, 9 aa, Artificial Sequence
  Description of Artificial Sequence: Synthetic peptide
IRTSFHVNA

SEQ ID NO: 30376 - protein, 9 aa, Artificial Sequence
  Description of Artificial Sequence: Synthetic peptide
ISNNDLRFV

SEQ ID NO: 30377 - protein, 9 aa, Artificial Sequence
  Description of Artificial Sequence: Synthetic peptide
ISNNDLRVG

SEQ ID NO: 30378 - protein, 9 aa, Artificial Sequence
  Description of Artificial Sequence: Synthetic peptide
ISNNDVRFG

SEQ ID NO: 30379 - protein, 9 aa, Artificial Sequence
  Description of Artificial Sequence: Synthetic peptide
ISTNDLRFG

SEQ ID NO: 30380 - protein, 9 aa, Artificial Sequence
  Description of Artificial Sequence: Synthetic peptide
ITCKFTQNG

SEQ ID NO: 30381 - protein, 9 aa, Artificial Sequence
  Description of Artificial Sequence: Synthetic peptide
ITCKMDFWQ

SEQ ID NO: 30382 - protein, 9 aa, Artificial Sequence
  Description of Artificial Sequence: Synthetic peptide
ITTGSRPTK

SEQ ID NO: 30383 - protein, 9 aa, Artificial Sequence
  Description of Artificial Sequence: Synthetic peptide
IVFPSLARG

SEQ ID NO: 30384 - protein, 9 aa, Artificial Sequence
  Description of Artificial Sequence: Synthetic peptide
IWPQSQYRM

SEQ ID NO: 30385 - protein, 9 aa, Artificial Sequence
  Description of Artificial Sequence: Synthetic peptide
KAHKTVQDK

SEQ ID NO: 30386 - protein, 9 aa, Artificial Sequence
  Description of Artificial Sequence: Synthetic peptide
KAMSVPWGK

SEQ ID NO: 30387 - protein, 9 aa, Artificial Sequence
  Description of Artificial Sequence: Synthetic peptide
KANGSMDHH

SEQ ID NO: 30388 - protein, 9 aa, Artificial Sequence
  Description of Artificial Sequence: Synthetic peptide
KANYACDWD

SEQ ID NO: 30389 - protein, 9 aa, Artificial Sequence
  Description of Artificial Sequence: Synthetic peptide
KCFSMDFSG

SEQ ID NO: 30390 - protein, 9 aa, Artificial Sequence
  Description of Artificial Sequence: Synthetic peptide
KCMPGCNDW

SEQ ID NO: 30391 - protein, 9 aa, Artificial Sequence
  Description of Artificial Sequence: Synthetic peptide
KCMPNVGWR

SEQ ID NO: 30392 - protein, 9 aa, Artificial Sequence
  Description of Artificial Sequence: Synthetic peptide
KCNVNPACF

SEQ ID NO: 30393 - protein, 9 aa, Artificial Sequence
  Description of Artificial Sequence: Synthetic peptide
KCQWVGREN

SEQ ID NO: 30394 - protein, 9 aa, Artificial Sequence
  Description of Artificial Sequence: Synthetic peptide
KCVSMAFSG

SEQ ID NO: 30395 - protein, 9 aa, Artificial Sequence
  Description of Artificial Sequence: Synthetic peptide
KCVSMDFAG

SEQ ID NO: 30396 - protein, 9 aa, Artificial Sequence
  Description of Artificial Sequence: Synthetic peptide
KCVSMDFTG

SEQ ID NO: 30397 - protein, 9 aa, Artificial Sequence
  Description of Artificial Sequence: Synthetic peptide
KCVSMGFSG

SEQ ID NO: 30398 - protein, 9 aa, Artificial Sequence
  Description of Artificial Sequence: Synthetic peptide
KCVSMVFSG

SEQ ID NO: 30399 - protein, 9 aa, Artificial Sequence
  Description of Artificial Sequence: Synthetic peptide
KCVSMYFSG

SEQ ID NO: 30400 - protein, 9 aa, Artificial Sequence
  Description of Artificial Sequence: Synthetic peptide
KCVSVDFSG

SEQ ID NO: 30401 - protein, 9 aa, Artificial Sequence
  Description of Artificial Sequence: Synthetic peptide
KCWRHVQWN

SEQ ID NO: 30402 - protein, 9 aa, Artificial Sequence
  Description of Artificial Sequence: Synthetic peptide
KDHNRWNRV

SEQ ID NO: 30403 - protein, 9 aa, Artificial Sequence
  Description of Artificial Sequence: Synthetic peptide
KDPNRWNRL

SEQ ID NO: 30404 - protein, 9 aa, Artificial Sequence
  Description of Artificial Sequence: Synthetic peptide
KDVGDDAHG

SEQ ID NO: 30405 - protein, 9 aa, Artificial Sequence
  Description of Artificial Sequence: Synthetic peptide
KDYNRWNRL

SEQ ID NO: 30406 - protein, 9 aa, Artificial Sequence
  Description of Artificial Sequence: Synthetic peptide
KEHNRWNRL

SEQ ID NO: 30407 - protein, 9 aa, Artificial Sequence
  Description of Artificial Sequence: Synthetic peptide
KFAKDWVSD

SEQ ID NO: 30408 - protein, 9 aa, Artificial Sequence
  Description of Artificial Sequence: Synthetic peptide
KFAMDWDSD

SEQ ID NO: 30409 - protein, 9 aa, Artificial Sequence
  Description of Artificial Sequence: Synthetic peptide
KFAMDWVSV

SEQ ID NO: 30410 - protein, 9 aa, Artificial Sequence
  Description of Artificial Sequence: Synthetic peptide
KFVSMDFSG

SEQ ID NO: 30411 - protein, 9 aa, Artificial Sequence
  Description of Artificial Sequence: Synthetic peptide
KHEADYVDM

SEQ ID NO: 30412 - protein, 9 aa, Artificial Sequence
  Description of Artificial Sequence: Synthetic peptide
KHEPRQSPR

SEQ ID NO: 30413 - protein, 9 aa, Artificial Sequence
  Description of Artificial Sequence: Synthetic peptide
KHKARQSPR

SEQ ID NO: 30414 - protein, 9 aa, Artificial Sequence
  Description of Artificial Sequence: Synthetic peptide
KHKLRQSPR

SEQ ID NO: 30415 - protein, 9 aa, Artificial Sequence
  Description of Artificial Sequence: Synthetic peptide
KHMPRQSPR

SEQ ID NO: 30416 - protein, 9 aa, Artificial Sequence
  Description of Artificial Sequence: Synthetic peptide
KHSELWREN

SEQ ID NO: 30417 - protein, 9 aa, Artificial Sequence
  Description of Artificial Sequence: Synthetic peptide
KKCFQWTSA

SEQ ID NO: 30418 - protein, 9 aa, Artificial Sequence
  Description of Artificial Sequence: Synthetic peptide
KKVRAFRQI

SEQ ID NO: 30419 - protein, 9 aa, Artificial Sequence
  Description of Artificial Sequence: Synthetic peptide
KMKDVEENG

SEQ ID NO: 30420 - protein, 9 aa, Artificial Sequence
  Description of Artificial Sequence: Synthetic peptide
KMKPVQRVG

SEQ ID NO: 30421 - protein, 9 aa, Artificial Sequence
  Description of Artificial Sequence: Synthetic peptide
KMMSFSEVD

SEQ ID NO: 30422 - protein, 9 aa, Artificial Sequence
  Description of Artificial Sequence: Synthetic peptide
KQEGDDVDM

SEQ ID NO: 30423 - protein, 9 aa, Artificial Sequence
  Description of Artificial Sequence: Synthetic peptide
KQEGDSVDM

SEQ ID NO: 30424 - protein, 9 aa, Artificial Sequence
  Description of Artificial Sequence: Synthetic peptide
KQVRAFREI

SEQ ID NO: 30425 - protein, 9 aa, Artificial Sequence
  Description of Artificial Sequence: Synthetic peptide
KQVRAFRPI

SEQ ID NO: 30426 - protein, 9 aa, Artificial Sequence
  Description of Artificial Sequence: Synthetic peptide
KQVRAFRQL

SEQ ID NO: 30427 - protein, 9 aa, Artificial Sequence
  Description of Artificial Sequence: Synthetic peptide
KQVRAFRQM

SEQ ID NO: 30428 - protein, 9 aa, Artificial Sequence
  Description of Artificial Sequence: Synthetic peptide
KQVRAFRQS

SEQ ID NO: 30429 - protein, 9 aa, Artificial Sequence
  Description of Artificial Sequence: Synthetic peptide
KQVRAFRQV

SEQ ID NO: 30430 - protein, 9 aa, Artificial Sequence
  Description of Artificial Sequence: Synthetic peptide
KQVRAFRRI

SEQ ID NO: 30431 - protein, 9 aa, Artificial Sequence
  Description of Artificial Sequence: Synthetic peptide
KQVRDFRQI

SEQ ID NO: 30432 - protein, 9 aa, Artificial Sequence
  Description of Artificial Sequence: Synthetic peptide
KQVRPFRQI

SEQ ID NO: 30433 - protein, 9 aa, Artificial Sequence
  Description of Artificial Sequence: Synthetic peptide
KQVRSFRQI

SEQ ID NO: 30434 - protein, 9 aa, Artificial Sequence
  Description of Artificial Sequence: Synthetic peptide
KQVRVFRQI

SEQ ID NO: 30435 - protein, 9 aa, Artificial Sequence
  Description of Artificial Sequence: Synthetic peptide
KRVHFEGGD

SEQ ID NO: 30436 - protein, 9 aa, Artificial Sequence
  Description of Artificial Sequence: Synthetic peptide
KSMTELDQP

SEQ ID NO: 30437 - protein, 9 aa, Artificial Sequence
  Description of Artificial Sequence: Synthetic peptide
KTCELFTPG

SEQ ID NO: 30438 - protein, 9 aa, Artificial Sequence
  Description of Artificial Sequence: Synthetic peptide
KTCEMFTPA

SEQ ID NO: 30439 - protein, 9 aa, Artificial Sequence
  Description of Artificial Sequence: Synthetic peptide
KTCEMFTPS

SEQ ID NO: 30440 - protein, 9 aa, Artificial Sequence
  Description of Artificial Sequence: Synthetic peptide
KTCERFTPG

SEQ ID NO: 30441 - protein, 9 aa, Artificial Sequence
  Description of Artificial Sequence: Synthetic peptide
KTCGMFTPG

SEQ ID NO: 30442 - protein, 9 aa, Artificial Sequence
  Description of Artificial Sequence: Synthetic peptide
KTELAMVID

SEQ ID NO: 30443 - protein, 9 aa, Artificial Sequence
  Description of Artificial Sequence: Synthetic peptide
KTELDRDSM

SEQ ID NO: 30444 - protein, 9 aa, Artificial Sequence
  Description of Artificial Sequence: Synthetic peptide
KTEWAMAID

SEQ ID NO: 30445 - protein, 9 aa, Artificial Sequence
  Description of Artificial Sequence: Synthetic peptide
KTEWAMVLD

SEQ ID NO: 30446 - protein, 9 aa, Artificial Sequence
  Description of Artificial Sequence: Synthetic peptide
KTEWAMVVD

SEQ ID NO: 30447 - protein, 9 aa, Artificial Sequence
  Description of Artificial Sequence: Synthetic peptide
KTISGFQDK

SEQ ID NO: 30448 - protein, 9 aa, Artificial Sequence
  Description of Artificial Sequence: Synthetic peptide
KTKWAMVID

SEQ ID NO: 30449 - protein, 9 aa, Artificial Sequence
  Description of Artificial Sequence: Synthetic peptide
KTMSGPWGK

SEQ ID NO: 30450 - protein, 9 aa, Artificial Sequence
  Description of Artificial Sequence: Synthetic peptide
KVNYACDWH

SEQ ID NO: 30451 - protein, 9 aa, Artificial Sequence
  Description of Artificial Sequence: Synthetic peptide
KVTYACDWD

SEQ ID NO: 30452 - protein, 9 aa, Artificial Sequence
  Description of Artificial Sequence: Synthetic peptide
KWDSIFVEH

SEQ ID NO: 30453 - protein, 9 aa, Artificial Sequence
  Description of Artificial Sequence: Synthetic peptide
KWDSIFVQR

SEQ ID NO: 30454 - protein, 9 aa, Artificial Sequence
  Description of Artificial Sequence: Synthetic peptide
KYAANWLKD

SEQ ID NO: 30455 - protein, 9 aa, Artificial Sequence
  Description of Artificial Sequence: Synthetic peptide
KYADNWLKA

SEQ ID NO: 30456 - protein, 9 aa, Artificial Sequence
  Description of Artificial Sequence: Synthetic peptide
KYADNWVKD

SEQ ID NO: 30457 - protein, 9 aa, Artificial Sequence
  Description of Artificial Sequence: Synthetic peptide
KYADYWLKD

SEQ ID NO: 30458 - protein, 9 aa, Artificial Sequence
  Description of Artificial Sequence: Synthetic peptide
KYSDNWLKD

SEQ ID NO: 30459 - protein, 9 aa, Artificial Sequence
  Description of Artificial Sequence: Synthetic peptide
KYSEVWREN

SEQ ID NO: 30460 - protein, 9 aa, Artificial Sequence
  Description of Artificial Sequence: Synthetic peptide
KYSKLWREN

SEQ ID NO: 30461 - protein, 9 aa, Artificial Sequence
  Description of Artificial Sequence: Synthetic peptide
KYWMRHVVM

SEQ ID NO: 30462 - protein, 9 aa, Artificial Sequence
  Description of Artificial Sequence: Synthetic peptide
LATSMCYQS

SEQ ID NO: 30463 - protein, 9 aa, Artificial Sequence
  Description of Artificial Sequence: Synthetic peptide
LCHFLRTCK

SEQ ID NO: 30464 - protein, 9 aa, Artificial Sequence
  Description of Artificial Sequence: Synthetic peptide
LDKIEHDWN

SEQ ID NO: 30465 - protein, 9 aa, Artificial Sequence
  Description of Artificial Sequence: Synthetic peptide
LFCIVQSRE

SEQ ID NO: 30466 - protein, 9 aa, Artificial Sequence
  Description of Artificial Sequence: Synthetic peptide
LIDRIWFNW

SEQ ID NO: 30467 - protein, 9 aa, Artificial Sequence
  Description of Artificial Sequence: Synthetic peptide
LSGPIHYEP

SEQ ID NO: 30468 - protein, 9 aa, Artificial Sequence
  Description of Artificial Sequence: Synthetic peptide
LSGSIHYES

SEQ ID NO: 30469 - protein, 9 aa, Artificial Sequence
  Description of Artificial Sequence: Synthetic peptide
LSVKMDRAK

SEQ ID NO: 30470 - protein, 9 aa, Artificial Sequence
  Description of Artificial Sequence: Synthetic peptide
LSVQMDRSK

SEQ ID NO: 30471 - protein, 9 aa, Artificial Sequence
  Description of Artificial Sequence: Synthetic peptide
LSVRMDRAK

SEQ ID NO: 30472 - protein, 9 aa, Artificial Sequence
  Description of Artificial Sequence: Synthetic peptide
LTGQEAGKG

SEQ ID NO: 30473 - protein, 9 aa, Artificial Sequence
  Description of Artificial Sequence: Synthetic peptide
LVCIRADTD

SEQ ID NO: 30474 - protein, 9 aa, Artificial Sequence
  Description of Artificial Sequence: Synthetic peptide
LVGKYWPRD

SEQ ID NO: 30475 - protein, 9 aa, Artificial Sequence
  Description of Artificial Sequence: Synthetic peptide
LVGPYWPRD

SEQ ID NO: 30476 - protein, 9 aa, Artificial Sequence
  Description of Artificial Sequence: Synthetic peptide
MADHCCANS

SEQ ID NO: 30477 - protein, 9 aa, Artificial Sequence
  Description of Artificial Sequence: Synthetic peptide
MADHCCTDS

SEQ ID NO: 30478 - protein, 9 aa, Artificial Sequence
  Description of Artificial Sequence: Synthetic peptide
MAFSSMHQG

SEQ ID NO: 30479 - protein, 9 aa, Artificial Sequence
  Description of Artificial Sequence: Synthetic peptide
MASLRGSDE

SEQ ID NO: 30480 - protein, 9 aa, Artificial Sequence
  Description of Artificial Sequence: Synthetic peptide
MCYQNIAFQ

SEQ ID NO: 30481 - protein, 9 aa, Artificial Sequence
  Description of Artificial Sequence: Synthetic peptide
MFGECYNNG

SEQ ID NO: 30482 - protein, 9 aa, Artificial Sequence
  Description of Artificial Sequence: Synthetic peptide
MFKYYPYCD

SEQ ID NO: 30483 - protein, 9 aa, Artificial Sequence
  Description of Artificial Sequence: Synthetic peptide
MFLECYNNG

SEQ ID NO: 30484 - protein, 9 aa, Artificial Sequence
  Description of Artificial Sequence: Synthetic peptide
MFQSYPYCD

SEQ ID NO: 30485 - protein, 9 aa, Artificial Sequence
  Description of Artificial Sequence: Synthetic peptide
MFQYYQYCD

SEQ ID NO: 30486 - protein, 9 aa, Artificial Sequence
  Description of Artificial Sequence: Synthetic peptide
MFRECYDNG

SEQ ID NO: 30487 - protein, 9 aa, Artificial Sequence
  Description of Artificial Sequence: Synthetic peptide
MFRECYKNG

SEQ ID NO: 30488 - protein, 9 aa, Artificial Sequence
  Description of Artificial Sequence: Synthetic peptide
MFRECYNSG

SEQ ID NO: 30489 - protein, 9 aa, Artificial Sequence
  Description of Artificial Sequence: Synthetic peptide
MFREWYNNG

SEQ ID NO: 30490 - protein, 9 aa, Artificial Sequence
  Description of Artificial Sequence: Synthetic peptide
MFRKCYNNG

SEQ ID NO: 30491 - protein, 9 aa, Artificial Sequence
  Description of Artificial Sequence: Synthetic peptide
MGDGLWVKV

SEQ ID NO: 30492 - protein, 9 aa, Artificial Sequence
  Description of Artificial Sequence: Synthetic peptide
MHFKYPQRG

SEQ ID NO: 30493 - protein, 9 aa, Artificial Sequence
  Description of Artificial Sequence: Synthetic peptide
MNLVKIRNS

SEQ ID NO: 30494 - protein, 9 aa, Artificial Sequence
  Description of Artificial Sequence: Synthetic peptide
MPVKKEYGG

SEQ ID NO: 30495 - protein, 9 aa, Artificial Sequence
  Description of Artificial Sequence: Synthetic peptide
MRHWAFCDY

SEQ ID NO: 30496 - protein, 9 aa, Artificial Sequence
  Description of Artificial Sequence: Synthetic peptide
MRIHFEGGD

SEQ ID NO: 30497 - protein, 9 aa, Artificial Sequence
  Description of Artificial Sequence: Synthetic peptide
MRVHFEGGG

SEQ ID NO: 30498 - protein, 9 aa, Artificial Sequence
  Description of Artificial Sequence: Synthetic peptide
MRVHFQGGD

SEQ ID NO: 30499 - protein, 9 aa, Artificial Sequence
  Description of Artificial Sequence: Synthetic peptide
MRVRFEGGD

SEQ ID NO: 30500 - protein, 9 aa, Artificial Sequence
  Description of Artificial Sequence: Synthetic peptide
MSSLKGSDE

SEQ ID NO: 30501 - protein, 9 aa, Artificial Sequence
  Description of Artificial Sequence: Synthetic peptide
MSWLGAAGI

SEQ ID NO: 30502 - protein, 9 aa, Artificial Sequence
  Description of Artificial Sequence: Synthetic peptide
MTLLMGHES

SEQ ID NO: 30503 - protein, 9 aa, Artificial Sequence
  Description of Artificial Sequence: Synthetic peptide
MVCIHADTD

SEQ ID NO: 30504 - protein, 9 aa, Artificial Sequence
  Description of Artificial Sequence: Synthetic peptide
MWLAKARQG

SEQ ID NO: 30505 - protein, 9 aa, Artificial Sequence
  Description of Artificial Sequence: Synthetic peptide
MWVGKARQG

SEQ ID NO: 30506 - protein, 9 aa, Artificial Sequence
  Description of Artificial Sequence: Synthetic peptide
MYKYGQDWY

SEQ ID NO: 30507 - protein, 9 aa, Artificial Sequence
  Description of Artificial Sequence: Synthetic peptide
NAINVGEWD

SEQ ID NO: 30508 - protein, 9 aa, Artificial Sequence
  Description of Artificial Sequence: Synthetic peptide
NAISVGKWD

SEQ ID NO: 30509 - protein, 9 aa, Artificial Sequence
  Description of Artificial Sequence: Synthetic peptide
NALSVGEWD

SEQ ID NO: 30510 - protein, 9 aa, Artificial Sequence
  Description of Artificial Sequence: Synthetic peptide
NARSSPDCL

SEQ ID NO: 30511 - protein, 9 aa, Artificial Sequence
  Description of Artificial Sequence: Synthetic peptide
NCSRHFCEV

SEQ ID NO: 30512 - protein, 9 aa, Artificial Sequence
  Description of Artificial Sequence: Synthetic peptide
NCWAIHGSW

SEQ ID NO: 30513 - protein, 9 aa, Artificial Sequence
  Description of Artificial Sequence: Synthetic peptide
NCWAILSSW

SEQ ID NO: 30514 - protein, 9 aa, Artificial Sequence
  Description of Artificial Sequence: Synthetic peptide
NDLGDDAHG

SEQ ID NO: 30515 - protein, 9 aa, Artificial Sequence
  Description of Artificial Sequence: Synthetic peptide
NDVADDAHG

SEQ ID NO: 30516 - protein, 9 aa, Artificial Sequence
  Description of Artificial Sequence: Synthetic peptide
NDVGDDDHG

SEQ ID NO: 30517 - protein, 9 aa, Artificial Sequence
  Description of Artificial Sequence: Synthetic peptide
NDVGDEAHG

SEQ ID NO: 30518 - protein, 9 aa, Artificial Sequence
  Description of Artificial Sequence: Synthetic peptide
NDVGGDAHG

SEQ ID NO: 30519 - protein, 9 aa, Artificial Sequence
  Description of Artificial Sequence: Synthetic peptide
NDVGNDAHG

SEQ ID NO: 30520 - protein, 9 aa, Artificial Sequence
  Description of Artificial Sequence: Synthetic peptide
NEIDGWQMA

SEQ ID NO: 30521 - protein, 9 aa, Artificial Sequence
  Description of Artificial Sequence: Synthetic peptide
NEIMMWRAN

SEQ ID NO: 30522 - protein, 9 aa, Artificial Sequence
  Description of Artificial Sequence: Synthetic peptide
NETMMWRTN

SEQ ID NO: 30523 - protein, 9 aa, Artificial Sequence
  Description of Artificial Sequence: Synthetic peptide
NFLDYHDMV

SEQ ID NO: 30524 - protein, 9 aa, Artificial Sequence
  Description of Artificial Sequence: Synthetic peptide
NFMDYNDMV

SEQ ID NO: 30525 - protein, 9 aa, Artificial Sequence
  Description of Artificial Sequence: Synthetic peptide
NFMEYHDMV

SEQ ID NO: 30526 - protein, 9 aa, Artificial Sequence
  Description of Artificial Sequence: Synthetic peptide
NHQADEHDA

SEQ ID NO: 30527 - protein, 9 aa, Artificial Sequence
  Description of Artificial Sequence: Synthetic peptide
NIRPSDASG

SEQ ID NO: 30528 - protein, 9 aa, Artificial Sequence
  Description of Artificial Sequence: Synthetic peptide
NIRPSDASS

SEQ ID NO: 30529 - protein, 9 aa, Artificial Sequence
  Description of Artificial Sequence: Synthetic peptide
NIRPSDTSA

SEQ ID NO: 30530 - protein, 9 aa, Artificial Sequence
  Description of Artificial Sequence: Synthetic peptide
NIRQSDASA

SEQ ID NO: 30531 - protein, 9 aa, Artificial Sequence
  Description of Artificial Sequence: Synthetic peptide
NIRRSDASA

SEQ ID NO: 30532 - protein, 9 aa, Artificial Sequence
  Description of Artificial Sequence: Synthetic peptide
NKRNLYAMQ

SEQ ID NO: 30533 - protein, 9 aa, Artificial Sequence
  Description of Artificial Sequence: Synthetic peptide
NKRNLYAVQ

SEQ ID NO: 30534 - protein, 9 aa, Artificial Sequence
  Description of Artificial Sequence: Synthetic peptide
NMGIASPWH

SEQ ID NO: 30535 - protein, 9 aa, Artificial Sequence
  Description of Artificial Sequence: Synthetic peptide
NMVDENRFW

SEQ ID NO: 30536 - protein, 9 aa, Artificial Sequence
  Description of Artificial Sequence: Synthetic peptide
NMVHEHRFW

SEQ ID NO: 30537 - protein, 9 aa, Artificial Sequence
  Description of Artificial Sequence: Synthetic peptide
NMVHESRFW

SEQ ID NO: 30538 - protein, 9 aa, Artificial Sequence
  Description of Artificial Sequence: Synthetic peptide
NMVHQNRFW

SEQ ID NO: 30539 - protein, 9 aa, Artificial Sequence
  Description of Artificial Sequence: Synthetic peptide
NMVRENRFW

SEQ ID NO: 30540 - protein, 9 aa, Artificial Sequence
  Description of Artificial Sequence: Synthetic peptide
NSISVGEWD

SEQ ID NO: 30541 - protein, 9 aa, Artificial Sequence
  Description of Artificial Sequence: Synthetic peptide
NTSCWKLEN

SEQ ID NO: 30542 - protein, 9 aa, Artificial Sequence
  Description of Artificial Sequence: Synthetic peptide
NTVIRYRHS

SEQ ID NO: 30543 - protein, 9 aa, Artificial Sequence
  Description of Artificial Sequence: Synthetic peptide
NVNEDVQWQ

SEQ ID NO: 30544 - protein, 9 aa, Artificial Sequence
  Description of Artificial Sequence: Synthetic peptide
NWVNGFVDH

SEQ ID NO: 30545 - protein, 9 aa, Artificial Sequence
  Description of Artificial Sequence: Synthetic peptide
NWWAIHSSW

SEQ ID NO: 30546 - protein, 9 aa, Artificial Sequence
  Description of Artificial Sequence: Synthetic peptide
NYVLFVDHE

SEQ ID NO: 30547 - protein, 9 aa, Artificial Sequence
  Description of Artificial Sequence: Synthetic peptide
PAWDLVEML

SEQ ID NO: 30548 - protein, 9 aa, Artificial Sequence
  Description of Artificial Sequence: Synthetic peptide
PAWDLVGMF

SEQ ID NO: 30549 - protein, 9 aa, Artificial Sequence
  Description of Artificial Sequence: Synthetic peptide
PAWDLVGMH

SEQ ID NO: 30550 - protein, 9 aa, Artificial Sequence
  Description of Artificial Sequence: Synthetic peptide
PAWDLVGMI

SEQ ID NO: 30551 - protein, 9 aa, Artificial Sequence
  Description of Artificial Sequence: Synthetic peptide
PAWDPVGML

SEQ ID NO: 30552 - protein, 9 aa, Artificial Sequence
  Description of Artificial Sequence: Synthetic peptide
PAWELVGMV

SEQ ID NO: 30553 - protein, 9 aa, Artificial Sequence
  Description of Artificial Sequence: Synthetic peptide
PAWHLVGML

SEQ ID NO: 30554 - protein, 9 aa, Artificial Sequence
  Description of Artificial Sequence: Synthetic peptide
PCDFDNQPH

SEQ ID NO: 30555 - protein, 9 aa, Artificial Sequence
  Description of Artificial Sequence: Synthetic peptide
PCHFDNQPH

SEQ ID NO: 30556 - protein, 9 aa, Artificial Sequence
  Description of Artificial Sequence: Synthetic peptide
PCLDHHRWL

SEQ ID NO: 30557 - protein, 9 aa, Artificial Sequence
  Description of Artificial Sequence: Synthetic peptide
PCNFDSQPH

SEQ ID NO: 30558 - protein, 9 aa, Artificial Sequence
  Description of Artificial Sequence: Synthetic peptide
PCNVDNQPH

SEQ ID NO: 30559 - protein, 9 aa, Artificial Sequence
  Description of Artificial Sequence: Synthetic peptide
PCPDHHRLL

SEQ ID NO: 30560 - protein, 9 aa, Artificial Sequence
  Description of Artificial Sequence: Synthetic peptide
PCPDHHRRL

SEQ ID NO: 30561 - protein, 9 aa, Artificial Sequence
  Description of Artificial Sequence: Synthetic peptide
PCPDHHRWV

SEQ ID NO: 30562 - protein, 9 aa, Artificial Sequence
  Description of Artificial Sequence: Synthetic peptide
PCPDHNRWL

SEQ ID NO: 30563 - protein, 9 aa, Artificial Sequence
  Description of Artificial Sequence: Synthetic peptide
PCPDNHRWL

SEQ ID NO: 30564 - protein, 9 aa, Artificial Sequence
  Description of Artificial Sequence: Synthetic peptide
PCPDPHRWL

SEQ ID NO: 30565 - protein, 9 aa, Artificial Sequence
  Description of Artificial Sequence: Synthetic peptide
PCPEHHRWL

SEQ ID NO: 30566 - protein, 9 aa, Artificial Sequence
  Description of Artificial Sequence: Synthetic peptide
PCPNVWWHM

SEQ ID NO: 30567 - protein, 9 aa, Artificial Sequence
  Description of Artificial Sequence: Synthetic peptide
PCQCKVIWQ

SEQ ID NO: 30568 - protein, 9 aa, Artificial Sequence
  Description of Artificial Sequence: Synthetic peptide
PCTDHHRWL

SEQ ID NO: 30569 - protein, 9 aa, Artificial Sequence
  Description of Artificial Sequence: Synthetic peptide
PCTFDNQPH

SEQ ID NO: 30570 - protein, 9 aa, Artificial Sequence
  Description of Artificial Sequence: Synthetic peptide
PCYRKVVFR

SEQ ID NO: 30571 - protein, 9 aa, Artificial Sequence
  Description of Artificial Sequence: Synthetic peptide
PDGERCERF

SEQ ID NO: 30572 - protein, 9 aa, Artificial Sequence
  Description of Artificial Sequence: Synthetic peptide
PDWRKIKKF

SEQ ID NO: 30573 - protein, 9 aa, Artificial Sequence
  Description of Artificial Sequence: Synthetic peptide
PFMKDGECE

SEQ ID NO: 30574 - protein, 9 aa, Artificial Sequence
  Description of Artificial Sequence: Synthetic peptide
PFMKDVKCE

SEQ ID NO: 30575 - protein, 9 aa, Artificial Sequence
  Description of Artificial Sequence: Synthetic peptide
PGDPQEDTV

SEQ ID NO: 30576 - protein, 9 aa, Artificial Sequence
  Description of Artificial Sequence: Synthetic peptide
PGIDLWHMA

SEQ ID NO: 30577 - protein, 9 aa, Artificial Sequence
  Description of Artificial Sequence: Synthetic peptide
PGIEWWHMA

SEQ ID NO: 30578 - protein, 9 aa, Artificial Sequence
  Description of Artificial Sequence: Synthetic peptide
PGWIGACMA

SEQ ID NO: 30579 - protein, 9 aa, Artificial Sequence
  Description of Artificial Sequence: Synthetic peptide
PHFDKCQHF

SEQ ID NO: 30580 - protein, 9 aa, Artificial Sequence
  Description of Artificial Sequence: Synthetic peptide
PIDWEDVWE

SEQ ID NO: 30581 - protein, 9 aa, Artificial Sequence
  Description of Artificial Sequence: Synthetic peptide
PKAMAKICE

SEQ ID NO: 30582 - protein, 9 aa, Artificial Sequence
  Description of Artificial Sequence: Synthetic peptide
PKGMAKICA

SEQ ID NO: 30583 - protein, 9 aa, Artificial Sequence
  Description of Artificial Sequence: Synthetic peptide
PKGMAKIFE

SEQ ID NO: 30584 - protein, 9 aa, Artificial Sequence
  Description of Artificial Sequence: Synthetic peptide
PKGMAKIWE

SEQ ID NO: 30585 - protein, 9 aa, Artificial Sequence
  Description of Artificial Sequence: Synthetic peptide
PKGMARICE

SEQ ID NO: 30586 - protein, 9 aa, Artificial Sequence
  Description of Artificial Sequence: Synthetic peptide
PKGMSKICE

SEQ ID NO: 30587 - protein, 9 aa, Artificial Sequence
  Description of Artificial Sequence: Synthetic peptide
PKGMVKICE

SEQ ID NO: 30588 - protein, 9 aa, Artificial Sequence
  Description of Artificial Sequence: Synthetic peptide
PKGNRTNQI

SEQ ID NO: 30589 - protein, 9 aa, Artificial Sequence
  Description of Artificial Sequence: Synthetic peptide
PKVMAKICE

SEQ ID NO: 30590 - protein, 9 aa, Artificial Sequence
  Description of Artificial Sequence: Synthetic peptide
PMHQRWTND

SEQ ID NO: 30591 - protein, 9 aa, Artificial Sequence
  Description of Artificial Sequence: Synthetic peptide
PMMKKLCCG

SEQ ID NO: 30592 - protein, 9 aa, Artificial Sequence
  Description of Artificial Sequence: Synthetic peptide
PNGEKCERF

SEQ ID NO: 30593 - protein, 9 aa, Artificial Sequence
  Description of Artificial Sequence: Synthetic peptide
PQHISADPT

SEQ ID NO: 30594 - protein, 9 aa, Artificial Sequence
  Description of Artificial Sequence: Synthetic peptide
PQHISSDPT

SEQ ID NO: 30595 - protein, 9 aa, Artificial Sequence
  Description of Artificial Sequence: Synthetic peptide
PQLISPDPT

SEQ ID NO: 30596 - protein, 9 aa, Artificial Sequence
  Description of Artificial Sequence: Synthetic peptide
PQRISPDPT

SEQ ID NO: 30597 - protein, 9 aa, Artificial Sequence
  Description of Artificial Sequence: Synthetic peptide
PRDDESNLI

SEQ ID NO: 30598 - protein, 9 aa, Artificial Sequence
  Description of Artificial Sequence: Synthetic peptide
PRDKIWFMN

SEQ ID NO: 30599 - protein, 9 aa, Artificial Sequence
  Description of Artificial Sequence: Synthetic peptide
PRDNVSNLI

SEQ ID NO: 30600 - protein, 9 aa, Artificial Sequence
  Description of Artificial Sequence: Synthetic peptide
PRFCISLKC

SEQ ID NO: 30601 - protein, 9 aa, Artificial Sequence
  Description of Artificial Sequence: Synthetic peptide
PRGNESNLI

SEQ ID NO: 30602 - protein, 9 aa, Artificial Sequence
  Description of Artificial Sequence: Synthetic peptide
PRMSYEIKG

SEQ ID NO: 30603 - protein, 9 aa, Artificial Sequence
  Description of Artificial Sequence: Synthetic peptide
PRTSYEFKG

SEQ ID NO: 30604 - protein, 9 aa, Artificial Sequence
  Description of Artificial Sequence: Synthetic peptide
PSKPFSKEE

SEQ ID NO: 30605 - protein, 9 aa, Artificial Sequence
  Description of Artificial Sequence: Synthetic peptide
PSQPFSEEE

SEQ ID NO: 30606 - protein, 9 aa, Artificial Sequence
  Description of Artificial Sequence: Synthetic peptide
PTWDLVGML

SEQ ID NO: 30607 - protein, 9 aa, Artificial Sequence
  Description of Artificial Sequence: Synthetic peptide
PWCECHRLF

SEQ ID NO: 30608 - protein, 9 aa, Artificial Sequence
  Description of Artificial Sequence: Synthetic peptide
PWSWCEFNK

SEQ ID NO: 30609 - protein, 9 aa, Artificial Sequence
  Description of Artificial Sequence: Synthetic peptide
PWSWCEYNQ

SEQ ID NO: 30610 - protein, 9 aa, Artificial Sequence
  Description of Artificial Sequence: Synthetic peptide
PWWTRCKQQ

SEQ ID NO: 30611 - protein, 9 aa, Artificial Sequence
  Description of Artificial Sequence: Synthetic peptide
PYGEKCERF

SEQ ID NO: 30612 - protein, 9 aa, Artificial Sequence
  Description of Artificial Sequence: Synthetic peptide
PYTHWKLNN

SEQ ID NO: 30613 - protein, 9 aa, Artificial Sequence
  Description of Artificial Sequence: Synthetic peptide
QARIEDMAK

SEQ ID NO: 30614 - protein, 9 aa, Artificial Sequence
  Description of Artificial Sequence: Synthetic peptide
QCEWQKMEH

SEQ ID NO: 30615 - protein, 9 aa, Artificial Sequence
  Description of Artificial Sequence: Synthetic peptide
QCFLCGSAT

SEQ ID NO: 30616 - protein, 9 aa, Artificial Sequence
  Description of Artificial Sequence: Synthetic peptide
QCHFLRNCK

SEQ ID NO: 30617 - protein, 9 aa, Artificial Sequence
  Description of Artificial Sequence: Synthetic peptide
QCMPGCNDL

SEQ ID NO: 30618 - protein, 9 aa, Artificial Sequence
  Description of Artificial Sequence: Synthetic peptide
QCPVECDHV

SEQ ID NO: 30619 - protein, 9 aa, Artificial Sequence
  Description of Artificial Sequence: Synthetic peptide
QCVSMDFSG

SEQ ID NO: 30620 - protein, 9 aa, Artificial Sequence
  Description of Artificial Sequence: Synthetic peptide
QCYREVVFR

SEQ ID NO: 30621 - protein, 9 aa, Artificial Sequence
  Description of Artificial Sequence: Synthetic peptide
QFAMDWVSD

SEQ ID NO: 30622 - protein, 9 aa, Artificial Sequence
  Description of Artificial Sequence: Synthetic peptide
QIRIEDMAK

SEQ ID NO: 30623 - protein, 9 aa, Artificial Sequence
  Description of Artificial Sequence: Synthetic peptide
QKGNRTDQI

SEQ ID NO: 30624 - protein, 9 aa, Artificial Sequence
  Description of Artificial Sequence: Synthetic peptide
QKGNRTTQI

SEQ ID NO: 30625 - protein, 9 aa, Artificial Sequence
  Description of Artificial Sequence: Synthetic peptide
QKRGIEAVD

SEQ ID NO: 30626 - protein, 9 aa, Artificial Sequence
  Description of Artificial Sequence: Synthetic peptide
QKRIEDMAK

SEQ ID NO: 30627 - protein, 9 aa, Artificial Sequence
  Description of Artificial Sequence: Synthetic peptide
QLNICQATF

SEQ ID NO: 30628 - protein, 9 aa, Artificial Sequence
  Description of Artificial Sequence: Synthetic peptide
QMHNTFCGW

SEQ ID NO: 30629 - protein, 9 aa, Artificial Sequence
  Description of Artificial Sequence: Synthetic peptide
QMHSTFCSW

SEQ ID NO: 30630 - protein, 9 aa, Artificial Sequence
  Description of Artificial Sequence: Synthetic peptide
QRDKVWFMN

SEQ ID NO: 30631 - protein, 9 aa, Artificial Sequence
  Description of Artificial Sequence: Synthetic peptide
QRDRIWFMN

SEQ ID NO: 30632 - protein, 9 aa, Artificial Sequence
  Description of Artificial Sequence: Synthetic peptide
QSVDVGLMH

SEQ ID NO: 30633 - protein, 9 aa, Artificial Sequence
  Description of Artificial Sequence: Synthetic peptide
QTGDWWQYG

SEQ ID NO: 30634 - protein, 9 aa, Artificial Sequence
  Description of Artificial Sequence: Synthetic peptide
QTGNWWEYG

SEQ ID NO: 30635 - protein, 9 aa, Artificial Sequence
  Description of Artificial Sequence: Synthetic peptide
QTGNWWKYG

SEQ ID NO: 30636 - protein, 9 aa, Artificial Sequence
  Description of Artificial Sequence: Synthetic peptide
QTGNWWQYA

SEQ ID NO: 30637 - protein, 9 aa, Artificial Sequence
  Description of Artificial Sequence: Synthetic peptide
QTGTWWQYG

SEQ ID NO: 30638 - protein, 9 aa, Artificial Sequence
  Description of Artificial Sequence: Synthetic peptide
QTISGFKDK

SEQ ID NO: 30639 - protein, 9 aa, Artificial Sequence
  Description of Artificial Sequence: Synthetic peptide
QTISGFQYK

SEQ ID NO: 30640 - protein, 9 aa, Artificial Sequence
  Description of Artificial Sequence: Synthetic peptide
QTIVAWHHS

SEQ ID NO: 30641 - protein, 9 aa, Artificial Sequence
  Description of Artificial Sequence: Synthetic peptide
QTLSGFQDK

SEQ ID NO: 30642 - protein, 9 aa, Artificial Sequence
  Description of Artificial Sequence: Synthetic peptide
QTQIEDMAK

SEQ ID NO: 30643 - protein, 9 aa, Artificial Sequence
  Description of Artificial Sequence: Synthetic peptide
QTRIDDMAK

SEQ ID NO: 30644 - protein, 9 aa, Artificial Sequence
  Description of Artificial Sequence: Synthetic peptide
QTRIEDMTK

SEQ ID NO: 30645 - protein, 9 aa, Artificial Sequence
  Description of Artificial Sequence: Synthetic peptide
QTRIQDMAK

SEQ ID NO: 30646 - protein, 9 aa, Artificial Sequence
  Description of Artificial Sequence: Synthetic peptide
QTRRLEPYH

SEQ ID NO: 30647 - protein, 9 aa, Artificial Sequence
  Description of Artificial Sequence: Synthetic peptide
QTRVEDMAK

SEQ ID NO: 30648 - protein, 9 aa, Artificial Sequence
  Description of Artificial Sequence: Synthetic peptide
QVCIHADTD

SEQ ID NO: 30649 - protein, 9 aa, Artificial Sequence
  Description of Artificial Sequence: Synthetic peptide
RADVDMTSI

SEQ ID NO: 30650 - protein, 9 aa, Artificial Sequence
  Description of Artificial Sequence: Synthetic peptide
RCEIWLASS

SEQ ID NO: 30651 - protein, 9 aa, Artificial Sequence
  Description of Artificial Sequence: Synthetic peptide
RCISNEGMQ

SEQ ID NO: 30652 - protein, 9 aa, Artificial Sequence
  Description of Artificial Sequence: Synthetic peptide
RCISNEWME

SEQ ID NO: 30653 - protein, 9 aa, Artificial Sequence
  Description of Artificial Sequence: Synthetic peptide
RCISNEWMP

SEQ ID NO: 30654 - protein, 9 aa, Artificial Sequence
  Description of Artificial Sequence: Synthetic peptide
RDHNRWNRL

SEQ ID NO: 30655 - protein, 9 aa, Artificial Sequence
  Description of Artificial Sequence: Synthetic peptide
REEIARPWY

SEQ ID NO: 30656 - protein, 9 aa, Artificial Sequence
  Description of Artificial Sequence: Synthetic peptide
REKIARPWY

SEQ ID NO: 30657 - protein, 9 aa, Artificial Sequence
  Description of Artificial Sequence: Synthetic peptide
REQIACPWY

SEQ ID NO: 30658 - protein, 9 aa, Artificial Sequence
  Description of Artificial Sequence: Synthetic peptide
REQIARPGY

SEQ ID NO: 30659 - protein, 9 aa, Artificial Sequence
  Description of Artificial Sequence: Synthetic peptide
REQISRPWY

SEQ ID NO: 30660 - protein, 9 aa, Artificial Sequence
  Description of Artificial Sequence: Synthetic peptide
REQLARPWY

SEQ ID NO: 30661 - protein, 9 aa, Artificial Sequence
  Description of Artificial Sequence: Synthetic peptide
RETLEQVAY

SEQ ID NO: 30662 - protein, 9 aa, Artificial Sequence
  Description of Artificial Sequence: Synthetic peptide
RFNLPNFYD

SEQ ID NO: 30663 - protein, 9 aa, Artificial Sequence
  Description of Artificial Sequence: Synthetic peptide
RFNWPIFYD

SEQ ID NO: 30664 - protein, 9 aa, Artificial Sequence
  Description of Artificial Sequence: Synthetic peptide
RFNWPNVYD

SEQ ID NO: 30665 - protein, 9 aa, Artificial Sequence
  Description of Artificial Sequence: Synthetic peptide
RFPFRAQVW

SEQ ID NO: 30666 - protein, 9 aa, Artificial Sequence
  Description of Artificial Sequence: Synthetic peptide
RFRFLAQVW

SEQ ID NO: 30667 - protein, 9 aa, Artificial Sequence
  Description of Artificial Sequence: Synthetic peptide
RFRFRAKVW

SEQ ID NO: 30668 - protein, 9 aa, Artificial Sequence
  Description of Artificial Sequence: Synthetic peptide
RFRFRAQGW

SEQ ID NO: 30669 - protein, 9 aa, Artificial Sequence
  Description of Artificial Sequence: Synthetic peptide
RFRFRAQIW

SEQ ID NO: 30670 - protein, 9 aa, Artificial Sequence
  Description of Artificial Sequence: Synthetic peptide
RFRFRTQVW

SEQ ID NO: 30671 - protein, 9 aa, Artificial Sequence
  Description of Artificial Sequence: Synthetic peptide
RFRFRVQVW

SEQ ID NO: 30672 - protein, 9 aa, Artificial Sequence
  Description of Artificial Sequence: Synthetic peptide
RFRIRAQVW

SEQ ID NO: 30673 - protein, 9 aa, Artificial Sequence
  Description of Artificial Sequence: Synthetic peptide
RFRVRAQVW

SEQ ID NO: 30674 - protein, 9 aa, Artificial Sequence
  Description of Artificial Sequence: Synthetic peptide
RFTWPNFYD

SEQ ID NO: 30675 - protein, 9 aa, Artificial Sequence
  Description of Artificial Sequence: Synthetic peptide
RHDWQHRTV

SEQ ID NO: 30676 - protein, 9 aa, Artificial Sequence
  Description of Artificial Sequence: Synthetic peptide
RHELTMSHH

SEQ ID NO: 30677 - protein, 9 aa, Artificial Sequence
  Description of Artificial Sequence: Synthetic peptide
RHELTMSQY

SEQ ID NO: 30678 - protein, 9 aa, Artificial Sequence
  Description of Artificial Sequence: Synthetic peptide
RHQPLHYFH

SEQ ID NO: 30679 - protein, 9 aa, Artificial Sequence
  Description of Artificial Sequence: Synthetic peptide
RHVPLHYFH

SEQ ID NO: 30680 - protein, 9 aa, Artificial Sequence
  Description of Artificial Sequence: Synthetic peptide
RIDFNVDCY

SEQ ID NO: 30681 - protein, 9 aa, Artificial Sequence
  Description of Artificial Sequence: Synthetic peptide
RIDINVDCH

SEQ ID NO: 30682 - protein, 9 aa, Artificial Sequence
  Description of Artificial Sequence: Synthetic peptide
RIDINVDWY

SEQ ID NO: 30683 - protein, 9 aa, Artificial Sequence
  Description of Artificial Sequence: Synthetic peptide
RIDINVNCY

SEQ ID NO: 30684 - protein, 9 aa, Artificial Sequence
  Description of Artificial Sequence: Synthetic peptide
RIDINVYCY

SEQ ID NO: 30685 - protein, 9 aa, Artificial Sequence
  Description of Artificial Sequence: Synthetic peptide
RIDISVDCY

SEQ ID NO: 30686 - protein, 9 aa, Artificial Sequence
  Description of Artificial Sequence: Synthetic peptide
RIDLNVDCY

SEQ ID NO: 30687 - protein, 9 aa, Artificial Sequence
  Description of Artificial Sequence: Synthetic peptide
RIDVNVDCY

SEQ ID NO: 30688 - protein, 9 aa, Artificial Sequence
  Description of Artificial Sequence: Synthetic peptide
RIGINVDCY

SEQ ID NO: 30689 - protein, 9 aa, Artificial Sequence
  Description of Artificial Sequence: Synthetic peptide
RIMFFDKFT

SEQ ID NO: 30690 - protein, 9 aa, Artificial Sequence
  Description of Artificial Sequence: Synthetic peptide
RIMYFDEFT

SEQ ID NO: 30691 - protein, 9 aa, Artificial Sequence
  Description of Artificial Sequence: Synthetic peptide
RIMYFDKCT

SEQ ID NO: 30692 - protein, 9 aa, Artificial Sequence
  Description of Artificial Sequence: Synthetic peptide
RIMYFDRFT

SEQ ID NO: 30693 - protein, 9 aa, Artificial Sequence
  Description of Artificial Sequence: Synthetic peptide
RINWPNFYD

SEQ ID NO: 30694 - protein, 9 aa, Artificial Sequence
  Description of Artificial Sequence: Synthetic peptide
RITYFDKFT

SEQ ID NO: 30695 - protein, 9 aa, Artificial Sequence
  Description of Artificial Sequence: Synthetic peptide
RKDTPKAGH

SEQ ID NO: 30696 - protein, 9 aa, Artificial Sequence
  Description of Artificial Sequence: Synthetic peptide
RLARDNNES

SEQ ID NO: 30697 - protein, 9 aa, Artificial Sequence
  Description of Artificial Sequence: Synthetic peptide
RLARENNEA

SEQ ID NO: 30698 - protein, 9 aa, Artificial Sequence
  Description of Artificial Sequence: Synthetic peptide
RLELDNNEA

SEQ ID NO: 30699 - protein, 9 aa, Artificial Sequence
  Description of Artificial Sequence: Synthetic peptide
RLEQYNNEA

SEQ ID NO: 30700 - protein, 9 aa, Artificial Sequence
  Description of Artificial Sequence: Synthetic peptide
RLERANNEA

SEQ ID NO: 30701 - protein, 9 aa, Artificial Sequence
  Description of Artificial Sequence: Synthetic peptide
RLERDDNEA

SEQ ID NO: 30702 - protein, 9 aa, Artificial Sequence
  Description of Artificial Sequence: Synthetic peptide
RLERDHNEA

SEQ ID NO: 30703 - protein, 9 aa, Artificial Sequence
  Description of Artificial Sequence: Synthetic peptide
RLERDINEA

SEQ ID NO: 30704 - protein, 9 aa, Artificial Sequence
  Description of Artificial Sequence: Synthetic peptide
RLERDNIEA

SEQ ID NO: 30705 - protein, 9 aa, Artificial Sequence
  Description of Artificial Sequence: Synthetic peptide
RLERDNNAA

SEQ ID NO: 30706 - protein, 9 aa, Artificial Sequence
  Description of Artificial Sequence: Synthetic peptide
RLERDNNAV

SEQ ID NO: 30707 - protein, 9 aa, Artificial Sequence
  Description of Artificial Sequence: Synthetic peptide
RLERDNNED

SEQ ID NO: 30708 - protein, 9 aa, Artificial Sequence
  Description of Artificial Sequence: Synthetic peptide
RLERDNNEP

SEQ ID NO: 30709 - protein, 9 aa, Artificial Sequence
  Description of Artificial Sequence: Synthetic peptide
RLERDNNES

SEQ ID NO: 30710 - protein, 9 aa, Artificial Sequence
  Description of Artificial Sequence: Synthetic peptide
RLERDNNET

SEQ ID NO: 30711 - protein, 9 aa, Artificial Sequence
  Description of Artificial Sequence: Synthetic peptide
RLERDNTEA

SEQ ID NO: 30712 - protein, 9 aa, Artificial Sequence
  Description of Artificial Sequence: Synthetic peptide
RLERDTNEA

SEQ ID NO: 30713 - protein, 9 aa, Artificial Sequence
  Description of Artificial Sequence: Synthetic peptide
RLERHNNEA

SEQ ID NO: 30714 - protein, 9 aa, Artificial Sequence
  Description of Artificial Sequence: Synthetic peptide
RLERNNNEA

SEQ ID NO: 30715 - protein, 9 aa, Artificial Sequence
  Description of Artificial Sequence: Synthetic peptide
RLGRDNNEA

SEQ ID NO: 30716 - protein, 9 aa, Artificial Sequence
  Description of Artificial Sequence: Synthetic peptide
RLKRDNNEA

SEQ ID NO: 30717 - protein, 9 aa, Artificial Sequence
  Description of Artificial Sequence: Synthetic peptide
RLKRVNNEA

SEQ ID NO: 30718 - protein, 9 aa, Artificial Sequence
  Description of Artificial Sequence: Synthetic peptide
RLQRDNNEA

SEQ ID NO: 30719 - protein, 9 aa, Artificial Sequence
  Description of Artificial Sequence: Synthetic peptide
RLYSDYWFD

SEQ ID NO: 30720 - protein, 9 aa, Artificial Sequence
  Description of Artificial Sequence: Synthetic peptide
RMGYEVDWQ

SEQ ID NO: 30721 - protein, 9 aa, Artificial Sequence
  Description of Artificial Sequence: Synthetic peptide
RMMYFDKFT

SEQ ID NO: 30722 - protein, 9 aa, Artificial Sequence
  Description of Artificial Sequence: Synthetic peptide
RNLDYNTAV

SEQ ID NO: 30723 - protein, 9 aa, Artificial Sequence
  Description of Artificial Sequence: Synthetic peptide
RNLNYNTGV

SEQ ID NO: 30724 - protein, 9 aa, Artificial Sequence
  Description of Artificial Sequence: Synthetic peptide
RNPNYNTAV

SEQ ID NO: 30725 - protein, 9 aa, Artificial Sequence
  Description of Artificial Sequence: Synthetic peptide
RNVNYNTAV

SEQ ID NO: 30726 - protein, 9 aa, Artificial Sequence
  Description of Artificial Sequence: Synthetic peptide
RPERDNNEA

SEQ ID NO: 30727 - protein, 9 aa, Artificial Sequence
  Description of Artificial Sequence: Synthetic peptide
RQQIARPWY

SEQ ID NO: 30728 - protein, 9 aa, Artificial Sequence
  Description of Artificial Sequence: Synthetic peptide
RRCCISLKC

SEQ ID NO: 30729 - protein, 9 aa, Artificial Sequence
  Description of Artificial Sequence: Synthetic peptide
RRDSDSVCK

SEQ ID NO: 30730 - protein, 9 aa, Artificial Sequence
  Description of Artificial Sequence: Synthetic peptide
RRFCVSLKC

SEQ ID NO: 30731 - protein, 9 aa, Artificial Sequence
  Description of Artificial Sequence: Synthetic peptide
RTECVPDTK

SEQ ID NO: 30732 - protein, 9 aa, Artificial Sequence
  Description of Artificial Sequence: Synthetic peptide
RTLDSEYFF

SEQ ID NO: 30733 - protein, 9 aa, Artificial Sequence
  Description of Artificial Sequence: Synthetic peptide
RTLDSEYWF

SEQ ID NO: 30734 - protein, 9 aa, Artificial Sequence
  Description of Artificial Sequence: Synthetic peptide
RTQCAPDTK

SEQ ID NO: 30735 - protein, 9 aa, Artificial Sequence
  Description of Artificial Sequence: Synthetic peptide
RTQCVPATK

SEQ ID NO: 30736 - protein, 9 aa, Artificial Sequence
  Description of Artificial Sequence: Synthetic peptide
RTQCVPDAK

SEQ ID NO: 30737 - protein, 9 aa, Artificial Sequence
  Description of Artificial Sequence: Synthetic peptide
RTQWVPDTK

SEQ ID NO: 30738 - protein, 9 aa, Artificial Sequence
  Description of Artificial Sequence: Synthetic peptide
RTVDSEYLF

SEQ ID NO: 30739 - protein, 9 aa, Artificial Sequence
  Description of Artificial Sequence: Synthetic peptide
RVCPFCCCF

SEQ ID NO: 30740 - protein, 9 aa, Artificial Sequence
  Description of Artificial Sequence: Synthetic peptide
RVCTFCGCF

SEQ ID NO: 30741 - protein, 9 aa, Artificial Sequence
  Description of Artificial Sequence: Synthetic peptide
RVDINVDCY

SEQ ID NO: 30742 - protein, 9 aa, Artificial Sequence
  Description of Artificial Sequence: Synthetic peptide
RVDNDMADG

SEQ ID NO: 30743 - protein, 9 aa, Artificial Sequence
  Description of Artificial Sequence: Synthetic peptide
RVERDNNEA

SEQ ID NO: 30744 - protein, 9 aa, Artificial Sequence
  Description of Artificial Sequence: Synthetic peptide
RVKRDNNEA

SEQ ID NO: 30745 - protein, 9 aa, Artificial Sequence
  Description of Artificial Sequence: Synthetic peptide
RWEKMAYSW

SEQ ID NO: 30746 - protein, 9 aa, Artificial Sequence
  Description of Artificial Sequence: Synthetic peptide
RYCDAWPDV

SEQ ID NO: 30747 - protein, 9 aa, Artificial Sequence
  Description of Artificial Sequence: Synthetic peptide
SAWDLVGML

SEQ ID NO: 30748 - protein, 9 aa, Artificial Sequence
  Description of Artificial Sequence: Synthetic peptide
SCENWGRQH

SEQ ID NO: 30749 - protein, 9 aa, Artificial Sequence
  Description of Artificial Sequence: Synthetic peptide
SCETGGRQH

SEQ ID NO: 30750 - protein, 9 aa, Artificial Sequence
  Description of Artificial Sequence: Synthetic peptide
SCETWGRHH

SEQ ID NO: 30751 - protein, 9 aa, Artificial Sequence
  Description of Artificial Sequence: Synthetic peptide
SCETWGRPH

SEQ ID NO: 30752 - protein, 9 aa, Artificial Sequence
  Description of Artificial Sequence: Synthetic peptide
SCETWSRQH

SEQ ID NO: 30753 - protein, 9 aa, Artificial Sequence
  Description of Artificial Sequence: Synthetic peptide
SCETWVRQH

SEQ ID NO: 30754 - protein, 9 aa, Artificial Sequence
  Description of Artificial Sequence: Synthetic peptide
SCEWSKQCK

SEQ ID NO: 30755 - protein, 9 aa, Artificial Sequence
  Description of Artificial Sequence: Synthetic peptide
SCMDGTTGV

SEQ ID NO: 30756 - protein, 9 aa, Artificial Sequence
  Description of Artificial Sequence: Synthetic peptide
SCMHGTTGV

SEQ ID NO: 30757 - protein, 9 aa, Artificial Sequence
  Description of Artificial Sequence: Synthetic peptide
SCMNGATGV

SEQ ID NO: 30758 - protein, 9 aa, Artificial Sequence
  Description of Artificial Sequence: Synthetic peptide
SCMNGPTGV

SEQ ID NO: 30759 - protein, 9 aa, Artificial Sequence
  Description of Artificial Sequence: Synthetic peptide
SCMNGTAGV

SEQ ID NO: 30760 - protein, 9 aa, Artificial Sequence
  Description of Artificial Sequence: Synthetic peptide
SCMNGTTVV

SEQ ID NO: 30761 - protein, 9 aa, Artificial Sequence
  Description of Artificial Sequence: Synthetic peptide
SCMNVTTGV

SEQ ID NO: 30762 - protein, 9 aa, Artificial Sequence
  Description of Artificial Sequence: Synthetic peptide
SCPWPTGEE

SEQ ID NO: 30763 - protein, 9 aa, Artificial Sequence
  Description of Artificial Sequence: Synthetic peptide
SCQTWGRQH

SEQ ID NO: 30764 - protein, 9 aa, Artificial Sequence
  Description of Artificial Sequence: Synthetic peptide
SCRHWRPTP

SEQ ID NO: 30765 - protein, 9 aa, Artificial Sequence
  Description of Artificial Sequence: Synthetic peptide
SCVTWGRQH

SEQ ID NO: 30766 - protein, 9 aa, Artificial Sequence
  Description of Artificial Sequence: Synthetic peptide
SCWDTQQSI

SEQ ID NO: 30767 - protein, 9 aa, Artificial Sequence
  Description of Artificial Sequence: Synthetic peptide
SDKWYRVSF

SEQ ID NO: 30768 - protein, 9 aa, Artificial Sequence
  Description of Artificial Sequence: Synthetic peptide
SFQHAQWMG

SEQ ID NO: 30769 - protein, 9 aa, Artificial Sequence
  Description of Artificial Sequence: Synthetic peptide
SGWIAACMA

SEQ ID NO: 30770 - protein, 9 aa, Artificial Sequence
  Description of Artificial Sequence: Synthetic peptide
SGWIRACMA

SEQ ID NO: 30771 - protein, 9 aa, Artificial Sequence
  Description of Artificial Sequence: Synthetic peptide
SGWNGACMA

SEQ ID NO: 30772 - protein, 9 aa, Artificial Sequence
  Description of Artificial Sequence: Synthetic peptide
SHFESHQWC

SEQ ID NO: 30773 - protein, 9 aa, Artificial Sequence
  Description of Artificial Sequence: Synthetic peptide
SHGESHQWC

SEQ ID NO: 30774 - protein, 9 aa, Artificial Sequence
  Description of Artificial Sequence: Synthetic peptide
SIMMPDYSC

SEQ ID NO: 30775 - protein, 9 aa, Artificial Sequence
  Description of Artificial Sequence: Synthetic peptide
SITDANLGF

SEQ ID NO: 30776 - protein, 9 aa, Artificial Sequence
  Description of Artificial Sequence: Synthetic peptide
SKIYAVDQS

SEQ ID NO: 30777 - protein, 9 aa, Artificial Sequence
  Description of Artificial Sequence: Synthetic peptide
SKRDIENCH

SEQ ID NO: 30778 - protein, 9 aa, Artificial Sequence
  Description of Artificial Sequence: Synthetic peptide
SKRDVQSMM

SEQ ID NO: 30779 - protein, 9 aa, Artificial Sequence
  Description of Artificial Sequence: Synthetic peptide
SKREIENCQ

SEQ ID NO: 30780 - protein, 9 aa, Artificial Sequence
  Description of Artificial Sequence: Synthetic peptide
SKREIETCH

SEQ ID NO: 30781 - protein, 9 aa, Artificial Sequence
  Description of Artificial Sequence: Synthetic peptide
SKRELENCH

SEQ ID NO: 30782 - protein, 9 aa, Artificial Sequence
  Description of Artificial Sequence: Synthetic peptide
SKRKIENCH

SEQ ID NO: 30783 - protein, 9 aa, Artificial Sequence
  Description of Artificial Sequence: Synthetic peptide
SKWACHPKM

SEQ ID NO: 30784 - protein, 9 aa, Artificial Sequence
  Description of Artificial Sequence: Synthetic peptide
SKWNCHPKM

SEQ ID NO: 30785 - protein, 9 aa, Artificial Sequence
  Description of Artificial Sequence: Synthetic peptide
SLNELKRDQ

SEQ ID NO: 30786 - protein, 9 aa, Artificial Sequence
  Description of Artificial Sequence: Synthetic peptide
SMAKHFTSS

SEQ ID NO: 30787 - protein, 9 aa, Artificial Sequence
  Description of Artificial Sequence: Synthetic peptide
SMHKIQYRA

SEQ ID NO: 30788 - protein, 9 aa, Artificial Sequence
  Description of Artificial Sequence: Synthetic peptide
SQEFVCAQE

SEQ ID NO: 30789 - protein, 9 aa, Artificial Sequence
  Description of Artificial Sequence: Synthetic peptide
SRDNESNLI

SEQ ID NO: 30790 - protein, 9 aa, Artificial Sequence
  Description of Artificial Sequence: Synthetic peptide
SREQVNCDA

SEQ ID NO: 30791 - protein, 9 aa, Artificial Sequence
  Description of Artificial Sequence: Synthetic peptide
SRISFVCSD

SEQ ID NO: 30792 - protein, 9 aa, Artificial Sequence
  Description of Artificial Sequence: Synthetic peptide
SRKQVNCDA

SEQ ID NO: 30793 - protein, 9 aa, Artificial Sequence
  Description of Artificial Sequence: Synthetic peptide
SRLQVNCDA

SEQ ID NO: 30794 - protein, 9 aa, Artificial Sequence
  Description of Artificial Sequence: Synthetic peptide
SRLSFVCSD

SEQ ID NO: 30795 - protein, 9 aa, Artificial Sequence
  Description of Artificial Sequence: Synthetic peptide
SRQPVNCDA

SEQ ID NO: 30796 - protein, 9 aa, Artificial Sequence
  Description of Artificial Sequence: Synthetic peptide
SRQQANCDA

SEQ ID NO: 30797 - protein, 9 aa, Artificial Sequence
  Description of Artificial Sequence: Synthetic peptide
SRQQVHCDA

SEQ ID NO: 30798 - protein, 9 aa, Artificial Sequence
  Description of Artificial Sequence: Synthetic peptide
SRQQVNCDV

SEQ ID NO: 30799 - protein, 9 aa, Artificial Sequence
  Description of Artificial Sequence: Synthetic peptide
SRQQVNCEA

SEQ ID NO: 30800 - protein, 9 aa, Artificial Sequence
  Description of Artificial Sequence: Synthetic peptide
SRQQVNGDA

SEQ ID NO: 30801 - protein, 9 aa, Artificial Sequence
  Description of Artificial Sequence: Synthetic peptide
SRQRVNCDA

SEQ ID NO: 30802 - protein, 9 aa, Artificial Sequence
  Description of Artificial Sequence: Synthetic peptide
SRSMSSSME

SEQ ID NO: 30803 - protein, 9 aa, Artificial Sequence
  Description of Artificial Sequence: Synthetic peptide
SRSMYSGME

SEQ ID NO: 30804 - protein, 9 aa, Artificial Sequence
  Description of Artificial Sequence: Synthetic peptide
SRVAFVCSD

SEQ ID NO: 30805 - protein, 9 aa, Artificial Sequence
  Description of Artificial Sequence: Synthetic peptide
SSAIQCDAA

SEQ ID NO: 30806 - protein, 9 aa, Artificial Sequence
  Description of Artificial Sequence: Synthetic peptide
SSGIECDAA

SEQ ID NO: 30807 - protein, 9 aa, Artificial Sequence
  Description of Artificial Sequence: Synthetic peptide
SSGIQCDAT

SEQ ID NO: 30808 - protein, 9 aa, Artificial Sequence
  Description of Artificial Sequence: Synthetic peptide
SSGIQCEAA

SEQ ID NO: 30809 - protein, 9 aa, Artificial Sequence
  Description of Artificial Sequence: Synthetic peptide
SSGLQCDAA

SEQ ID NO: 30810 - protein, 9 aa, Artificial Sequence
  Description of Artificial Sequence: Synthetic peptide
SSILTWTWI

SEQ ID NO: 30811 - protein, 9 aa, Artificial Sequence
  Description of Artificial Sequence: Synthetic peptide
SSRIQCDAA

SEQ ID NO: 30812 - protein, 9 aa, Artificial Sequence
  Description of Artificial Sequence: Synthetic peptide
STDNHWGHG

SEQ ID NO: 30813 - protein, 9 aa, Artificial Sequence
  Description of Artificial Sequence: Synthetic peptide
STQATVRWP

SEQ ID NO: 30814 - protein, 9 aa, Artificial Sequence
  Description of Artificial Sequence: Synthetic peptide
STQEDFDMF

SEQ ID NO: 30815 - protein, 9 aa, Artificial Sequence
  Description of Artificial Sequence: Synthetic peptide
STQTSVRWP

SEQ ID NO: 30816 - protein, 9 aa, Artificial Sequence
  Description of Artificial Sequence: Synthetic peptide
SVQWYRVSF

SEQ ID NO: 30817 - protein, 9 aa, Artificial Sequence
  Description of Artificial Sequence: Synthetic peptide
SWCDCHRLF

SEQ ID NO: 30818 - protein, 9 aa, Artificial Sequence
  Description of Artificial Sequence: Synthetic peptide
SWCECHRLL

SEQ ID NO: 30819 - protein, 9 aa, Artificial Sequence
  Description of Artificial Sequence: Synthetic peptide
SWCECHRLV

SEQ ID NO: 30820 - protein, 9 aa, Artificial Sequence
  Description of Artificial Sequence: Synthetic peptide
SWCECHRMF

SEQ ID NO: 30821 - protein, 9 aa, Artificial Sequence
  Description of Artificial Sequence: Synthetic peptide
SWCECHRSF

SEQ ID NO: 30822 - protein, 9 aa, Artificial Sequence
  Description of Artificial Sequence: Synthetic peptide
SWCECHRVF

SEQ ID NO: 30823 - protein, 9 aa, Artificial Sequence
  Description of Artificial Sequence: Synthetic peptide
SWCGCHRLF

SEQ ID NO: 30824 - protein, 9 aa, Artificial Sequence
  Description of Artificial Sequence: Synthetic peptide
SWCVCHRLF

SEQ ID NO: 30825 - protein, 9 aa, Artificial Sequence
  Description of Artificial Sequence: Synthetic peptide
SWNELKRNQ

SEQ ID NO: 30826 - protein, 9 aa, Artificial Sequence
  Description of Artificial Sequence: Synthetic peptide
SWSWCEFNQ

SEQ ID NO: 30827 - protein, 9 aa, Artificial Sequence
  Description of Artificial Sequence: Synthetic peptide
SYTHLKLNN

SEQ ID NO: 30828 - protein, 9 aa, Artificial Sequence
  Description of Artificial Sequence: Synthetic peptide
SYTPWKLNN

SEQ ID NO: 30829 - protein, 9 aa, Artificial Sequence
  Description of Artificial Sequence: Synthetic peptide
TAWDLVGML

SEQ ID NO: 30830 - protein, 9 aa, Artificial Sequence
  Description of Artificial Sequence: Synthetic peptide
TAWRKIKKF

SEQ ID NO: 30831 - protein, 9 aa, Artificial Sequence
  Description of Artificial Sequence: Synthetic peptide
TCKWVGREN

SEQ ID NO: 30832 - protein, 9 aa, Artificial Sequence
  Description of Artificial Sequence: Synthetic peptide
TCMFRVYDN

SEQ ID NO: 30833 - protein, 9 aa, Artificial Sequence
  Description of Artificial Sequence: Synthetic peptide
TCPNVWWHK

SEQ ID NO: 30834 - protein, 9 aa, Artificial Sequence
  Description of Artificial Sequence: Synthetic peptide
TCPNVWWHL

SEQ ID NO: 30835 - protein, 9 aa, Artificial Sequence
  Description of Artificial Sequence: Synthetic peptide
TCPNVWWRM

SEQ ID NO: 30836 - protein, 9 aa, Artificial Sequence
  Description of Artificial Sequence: Synthetic peptide
TCQWFGREN

SEQ ID NO: 30837 - protein, 9 aa, Artificial Sequence
  Description of Artificial Sequence: Synthetic peptide
TDWPKIKKF

SEQ ID NO: 30838 - protein, 9 aa, Artificial Sequence
  Description of Artificial Sequence: Synthetic peptide
TDWRKFKKF

SEQ ID NO: 30839 - protein, 9 aa, Artificial Sequence
  Description of Artificial Sequence: Synthetic peptide
TDWRKLKKF

SEQ ID NO: 30840 - protein, 9 aa, Artificial Sequence
  Description of Artificial Sequence: Synthetic peptide
TDWRKMKKF

SEQ ID NO: 30841 - protein, 9 aa, Artificial Sequence
  Description of Artificial Sequence: Synthetic peptide
TDWRKVKKF

SEQ ID NO: 30842 - protein, 9 aa, Artificial Sequence
  Description of Artificial Sequence: Synthetic peptide
TDWRRIKKF

SEQ ID NO: 30843 - protein, 9 aa, Artificial Sequence
  Description of Artificial Sequence: Synthetic peptide
TEVKGWESD

SEQ ID NO: 30844 - protein, 9 aa, Artificial Sequence
  Description of Artificial Sequence: Synthetic peptide
TFMDYHDMV

SEQ ID NO: 30845 - protein, 9 aa, Artificial Sequence
  Description of Artificial Sequence: Synthetic peptide
TGFHNTFKD

SEQ ID NO: 30846 - protein, 9 aa, Artificial Sequence
  Description of Artificial Sequence: Synthetic peptide
THQGDEHDA

SEQ ID NO: 30847 - protein, 9 aa, Artificial Sequence
  Description of Artificial Sequence: Synthetic peptide
TISDIPGEP

SEQ ID NO: 30848 - protein, 9 aa, Artificial Sequence
  Description of Artificial Sequence: Synthetic peptide
TISDIPGKP

SEQ ID NO: 30849 - protein, 9 aa, Artificial Sequence
  Description of Artificial Sequence: Synthetic peptide
TLDECCRRG

SEQ ID NO: 30850 - protein, 9 aa, Artificial Sequence
  Description of Artificial Sequence: Synthetic peptide
TLPCYQRYT

SEQ ID NO: 30851 - protein, 9 aa, Artificial Sequence
  Description of Artificial Sequence: Synthetic peptide
TMPCYQRYT

SEQ ID NO: 30852 - protein, 9 aa, Artificial Sequence
  Description of Artificial Sequence: Synthetic peptide
TNVEYFDAW

SEQ ID NO: 30853 - protein, 9 aa, Artificial Sequence
  Description of Artificial Sequence: Synthetic peptide
TNWREMNAR

SEQ ID NO: 30854 - protein, 9 aa, Artificial Sequence
  Description of Artificial Sequence: Synthetic peptide
TNWRKIKKF

SEQ ID NO: 30855 - protein, 9 aa, Artificial Sequence
  Description of Artificial Sequence: Synthetic peptide
TPRPPRSGR

SEQ ID NO: 30856 - protein, 9 aa, Artificial Sequence
  Description of Artificial Sequence: Synthetic peptide
TPRPSRSAR

SEQ ID NO: 30857 - protein, 9 aa, Artificial Sequence
  Description of Artificial Sequence: Synthetic peptide
TPRTPRSAR

SEQ ID NO: 30858 - protein, 9 aa, Artificial Sequence
  Description of Artificial Sequence: Synthetic peptide
TRSGAQAMM

SEQ ID NO: 30859 - protein, 9 aa, Artificial Sequence
  Description of Artificial Sequence: Synthetic peptide
TSGTCMPIK

SEQ ID NO: 30860 - protein, 9 aa, Artificial Sequence
  Description of Artificial Sequence: Synthetic peptide
TWMVVHRNN

SEQ ID NO: 30861 - protein, 9 aa, Artificial Sequence
  Description of Artificial Sequence: Synthetic peptide
TYQWVGREN

SEQ ID NO: 30862 - protein, 9 aa, Artificial Sequence
  Description of Artificial Sequence: Synthetic peptide
VAEMHWMVN

SEQ ID NO: 30863 - protein, 9 aa, Artificial Sequence
  Description of Artificial Sequence: Synthetic peptide
VAIGFHWHA

SEQ ID NO: 30864 - protein, 9 aa, Artificial Sequence
  Description of Artificial Sequence: Synthetic peptide
VAWAVSYVC

SEQ ID NO: 30865 - protein, 9 aa, Artificial Sequence
  Description of Artificial Sequence: Synthetic peptide
VAWGVSYVG

SEQ ID NO: 30866 - protein, 9 aa, Artificial Sequence
  Description of Artificial Sequence: Synthetic peptide
VCDIDAYSN

SEQ ID NO: 30867 - protein, 9 aa, Artificial Sequence
  Description of Artificial Sequence: Synthetic peptide
VCEMGPYDG

SEQ ID NO: 30868 - protein, 9 aa, Artificial Sequence
  Description of Artificial Sequence: Synthetic peptide
VCEMGPYNG

SEQ ID NO: 30869 - protein, 9 aa, Artificial Sequence
  Description of Artificial Sequence: Synthetic peptide
VCEMGPYRG

SEQ ID NO: 30870 - protein, 9 aa, Artificial Sequence
  Description of Artificial Sequence: Synthetic peptide
VCEMGQYHG

SEQ ID NO: 30871 - protein, 9 aa, Artificial Sequence
  Description of Artificial Sequence: Synthetic peptide
VCERGPYHG

SEQ ID NO: 30872 - protein, 9 aa, Artificial Sequence
  Description of Artificial Sequence: Synthetic peptide
VCQMGPYHG

SEQ ID NO: 30873 - protein, 9 aa, Artificial Sequence
  Description of Artificial Sequence: Synthetic peptide
VCVAIMKDQ

SEQ ID NO: 30874 - protein, 9 aa, Artificial Sequence
  Description of Artificial Sequence: Synthetic peptide
VCVAIMKGK

SEQ ID NO: 30875 - protein, 9 aa, Artificial Sequence
  Description of Artificial Sequence: Synthetic peptide
VCVAIMQDK

SEQ ID NO: 30876 - protein, 9 aa, Artificial Sequence
  Description of Artificial Sequence: Synthetic peptide
VCVMGPYHG

SEQ ID NO: 30877 - protein, 9 aa, Artificial Sequence
  Description of Artificial Sequence: Synthetic peptide
VCWDTQQSI

SEQ ID NO: 30878 - protein, 9 aa, Artificial Sequence
  Description of Artificial Sequence: Synthetic peptide
VCWMAGAQM

SEQ ID NO: 30879 - protein, 9 aa, Artificial Sequence
  Description of Artificial Sequence: Synthetic peptide
VDKAWWNLI

SEQ ID NO: 30880 - protein, 9 aa, Artificial Sequence
  Description of Artificial Sequence: Synthetic peptide
VDKVWWNLV

SEQ ID NO: 30881 - protein, 9 aa, Artificial Sequence
  Description of Artificial Sequence: Synthetic peptide
VDRSYGPSG

SEQ ID NO: 30882 - protein, 9 aa, Artificial Sequence
  Description of Artificial Sequence: Synthetic peptide
VFGDFDNHS

SEQ ID NO: 30883 - protein, 9 aa, Artificial Sequence
  Description of Artificial Sequence: Synthetic peptide
VFVACHVNG

SEQ ID NO: 30884 - protein, 9 aa, Artificial Sequence
  Description of Artificial Sequence: Synthetic peptide
VGDLNFRIQ

SEQ ID NO: 30885 - protein, 9 aa, Artificial Sequence
  Description of Artificial Sequence: Synthetic peptide
VHLNADTKF

SEQ ID NO: 30886 - protein, 9 aa, Artificial Sequence
  Description of Artificial Sequence: Synthetic peptide
VHWDAIMRW

SEQ ID NO: 30887 - protein, 9 aa, Artificial Sequence
  Description of Artificial Sequence: Synthetic peptide
VHWNAIMRG

SEQ ID NO: 30888 - protein, 9 aa, Artificial Sequence
  Description of Artificial Sequence: Synthetic peptide
VHWNAIMRL

SEQ ID NO: 30889 - protein, 9 aa, Artificial Sequence
  Description of Artificial Sequence: Synthetic peptide
VHWNALMRW

SEQ ID NO: 30890 - protein, 9 aa, Artificial Sequence
  Description of Artificial Sequence: Synthetic peptide
VHWNASMRW

SEQ ID NO: 30891 - protein, 9 aa, Artificial Sequence
  Description of Artificial Sequence: Synthetic peptide
VHWQQCGHQ

SEQ ID NO: 30892 - protein, 9 aa, Artificial Sequence
  Description of Artificial Sequence: Synthetic peptide
VIDRIWFNW

SEQ ID NO: 30893 - protein, 9 aa, Artificial Sequence
  Description of Artificial Sequence: Synthetic peptide
VIKGRSQDK

SEQ ID NO: 30894 - protein, 9 aa, Artificial Sequence
  Description of Artificial Sequence: Synthetic peptide
VIKLRSQDK

SEQ ID NO: 30895 - protein, 9 aa, Artificial Sequence
  Description of Artificial Sequence: Synthetic peptide
VIKWGSQDK

SEQ ID NO: 30896 - protein, 9 aa, Artificial Sequence
  Description of Artificial Sequence: Synthetic peptide
VIKWRGQDK

SEQ ID NO: 30897 - protein, 9 aa, Artificial Sequence
  Description of Artificial Sequence: Synthetic peptide
VIKWRSLDK

SEQ ID NO: 30898 - protein, 9 aa, Artificial Sequence
  Description of Artificial Sequence: Synthetic peptide
VIKWRSRDK

SEQ ID NO: 30899 - protein, 9 aa, Artificial Sequence
  Description of Artificial Sequence: Synthetic peptide
VIQWRSQDK

SEQ ID NO: 30900 - protein, 9 aa, Artificial Sequence
  Description of Artificial Sequence: Synthetic peptide
VIRWRSQDK

SEQ ID NO: 30901 - protein, 9 aa, Artificial Sequence
  Description of Artificial Sequence: Synthetic peptide
VLPCQRKRV

SEQ ID NO: 30902 - protein, 9 aa, Artificial Sequence
  Description of Artificial Sequence: Synthetic peptide
VLWNAIMRW

SEQ ID NO: 30903 - protein, 9 aa, Artificial Sequence
  Description of Artificial Sequence: Synthetic peptide
VMQNVWCSW

SEQ ID NO: 30904 - protein, 9 aa, Artificial Sequence
  Description of Artificial Sequence: Synthetic peptide
VMSCHSRDH

SEQ ID NO: 30905 - protein, 9 aa, Artificial Sequence
  Description of Artificial Sequence: Synthetic peptide
VPKNVNRDM

SEQ ID NO: 30906 - protein, 9 aa, Artificial Sequence
  Description of Artificial Sequence: Synthetic peptide
VPKTANRDM

SEQ ID NO: 30907 - protein, 9 aa, Artificial Sequence
  Description of Artificial Sequence: Synthetic peptide
VPKTVDRDM

SEQ ID NO: 30908 - protein, 9 aa, Artificial Sequence
  Description of Artificial Sequence: Synthetic peptide
VPTTVNRDM

SEQ ID NO: 30909 - protein, 9 aa, Artificial Sequence
  Description of Artificial Sequence: Synthetic peptide
VQDKCTVNL

SEQ ID NO: 30910 - protein, 9 aa, Artificial Sequence
  Description of Artificial Sequence: Synthetic peptide
VRHWAFCDY

SEQ ID NO: 30911 - protein, 9 aa, Artificial Sequence
  Description of Artificial Sequence: Synthetic peptide
VSVQMDRAK

SEQ ID NO: 30912 - protein, 9 aa, Artificial Sequence
  Description of Artificial Sequence: Synthetic peptide
VTGKMDFWQ

SEQ ID NO: 30913 - protein, 9 aa, Artificial Sequence
  Description of Artificial Sequence: Synthetic peptide
VTKNVWCSW

SEQ ID NO: 30914 - protein, 9 aa, Artificial Sequence
  Description of Artificial Sequence: Synthetic peptide
VTKWRSQDQ

SEQ ID NO: 30915 - protein, 9 aa, Artificial Sequence
  Description of Artificial Sequence: Synthetic peptide
VTMIMMDCH

SEQ ID NO: 30916 - protein, 9 aa, Artificial Sequence
  Description of Artificial Sequence: Synthetic peptide
VTRDLKKEQ

SEQ ID NO: 30917 - protein, 9 aa, Artificial Sequence
  Description of Artificial Sequence: Synthetic peptide
VVDMCRKGK

SEQ ID NO: 30918 - protein, 9 aa, Artificial Sequence
  Description of Artificial Sequence: Synthetic peptide
VVRDLPNQY

SEQ ID NO: 30919 - protein, 9 aa, Artificial Sequence
  Description of Artificial Sequence: Synthetic peptide
VWFGKCVNC

SEQ ID NO: 30920 - protein, 9 aa, Artificial Sequence
  Description of Artificial Sequence: Synthetic peptide
VWLKSLDRM

SEQ ID NO: 30921 - protein, 9 aa, Artificial Sequence
  Description of Artificial Sequence: Synthetic peptide
VWPKGMREM

SEQ ID NO: 30922 - protein, 9 aa, Artificial Sequence
  Description of Artificial Sequence: Synthetic peptide
VWSCVHTDV

SEQ ID NO: 30923 - protein, 9 aa, Artificial Sequence
  Description of Artificial Sequence: Synthetic peptide
WDVVAADGP

SEQ ID NO: 30924 - protein, 9 aa, Artificial Sequence
  Description of Artificial Sequence: Synthetic peptide
WDVVATDVP

SEQ ID NO: 30925 - protein, 9 aa, Artificial Sequence
  Description of Artificial Sequence: Synthetic peptide
WERAWLFGG

SEQ ID NO: 30926 - protein, 9 aa, Artificial Sequence
  Description of Artificial Sequence: Synthetic peptide
WERFWHEYW

SEQ ID NO: 30927 - protein, 9 aa, Artificial Sequence
  Description of Artificial Sequence: Synthetic peptide
WHGRLMITF

SEQ ID NO: 30928 - protein, 9 aa, Artificial Sequence
  Description of Artificial Sequence: Synthetic peptide
WHQENFVFR

SEQ ID NO: 30929 - protein, 9 aa, Artificial Sequence
  Description of Artificial Sequence: Synthetic peptide
WKDPFNRKI

SEQ ID NO: 30930 - protein, 9 aa, Artificial Sequence
  Description of Artificial Sequence: Synthetic peptide
WLANGWFRE

SEQ ID NO: 30931 - protein, 9 aa, Artificial Sequence
  Description of Artificial Sequence: Synthetic peptide
WLANSWFRG

SEQ ID NO: 30932 - protein, 9 aa, Artificial Sequence
  Description of Artificial Sequence: Synthetic peptide
WLDNSWFRE

SEQ ID NO: 30933 - protein, 9 aa, Artificial Sequence
  Description of Artificial Sequence: Synthetic peptide
WLPNSWFRE

SEQ ID NO: 30934 - protein, 9 aa, Artificial Sequence
  Description of Artificial Sequence: Synthetic peptide
WLSNSWFRE

SEQ ID NO: 30935 - protein, 9 aa, Artificial Sequence
  Description of Artificial Sequence: Synthetic peptide
WMCRNHHFD

SEQ ID NO: 30936 - protein, 9 aa, Artificial Sequence
  Description of Artificial Sequence: Synthetic peptide
WMCRNHPFN

SEQ ID NO: 30937 - protein, 9 aa, Artificial Sequence
  Description of Artificial Sequence: Synthetic peptide
WMCRNHPVD

SEQ ID NO: 30938 - protein, 9 aa, Artificial Sequence
  Description of Artificial Sequence: Synthetic peptide
WMCRSHPFD

SEQ ID NO: 30939 - protein, 9 aa, Artificial Sequence
  Description of Artificial Sequence: Synthetic peptide
WRCLCARID

SEQ ID NO: 30940 - protein, 9 aa, Artificial Sequence
  Description of Artificial Sequence: Synthetic peptide
WRCMCARIA

SEQ ID NO: 30941 - protein, 9 aa, Artificial Sequence
  Description of Artificial Sequence: Synthetic peptide
WRCMCARLD

SEQ ID NO: 30942 - protein, 9 aa, Artificial Sequence
  Description of Artificial Sequence: Synthetic peptide
WRCMCARMD

SEQ ID NO: 30943 - protein, 9 aa, Artificial Sequence
  Description of Artificial Sequence: Synthetic peptide
WRCMCARTD

SEQ ID NO: 30944 - protein, 9 aa, Artificial Sequence
  Description of Artificial Sequence: Synthetic peptide
WRCMCARVD

SEQ ID NO: 30945 - protein, 9 aa, Artificial Sequence
  Description of Artificial Sequence: Synthetic peptide
WRCMCSRID

SEQ ID NO: 30946 - protein, 9 aa, Artificial Sequence
  Description of Artificial Sequence: Synthetic peptide
WRCMCTRID

SEQ ID NO: 30947 - protein, 9 aa, Artificial Sequence
  Description of Artificial Sequence: Synthetic peptide
WRCWYAPLT

SEQ ID NO: 30948 - protein, 9 aa, Artificial Sequence
  Description of Artificial Sequence: Synthetic peptide
WRELSNTGY

SEQ ID NO: 30949 - protein, 9 aa, Artificial Sequence
  Description of Artificial Sequence: Synthetic peptide
WREWSHTGY

SEQ ID NO: 30950 - protein, 9 aa, Artificial Sequence
  Description of Artificial Sequence: Synthetic peptide
WREWSNAGY

SEQ ID NO: 30951 - protein, 9 aa, Artificial Sequence
  Description of Artificial Sequence: Synthetic peptide
WREWSNTAY

SEQ ID NO: 30952 - protein, 9 aa, Artificial Sequence
  Description of Artificial Sequence: Synthetic peptide
WREWSNTCY

SEQ ID NO: 30953 - protein, 9 aa, Artificial Sequence
  Description of Artificial Sequence: Synthetic peptide
WREWSNTVY

SEQ ID NO: 30954 - protein, 9 aa, Artificial Sequence
  Description of Artificial Sequence: Synthetic peptide
WRGWSNTGY

SEQ ID NO: 30955 - protein, 9 aa, Artificial Sequence
  Description of Artificial Sequence: Synthetic peptide
WRQWSNTGY

SEQ ID NO: 30956 - protein, 9 aa, Artificial Sequence
  Description of Artificial Sequence: Synthetic peptide
WRRFASGWE

SEQ ID NO: 30957 - protein, 9 aa, Artificial Sequence
  Description of Artificial Sequence: Synthetic peptide
WRRFASWLE

SEQ ID NO: 30958 - protein, 9 aa, Artificial Sequence
  Description of Artificial Sequence: Synthetic peptide
WRRFSSWWE

SEQ ID NO: 30959 - protein, 9 aa, Artificial Sequence
  Description of Artificial Sequence: Synthetic peptide
WRRFVSWWE

SEQ ID NO: 30960 - protein, 9 aa, Artificial Sequence
  Description of Artificial Sequence: Synthetic peptide
WRTADEGDA

SEQ ID NO: 30961 - protein, 9 aa, Artificial Sequence
  Description of Artificial Sequence: Synthetic peptide
WRTADESDT

SEQ ID NO: 30962 - protein, 9 aa, Artificial Sequence
  Description of Artificial Sequence: Synthetic peptide
WRTAHESDA

SEQ ID NO: 30963 - protein, 9 aa, Artificial Sequence
  Description of Artificial Sequence: Synthetic peptide
WRTGDESDA

SEQ ID NO: 30964 - protein, 9 aa, Artificial Sequence
  Description of Artificial Sequence: Synthetic peptide
WTETTVRWP

SEQ ID NO: 30965 - protein, 9 aa, Artificial Sequence
  Description of Artificial Sequence: Synthetic peptide
WTQTTVRWP

SEQ ID NO: 30966 - protein, 9 aa, Artificial Sequence
  Description of Artificial Sequence: Synthetic peptide
WVANSWFRE

SEQ ID NO: 30967 - protein, 9 aa, Artificial Sequence
  Description of Artificial Sequence: Synthetic peptide
WVCRNHPFD

SEQ ID NO: 30968 - protein, 9 aa, Artificial Sequence
  Description of Artificial Sequence: Synthetic peptide
WYGHLNAMC

SEQ ID NO: 30969 - protein, 9 aa, Artificial Sequence
  Description of Artificial Sequence: Synthetic peptide
WYSWRVRNR

SEQ ID NO: 30970 - protein, 9 aa, Artificial Sequence
  Description of Artificial Sequence: Synthetic peptide
YARGIWDIH

SEQ ID NO: 30971 - protein, 9 aa, Artificial Sequence
  Description of Artificial Sequence: Synthetic peptide
YARGIWDVH

SEQ ID NO: 30972 - protein, 9 aa, Artificial Sequence
  Description of Artificial Sequence: Synthetic peptide
YARGTWDFH

SEQ ID NO: 30973 - protein, 9 aa, Artificial Sequence
  Description of Artificial Sequence: Synthetic peptide
YCSRHFCEV

SEQ ID NO: 30974 - protein, 9 aa, Artificial Sequence
  Description of Artificial Sequence: Synthetic peptide
YDRGIWDFH

SEQ ID NO: 30975 - protein, 9 aa, Artificial Sequence
  Description of Artificial Sequence: Synthetic peptide
YEVHSFLSG

SEQ ID NO: 30976 - protein, 9 aa, Artificial Sequence
  Description of Artificial Sequence: Synthetic peptide
YHDLCFAWY

SEQ ID NO: 30977 - protein, 9 aa, Artificial Sequence
  Description of Artificial Sequence: Synthetic peptide
YHDLFFDWY

SEQ ID NO: 30978 - protein, 9 aa, Artificial Sequence
  Description of Artificial Sequence: Synthetic peptide
YHDLFFGWY

SEQ ID NO: 30979 - protein, 9 aa, Artificial Sequence
  Description of Artificial Sequence: Synthetic peptide
YKREIENCH

SEQ ID NO: 30980 - protein, 9 aa, Artificial Sequence
  Description of Artificial Sequence: Synthetic peptide
YMGIASPWH

SEQ ID NO: 30981 - protein, 9 aa, Artificial Sequence
  Description of Artificial Sequence: Synthetic peptide
YMWWEEGTL

SEQ ID NO: 30982 - protein, 9 aa, Artificial Sequence
  Description of Artificial Sequence: Synthetic peptide
YMWWQAGTL

SEQ ID NO: 30983 - protein, 9 aa, Artificial Sequence
  Description of Artificial Sequence: Synthetic peptide
YRQQVNCDA

SEQ ID NO: 30984 - protein, 9 aa, Artificial Sequence
  Description of Artificial Sequence: Synthetic peptide
YRRLQSNTT

SEQ ID NO: 30985 - protein, 9 aa, Artificial Sequence
  Description of Artificial Sequence: Synthetic peptide
YRRWESNTT

SEQ ID NO: 30986 - protein, 9 aa, Artificial Sequence
  Description of Artificial Sequence: Synthetic peptide
YRRWQSNTI

SEQ ID NO: 30987 - protein, 9 aa, Artificial Sequence
  Description of Artificial Sequence: Synthetic peptide
YRRWQSNTS

SEQ ID NO: 30988 - protein, 9 aa, Artificial Sequence
  Description of Artificial Sequence: Synthetic peptide
YVKFNVNIN

SEQ ID NO: 30989 - protein, 9 aa, Artificial Sequence
  Description of Artificial Sequence: Synthetic peptide
YVKFSVDIN

SEQ ID NO: 30990 - protein, 9 aa, Artificial Sequence
  Description of Artificial Sequence: Synthetic peptide
YVKISVNIN

SEQ ID NO: 30991 - protein, 9 aa, Artificial Sequence
  Description of Artificial Sequence: Synthetic peptide
ACIFVMLPL

SEQ ID NO: 30992 - protein, 9 aa, Artificial Sequence
  Description of Artificial Sequence: Synthetic peptide
ACIFVVLPL

SEQ ID NO: 30993 - protein, 9 aa, Artificial Sequence
  Description of Artificial Sequence: Synthetic peptide
AGKEVSAGM

SEQ ID NO: 30994 - protein, 9 aa, Artificial Sequence
  Description of Artificial Sequence: Synthetic peptide
AKKGMRHDQ

SEQ ID NO: 30995 - protein, 9 aa, Artificial Sequence
  Description of Artificial Sequence: Synthetic peptide
AKKGMWHDQ

SEQ ID NO: 30996 - protein, 9 aa, Artificial Sequence
  Description of Artificial Sequence: Synthetic peptide
APSKPWLHF

SEQ ID NO: 30997 - protein, 9 aa, Artificial Sequence
  Description of Artificial Sequence: Synthetic peptide
ARLCKRKQA

SEQ ID NO: 30998 - protein, 9 aa, Artificial Sequence
  Description of Artificial Sequence: Synthetic peptide
AWVEHAAFM

SEQ ID NO: 30999 - protein, 9 aa, Artificial Sequence
  Description of Artificial Sequence: Synthetic peptide
AYIFVVLPL

SEQ ID NO: 31000 - protein, 9 aa, Artificial Sequence
  Description of Artificial Sequence: Synthetic peptide
CAWDKHHKM

SEQ ID NO: 31001 - protein, 9 aa, Artificial Sequence
  Description of Artificial Sequence: Synthetic peptide
CAWDKHHKV

SEQ ID NO: 31002 - protein, 9 aa, Artificial Sequence
  Description of Artificial Sequence: Synthetic peptide
CDPHWAWCE

SEQ ID NO: 31003 - protein, 9 aa, Artificial Sequence
  Description of Artificial Sequence: Synthetic peptide
CDPHWDWCE

SEQ ID NO: 31004 - protein, 9 aa, Artificial Sequence
  Description of Artificial Sequence: Synthetic peptide
CDPHWDWWE

SEQ ID NO: 31005 - protein, 9 aa, Artificial Sequence
  Description of Artificial Sequence: Synthetic peptide
CDPHWGWCE

SEQ ID NO: 31006 - protein, 9 aa, Artificial Sequence
  Description of Artificial Sequence: Synthetic peptide
CFVHTSCQN

SEQ ID NO: 31007 - protein, 9 aa, Artificial Sequence
  Description of Artificial Sequence: Synthetic peptide
CPWFGLCNW

SEQ ID NO: 31008 - protein, 9 aa, Artificial Sequence
  Description of Artificial Sequence: Synthetic peptide
CPWFSLCNW

SEQ ID NO: 31009 - protein, 9 aa, Artificial Sequence
  Description of Artificial Sequence: Synthetic peptide
CPWFSLWNW

SEQ ID NO: 31010 - protein, 9 aa, Artificial Sequence
  Description of Artificial Sequence: Synthetic peptide
CRTCDEDGA

SEQ ID NO: 31011 - protein, 9 aa, Artificial Sequence
  Description of Artificial Sequence: Synthetic peptide
CRTCDEDVA

SEQ ID NO: 31012 - protein, 9 aa, Artificial Sequence
  Description of Artificial Sequence: Synthetic peptide
DDCQFDNEN

SEQ ID NO: 31013 - protein, 9 aa, Artificial Sequence
  Description of Artificial Sequence: Synthetic peptide
DDFGTLPRM

SEQ ID NO: 31014 - protein, 9 aa, Artificial Sequence
  Description of Artificial Sequence: Synthetic peptide
DENIKIIYG

SEQ ID NO: 31015 - protein, 9 aa, Artificial Sequence
  Description of Artificial Sequence: Synthetic peptide
DENIKVIYG

SEQ ID NO: 31016 - protein, 9 aa, Artificial Sequence
  Description of Artificial Sequence: Synthetic peptide
DIDPLRNSG

SEQ ID NO: 31017 - protein, 9 aa, Artificial Sequence
  Description of Artificial Sequence: Synthetic peptide
DIDQLRNSC

SEQ ID NO: 31018 - protein, 9 aa, Artificial Sequence
  Description of Artificial Sequence: Synthetic peptide
DIDQLRNSG

SEQ ID NO: 31019 - protein, 9 aa, Artificial Sequence
  Description of Artificial Sequence: Synthetic peptide
DKLKFVKQW

SEQ ID NO: 31020 - protein, 9 aa, Artificial Sequence
  Description of Artificial Sequence: Synthetic peptide
DKPKFVKQW

SEQ ID NO: 31021 - protein, 9 aa, Artificial Sequence
  Description of Artificial Sequence: Synthetic peptide
DLRSPGFYA

SEQ ID NO: 31022 - protein, 9 aa, Artificial Sequence
  Description of Artificial Sequence: Synthetic peptide
DMTPKNMQM

SEQ ID NO: 31023 - protein, 9 aa, Artificial Sequence
  Description of Artificial Sequence: Synthetic peptide
DRAMYHKVV

SEQ ID NO: 31024 - protein, 9 aa, Artificial Sequence
  Description of Artificial Sequence: Synthetic peptide
DRAMYRKVG

SEQ ID NO: 31025 - protein, 9 aa, Artificial Sequence
  Description of Artificial Sequence: Synthetic peptide
DRAMYRKVV

SEQ ID NO: 31026 - protein, 9 aa, Artificial Sequence
  Description of Artificial Sequence: Synthetic peptide
DRTMYRKVV

SEQ ID NO: 31027 - protein, 9 aa, Artificial Sequence
  Description of Artificial Sequence: Synthetic peptide
DVYQFWTSF

SEQ ID NO: 31028 - protein, 9 aa, Artificial Sequence
  Description of Artificial Sequence: Synthetic peptide
EACYMCRNV

SEQ ID NO: 31029 - protein, 9 aa, Artificial Sequence
  Description of Artificial Sequence: Synthetic peptide
EAYDVAAVN

SEQ ID NO: 31030 - protein, 9 aa, Artificial Sequence
  Description of Artificial Sequence: Synthetic peptide
EAYDVATVN

SEQ ID NO: 31031 - protein, 9 aa, Artificial Sequence
  Description of Artificial Sequence: Synthetic peptide
EFECFHNGP

SEQ ID NO: 31032 - protein, 9 aa, Artificial Sequence
  Description of Artificial Sequence: Synthetic peptide
EFGCFHNGP

SEQ ID NO: 31033 - protein, 9 aa, Artificial Sequence
  Description of Artificial Sequence: Synthetic peptide
ELNLPVRWY

SEQ ID NO: 31034 - protein, 9 aa, Artificial Sequence
  Description of Artificial Sequence: Synthetic peptide
ERRMEVLNA

SEQ ID NO: 31035 - protein, 9 aa, Artificial Sequence
  Description of Artificial Sequence: Synthetic peptide
ETYDVAAVN

SEQ ID NO: 31036 - protein, 9 aa, Artificial Sequence
  Description of Artificial Sequence: Synthetic peptide
EVECFHNGP

SEQ ID NO: 31037 - protein, 9 aa, Artificial Sequence
  Description of Artificial Sequence: Synthetic peptide
FTDTHEMVL

SEQ ID NO: 31038 - protein, 9 aa, Artificial Sequence
  Description of Artificial Sequence: Synthetic peptide
FYPRPELTG

SEQ ID NO: 31039 - protein, 9 aa, Artificial Sequence
  Description of Artificial Sequence: Synthetic peptide
GCIQFESTG

SEQ ID NO: 31040 - protein, 9 aa, Artificial Sequence
  Description of Artificial Sequence: Synthetic peptide
GDGYLEDSW

SEQ ID NO: 31041 - protein, 9 aa, Artificial Sequence
  Description of Artificial Sequence: Synthetic peptide
GMAPKNMQM

SEQ ID NO: 31042 - protein, 9 aa, Artificial Sequence
  Description of Artificial Sequence: Synthetic peptide
GMTPKNMQM

SEQ ID NO: 31043 - protein, 9 aa, Artificial Sequence
  Description of Artificial Sequence: Synthetic peptide
GNKDCYGSM

SEQ ID NO: 31044 - protein, 9 aa, Artificial Sequence
  Description of Artificial Sequence: Synthetic peptide
GRNFQESLQ

SEQ ID NO: 31045 - protein, 9 aa, Artificial Sequence
  Description of Artificial Sequence: Synthetic peptide
GTMLTTEDL

SEQ ID NO: 31046 - protein, 9 aa, Artificial Sequence
  Description of Artificial Sequence: Synthetic peptide
GVWQIHARE

SEQ ID NO: 31047 - protein, 9 aa, Artificial Sequence
  Description of Artificial Sequence: Synthetic peptide
GVWQIPARE

SEQ ID NO: 31048 - protein, 9 aa, Artificial Sequence
  Description of Artificial Sequence: Synthetic peptide
GVWRIHARE

SEQ ID NO: 31049 - protein, 9 aa, Artificial Sequence
  Description of Artificial Sequence: Synthetic peptide
GYTTMQTLH

SEQ ID NO: 31050 - protein, 9 aa, Artificial Sequence
  Description of Artificial Sequence: Synthetic peptide
HLDAIWPLW

SEQ ID NO: 31051 - protein, 9 aa, Artificial Sequence
  Description of Artificial Sequence: Synthetic peptide
HLDEIWPLW

SEQ ID NO: 31052 - protein, 9 aa, Artificial Sequence
  Description of Artificial Sequence: Synthetic peptide
HLDEIWPSW

SEQ ID NO: 31053 - protein, 9 aa, Artificial Sequence
  Description of Artificial Sequence: Synthetic peptide
HLDESWPLW

SEQ ID NO: 31054 - protein, 9 aa, Artificial Sequence
  Description of Artificial Sequence: Synthetic peptide
HMQWMGFRG

SEQ ID NO: 31055 - protein, 9 aa, Artificial Sequence
  Description of Artificial Sequence: Synthetic peptide
HSRCSHYDW

SEQ ID NO: 31056 - protein, 9 aa, Artificial Sequence
  Description of Artificial Sequence: Synthetic peptide
HTPHDDYRS

SEQ ID NO: 31057 - protein, 9 aa, Artificial Sequence
  Description of Artificial Sequence: Synthetic peptide
HYMSMTTYE

SEQ ID NO: 31058 - protein, 9 aa, Artificial Sequence
  Description of Artificial Sequence: Synthetic peptide
IAYTLQFQW

SEQ ID NO: 31059 - protein, 9 aa, Artificial Sequence
  Description of Artificial Sequence: Synthetic peptide
ICNEQEFVA

SEQ ID NO: 31060 - protein, 9 aa, Artificial Sequence
  Description of Artificial Sequence: Synthetic peptide
ICNEQEVVA

SEQ ID NO: 31061 - protein, 9 aa, Artificial Sequence
  Description of Artificial Sequence: Synthetic peptide
ICNKQEFVA

SEQ ID NO: 31062 - protein, 9 aa, Artificial Sequence
  Description of Artificial Sequence: Synthetic peptide
IDHCGCTQP

SEQ ID NO: 31063 - protein, 9 aa, Artificial Sequence
  Description of Artificial Sequence: Synthetic peptide
IFRCFGVEY

SEQ ID NO: 31064 - protein, 9 aa, Artificial Sequence
  Description of Artificial Sequence: Synthetic peptide
ILARWSEKE

SEQ ID NO: 31065 - protein, 9 aa, Artificial Sequence
  Description of Artificial Sequence: Synthetic peptide
IPAFPLRMV

SEQ ID NO: 31066 - protein, 9 aa, Artificial Sequence
  Description of Artificial Sequence: Synthetic peptide
IPEFPLRMV

SEQ ID NO: 31067 - protein, 9 aa, Artificial Sequence
  Description of Artificial Sequence: Synthetic peptide
IPEFPLRRV

SEQ ID NO: 31068 - protein, 9 aa, Artificial Sequence
  Description of Artificial Sequence: Synthetic peptide
IVMYPFCST

SEQ ID NO: 31069 - protein, 9 aa, Artificial Sequence
  Description of Artificial Sequence: Synthetic peptide
KENLKTNWW

SEQ ID NO: 31070 - protein, 9 aa, Artificial Sequence
  Description of Artificial Sequence: Synthetic peptide
KQEGDYVDM

SEQ ID NO: 31071 - protein, 9 aa, Artificial Sequence
  Description of Artificial Sequence: Synthetic peptide
KVKACEGSK

SEQ ID NO: 31072 - protein, 9 aa, Artificial Sequence
  Description of Artificial Sequence: Synthetic peptide
KVKSCAGSK

SEQ ID NO: 31073 - protein, 9 aa, Artificial Sequence
  Description of Artificial Sequence: Synthetic peptide
KVKSCEESK

SEQ ID NO: 31074 - protein, 9 aa, Artificial Sequence
  Description of Artificial Sequence: Synthetic peptide
KVKSCEGAK

SEQ ID NO: 31075 - protein, 9 aa, Artificial Sequence
  Description of Artificial Sequence: Synthetic peptide
KVKSCEGSK

SEQ ID NO: 31076 - protein, 9 aa, Artificial Sequence
  Description of Artificial Sequence: Synthetic peptide
KVKSWEGSK

SEQ ID NO: 31077 - protein, 9 aa, Artificial Sequence
  Description of Artificial Sequence: Synthetic peptide
KVRSCEGSK

SEQ ID NO: 31078 - protein, 9 aa, Artificial Sequence
  Description of Artificial Sequence: Synthetic peptide
KWMQDITYF

SEQ ID NO: 31079 - protein, 9 aa, Artificial Sequence
  Description of Artificial Sequence: Synthetic peptide
LALNAPNFC

SEQ ID NO: 31080 - protein, 9 aa, Artificial Sequence
  Description of Artificial Sequence: Synthetic peptide
LELPDSIKV

SEQ ID NO: 31081 - protein, 9 aa, Artificial Sequence
  Description of Artificial Sequence: Synthetic peptide
LELPVSIKV

SEQ ID NO: 31082 - protein, 9 aa, Artificial Sequence
  Description of Artificial Sequence: Synthetic peptide
LLPLFTPYV

SEQ ID NO: 31083 - protein, 9 aa, Artificial Sequence
  Description of Artificial Sequence: Synthetic peptide
LMWIGQVVE

SEQ ID NO: 31084 - protein, 9 aa, Artificial Sequence
  Description of Artificial Sequence: Synthetic peptide
LMWTGQVVE

SEQ ID NO: 31085 - protein, 9 aa, Artificial Sequence
  Description of Artificial Sequence: Synthetic peptide
LQAQEQFHI

SEQ ID NO: 31086 - protein, 9 aa, Artificial Sequence
  Description of Artificial Sequence: Synthetic peptide
LRNCICNDH

SEQ ID NO: 31087 - protein, 9 aa, Artificial Sequence
  Description of Artificial Sequence: Synthetic peptide
LRTMVQNDH

SEQ ID NO: 31088 - protein, 9 aa, Artificial Sequence
  Description of Artificial Sequence: Synthetic peptide
LRTMVRNDH

SEQ ID NO: 31089 - protein, 9 aa, Artificial Sequence
  Description of Artificial Sequence: Synthetic peptide
LTGWFLIWV

SEQ ID NO: 31090 - protein, 9 aa, Artificial Sequence
  Description of Artificial Sequence: Synthetic peptide
LVLNAPNFC

SEQ ID NO: 31091 - protein, 9 aa, Artificial Sequence
  Description of Artificial Sequence: Synthetic peptide
LWTMVQNDH

SEQ ID NO: 31092 - protein, 9 aa, Artificial Sequence
  Description of Artificial Sequence: Synthetic peptide
MAGYNDSCM

SEQ ID NO: 31093 - protein, 9 aa, Artificial Sequence
  Description of Artificial Sequence: Synthetic peptide
MAGYNDSWM

SEQ ID NO: 31094 - protein, 9 aa, Artificial Sequence
  Description of Artificial Sequence: Synthetic peptide
MAGYNGSCM

SEQ ID NO: 31095 - protein, 9 aa, Artificial Sequence
  Description of Artificial Sequence: Synthetic peptide
MAGYSDSCM

SEQ ID NO: 31096 - protein, 9 aa, Artificial Sequence
  Description of Artificial Sequence: Synthetic peptide
MIEWQFCTS

SEQ ID NO: 31097 - protein, 9 aa, Artificial Sequence
  Description of Artificial Sequence: Synthetic peptide
MMIGNQMHC

SEQ ID NO: 31098 - protein, 9 aa, Artificial Sequence
  Description of Artificial Sequence: Synthetic peptide
MPGYNDSCM

SEQ ID NO: 31099 - protein, 9 aa, Artificial Sequence
  Description of Artificial Sequence: Synthetic peptide
MRGNCEIKR

SEQ ID NO: 31100 - protein, 9 aa, Artificial Sequence
  Description of Artificial Sequence: Synthetic peptide
MTGYNDSCM

SEQ ID NO: 31101 - protein, 9 aa, Artificial Sequence
  Description of Artificial Sequence: Synthetic peptide
NAPCMWMPD

SEQ ID NO: 31102 - protein, 9 aa, Artificial Sequence
  Description of Artificial Sequence: Synthetic peptide
NAPCMWMPY

SEQ ID NO: 31103 - protein, 9 aa, Artificial Sequence
  Description of Artificial Sequence: Synthetic peptide
NAPCMWMSY

SEQ ID NO: 31104 - protein, 9 aa, Artificial Sequence
  Description of Artificial Sequence: Synthetic peptide
NDFHIEPIH

SEQ ID NO: 31105 - protein, 9 aa, Artificial Sequence
  Description of Artificial Sequence: Synthetic peptide
NEDPGAGCN

SEQ ID NO: 31106 - protein, 9 aa, Artificial Sequence
  Description of Artificial Sequence: Synthetic peptide
NEDPGAGCY

SEQ ID NO: 31107 - protein, 9 aa, Artificial Sequence
  Description of Artificial Sequence: Synthetic peptide
NGFHIEPIH

SEQ ID NO: 31108 - protein, 9 aa, Artificial Sequence
  Description of Artificial Sequence: Synthetic peptide
NGFRIEPIH

SEQ ID NO: 31109 - protein, 9 aa, Artificial Sequence
  Description of Artificial Sequence: Synthetic peptide
NLQSMFCEP

SEQ ID NO: 31110 - protein, 9 aa, Artificial Sequence
  Description of Artificial Sequence: Synthetic peptide
NQPSSDDRQ

SEQ ID NO: 31111 - protein, 9 aa, Artificial Sequence
  Description of Artificial Sequence: Synthetic peptide
NVAQPTIHR

SEQ ID NO: 31112 - protein, 9 aa, Artificial Sequence
  Description of Artificial Sequence: Synthetic peptide
NVTQPTIHR

SEQ ID NO: 31113 - protein, 9 aa, Artificial Sequence
  Description of Artificial Sequence: Synthetic peptide
PFECEANEQ

SEQ ID NO: 31114 - protein, 9 aa, Artificial Sequence
  Description of Artificial Sequence: Synthetic peptide
PFGCEANEQ

SEQ ID NO: 31115 - protein, 9 aa, Artificial Sequence
  Description of Artificial Sequence: Synthetic peptide
PHEQKMLDR

SEQ ID NO: 31116 - protein, 9 aa, Artificial Sequence
  Description of Artificial Sequence: Synthetic peptide
PPCGLKCMN

SEQ ID NO: 31117 - protein, 9 aa, Artificial Sequence
  Description of Artificial Sequence: Synthetic peptide
PPCGLKCMS

SEQ ID NO: 31118 - protein, 9 aa, Artificial Sequence
  Description of Artificial Sequence: Synthetic peptide
PQAQEQFHI

SEQ ID NO: 31119 - protein, 9 aa, Artificial Sequence
  Description of Artificial Sequence: Synthetic peptide
QFFHTLWKY

SEQ ID NO: 31120 - protein, 9 aa, Artificial Sequence
  Description of Artificial Sequence: Synthetic peptide
QFSHTLWKY

SEQ ID NO: 31121 - protein, 9 aa, Artificial Sequence
  Description of Artificial Sequence: Synthetic peptide
QNWHMKNKM

SEQ ID NO: 31122 - protein, 9 aa, Artificial Sequence
  Description of Artificial Sequence: Synthetic peptide
QNWHMKNNM

SEQ ID NO: 31123 - protein, 9 aa, Artificial Sequence
  Description of Artificial Sequence: Synthetic peptide
QSTQICHNR

SEQ ID NO: 31124 - protein, 9 aa, Artificial Sequence
  Description of Artificial Sequence: Synthetic peptide
RFWPRKVQP

SEQ ID NO: 31125 - protein, 9 aa, Artificial Sequence
  Description of Artificial Sequence: Synthetic peptide
RFWQRKVQP

SEQ ID NO: 31126 - protein, 9 aa, Artificial Sequence
  Description of Artificial Sequence: Synthetic peptide
RKDDQMYAL

SEQ ID NO: 31127 - protein, 9 aa, Artificial Sequence
  Description of Artificial Sequence: Synthetic peptide
RKEGCTSHG

SEQ ID NO: 31128 - protein, 9 aa, Artificial Sequence
  Description of Artificial Sequence: Synthetic peptide
RSGMARYAY

SEQ ID NO: 31129 - protein, 9 aa, Artificial Sequence
  Description of Artificial Sequence: Synthetic peptide
RTMLTTEDL

SEQ ID NO: 31130 - protein, 9 aa, Artificial Sequence
  Description of Artificial Sequence: Synthetic peptide
SHYFCTMST

SEQ ID NO: 31131 - protein, 9 aa, Artificial Sequence
  Description of Artificial Sequence: Synthetic peptide
SPPCCKKIL

SEQ ID NO: 31132 - protein, 9 aa, Artificial Sequence
  Description of Artificial Sequence: Synthetic peptide
SWKLKLCQT

SEQ ID NO: 31133 - protein, 9 aa, Artificial Sequence
  Description of Artificial Sequence: Synthetic peptide
SWRLKLCQT

SEQ ID NO: 31134 - protein, 9 aa, Artificial Sequence
  Description of Artificial Sequence: Synthetic peptide
TCCLPWQRI

SEQ ID NO: 31135 - protein, 9 aa, Artificial Sequence
  Description of Artificial Sequence: Synthetic peptide
TGKEASAGM

SEQ ID NO: 31136 - protein, 9 aa, Artificial Sequence
  Description of Artificial Sequence: Synthetic peptide
TGKEDSAGM

SEQ ID NO: 31137 - protein, 9 aa, Artificial Sequence
  Description of Artificial Sequence: Synthetic peptide
TGKEGSAGM

SEQ ID NO: 31138 - protein, 9 aa, Artificial Sequence
  Description of Artificial Sequence: Synthetic peptide
TGKEVSAGM

SEQ ID NO: 31139 - protein, 9 aa, Artificial Sequence
  Description of Artificial Sequence: Synthetic peptide
TKKGMRHDQ

SEQ ID NO: 31140 - protein, 9 aa, Artificial Sequence
  Description of Artificial Sequence: Synthetic peptide
TSFSFPDCM

SEQ ID NO: 31141 - protein, 9 aa, Artificial Sequence
  Description of Artificial Sequence: Synthetic peptide
TVSCGPADM

SEQ ID NO: 31142 - protein, 9 aa, Artificial Sequence
  Description of Artificial Sequence: Synthetic peptide
TVSCGPTDM

SEQ ID NO: 31143 - protein, 9 aa, Artificial Sequence
  Description of Artificial Sequence: Synthetic peptide
TWVEHAAFM

SEQ ID NO: 31144 - protein, 9 aa, Artificial Sequence
  Description of Artificial Sequence: Synthetic peptide
VDLHHPIYR

SEQ ID NO: 31145 - protein, 9 aa, Artificial Sequence
  Description of Artificial Sequence: Synthetic peptide
VVKFSWKPW

SEQ ID NO: 31146 - protein, 9 aa, Artificial Sequence
  Description of Artificial Sequence: Synthetic peptide
VVPQPPLET

SEQ ID NO: 31147 - protein, 9 aa, Artificial Sequence
  Description of Artificial Sequence: Synthetic peptide
VVQFSWKPW

SEQ ID NO: 31148 - protein, 9 aa, Artificial Sequence
  Description of Artificial Sequence: Synthetic peptide
WNPHHDFEA

SEQ ID NO: 31149 - protein, 9 aa, Artificial Sequence
  Description of Artificial Sequence: Synthetic peptide
WNPHHDFED

SEQ ID NO: 31150 - protein, 9 aa, Artificial Sequence
  Description of Artificial Sequence: Synthetic peptide
WNPHHDFEG

SEQ ID NO: 31151 - protein, 9 aa, Artificial Sequence
  Description of Artificial Sequence: Synthetic peptide
WNPHRDFED

SEQ ID NO: 31152 - protein, 9 aa, Artificial Sequence
  Description of Artificial Sequence: Synthetic peptide
YGNCRGHRL

SEQ ID NO: 31153 - protein, 9 aa, Artificial Sequence
  Description of Artificial Sequence: Synthetic peptide
YGNCWGHRL

SEQ ID NO: 31154 - protein, 9 aa, Artificial Sequence
  Description of Artificial Sequence: Synthetic peptide
YIDQLRNSG

SEQ ID NO: 31155 - protein, 9 aa, Artificial Sequence
  Description of Artificial Sequence: Synthetic peptide
YNPYRFINK

SEQ ID NO: 31156 - protein, 9 aa, Artificial Sequence
  Description of Artificial Sequence: Synthetic peptide
YNPYRFMNK

SEQ ID NO: 31157 - protein, 9 aa, Artificial Sequence
  Description of Artificial Sequence: Synthetic peptide
AENLPRWGM

SEQ ID NO: 31158 - protein, 9 aa, Artificial Sequence
  Description of Artificial Sequence: Synthetic peptide
CIETGILNG

SEQ ID NO: 31159 - protein, 9 aa, Artificial Sequence
  Description of Artificial Sequence: Synthetic peptide
CTQTTVRWP

SEQ ID NO: 31160 - protein, 9 aa, Artificial Sequence
  Description of Artificial Sequence: Synthetic peptide
EKVHCMWWH

SEQ ID NO: 31161 - protein, 9 aa, Artificial Sequence
  Description of Artificial Sequence: Synthetic peptide
ETHEMNVCM

SEQ ID NO: 31162 - protein, 9 aa, Artificial Sequence
  Description of Artificial Sequence: Synthetic peptide
FCPAEWGCL

SEQ ID NO: 31163 - protein, 9 aa, Artificial Sequence
  Description of Artificial Sequence: Synthetic peptide
GRHWAFCDY

SEQ ID NO: 31164 - protein, 9 aa, Artificial Sequence
  Description of Artificial Sequence: Synthetic peptide
HCSRHFCEV

SEQ ID NO: 31165 - protein, 9 aa, Artificial Sequence
  Description of Artificial Sequence: Synthetic peptide
HQQSEAFVS

SEQ ID NO: 31166 - protein, 9 aa, Artificial Sequence
  Description of Artificial Sequence: Synthetic peptide
IACMGEVQG

SEQ ID NO: 31167 - protein, 9 aa, Artificial Sequence
  Description of Artificial Sequence: Synthetic peptide
KAHQTVQDK

SEQ ID NO: 31168 - protein, 9 aa, Artificial Sequence
  Description of Artificial Sequence: Synthetic peptide
KCVSMDFSG

SEQ ID NO: 31169 - protein, 9 aa, Artificial Sequence
  Description of Artificial Sequence: Synthetic peptide
MYEYGQDWY

SEQ ID NO: 31170 - protein, 9 aa, Artificial Sequence
  Description of Artificial Sequence: Synthetic peptide
NAISVGEWD

SEQ ID NO: 31171 - protein, 9 aa, Artificial Sequence
  Description of Artificial Sequence: Synthetic peptide
NKRNLYALQ

SEQ ID NO: 31172 - protein, 9 aa, Artificial Sequence
  Description of Artificial Sequence: Synthetic peptide
NMVHENRFW

SEQ ID NO: 31173 - protein, 9 aa, Artificial Sequence
  Description of Artificial Sequence: Synthetic peptide
PAWDLVGML

SEQ ID NO: 31174 - protein, 9 aa, Artificial Sequence
  Description of Artificial Sequence: Synthetic peptide
PKGMAKICE

SEQ ID NO: 31175 - protein, 9 aa, Artificial Sequence
  Description of Artificial Sequence: Synthetic peptide
QKKGIEAVD

SEQ ID NO: 31176 - protein, 9 aa, Artificial Sequence
  Description of Artificial Sequence: Synthetic peptide
RFRFRAQVW

SEQ ID NO: 31177 - protein, 9 aa, Artificial Sequence
  Description of Artificial Sequence: Synthetic peptide
RLERDNNEA

SEQ ID NO: 31178 - protein, 9 aa, Artificial Sequence
  Description of Artificial Sequence: Synthetic peptide
VIKWRSQDK

SEQ ID NO: 31179 - protein, 9 aa, Artificial Sequence
  Description of Artificial Sequence: Synthetic peptide
WLANSWFRE

SEQ ID NO: 31180 - protein, 9 aa, Artificial Sequence
  Description of Artificial Sequence: Synthetic peptide
YMWWQEGTL

SEQ ID NO: 31181 - protein, 9 aa, Artificial Sequence
  Description of Artificial Sequence: Synthetic peptide
YVVGDAACP

SEQ ID NO: 31182 - protein, 9 aa, Artificial Sequence
  Description of Artificial Sequence: Synthetic peptide
KFAMDWVSD

SEQ ID NO: 31183 - protein, 9 aa, Artificial Sequence
  Description of Artificial Sequence: Synthetic peptide
LNELPRAEY

SEQ ID NO: 31184 - protein, 9 aa, Artificial Sequence
  Description of Artificial Sequence: Synthetic peptide
ISLQEMMGK

SEQ ID NO: 31185 - protein, 9 aa, Artificial Sequence
  Description of Artificial Sequence: Synthetic peptide
VGECVASAP

SEQ ID NO: 31186 - protein, 9 aa, Artificial Sequence
  Description of Artificial Sequence: Synthetic peptide
MREMPMVGA

SEQ ID NO: 31187 - protein, 9 aa, Artificial Sequence
  Description of Artificial Sequence: Synthetic peptide
AAANYDQIE

SEQ ID NO: 31188 - protein, 9 aa, Artificial Sequence
  Description of Artificial Sequence: Synthetic peptide
AACCPFAIM

SEQ ID NO: 31189 - protein, 9 aa, Artificial Sequence
  Description of Artificial Sequence: Synthetic peptide
AAGMSGQFE

SEQ ID NO: 31190 - protein, 9 aa, Artificial Sequence
  Description of Artificial Sequence: Synthetic peptide
AANEKPTHQ

SEQ ID NO: 31191 - protein, 9 aa, Artificial Sequence
  Description of Artificial Sequence: Synthetic peptide
AAVQFVLSC

SEQ ID NO: 31192 - protein, 9 aa, Artificial Sequence
  Description of Artificial Sequence: Synthetic peptide
ACMSRAMFD

SEQ ID NO: 31193 - protein, 9 aa, Artificial Sequence
  Description of Artificial Sequence: Synthetic peptide
ACQCKVIWQ

SEQ ID NO: 31194 - protein, 9 aa, Artificial Sequence
  Description of Artificial Sequence: Synthetic peptide
ACTWPGVGP

SEQ ID NO: 31195 - protein, 9 aa, Artificial Sequence
  Description of Artificial Sequence: Synthetic peptide
ADQSWYIKG

SEQ ID NO: 31196 - protein, 9 aa, Artificial Sequence
  Description of Artificial Sequence: Synthetic peptide
AEIYNCEFK

SEQ ID NO: 31197 - protein, 9 aa, Artificial Sequence
  Description of Artificial Sequence: Synthetic peptide
AEVEADQRM

SEQ ID NO: 31198 - protein, 9 aa, Artificial Sequence
  Description of Artificial Sequence: Synthetic peptide
AFANALACY

SEQ ID NO: 31199 - protein, 9 aa, Artificial Sequence
  Description of Artificial Sequence: Synthetic peptide
AFEYFGNPI

SEQ ID NO: 31200 - protein, 9 aa, Artificial Sequence
  Description of Artificial Sequence: Synthetic peptide
AFNRIGRYT

SEQ ID NO: 31201 - protein, 9 aa, Artificial Sequence
  Description of Artificial Sequence: Synthetic peptide
AFYYLGHDS

SEQ ID NO: 31202 - protein, 9 aa, Artificial Sequence
  Description of Artificial Sequence: Synthetic peptide
AGSTAMQSQ

SEQ ID NO: 31203 - protein, 9 aa, Artificial Sequence
  Description of Artificial Sequence: Synthetic peptide
AGTSFDMMP

SEQ ID NO: 31204 - protein, 9 aa, Artificial Sequence
  Description of Artificial Sequence: Synthetic peptide
AHMENELEM

SEQ ID NO: 31205 - protein, 9 aa, Artificial Sequence
  Description of Artificial Sequence: Synthetic peptide
AHNYSLAEQ

SEQ ID NO: 31206 - protein, 9 aa, Artificial Sequence
  Description of Artificial Sequence: Synthetic peptide
AHRQLDAEW

SEQ ID NO: 31207 - protein, 9 aa, Artificial Sequence
  Description of Artificial Sequence: Synthetic peptide
AIAWWHEPM

SEQ ID NO: 31208 - protein, 9 aa, Artificial Sequence
  Description of Artificial Sequence: Synthetic peptide
AIDWEDVWE

SEQ ID NO: 31209 - protein, 9 aa, Artificial Sequence
  Description of Artificial Sequence: Synthetic peptide
AIEMQRQTD

SEQ ID NO: 31210 - protein, 9 aa, Artificial Sequence
  Description of Artificial Sequence: Synthetic peptide
AIFEPRRWH

SEQ ID NO: 31211 - protein, 9 aa, Artificial Sequence
  Description of Artificial Sequence: Synthetic peptide
AIQLHFEWG

SEQ ID NO: 31212 - protein, 9 aa, Artificial Sequence
  Description of Artificial Sequence: Synthetic peptide
AKGNTNNNA

SEQ ID NO: 31213 - protein, 9 aa, Artificial Sequence
  Description of Artificial Sequence: Synthetic peptide
ALVHKDLYG

SEQ ID NO: 31214 - protein, 9 aa, Artificial Sequence
  Description of Artificial Sequence: Synthetic peptide
AMMELMWTD

SEQ ID NO: 31215 - protein, 9 aa, Artificial Sequence
  Description of Artificial Sequence: Synthetic peptide
ANHHCGLAC

SEQ ID NO: 31216 - protein, 9 aa, Artificial Sequence
  Description of Artificial Sequence: Synthetic peptide
ANHLFVIEH

SEQ ID NO: 31217 - protein, 9 aa, Artificial Sequence
  Description of Artificial Sequence: Synthetic peptide
APDDENCDF

SEQ ID NO: 31218 - protein, 9 aa, Artificial Sequence
  Description of Artificial Sequence: Synthetic peptide
AQATESSQP

SEQ ID NO: 31219 - protein, 9 aa, Artificial Sequence
  Description of Artificial Sequence: Synthetic peptide
AQVEYTYET

SEQ ID NO: 31220 - protein, 9 aa, Artificial Sequence
  Description of Artificial Sequence: Synthetic peptide
AQYPTLEYA

SEQ ID NO: 31221 - protein, 9 aa, Artificial Sequence
  Description of Artificial Sequence: Synthetic peptide
ASFFSSVAQ

SEQ ID NO: 31222 - protein, 9 aa, Artificial Sequence
  Description of Artificial Sequence: Synthetic peptide
ATDALSTSL

SEQ ID NO: 31223 - protein, 9 aa, Artificial Sequence
  Description of Artificial Sequence: Synthetic peptide
ATDNHWGHG

SEQ ID NO: 31224 - protein, 9 aa, Artificial Sequence
  Description of Artificial Sequence: Synthetic peptide
ATENVMWTC

SEQ ID NO: 31225 - protein, 9 aa, Artificial Sequence
  Description of Artificial Sequence: Synthetic peptide
ATGLHITTC

SEQ ID NO: 31226 - protein, 9 aa, Artificial Sequence
  Description of Artificial Sequence: Synthetic peptide
ATHERDFFV

SEQ ID NO: 31227 - protein, 9 aa, Artificial Sequence
  Description of Artificial Sequence: Synthetic peptide
ATHEVITPA

SEQ ID NO: 31228 - protein, 9 aa, Artificial Sequence
  Description of Artificial Sequence: Synthetic peptide
ATNWGPMSP

SEQ ID NO: 31229 - protein, 9 aa, Artificial Sequence
  Description of Artificial Sequence: Synthetic peptide
ATQEFLGLN

SEQ ID NO: 31230 - protein, 9 aa, Artificial Sequence
  Description of Artificial Sequence: Synthetic peptide
ATVATYINT

SEQ ID NO: 31231 - protein, 9 aa, Artificial Sequence
  Description of Artificial Sequence: Synthetic peptide
AVGEVDAYS

SEQ ID NO: 31232 - protein, 9 aa, Artificial Sequence
  Description of Artificial Sequence: Synthetic peptide
AVIYSSYNW

SEQ ID NO: 31233 - protein, 9 aa, Artificial Sequence
  Description of Artificial Sequence: Synthetic peptide
AVMYYGYES

SEQ ID NO: 31234 - protein, 9 aa, Artificial Sequence
  Description of Artificial Sequence: Synthetic peptide
AVWIEPRQW

SEQ ID NO: 31235 - protein, 9 aa, Artificial Sequence
  Description of Artificial Sequence: Synthetic peptide
AVYLNEFNM

SEQ ID NO: 31236 - protein, 9 aa, Artificial Sequence
  Description of Artificial Sequence: Synthetic peptide
AWFCPLLYN

SEQ ID NO: 31237 - protein, 9 aa, Artificial Sequence
  Description of Artificial Sequence: Synthetic peptide
AWSARSVNM

SEQ ID NO: 31238 - protein, 9 aa, Artificial Sequence
  Description of Artificial Sequence: Synthetic peptide
AYGWENQFE

SEQ ID NO: 31239 - protein, 9 aa, Artificial Sequence
  Description of Artificial Sequence: Synthetic peptide
AYHELTSCA

SEQ ID NO: 31240 - protein, 9 aa, Artificial Sequence
  Description of Artificial Sequence: Synthetic peptide
CADSKMTST

SEQ ID NO: 31241 - protein, 9 aa, Artificial Sequence
  Description of Artificial Sequence: Synthetic peptide
CAHFAMNNH

SEQ ID NO: 31242 - protein, 9 aa, Artificial Sequence
  Description of Artificial Sequence: Synthetic peptide
CAVCPALSA

SEQ ID NO: 31243 - protein, 9 aa, Artificial Sequence
  Description of Artificial Sequence: Synthetic peptide
CCRHWRPTP

SEQ ID NO: 31244 - protein, 9 aa, Artificial Sequence
  Description of Artificial Sequence: Synthetic peptide
CEHDMCWPT

SEQ ID NO: 31245 - protein, 9 aa, Artificial Sequence
  Description of Artificial Sequence: Synthetic peptide
CEQVQIGDE

SEQ ID NO: 31246 - protein, 9 aa, Artificial Sequence
  Description of Artificial Sequence: Synthetic peptide
CFICCHCFQ

SEQ ID NO: 31247 - protein, 9 aa, Artificial Sequence
  Description of Artificial Sequence: Synthetic peptide
CGEHDKFKS

SEQ ID NO: 31248 - protein, 9 aa, Artificial Sequence
  Description of Artificial Sequence: Synthetic peptide
CGGCEDWPM

SEQ ID NO: 31249 - protein, 9 aa, Artificial Sequence
  Description of Artificial Sequence: Synthetic peptide
CHMYHRREG

SEQ ID NO: 31250 - protein, 9 aa, Artificial Sequence
  Description of Artificial Sequence: Synthetic peptide
CHPHDEHKT

SEQ ID NO: 31251 - protein, 9 aa, Artificial Sequence
  Description of Artificial Sequence: Synthetic peptide
CHQENFVFR

SEQ ID NO: 31252 - protein, 9 aa, Artificial Sequence
  Description of Artificial Sequence: Synthetic peptide
CIASFTDGK

SEQ ID NO: 31253 - protein, 9 aa, Artificial Sequence
  Description of Artificial Sequence: Synthetic peptide
CKVNESAKN

SEQ ID NO: 31254 - protein, 9 aa, Artificial Sequence
  Description of Artificial Sequence: Synthetic peptide
CNPRPQMVG

SEQ ID NO: 31255 - protein, 9 aa, Artificial Sequence
  Description of Artificial Sequence: Synthetic peptide
CNTKFLSQS

SEQ ID NO: 31256 - protein, 9 aa, Artificial Sequence
  Description of Artificial Sequence: Synthetic peptide
CQKTFELHG

SEQ ID NO: 31257 - protein, 9 aa, Artificial Sequence
  Description of Artificial Sequence: Synthetic peptide
CQMPERWTN

SEQ ID NO: 31258 - protein, 9 aa, Artificial Sequence
  Description of Artificial Sequence: Synthetic peptide
CSGRGEIEF

SEQ ID NO: 31259 - protein, 9 aa, Artificial Sequence
  Description of Artificial Sequence: Synthetic peptide
CTCDYTAQY

SEQ ID NO: 31260 - protein, 9 aa, Artificial Sequence
  Description of Artificial Sequence: Synthetic peptide
CTCEGGSTA

SEQ ID NO: 31261 - protein, 9 aa, Artificial Sequence
  Description of Artificial Sequence: Synthetic peptide
CVLGHIHHG

SEQ ID NO: 31262 - protein, 9 aa, Artificial Sequence
  Description of Artificial Sequence: Synthetic peptide
CVMQRAADL

SEQ ID NO: 31263 - protein, 9 aa, Artificial Sequence
  Description of Artificial Sequence: Synthetic peptide
CVQPHVDPM

SEQ ID NO: 31264 - protein, 9 aa, Artificial Sequence
  Description of Artificial Sequence: Synthetic peptide
CVTCTNVYG

SEQ ID NO: 31265 - protein, 9 aa, Artificial Sequence
  Description of Artificial Sequence: Synthetic peptide
CWSQEANRG

SEQ ID NO: 31266 - protein, 9 aa, Artificial Sequence
  Description of Artificial Sequence: Synthetic peptide
CWTDNDDMD

SEQ ID NO: 31267 - protein, 9 aa, Artificial Sequence
  Description of Artificial Sequence: Synthetic peptide
CYGHLNAMC

SEQ ID NO: 31268 - protein, 9 aa, Artificial Sequence
  Description of Artificial Sequence: Synthetic peptide
DAEHSPNIM

SEQ ID NO: 31269 - protein, 9 aa, Artificial Sequence
  Description of Artificial Sequence: Synthetic peptide
DAKHHQMVH

SEQ ID NO: 31270 - protein, 9 aa, Artificial Sequence
  Description of Artificial Sequence: Synthetic peptide
DAKPYQRNI

SEQ ID NO: 31271 - protein, 9 aa, Artificial Sequence
  Description of Artificial Sequence: Synthetic peptide
DATATGQWS

SEQ ID NO: 31272 - protein, 9 aa, Artificial Sequence
  Description of Artificial Sequence: Synthetic peptide
DAWTMASAM

SEQ ID NO: 31273 - protein, 9 aa, Artificial Sequence
  Description of Artificial Sequence: Synthetic peptide
DCEEFDRTP

SEQ ID NO: 31274 - protein, 9 aa, Artificial Sequence
  Description of Artificial Sequence: Synthetic peptide
DCKWEHHSD

SEQ ID NO: 31275 - protein, 9 aa, Artificial Sequence
  Description of Artificial Sequence: Synthetic peptide
DCPQDEQMN

SEQ ID NO: 31276 - protein, 9 aa, Artificial Sequence
  Description of Artificial Sequence: Synthetic peptide
DDEPKTDWC

SEQ ID NO: 31277 - protein, 9 aa, Artificial Sequence
  Description of Artificial Sequence: Synthetic peptide
DDMWQRDWF

SEQ ID NO: 31278 - protein, 9 aa, Artificial Sequence
  Description of Artificial Sequence: Synthetic peptide
DDPAGHCYV

SEQ ID NO: 31279 - protein, 9 aa, Artificial Sequence
  Description of Artificial Sequence: Synthetic peptide
DEHKRLDIC

SEQ ID NO: 31280 - protein, 9 aa, Artificial Sequence
  Description of Artificial Sequence: Synthetic peptide
DEVPNKCDC

SEQ ID NO: 31281 - protein, 9 aa, Artificial Sequence
  Description of Artificial Sequence: Synthetic peptide
DFKPKQHDH

SEQ ID NO: 31282 - protein, 9 aa, Artificial Sequence
  Description of Artificial Sequence: Synthetic peptide
DFNWQDSGY

SEQ ID NO: 31283 - protein, 9 aa, Artificial Sequence
  Description of Artificial Sequence: Synthetic peptide
DFSSINCQS

SEQ ID NO: 31284 - protein, 9 aa, Artificial Sequence
  Description of Artificial Sequence: Synthetic peptide
DGMCNGGHP

SEQ ID NO: 31285 - protein, 9 aa, Artificial Sequence
  Description of Artificial Sequence: Synthetic peptide
DGVSDHQRP

SEQ ID NO: 31286 - protein, 9 aa, Artificial Sequence
  Description of Artificial Sequence: Synthetic peptide
DHTDMLCFG

SEQ ID NO: 31287 - protein, 9 aa, Artificial Sequence
  Description of Artificial Sequence: Synthetic peptide
DIFPNCKTD

SEQ ID NO: 31288 - protein, 9 aa, Artificial Sequence
  Description of Artificial Sequence: Synthetic peptide
DIFPSMNMS

SEQ ID NO: 31289 - protein, 9 aa, Artificial Sequence
  Description of Artificial Sequence: Synthetic peptide
DIFQLTDDS

SEQ ID NO: 31290 - protein, 9 aa, Artificial Sequence
  Description of Artificial Sequence: Synthetic peptide
DIHEWQVMS

SEQ ID NO: 31291 - protein, 9 aa, Artificial Sequence
  Description of Artificial Sequence: Synthetic peptide
DIHGSQEFA

SEQ ID NO: 31292 - protein, 9 aa, Artificial Sequence
  Description of Artificial Sequence: Synthetic peptide
DINENMSVE

SEQ ID NO: 31293 - protein, 9 aa, Artificial Sequence
  Description of Artificial Sequence: Synthetic peptide
DIVCKFASP

SEQ ID NO: 31294 - protein, 9 aa, Artificial Sequence
  Description of Artificial Sequence: Synthetic peptide
DLWRTFEAQ

SEQ ID NO: 31295 - protein, 9 aa, Artificial Sequence
  Description of Artificial Sequence: Synthetic peptide
DNHDCGRSH

SEQ ID NO: 31296 - protein, 9 aa, Artificial Sequence
  Description of Artificial Sequence: Synthetic peptide
DNHGYDRHY

SEQ ID NO: 31297 - protein, 9 aa, Artificial Sequence
  Description of Artificial Sequence: Synthetic peptide
DNRCCWHMN

SEQ ID NO: 31298 - protein, 9 aa, Artificial Sequence
  Description of Artificial Sequence: Synthetic peptide
DNRWWVAFS

SEQ ID NO: 31299 - protein, 9 aa, Artificial Sequence
  Description of Artificial Sequence: Synthetic peptide
DNVIMTTVG

SEQ ID NO: 31300 - protein, 9 aa, Artificial Sequence
  Description of Artificial Sequence: Synthetic peptide
DPSNCMRIM

SEQ ID NO: 31301 - protein, 9 aa, Artificial Sequence
  Description of Artificial Sequence: Synthetic peptide
DQEVCTAMD

SEQ ID NO: 31302 - protein, 9 aa, Artificial Sequence
  Description of Artificial Sequence: Synthetic peptide
DQLNVNESG

SEQ ID NO: 31303 - protein, 9 aa, Artificial Sequence
  Description of Artificial Sequence: Synthetic peptide
DQNIFLSID

SEQ ID NO: 31304 - protein, 9 aa, Artificial Sequence
  Description of Artificial Sequence: Synthetic peptide
DRSDGGFVG

SEQ ID NO: 31305 - protein, 9 aa, Artificial Sequence
  Description of Artificial Sequence: Synthetic peptide
DSGEGLHNK

SEQ ID NO: 31306 - protein, 9 aa, Artificial Sequence
  Description of Artificial Sequence: Synthetic peptide
DSLLMREAY

SEQ ID NO: 31307 - protein, 9 aa, Artificial Sequence
  Description of Artificial Sequence: Synthetic peptide
DSRRIYAWI

SEQ ID NO: 31308 - protein, 9 aa, Artificial Sequence
  Description of Artificial Sequence: Synthetic peptide
DSYCVNHFH

SEQ ID NO: 31309 - protein, 9 aa, Artificial Sequence
  Description of Artificial Sequence: Synthetic peptide
DTAYVWCEM

SEQ ID NO: 31310 - protein, 9 aa, Artificial Sequence
  Description of Artificial Sequence: Synthetic peptide
DTNRCMMQS

SEQ ID NO: 31311 - protein, 9 aa, Artificial Sequence
  Description of Artificial Sequence: Synthetic peptide
DTQLDDIAG

SEQ ID NO: 31312 - protein, 9 aa, Artificial Sequence
  Description of Artificial Sequence: Synthetic peptide
DTYPMQSAD

SEQ ID NO: 31313 - protein, 9 aa, Artificial Sequence
  Description of Artificial Sequence: Synthetic peptide
DVDDLVEIM

SEQ ID NO: 31314 - protein, 9 aa, Artificial Sequence
  Description of Artificial Sequence: Synthetic peptide
DVEDHDSQQ

SEQ ID NO: 31315 - protein, 9 aa, Artificial Sequence
  Description of Artificial Sequence: Synthetic peptide
DVIANIHSR

SEQ ID NO: 31316 - protein, 9 aa, Artificial Sequence
  Description of Artificial Sequence: Synthetic peptide
DVMHNHVKA

SEQ ID NO: 31317 - protein, 9 aa, Artificial Sequence
  Description of Artificial Sequence: Synthetic peptide
DYRQYLEVQ

SEQ ID NO: 31318 - protein, 9 aa, Artificial Sequence
  Description of Artificial Sequence: Synthetic peptide
EADKQYDDQ

SEQ ID NO: 31319 - protein, 9 aa, Artificial Sequence
  Description of Artificial Sequence: Synthetic peptide
EAGMKQLCA

SEQ ID NO: 31320 - protein, 9 aa, Artificial Sequence
  Description of Artificial Sequence: Synthetic peptide
EAIQFPSRG

SEQ ID NO: 31321 - protein, 9 aa, Artificial Sequence
  Description of Artificial Sequence: Synthetic peptide
EAQDKWAGA

SEQ ID NO: 31322 - protein, 9 aa, Artificial Sequence
  Description of Artificial Sequence: Synthetic peptide
EAQSIACPT

SEQ ID NO: 31323 - protein, 9 aa, Artificial Sequence
  Description of Artificial Sequence: Synthetic peptide
EAYMMVCSH

SEQ ID NO: 31324 - protein, 9 aa, Artificial Sequence
  Description of Artificial Sequence: Synthetic peptide
ECLFLRNVE

SEQ ID NO: 31325 - protein, 9 aa, Artificial Sequence
  Description of Artificial Sequence: Synthetic peptide
ECNRMAMAQ

SEQ ID NO: 31326 - protein, 9 aa, Artificial Sequence
  Description of Artificial Sequence: Synthetic peptide
ECNVNPACF

SEQ ID NO: 31327 - protein, 9 aa, Artificial Sequence
  Description of Artificial Sequence: Synthetic peptide
ECSDWTHMQ

SEQ ID NO: 31328 - protein, 9 aa, Artificial Sequence
  Description of Artificial Sequence: Synthetic peptide
ECWRHVQWN

SEQ ID NO: 31329 - protein, 9 aa, Artificial Sequence
  Description of Artificial Sequence: Synthetic peptide
ECYSIYCEE

SEQ ID NO: 31330 - protein, 9 aa, Artificial Sequence
  Description of Artificial Sequence: Synthetic peptide
EDNIRIMMI

SEQ ID NO: 31331 - protein, 9 aa, Artificial Sequence
  Description of Artificial Sequence: Synthetic peptide
EDYHYTHTE

SEQ ID NO: 31332 - protein, 9 aa, Artificial Sequence
  Description of Artificial Sequence: Synthetic peptide
EEAYVNCSV

SEQ ID NO: 31333 - protein, 9 aa, Artificial Sequence
  Description of Artificial Sequence: Synthetic peptide
EFDEFNTRG

SEQ ID NO: 31334 - protein, 9 aa, Artificial Sequence
  Description of Artificial Sequence: Synthetic peptide
EFESGLLDH

SEQ ID NO: 31335 - protein, 9 aa, Artificial Sequence
  Description of Artificial Sequence: Synthetic peptide
EFHSYCMSF

SEQ ID NO: 31336 - protein, 9 aa, Artificial Sequence
  Description of Artificial Sequence: Synthetic peptide
EFIHIDREC

SEQ ID NO: 31337 - protein, 9 aa, Artificial Sequence
  Description of Artificial Sequence: Synthetic peptide
EFKCVDATE

SEQ ID NO: 31338 - protein, 9 aa, Artificial Sequence
  Description of Artificial Sequence: Synthetic peptide
EFMEAHCGC

SEQ ID NO: 31339 - protein, 9 aa, Artificial Sequence
  Description of Artificial Sequence: Synthetic peptide
EFMPEISTG

SEQ ID NO: 31340 - protein, 9 aa, Artificial Sequence
  Description of Artificial Sequence: Synthetic peptide
EFRHLKHGG

SEQ ID NO: 31341 - protein, 9 aa, Artificial Sequence
  Description of Artificial Sequence: Synthetic peptide
EGLENNDMF

SEQ ID NO: 31342 - protein, 9 aa, Artificial Sequence
  Description of Artificial Sequence: Synthetic peptide
EHAGCQLWS

SEQ ID NO: 31343 - protein, 9 aa, Artificial Sequence
  Description of Artificial Sequence: Synthetic peptide
EHEQLPSCY

SEQ ID NO: 31344 - protein, 9 aa, Artificial Sequence
  Description of Artificial Sequence: Synthetic peptide
EHFFDDIHG

SEQ ID NO: 31345 - protein, 9 aa, Artificial Sequence
  Description of Artificial Sequence: Synthetic peptide
EHKLVMCFP

SEQ ID NO: 31346 - protein, 9 aa, Artificial Sequence
  Description of Artificial Sequence: Synthetic peptide
EHKWYTTLG

SEQ ID NO: 31347 - protein, 9 aa, Artificial Sequence
  Description of Artificial Sequence: Synthetic peptide
EIHHFEYWS

SEQ ID NO: 31348 - protein, 9 aa, Artificial Sequence
  Description of Artificial Sequence: Synthetic peptide
EIIHVVGND

SEQ ID NO: 31349 - protein, 9 aa, Artificial Sequence
  Description of Artificial Sequence: Synthetic peptide
EILKNYTEA

SEQ ID NO: 31350 - protein, 9 aa, Artificial Sequence
  Description of Artificial Sequence: Synthetic peptide
EIRPQDTEM

SEQ ID NO: 31351 - protein, 9 aa, Artificial Sequence
  Description of Artificial Sequence: Synthetic peptide
EKAKRISGW

SEQ ID NO: 31352 - protein, 9 aa, Artificial Sequence
  Description of Artificial Sequence: Synthetic peptide
EKPMMQNEC

SEQ ID NO: 31353 - protein, 9 aa, Artificial Sequence
  Description of Artificial Sequence: Synthetic peptide
EKYSIIAHS

SEQ ID NO: 31354 - protein, 9 aa, Artificial Sequence
  Description of Artificial Sequence: Synthetic peptide
ELAYLWPPH

SEQ ID NO: 31355 - protein, 9 aa, Artificial Sequence
  Description of Artificial Sequence: Synthetic peptide
ELHSVNYML

SEQ ID NO: 31356 - protein, 9 aa, Artificial Sequence
  Description of Artificial Sequence: Synthetic peptide
EMCVQHNTS

SEQ ID NO: 31357 - protein, 9 aa, Artificial Sequence
  Description of Artificial Sequence: Synthetic peptide
EMEAKAFQD

SEQ ID NO: 31358 - protein, 9 aa, Artificial Sequence
  Description of Artificial Sequence: Synthetic peptide
EMFYCGAYH

SEQ ID NO: 31359 - protein, 9 aa, Artificial Sequence
  Description of Artificial Sequence: Synthetic peptide
EMMASAQSN

SEQ ID NO: 31360 - protein, 9 aa, Artificial Sequence
  Description of Artificial Sequence: Synthetic peptide
EMMPLHQQP

SEQ ID NO: 31361 - protein, 9 aa, Artificial Sequence
  Description of Artificial Sequence: Synthetic peptide
ENFSFYKCT

SEQ ID NO: 31362 - protein, 9 aa, Artificial Sequence
  Description of Artificial Sequence: Synthetic peptide
ENIHYACSN

SEQ ID NO: 31363 - protein, 9 aa, Artificial Sequence
  Description of Artificial Sequence: Synthetic peptide
ENLVINHIS

SEQ ID NO: 31364 - protein, 9 aa, Artificial Sequence
  Description of Artificial Sequence: Synthetic peptide
ENNKWYSAW

SEQ ID NO: 31365 - protein, 9 aa, Artificial Sequence
  Description of Artificial Sequence: Synthetic peptide
ENRCFSDEQ

SEQ ID NO: 31366 - protein, 9 aa, Artificial Sequence
  Description of Artificial Sequence: Synthetic peptide
EPHWFFAES

SEQ ID NO: 31367 - protein, 9 aa, Artificial Sequence
  Description of Artificial Sequence: Synthetic peptide
EPQATQKAI

SEQ ID NO: 31368 - protein, 9 aa, Artificial Sequence
  Description of Artificial Sequence: Synthetic peptide
EQRIVQQAT

SEQ ID NO: 31369 - protein, 9 aa, Artificial Sequence
  Description of Artificial Sequence: Synthetic peptide
ERCESHRAS

SEQ ID NO: 31370 - protein, 9 aa, Artificial Sequence
  Description of Artificial Sequence: Synthetic peptide
ERQTCWRGS

SEQ ID NO: 31371 - protein, 9 aa, Artificial Sequence
  Description of Artificial Sequence: Synthetic peptide
ESADMACSQ

SEQ ID NO: 31372 - protein, 9 aa, Artificial Sequence
  Description of Artificial Sequence: Synthetic peptide
ESHSYVIAA

SEQ ID NO: 31373 - protein, 9 aa, Artificial Sequence
  Description of Artificial Sequence: Synthetic peptide
ESRCVLEQG

SEQ ID NO: 31374 - protein, 9 aa, Artificial Sequence
  Description of Artificial Sequence: Synthetic peptide
ESTNSHWGA

SEQ ID NO: 31375 - protein, 9 aa, Artificial Sequence
  Description of Artificial Sequence: Synthetic peptide
ESVDVGLMH

SEQ ID NO: 31376 - protein, 9 aa, Artificial Sequence
  Description of Artificial Sequence: Synthetic peptide
ETEPHTFFS

SEQ ID NO: 31377 - protein, 9 aa, Artificial Sequence
  Description of Artificial Sequence: Synthetic peptide
ETGIDNNAT

SEQ ID NO: 31378 - protein, 9 aa, Artificial Sequence
  Description of Artificial Sequence: Synthetic peptide
ETNLECGQK

SEQ ID NO: 31379 - protein, 9 aa, Artificial Sequence
  Description of Artificial Sequence: Synthetic peptide
ETQYCRGQQ

SEQ ID NO: 31380 - protein, 9 aa, Artificial Sequence
  Description of Artificial Sequence: Synthetic peptide
EVAHKLKHA

SEQ ID NO: 31381 - protein, 9 aa, Artificial Sequence
  Description of Artificial Sequence: Synthetic peptide
EVDEVSPSA

SEQ ID NO: 31382 - protein, 9 aa, Artificial Sequence
  Description of Artificial Sequence: Synthetic peptide
EVGTNPSKN

SEQ ID NO: 31383 - protein, 9 aa, Artificial Sequence
  Description of Artificial Sequence: Synthetic peptide
EVRVDPCCL

SEQ ID NO: 31384 - protein, 9 aa, Artificial Sequence
  Description of Artificial Sequence: Synthetic peptide
EVSHDAQCT

SEQ ID NO: 31385 - protein, 9 aa, Artificial Sequence
  Description of Artificial Sequence: Synthetic peptide
EVTEVQTKA

SEQ ID NO: 31386 - protein, 9 aa, Artificial Sequence
  Description of Artificial Sequence: Synthetic peptide
EWAMWKPYA

SEQ ID NO: 31387 - protein, 9 aa, Artificial Sequence
  Description of Artificial Sequence: Synthetic peptide
EWSDEHLKA

SEQ ID NO: 31388 - protein, 9 aa, Artificial Sequence
  Description of Artificial Sequence: Synthetic peptide
EWVREDGLP

SEQ ID NO: 31389 - protein, 9 aa, Artificial Sequence
  Description of Artificial Sequence: Synthetic peptide
EYGVVKTPP

SEQ ID NO: 31390 - protein, 9 aa, Artificial Sequence
  Description of Artificial Sequence: Synthetic peptide
EYMNYEHES

SEQ ID NO: 31391 - protein, 9 aa, Artificial Sequence
  Description of Artificial Sequence: Synthetic peptide
EYSQNHSEV

SEQ ID NO: 31392 - protein, 9 aa, Artificial Sequence
  Description of Artificial Sequence: Synthetic peptide
FAAHYGQND

SEQ ID NO: 31393 - protein, 9 aa, Artificial Sequence
  Description of Artificial Sequence: Synthetic peptide
FAAPNSYWP

SEQ ID NO: 31394 - protein, 9 aa, Artificial Sequence
  Description of Artificial Sequence: Synthetic peptide
FAKTDVWCG

SEQ ID NO: 31395 - protein, 9 aa, Artificial Sequence
  Description of Artificial Sequence: Synthetic peptide
FANQGAIHP

SEQ ID NO: 31396 - protein, 9 aa, Artificial Sequence
  Description of Artificial Sequence: Synthetic peptide
FCPEHWFNI

SEQ ID NO: 31397 - protein, 9 aa, Artificial Sequence
  Description of Artificial Sequence: Synthetic peptide
FDMFASPDD

SEQ ID NO: 31398 - protein, 9 aa, Artificial Sequence
  Description of Artificial Sequence: Synthetic peptide
FDNSCPKRW

SEQ ID NO: 31399 - protein, 9 aa, Artificial Sequence
  Description of Artificial Sequence: Synthetic peptide
FFALNPNYP

SEQ ID NO: 31400 - protein, 9 aa, Artificial Sequence
  Description of Artificial Sequence: Synthetic peptide
FFELSQTVF

SEQ ID NO: 31401 - protein, 9 aa, Artificial Sequence
  Description of Artificial Sequence: Synthetic peptide
FGGKIDIGL

SEQ ID NO: 31402 - protein, 9 aa, Artificial Sequence
  Description of Artificial Sequence: Synthetic peptide
FHCRGYLGQ

SEQ ID NO: 31403 - protein, 9 aa, Artificial Sequence
  Description of Artificial Sequence: Synthetic peptide
FHHAMTEWQ

SEQ ID NO: 31404 - protein, 9 aa, Artificial Sequence
  Description of Artificial Sequence: Synthetic peptide
FKPVNAPQL

SEQ ID NO: 31405 - protein, 9 aa, Artificial Sequence
  Description of Artificial Sequence: Synthetic peptide
FLESWEKDQ

SEQ ID NO: 31406 - protein, 9 aa, Artificial Sequence
  Description of Artificial Sequence: Synthetic peptide
FLPPNCIEW

SEQ ID NO: 31407 - protein, 9 aa, Artificial Sequence
  Description of Artificial Sequence: Synthetic peptide
FLWLMQAIN

SEQ ID NO: 31408 - protein, 9 aa, Artificial Sequence
  Description of Artificial Sequence: Synthetic peptide
FMEQYMMVD

SEQ ID NO: 31409 - protein, 9 aa, Artificial Sequence
  Description of Artificial Sequence: Synthetic peptide
FMGQQNVAC

SEQ ID NO: 31410 - protein, 9 aa, Artificial Sequence
  Description of Artificial Sequence: Synthetic peptide
FPQHMNVCV

SEQ ID NO: 31411 - protein, 9 aa, Artificial Sequence
  Description of Artificial Sequence: Synthetic peptide
FRAQLPTCS

SEQ ID NO: 31412 - protein, 9 aa, Artificial Sequence
  Description of Artificial Sequence: Synthetic peptide
FRGIETGQG

SEQ ID NO: 31413 - protein, 9 aa, Artificial Sequence
  Description of Artificial Sequence: Synthetic peptide
FSGCYCMRI

SEQ ID NO: 31414 - protein, 9 aa, Artificial Sequence
  Description of Artificial Sequence: Synthetic peptide
FYGQVTKSC

SEQ ID NO: 31415 - protein, 9 aa, Artificial Sequence
  Description of Artificial Sequence: Synthetic peptide
FYQTIGQQE

SEQ ID NO: 31416 - protein, 9 aa, Artificial Sequence
  Description of Artificial Sequence: Synthetic peptide
GAFMDMLIS

SEQ ID NO: 31417 - protein, 9 aa, Artificial Sequence
  Description of Artificial Sequence: Synthetic peptide
GAIDYHTQM

SEQ ID NO: 31418 - protein, 9 aa, Artificial Sequence
  Description of Artificial Sequence: Synthetic peptide
GAMLAQLSC

SEQ ID NO: 31419 - protein, 9 aa, Artificial Sequence
  Description of Artificial Sequence: Synthetic peptide
GASWNDREH

SEQ ID NO: 31420 - protein, 9 aa, Artificial Sequence
  Description of Artificial Sequence: Synthetic peptide
GEPELPNNA

SEQ ID NO: 31421 - protein, 9 aa, Artificial Sequence
  Description of Artificial Sequence: Synthetic peptide
GFFIYQNRI

SEQ ID NO: 31422 - protein, 9 aa, Artificial Sequence
  Description of Artificial Sequence: Synthetic peptide
GGARALRFN

SEQ ID NO: 31423 - protein, 9 aa, Artificial Sequence
  Description of Artificial Sequence: Synthetic peptide
GGIQLDREW

SEQ ID NO: 31424 - protein, 9 aa, Artificial Sequence
  Description of Artificial Sequence: Synthetic peptide
GHRKAFLAT

SEQ ID NO: 31425 - protein, 9 aa, Artificial Sequence
  Description of Artificial Sequence: Synthetic peptide
GIFQYMSKH

SEQ ID NO: 31426 - protein, 9 aa, Artificial Sequence
  Description of Artificial Sequence: Synthetic peptide
GIGPIMSAM

SEQ ID NO: 31427 - protein, 9 aa, Artificial Sequence
  Description of Artificial Sequence: Synthetic peptide
GIIQVRMEW

SEQ ID NO: 31428 - protein, 9 aa, Artificial Sequence
  Description of Artificial Sequence: Synthetic peptide
GINQEYTKC

SEQ ID NO: 31429 - protein, 9 aa, Artificial Sequence
  Description of Artificial Sequence: Synthetic peptide
GITLTELQF

SEQ ID NO: 31430 - protein, 9 aa, Artificial Sequence
  Description of Artificial Sequence: Synthetic peptide
GLRHDPAQF

SEQ ID NO: 31431 - protein, 9 aa, Artificial Sequence
  Description of Artificial Sequence: Synthetic peptide
GMAYLQNEG

SEQ ID NO: 31432 - protein, 9 aa, Artificial Sequence
  Description of Artificial Sequence: Synthetic peptide
GMQWMDRQA

SEQ ID NO: 31433 - protein, 9 aa, Artificial Sequence
  Description of Artificial Sequence: Synthetic peptide
GMVQKQHGR

SEQ ID NO: 31434 - protein, 9 aa, Artificial Sequence
  Description of Artificial Sequence: Synthetic peptide
GNVVWLARP

SEQ ID NO: 31435 - protein, 9 aa, Artificial Sequence
  Description of Artificial Sequence: Synthetic peptide
GPDGAKRNK

SEQ ID NO: 31436 - protein, 9 aa, Artificial Sequence
  Description of Artificial Sequence: Synthetic peptide
GPIGMDWED

SEQ ID NO: 31437 - protein, 9 aa, Artificial Sequence
  Description of Artificial Sequence: Synthetic peptide
GPISGRYSV

SEQ ID NO: 31438 - protein, 9 aa, Artificial Sequence
  Description of Artificial Sequence: Synthetic peptide
GPVVSPCKP

SEQ ID NO: 31439 - protein, 9 aa, Artificial Sequence
  Description of Artificial Sequence: Synthetic peptide
GQFEDLLVL

SEQ ID NO: 31440 - protein, 9 aa, Artificial Sequence
  Description of Artificial Sequence: Synthetic peptide
GQGLKAWPC

SEQ ID NO: 31441 - protein, 9 aa, Artificial Sequence
  Description of Artificial Sequence: Synthetic peptide
GQVAFDKDY

SEQ ID NO: 31442 - protein, 9 aa, Artificial Sequence
  Description of Artificial Sequence: Synthetic peptide
GRHDWMDKE

SEQ ID NO: 31443 - protein, 9 aa, Artificial Sequence
  Description of Artificial Sequence: Synthetic peptide
GSLFSHFWV

SEQ ID NO: 31444 - protein, 9 aa, Artificial Sequence
  Description of Artificial Sequence: Synthetic peptide
GSYNRLHDN

SEQ ID NO: 31445 - protein, 9 aa, Artificial Sequence
  Description of Artificial Sequence: Synthetic peptide
GTDRNYAQC

SEQ ID NO: 31446 - protein, 9 aa, Artificial Sequence
  Description of Artificial Sequence: Synthetic peptide
GTEQVSAEA

SEQ ID NO: 31447 - protein, 9 aa, Artificial Sequence
  Description of Artificial Sequence: Synthetic peptide
GVHHNEHCR

SEQ ID NO: 31448 - protein, 9 aa, Artificial Sequence
  Description of Artificial Sequence: Synthetic peptide
GVKFFEYDQ

SEQ ID NO: 31449 - protein, 9 aa, Artificial Sequence
  Description of Artificial Sequence: Synthetic peptide
GVMVWNQLR

SEQ ID NO: 31450 - protein, 9 aa, Artificial Sequence
  Description of Artificial Sequence: Synthetic peptide
GVYMEHNFE

SEQ ID NO: 31451 - protein, 9 aa, Artificial Sequence
  Description of Artificial Sequence: Synthetic peptide
GVYSNCHDG

SEQ ID NO: 31452 - protein, 9 aa, Artificial Sequence
  Description of Artificial Sequence: Synthetic peptide
GWYCMRQKI

SEQ ID NO: 31453 - protein, 9 aa, Artificial Sequence
  Description of Artificial Sequence: Synthetic peptide
GYCGLMQYP

SEQ ID NO: 31454 - protein, 9 aa, Artificial Sequence
  Description of Artificial Sequence: Synthetic peptide
GYTDDGVGY

SEQ ID NO: 31455 - protein, 9 aa, Artificial Sequence
  Description of Artificial Sequence: Synthetic peptide
HADHAMAYF

SEQ ID NO: 31456 - protein, 9 aa, Artificial Sequence
  Description of Artificial Sequence: Synthetic peptide
HASLQCMKT

SEQ ID NO: 31457 - protein, 9 aa, Artificial Sequence
  Description of Artificial Sequence: Synthetic peptide
HCEGGQTIV

SEQ ID NO: 31458 - protein, 9 aa, Artificial Sequence
  Description of Artificial Sequence: Synthetic peptide
HDLSYIDMA

SEQ ID NO: 31459 - protein, 9 aa, Artificial Sequence
  Description of Artificial Sequence: Synthetic peptide
HEDRKHAGE

SEQ ID NO: 31460 - protein, 9 aa, Artificial Sequence
  Description of Artificial Sequence: Synthetic peptide
HEDVGWCSR

SEQ ID NO: 31461 - protein, 9 aa, Artificial Sequence
  Description of Artificial Sequence: Synthetic peptide
HEEFEYWNL

SEQ ID NO: 31462 - protein, 9 aa, Artificial Sequence
  Description of Artificial Sequence: Synthetic peptide
HEHKRSSTE

SEQ ID NO: 31463 - protein, 9 aa, Artificial Sequence
  Description of Artificial Sequence: Synthetic peptide
HEIDGWQMA

SEQ ID NO: 31464 - protein, 9 aa, Artificial Sequence
  Description of Artificial Sequence: Synthetic peptide
HFDEITAGT

SEQ ID NO: 31465 - protein, 9 aa, Artificial Sequence
  Description of Artificial Sequence: Synthetic peptide
HFERSPYWI

SEQ ID NO: 31466 - protein, 9 aa, Artificial Sequence
  Description of Artificial Sequence: Synthetic peptide
HFQPLFEYN

SEQ ID NO: 31467 - protein, 9 aa, Artificial Sequence
  Description of Artificial Sequence: Synthetic peptide
HGTEVCHWS

SEQ ID NO: 31468 - protein, 9 aa, Artificial Sequence
  Description of Artificial Sequence: Synthetic peptide
HHEEHDIFA

SEQ ID NO: 31469 - protein, 9 aa, Artificial Sequence
  Description of Artificial Sequence: Synthetic peptide
HHSFTIPYQ

SEQ ID NO: 31470 - protein, 9 aa, Artificial Sequence
  Description of Artificial Sequence: Synthetic peptide
HILHLYICW

SEQ ID NO: 31471 - protein, 9 aa, Artificial Sequence
  Description of Artificial Sequence: Synthetic peptide
HNFYPVTGG

SEQ ID NO: 31472 - protein, 9 aa, Artificial Sequence
  Description of Artificial Sequence: Synthetic peptide
HPEEFRGFT

SEQ ID NO: 31473 - protein, 9 aa, Artificial Sequence
  Description of Artificial Sequence: Synthetic peptide
HPGTYAIHA

SEQ ID NO: 31474 - protein, 9 aa, Artificial Sequence
  Description of Artificial Sequence: Synthetic peptide
HPHAGGINK

SEQ ID NO: 31475 - protein, 9 aa, Artificial Sequence
  Description of Artificial Sequence: Synthetic peptide
HPVWVRSDH

SEQ ID NO: 31476 - protein, 9 aa, Artificial Sequence
  Description of Artificial Sequence: Synthetic peptide
HQETFFHGP

SEQ ID NO: 31477 - protein, 9 aa, Artificial Sequence
  Description of Artificial Sequence: Synthetic peptide
HRDPHLLME

SEQ ID NO: 31478 - protein, 9 aa, Artificial Sequence
  Description of Artificial Sequence: Synthetic peptide
HSFLDNNAD

SEQ ID NO: 31479 - protein, 9 aa, Artificial Sequence
  Description of Artificial Sequence: Synthetic peptide
HSGMDHAQY

SEQ ID NO: 31480 - protein, 9 aa, Artificial Sequence
  Description of Artificial Sequence: Synthetic peptide
HSMQGAPLY

SEQ ID NO: 31481 - protein, 9 aa, Artificial Sequence
  Description of Artificial Sequence: Synthetic peptide
HSRWFEDYE

SEQ ID NO: 31482 - protein, 9 aa, Artificial Sequence
  Description of Artificial Sequence: Synthetic peptide
HSTCPCVVR

SEQ ID NO: 31483 - protein, 9 aa, Artificial Sequence
  Description of Artificial Sequence: Synthetic peptide
HSYPTAFYY

SEQ ID NO: 31484 - protein, 9 aa, Artificial Sequence
  Description of Artificial Sequence: Synthetic peptide
HTGMEHMLY

SEQ ID NO: 31485 - protein, 9 aa, Artificial Sequence
  Description of Artificial Sequence: Synthetic peptide
HTKQMDVDM

SEQ ID NO: 31486 - protein, 9 aa, Artificial Sequence
  Description of Artificial Sequence: Synthetic peptide
HVIDHTGIL

SEQ ID NO: 31487 - protein, 9 aa, Artificial Sequence
  Description of Artificial Sequence: Synthetic peptide
HVKINGTGK

SEQ ID NO: 31488 - protein, 9 aa, Artificial Sequence
  Description of Artificial Sequence: Synthetic peptide
HWYMMEDYV

SEQ ID NO: 31489 - protein, 9 aa, Artificial Sequence
  Description of Artificial Sequence: Synthetic peptide
HYFTKYKVD

SEQ ID NO: 31490 - protein, 9 aa, Artificial Sequence
  Description of Artificial Sequence: Synthetic peptide
IAGLFLKTY

SEQ ID NO: 31491 - protein, 9 aa, Artificial Sequence
  Description of Artificial Sequence: Synthetic peptide
IAMISLYNG

SEQ ID NO: 31492 - protein, 9 aa, Artificial Sequence
  Description of Artificial Sequence: Synthetic peptide
IANCNTKHL

SEQ ID NO: 31493 - protein, 9 aa, Artificial Sequence
  Description of Artificial Sequence: Synthetic peptide
IAVQQFYAA

SEQ ID NO: 31494 - protein, 9 aa, Artificial Sequence
  Description of Artificial Sequence: Synthetic peptide
IAYQLTEIT

SEQ ID NO: 31495 - protein, 9 aa, Artificial Sequence
  Description of Artificial Sequence: Synthetic peptide
ICFTPMHDS

SEQ ID NO: 31496 - protein, 9 aa, Artificial Sequence
  Description of Artificial Sequence: Synthetic peptide
ICLPKMYFG

SEQ ID NO: 31497 - protein, 9 aa, Artificial Sequence
  Description of Artificial Sequence: Synthetic peptide
IDIDMCYDY

SEQ ID NO: 31498 - protein, 9 aa, Artificial Sequence
  Description of Artificial Sequence: Synthetic peptide
IDPPHKMLD

SEQ ID NO: 31499 - protein, 9 aa, Artificial Sequence
  Description of Artificial Sequence: Synthetic peptide
IFGCTSAAE

SEQ ID NO: 31500 - protein, 9 aa, Artificial Sequence
  Description of Artificial Sequence: Synthetic peptide
IGCHRMLNP

SEQ ID NO: 31501 - protein, 9 aa, Artificial Sequence
  Description of Artificial Sequence: Synthetic peptide
IGNCDTFTK

SEQ ID NO: 31502 - protein, 9 aa, Artificial Sequence
  Description of Artificial Sequence: Synthetic peptide
IGVVFQRDF

SEQ ID NO: 31503 - protein, 9 aa, Artificial Sequence
  Description of Artificial Sequence: Synthetic peptide
IHHALQCHK

SEQ ID NO: 31504 - protein, 9 aa, Artificial Sequence
  Description of Artificial Sequence: Synthetic peptide
IHVTSKTVK

SEQ ID NO: 31505 - protein, 9 aa, Artificial Sequence
  Description of Artificial Sequence: Synthetic peptide
IIQGPVKAN

SEQ ID NO: 31506 - protein, 9 aa, Artificial Sequence
  Description of Artificial Sequence: Synthetic peptide
ILMSMYING

SEQ ID NO: 31507 - protein, 9 aa, Artificial Sequence
  Description of Artificial Sequence: Synthetic peptide
ILVNQQNGQ

SEQ ID NO: 31508 - protein, 9 aa, Artificial Sequence
  Description of Artificial Sequence: Synthetic peptide
IMEITNVHE

SEQ ID NO: 31509 - protein, 9 aa, Artificial Sequence
  Description of Artificial Sequence: Synthetic peptide
IMELTHHNA

SEQ ID NO: 31510 - protein, 9 aa, Artificial Sequence
  Description of Artificial Sequence: Synthetic peptide
INEMARHPK

SEQ ID NO: 31511 - protein, 9 aa, Artificial Sequence
  Description of Artificial Sequence: Synthetic peptide
INYTYLWAE

SEQ ID NO: 31512 - protein, 9 aa, Artificial Sequence
  Description of Artificial Sequence: Synthetic peptide
IPGYAEFCE

SEQ ID NO: 31513 - protein, 9 aa, Artificial Sequence
  Description of Artificial Sequence: Synthetic peptide
IPGYLEIHR

SEQ ID NO: 31514 - protein, 9 aa, Artificial Sequence
  Description of Artificial Sequence: Synthetic peptide
IPTYRNRDH

SEQ ID NO: 31515 - protein, 9 aa, Artificial Sequence
  Description of Artificial Sequence: Synthetic peptide
IQGVLPAMA

SEQ ID NO: 31516 - protein, 9 aa, Artificial Sequence
  Description of Artificial Sequence: Synthetic peptide
IQMDFMLWR

SEQ ID NO: 31517 - protein, 9 aa, Artificial Sequence
  Description of Artificial Sequence: Synthetic peptide
IRPTQRPCA

SEQ ID NO: 31518 - protein, 9 aa, Artificial Sequence
  Description of Artificial Sequence: Synthetic peptide
ISGKSHGDR

SEQ ID NO: 31519 - protein, 9 aa, Artificial Sequence
  Description of Artificial Sequence: Synthetic peptide
ISQWEHSCW

SEQ ID NO: 31520 - protein, 9 aa, Artificial Sequence
  Description of Artificial Sequence: Synthetic peptide
ISTDCAEFK

SEQ ID NO: 31521 - protein, 9 aa, Artificial Sequence
  Description of Artificial Sequence: Synthetic peptide
ITETEAALY

SEQ ID NO: 31522 - protein, 9 aa, Artificial Sequence
  Description of Artificial Sequence: Synthetic peptide
ITKHHMRNC

SEQ ID NO: 31523 - protein, 9 aa, Artificial Sequence
  Description of Artificial Sequence: Synthetic peptide
ITSEGFSFT

SEQ ID NO: 31524 - protein, 9 aa, Artificial Sequence
  Description of Artificial Sequence: Synthetic peptide
IVANGHWLQ

SEQ ID NO: 31525 - protein, 9 aa, Artificial Sequence
  Description of Artificial Sequence: Synthetic peptide
IVEQCQRMR

SEQ ID NO: 31526 - protein, 9 aa, Artificial Sequence
  Description of Artificial Sequence: Synthetic peptide
IVFQSLARG

SEQ ID NO: 31527 - protein, 9 aa, Artificial Sequence
  Description of Artificial Sequence: Synthetic peptide
IVTMGITEI

SEQ ID NO: 31528 - protein, 9 aa, Artificial Sequence
  Description of Artificial Sequence: Synthetic peptide
IYEIMDYLA

SEQ ID NO: 31529 - protein, 9 aa, Artificial Sequence
  Description of Artificial Sequence: Synthetic peptide
IYFMFYCSV

SEQ ID NO: 31530 - protein, 9 aa, Artificial Sequence
  Description of Artificial Sequence: Synthetic peptide
IYPQCALQW

SEQ ID NO: 31531 - protein, 9 aa, Artificial Sequence
  Description of Artificial Sequence: Synthetic peptide
KATYMEFDT

SEQ ID NO: 31532 - protein, 9 aa, Artificial Sequence
  Description of Artificial Sequence: Synthetic peptide
KCEEFAHPQ

SEQ ID NO: 31533 - protein, 9 aa, Artificial Sequence
  Description of Artificial Sequence: Synthetic peptide
KCFLCGSAT

SEQ ID NO: 31534 - protein, 9 aa, Artificial Sequence
  Description of Artificial Sequence: Synthetic peptide
KCFWAELWA

SEQ ID NO: 31535 - protein, 9 aa, Artificial Sequence
  Description of Artificial Sequence: Synthetic peptide
KEAVLNHWT

SEQ ID NO: 31536 - protein, 9 aa, Artificial Sequence
  Description of Artificial Sequence: Synthetic peptide
KHELVTRMY

SEQ ID NO: 31537 - protein, 9 aa, Artificial Sequence
  Description of Artificial Sequence: Synthetic peptide
KHKPRQSPR

SEQ ID NO: 31538 - protein, 9 aa, Artificial Sequence
  Description of Artificial Sequence: Synthetic peptide
KHVCLVSWY

SEQ ID NO: 31539 - protein, 9 aa, Artificial Sequence
  Description of Artificial Sequence: Synthetic peptide
KMEWLAAGP

SEQ ID NO: 31540 - protein, 9 aa, Artificial Sequence
  Description of Artificial Sequence: Synthetic peptide
KMMAFSEVD

SEQ ID NO: 31541 - protein, 9 aa, Artificial Sequence
  Description of Artificial Sequence: Synthetic peptide
KNNEPPMFF

SEQ ID NO: 31542 - protein, 9 aa, Artificial Sequence
  Description of Artificial Sequence: Synthetic peptide
KSYCFMCPT

SEQ ID NO: 31543 - protein, 9 aa, Artificial Sequence
  Description of Artificial Sequence: Synthetic peptide
KTCEMFTPG

SEQ ID NO: 31544 - protein, 9 aa, Artificial Sequence
  Description of Artificial Sequence: Synthetic peptide
KTTILEDCC

SEQ ID NO: 31545 - protein, 9 aa, Artificial Sequence
  Description of Artificial Sequence: Synthetic peptide
KTVEWWGRW

SEQ ID NO: 31546 - protein, 9 aa, Artificial Sequence
  Description of Artificial Sequence: Synthetic peptide
KVVDCGRYQ

SEQ ID NO: 31547 - protein, 9 aa, Artificial Sequence
  Description of Artificial Sequence: Synthetic peptide
KWADAEYGH

SEQ ID NO: 31548 - protein, 9 aa, Artificial Sequence
  Description of Artificial Sequence: Synthetic peptide
KWCYHLFCQ

SEQ ID NO: 31549 - protein, 9 aa, Artificial Sequence
  Description of Artificial Sequence: Synthetic peptide
LANVWVCME

SEQ ID NO: 31550 - protein, 9 aa, Artificial Sequence
  Description of Artificial Sequence: Synthetic peptide
LAPEIECRH

SEQ ID NO: 31551 - protein, 9 aa, Artificial Sequence
  Description of Artificial Sequence: Synthetic peptide
LATSKCSAM

SEQ ID NO: 31552 - protein, 9 aa, Artificial Sequence
  Description of Artificial Sequence: Synthetic peptide
LATSMCYQA

SEQ ID NO: 31553 - protein, 9 aa, Artificial Sequence
  Description of Artificial Sequence: Synthetic peptide
LATYGEWHN

SEQ ID NO: 31554 - protein, 9 aa, Artificial Sequence
  Description of Artificial Sequence: Synthetic peptide
LCDYMHMGS

SEQ ID NO: 31555 - protein, 9 aa, Artificial Sequence
  Description of Artificial Sequence: Synthetic peptide
LCEENSVDP

SEQ ID NO: 31556 - protein, 9 aa, Artificial Sequence
  Description of Artificial Sequence: Synthetic peptide
LCFHYMLAQ

SEQ ID NO: 31557 - protein, 9 aa, Artificial Sequence
  Description of Artificial Sequence: Synthetic peptide
LCWGPLHIS

SEQ ID NO: 31558 - protein, 9 aa, Artificial Sequence
  Description of Artificial Sequence: Synthetic peptide
LCYFGSRWY

SEQ ID NO: 31559 - protein, 9 aa, Artificial Sequence
  Description of Artificial Sequence: Synthetic peptide
LCYRTEKWD

SEQ ID NO: 31560 - protein, 9 aa, Artificial Sequence
  Description of Artificial Sequence: Synthetic peptide
LDSQWMYYN

SEQ ID NO: 31561 - protein, 9 aa, Artificial Sequence
  Description of Artificial Sequence: Synthetic peptide
LEEAVAAGN

SEQ ID NO: 31562 - protein, 9 aa, Artificial Sequence
  Description of Artificial Sequence: Synthetic peptide
LESTSFCTY

SEQ ID NO: 31563 - protein, 9 aa, Artificial Sequence
  Description of Artificial Sequence: Synthetic peptide
LEYDWNGWW

SEQ ID NO: 31564 - protein, 9 aa, Artificial Sequence
  Description of Artificial Sequence: Synthetic peptide
LFCIVQSRQ

SEQ ID NO: 31565 - protein, 9 aa, Artificial Sequence
  Description of Artificial Sequence: Synthetic peptide
LGWSNYECA

SEQ ID NO: 31566 - protein, 9 aa, Artificial Sequence
  Description of Artificial Sequence: Synthetic peptide
LHIRYQSAP

SEQ ID NO: 31567 - protein, 9 aa, Artificial Sequence
  Description of Artificial Sequence: Synthetic peptide
LHNSYWSLA

SEQ ID NO: 31568 - protein, 9 aa, Artificial Sequence
  Description of Artificial Sequence: Synthetic peptide
LHWCSQHGH

SEQ ID NO: 31569 - protein, 9 aa, Artificial Sequence
  Description of Artificial Sequence: Synthetic peptide
LIGFRTMFG

SEQ ID NO: 31570 - protein, 9 aa, Artificial Sequence
  Description of Artificial Sequence: Synthetic peptide
LILGAKFMG

SEQ ID NO: 31571 - protein, 9 aa, Artificial Sequence
  Description of Artificial Sequence: Synthetic peptide
LITWDGPTF

SEQ ID NO: 31572 - protein, 9 aa, Artificial Sequence
  Description of Artificial Sequence: Synthetic peptide
LKFWASEKG

SEQ ID NO: 31573 - protein, 9 aa, Artificial Sequence
  Description of Artificial Sequence: Synthetic peptide
LKYQFWTYD

SEQ ID NO: 31574 - protein, 9 aa, Artificial Sequence
  Description of Artificial Sequence: Synthetic peptide
LMMPYMGTH

SEQ ID NO: 31575 - protein, 9 aa, Artificial Sequence
  Description of Artificial Sequence: Synthetic peptide
LNITLVMGC

SEQ ID NO: 31576 - protein, 9 aa, Artificial Sequence
  Description of Artificial Sequence: Synthetic peptide
LNPHVSQIW

SEQ ID NO: 31577 - protein, 9 aa, Artificial Sequence
  Description of Artificial Sequence: Synthetic peptide
LPCKEVCCR

SEQ ID NO: 31578 - protein, 9 aa, Artificial Sequence
  Description of Artificial Sequence: Synthetic peptide
LPGTPPDNC

SEQ ID NO: 31579 - protein, 9 aa, Artificial Sequence
  Description of Artificial Sequence: Synthetic peptide
LPKWKEEIY

SEQ ID NO: 31580 - protein, 9 aa, Artificial Sequence
  Description of Artificial Sequence: Synthetic peptide
LPPMKQDEE

SEQ ID NO: 31581 - protein, 9 aa, Artificial Sequence
  Description of Artificial Sequence: Synthetic peptide
LQHHKYSSM

SEQ ID NO: 31582 - protein, 9 aa, Artificial Sequence
  Description of Artificial Sequence: Synthetic peptide
LRCIDPPCQ

SEQ ID NO: 31583 - protein, 9 aa, Artificial Sequence
  Description of Artificial Sequence: Synthetic peptide
LRNNNCSDI

SEQ ID NO: 31584 - protein, 9 aa, Artificial Sequence
  Description of Artificial Sequence: Synthetic peptide
LRRWDDFQT

SEQ ID NO: 31585 - protein, 9 aa, Artificial Sequence
  Description of Artificial Sequence: Synthetic peptide
LRSIEEKLS

SEQ ID NO: 31586 - protein, 9 aa, Artificial Sequence
  Description of Artificial Sequence: Synthetic peptide
LRSLVAEDF

SEQ ID NO: 31587 - protein, 9 aa, Artificial Sequence
  Description of Artificial Sequence: Synthetic peptide
LSDRCDVSG

SEQ ID NO: 31588 - protein, 9 aa, Artificial Sequence
  Description of Artificial Sequence: Synthetic peptide
LSEVMMQPG

SEQ ID NO: 31589 - protein, 9 aa, Artificial Sequence
  Description of Artificial Sequence: Synthetic peptide
LSHIKVEQD

SEQ ID NO: 31590 - protein, 9 aa, Artificial Sequence
  Description of Artificial Sequence: Synthetic peptide
LSKNCEYWE

SEQ ID NO: 31591 - protein, 9 aa, Artificial Sequence
  Description of Artificial Sequence: Synthetic peptide
LSTGNIQFM

SEQ ID NO: 31592 - protein, 9 aa, Artificial Sequence
  Description of Artificial Sequence: Synthetic peptide
LTKPMPIIL

SEQ ID NO: 31593 - protein, 9 aa, Artificial Sequence
  Description of Artificial Sequence: Synthetic peptide
LTMISMFSD

SEQ ID NO: 31594 - protein, 9 aa, Artificial Sequence
  Description of Artificial Sequence: Synthetic peptide
LTRPRVQKL

SEQ ID NO: 31595 - protein, 9 aa, Artificial Sequence
  Description of Artificial Sequence: Synthetic peptide
LTSRSDFDL

SEQ ID NO: 31596 - protein, 9 aa, Artificial Sequence
  Description of Artificial Sequence: Synthetic peptide
LVDMCRKGK

SEQ ID NO: 31597 - protein, 9 aa, Artificial Sequence
  Description of Artificial Sequence: Synthetic peptide
LVGQYWPRD

SEQ ID NO: 31598 - protein, 9 aa, Artificial Sequence
  Description of Artificial Sequence: Synthetic peptide
LVGSYQHFQ

SEQ ID NO: 31599 - protein, 9 aa, Artificial Sequence
  Description of Artificial Sequence: Synthetic peptide
LVTRGVSPL

SEQ ID NO: 31600 - protein, 9 aa, Artificial Sequence
  Description of Artificial Sequence: Synthetic peptide
LWDQTQIAI

SEQ ID NO: 31601 - protein, 9 aa, Artificial Sequence
  Description of Artificial Sequence: Synthetic peptide
LYAVENQHW

SEQ ID NO: 31602 - protein, 9 aa, Artificial Sequence
  Description of Artificial Sequence: Synthetic peptide
LYCQQAANW

SEQ ID NO: 31603 - protein, 9 aa, Artificial Sequence
  Description of Artificial Sequence: Synthetic peptide
LYDHYAAAS

SEQ ID NO: 31604 - protein, 9 aa, Artificial Sequence
  Description of Artificial Sequence: Synthetic peptide
LYNWMKLIH

SEQ ID NO: 31605 - protein, 9 aa, Artificial Sequence
  Description of Artificial Sequence: Synthetic peptide
MADLKWEDS

SEQ ID NO: 31606 - protein, 9 aa, Artificial Sequence
  Description of Artificial Sequence: Synthetic peptide
MAFVSKYIM

SEQ ID NO: 31607 - protein, 9 aa, Artificial Sequence
  Description of Artificial Sequence: Synthetic peptide
MAHDIPVPV

SEQ ID NO: 31608 - protein, 9 aa, Artificial Sequence
  Description of Artificial Sequence: Synthetic peptide
MAHQLNHNS

SEQ ID NO: 31609 - protein, 9 aa, Artificial Sequence
  Description of Artificial Sequence: Synthetic peptide
MATDISGWF

SEQ ID NO: 31610 - protein, 9 aa, Artificial Sequence
  Description of Artificial Sequence: Synthetic peptide
MAWTHCHKP

SEQ ID NO: 31611 - protein, 9 aa, Artificial Sequence
  Description of Artificial Sequence: Synthetic peptide
MCLCNMVIQ

SEQ ID NO: 31612 - protein, 9 aa, Artificial Sequence
  Description of Artificial Sequence: Synthetic peptide
MCSARRQDT

SEQ ID NO: 31613 - protein, 9 aa, Artificial Sequence
  Description of Artificial Sequence: Synthetic peptide
MCTQPSVKP

SEQ ID NO: 31614 - protein, 9 aa, Artificial Sequence
  Description of Artificial Sequence: Synthetic peptide
MCYQNIAFP

SEQ ID NO: 31615 - protein, 9 aa, Artificial Sequence
  Description of Artificial Sequence: Synthetic peptide
MDEQRQHEE

SEQ ID NO: 31616 - protein, 9 aa, Artificial Sequence
  Description of Artificial Sequence: Synthetic peptide
MDFPSCEMC

SEQ ID NO: 31617 - protein, 9 aa, Artificial Sequence
  Description of Artificial Sequence: Synthetic peptide
MDHQLCIQY

SEQ ID NO: 31618 - protein, 9 aa, Artificial Sequence
  Description of Artificial Sequence: Synthetic peptide
MDPILRCLH

SEQ ID NO: 31619 - protein, 9 aa, Artificial Sequence
  Description of Artificial Sequence: Synthetic peptide
MDPRAHGKV

SEQ ID NO: 31620 - protein, 9 aa, Artificial Sequence
  Description of Artificial Sequence: Synthetic peptide
MEQWDPDEW

SEQ ID NO: 31621 - protein, 9 aa, Artificial Sequence
  Description of Artificial Sequence: Synthetic peptide
MFELFQEGW

SEQ ID NO: 31622 - protein, 9 aa, Artificial Sequence
  Description of Artificial Sequence: Synthetic peptide
MFGGFVKMK

SEQ ID NO: 31623 - protein, 9 aa, Artificial Sequence
  Description of Artificial Sequence: Synthetic peptide
MFIKWRRYW

SEQ ID NO: 31624 - protein, 9 aa, Artificial Sequence
  Description of Artificial Sequence: Synthetic peptide
MFMWWNYFP

SEQ ID NO: 31625 - protein, 9 aa, Artificial Sequence
  Description of Artificial Sequence: Synthetic peptide
MFRISRFMA

SEQ ID NO: 31626 - protein, 9 aa, Artificial Sequence
  Description of Artificial Sequence: Synthetic peptide
MGILKGEFS

SEQ ID NO: 31627 - protein, 9 aa, Artificial Sequence
  Description of Artificial Sequence: Synthetic peptide
MGTSCCNYE

SEQ ID NO: 31628 - protein, 9 aa, Artificial Sequence
  Description of Artificial Sequence: Synthetic peptide
MHLQKHIGC

SEQ ID NO: 31629 - protein, 9 aa, Artificial Sequence
  Description of Artificial Sequence: Synthetic peptide
MHYLVMRDA

SEQ ID NO: 31630 - protein, 9 aa, Artificial Sequence
  Description of Artificial Sequence: Synthetic peptide
MIDPKMGDR

SEQ ID NO: 31631 - protein, 9 aa, Artificial Sequence
  Description of Artificial Sequence: Synthetic peptide
MIHKKDGMY

SEQ ID NO: 31632 - protein, 9 aa, Artificial Sequence
  Description of Artificial Sequence: Synthetic peptide
MIMQCNCSM

SEQ ID NO: 31633 - protein, 9 aa, Artificial Sequence
  Description of Artificial Sequence: Synthetic peptide
MKQLSNDGE

SEQ ID NO: 31634 - protein, 9 aa, Artificial Sequence
  Description of Artificial Sequence: Synthetic peptide
MMDLAYHWQ

SEQ ID NO: 31635 - protein, 9 aa, Artificial Sequence
  Description of Artificial Sequence: Synthetic peptide
MMEYTHSFE

SEQ ID NO: 31636 - protein, 9 aa, Artificial Sequence
  Description of Artificial Sequence: Synthetic peptide
MNLPDPSVG

SEQ ID NO: 31637 - protein, 9 aa, Artificial Sequence
  Description of Artificial Sequence: Synthetic peptide
MNVPWYKDR

SEQ ID NO: 31638 - protein, 9 aa, Artificial Sequence
  Description of Artificial Sequence: Synthetic peptide
MPCFSVAAA

SEQ ID NO: 31639 - protein, 9 aa, Artificial Sequence
  Description of Artificial Sequence: Synthetic peptide
MPHPEIRPG

SEQ ID NO: 31640 - protein, 9 aa, Artificial Sequence
  Description of Artificial Sequence: Synthetic peptide
MQEPMRCAI

SEQ ID NO: 31641 - protein, 9 aa, Artificial Sequence
  Description of Artificial Sequence: Synthetic peptide
MSFLFFVFM

SEQ ID NO: 31642 - protein, 9 aa, Artificial Sequence
  Description of Artificial Sequence: Synthetic peptide
MSLLMGHES

SEQ ID NO: 31643 - protein, 9 aa, Artificial Sequence
  Description of Artificial Sequence: Synthetic peptide
MTEVMREIR

SEQ ID NO: 31644 - protein, 9 aa, Artificial Sequence
  Description of Artificial Sequence: Synthetic peptide
MTIILPMTS

SEQ ID NO: 31645 - protein, 9 aa, Artificial Sequence
  Description of Artificial Sequence: Synthetic peptide
MTKPWSIIE

SEQ ID NO: 31646 - protein, 9 aa, Artificial Sequence
  Description of Artificial Sequence: Synthetic peptide
MTKQTLCHL

SEQ ID NO: 31647 - protein, 9 aa, Artificial Sequence
  Description of Artificial Sequence: Synthetic peptide
MTQLCEPWL

SEQ ID NO: 31648 - protein, 9 aa, Artificial Sequence
  Description of Artificial Sequence: Synthetic peptide
MVIQAIWPV

SEQ ID NO: 31649 - protein, 9 aa, Artificial Sequence
  Description of Artificial Sequence: Synthetic peptide
MVIQDGHEY

SEQ ID NO: 31650 - protein, 9 aa, Artificial Sequence
  Description of Artificial Sequence: Synthetic peptide
MVMVMEAHN

SEQ ID NO: 31651 - protein, 9 aa, Artificial Sequence
  Description of Artificial Sequence: Synthetic peptide
MVQWEWCDN

SEQ ID NO: 31652 - protein, 9 aa, Artificial Sequence
  Description of Artificial Sequence: Synthetic peptide
MYLEKDLSG

SEQ ID NO: 31653 - protein, 9 aa, Artificial Sequence
  Description of Artificial Sequence: Synthetic peptide
MYQLCHAFA

SEQ ID NO: 31654 - protein, 9 aa, Artificial Sequence
  Description of Artificial Sequence: Synthetic peptide
NAEFDNNRG

SEQ ID NO: 31655 - protein, 9 aa, Artificial Sequence
  Description of Artificial Sequence: Synthetic peptide
NAIPWINMD

SEQ ID NO: 31656 - protein, 9 aa, Artificial Sequence
  Description of Artificial Sequence: Synthetic peptide
NAVAQIVSD

SEQ ID NO: 31657 - protein, 9 aa, Artificial Sequence
  Description of Artificial Sequence: Synthetic peptide
NCCPGFAIA

SEQ ID NO: 31658 - protein, 9 aa, Artificial Sequence
  Description of Artificial Sequence: Synthetic peptide
NCPWPTGEE

SEQ ID NO: 31659 - protein, 9 aa, Artificial Sequence
  Description of Artificial Sequence: Synthetic peptide
NCRMHNAWF

SEQ ID NO: 31660 - protein, 9 aa, Artificial Sequence
  Description of Artificial Sequence: Synthetic peptide
NDDRCSIEL

SEQ ID NO: 31661 - protein, 9 aa, Artificial Sequence
  Description of Artificial Sequence: Synthetic peptide
NEQWWVWYR

SEQ ID NO: 31662 - protein, 9 aa, Artificial Sequence
  Description of Artificial Sequence: Synthetic peptide
NETMMWRAN

SEQ ID NO: 31663 - protein, 9 aa, Artificial Sequence
  Description of Artificial Sequence: Synthetic peptide
NFHYIGTLG

SEQ ID NO: 31664 - protein, 9 aa, Artificial Sequence
  Description of Artificial Sequence: Synthetic peptide
NFIFMQDMT

SEQ ID NO: 31665 - protein, 9 aa, Artificial Sequence
  Description of Artificial Sequence: Synthetic peptide
NFMDYHDMV

SEQ ID NO: 31666 - protein, 9 aa, Artificial Sequence
  Description of Artificial Sequence: Synthetic peptide
NGMLETDHV

SEQ ID NO: 31667 - protein, 9 aa, Artificial Sequence
  Description of Artificial Sequence: Synthetic peptide
NIYMPHTCL

SEQ ID NO: 31668 - protein, 9 aa, Artificial Sequence
  Description of Artificial Sequence: Synthetic peptide
NMATANTCV

SEQ ID NO: 31669 - protein, 9 aa, Artificial Sequence
  Description of Artificial Sequence: Synthetic peptide
NMDGKNCRT

SEQ ID NO: 31670 - protein, 9 aa, Artificial Sequence
  Description of Artificial Sequence: Synthetic peptide
NNEMPGWRA

SEQ ID NO: 31671 - protein, 9 aa, Artificial Sequence
  Description of Artificial Sequence: Synthetic peptide
NNMPMDAEH

SEQ ID NO: 31672 - protein, 9 aa, Artificial Sequence
  Description of Artificial Sequence: Synthetic peptide
NNMSAHHSK

SEQ ID NO: 31673 - protein, 9 aa, Artificial Sequence
  Description of Artificial Sequence: Synthetic peptide
NNYHYPHIG

SEQ ID NO: 31674 - protein, 9 aa, Artificial Sequence
  Description of Artificial Sequence: Synthetic peptide
NNYLELHRY

SEQ ID NO: 31675 - protein, 9 aa, Artificial Sequence
  Description of Artificial Sequence: Synthetic peptide
NPSSHNQLN

SEQ ID NO: 31676 - protein, 9 aa, Artificial Sequence
  Description of Artificial Sequence: Synthetic peptide
NQNIWKHNV

SEQ ID NO: 31677 - protein, 9 aa, Artificial Sequence
  Description of Artificial Sequence: Synthetic peptide
NQRPYDQWA

SEQ ID NO: 31678 - protein, 9 aa, Artificial Sequence
  Description of Artificial Sequence: Synthetic peptide
NRGCYEMIN

SEQ ID NO: 31679 - protein, 9 aa, Artificial Sequence
  Description of Artificial Sequence: Synthetic peptide
NRTFKAECH

SEQ ID NO: 31680 - protein, 9 aa, Artificial Sequence
  Description of Artificial Sequence: Synthetic peptide
NSIFCLENQ

SEQ ID NO: 31681 - protein, 9 aa, Artificial Sequence
  Description of Artificial Sequence: Synthetic peptide
NSNQDQWRI

SEQ ID NO: 31682 - protein, 9 aa, Artificial Sequence
  Description of Artificial Sequence: Synthetic peptide
NTCCWKLEN

SEQ ID NO: 31683 - protein, 9 aa, Artificial Sequence
  Description of Artificial Sequence: Synthetic peptide
NTVIRYRQS

SEQ ID NO: 31684 - protein, 9 aa, Artificial Sequence
  Description of Artificial Sequence: Synthetic peptide
NVCLEPMDP

SEQ ID NO: 31685 - protein, 9 aa, Artificial Sequence
  Description of Artificial Sequence: Synthetic peptide
NVEWQVRGP

SEQ ID NO: 31686 - protein, 9 aa, Artificial Sequence
  Description of Artificial Sequence: Synthetic peptide
NVQWADIGG

SEQ ID NO: 31687 - protein, 9 aa, Artificial Sequence
  Description of Artificial Sequence: Synthetic peptide
NYKQPVQAP

SEQ ID NO: 31688 - protein, 9 aa, Artificial Sequence
  Description of Artificial Sequence: Synthetic peptide
NYNITKFFG

SEQ ID NO: 31689 - protein, 9 aa, Artificial Sequence
  Description of Artificial Sequence: Synthetic peptide
NYWQAQEFY

SEQ ID NO: 31690 - protein, 9 aa, Artificial Sequence
  Description of Artificial Sequence: Synthetic peptide
PAEVWTHSL

SEQ ID NO: 31691 - protein, 9 aa, Artificial Sequence
  Description of Artificial Sequence: Synthetic peptide
PCCQEHCQR

SEQ ID NO: 31692 - protein, 9 aa, Artificial Sequence
  Description of Artificial Sequence: Synthetic peptide
PCNFDNQPH

SEQ ID NO: 31693 - protein, 9 aa, Artificial Sequence
  Description of Artificial Sequence: Synthetic peptide
PDAAYWFDG

SEQ ID NO: 31694 - protein, 9 aa, Artificial Sequence
  Description of Artificial Sequence: Synthetic peptide
PDCPYKCYC

SEQ ID NO: 31695 - protein, 9 aa, Artificial Sequence
  Description of Artificial Sequence: Synthetic peptide
PDGEKCERF

SEQ ID NO: 31696 - protein, 9 aa, Artificial Sequence
  Description of Artificial Sequence: Synthetic peptide
PDNYIQNHH

SEQ ID NO: 31697 - protein, 9 aa, Artificial Sequence
  Description of Artificial Sequence: Synthetic peptide
PDQWDFEQY

SEQ ID NO: 31698 - protein, 9 aa, Artificial Sequence
  Description of Artificial Sequence: Synthetic peptide
PEFMTEMCT

SEQ ID NO: 31699 - protein, 9 aa, Artificial Sequence
  Description of Artificial Sequence: Synthetic peptide
PFHMALAIE

SEQ ID NO: 31700 - protein, 9 aa, Artificial Sequence
  Description of Artificial Sequence: Synthetic peptide
PFYHMCAAP

SEQ ID NO: 31701 - protein, 9 aa, Artificial Sequence
  Description of Artificial Sequence: Synthetic peptide
PGCMIVSQN

SEQ ID NO: 31702 - protein, 9 aa, Artificial Sequence
  Description of Artificial Sequence: Synthetic peptide
PGELGDENF

SEQ ID NO: 31703 - protein, 9 aa, Artificial Sequence
  Description of Artificial Sequence: Synthetic peptide
PHNWRSVSW

SEQ ID NO: 31704 - protein, 9 aa, Artificial Sequence
  Description of Artificial Sequence: Synthetic peptide
PMMQKLCCG

SEQ ID NO: 31705 - protein, 9 aa, Artificial Sequence
  Description of Artificial Sequence: Synthetic peptide
PNNIGGMKP

SEQ ID NO: 31706 - protein, 9 aa, Artificial Sequence
  Description of Artificial Sequence: Synthetic peptide
PPGSHKGIN

SEQ ID NO: 31707 - protein, 9 aa, Artificial Sequence
  Description of Artificial Sequence: Synthetic peptide
PPPDRTFAA

SEQ ID NO: 31708 - protein, 9 aa, Artificial Sequence
  Description of Artificial Sequence: Synthetic peptide
PQEFREMCP

SEQ ID NO: 31709 - protein, 9 aa, Artificial Sequence
  Description of Artificial Sequence: Synthetic peptide
PQLKFGQLY

SEQ ID NO: 31710 - protein, 9 aa, Artificial Sequence
  Description of Artificial Sequence: Synthetic peptide
PQNGMLHYS

SEQ ID NO: 31711 - protein, 9 aa, Artificial Sequence
  Description of Artificial Sequence: Synthetic peptide
PRAENDESR

SEQ ID NO: 31712 - protein, 9 aa, Artificial Sequence
  Description of Artificial Sequence: Synthetic peptide
PTITDRFFQ

SEQ ID NO: 31713 - protein, 9 aa, Artificial Sequence
  Description of Artificial Sequence: Synthetic peptide
PTTNWHYVQ

SEQ ID NO: 31714 - protein, 9 aa, Artificial Sequence
  Description of Artificial Sequence: Synthetic peptide
PTYHWDSKT

SEQ ID NO: 31715 - protein, 9 aa, Artificial Sequence
  Description of Artificial Sequence: Synthetic peptide
PVEHVEKEM

SEQ ID NO: 31716 - protein, 9 aa, Artificial Sequence
  Description of Artificial Sequence: Synthetic peptide
PWHEYAGFT

SEQ ID NO: 31717 - protein, 9 aa, Artificial Sequence
  Description of Artificial Sequence: Synthetic peptide
PWLAIPRGG

SEQ ID NO: 31718 - protein, 9 aa, Artificial Sequence
  Description of Artificial Sequence: Synthetic peptide
PWQSGSDGD

SEQ ID NO: 31719 - protein, 9 aa, Artificial Sequence
  Description of Artificial Sequence: Synthetic peptide
PYASQECIS

SEQ ID NO: 31720 - protein, 9 aa, Artificial Sequence
  Description of Artificial Sequence: Synthetic peptide
PYPAIELGK

SEQ ID NO: 31721 - protein, 9 aa, Artificial Sequence
  Description of Artificial Sequence: Synthetic peptide
PYSPHKQSA

SEQ ID NO: 31722 - protein, 9 aa, Artificial Sequence
  Description of Artificial Sequence: Synthetic peptide
QANVNGHDF

SEQ ID NO: 31723 - protein, 9 aa, Artificial Sequence
  Description of Artificial Sequence: Synthetic peptide
QCAFIPNSV

SEQ ID NO: 31724 - protein, 9 aa, Artificial Sequence
  Description of Artificial Sequence: Synthetic peptide
QCEHDRQIM

SEQ ID NO: 31725 - protein, 9 aa, Artificial Sequence
  Description of Artificial Sequence: Synthetic peptide
QCPVECEHV

SEQ ID NO: 31726 - protein, 9 aa, Artificial Sequence
  Description of Artificial Sequence: Synthetic peptide
QCYRKVVFR

SEQ ID NO: 31727 - protein, 9 aa, Artificial Sequence
  Description of Artificial Sequence: Synthetic peptide
QDIWPVCRE

SEQ ID NO: 31728 - protein, 9 aa, Artificial Sequence
  Description of Artificial Sequence: Synthetic peptide
QEDDFRNKS

SEQ ID NO: 31729 - protein, 9 aa, Artificial Sequence
  Description of Artificial Sequence: Synthetic peptide
QEKIAMRTN

SEQ ID NO: 31730 - protein, 9 aa, Artificial Sequence
  Description of Artificial Sequence: Synthetic peptide
QFTSQNEGP

SEQ ID NO: 31731 - protein, 9 aa, Artificial Sequence
  Description of Artificial Sequence: Synthetic peptide
QFVGRERQV

SEQ ID NO: 31732 - protein, 9 aa, Artificial Sequence
  Description of Artificial Sequence: Synthetic peptide
QGFYTHTGY

SEQ ID NO: 31733 - protein, 9 aa, Artificial Sequence
  Description of Artificial Sequence: Synthetic peptide
QHMPRHIWH

SEQ ID NO: 31734 - protein, 9 aa, Artificial Sequence
  Description of Artificial Sequence: Synthetic peptide
QHWQFCTNA

SEQ ID NO: 31735 - protein, 9 aa, Artificial Sequence
  Description of Artificial Sequence: Synthetic peptide
QIADQTGIV

SEQ ID NO: 31736 - protein, 9 aa, Artificial Sequence
  Description of Artificial Sequence: Synthetic peptide
QIGPTISEY

SEQ ID NO: 31737 - protein, 9 aa, Artificial Sequence
  Description of Artificial Sequence: Synthetic peptide
QIMNYCYFN

SEQ ID NO: 31738 - protein, 9 aa, Artificial Sequence
  Description of Artificial Sequence: Synthetic peptide
QISCLEHGL

SEQ ID NO: 31739 - protein, 9 aa, Artificial Sequence
  Description of Artificial Sequence: Synthetic peptide
QISYHIQHH

SEQ ID NO: 31740 - protein, 9 aa, Artificial Sequence
  Description of Artificial Sequence: Synthetic peptide
QITQHPCEQ

SEQ ID NO: 31741 - protein, 9 aa, Artificial Sequence
  Description of Artificial Sequence: Synthetic peptide
QITSMKCAN

SEQ ID NO: 31742 - protein, 9 aa, Artificial Sequence
  Description of Artificial Sequence: Synthetic peptide
QIVQSRSAV

SEQ ID NO: 31743 - protein, 9 aa, Artificial Sequence
  Description of Artificial Sequence: Synthetic peptide
QIYNWEKMT

SEQ ID NO: 31744 - protein, 9 aa, Artificial Sequence
  Description of Artificial Sequence: Synthetic peptide
QKGNRTNQI

SEQ ID NO: 31745 - protein, 9 aa, Artificial Sequence
  Description of Artificial Sequence: Synthetic peptide
QLIVCDTGH

SEQ ID NO: 31746 - protein, 9 aa, Artificial Sequence
  Description of Artificial Sequence: Synthetic peptide
QMGSRMEMC

SEQ ID NO: 31747 - protein, 9 aa, Artificial Sequence
  Description of Artificial Sequence: Synthetic peptide
QMHSTFCGW

SEQ ID NO: 31748 - protein, 9 aa, Artificial Sequence
  Description of Artificial Sequence: Synthetic peptide
QMPIGGCSE

SEQ ID NO: 31749 - protein, 9 aa, Artificial Sequence
  Description of Artificial Sequence: Synthetic peptide
QNSHKHWDH

SEQ ID NO: 31750 - protein, 9 aa, Artificial Sequence
  Description of Artificial Sequence: Synthetic peptide
QPCVDWPYF

SEQ ID NO: 31751 - protein, 9 aa, Artificial Sequence
  Description of Artificial Sequence: Synthetic peptide
QQAPGQMFY

SEQ ID NO: 31752 - protein, 9 aa, Artificial Sequence
  Description of Artificial Sequence: Synthetic peptide
QQDRLWTTG

SEQ ID NO: 31753 - protein, 9 aa, Artificial Sequence
  Description of Artificial Sequence: Synthetic peptide
QQKDQAWRH

SEQ ID NO: 31754 - protein, 9 aa, Artificial Sequence
  Description of Artificial Sequence: Synthetic peptide
QQMIRQLSE

SEQ ID NO: 31755 - protein, 9 aa, Artificial Sequence
  Description of Artificial Sequence: Synthetic peptide
QQMWGCACC

SEQ ID NO: 31756 - protein, 9 aa, Artificial Sequence
  Description of Artificial Sequence: Synthetic peptide
QQNVLEHHF

SEQ ID NO: 31757 - protein, 9 aa, Artificial Sequence
  Description of Artificial Sequence: Synthetic peptide
QQSPVEQCY

SEQ ID NO: 31758 - protein, 9 aa, Artificial Sequence
  Description of Artificial Sequence: Synthetic peptide
QRQNVQQTW

SEQ ID NO: 31759 - protein, 9 aa, Artificial Sequence
  Description of Artificial Sequence: Synthetic peptide
QSDAILKYY

SEQ ID NO: 31760 - protein, 9 aa, Artificial Sequence
  Description of Artificial Sequence: Synthetic peptide
QSDLQHWWY

SEQ ID NO: 31761 - protein, 9 aa, Artificial Sequence
  Description of Artificial Sequence: Synthetic peptide
QSKELSCMK

SEQ ID NO: 31762 - protein, 9 aa, Artificial Sequence
  Description of Artificial Sequence: Synthetic peptide
QSKSGQHIA

SEQ ID NO: 31763 - protein, 9 aa, Artificial Sequence
  Description of Artificial Sequence: Synthetic peptide
QTCTSQDYS

SEQ ID NO: 31764 - protein, 9 aa, Artificial Sequence
  Description of Artificial Sequence: Synthetic peptide
QTLESMIYH

SEQ ID NO: 31765 - protein, 9 aa, Artificial Sequence
  Description of Artificial Sequence: Synthetic peptide
QTMFYEIGG

SEQ ID NO: 31766 - protein, 9 aa, Artificial Sequence
  Description of Artificial Sequence: Synthetic peptide
QTTQTDCTK

SEQ ID NO: 31767 - protein, 9 aa, Artificial Sequence
  Description of Artificial Sequence: Synthetic peptide
QTVEMSATV

SEQ ID NO: 31768 - protein, 9 aa, Artificial Sequence
  Description of Artificial Sequence: Synthetic peptide
QVDEWGGHE

SEQ ID NO: 31769 - protein, 9 aa, Artificial Sequence
  Description of Artificial Sequence: Synthetic peptide
QVDNREGDV

SEQ ID NO: 31770 - protein, 9 aa, Artificial Sequence
  Description of Artificial Sequence: Synthetic peptide
QVKCMQMWP

SEQ ID NO: 31771 - protein, 9 aa, Artificial Sequence
  Description of Artificial Sequence: Synthetic peptide
QVVHNEFIH

SEQ ID NO: 31772 - protein, 9 aa, Artificial Sequence
  Description of Artificial Sequence: Synthetic peptide
QVVSTDAPI

SEQ ID NO: 31773 - protein, 9 aa, Artificial Sequence
  Description of Artificial Sequence: Synthetic peptide
QVWITAKEE

SEQ ID NO: 31774 - protein, 9 aa, Artificial Sequence
  Description of Artificial Sequence: Synthetic peptide
QYDAFAVLA

SEQ ID NO: 31775 - protein, 9 aa, Artificial Sequence
  Description of Artificial Sequence: Synthetic peptide
QYMDQDVAI

SEQ ID NO: 31776 - protein, 9 aa, Artificial Sequence
  Description of Artificial Sequence: Synthetic peptide
RADEDMTSI

SEQ ID NO: 31777 - protein, 9 aa, Artificial Sequence
  Description of Artificial Sequence: Synthetic peptide
RADHWGSWP

SEQ ID NO: 31778 - protein, 9 aa, Artificial Sequence
  Description of Artificial Sequence: Synthetic peptide
RENIHCEGL

SEQ ID NO: 31779 - protein, 9 aa, Artificial Sequence
  Description of Artificial Sequence: Synthetic peptide
RHELTMSHY

SEQ ID NO: 31780 - protein, 9 aa, Artificial Sequence
  Description of Artificial Sequence: Synthetic peptide
RHEPLHYFH

SEQ ID NO: 31781 - protein, 9 aa, Artificial Sequence
  Description of Artificial Sequence: Synthetic peptide
RHWLNGCSN

SEQ ID NO: 31782 - protein, 9 aa, Artificial Sequence
  Description of Artificial Sequence: Synthetic peptide
RIDINVDCY

SEQ ID NO: 31783 - protein, 9 aa, Artificial Sequence
  Description of Artificial Sequence: Synthetic peptide
RIELMACTT

SEQ ID NO: 31784 - protein, 9 aa, Artificial Sequence
  Description of Artificial Sequence: Synthetic peptide
RIKYEHCQL

SEQ ID NO: 31785 - protein, 9 aa, Artificial Sequence
  Description of Artificial Sequence: Synthetic peptide
RIMYFDKFT

SEQ ID NO: 31786 - protein, 9 aa, Artificial Sequence
  Description of Artificial Sequence: Synthetic peptide
RITYFDDQC

SEQ ID NO: 31787 - protein, 9 aa, Artificial Sequence
  Description of Artificial Sequence: Synthetic peptide
RNGFRWTVL

SEQ ID NO: 31788 - protein, 9 aa, Artificial Sequence
  Description of Artificial Sequence: Synthetic peptide
RPEAYWVPV

SEQ ID NO: 31789 - protein, 9 aa, Artificial Sequence
  Description of Artificial Sequence: Synthetic peptide
RRDSDSVFK

SEQ ID NO: 31790 - protein, 9 aa, Artificial Sequence
  Description of Artificial Sequence: Synthetic peptide
RRFCISLKC

SEQ ID NO: 31791 - protein, 9 aa, Artificial Sequence
  Description of Artificial Sequence: Synthetic peptide
RSAEGISHW

SEQ ID NO: 31792 - protein, 9 aa, Artificial Sequence
  Description of Artificial Sequence: Synthetic peptide
RSHHHQRMM

SEQ ID NO: 31793 - protein, 9 aa, Artificial Sequence
  Description of Artificial Sequence: Synthetic peptide
RTIEEINTS

SEQ ID NO: 31794 - protein, 9 aa, Artificial Sequence
  Description of Artificial Sequence: Synthetic peptide
RTVEIESWV

SEQ ID NO: 31795 - protein, 9 aa, Artificial Sequence
  Description of Artificial Sequence: Synthetic peptide
RVDDENGGN

SEQ ID NO: 31796 - protein, 9 aa, Artificial Sequence
  Description of Artificial Sequence: Synthetic peptide
RVDHDMADG

SEQ ID NO: 31797 - protein, 9 aa, Artificial Sequence
  Description of Artificial Sequence: Synthetic peptide
RVESQACFQ

SEQ ID NO: 31798 - protein, 9 aa, Artificial Sequence
  Description of Artificial Sequence: Synthetic peptide
RVSVDESDK

SEQ ID NO: 31799 - protein, 9 aa, Artificial Sequence
  Description of Artificial Sequence: Synthetic peptide
RWEQMAYSW

SEQ ID NO: 31800 - protein, 9 aa, Artificial Sequence
  Description of Artificial Sequence: Synthetic peptide
SAGVVVQSI

SEQ ID NO: 31801 - protein, 9 aa, Artificial Sequence
  Description of Artificial Sequence: Synthetic peptide
SATMVADKE

SEQ ID NO: 31802 - protein, 9 aa, Artificial Sequence
  Description of Artificial Sequence: Synthetic peptide
SAYMALHPL

SEQ ID NO: 31803 - protein, 9 aa, Artificial Sequence
  Description of Artificial Sequence: Synthetic peptide
SCEWPKQCK

SEQ ID NO: 31804 - protein, 9 aa, Artificial Sequence
  Description of Artificial Sequence: Synthetic peptide
SCTHWNTWR

SEQ ID NO: 31805 - protein, 9 aa, Artificial Sequence
  Description of Artificial Sequence: Synthetic peptide
SDAPEHDGQ

SEQ ID NO: 31806 - protein, 9 aa, Artificial Sequence
  Description of Artificial Sequence: Synthetic peptide
SDLKIETAY

SEQ ID NO: 31807 - protein, 9 aa, Artificial Sequence
  Description of Artificial Sequence: Synthetic peptide
SDQWYRVSF

SEQ ID NO: 31808 - protein, 9 aa, Artificial Sequence
  Description of Artificial Sequence: Synthetic peptide
SHMVVTSQG

SEQ ID NO: 31809 - protein, 9 aa, Artificial Sequence
  Description of Artificial Sequence: Synthetic peptide
SHVESHQWC

SEQ ID NO: 31810 - protein, 9 aa, Artificial Sequence
  Description of Artificial Sequence: Synthetic peptide
SIDVTSCAF

SEQ ID NO: 31811 - protein, 9 aa, Artificial Sequence
  Description of Artificial Sequence: Synthetic peptide
SIHPLNQEE

SEQ ID NO: 31812 - protein, 9 aa, Artificial Sequence
  Description of Artificial Sequence: Synthetic peptide
SIRVYPELS

SEQ ID NO: 31813 - protein, 9 aa, Artificial Sequence
  Description of Artificial Sequence: Synthetic peptide
SISPIRDMD

SEQ ID NO: 31814 - protein, 9 aa, Artificial Sequence
  Description of Artificial Sequence: Synthetic peptide
SIVSIVCPN

SEQ ID NO: 31815 - protein, 9 aa, Artificial Sequence
  Description of Artificial Sequence: Synthetic peptide
SKMAGFPHW

SEQ ID NO: 31816 - protein, 9 aa, Artificial Sequence
  Description of Artificial Sequence: Synthetic peptide
SKWTCHPKM

SEQ ID NO: 31817 - protein, 9 aa, Artificial Sequence
  Description of Artificial Sequence: Synthetic peptide
SLKMVDVAV

SEQ ID NO: 31818 - protein, 9 aa, Artificial Sequence
  Description of Artificial Sequence: Synthetic peptide
SMFKYEARD

SEQ ID NO: 31819 - protein, 9 aa, Artificial Sequence
  Description of Artificial Sequence: Synthetic peptide
SMHEKQHFE

SEQ ID NO: 31820 - protein, 9 aa, Artificial Sequence
  Description of Artificial Sequence: Synthetic peptide
SNLDFPNQE

SEQ ID NO: 31821 - protein, 9 aa, Artificial Sequence
  Description of Artificial Sequence: Synthetic peptide
SNPIMAKGV

SEQ ID NO: 31822 - protein, 9 aa, Artificial Sequence
  Description of Artificial Sequence: Synthetic peptide
SNPQSVCRG

SEQ ID NO: 31823 - protein, 9 aa, Artificial Sequence
  Description of Artificial Sequence: Synthetic peptide
SNPRTQTMV

SEQ ID NO: 31824 - protein, 9 aa, Artificial Sequence
  Description of Artificial Sequence: Synthetic peptide
SNSPHPAVF

SEQ ID NO: 31825 - protein, 9 aa, Artificial Sequence
  Description of Artificial Sequence: Synthetic peptide
SNVILDFEN

SEQ ID NO: 31826 - protein, 9 aa, Artificial Sequence
  Description of Artificial Sequence: Synthetic peptide
SNVVKQASD

SEQ ID NO: 31827 - protein, 9 aa, Artificial Sequence
  Description of Artificial Sequence: Synthetic peptide
SNYRALYGH

SEQ ID NO: 31828 - protein, 9 aa, Artificial Sequence
  Description of Artificial Sequence: Synthetic peptide
SRDGWPNCI

SEQ ID NO: 31829 - protein, 9 aa, Artificial Sequence
  Description of Artificial Sequence: Synthetic peptide
SREPIIKGH

SEQ ID NO: 31830 - protein, 9 aa, Artificial Sequence
  Description of Artificial Sequence: Synthetic peptide
SSGGIWYFD

SEQ ID NO: 31831 - protein, 9 aa, Artificial Sequence
  Description of Artificial Sequence: Synthetic peptide
SSMEMWTCN

SEQ ID NO: 31832 - protein, 9 aa, Artificial Sequence
  Description of Artificial Sequence: Synthetic peptide
SSRFAPPPE

SEQ ID NO: 31833 - protein, 9 aa, Artificial Sequence
  Description of Artificial Sequence: Synthetic peptide
SSRPPSGWV

SEQ ID NO: 31834 - protein, 9 aa, Artificial Sequence
  Description of Artificial Sequence: Synthetic peptide
SSSQCCTPI

SEQ ID NO: 31835 - protein, 9 aa, Artificial Sequence
  Description of Artificial Sequence: Synthetic peptide
STHHFSYGE

SEQ ID NO: 31836 - protein, 9 aa, Artificial Sequence
  Description of Artificial Sequence: Synthetic peptide
SVEAGIKEG

SEQ ID NO: 31837 - protein, 9 aa, Artificial Sequence
  Description of Artificial Sequence: Synthetic peptide
SVKEEMFSP

SEQ ID NO: 31838 - protein, 9 aa, Artificial Sequence
  Description of Artificial Sequence: Synthetic peptide
SVLESDICK

SEQ ID NO: 31839 - protein, 9 aa, Artificial Sequence
  Description of Artificial Sequence: Synthetic peptide
SVNDTVDYF

SEQ ID NO: 31840 - protein, 9 aa, Artificial Sequence
  Description of Artificial Sequence: Synthetic peptide
SVWDMVKMQ

SEQ ID NO: 31841 - protein, 9 aa, Artificial Sequence
  Description of Artificial Sequence: Synthetic peptide
SWCPEYWEI

SEQ ID NO: 31842 - protein, 9 aa, Artificial Sequence
  Description of Artificial Sequence: Synthetic peptide
SWHYLAMQC

SEQ ID NO: 31843 - protein, 9 aa, Artificial Sequence
  Description of Artificial Sequence: Synthetic peptide
SYHAHQPHC

SEQ ID NO: 31844 - protein, 9 aa, Artificial Sequence
  Description of Artificial Sequence: Synthetic peptide
SYKQVTAPR

SEQ ID NO: 31845 - protein, 9 aa, Artificial Sequence
  Description of Artificial Sequence: Synthetic peptide
SYLSFGAPW

SEQ ID NO: 31846 - protein, 9 aa, Artificial Sequence
  Description of Artificial Sequence: Synthetic peptide
TAAEQKADN

SEQ ID NO: 31847 - protein, 9 aa, Artificial Sequence
  Description of Artificial Sequence: Synthetic peptide
TAHCTDWQH

SEQ ID NO: 31848 - protein, 9 aa, Artificial Sequence
  Description of Artificial Sequence: Synthetic peptide
TASMMECAD

SEQ ID NO: 31849 - protein, 9 aa, Artificial Sequence
  Description of Artificial Sequence: Synthetic peptide
TATTHQRCP

SEQ ID NO: 31850 - protein, 9 aa, Artificial Sequence
  Description of Artificial Sequence: Synthetic peptide
TCPNVWWHM

SEQ ID NO: 31851 - protein, 9 aa, Artificial Sequence
  Description of Artificial Sequence: Synthetic peptide
TCVIRNMMI

SEQ ID NO: 31852 - protein, 9 aa, Artificial Sequence
  Description of Artificial Sequence: Synthetic peptide
TEAPWWSGH

SEQ ID NO: 31853 - protein, 9 aa, Artificial Sequence
  Description of Artificial Sequence: Synthetic peptide
TEEVDSMAC

SEQ ID NO: 31854 - protein, 9 aa, Artificial Sequence
  Description of Artificial Sequence: Synthetic peptide
TEGNWDSCW

SEQ ID NO: 31855 - protein, 9 aa, Artificial Sequence
  Description of Artificial Sequence: Synthetic peptide
TEKAIVYYP

SEQ ID NO: 31856 - protein, 9 aa, Artificial Sequence
  Description of Artificial Sequence: Synthetic peptide
TFGYMATQV

SEQ ID NO: 31857 - protein, 9 aa, Artificial Sequence
  Description of Artificial Sequence: Synthetic peptide
TGFHNTFRD

SEQ ID NO: 31858 - protein, 9 aa, Artificial Sequence
  Description of Artificial Sequence: Synthetic peptide
THCHRHHID

SEQ ID NO: 31859 - protein, 9 aa, Artificial Sequence
  Description of Artificial Sequence: Synthetic peptide
THIHSGVYG

SEQ ID NO: 31860 - protein, 9 aa, Artificial Sequence
  Description of Artificial Sequence: Synthetic peptide
THKWDADAK

SEQ ID NO: 31861 - protein, 9 aa, Artificial Sequence
  Description of Artificial Sequence: Synthetic peptide
TIATVRTCT

SEQ ID NO: 31862 - protein, 9 aa, Artificial Sequence
  Description of Artificial Sequence: Synthetic peptide
TIDLVYLDK

SEQ ID NO: 31863 - protein, 9 aa, Artificial Sequence
  Description of Artificial Sequence: Synthetic peptide
TIIPIDWTE

SEQ ID NO: 31864 - protein, 9 aa, Artificial Sequence
  Description of Artificial Sequence: Synthetic peptide
TILPTCKQA

SEQ ID NO: 31865 - protein, 9 aa, Artificial Sequence
  Description of Artificial Sequence: Synthetic peptide
TIPCYQRYT

SEQ ID NO: 31866 - protein, 9 aa, Artificial Sequence
  Description of Artificial Sequence: Synthetic peptide
TISDIPGQP

SEQ ID NO: 31867 - protein, 9 aa, Artificial Sequence
  Description of Artificial Sequence: Synthetic peptide
TKFMPRGYI

SEQ ID NO: 31868 - protein, 9 aa, Artificial Sequence
  Description of Artificial Sequence: Synthetic peptide
TLFYHDWYM

SEQ ID NO: 31869 - protein, 9 aa, Artificial Sequence
  Description of Artificial Sequence: Synthetic peptide
TLSSHWKER

SEQ ID NO: 31870 - protein, 9 aa, Artificial Sequence
  Description of Artificial Sequence: Synthetic peptide
TMTKRDDFW

SEQ ID NO: 31871 - protein, 9 aa, Artificial Sequence
  Description of Artificial Sequence: Synthetic peptide
TNTAFMNGT

SEQ ID NO: 31872 - protein, 9 aa, Artificial Sequence
  Description of Artificial Sequence: Synthetic peptide
TNTSMPAAW

SEQ ID NO: 31873 - protein, 9 aa, Artificial Sequence
  Description of Artificial Sequence: Synthetic peptide
TNWREMNPR

SEQ ID NO: 31874 - protein, 9 aa, Artificial Sequence
  Description of Artificial Sequence: Synthetic peptide
TPWFWQETA

SEQ ID NO: 31875 - protein, 9 aa, Artificial Sequence
  Description of Artificial Sequence: Synthetic peptide
TQTELYCCP

SEQ ID NO: 31876 - protein, 9 aa, Artificial Sequence
  Description of Artificial Sequence: Synthetic peptide
TRHCHECLG

SEQ ID NO: 31877 - protein, 9 aa, Artificial Sequence
  Description of Artificial Sequence: Synthetic peptide
TSDEAEHYT

SEQ ID NO: 31878 - protein, 9 aa, Artificial Sequence
  Description of Artificial Sequence: Synthetic peptide
TSFMCQKFP

SEQ ID NO: 31879 - protein, 9 aa, Artificial Sequence
  Description of Artificial Sequence: Synthetic peptide
TSGPCMPIK

SEQ ID NO: 31880 - protein, 9 aa, Artificial Sequence
  Description of Artificial Sequence: Synthetic peptide
TSQHAIWNA

SEQ ID NO: 31881 - protein, 9 aa, Artificial Sequence
  Description of Artificial Sequence: Synthetic peptide
TSTLVSNNV

SEQ ID NO: 31882 - protein, 9 aa, Artificial Sequence
  Description of Artificial Sequence: Synthetic peptide
TTEFVRIKG

SEQ ID NO: 31883 - protein, 9 aa, Artificial Sequence
  Description of Artificial Sequence: Synthetic peptide
TTNDDNCNN

SEQ ID NO: 31884 - protein, 9 aa, Artificial Sequence
  Description of Artificial Sequence: Synthetic peptide
TTSEKNFDD

SEQ ID NO: 31885 - protein, 9 aa, Artificial Sequence
  Description of Artificial Sequence: Synthetic peptide
TTTRDEAFM

SEQ ID NO: 31886 - protein, 9 aa, Artificial Sequence
  Description of Artificial Sequence: Synthetic peptide
TVCTTKSMG

SEQ ID NO: 31887 - protein, 9 aa, Artificial Sequence
  Description of Artificial Sequence: Synthetic peptide
TVRCMIQLG

SEQ ID NO: 31888 - protein, 9 aa, Artificial Sequence
  Description of Artificial Sequence: Synthetic peptide
TVSDDWCWI

SEQ ID NO: 31889 - protein, 9 aa, Artificial Sequence
  Description of Artificial Sequence: Synthetic peptide
TWITTGQFV

SEQ ID NO: 31890 - protein, 9 aa, Artificial Sequence
  Description of Artificial Sequence: Synthetic peptide
TWMFVHRNN

SEQ ID NO: 31891 - protein, 9 aa, Artificial Sequence
  Description of Artificial Sequence: Synthetic peptide
TWSDNHAAQ

SEQ ID NO: 31892 - protein, 9 aa, Artificial Sequence
  Description of Artificial Sequence: Synthetic peptide
TWTNKLCDM

SEQ ID NO: 31893 - protein, 9 aa, Artificial Sequence
  Description of Artificial Sequence: Synthetic peptide
TYEDHVDRF

SEQ ID NO: 31894 - protein, 9 aa, Artificial Sequence
  Description of Artificial Sequence: Synthetic peptide
TYIWSMLDR

SEQ ID NO: 31895 - protein, 9 aa, Artificial Sequence
  Description of Artificial Sequence: Synthetic peptide
TYQNELACY

SEQ ID NO: 31896 - protein, 9 aa, Artificial Sequence
  Description of Artificial Sequence: Synthetic peptide
VATMAHYGY

SEQ ID NO: 31897 - protein, 9 aa, Artificial Sequence
  Description of Artificial Sequence: Synthetic peptide
VCIGYDHTP

SEQ ID NO: 31898 - protein, 9 aa, Artificial Sequence
  Description of Artificial Sequence: Synthetic peptide
VCPLPNQLH

SEQ ID NO: 31899 - protein, 9 aa, Artificial Sequence
  Description of Artificial Sequence: Synthetic peptide
VCSQTTLWH

SEQ ID NO: 31900 - protein, 9 aa, Artificial Sequence
  Description of Artificial Sequence: Synthetic peptide
VDKVWWNLI

SEQ ID NO: 31901 - protein, 9 aa, Artificial Sequence
  Description of Artificial Sequence: Synthetic peptide
VETCRDCEG

SEQ ID NO: 31902 - protein, 9 aa, Artificial Sequence
  Description of Artificial Sequence: Synthetic peptide
VFGEFDNHS

SEQ ID NO: 31903 - protein, 9 aa, Artificial Sequence
  Description of Artificial Sequence: Synthetic peptide
VFHFQTKGM

SEQ ID NO: 31904 - protein, 9 aa, Artificial Sequence
  Description of Artificial Sequence: Synthetic peptide
VFKFDFSYP

SEQ ID NO: 31905 - protein, 9 aa, Artificial Sequence
  Description of Artificial Sequence: Synthetic peptide
VGDPNFRIQ

SEQ ID NO: 31906 - protein, 9 aa, Artificial Sequence
  Description of Artificial Sequence: Synthetic peptide
VHAQTIQRE

SEQ ID NO: 31907 - protein, 9 aa, Artificial Sequence
  Description of Artificial Sequence: Synthetic peptide
VHHTEPERQ

SEQ ID NO: 31908 - protein, 9 aa, Artificial Sequence
  Description of Artificial Sequence: Synthetic peptide
VHWPQCGHQ

SEQ ID NO: 31909 - protein, 9 aa, Artificial Sequence
  Description of Artificial Sequence: Synthetic peptide
VIHAPTHKT

SEQ ID NO: 31910 - protein, 9 aa, Artificial Sequence
  Description of Artificial Sequence: Synthetic peptide
VIPPSIFNN

SEQ ID NO: 31911 - protein, 9 aa, Artificial Sequence
  Description of Artificial Sequence: Synthetic peptide
VIYHTSYYW

SEQ ID NO: 31912 - protein, 9 aa, Artificial Sequence
  Description of Artificial Sequence: Synthetic peptide
VKECRRTDQ

SEQ ID NO: 31913 - protein, 9 aa, Artificial Sequence
  Description of Artificial Sequence: Synthetic peptide
VKSEWYDEQ

SEQ ID NO: 31914 - protein, 9 aa, Artificial Sequence
  Description of Artificial Sequence: Synthetic peptide
VLGDWSNIC

SEQ ID NO: 31915 - protein, 9 aa, Artificial Sequence
  Description of Artificial Sequence: Synthetic peptide
VLIPILVAQ

SEQ ID NO: 31916 - protein, 9 aa, Artificial Sequence
  Description of Artificial Sequence: Synthetic peptide
VLVNVDQLG

SEQ ID NO: 31917 - protein, 9 aa, Artificial Sequence
  Description of Artificial Sequence: Synthetic peptide
VMPNWKEQT

SEQ ID NO: 31918 - protein, 9 aa, Artificial Sequence
  Description of Artificial Sequence: Synthetic peptide
VMSCYSRDH

SEQ ID NO: 31919 - protein, 9 aa, Artificial Sequence
  Description of Artificial Sequence: Synthetic peptide
VMTFRQKAC

SEQ ID NO: 31920 - protein, 9 aa, Artificial Sequence
  Description of Artificial Sequence: Synthetic peptide
VPGPMIYEF

SEQ ID NO: 31921 - protein, 9 aa, Artificial Sequence
  Description of Artificial Sequence: Synthetic peptide
VPKTVNRDM

SEQ ID NO: 31922 - protein, 9 aa, Artificial Sequence
  Description of Artificial Sequence: Synthetic peptide
VQSVRRITG

SEQ ID NO: 31923 - protein, 9 aa, Artificial Sequence
  Description of Artificial Sequence: Synthetic peptide
VRMICTSSC

SEQ ID NO: 31924 - protein, 9 aa, Artificial Sequence
  Description of Artificial Sequence: Synthetic peptide
VRVWDYKGT

SEQ ID NO: 31925 - protein, 9 aa, Artificial Sequence
  Description of Artificial Sequence: Synthetic peptide
VSALQQTQQ

SEQ ID NO: 31926 - protein, 9 aa, Artificial Sequence
  Description of Artificial Sequence: Synthetic peptide
VSCHWGLAN

SEQ ID NO: 31927 - protein, 9 aa, Artificial Sequence
  Description of Artificial Sequence: Synthetic peptide
VSRLRQNHW

SEQ ID NO: 31928 - protein, 9 aa, Artificial Sequence
  Description of Artificial Sequence: Synthetic peptide
VTDHAWTMP

SEQ ID NO: 31929 - protein, 9 aa, Artificial Sequence
  Description of Artificial Sequence: Synthetic peptide
VTMLMAGMQ

SEQ ID NO: 31930 - protein, 9 aa, Artificial Sequence
  Description of Artificial Sequence: Synthetic peptide
VTSYWEFQE

SEQ ID NO: 31931 - protein, 9 aa, Artificial Sequence
  Description of Artificial Sequence: Synthetic peptide
VTYHHHNFL

SEQ ID NO: 31932 - protein, 9 aa, Artificial Sequence
  Description of Artificial Sequence: Synthetic peptide
VVNFVGAEG

SEQ ID NO: 31933 - protein, 9 aa, Artificial Sequence
  Description of Artificial Sequence: Synthetic peptide
VVWMNSNHD

SEQ ID NO: 31934 - protein, 9 aa, Artificial Sequence
  Description of Artificial Sequence: Synthetic peptide
VWFYPQWDS

SEQ ID NO: 31935 - protein, 9 aa, Artificial Sequence
  Description of Artificial Sequence: Synthetic peptide
VWSCVHADV

SEQ ID NO: 31936 - protein, 9 aa, Artificial Sequence
  Description of Artificial Sequence: Synthetic peptide
VYWFPDQMM

SEQ ID NO: 31937 - protein, 9 aa, Artificial Sequence
  Description of Artificial Sequence: Synthetic peptide
WCNGHGSIF

SEQ ID NO: 31938 - protein, 9 aa, Artificial Sequence
  Description of Artificial Sequence: Synthetic peptide
WDLYLKTMG

SEQ ID NO: 31939 - protein, 9 aa, Artificial Sequence
  Description of Artificial Sequence: Synthetic peptide
WEAGECDLM

SEQ ID NO: 31940 - protein, 9 aa, Artificial Sequence
  Description of Artificial Sequence: Synthetic peptide
WEKFWHEYW

SEQ ID NO: 31941 - protein, 9 aa, Artificial Sequence
  Description of Artificial Sequence: Synthetic peptide
WEWPMTWTT

SEQ ID NO: 31942 - protein, 9 aa, Artificial Sequence
  Description of Artificial Sequence: Synthetic peptide
WHIFVVIGI

SEQ ID NO: 31943 - protein, 9 aa, Artificial Sequence
  Description of Artificial Sequence: Synthetic peptide
WIPHCKCPA

SEQ ID NO: 31944 - protein, 9 aa, Artificial Sequence
  Description of Artificial Sequence: Synthetic peptide
WKAHTEHLG

SEQ ID NO: 31945 - protein, 9 aa, Artificial Sequence
  Description of Artificial Sequence: Synthetic peptide
WKCWYAPLT

SEQ ID NO: 31946 - protein, 9 aa, Artificial Sequence
  Description of Artificial Sequence: Synthetic peptide
WLIWGIIEQ

SEQ ID NO: 31947 - protein, 9 aa, Artificial Sequence
  Description of Artificial Sequence: Synthetic peptide
WMCRNHPFD

SEQ ID NO: 31948 - protein, 9 aa, Artificial Sequence
  Description of Artificial Sequence: Synthetic peptide
WQMTTRYYM

SEQ ID NO: 31949 - protein, 9 aa, Artificial Sequence
  Description of Artificial Sequence: Synthetic peptide
WSSTQDQTN

SEQ ID NO: 31950 - protein, 9 aa, Artificial Sequence
  Description of Artificial Sequence: Synthetic peptide
WTVGDEQPM

SEQ ID NO: 31951 - protein, 9 aa, Artificial Sequence
  Description of Artificial Sequence: Synthetic peptide
WVEPQTTIY

SEQ ID NO: 31952 - protein, 9 aa, Artificial Sequence
  Description of Artificial Sequence: Synthetic peptide
WVEPSSKPP

SEQ ID NO: 31953 - protein, 9 aa, Artificial Sequence
  Description of Artificial Sequence: Synthetic peptide
WWQTFCYGE

SEQ ID NO: 31954 - protein, 9 aa, Artificial Sequence
  Description of Artificial Sequence: Synthetic peptide
YADMDQAVQ

SEQ ID NO: 31955 - protein, 9 aa, Artificial Sequence
  Description of Artificial Sequence: Synthetic peptide
YAMSRKQTI

SEQ ID NO: 31956 - protein, 9 aa, Artificial Sequence
  Description of Artificial Sequence: Synthetic peptide
YATVEEDLQ

SEQ ID NO: 31957 - protein, 9 aa, Artificial Sequence
  Description of Artificial Sequence: Synthetic peptide
YEHWYEHDD

SEQ ID NO: 31958 - protein, 9 aa, Artificial Sequence
  Description of Artificial Sequence: Synthetic peptide
YERLFDEQT

SEQ ID NO: 31959 - protein, 9 aa, Artificial Sequence
  Description of Artificial Sequence: Synthetic peptide
YFRDQEEGQ

SEQ ID NO: 31960 - protein, 9 aa, Artificial Sequence
  Description of Artificial Sequence: Synthetic peptide
YFSLLMENC

SEQ ID NO: 31961 - protein, 9 aa, Artificial Sequence
  Description of Artificial Sequence: Synthetic peptide
YHSDYHHNN

SEQ ID NO: 31962 - protein, 9 aa, Artificial Sequence
  Description of Artificial Sequence: Synthetic peptide
YIEPNHHSG

SEQ ID NO: 31963 - protein, 9 aa, Artificial Sequence
  Description of Artificial Sequence: Synthetic peptide
YIQRGTDSM

SEQ ID NO: 31964 - protein, 9 aa, Artificial Sequence
  Description of Artificial Sequence: Synthetic peptide
YLVRQWAIM

SEQ ID NO: 31965 - protein, 9 aa, Artificial Sequence
  Description of Artificial Sequence: Synthetic peptide
YMSKHEADI

SEQ ID NO: 31966 - protein, 9 aa, Artificial Sequence
  Description of Artificial Sequence: Synthetic peptide
YNNNHLMMC

SEQ ID NO: 31967 - protein, 9 aa, Artificial Sequence
  Description of Artificial Sequence: Synthetic peptide
YQQQMTFHN

SEQ ID NO: 31968 - protein, 9 aa, Artificial Sequence
  Description of Artificial Sequence: Synthetic peptide
YQYFPDNKK

SEQ ID NO: 31969 - protein, 9 aa, Artificial Sequence
  Description of Artificial Sequence: Synthetic peptide
YRHGSVDGP

SEQ ID NO: 31970 - protein, 9 aa, Artificial Sequence
  Description of Artificial Sequence: Synthetic peptide
YSCNRLTRF

SEQ ID NO: 31971 - protein, 9 aa, Artificial Sequence
  Description of Artificial Sequence: Synthetic peptide
YTQLNASQW

SEQ ID NO: 31972 - protein, 9 aa, Artificial Sequence
  Description of Artificial Sequence: Synthetic peptide
YTTFQGYWA

SEQ ID NO: 31973 - protein, 9 aa, Artificial Sequence
  Description of Artificial Sequence: Synthetic peptide
YVAEPYYHG

SEQ ID NO: 31974 - protein, 9 aa, Artificial Sequence
  Description of Artificial Sequence: Synthetic peptide
YVCNICPTP

SEQ ID NO: 31975 - protein, 9 aa, Artificial Sequence
  Description of Artificial Sequence: Synthetic peptide
YVGQTSSSE

SEQ ID NO: 31976 - protein, 9 aa, Artificial Sequence
  Description of Artificial Sequence: Synthetic peptide
YVGTIPTFS

SEQ ID NO: 31977 - protein, 9 aa, Artificial Sequence
  Description of Artificial Sequence: Synthetic peptide
AAEENEAAD

SEQ ID NO: 31978 - protein, 9 aa, Artificial Sequence
  Description of Artificial Sequence: Synthetic peptide
AAGPDALRP

SEQ ID NO: 31979 - protein, 9 aa, Artificial Sequence
  Description of Artificial Sequence: Synthetic peptide
AAGTVCLPM

SEQ ID NO: 31980 - protein, 9 aa, Artificial Sequence
  Description of Artificial Sequence: Synthetic peptide
AAGTVEFGH

SEQ ID NO: 31981 - protein, 9 aa, Artificial Sequence
  Description of Artificial Sequence: Synthetic peptide
AAGWGGATS

SEQ ID NO: 31982 - protein, 9 aa, Artificial Sequence
  Description of Artificial Sequence: Synthetic peptide
AAMEVMVKC

SEQ ID NO: 31983 - protein, 9 aa, Artificial Sequence
  Description of Artificial Sequence: Synthetic peptide
AAMHESCNW

SEQ ID NO: 31984 - protein, 9 aa, Artificial Sequence
  Description of Artificial Sequence: Synthetic peptide
AAPCCLYYT

SEQ ID NO: 31985 - protein, 9 aa, Artificial Sequence
  Description of Artificial Sequence: Synthetic peptide
ACAWIENFT

SEQ ID NO: 31986 - protein, 9 aa, Artificial Sequence
  Description of Artificial Sequence: Synthetic peptide
ACHATTLRY

SEQ ID NO: 31987 - protein, 9 aa, Artificial Sequence
  Description of Artificial Sequence: Synthetic peptide
ACKQDSELV

SEQ ID NO: 31988 - protein, 9 aa, Artificial Sequence
  Description of Artificial Sequence: Synthetic peptide
ACMSRAMFN

SEQ ID NO: 31989 - protein, 9 aa, Artificial Sequence
  Description of Artificial Sequence: Synthetic peptide
ACTRPMVLA

SEQ ID NO: 31990 - protein, 9 aa, Artificial Sequence
  Description of Artificial Sequence: Synthetic peptide
ACVEHYVAQ

SEQ ID NO: 31991 - protein, 9 aa, Artificial Sequence
  Description of Artificial Sequence: Synthetic peptide
CAFAYTIQS

SEQ ID NO: 31992 - protein, 9 aa, Artificial Sequence
  Description of Artificial Sequence: Synthetic peptide
CAFMTHCYA

SEQ ID NO: 31993 - protein, 9 aa, Artificial Sequence
  Description of Artificial Sequence: Synthetic peptide
CAGPWCHHE

SEQ ID NO: 31994 - protein, 9 aa, Artificial Sequence
  Description of Artificial Sequence: Synthetic peptide
CAIVCFDSF

SEQ ID NO: 31995 - protein, 9 aa, Artificial Sequence
  Description of Artificial Sequence: Synthetic peptide
CAMWHQKGM

SEQ ID NO: 31996 - protein, 9 aa, Artificial Sequence
  Description of Artificial Sequence: Synthetic peptide
CANCTWVAE

SEQ ID NO: 31997 - protein, 9 aa, Artificial Sequence
  Description of Artificial Sequence: Synthetic peptide
CASWYATDR

SEQ ID NO: 31998 - protein, 9 aa, Artificial Sequence
  Description of Artificial Sequence: Synthetic peptide
CAVWANWLC

SEQ ID NO: 31999 - protein, 9 aa, Artificial Sequence
  Description of Artificial Sequence: Synthetic peptide
CAWLATDFK

SEQ ID NO: 32000 - protein, 9 aa, Artificial Sequence
  Description of Artificial Sequence: Synthetic peptide
CCDHVQSSW

SEQ ID NO: 32001 - protein, 9 aa, Artificial Sequence
  Description of Artificial Sequence: Synthetic peptide
CCMPMFRNA

SEQ ID NO: 32002 - protein, 9 aa, Artificial Sequence
  Description of Artificial Sequence: Synthetic peptide
CFAAYRMQG

SEQ ID NO: 32003 - protein, 9 aa, Artificial Sequence
  Description of Artificial Sequence: Synthetic peptide
CFAKWWGYE

SEQ ID NO: 32004 - protein, 9 aa, Artificial Sequence
  Description of Artificial Sequence: Synthetic peptide
CFALKINYS

SEQ ID NO: 32005 - protein, 9 aa, Artificial Sequence
  Description of Artificial Sequence: Synthetic peptide
CFCIMVNGY

SEQ ID NO: 32006 - protein, 9 aa, Artificial Sequence
  Description of Artificial Sequence: Synthetic peptide
CFCQRPLWP

SEQ ID NO: 32007 - protein, 9 aa, Artificial Sequence
  Description of Artificial Sequence: Synthetic peptide
CFLRNNAEY

SEQ ID NO: 32008 - protein, 9 aa, Artificial Sequence
  Description of Artificial Sequence: Synthetic peptide
CFRYAEIGP

SEQ ID NO: 32009 - protein, 9 aa, Artificial Sequence
  Description of Artificial Sequence: Synthetic peptide
CGAIHSKRD

SEQ ID NO: 32010 - protein, 9 aa, Artificial Sequence
  Description of Artificial Sequence: Synthetic peptide
CHARGYIMP

SEQ ID NO: 32011 - protein, 9 aa, Artificial Sequence
  Description of Artificial Sequence: Synthetic peptide
CHCMPLVIF

SEQ ID NO: 32012 - protein, 9 aa, Artificial Sequence
  Description of Artificial Sequence: Synthetic peptide
CITHTLKDG

SEQ ID NO: 32013 - protein, 9 aa, Artificial Sequence
  Description of Artificial Sequence: Synthetic peptide
CKVMKMEGE

SEQ ID NO: 32014 - protein, 9 aa, Artificial Sequence
  Description of Artificial Sequence: Synthetic peptide
CLVWERRFS

SEQ ID NO: 32015 - protein, 9 aa, Artificial Sequence
  Description of Artificial Sequence: Synthetic peptide
CMSMNHWMR

SEQ ID NO: 32016 - protein, 9 aa, Artificial Sequence
  Description of Artificial Sequence: Synthetic peptide
CNAKMTDLA

SEQ ID NO: 32017 - protein, 9 aa, Artificial Sequence
  Description of Artificial Sequence: Synthetic peptide
CPNIAPIPG

SEQ ID NO: 32018 - protein, 9 aa, Artificial Sequence
  Description of Artificial Sequence: Synthetic peptide
CQLTVHSFG

SEQ ID NO: 32019 - protein, 9 aa, Artificial Sequence
  Description of Artificial Sequence: Synthetic peptide
CQSSYSMYA

SEQ ID NO: 32020 - protein, 9 aa, Artificial Sequence
  Description of Artificial Sequence: Synthetic peptide
CQTRFYVMP

SEQ ID NO: 32021 - protein, 9 aa, Artificial Sequence
  Description of Artificial Sequence: Synthetic peptide
CRGTIAVGI

SEQ ID NO: 32022 - protein, 9 aa, Artificial Sequence
  Description of Artificial Sequence: Synthetic peptide
CRMFKIDAI

SEQ ID NO: 32023 - protein, 9 aa, Artificial Sequence
  Description of Artificial Sequence: Synthetic peptide
CRSRYEAQC

SEQ ID NO: 32024 - protein, 9 aa, Artificial Sequence
  Description of Artificial Sequence: Synthetic peptide
CSIKCAFGC

SEQ ID NO: 32025 - protein, 9 aa, Artificial Sequence
  Description of Artificial Sequence: Synthetic peptide
CSITHQRGC

SEQ ID NO: 32026 - protein, 9 aa, Artificial Sequence
  Description of Artificial Sequence: Synthetic peptide
CSQKIAYAK

SEQ ID NO: 32027 - protein, 9 aa, Artificial Sequence
  Description of Artificial Sequence: Synthetic peptide
CSSPQYFSM

SEQ ID NO: 32028 - protein, 9 aa, Artificial Sequence
  Description of Artificial Sequence: Synthetic peptide
CSTYYCNGL

SEQ ID NO: 32029 - protein, 9 aa, Artificial Sequence
  Description of Artificial Sequence: Synthetic peptide
CSVKCAFGC

SEQ ID NO: 32030 - protein, 9 aa, Artificial Sequence
  Description of Artificial Sequence: Synthetic peptide
CSYPWDNLG

SEQ ID NO: 32031 - protein, 9 aa, Artificial Sequence
  Description of Artificial Sequence: Synthetic peptide
CTATYTIRD

SEQ ID NO: 32032 - protein, 9 aa, Artificial Sequence
  Description of Artificial Sequence: Synthetic peptide
CTCQYGWTV

SEQ ID NO: 32033 - protein, 9 aa, Artificial Sequence
  Description of Artificial Sequence: Synthetic peptide
CTFYYFKHH

SEQ ID NO: 32034 - protein, 9 aa, Artificial Sequence
  Description of Artificial Sequence: Synthetic peptide
CTKGWMVIG

SEQ ID NO: 32035 - protein, 9 aa, Artificial Sequence
  Description of Artificial Sequence: Synthetic peptide
CTLRTWSGM

SEQ ID NO: 32036 - protein, 9 aa, Artificial Sequence
  Description of Artificial Sequence: Synthetic peptide
CTMFYEQSK

SEQ ID NO: 32037 - protein, 9 aa, Artificial Sequence
  Description of Artificial Sequence: Synthetic peptide
CTMKYQEHK

SEQ ID NO: 32038 - protein, 9 aa, Artificial Sequence
  Description of Artificial Sequence: Synthetic peptide
CTMQALRQA

SEQ ID NO: 32039 - protein, 9 aa, Artificial Sequence
  Description of Artificial Sequence: Synthetic peptide
CTTKFEKCW

SEQ ID NO: 32040 - protein, 9 aa, Artificial Sequence
  Description of Artificial Sequence: Synthetic peptide
CTTTFACPT

SEQ ID NO: 32041 - protein, 9 aa, Artificial Sequence
  Description of Artificial Sequence: Synthetic peptide
CTWMAFTAP

SEQ ID NO: 32042 - protein, 9 aa, Artificial Sequence
  Description of Artificial Sequence: Synthetic peptide
CTWPRCDSF

SEQ ID NO: 32043 - protein, 9 aa, Artificial Sequence
  Description of Artificial Sequence: Synthetic peptide
CTWVTHGQQ

SEQ ID NO: 32044 - protein, 9 aa, Artificial Sequence
  Description of Artificial Sequence: Synthetic peptide
CVCGKMGHG

SEQ ID NO: 32045 - protein, 9 aa, Artificial Sequence
  Description of Artificial Sequence: Synthetic peptide
CVDPDDYGY

SEQ ID NO: 32046 - protein, 9 aa, Artificial Sequence
  Description of Artificial Sequence: Synthetic peptide
CVEIMYMNE

SEQ ID NO: 32047 - protein, 9 aa, Artificial Sequence
  Description of Artificial Sequence: Synthetic peptide
CVEYWGQCN

SEQ ID NO: 32048 - protein, 9 aa, Artificial Sequence
  Description of Artificial Sequence: Synthetic peptide
CVGSRPEAA

SEQ ID NO: 32049 - protein, 9 aa, Artificial Sequence
  Description of Artificial Sequence: Synthetic peptide
CVIWDQAQN

SEQ ID NO: 32050 - protein, 9 aa, Artificial Sequence
  Description of Artificial Sequence: Synthetic peptide
CVLTQQFNA

SEQ ID NO: 32051 - protein, 9 aa, Artificial Sequence
  Description of Artificial Sequence: Synthetic peptide
CVMHSTDHH

SEQ ID NO: 32052 - protein, 9 aa, Artificial Sequence
  Description of Artificial Sequence: Synthetic peptide
CVQRKDRGT

SEQ ID NO: 32053 - protein, 9 aa, Artificial Sequence
  Description of Artificial Sequence: Synthetic peptide
CVQRKMQAV

SEQ ID NO: 32054 - protein, 9 aa, Artificial Sequence
  Description of Artificial Sequence: Synthetic peptide
CVQTKINCG

SEQ ID NO: 32055 - protein, 9 aa, Artificial Sequence
  Description of Artificial Sequence: Synthetic peptide
CVQYNKCRS

SEQ ID NO: 32056 - protein, 9 aa, Artificial Sequence
  Description of Artificial Sequence: Synthetic peptide
CVRYYPRPA

SEQ ID NO: 32057 - protein, 9 aa, Artificial Sequence
  Description of Artificial Sequence: Synthetic peptide
CVTMALMDQ

SEQ ID NO: 32058 - protein, 9 aa, Artificial Sequence
  Description of Artificial Sequence: Synthetic peptide
CVTTSNYTM

SEQ ID NO: 32059 - protein, 9 aa, Artificial Sequence
  Description of Artificial Sequence: Synthetic peptide
CVTVTYDGR

SEQ ID NO: 32060 - protein, 9 aa, Artificial Sequence
  Description of Artificial Sequence: Synthetic peptide
CVVHKQKEY

SEQ ID NO: 32061 - protein, 9 aa, Artificial Sequence
  Description of Artificial Sequence: Synthetic peptide
CVVHTMRWC

SEQ ID NO: 32062 - protein, 9 aa, Artificial Sequence
  Description of Artificial Sequence: Synthetic peptide
CVVKHLFGH

SEQ ID NO: 32063 - protein, 9 aa, Artificial Sequence
  Description of Artificial Sequence: Synthetic peptide
CWSYGQTAA

SEQ ID NO: 32064 - protein, 9 aa, Artificial Sequence
  Description of Artificial Sequence: Synthetic peptide
CAAQHCAQV

SEQ ID NO: 32065 - protein, 9 aa, Artificial Sequence
  Description of Artificial Sequence: Synthetic peptide
CAAQHYAQV

SEQ ID NO: 32066 - protein, 9 aa, Artificial Sequence
  Description of Artificial Sequence: Synthetic peptide
CAGIQATGD

SEQ ID NO: 32067 - protein, 9 aa, Artificial Sequence
  Description of Artificial Sequence: Synthetic peptide
CAIHTRSHS

SEQ ID NO: 32068 - protein, 9 aa, Artificial Sequence
  Description of Artificial Sequence: Synthetic peptide
CAIMFSAGP

SEQ ID NO: 32069 - protein, 9 aa, Artificial Sequence
  Description of Artificial Sequence: Synthetic peptide
CAIMLQHMT

SEQ ID NO: 32070 - protein, 9 aa, Artificial Sequence
  Description of Artificial Sequence: Synthetic peptide
CALPVLVAM

SEQ ID NO: 32071 - protein, 9 aa, Artificial Sequence
  Description of Artificial Sequence: Synthetic peptide
CALPYAWSR

SEQ ID NO: 32072 - protein, 9 aa, Artificial Sequence
  Description of Artificial Sequence: Synthetic peptide
CALSMYSQE

SEQ ID NO: 32073 - protein, 9 aa, Artificial Sequence
  Description of Artificial Sequence: Synthetic peptide
CALTYAWSR

SEQ ID NO: 32074 - protein, 9 aa, Artificial Sequence
  Description of Artificial Sequence: Synthetic peptide
CAVYFGKCA

SEQ ID NO: 32075 - protein, 9 aa, Artificial Sequence
  Description of Artificial Sequence: Synthetic peptide
CCRYYVNVE

SEQ ID NO: 32076 - protein, 9 aa, Artificial Sequence
  Description of Artificial Sequence: Synthetic peptide
CEKLTQNVD

SEQ ID NO: 32077 - protein, 9 aa, Artificial Sequence
  Description of Artificial Sequence: Synthetic peptide
CEYFKRHPD

SEQ ID NO: 32078 - protein, 9 aa, Artificial Sequence
  Description of Artificial Sequence: Synthetic peptide
CFHQYHQAH

SEQ ID NO: 32079 - protein, 9 aa, Artificial Sequence
  Description of Artificial Sequence: Synthetic peptide
CFHRYHQAH

SEQ ID NO: 32080 - protein, 9 aa, Artificial Sequence
  Description of Artificial Sequence: Synthetic peptide
CFKIWDLGN

SEQ ID NO: 32081 - protein, 9 aa, Artificial Sequence
  Description of Artificial Sequence: Synthetic peptide
CFMGLSFHW

SEQ ID NO: 32082 - protein, 9 aa, Artificial Sequence
  Description of Artificial Sequence: Synthetic peptide
CFVEPKTSC

SEQ ID NO: 32083 - protein, 9 aa, Artificial Sequence
  Description of Artificial Sequence: Synthetic peptide
CFVWEFNYP

SEQ ID NO: 32084 - protein, 9 aa, Artificial Sequence
  Description of Artificial Sequence: Synthetic peptide
CGDCYGWCQ

SEQ ID NO: 32085 - protein, 9 aa, Artificial Sequence
  Description of Artificial Sequence: Synthetic peptide
CGGFCTALE

SEQ ID NO: 32086 - protein, 9 aa, Artificial Sequence
  Description of Artificial Sequence: Synthetic peptide
CHAQIQHGG

SEQ ID NO: 32087 - protein, 9 aa, Artificial Sequence
  Description of Artificial Sequence: Synthetic peptide
CHAQSIMGP

SEQ ID NO: 32088 - protein, 9 aa, Artificial Sequence
  Description of Artificial Sequence: Synthetic peptide
CHFMINAGR

SEQ ID NO: 32089 - protein, 9 aa, Artificial Sequence
  Description of Artificial Sequence: Synthetic peptide
CHHFATESE

SEQ ID NO: 32090 - protein, 9 aa, Artificial Sequence
  Description of Artificial Sequence: Synthetic peptide
CHHTTNTSQ

SEQ ID NO: 32091 - protein, 9 aa, Artificial Sequence
  Description of Artificial Sequence: Synthetic peptide
CHVPLNNCD

SEQ ID NO: 32092 - protein, 9 aa, Artificial Sequence
  Description of Artificial Sequence: Synthetic peptide
CIKACYDHE

SEQ ID NO: 32093 - protein, 9 aa, Artificial Sequence
  Description of Artificial Sequence: Synthetic peptide
CIKSYNVMM

SEQ ID NO: 32094 - protein, 9 aa, Artificial Sequence
  Description of Artificial Sequence: Synthetic peptide
CILHKHSFP

SEQ ID NO: 32095 - protein, 9 aa, Artificial Sequence
  Description of Artificial Sequence: Synthetic peptide
CIMLNARVG

SEQ ID NO: 32096 - protein, 9 aa, Artificial Sequence
  Description of Artificial Sequence: Synthetic peptide
CIQLNKMGP

SEQ ID NO: 32097 - protein, 9 aa, Artificial Sequence
  Description of Artificial Sequence: Synthetic peptide
CIVTVPQQA

SEQ ID NO: 32098 - protein, 9 aa, Artificial Sequence
  Description of Artificial Sequence: Synthetic peptide
CIWMQHFSL

SEQ ID NO: 32099 - protein, 9 aa, Artificial Sequence
  Description of Artificial Sequence: Synthetic peptide
CKFDMPSFF

SEQ ID NO: 32100 - protein, 9 aa, Artificial Sequence
  Description of Artificial Sequence: Synthetic peptide
CKNFHWMND

SEQ ID NO: 32101 - protein, 9 aa, Artificial Sequence
  Description of Artificial Sequence: Synthetic peptide
CKQQINDAY

SEQ ID NO: 32102 - protein, 9 aa, Artificial Sequence
  Description of Artificial Sequence: Synthetic peptide
CKSHFDQVE

SEQ ID NO: 32103 - protein, 9 aa, Artificial Sequence
  Description of Artificial Sequence: Synthetic peptide
CKYDITKMA

SEQ ID NO: 32104 - protein, 9 aa, Artificial Sequence
  Description of Artificial Sequence: Synthetic peptide
CLELVKVYE

SEQ ID NO: 32105 - protein, 9 aa, Artificial Sequence
  Description of Artificial Sequence: Synthetic peptide
CLNTYHYQG

SEQ ID NO: 32106 - protein, 9 aa, Artificial Sequence
  Description of Artificial Sequence: Synthetic peptide
CLSSSYNSY

SEQ ID NO: 32107 - protein, 9 aa, Artificial Sequence
  Description of Artificial Sequence: Synthetic peptide
CMHLVNMNY

SEQ ID NO: 32108 - protein, 9 aa, Artificial Sequence
  Description of Artificial Sequence: Synthetic peptide
CMQFIRIGS

SEQ ID NO: 32109 - protein, 9 aa, Artificial Sequence
  Description of Artificial Sequence: Synthetic peptide
CMQFIRVGS

SEQ ID NO: 32110 - protein, 9 aa, Artificial Sequence
  Description of Artificial Sequence: Synthetic peptide
CMVHNHKGF

SEQ ID NO: 32111 - protein, 9 aa, Artificial Sequence
  Description of Artificial Sequence: Synthetic peptide
CMYWLTNQE

SEQ ID NO: 32112 - protein, 9 aa, Artificial Sequence
  Description of Artificial Sequence: Synthetic peptide
CNCHIRHTG

SEQ ID NO: 32113 - protein, 9 aa, Artificial Sequence
  Description of Artificial Sequence: Synthetic peptide
CNFQTNVHL

SEQ ID NO: 32114 - protein, 9 aa, Artificial Sequence
  Description of Artificial Sequence: Synthetic peptide
CNTQVYGNY

SEQ ID NO: 32115 - protein, 9 aa, Artificial Sequence
  Description of Artificial Sequence: Synthetic peptide
CNVDRYNRP

SEQ ID NO: 32116 - protein, 9 aa, Artificial Sequence
  Description of Artificial Sequence: Synthetic peptide
CPKPFLIQE

SEQ ID NO: 32117 - protein, 9 aa, Artificial Sequence
  Description of Artificial Sequence: Synthetic peptide
CQELRTQYA

SEQ ID NO: 32118 - protein, 9 aa, Artificial Sequence
  Description of Artificial Sequence: Synthetic peptide
CQEVYAHMS

SEQ ID NO: 32119 - protein, 9 aa, Artificial Sequence
  Description of Artificial Sequence: Synthetic peptide
CQSVHYRAP

SEQ ID NO: 32120 - protein, 9 aa, Artificial Sequence
  Description of Artificial Sequence: Synthetic peptide
CRAAHSVCA

SEQ ID NO: 32121 - protein, 9 aa, Artificial Sequence
  Description of Artificial Sequence: Synthetic peptide
CRATHSVCA

SEQ ID NO: 32122 - protein, 9 aa, Artificial Sequence
  Description of Artificial Sequence: Synthetic peptide
CSGCYMKMP

SEQ ID NO: 32123 - protein, 9 aa, Artificial Sequence
  Description of Artificial Sequence: Synthetic peptide
CSGTMLSQP

SEQ ID NO: 32124 - protein, 9 aa, Artificial Sequence
  Description of Artificial Sequence: Synthetic peptide
CSHHVDRVM

SEQ ID NO: 32125 - protein, 9 aa, Artificial Sequence
  Description of Artificial Sequence: Synthetic peptide
CSHQKLMES

SEQ ID NO: 32126 - protein, 9 aa, Artificial Sequence
  Description of Artificial Sequence: Synthetic peptide
CSMIQNSFQ

SEQ ID NO: 32127 - protein, 9 aa, Artificial Sequence
  Description of Artificial Sequence: Synthetic peptide
CSTDHALVE

SEQ ID NO: 32128 - protein, 9 aa, Artificial Sequence
  Description of Artificial Sequence: Synthetic peptide
CSTMVRSQT

SEQ ID NO: 32129 - protein, 9 aa, Artificial Sequence
  Description of Artificial Sequence: Synthetic peptide
CSTWLNQHM

SEQ ID NO: 32130 - protein, 9 aa, Artificial Sequence
  Description of Artificial Sequence: Synthetic peptide
CTCNLPYAI

SEQ ID NO: 32131 - protein, 9 aa, Artificial Sequence
  Description of Artificial Sequence: Synthetic peptide
CTEMLQRKG

SEQ ID NO: 32132 - protein, 9 aa, Artificial Sequence
  Description of Artificial Sequence: Synthetic peptide
CTGQLMHKE

SEQ ID NO: 32133 - protein, 9 aa, Artificial Sequence
  Description of Artificial Sequence: Synthetic peptide
CTHGFLTGP

SEQ ID NO: 32134 - protein, 9 aa, Artificial Sequence
  Description of Artificial Sequence: Synthetic peptide
CTHKVNSWI

SEQ ID NO: 32135 - protein, 9 aa, Artificial Sequence
  Description of Artificial Sequence: Synthetic peptide
CTIFNTVDQ

SEQ ID NO: 32136 - protein, 9 aa, Artificial Sequence
  Description of Artificial Sequence: Synthetic peptide
CTIRANWHF

SEQ ID NO: 32137 - protein, 9 aa, Artificial Sequence
  Description of Artificial Sequence: Synthetic peptide
CTMLANHYQ

SEQ ID NO: 32138 - protein, 9 aa, Artificial Sequence
  Description of Artificial Sequence: Synthetic peptide
CTPGFWSER

SEQ ID NO: 32139 - protein, 9 aa, Artificial Sequence
  Description of Artificial Sequence: Synthetic peptide
CTQFTKHQE

SEQ ID NO: 32140 - protein, 9 aa, Artificial Sequence
  Description of Artificial Sequence: Synthetic peptide
CTTAWQGAW

SEQ ID NO: 32141 - protein, 9 aa, Artificial Sequence
  Description of Artificial Sequence: Synthetic peptide
CTTVKMWHT

SEQ ID NO: 32142 - protein, 9 aa, Artificial Sequence
  Description of Artificial Sequence: Synthetic peptide
CTTYRNLLS

SEQ ID NO: 32143 - protein, 9 aa, Artificial Sequence
  Description of Artificial Sequence: Synthetic peptide
CTYFSMMDR

SEQ ID NO: 32144 - protein, 9 aa, Artificial Sequence
  Description of Artificial Sequence: Synthetic peptide
CTYMQMAYG

SEQ ID NO: 32145 - protein, 9 aa, Artificial Sequence
  Description of Artificial Sequence: Synthetic peptide
CVFQCYRSP

SEQ ID NO: 32146 - protein, 9 aa, Artificial Sequence
  Description of Artificial Sequence: Synthetic peptide
CVFVQQNFQ

SEQ ID NO: 32147 - protein, 9 aa, Artificial Sequence
  Description of Artificial Sequence: Synthetic peptide
CVHAASLMP

SEQ ID NO: 32148 - protein, 9 aa, Artificial Sequence
  Description of Artificial Sequence: Synthetic peptide
CVHLGHWQW

SEQ ID NO: 32149 - protein, 9 aa, Artificial Sequence
  Description of Artificial Sequence: Synthetic peptide
CVLPVLVAM

SEQ ID NO: 32150 - protein, 9 aa, Artificial Sequence
  Description of Artificial Sequence: Synthetic peptide
CVLWQVHSE

SEQ ID NO: 32151 - protein, 9 aa, Artificial Sequence
  Description of Artificial Sequence: Synthetic peptide
CVNQHSLAM

SEQ ID NO: 32152 - protein, 9 aa, Artificial Sequence
  Description of Artificial Sequence: Synthetic peptide
CVPISAAPV

SEQ ID NO: 32153 - protein, 9 aa, Artificial Sequence
  Description of Artificial Sequence: Synthetic peptide
CVRLIDWCC

SEQ ID NO: 32154 - protein, 9 aa, Artificial Sequence
  Description of Artificial Sequence: Synthetic peptide
CVVMKFSEH

SEQ ID NO: 32155 - protein, 9 aa, Artificial Sequence
  Description of Artificial Sequence: Synthetic peptide
CVYWQQNHE

SEQ ID NO: 32156 - protein, 9 aa, Artificial Sequence
  Description of Artificial Sequence: Synthetic peptide
CWGPKFVDF

SEQ ID NO: 32157 - protein, 9 aa, Artificial Sequence
  Description of Artificial Sequence: Synthetic peptide
CWMPQQVAT

SEQ ID NO: 32158 - protein, 9 aa, Artificial Sequence
  Description of Artificial Sequence: Synthetic peptide
CYPVYKDWS

SEQ ID NO: 32159 - protein, 9 aa, Artificial Sequence
  Description of Artificial Sequence: Synthetic peptide
CYTIKQMDI

SEQ ID NO: 32160 - protein, 9 aa, Artificial Sequence
  Description of Artificial Sequence: Synthetic peptide
CANHLNQTI

SEQ ID NO: 32161 - protein, 9 aa, Artificial Sequence
  Description of Artificial Sequence: Synthetic peptide
CWAVTSMSS

SEQ ID NO: 32162 - protein, 9 aa, Artificial Sequence
  Description of Artificial Sequence: Synthetic peptide
CTCWYNRGD

SEQ ID NO: 32163 - protein, 9 aa, Artificial Sequence
  Description of Artificial Sequence: Synthetic peptide
CTHPVHDNE

SEQ ID NO: 32164 - protein, 9 aa, Artificial Sequence
  Description of Artificial Sequence: Synthetic peptide
CYQVTIQHN

SEQ ID NO: 32165 - protein, 9 aa, Artificial Sequence
  Description of Artificial Sequence: Synthetic peptide
CTLMHSHTR

SEQ ID NO: 32166 - protein, 9 aa, Artificial Sequence
  Description of Artificial Sequence: Synthetic peptide
CIIGRQEWL

SEQ ID NO: 32167 - protein, 9 aa, Artificial Sequence
  Description of Artificial Sequence: Synthetic peptide
CSRNRCWSG

SEQ ID NO: 32168 - protein, 9 aa, Artificial Sequence
  Description of Artificial Sequence: Synthetic peptide
CSIQINNCR

SEQ ID NO: 32169 - protein, 9 aa, Artificial Sequence
  Description of Artificial Sequence: Synthetic peptide
CGHRCEMNM

SEQ ID NO: 32170 - protein, 9 aa, Artificial Sequence
  Description of Artificial Sequence: Synthetic peptide
CNSYNKPWM

SEQ ID NO: 32171 - protein, 9 aa, Artificial Sequence
  Description of Artificial Sequence: Synthetic peptide
CMHLSCDWT

SEQ ID NO: 32172 - protein, 9 aa, Artificial Sequence
  Description of Artificial Sequence: Synthetic peptide
CYAEEPVWP

SEQ ID NO: 32173 - protein, 9 aa, Artificial Sequence
  Description of Artificial Sequence: Synthetic peptide
CNSWSTGSL

SEQ ID NO: 32174 - protein, 9 aa, Artificial Sequence
  Description of Artificial Sequence: Synthetic peptide
CMNHRWSTT

SEQ ID NO: 32175 - protein, 9 aa, Artificial Sequence
  Description of Artificial Sequence: Synthetic peptide
CWHFFGADR

SEQ ID NO: 32176 - protein, 9 aa, Artificial Sequence
  Description of Artificial Sequence: Synthetic peptide
CARLEGRGN

SEQ ID NO: 32177 - protein, 9 aa, Artificial Sequence
  Description of Artificial Sequence: Synthetic peptide
CMEAQGECY

SEQ ID NO: 32178 - protein, 9 aa, Artificial Sequence
  Description of Artificial Sequence: Synthetic peptide
CTKPIPCWM

SEQ ID NO: 32179 - protein, 9 aa, Artificial Sequence
  Description of Artificial Sequence: Synthetic peptide
CDCLHHCCM

SEQ ID NO: 32180 - protein, 9 aa, Artificial Sequence
  Description of Artificial Sequence: Synthetic peptide
CIWSSPDQP

SEQ ID NO: 32181 - protein, 9 aa, Artificial Sequence
  Description of Artificial Sequence: Synthetic peptide
CADPFSIRG

SEQ ID NO: 32182 - protein, 9 aa, Artificial Sequence
  Description of Artificial Sequence: Synthetic peptide
CSMPQQCME

SEQ ID NO: 32183 - protein, 9 aa, Artificial Sequence
  Description of Artificial Sequence: Synthetic peptide
CTMCHDCSP

SEQ ID NO: 32184 - protein, 9 aa, Artificial Sequence
  Description of Artificial Sequence: Synthetic peptide
CTEISWGGV

SEQ ID NO: 32185 - protein, 9 aa, Artificial Sequence
  Description of Artificial Sequence: Synthetic peptide
CVGYKSNTP

SEQ ID NO: 32186 - protein, 9 aa, Artificial Sequence
  Description of Artificial Sequence: Synthetic peptide
CSESYRGPD

SEQ ID NO: 32187 - protein, 9 aa, Artificial Sequence
  Description of Artificial Sequence: Synthetic peptide
CWECCTDSG

SEQ ID NO: 32188 - protein, 9 aa, Artificial Sequence
  Description of Artificial Sequence: Synthetic peptide
EVMPVNRKH

SEQ ID NO: 32189 - protein, 9 aa, Artificial Sequence
  Description of Artificial Sequence: Synthetic peptide
EVTRFSEPG

SEQ ID NO: 32190 - protein, 9 aa, Artificial Sequence
  Description of Artificial Sequence: Synthetic peptide
GVAYEEDYY

SEQ ID NO: 32191 - protein, 9 aa, Artificial Sequence
  Description of Artificial Sequence: Synthetic peptide
HVFSHWNCN

SEQ ID NO: 32192 - protein, 9 aa, Artificial Sequence
  Description of Artificial Sequence: Synthetic peptide
IVADLNMFY

SEQ ID NO: 32193 - protein, 9 aa, Artificial Sequence
  Description of Artificial Sequence: Synthetic peptide
IVGMQMTGE

SEQ ID NO: 32194 - protein, 9 aa, Artificial Sequence
  Description of Artificial Sequence: Synthetic peptide
IVNSFQKMS

SEQ ID NO: 32195 - protein, 9 aa, Artificial Sequence
  Description of Artificial Sequence: Synthetic peptide
IVTTVSRTA

SEQ ID NO: 32196 - protein, 9 aa, Artificial Sequence
  Description of Artificial Sequence: Synthetic peptide
KVEQYMQCH

SEQ ID NO: 32197 - protein, 9 aa, Artificial Sequence
  Description of Artificial Sequence: Synthetic peptide
KVTMESFDL

SEQ ID NO: 32198 - protein, 9 aa, Artificial Sequence
  Description of Artificial Sequence: Synthetic peptide
LVDHMSTGC

SEQ ID NO: 32199 - protein, 9 aa, Artificial Sequence
  Description of Artificial Sequence: Synthetic peptide
LVGPTDQLP

SEQ ID NO: 32200 - protein, 9 aa, Artificial Sequence
  Description of Artificial Sequence: Synthetic peptide
MVGQLMKES

SEQ ID NO: 32201 - protein, 9 aa, Artificial Sequence
  Description of Artificial Sequence: Synthetic peptide
NVFYVGEWP

SEQ ID NO: 32202 - protein, 9 aa, Artificial Sequence
  Description of Artificial Sequence: Synthetic peptide
NVMLGAGTI

SEQ ID NO: 32203 - protein, 9 aa, Artificial Sequence
  Description of Artificial Sequence: Synthetic peptide
NVQKQQTDA

SEQ ID NO: 32204 - protein, 9 aa, Artificial Sequence
  Description of Artificial Sequence: Synthetic peptide
NVQRLCCLQ

SEQ ID NO: 32205 - protein, 9 aa, Artificial Sequence
  Description of Artificial Sequence: Synthetic peptide
PVSLFGLIH

SEQ ID NO: 32206 - protein, 9 aa, Artificial Sequence
  Description of Artificial Sequence: Synthetic peptide
QVCAMVQCR

SEQ ID NO: 32207 - protein, 9 aa, Artificial Sequence
  Description of Artificial Sequence: Synthetic peptide
SVKHKEMVG

SEQ ID NO: 32208 - protein, 9 aa, Artificial Sequence
  Description of Artificial Sequence: Synthetic peptide
SVNYCPRGP

SEQ ID NO: 32209 - protein, 9 aa, Artificial Sequence
  Description of Artificial Sequence: Synthetic peptide
SVTCLYTSF

SEQ ID NO: 32210 - protein, 9 aa, Artificial Sequence
  Description of Artificial Sequence: Synthetic peptide
TVDRCFQYA

SEQ ID NO: 32211 - protein, 9 aa, Artificial Sequence
  Description of Artificial Sequence: Synthetic peptide
TVFYCTKMH

SEQ ID NO: 32212 - protein, 9 aa, Artificial Sequence
  Description of Artificial Sequence: Synthetic peptide
TVGIEWLNW

SEQ ID NO: 32213 - protein, 9 aa, Artificial Sequence
  Description of Artificial Sequence: Synthetic peptide
TVGSWAPGS

SEQ ID NO: 32214 - protein, 9 aa, Artificial Sequence
  Description of Artificial Sequence: Synthetic peptide
TVMRALVYN

SEQ ID NO: 32215 - protein, 9 aa, Artificial Sequence
  Description of Artificial Sequence: Synthetic peptide
VVVDLWWHT

SEQ ID NO: 32216 - protein, 9 aa, Artificial Sequence
  Description of Artificial Sequence: Synthetic peptide
WVGCTNHGQ

SEQ ID NO: 32217 - protein, 9 aa, Artificial Sequence
  Description of Artificial Sequence: Synthetic peptide
YVVDLKNFG

SEQ ID NO: 32218 - protein, 9 aa, Artificial Sequence
  Description of Artificial Sequence: Synthetic peptide
AVETEFRER

SEQ ID NO: 32219 - protein, 9 aa, Artificial Sequence
  Description of Artificial Sequence: Synthetic peptide
AVNCTIYGP

SEQ ID NO: 32220 - protein, 9 aa, Artificial Sequence
  Description of Artificial Sequence: Synthetic peptide
AVNTQDDLF

SEQ ID NO: 32221 - protein, 9 aa, Artificial Sequence
  Description of Artificial Sequence: Synthetic peptide
AVRNVEVSR

SEQ ID NO: 32222 - protein, 9 aa, Artificial Sequence
  Description of Artificial Sequence: Synthetic peptide
AVSTWAMQS

SEQ ID NO: 32223 - protein, 9 aa, Artificial Sequence
  Description of Artificial Sequence: Synthetic peptide
DVCKVMTRV

SEQ ID NO: 32224 - protein, 9 aa, Artificial Sequence
  Description of Artificial Sequence: Synthetic peptide
DVGSWLNKC

SEQ ID NO: 32225 - protein, 9 aa, Artificial Sequence
  Description of Artificial Sequence: Synthetic peptide
DVNHTKEFN

SEQ ID NO: 32226 - protein, 9 aa, Artificial Sequence
  Description of Artificial Sequence: Synthetic peptide
DVRVDMNHA

SEQ ID NO: 32227 - protein, 9 aa, Artificial Sequence
  Description of Artificial Sequence: Synthetic peptide
DVYNNVKLG

SEQ ID NO: 32228 - protein, 9 aa, Artificial Sequence
  Description of Artificial Sequence: Synthetic peptide
EVCRIERYM

SEQ ID NO: 32229 - protein, 9 aa, Artificial Sequence
  Description of Artificial Sequence: Synthetic peptide
EVDIVTNNY

SEQ ID NO: 32230 - protein, 9 aa, Artificial Sequence
  Description of Artificial Sequence: Synthetic peptide
EVIFMNCPL

SEQ ID NO: 32231 - protein, 9 aa, Artificial Sequence
  Description of Artificial Sequence: Synthetic peptide
EVNEEEVTY

SEQ ID NO: 32232 - protein, 9 aa, Artificial Sequence
  Description of Artificial Sequence: Synthetic peptide
EVWWEESKS

SEQ ID NO: 32233 - protein, 9 aa, Artificial Sequence
  Description of Artificial Sequence: Synthetic peptide
EVYPCMSYG

SEQ ID NO: 32234 - protein, 9 aa, Artificial Sequence
  Description of Artificial Sequence: Synthetic peptide
FVHCTNALF

SEQ ID NO: 32235 - protein, 9 aa, Artificial Sequence
  Description of Artificial Sequence: Synthetic peptide
FVTCNQYAP

SEQ ID NO: 32236 - protein, 9 aa, Artificial Sequence
  Description of Artificial Sequence: Synthetic peptide
GVFYTMASY

SEQ ID NO: 32237 - protein, 9 aa, Artificial Sequence
  Description of Artificial Sequence: Synthetic peptide
GVKCINSPV

SEQ ID NO: 32238 - protein, 9 aa, Artificial Sequence
  Description of Artificial Sequence: Synthetic peptide
GVMNHIAWT

SEQ ID NO: 32239 - protein, 9 aa, Artificial Sequence
  Description of Artificial Sequence: Synthetic peptide
HVCMLEFGT

SEQ ID NO: 32240 - protein, 9 aa, Artificial Sequence
  Description of Artificial Sequence: Synthetic peptide
HVMQGAPTD

SEQ ID NO: 32241 - protein, 9 aa, Artificial Sequence
  Description of Artificial Sequence: Synthetic peptide
HVVMKHGES

SEQ ID NO: 32242 - protein, 9 aa, Artificial Sequence
  Description of Artificial Sequence: Synthetic peptide
IVAKISWSE

SEQ ID NO: 32243 - protein, 9 aa, Artificial Sequence
  Description of Artificial Sequence: Synthetic peptide
IVCPAGQYH

SEQ ID NO: 32244 - protein, 9 aa, Artificial Sequence
  Description of Artificial Sequence: Synthetic peptide
IVEPSGHFL

SEQ ID NO: 32245 - protein, 9 aa, Artificial Sequence
  Description of Artificial Sequence: Synthetic peptide
IVVSMDQWL

SEQ ID NO: 32246 - protein, 9 aa, Artificial Sequence
  Description of Artificial Sequence: Synthetic peptide
LVGPEGAWN

SEQ ID NO: 32247 - protein, 9 aa, Artificial Sequence
  Description of Artificial Sequence: Synthetic peptide
LVMQLYCAG

SEQ ID NO: 32248 - protein, 9 aa, Artificial Sequence
  Description of Artificial Sequence: Synthetic peptide
LVMRMCADG

SEQ ID NO: 32249 - protein, 9 aa, Artificial Sequence
  Description of Artificial Sequence: Synthetic peptide
LVTQDMKRY

SEQ ID NO: 32250 - protein, 9 aa, Artificial Sequence
  Description of Artificial Sequence: Synthetic peptide
MVTQPCAWQ

SEQ ID NO: 32251 - protein, 9 aa, Artificial Sequence
  Description of Artificial Sequence: Synthetic peptide
NVERIQSLG

SEQ ID NO: 32252 - protein, 9 aa, Artificial Sequence
  Description of Artificial Sequence: Synthetic peptide
NVFIATAQT

SEQ ID NO: 32253 - protein, 9 aa, Artificial Sequence
  Description of Artificial Sequence: Synthetic peptide
NVGIFWYCG

SEQ ID NO: 32254 - protein, 9 aa, Artificial Sequence
  Description of Artificial Sequence: Synthetic peptide
PVAWCDKLG

SEQ ID NO: 32255 - protein, 9 aa, Artificial Sequence
  Description of Artificial Sequence: Synthetic peptide
QVAYAFEAN

SEQ ID NO: 32256 - protein, 9 aa, Artificial Sequence
  Description of Artificial Sequence: Synthetic peptide
QVHYMMCYE

SEQ ID NO: 32257 - protein, 9 aa, Artificial Sequence
  Description of Artificial Sequence: Synthetic peptide
QVLSQWFDN

SEQ ID NO: 32258 - protein, 9 aa, Artificial Sequence
  Description of Artificial Sequence: Synthetic peptide
QVVQKAMAE

SEQ ID NO: 32259 - protein, 9 aa, Artificial Sequence
  Description of Artificial Sequence: Synthetic peptide
SVMTTFCHN

SEQ ID NO: 32260 - protein, 9 aa, Artificial Sequence
  Description of Artificial Sequence: Synthetic peptide
TVGITMLPM

SEQ ID NO: 32261 - protein, 9 aa, Artificial Sequence
  Description of Artificial Sequence: Synthetic peptide
TVHEIMENN

SEQ ID NO: 32262 - protein, 9 aa, Artificial Sequence
  Description of Artificial Sequence: Synthetic peptide
VVMPKESNE

SEQ ID NO: 32263 - protein, 9 aa, Artificial Sequence
  Description of Artificial Sequence: Synthetic peptide
YVCGSGMEQ

SEQ ID NO: 32264 - protein, 9 aa, Artificial Sequence
  Description of Artificial Sequence: Synthetic peptide
YVDKRSTME

SEQ ID NO: 32265 - protein, 9 aa, Artificial Sequence
  Description of Artificial Sequence: Synthetic peptide
AVETGESAM

SEQ ID NO: 32266 - protein, 9 aa, Artificial Sequence
  Description of Artificial Sequence: Synthetic peptide
AVATRAMYS

SEQ ID NO: 32267 - protein, 9 aa, Artificial Sequence
  Description of Artificial Sequence: Synthetic peptide
AVSCGQQRE

SEQ ID NO: 32268 - protein, 9 aa, Artificial Sequence
  Description of Artificial Sequence: Synthetic peptide
DVAIMQGKG

SEQ ID NO: 32269 - protein, 9 aa, Artificial Sequence
  Description of Artificial Sequence: Synthetic peptide
DVLMDKRHC

SEQ ID NO: 32270 - protein, 9 aa, Artificial Sequence
  Description of Artificial Sequence: Synthetic peptide
DVNEPIQCQ

SEQ ID NO: 32271 - protein, 9 aa, Artificial Sequence
  Description of Artificial Sequence: Synthetic peptide
DVNLDPDVC

SEQ ID NO: 32272 - protein, 9 aa, Artificial Sequence
  Description of Artificial Sequence: Synthetic peptide
DVYKSPCTT

SEQ ID NO: 32273 - protein, 9 aa, Artificial Sequence
  Description of Artificial Sequence: Synthetic peptide
EVGINSEGL

SEQ ID NO: 32274 - protein, 9 aa, Artificial Sequence
  Description of Artificial Sequence: Synthetic peptide
EVGLCQSGR

SEQ ID NO: 32275 - protein, 9 aa, Artificial Sequence
  Description of Artificial Sequence: Synthetic peptide
EVLKSFMCQ

SEQ ID NO: 32276 - protein, 9 aa, Artificial Sequence
  Description of Artificial Sequence: Synthetic peptide
EVMFMKKHL

SEQ ID NO: 32277 - protein, 9 aa, Artificial Sequence
  Description of Artificial Sequence: Synthetic peptide
EVQVTKAQE

SEQ ID NO: 32278 - protein, 9 aa, Artificial Sequence
  Description of Artificial Sequence: Synthetic peptide
EVSHRVSAA

SEQ ID NO: 32279 - protein, 9 aa, Artificial Sequence
  Description of Artificial Sequence: Synthetic peptide
EVTQLSCQV

SEQ ID NO: 32280 - protein, 9 aa, Artificial Sequence
  Description of Artificial Sequence: Synthetic peptide
EVVCSMYYG

SEQ ID NO: 32281 - protein, 9 aa, Artificial Sequence
  Description of Artificial Sequence: Synthetic peptide
FVASVPDMS

SEQ ID NO: 32282 - protein, 9 aa, Artificial Sequence
  Description of Artificial Sequence: Synthetic peptide
FVDFNHKQW

SEQ ID NO: 32283 - protein, 9 aa, Artificial Sequence
  Description of Artificial Sequence: Synthetic peptide
FVDTYEAPG

SEQ ID NO: 32284 - protein, 9 aa, Artificial Sequence
  Description of Artificial Sequence: Synthetic peptide
FVEPYTDHQ

SEQ ID NO: 32285 - protein, 9 aa, Artificial Sequence
  Description of Artificial Sequence: Synthetic peptide
FVTMLHWQS

SEQ ID NO: 32286 - protein, 9 aa, Artificial Sequence
  Description of Artificial Sequence: Synthetic peptide
GVAVIRKMQ

SEQ ID NO: 32287 - protein, 9 aa, Artificial Sequence
  Description of Artificial Sequence: Synthetic peptide
GVEEFNAQD

SEQ ID NO: 32288 - protein, 9 aa, Artificial Sequence
  Description of Artificial Sequence: Synthetic peptide
GVFPNMFAP

SEQ ID NO: 32289 - protein, 9 aa, Artificial Sequence
  Description of Artificial Sequence: Synthetic peptide
GVGMKCYSH

SEQ ID NO: 32290 - protein, 9 aa, Artificial Sequence
  Description of Artificial Sequence: Synthetic peptide
GVLPVQQGF

SEQ ID NO: 32291 - protein, 9 aa, Artificial Sequence
  Description of Artificial Sequence: Synthetic peptide
GVQPWESCT

SEQ ID NO: 32292 - protein, 9 aa, Artificial Sequence
  Description of Artificial Sequence: Synthetic peptide
GVSAYCTSA

SEQ ID NO: 32293 - protein, 9 aa, Artificial Sequence
  Description of Artificial Sequence: Synthetic peptide
GVWIMRSKR

SEQ ID NO: 32294 - protein, 9 aa, Artificial Sequence
  Description of Artificial Sequence: Synthetic peptide
GVYYYTKQP

SEQ ID NO: 32295 - protein, 9 aa, Artificial Sequence
  Description of Artificial Sequence: Synthetic peptide
HVAFQWSGQ

SEQ ID NO: 32296 - protein, 9 aa, Artificial Sequence
  Description of Artificial Sequence: Synthetic peptide
HVALQNDWG

SEQ ID NO: 32297 - protein, 9 aa, Artificial Sequence
  Description of Artificial Sequence: Synthetic peptide
IVAHQCQYC

SEQ ID NO: 32298 - protein, 9 aa, Artificial Sequence
  Description of Artificial Sequence: Synthetic peptide
IVAKYGMTS

SEQ ID NO: 32299 - protein, 9 aa, Artificial Sequence
  Description of Artificial Sequence: Synthetic peptide
IVDQRSVWV

SEQ ID NO: 32300 - protein, 9 aa, Artificial Sequence
  Description of Artificial Sequence: Synthetic peptide
IVQPCQSNW

SEQ ID NO: 32301 - protein, 9 aa, Artificial Sequence
  Description of Artificial Sequence: Synthetic peptide
IVRSALTNT

SEQ ID NO: 32302 - protein, 9 aa, Artificial Sequence
  Description of Artificial Sequence: Synthetic peptide
KVCFKEDAF

SEQ ID NO: 32303 - protein, 9 aa, Artificial Sequence
  Description of Artificial Sequence: Synthetic peptide
LVNEMWYHS

SEQ ID NO: 32304 - protein, 9 aa, Artificial Sequence
  Description of Artificial Sequence: Synthetic peptide
LVQHSVVWM

SEQ ID NO: 32305 - protein, 9 aa, Artificial Sequence
  Description of Artificial Sequence: Synthetic peptide
LVTGMMSMF

SEQ ID NO: 32306 - protein, 9 aa, Artificial Sequence
  Description of Artificial Sequence: Synthetic peptide
MVAQHGISL

SEQ ID NO: 32307 - protein, 9 aa, Artificial Sequence
  Description of Artificial Sequence: Synthetic peptide
MVAQYGISL

SEQ ID NO: 32308 - protein, 9 aa, Artificial Sequence
  Description of Artificial Sequence: Synthetic peptide
MVEHNRLAN

SEQ ID NO: 32309 - protein, 9 aa, Artificial Sequence
  Description of Artificial Sequence: Synthetic peptide
MVGMLYKTK

SEQ ID NO: 32310 - protein, 9 aa, Artificial Sequence
  Description of Artificial Sequence: Synthetic peptide
MVVYRENMG

SEQ ID NO: 32311 - protein, 9 aa, Artificial Sequence
  Description of Artificial Sequence: Synthetic peptide
MVWEVKFND

SEQ ID NO: 32312 - protein, 9 aa, Artificial Sequence
  Description of Artificial Sequence: Synthetic peptide
MVWEVKFNG

SEQ ID NO: 32313 - protein, 9 aa, Artificial Sequence
  Description of Artificial Sequence: Synthetic peptide
NVCAMPMTH

SEQ ID NO: 32314 - protein, 9 aa, Artificial Sequence
  Description of Artificial Sequence: Synthetic peptide
NVCTMPMTH

SEQ ID NO: 32315 - protein, 9 aa, Artificial Sequence
  Description of Artificial Sequence: Synthetic peptide
NVMPSPMDR

SEQ ID NO: 32316 - protein, 9 aa, Artificial Sequence
  Description of Artificial Sequence: Synthetic peptide
NVQAYERAN

SEQ ID NO: 32317 - protein, 9 aa, Artificial Sequence
  Description of Artificial Sequence: Synthetic peptide
NVQRHHIFQ

SEQ ID NO: 32318 - protein, 9 aa, Artificial Sequence
  Description of Artificial Sequence: Synthetic peptide
NVVQSFTAK

SEQ ID NO: 32319 - protein, 9 aa, Artificial Sequence
  Description of Artificial Sequence: Synthetic peptide
PVQHIYWGL

SEQ ID NO: 32320 - protein, 9 aa, Artificial Sequence
  Description of Artificial Sequence: Synthetic peptide
QVEVDHCWA

SEQ ID NO: 32321 - protein, 9 aa, Artificial Sequence
  Description of Artificial Sequence: Synthetic peptide
QVGVCDQCQ

SEQ ID NO: 32322 - protein, 9 aa, Artificial Sequence
  Description of Artificial Sequence: Synthetic peptide
QVMENYELK

SEQ ID NO: 32323 - protein, 9 aa, Artificial Sequence
  Description of Artificial Sequence: Synthetic peptide
QVMQNQCYT

SEQ ID NO: 32324 - protein, 9 aa, Artificial Sequence
  Description of Artificial Sequence: Synthetic peptide
QVTMQPYSK

SEQ ID NO: 32325 - protein, 9 aa, Artificial Sequence
  Description of Artificial Sequence: Synthetic peptide
QVTRDGKGG

SEQ ID NO: 32326 - protein, 9 aa, Artificial Sequence
  Description of Artificial Sequence: Synthetic peptide
QVVQYLTNH

SEQ ID NO: 32327 - protein, 9 aa, Artificial Sequence
  Description of Artificial Sequence: Synthetic peptide
RVDVTNHRY

SEQ ID NO: 32328 - protein, 9 aa, Artificial Sequence
  Description of Artificial Sequence: Synthetic peptide
RVEPTTVPD

SEQ ID NO: 32329 - protein, 9 aa, Artificial Sequence
  Description of Artificial Sequence: Synthetic peptide
RVQSQWDGC

SEQ ID NO: 32330 - protein, 9 aa, Artificial Sequence
  Description of Artificial Sequence: Synthetic peptide
SVCPTRYAD

SEQ ID NO: 32331 - protein, 9 aa, Artificial Sequence
  Description of Artificial Sequence: Synthetic peptide
SVVCTTEFS

SEQ ID NO: 32332 - protein, 9 aa, Artificial Sequence
  Description of Artificial Sequence: Synthetic peptide
SVWASTVFH

SEQ ID NO: 32333 - protein, 9 aa, Artificial Sequence
  Description of Artificial Sequence: Synthetic peptide
TVARGPVPG

SEQ ID NO: 32334 - protein, 9 aa, Artificial Sequence
  Description of Artificial Sequence: Synthetic peptide
TVGNSKMQN

SEQ ID NO: 32335 - protein, 9 aa, Artificial Sequence
  Description of Artificial Sequence: Synthetic peptide
TVHWDITGC

SEQ ID NO: 32336 - protein, 9 aa, Artificial Sequence
  Description of Artificial Sequence: Synthetic peptide
TVMSAFDWG

SEQ ID NO: 32337 - protein, 9 aa, Artificial Sequence
  Description of Artificial Sequence: Synthetic peptide
TVTTKVRDS

SEQ ID NO: 32338 - protein, 9 aa, Artificial Sequence
  Description of Artificial Sequence: Synthetic peptide
VVCMHHCDM

SEQ ID NO: 32339 - protein, 9 aa, Artificial Sequence
  Description of Artificial Sequence: Synthetic peptide
VVGQKMTQT

SEQ ID NO: 32340 - protein, 9 aa, Artificial Sequence
  Description of Artificial Sequence: Synthetic peptide
VVQQIRDFH

SEQ ID NO: 32341 - protein, 9 aa, Artificial Sequence
  Description of Artificial Sequence: Synthetic peptide
WVEWPQMGS

SEQ ID NO: 32342 - protein, 9 aa, Artificial Sequence
  Description of Artificial Sequence: Synthetic peptide
WVVCRCAWE

SEQ ID NO: 32343 - protein, 9 aa, Artificial Sequence
  Description of Artificial Sequence: Synthetic peptide
YVPDRDGCD

SEQ ID NO: 32344 - protein, 9 aa, Artificial Sequence
  Description of Artificial Sequence: Synthetic peptide
YVQLKQEWY

SEQ ID NO: 32345 - protein, 9 aa, Artificial Sequence
  Description of Artificial Sequence: Synthetic peptide
YVVGMGKFC

SEQ ID NO: 32346 - protein, 9 aa, Artificial Sequence
  Description of Artificial Sequence: Synthetic peptide
PVLHIYWGL

SEQ ID NO: 32347 - protein, 9 aa, Artificial Sequence
  Description of Artificial Sequence: Synthetic peptide
YVHPWFGVS

SEQ ID NO: 32348 - protein, 9 aa, Artificial Sequence
  Description of Artificial Sequence: Synthetic peptide
KVNACGNLT

SEQ ID NO: 32349 - protein, 9 aa, Artificial Sequence
  Description of Artificial Sequence: Synthetic peptide
PVNLAQRDK

SEQ ID NO: 32350 - protein, 9 aa, Artificial Sequence
  Description of Artificial Sequence: Synthetic peptide
EVAGCATAV

SEQ ID NO: 32351 - protein, 9 aa, Artificial Sequence
  Description of Artificial Sequence: Synthetic peptide
SVKLAIDQK

SEQ ID NO: 32352 - protein, 9 aa, Artificial Sequence
  Description of Artificial Sequence: Synthetic peptide
LVGKYIDSM

SEQ ID NO: 32353 - protein, 9 aa, Artificial Sequence
  Description of Artificial Sequence: Synthetic peptide
DVMQNQCKS

SEQ ID NO: 32354 - protein, 9 aa, Artificial Sequence
  Description of Artificial Sequence: Synthetic peptide
HVVPCCPFH

SEQ ID NO: 32355 - protein, 9 aa, Artificial Sequence
  Description of Artificial Sequence: Synthetic peptide
DVISRNGRC

SEQ ID NO: 32356 - protein, 9 aa, Artificial Sequence
  Description of Artificial Sequence: Synthetic peptide
LVDCSNTCQ

SEQ ID NO: 32357 - protein, 9 aa, Artificial Sequence
  Description of Artificial Sequence: Synthetic peptide
AVEDYWRYF

SEQ ID NO: 32358 - protein, 9 aa, Artificial Sequence
  Description of Artificial Sequence: Synthetic peptide
GVAQYLHHC

SEQ ID NO: 32359 - protein, 9 aa, Artificial Sequence
  Description of Artificial Sequence: Synthetic peptide
QVEDGYWSY

SEQ ID NO: 32360 - protein, 9 aa, Artificial Sequence
  Description of Artificial Sequence: Synthetic peptide
MVFLEQHGR

SEQ ID NO: 32361 - protein, 9 aa, Artificial Sequence
  Description of Artificial Sequence: Synthetic peptide
LVQKWMRTC

SEQ ID NO: 32362 - protein, 9 aa, Artificial Sequence
  Description of Artificial Sequence: Synthetic peptide
VVISTKHTH

SEQ ID NO: 32363 - protein, 9 aa, Artificial Sequence
  Description of Artificial Sequence: Synthetic peptide
DVDVVALPM

SEQ ID NO: 32364 - protein, 9 aa, Artificial Sequence
  Description of Artificial Sequence: Synthetic peptide
RVTIMFTGT

SEQ ID NO: 32365 - protein, 9 aa, Artificial Sequence
  Description of Artificial Sequence: Synthetic peptide
AVNACSNSH

SEQ ID NO: 32366 - protein, 9 aa, Artificial Sequence
  Description of Artificial Sequence: Synthetic peptide
TVWIQSYSN

SEQ ID NO: 32367 - protein, 9 aa, Artificial Sequence
  Description of Artificial Sequence: Synthetic peptide
PVNESVHIC

SEQ ID NO: 32368 - protein, 9 aa, Artificial Sequence
  Description of Artificial Sequence: Synthetic peptide
SVRTCHQDE

SEQ ID NO: 32369 - protein, 9 aa, Artificial Sequence
  Description of Artificial Sequence: Synthetic peptide
DVTQHTSCT

SEQ ID NO: 32370 - protein, 9 aa, Artificial Sequence
  Description of Artificial Sequence: Synthetic peptide
PVEMKFAVQ

SEQ ID NO: 32371 - protein, 9 aa, Artificial Sequence
  Description of Artificial Sequence: Synthetic peptide
GVWMQGFHP

SEQ ID NO: 32372 - protein, 9 aa, Artificial Sequence
  Description of Artificial Sequence: Synthetic peptide
QVHMQRYYG

SEQ ID NO: 32373 - protein, 9 aa, Artificial Sequence
  Description of Artificial Sequence: Synthetic peptide
KVAHEMMSA

SEQ ID NO: 32374 - protein, 9 aa, Artificial Sequence
  Description of Artificial Sequence: Synthetic peptide
DVCKATTTE

SEQ ID NO: 32375 - protein, 9 aa, Artificial Sequence
  Description of Artificial Sequence: Synthetic peptide
AVHNVKDVH

SEQ ID NO: 32376 - protein, 9 aa, Artificial Sequence
  Description of Artificial Sequence: Synthetic peptide
NVYATPVVC

SEQ ID NO: 32377 - protein, 9 aa, Artificial Sequence
  Description of Artificial Sequence: Synthetic peptide
NVMGTQAKE

SEQ ID NO: 32378 - protein, 9 aa, Artificial Sequence
  Description of Artificial Sequence: Synthetic peptide
DVKAFMGGV

SEQ ID NO: 32379 - protein, 9 aa, Artificial Sequence
  Description of Artificial Sequence: Synthetic peptide
RVNGSTCRH

SEQ ID NO: 32380 - protein, 9 aa, Artificial Sequence
  Description of Artificial Sequence: Synthetic peptide
SVYMMTEGW

SEQ ID NO: 32381 - protein, 9 aa, Artificial Sequence
  Description of Artificial Sequence: Synthetic peptide
HVTKLMTSH

SEQ ID NO: 32382 - protein, 9 aa, Artificial Sequence
  Description of Artificial Sequence: Synthetic peptide
ELCTNWTAN

SEQ ID NO: 32383 - protein, 9 aa, Artificial Sequence
  Description of Artificial Sequence: Synthetic peptide
EPCQSHEFY

SEQ ID NO: 32384 - protein, 9 aa, Artificial Sequence
  Description of Artificial Sequence: Synthetic peptide
ETCPYFDFD

SEQ ID NO: 32385 - protein, 9 aa, Artificial Sequence
  Description of Artificial Sequence: Synthetic peptide
GGCVYWQMD

SEQ ID NO: 32386 - protein, 9 aa, Artificial Sequence
  Description of Artificial Sequence: Synthetic peptide
GTCTDMGIC

SEQ ID NO: 32387 - protein, 9 aa, Artificial Sequence
  Description of Artificial Sequence: Synthetic peptide
HTCHFGGFV

SEQ ID NO: 32388 - protein, 9 aa, Artificial Sequence
  Description of Artificial Sequence: Synthetic peptide
ISCQSMCCE

SEQ ID NO: 32389 - protein, 9 aa, Artificial Sequence
  Description of Artificial Sequence: Synthetic peptide
ITCQKMAMN

SEQ ID NO: 32390 - protein, 9 aa, Artificial Sequence
  Description of Artificial Sequence: Synthetic peptide
KDCFNGECE

SEQ ID NO: 32391 - protein, 9 aa, Artificial Sequence
  Description of Artificial Sequence: Synthetic peptide
KPCMFWMSR

SEQ ID NO: 32392 - protein, 9 aa, Artificial Sequence
  Description of Artificial Sequence: Synthetic peptide
KTCAVNVYL

SEQ ID NO: 32393 - protein, 9 aa, Artificial Sequence
  Description of Artificial Sequence: Synthetic peptide
LACQIQWMT

SEQ ID NO: 32394 - protein, 9 aa, Artificial Sequence
  Description of Artificial Sequence: Synthetic peptide
MTCEYRTSM

SEQ ID NO: 32395 - protein, 9 aa, Artificial Sequence
  Description of Artificial Sequence: Synthetic peptide
MWCDYGTGW

SEQ ID NO: 32396 - protein, 9 aa, Artificial Sequence
  Description of Artificial Sequence: Synthetic peptide
QACFIAGQQ

SEQ ID NO: 32397 - protein, 9 aa, Artificial Sequence
  Description of Artificial Sequence: Synthetic peptide
QDCCKQSVA

SEQ ID NO: 32398 - protein, 9 aa, Artificial Sequence
  Description of Artificial Sequence: Synthetic peptide
QGCKQMGSM

SEQ ID NO: 32399 - protein, 9 aa, Artificial Sequence
  Description of Artificial Sequence: Synthetic peptide
SSCYHSTGA

SEQ ID NO: 32400 - protein, 9 aa, Artificial Sequence
  Description of Artificial Sequence: Synthetic peptide
STCTIRGNP

SEQ ID NO: 32401 - protein, 9 aa, Artificial Sequence
  Description of Artificial Sequence: Synthetic peptide
TACTMFECQ

SEQ ID NO: 32402 - protein, 9 aa, Artificial Sequence
  Description of Artificial Sequence: Synthetic peptide
VACWYTKHS

SEQ ID NO: 32403 - protein, 9 aa, Artificial Sequence
  Description of Artificial Sequence: Synthetic peptide
VICQVQGRA

SEQ ID NO: 32404 - protein, 9 aa, Artificial Sequence
  Description of Artificial Sequence: Synthetic peptide
VYCLTHAGP

SEQ ID NO: 32405 - protein, 9 aa, Artificial Sequence
  Description of Artificial Sequence: Synthetic peptide
YICRLWTQC

SEQ ID NO: 32406 - protein, 9 aa, Artificial Sequence
  Description of Artificial Sequence: Synthetic peptide
YTCVMEHMH

SEQ ID NO: 32407 - protein, 9 aa, Artificial Sequence
  Description of Artificial Sequence: Synthetic peptide
AMCPTHWHQ

SEQ ID NO: 32408 - protein, 9 aa, Artificial Sequence
  Description of Artificial Sequence: Synthetic peptide
DRCNFNCSE

SEQ ID NO: 32409 - protein, 9 aa, Artificial Sequence
  Description of Artificial Sequence: Synthetic peptide
DSCPQIFRD

SEQ ID NO: 32410 - protein, 9 aa, Artificial Sequence
  Description of Artificial Sequence: Synthetic peptide
EWCLADGMT

SEQ ID NO: 32411 - protein, 9 aa, Artificial Sequence
  Description of Artificial Sequence: Synthetic peptide
GACKFNGHK

SEQ ID NO: 32412 - protein, 9 aa, Artificial Sequence
  Description of Artificial Sequence: Synthetic peptide
GRCQYFQMA

SEQ ID NO: 32413 - protein, 9 aa, Artificial Sequence
  Description of Artificial Sequence: Synthetic peptide
GWCWYMRMG

SEQ ID NO: 32414 - protein, 9 aa, Artificial Sequence
  Description of Artificial Sequence: Synthetic peptide
IGCKVQSTN

SEQ ID NO: 32415 - protein, 9 aa, Artificial Sequence
  Description of Artificial Sequence: Synthetic peptide
ISCKAHWQG

SEQ ID NO: 32416 - protein, 9 aa, Artificial Sequence
  Description of Artificial Sequence: Synthetic peptide
ITCVDNKMC

SEQ ID NO: 32417 - protein, 9 aa, Artificial Sequence
  Description of Artificial Sequence: Synthetic peptide
KSCEWMLQQ

SEQ ID NO: 32418 - protein, 9 aa, Artificial Sequence
  Description of Artificial Sequence: Synthetic peptide
KTCEWGQDK

SEQ ID NO: 32419 - protein, 9 aa, Artificial Sequence
  Description of Artificial Sequence: Synthetic peptide
LCCPFDTDA

SEQ ID NO: 32420 - protein, 9 aa, Artificial Sequence
  Description of Artificial Sequence: Synthetic peptide
LKCMNHSAW

SEQ ID NO: 32421 - protein, 9 aa, Artificial Sequence
  Description of Artificial Sequence: Synthetic peptide
LKCVFMRAE

SEQ ID NO: 32422 - protein, 9 aa, Artificial Sequence
  Description of Artificial Sequence: Synthetic peptide
LSCLATYQS

SEQ ID NO: 32423 - protein, 9 aa, Artificial Sequence
  Description of Artificial Sequence: Synthetic peptide
MLCEPEGAR

SEQ ID NO: 32424 - protein, 9 aa, Artificial Sequence
  Description of Artificial Sequence: Synthetic peptide
NYCTYHSTH

SEQ ID NO: 32425 - protein, 9 aa, Artificial Sequence
  Description of Artificial Sequence: Synthetic peptide
QSCATIIRE

SEQ ID NO: 32426 - protein, 9 aa, Artificial Sequence
  Description of Artificial Sequence: Synthetic peptide
QSCLQQIQA

SEQ ID NO: 32427 - protein, 9 aa, Artificial Sequence
  Description of Artificial Sequence: Synthetic peptide
RSCTKEDYW

SEQ ID NO: 32428 - protein, 9 aa, Artificial Sequence
  Description of Artificial Sequence: Synthetic peptide
RTCWFMGVG

SEQ ID NO: 32429 - protein, 9 aa, Artificial Sequence
  Description of Artificial Sequence: Synthetic peptide
SGCPQRVAT

SEQ ID NO: 32430 - protein, 9 aa, Artificial Sequence
  Description of Artificial Sequence: Synthetic peptide
SHCWYWYWN

SEQ ID NO: 32431 - protein, 9 aa, Artificial Sequence
  Description of Artificial Sequence: Synthetic peptide
SNCPYHTFY

SEQ ID NO: 32432 - protein, 9 aa, Artificial Sequence
  Description of Artificial Sequence: Synthetic peptide
SNCVTDATA

SEQ ID NO: 32433 - protein, 9 aa, Artificial Sequence
  Description of Artificial Sequence: Synthetic peptide
TNCAMQMYY

SEQ ID NO: 32434 - protein, 9 aa, Artificial Sequence
  Description of Artificial Sequence: Synthetic peptide
TTCRTWEAF

SEQ ID NO: 32435 - protein, 9 aa, Artificial Sequence
  Description of Artificial Sequence: Synthetic peptide
VACRENMLT

SEQ ID NO: 32436 - protein, 9 aa, Artificial Sequence
  Description of Artificial Sequence: Synthetic peptide
VLCHEADGP

SEQ ID NO: 32437 - protein, 9 aa, Artificial Sequence
  Description of Artificial Sequence: Synthetic peptide
VYCPCDGPD

SEQ ID NO: 32438 - protein, 9 aa, Artificial Sequence
  Description of Artificial Sequence: Synthetic peptide
YACHMGHYD

SEQ ID NO: 32439 - protein, 9 aa, Artificial Sequence
  Description of Artificial Sequence: Synthetic peptide
YPCLMEKEY

SEQ ID NO: 32440 - protein, 9 aa, Artificial Sequence
  Description of Artificial Sequence: Synthetic peptide
YSCMVNTHQ

SEQ ID NO: 32441 - protein, 9 aa, Artificial Sequence
  Description of Artificial Sequence: Synthetic peptide
YSCSQAMHG

SEQ ID NO: 32442 - protein, 9 aa, Artificial Sequence
  Description of Artificial Sequence: Synthetic peptide
AACENKVCF

SEQ ID NO: 32443 - protein, 9 aa, Artificial Sequence
  Description of Artificial Sequence: Synthetic peptide
AMCLFETMQ

SEQ ID NO: 32444 - protein, 9 aa, Artificial Sequence
  Description of Artificial Sequence: Synthetic peptide
AQCKLTTVE

SEQ ID NO: 32445 - protein, 9 aa, Artificial Sequence
  Description of Artificial Sequence: Synthetic peptide
ATCWQPAAK

SEQ ID NO: 32446 - protein, 9 aa, Artificial Sequence
  Description of Artificial Sequence: Synthetic peptide
DNCKIMFMC

SEQ ID NO: 32447 - protein, 9 aa, Artificial Sequence
  Description of Artificial Sequence: Synthetic peptide
DPCPNMIWT

SEQ ID NO: 32448 - protein, 9 aa, Artificial Sequence
  Description of Artificial Sequence: Synthetic peptide
DWCTYRAQD

SEQ ID NO: 32449 - protein, 9 aa, Artificial Sequence
  Description of Artificial Sequence: Synthetic peptide
EACYMYHNT

SEQ ID NO: 32450 - protein, 9 aa, Artificial Sequence
  Description of Artificial Sequence: Synthetic peptide
EGCYFWKQV

SEQ ID NO: 32451 - protein, 9 aa, Artificial Sequence
  Description of Artificial Sequence: Synthetic peptide
EICTASPQA

SEQ ID NO: 32452 - protein, 9 aa, Artificial Sequence
  Description of Artificial Sequence: Synthetic peptide
ESCLTGGNT

SEQ ID NO: 32453 - protein, 9 aa, Artificial Sequence
  Description of Artificial Sequence: Synthetic peptide
ETCQKYVAK

SEQ ID NO: 32454 - protein, 9 aa, Artificial Sequence
  Description of Artificial Sequence: Synthetic peptide
FICQIKSAS

SEQ ID NO: 32455 - protein, 9 aa, Artificial Sequence
  Description of Artificial Sequence: Synthetic peptide
HACPKHYCR

SEQ ID NO: 32456 - protein, 9 aa, Artificial Sequence
  Description of Artificial Sequence: Synthetic peptide
HCCFKNGDM

SEQ ID NO: 32457 - protein, 9 aa, Artificial Sequence
  Description of Artificial Sequence: Synthetic peptide
HMCPFMDQA

SEQ ID NO: 32458 - protein, 9 aa, Artificial Sequence
  Description of Artificial Sequence: Synthetic peptide
IACVSWFTC

SEQ ID NO: 32459 - protein, 9 aa, Artificial Sequence
  Description of Artificial Sequence: Synthetic peptide
ILCWHHYSV

SEQ ID NO: 32460 - protein, 9 aa, Artificial Sequence
  Description of Artificial Sequence: Synthetic peptide
ISCRTQSAC

SEQ ID NO: 32461 - protein, 9 aa, Artificial Sequence
  Description of Artificial Sequence: Synthetic peptide
ITCITWVNG

SEQ ID NO: 32462 - protein, 9 aa, Artificial Sequence
  Description of Artificial Sequence: Synthetic peptide
KACDYFMHG

SEQ ID NO: 32463 - protein, 9 aa, Artificial Sequence
  Description of Artificial Sequence: Synthetic peptide
KHCHSMQFE

SEQ ID NO: 32464 - protein, 9 aa, Artificial Sequence
  Description of Artificial Sequence: Synthetic peptide
KSCLYFDAY

SEQ ID NO: 32465 - protein, 9 aa, Artificial Sequence
  Description of Artificial Sequence: Synthetic peptide
MACDYFMHG

SEQ ID NO: 32466 - protein, 9 aa, Artificial Sequence
  Description of Artificial Sequence: Synthetic peptide
MACPKNISG

SEQ ID NO: 32467 - protein, 9 aa, Artificial Sequence
  Description of Artificial Sequence: Synthetic peptide
MACSMNVAL

SEQ ID NO: 32468 - protein, 9 aa, Artificial Sequence
  Description of Artificial Sequence: Synthetic peptide
MMCFNYFDR

SEQ ID NO: 32469 - protein, 9 aa, Artificial Sequence
  Description of Artificial Sequence: Synthetic peptide
NACSHQHLG

SEQ ID NO: 32470 - protein, 9 aa, Artificial Sequence
  Description of Artificial Sequence: Synthetic peptide
NPCPNMIWT

SEQ ID NO: 32471 - protein, 9 aa, Artificial Sequence
  Description of Artificial Sequence: Synthetic peptide
NYCRRTFHH

SEQ ID NO: 32472 - protein, 9 aa, Artificial Sequence
  Description of Artificial Sequence: Synthetic peptide
QACRLTYWY

SEQ ID NO: 32473 - protein, 9 aa, Artificial Sequence
  Description of Artificial Sequence: Synthetic peptide
QACWLTYWY

SEQ ID NO: 32474 - protein, 9 aa, Artificial Sequence
  Description of Artificial Sequence: Synthetic peptide
QMCTLTKAD

SEQ ID NO: 32475 - protein, 9 aa, Artificial Sequence
  Description of Artificial Sequence: Synthetic peptide
RACHKQLWV

SEQ ID NO: 32476 - protein, 9 aa, Artificial Sequence
  Description of Artificial Sequence: Synthetic peptide
RPCWPWDHL

SEQ ID NO: 32477 - protein, 9 aa, Artificial Sequence
  Description of Artificial Sequence: Synthetic peptide
RSCFEMKHI

SEQ ID NO: 32478 - protein, 9 aa, Artificial Sequence
  Description of Artificial Sequence: Synthetic peptide
RTCNLPYAI

SEQ ID NO: 32479 - protein, 9 aa, Artificial Sequence
  Description of Artificial Sequence: Synthetic peptide
RYCSTIYYS

SEQ ID NO: 32480 - protein, 9 aa, Artificial Sequence
  Description of Artificial Sequence: Synthetic peptide
SACPWNFYC

SEQ ID NO: 32481 - protein, 9 aa, Artificial Sequence
  Description of Artificial Sequence: Synthetic peptide
SGCFWRNTS

SEQ ID NO: 32482 - protein, 9 aa, Artificial Sequence
  Description of Artificial Sequence: Synthetic peptide
SHCLYWMKH

SEQ ID NO: 32483 - protein, 9 aa, Artificial Sequence
  Description of Artificial Sequence: Synthetic peptide
SICQTNFAV

SEQ ID NO: 32484 - protein, 9 aa, Artificial Sequence
  Description of Artificial Sequence: Synthetic peptide
SKCGFDVAA

SEQ ID NO: 32485 - protein, 9 aa, Artificial Sequence
  Description of Artificial Sequence: Synthetic peptide
SLCTIHGAQ

SEQ ID NO: 32486 - protein, 9 aa, Artificial Sequence
  Description of Artificial Sequence: Synthetic peptide
TACHISHYD

SEQ ID NO: 32487 - protein, 9 aa, Artificial Sequence
  Description of Artificial Sequence: Synthetic peptide
TACYKNTCE

SEQ ID NO: 32488 - protein, 9 aa, Artificial Sequence
  Description of Artificial Sequence: Synthetic peptide
TACYPHSFG

SEQ ID NO: 32489 - protein, 9 aa, Artificial Sequence
  Description of Artificial Sequence: Synthetic peptide
TICSMGQKD

SEQ ID NO: 32490 - protein, 9 aa, Artificial Sequence
  Description of Artificial Sequence: Synthetic peptide
TICYMSTSS

SEQ ID NO: 32491 - protein, 9 aa, Artificial Sequence
  Description of Artificial Sequence: Synthetic peptide
TYCRSGDVQ

SEQ ID NO: 32492 - protein, 9 aa, Artificial Sequence
  Description of Artificial Sequence: Synthetic peptide
VMCTWQACR

SEQ ID NO: 32493 - protein, 9 aa, Artificial Sequence
  Description of Artificial Sequence: Synthetic peptide
WHCNFHWHL

SEQ ID NO: 32494 - protein, 9 aa, Artificial Sequence
  Description of Artificial Sequence: Synthetic peptide
WYCLTQRSD

SEQ ID NO: 32495 - protein, 9 aa, Artificial Sequence
  Description of Artificial Sequence: Synthetic peptide
WYCMCIIRE

SEQ ID NO: 32496 - protein, 9 aa, Artificial Sequence
  Description of Artificial Sequence: Synthetic peptide
YACATQQHL

SEQ ID NO: 32497 - protein, 9 aa, Artificial Sequence
  Description of Artificial Sequence: Synthetic peptide
YACPKHYCR

SEQ ID NO: 32498 - protein, 9 aa, Artificial Sequence
  Description of Artificial Sequence: Synthetic peptide
YHCKFNWLG

SEQ ID NO: 32499 - protein, 9 aa, Artificial Sequence
  Description of Artificial Sequence: Synthetic peptide
YHCQNYAAS

SEQ ID NO: 32500 - protein, 9 aa, Artificial Sequence
  Description of Artificial Sequence: Synthetic peptide
YKCAHDPTG

SEQ ID NO: 32501 - protein, 9 aa, Artificial Sequence
  Description of Artificial Sequence: Synthetic peptide
IYCWMPMSP

SEQ ID NO: 32502 - protein, 9 aa, Artificial Sequence
  Description of Artificial Sequence: Synthetic peptide
EHCNHDQGV

SEQ ID NO: 32503 - protein, 9 aa, Artificial Sequence
  Description of Artificial Sequence: Synthetic peptide
KACMSHQGR

SEQ ID NO: 32504 - protein, 9 aa, Artificial Sequence
  Description of Artificial Sequence: Synthetic peptide
MSCPAKIVV

SEQ ID NO: 32505 - protein, 9 aa, Artificial Sequence
  Description of Artificial Sequence: Synthetic peptide
QNCIMLASN

SEQ ID NO: 32506 - protein, 9 aa, Artificial Sequence
  Description of Artificial Sequence: Synthetic peptide
GTCLFKTHK

SEQ ID NO: 32507 - protein, 9 aa, Artificial Sequence
  Description of Artificial Sequence: Synthetic peptide
KPCNPVGQE

SEQ ID NO: 32508 - protein, 9 aa, Artificial Sequence
  Description of Artificial Sequence: Synthetic peptide
RLCDTHKCL

SEQ ID NO: 32509 - protein, 9 aa, Artificial Sequence
  Description of Artificial Sequence: Synthetic peptide
EMCGGGLSC

SEQ ID NO: 32510 - protein, 9 aa, Artificial Sequence
  Description of Artificial Sequence: Synthetic peptide
EACMPWAHH

SEQ ID NO: 32511 - protein, 9 aa, Artificial Sequence
  Description of Artificial Sequence: Synthetic peptide
IMCHARMMA

SEQ ID NO: 32512 - protein, 9 aa, Artificial Sequence
  Description of Artificial Sequence: Synthetic peptide
AQCHDMWGH

SEQ ID NO: 32513 - protein, 9 aa, Artificial Sequence
  Description of Artificial Sequence: Synthetic peptide
ESCHLQHGE

SEQ ID NO: 32514 - protein, 9 aa, Artificial Sequence
  Description of Artificial Sequence: Synthetic peptide
WACIIYMWN

SEQ ID NO: 32515 - protein, 9 aa, Artificial Sequence
  Description of Artificial Sequence: Synthetic peptide
GRPRTPLGN

SEQ ID NO: 32516 - protein, 9 aa, Artificial Sequence
  Description of Artificial Sequence: Synthetic peptide
GTIRKEKYY

SEQ ID NO: 32517 - protein, 9 aa, Artificial Sequence
  Description of Artificial Sequence: Synthetic peptide
IPRRLQLPI

SEQ ID NO: 32518 - protein, 9 aa, Artificial Sequence
  Description of Artificial Sequence: Synthetic peptide
ITQRDNIAM

SEQ ID NO: 32519 - protein, 9 aa, Artificial Sequence
  Description of Artificial Sequence: Synthetic peptide
IYERHHCQA

SEQ ID NO: 32520 - protein, 9 aa, Artificial Sequence
  Description of Artificial Sequence: Synthetic peptide
KDNRRIYKQ

SEQ ID NO: 32521 - protein, 9 aa, Artificial Sequence
  Description of Artificial Sequence: Synthetic peptide
MALRSPFNL

SEQ ID NO: 32522 - protein, 9 aa, Artificial Sequence
  Description of Artificial Sequence: Synthetic peptide
MCDRAIRSD

SEQ ID NO: 32523 - protein, 9 aa, Artificial Sequence
  Description of Artificial Sequence: Synthetic peptide
QMYRLAYSR

SEQ ID NO: 32524 - protein, 9 aa, Artificial Sequence
  Description of Artificial Sequence: Synthetic peptide
RLSRAHLPQ

SEQ ID NO: 32525 - protein, 9 aa, Artificial Sequence
  Description of Artificial Sequence: Synthetic peptide
SIERHCRME

SEQ ID NO: 32526 - protein, 9 aa, Artificial Sequence
  Description of Artificial Sequence: Synthetic peptide
YDWRTMAEV

SEQ ID NO: 32527 - protein, 9 aa, Artificial Sequence
  Description of Artificial Sequence: Synthetic peptide
YSERYINAY

SEQ ID NO: 32528 - protein, 9 aa, Artificial Sequence
  Description of Artificial Sequence: Synthetic peptide
AASRSHQSE

SEQ ID NO: 32529 - protein, 9 aa, Artificial Sequence
  Description of Artificial Sequence: Synthetic peptide
DGVRMHKDW

SEQ ID NO: 32530 - protein, 9 aa, Artificial Sequence
  Description of Artificial Sequence: Synthetic peptide
ETKRSDHEV

SEQ ID NO: 32531 - protein, 9 aa, Artificial Sequence
  Description of Artificial Sequence: Synthetic peptide
LCARGHKSG

SEQ ID NO: 32532 - protein, 9 aa, Artificial Sequence
  Description of Artificial Sequence: Synthetic peptide
MCLREIQMQ

SEQ ID NO: 32533 - protein, 9 aa, Artificial Sequence
  Description of Artificial Sequence: Synthetic peptide
MPQRYNRET

SEQ ID NO: 32534 - protein, 9 aa, Artificial Sequence
  Description of Artificial Sequence: Synthetic peptide
NCARGWMII

SEQ ID NO: 32535 - protein, 9 aa, Artificial Sequence
  Description of Artificial Sequence: Synthetic peptide
TGERTHMCL

SEQ ID NO: 32536 - protein, 9 aa, Artificial Sequence
  Description of Artificial Sequence: Synthetic peptide
VSRRSDWSE

SEQ ID NO: 32537 - protein, 9 aa, Artificial Sequence
  Description of Artificial Sequence: Synthetic peptide
YFPRPFKMT

SEQ ID NO: 32538 - protein, 9 aa, Artificial Sequence
  Description of Artificial Sequence: Synthetic peptide
YMDRMSECY

SEQ ID NO: 32539 - protein, 9 aa, Artificial Sequence
  Description of Artificial Sequence: Synthetic peptide
AFDRHSDLA

SEQ ID NO: 32540 - protein, 9 aa, Artificial Sequence
  Description of Artificial Sequence: Synthetic peptide
AGGRIGDSQ

SEQ ID NO: 32541 - protein, 9 aa, Artificial Sequence
  Description of Artificial Sequence: Synthetic peptide
DFVRTNIGV

SEQ ID NO: 32542 - protein, 9 aa, Artificial Sequence
  Description of Artificial Sequence: Synthetic peptide
EFVRNPCFE

SEQ ID NO: 32543 - protein, 9 aa, Artificial Sequence
  Description of Artificial Sequence: Synthetic peptide
ESARYIDFT

SEQ ID NO: 32544 - protein, 9 aa, Artificial Sequence
  Description of Artificial Sequence: Synthetic peptide
FAQRTTDHR

SEQ ID NO: 32545 - protein, 9 aa, Artificial Sequence
  Description of Artificial Sequence: Synthetic peptide
FHDRPFTFT

SEQ ID NO: 32546 - protein, 9 aa, Artificial Sequence
  Description of Artificial Sequence: Synthetic peptide
FQDREQFWY

SEQ ID NO: 32547 - protein, 9 aa, Artificial Sequence
  Description of Artificial Sequence: Synthetic peptide
GWMRGEYNV

SEQ ID NO: 32548 - protein, 9 aa, Artificial Sequence
  Description of Artificial Sequence: Synthetic peptide
ICVRWHCGP

SEQ ID NO: 32549 - protein, 9 aa, Artificial Sequence
  Description of Artificial Sequence: Synthetic peptide
IRVRWHCGP

SEQ ID NO: 32550 - protein, 9 aa, Artificial Sequence
  Description of Artificial Sequence: Synthetic peptide
KCQRMDTWK

SEQ ID NO: 32551 - protein, 9 aa, Artificial Sequence
  Description of Artificial Sequence: Synthetic peptide
KGDRFMVDQ

SEQ ID NO: 32552 - protein, 9 aa, Artificial Sequence
  Description of Artificial Sequence: Synthetic peptide
LAARIGEVE

SEQ ID NO: 32553 - protein, 9 aa, Artificial Sequence
  Description of Artificial Sequence: Synthetic peptide
LIARYGKQW

SEQ ID NO: 32554 - protein, 9 aa, Artificial Sequence
  Description of Artificial Sequence: Synthetic peptide
LMARIQNIT

SEQ ID NO: 32555 - protein, 9 aa, Artificial Sequence
  Description of Artificial Sequence: Synthetic peptide
MADREMAAR

SEQ ID NO: 32556 - protein, 9 aa, Artificial Sequence
  Description of Artificial Sequence: Synthetic peptide
MCIRSGFIV

SEQ ID NO: 32557 - protein, 9 aa, Artificial Sequence
  Description of Artificial Sequence: Synthetic peptide
MEDRLAHYH

SEQ ID NO: 32558 - protein, 9 aa, Artificial Sequence
  Description of Artificial Sequence: Synthetic peptide
NCIRNWQHA

SEQ ID NO: 32559 - protein, 9 aa, Artificial Sequence
  Description of Artificial Sequence: Synthetic peptide
NGIRIFLFG

SEQ ID NO: 32560 - protein, 9 aa, Artificial Sequence
  Description of Artificial Sequence: Synthetic peptide
PMSRQLYSD

SEQ ID NO: 32561 - protein, 9 aa, Artificial Sequence
  Description of Artificial Sequence: Synthetic peptide
QGVRILTAA

SEQ ID NO: 32562 - protein, 9 aa, Artificial Sequence
  Description of Artificial Sequence: Synthetic peptide
QWMRWLIVT

SEQ ID NO: 32563 - protein, 9 aa, Artificial Sequence
  Description of Artificial Sequence: Synthetic peptide
TADRWCDAS

SEQ ID NO: 32564 - protein, 9 aa, Artificial Sequence
  Description of Artificial Sequence: Synthetic peptide
TCTRKDDDM

SEQ ID NO: 32565 - protein, 9 aa, Artificial Sequence
  Description of Artificial Sequence: Synthetic peptide
TMARFPCIS

SEQ ID NO: 32566 - protein, 9 aa, Artificial Sequence
  Description of Artificial Sequence: Synthetic peptide
VSERAHCGE

SEQ ID NO: 32567 - protein, 9 aa, Artificial Sequence
  Description of Artificial Sequence: Synthetic peptide
WEHRFSASM

SEQ ID NO: 32568 - protein, 9 aa, Artificial Sequence
  Description of Artificial Sequence: Synthetic peptide
WGIRNMELR

SEQ ID NO: 32569 - protein, 9 aa, Artificial Sequence
  Description of Artificial Sequence: Synthetic peptide
YADRFACYQ

SEQ ID NO: 32570 - protein, 9 aa, Artificial Sequence
  Description of Artificial Sequence: Synthetic peptide
YANRNFSPE

SEQ ID NO: 32571 - protein, 9 aa, Artificial Sequence
  Description of Artificial Sequence: Synthetic peptide
YENRGREHN

SEQ ID NO: 32572 - protein, 9 aa, Artificial Sequence
  Description of Artificial Sequence: Synthetic peptide
AFDRHSDWA

SEQ ID NO: 32573 - protein, 9 aa, Artificial Sequence
  Description of Artificial Sequence: Synthetic peptide
MEVRECGWD

SEQ ID NO: 32574 - protein, 9 aa, Artificial Sequence
  Description of Artificial Sequence: Synthetic peptide
MGQRYDIQG

SEQ ID NO: 32575 - protein, 9 aa, Artificial Sequence
  Description of Artificial Sequence: Synthetic peptide
QAVRRWWFF

SEQ ID NO: 32576 - protein, 9 aa, Artificial Sequence
  Description of Artificial Sequence: Synthetic peptide
HHLRNVHHC

SEQ ID NO: 32577 - protein, 9 aa, Artificial Sequence
  Description of Artificial Sequence: Synthetic peptide
KATRDPKFP

SEQ ID NO: 32578 - protein, 9 aa, Artificial Sequence
  Description of Artificial Sequence: Synthetic peptide
NSTRNTSYY

SEQ ID NO: 32579 - protein, 9 aa, Artificial Sequence
  Description of Artificial Sequence: Synthetic peptide
MTERYYWCQ

SEQ ID NO: 32580 - protein, 9 aa, Artificial Sequence
  Description of Artificial Sequence: Synthetic peptide
MTQRVVHWG

SEQ ID NO: 32581 - protein, 9 aa, Artificial Sequence
  Description of Artificial Sequence: Synthetic peptide
NNDRHQHLK

SEQ ID NO: 32582 - protein, 9 aa, Artificial Sequence
  Description of Artificial Sequence: Synthetic peptide
NILRYLICD

SEQ ID NO: 32583 - protein, 9 aa, Artificial Sequence
  Description of Artificial Sequence: Synthetic peptide
MPTRMQKGA

SEQ ID NO: 32584 - protein, 9 aa, Artificial Sequence
  Description of Artificial Sequence: Synthetic peptide
DIGRFTAYY

SEQ ID NO: 32585 - protein, 9 aa, Artificial Sequence
  Description of Artificial Sequence: Synthetic peptide
EAWRNSSSG

SEQ ID NO: 32586 - protein, 9 aa, Artificial Sequence
  Description of Artificial Sequence: Synthetic peptide
AQARTIGLG

SEQ ID NO: 32587 - protein, 9 aa, Artificial Sequence
  Description of Artificial Sequence: Synthetic peptide
TKGRNDHME

SEQ ID NO: 32588 - protein, 9 aa, Artificial Sequence
  Description of Artificial Sequence: Synthetic peptide
GQFRSGAYR

SEQ ID NO: 32589 - protein, 9 aa, Artificial Sequence
  Description of Artificial Sequence: Synthetic peptide
LNARTMRSA

SEQ ID NO: 32590 - protein, 9 aa, Artificial Sequence
  Description of Artificial Sequence: Synthetic peptide
MMKRNRFIC

SEQ ID NO: 32591 - protein, 9 aa, Artificial Sequence
  Description of Artificial Sequence: Synthetic peptide
EYSRMNKAS

SEQ ID NO: 32592 - protein, 9 aa, Artificial Sequence
  Description of Artificial Sequence: Synthetic peptide
SYARKVYDC

SEQ ID NO: 32593 - protein, 9 aa, Artificial Sequence
  Description of Artificial Sequence: Synthetic peptide
ICIRGARAD

SEQ ID NO: 32594 - protein, 9 aa, Artificial Sequence
  Description of Artificial Sequence: Synthetic peptide
ERMCYEDSY

SEQ ID NO: 32595 - protein, 9 aa, Artificial Sequence
  Description of Artificial Sequence: Synthetic peptide
ESGFYATWN

SEQ ID NO: 32596 - protein, 9 aa, Artificial Sequence
  Description of Artificial Sequence: Synthetic peptide
FGGHYWPCP

SEQ ID NO: 32597 - protein, 9 aa, Artificial Sequence
  Description of Artificial Sequence: Synthetic peptide
GHGSYLAED

SEQ ID NO: 32598 - protein, 9 aa, Artificial Sequence
  Description of Artificial Sequence: Synthetic peptide
GNQPYGDNQ

SEQ ID NO: 32599 - protein, 9 aa, Artificial Sequence
  Description of Artificial Sequence: Synthetic peptide
GQVGYQMHG

SEQ ID NO: 32600 - protein, 9 aa, Artificial Sequence
  Description of Artificial Sequence: Synthetic peptide
GYHMYQKTS

SEQ ID NO: 32601 - protein, 9 aa, Artificial Sequence
  Description of Artificial Sequence: Synthetic peptide
ITMSYAHMC

SEQ ID NO: 32602 - protein, 9 aa, Artificial Sequence
  Description of Artificial Sequence: Synthetic peptide
IWRDYDQCY

SEQ ID NO: 32603 - protein, 9 aa, Artificial Sequence
  Description of Artificial Sequence: Synthetic peptide
QKRDYQFMP

SEQ ID NO: 32604 - protein, 9 aa, Artificial Sequence
  Description of Artificial Sequence: Synthetic peptide
QMNSYPMYE

SEQ ID NO: 32605 - protein, 9 aa, Artificial Sequence
  Description of Artificial Sequence: Synthetic peptide
RADAYTQIA

SEQ ID NO: 32606 - protein, 9 aa, Artificial Sequence
  Description of Artificial Sequence: Synthetic peptide
SCELYMARD

SEQ ID NO: 32607 - protein, 9 aa, Artificial Sequence
  Description of Artificial Sequence: Synthetic peptide
ACSCYMHTG

SEQ ID NO: 32608 - protein, 9 aa, Artificial Sequence
  Description of Artificial Sequence: Synthetic peptide
DISMYMFQD

SEQ ID NO: 32609 - protein, 9 aa, Artificial Sequence
  Description of Artificial Sequence: Synthetic peptide
DMNMYLGSQ

SEQ ID NO: 32610 - protein, 9 aa, Artificial Sequence
  Description of Artificial Sequence: Synthetic peptide
ECIWYDNYF

SEQ ID NO: 32611 - protein, 9 aa, Artificial Sequence
  Description of Artificial Sequence: Synthetic peptide
GFYWYEMAL

SEQ ID NO: 32612 - protein, 9 aa, Artificial Sequence
  Description of Artificial Sequence: Synthetic peptide
HYAAYEQAM

SEQ ID NO: 32613 - protein, 9 aa, Artificial Sequence
  Description of Artificial Sequence: Synthetic peptide
IKMLYHWKD

SEQ ID NO: 32614 - protein, 9 aa, Artificial Sequence
  Description of Artificial Sequence: Synthetic peptide
ISYDYAQAP

SEQ ID NO: 32615 - protein, 9 aa, Artificial Sequence
  Description of Artificial Sequence: Synthetic peptide
ITMPYAHMC

SEQ ID NO: 32616 - protein, 9 aa, Artificial Sequence
  Description of Artificial Sequence: Synthetic peptide
KTPWYTWHD

SEQ ID NO: 32617 - protein, 9 aa, Artificial Sequence
  Description of Artificial Sequence: Synthetic peptide
MASLYPFGQ

SEQ ID NO: 32618 - protein, 9 aa, Artificial Sequence
  Description of Artificial Sequence: Synthetic peptide
MFTPYRMQA

SEQ ID NO: 32619 - protein, 9 aa, Artificial Sequence
  Description of Artificial Sequence: Synthetic peptide
NGASYNQIE

SEQ ID NO: 32620 - protein, 9 aa, Artificial Sequence
  Description of Artificial Sequence: Synthetic peptide
QEMDYRMST

SEQ ID NO: 32621 - protein, 9 aa, Artificial Sequence
  Description of Artificial Sequence: Synthetic peptide
QHQHYELHQ

SEQ ID NO: 32622 - protein, 9 aa, Artificial Sequence
  Description of Artificial Sequence: Synthetic peptide
QWSMYNMYD

SEQ ID NO: 32623 - protein, 9 aa, Artificial Sequence
  Description of Artificial Sequence: Synthetic peptide
RLTCYRMHK

SEQ ID NO: 32624 - protein, 9 aa, Artificial Sequence
  Description of Artificial Sequence: Synthetic peptide
SAAFYMDVD

SEQ ID NO: 32625 - protein, 9 aa, Artificial Sequence
  Description of Artificial Sequence: Synthetic peptide
SGLEYMGQQ

SEQ ID NO: 32626 - protein, 9 aa, Artificial Sequence
  Description of Artificial Sequence: Synthetic peptide
SIQMYRYQA

SEQ ID NO: 32627 - protein, 9 aa, Artificial Sequence
  Description of Artificial Sequence: Synthetic peptide
TPLWYHRTE

SEQ ID NO: 32628 - protein, 9 aa, Artificial Sequence
  Description of Artificial Sequence: Synthetic peptide
WCGCYHIFN

SEQ ID NO: 32629 - protein, 9 aa, Artificial Sequence
  Description of Artificial Sequence: Synthetic peptide
WWFMYWADI

SEQ ID NO: 32630 - protein, 9 aa, Artificial Sequence
  Description of Artificial Sequence: Synthetic peptide
YPHKYWQMK

SEQ ID NO: 32631 - protein, 9 aa, Artificial Sequence
  Description of Artificial Sequence: Synthetic peptide
YRHEYAHYS

SEQ ID NO: 32632 - protein, 9 aa, Artificial Sequence
  Description of Artificial Sequence: Synthetic peptide
TAVLYETEF

SEQ ID NO: 32633 - protein, 9 aa, Artificial Sequence
  Description of Artificial Sequence: Synthetic peptide
ADHVYGTEQ

SEQ ID NO: 32634 - protein, 9 aa, Artificial Sequence
  Description of Artificial Sequence: Synthetic peptide
AINEYWDVP

SEQ ID NO: 32635 - protein, 9 aa, Artificial Sequence
  Description of Artificial Sequence: Synthetic peptide
ASDGYFMEL

SEQ ID NO: 32636 - protein, 9 aa, Artificial Sequence
  Description of Artificial Sequence: Synthetic peptide
ASGCYATMW

SEQ ID NO: 32637 - protein, 9 aa, Artificial Sequence
  Description of Artificial Sequence: Synthetic peptide
DIKTYMGLQ

SEQ ID NO: 32638 - protein, 9 aa, Artificial Sequence
  Description of Artificial Sequence: Synthetic peptide
DKGGYGCHE

SEQ ID NO: 32639 - protein, 9 aa, Artificial Sequence
  Description of Artificial Sequence: Synthetic peptide
DLVNYGNHG

SEQ ID NO: 32640 - protein, 9 aa, Artificial Sequence
  Description of Artificial Sequence: Synthetic peptide
DYQWYQVAR

SEQ ID NO: 32641 - protein, 9 aa, Artificial Sequence
  Description of Artificial Sequence: Synthetic peptide
EMRFYESGN

SEQ ID NO: 32642 - protein, 9 aa, Artificial Sequence
  Description of Artificial Sequence: Synthetic peptide
EQLQYEPSH

SEQ ID NO: 32643 - protein, 9 aa, Artificial Sequence
  Description of Artificial Sequence: Synthetic peptide
GILPYVKFQ

SEQ ID NO: 32644 - protein, 9 aa, Artificial Sequence
  Description of Artificial Sequence: Synthetic peptide
GSTHYTDAN

SEQ ID NO: 32645 - protein, 9 aa, Artificial Sequence
  Description of Artificial Sequence: Synthetic peptide
ICISYEGGT

SEQ ID NO: 32646 - protein, 9 aa, Artificial Sequence
  Description of Artificial Sequence: Synthetic peptide
ICQVYSKTG

SEQ ID NO: 32647 - protein, 9 aa, Artificial Sequence
  Description of Artificial Sequence: Synthetic peptide
IPMQYAHFK

SEQ ID NO: 32648 - protein, 9 aa, Artificial Sequence
  Description of Artificial Sequence: Synthetic peptide
IPVQYAHFK

SEQ ID NO: 32649 - protein, 9 aa, Artificial Sequence
  Description of Artificial Sequence: Synthetic peptide
IQDDYQLMT

SEQ ID NO: 32650 - protein, 9 aa, Artificial Sequence
  Description of Artificial Sequence: Synthetic peptide
LADLYDLSH

SEQ ID NO: 32651 - protein, 9 aa, Artificial Sequence
  Description of Artificial Sequence: Synthetic peptide
LEQFYEGNI

SEQ ID NO: 32652 - protein, 9 aa, Artificial Sequence
  Description of Artificial Sequence: Synthetic peptide
LGGDYFRSD

SEQ ID NO: 32653 - protein, 9 aa, Artificial Sequence
  Description of Artificial Sequence: Synthetic peptide
LKKWYETHG

SEQ ID NO: 32654 - protein, 9 aa, Artificial Sequence
  Description of Artificial Sequence: Synthetic peptide
MAEPYGLAT

SEQ ID NO: 32655 - protein, 9 aa, Artificial Sequence
  Description of Artificial Sequence: Synthetic peptide
MCDDYETSQ

SEQ ID NO: 32656 - protein, 9 aa, Artificial Sequence
  Description of Artificial Sequence: Synthetic peptide
MTKPYMTQC

SEQ ID NO: 32657 - protein, 9 aa, Artificial Sequence
  Description of Artificial Sequence: Synthetic peptide
MYLGYDMDC

SEQ ID NO: 32658 - protein, 9 aa, Artificial Sequence
  Description of Artificial Sequence: Synthetic peptide
NQSAYRVAE

SEQ ID NO: 32659 - protein, 9 aa, Artificial Sequence
  Description of Artificial Sequence: Synthetic peptide
QHEGYVRNG

SEQ ID NO: 32660 - protein, 9 aa, Artificial Sequence
  Description of Artificial Sequence: Synthetic peptide
QQPSYMVSC

SEQ ID NO: 32661 - protein, 9 aa, Artificial Sequence
  Description of Artificial Sequence: Synthetic peptide
QTPAYCHHQ

SEQ ID NO: 32662 - protein, 9 aa, Artificial Sequence
  Description of Artificial Sequence: Synthetic peptide
QYQWYAKIE

SEQ ID NO: 32663 - protein, 9 aa, Artificial Sequence
  Description of Artificial Sequence: Synthetic peptide
SAHWYCHRT

SEQ ID NO: 32664 - protein, 9 aa, Artificial Sequence
  Description of Artificial Sequence: Synthetic peptide
THYTYAVAQ

SEQ ID NO: 32665 - protein, 9 aa, Artificial Sequence
  Description of Artificial Sequence: Synthetic peptide
TNGHYHCKY

SEQ ID NO: 32666 - protein, 9 aa, Artificial Sequence
  Description of Artificial Sequence: Synthetic peptide
TTTIYRRNG

SEQ ID NO: 32667 - protein, 9 aa, Artificial Sequence
  Description of Artificial Sequence: Synthetic peptide
TTTIYSRNG

SEQ ID NO: 32668 - protein, 9 aa, Artificial Sequence
  Description of Artificial Sequence: Synthetic peptide
TYAKYALRG

SEQ ID NO: 32669 - protein, 9 aa, Artificial Sequence
  Description of Artificial Sequence: Synthetic peptide
VLNTYPCNH

SEQ ID NO: 32670 - protein, 9 aa, Artificial Sequence
  Description of Artificial Sequence: Synthetic peptide
YIRMYDIAS

SEQ ID NO: 32671 - protein, 9 aa, Artificial Sequence
  Description of Artificial Sequence: Synthetic peptide
YTMCYSHQS

SEQ ID NO: 32672 - protein, 9 aa, Artificial Sequence
  Description of Artificial Sequence: Synthetic peptide
YTQNYVFPP

SEQ ID NO: 32673 - protein, 9 aa, Artificial Sequence
  Description of Artificial Sequence: Synthetic peptide
SIDTYDHRN

SEQ ID NO: 32674 - protein, 9 aa, Artificial Sequence
  Description of Artificial Sequence: Synthetic peptide
EYSPYQVME

SEQ ID NO: 32675 - protein, 9 aa, Artificial Sequence
  Description of Artificial Sequence: Synthetic peptide
QHFWYEMES

SEQ ID NO: 32676 - protein, 9 aa, Artificial Sequence
  Description of Artificial Sequence: Synthetic peptide
QIQLYQNDE

SEQ ID NO: 32677 - protein, 9 aa, Artificial Sequence
  Description of Artificial Sequence: Synthetic peptide
MCFPYSCAA

SEQ ID NO: 32678 - protein, 9 aa, Artificial Sequence
  Description of Artificial Sequence: Synthetic peptide
QSEHYVLPC

SEQ ID NO: 32679 - protein, 9 aa, Artificial Sequence
  Description of Artificial Sequence: Synthetic peptide
RNLNYNTAV

SEQ ID NO: 32680 - protein, 9 aa, Artificial Sequence
  Description of Artificial Sequence: Synthetic peptide
ATNKYANAI

SEQ ID NO: 32681 - protein, 9 aa, Artificial Sequence
  Description of Artificial Sequence: Synthetic peptide
LLAKYMVHT

SEQ ID NO: 32682 - protein, 9 aa, Artificial Sequence
  Description of Artificial Sequence: Synthetic peptide
ITEQYDAFA

SEQ ID NO: 32683 - protein, 9 aa, Artificial Sequence
  Description of Artificial Sequence: Synthetic peptide
FRLDYDYKN

SEQ ID NO: 32684 - protein, 9 aa, Artificial Sequence
  Description of Artificial Sequence: Synthetic peptide
LPTQYQQQN

SEQ ID NO: 32685 - protein, 9 aa, Artificial Sequence
  Description of Artificial Sequence: Synthetic peptide
GQNGYGQCM

SEQ ID NO: 32686 - protein, 9 aa, Artificial Sequence
  Description of Artificial Sequence: Synthetic peptide
HSDWYMKYP

SEQ ID NO: 32687 - protein, 9 aa, Artificial Sequence
  Description of Artificial Sequence: Synthetic peptide
NMPAYQIQC

SEQ ID NO: 32688 - protein, 9 aa, Artificial Sequence
  Description of Artificial Sequence: Synthetic peptide
YISEYVMMV

SEQ ID NO: 32689 - protein, 9 aa, Artificial Sequence
  Description of Artificial Sequence: Synthetic peptide
NGNHYNAMR

SEQ ID NO: 32690 - protein, 9 aa, Artificial Sequence
  Description of Artificial Sequence: Synthetic peptide
DPGWYGLAP

SEQ ID NO: 32691 - protein, 9 aa, Artificial Sequence
  Description of Artificial Sequence: Synthetic peptide
VQMQYERLF

SEQ ID NO: 32692 - protein, 9 aa, Artificial Sequence
  Description of Artificial Sequence: Synthetic peptide
AYHCYMSWM

SEQ ID NO: 32693 - protein, 9 aa, Artificial Sequence
  Description of Artificial Sequence: Synthetic peptide
GDVSYDAEA

SEQ ID NO: 32694 - protein, 9 aa, Artificial Sequence
  Description of Artificial Sequence: Synthetic peptide
MMLGYMEQD

SEQ ID NO: 32695 - protein, 9 aa, Artificial Sequence
  Description of Artificial Sequence: Synthetic peptide
ESNKWNPYG

SEQ ID NO: 32696 - protein, 9 aa, Artificial Sequence
  Description of Artificial Sequence: Synthetic peptide
GIHAHNSTY

SEQ ID NO: 32697 - protein, 9 aa, Artificial Sequence
  Description of Artificial Sequence: Synthetic peptide
KFASANGPL

SEQ ID NO: 32698 - protein, 9 aa, Artificial Sequence
  Description of Artificial Sequence: Synthetic peptide
LCKTFNQSD

SEQ ID NO: 32699 - protein, 9 aa, Artificial Sequence
  Description of Artificial Sequence: Synthetic peptide
LGNMENPPP

SEQ ID NO: 32700 - protein, 9 aa, Artificial Sequence
  Description of Artificial Sequence: Synthetic peptide
LRVLGNMTC

SEQ ID NO: 32701 - protein, 9 aa, Artificial Sequence
  Description of Artificial Sequence: Synthetic peptide
MFQLPNHFC

SEQ ID NO: 32702 - protein, 9 aa, Artificial Sequence
  Description of Artificial Sequence: Synthetic peptide
NATQKNGMY

SEQ ID NO: 32703 - protein, 9 aa, Artificial Sequence
  Description of Artificial Sequence: Synthetic peptide
NPKPNNYQY

SEQ ID NO: 32704 - protein, 9 aa, Artificial Sequence
  Description of Artificial Sequence: Synthetic peptide
SSDAENRCG

SEQ ID NO: 32705 - protein, 9 aa, Artificial Sequence
  Description of Artificial Sequence: Synthetic peptide
DAGCSNDNG

SEQ ID NO: 32706 - protein, 9 aa, Artificial Sequence
  Description of Artificial Sequence: Synthetic peptide
GCLYANIAQ

SEQ ID NO: 32707 - protein, 9 aa, Artificial Sequence
  Description of Artificial Sequence: Synthetic peptide
GTATTNFDQ

SEQ ID NO: 32708 - protein, 9 aa, Artificial Sequence
  Description of Artificial Sequence: Synthetic peptide
LLFPRNVGG

SEQ ID NO: 32709 - protein, 9 aa, Artificial Sequence
  Description of Artificial Sequence: Synthetic peptide
MHRCRNTDQ

SEQ ID NO: 32710 - protein, 9 aa, Artificial Sequence
  Description of Artificial Sequence: Synthetic peptide
QAMTNNVRC

SEQ ID NO: 32711 - protein, 9 aa, Artificial Sequence
  Description of Artificial Sequence: Synthetic peptide
TLDVQNVQN

SEQ ID NO: 32712 - protein, 9 aa, Artificial Sequence
  Description of Artificial Sequence: Synthetic peptide
TSGYCNIGA

SEQ ID NO: 32713 - protein, 9 aa, Artificial Sequence
  Description of Artificial Sequence: Synthetic peptide
VAAQVNQSQ

SEQ ID NO: 32714 - protein, 9 aa, Artificial Sequence
  Description of Artificial Sequence: Synthetic peptide
VSNWENVAG

SEQ ID NO: 32715 - protein, 9 aa, Artificial Sequence
  Description of Artificial Sequence: Synthetic peptide
AASGLNAFK

SEQ ID NO: 32716 - protein, 9 aa, Artificial Sequence
  Description of Artificial Sequence: Synthetic peptide
AKSCFNGFE

SEQ ID NO: 32717 - protein, 9 aa, Artificial Sequence
  Description of Artificial Sequence: Synthetic peptide
ASNLMNISF

SEQ ID NO: 32718 - protein, 9 aa, Artificial Sequence
  Description of Artificial Sequence: Synthetic peptide
ASQWLNDSF

SEQ ID NO: 32719 - protein, 9 aa, Artificial Sequence
  Description of Artificial Sequence: Synthetic peptide
AWVMNNWWA

SEQ ID NO: 32720 - protein, 9 aa, Artificial Sequence
  Description of Artificial Sequence: Synthetic peptide
DKSEENRQE

SEQ ID NO: 32721 - protein, 9 aa, Artificial Sequence
  Description of Artificial Sequence: Synthetic peptide
ETSCVNLFN

SEQ ID NO: 32722 - protein, 9 aa, Artificial Sequence
  Description of Artificial Sequence: Synthetic peptide
FKESRNQGA

SEQ ID NO: 32723 - protein, 9 aa, Artificial Sequence
  Description of Artificial Sequence: Synthetic peptide
GAFYINNTF

SEQ ID NO: 32724 - protein, 9 aa, Artificial Sequence
  Description of Artificial Sequence: Synthetic peptide
GLTLANIGA

SEQ ID NO: 32725 - protein, 9 aa, Artificial Sequence
  Description of Artificial Sequence: Synthetic peptide
HEPLTNQVS

SEQ ID NO: 32726 - protein, 9 aa, Artificial Sequence
  Description of Artificial Sequence: Synthetic peptide
HPVDTNAGA

SEQ ID NO: 32727 - protein, 9 aa, Artificial Sequence
  Description of Artificial Sequence: Synthetic peptide
ITSLCNEFH

SEQ ID NO: 32728 - protein, 9 aa, Artificial Sequence
  Description of Artificial Sequence: Synthetic peptide
ITSLWNEFH

SEQ ID NO: 32729 - protein, 9 aa, Artificial Sequence
  Description of Artificial Sequence: Synthetic peptide
MHAERNANM

SEQ ID NO: 32730 - protein, 9 aa, Artificial Sequence
  Description of Artificial Sequence: Synthetic peptide
MTDQFNKMQ

SEQ ID NO: 32731 - protein, 9 aa, Artificial Sequence
  Description of Artificial Sequence: Synthetic peptide
MYAERNANM

SEQ ID NO: 32732 - protein, 9 aa, Artificial Sequence
  Description of Artificial Sequence: Synthetic peptide
MYVWRNDCA

SEQ ID NO: 32733 - protein, 9 aa, Artificial Sequence
  Description of Artificial Sequence: Synthetic peptide
NFRTINDNM

SEQ ID NO: 32734 - protein, 9 aa, Artificial Sequence
  Description of Artificial Sequence: Synthetic peptide
NIDIHNHEE

SEQ ID NO: 32735 - protein, 9 aa, Artificial Sequence
  Description of Artificial Sequence: Synthetic peptide
PLKGTNQIF

SEQ ID NO: 32736 - protein, 9 aa, Artificial Sequence
  Description of Artificial Sequence: Synthetic peptide
PMVIFNTDY

SEQ ID NO: 32737 - protein, 9 aa, Artificial Sequence
  Description of Artificial Sequence: Synthetic peptide
QCDYRNMHF

SEQ ID NO: 32738 - protein, 9 aa, Artificial Sequence
  Description of Artificial Sequence: Synthetic peptide
QGTHHNHVQ

SEQ ID NO: 32739 - protein, 9 aa, Artificial Sequence
  Description of Artificial Sequence: Synthetic peptide
QKVPVNDHQ

SEQ ID NO: 32740 - protein, 9 aa, Artificial Sequence
  Description of Artificial Sequence: Synthetic peptide
QMLNHNHHA

SEQ ID NO: 32741 - protein, 9 aa, Artificial Sequence
  Description of Artificial Sequence: Synthetic peptide
QRMITNWGC

SEQ ID NO: 32742 - protein, 9 aa, Artificial Sequence
  Description of Artificial Sequence: Synthetic peptide
QTDIRNVSG

SEQ ID NO: 32743 - protein, 9 aa, Artificial Sequence
  Description of Artificial Sequence: Synthetic peptide
QWQTTNGGA

SEQ ID NO: 32744 - protein, 9 aa, Artificial Sequence
  Description of Artificial Sequence: Synthetic peptide
RADQSNPCQ

SEQ ID NO: 32745 - protein, 9 aa, Artificial Sequence
  Description of Artificial Sequence: Synthetic peptide
RHFMINAGR

SEQ ID NO: 32746 - protein, 9 aa, Artificial Sequence
  Description of Artificial Sequence: Synthetic peptide
RTECCNVAA

SEQ ID NO: 32747 - protein, 9 aa, Artificial Sequence
  Description of Artificial Sequence: Synthetic peptide
RTSQENKWC

SEQ ID NO: 32748 - protein, 9 aa, Artificial Sequence
  Description of Artificial Sequence: Synthetic peptide
SAVEGNRHN

SEQ ID NO: 32749 - protein, 9 aa, Artificial Sequence
  Description of Artificial Sequence: Synthetic peptide
SCFEVNQAS

SEQ ID NO: 32750 - protein, 9 aa, Artificial Sequence
  Description of Artificial Sequence: Synthetic peptide
SLRNRNADY

SEQ ID NO: 32751 - protein, 9 aa, Artificial Sequence
  Description of Artificial Sequence: Synthetic peptide
SMVIFNTDY

SEQ ID NO: 32752 - protein, 9 aa, Artificial Sequence
  Description of Artificial Sequence: Synthetic peptide
SWICCNAST

SEQ ID NO: 32753 - protein, 9 aa, Artificial Sequence
  Description of Artificial Sequence: Synthetic peptide
SYVHWNWVS

SEQ ID NO: 32754 - protein, 9 aa, Artificial Sequence
  Description of Artificial Sequence: Synthetic peptide
TAYIHNSEQ

SEQ ID NO: 32755 - protein, 9 aa, Artificial Sequence
  Description of Artificial Sequence: Synthetic peptide
THNEVNYAQ

SEQ ID NO: 32756 - protein, 9 aa, Artificial Sequence
  Description of Artificial Sequence: Synthetic peptide
TTDQFNKMQ

SEQ ID NO: 32757 - protein, 9 aa, Artificial Sequence
  Description of Artificial Sequence: Synthetic peptide
WSHTANKYP

SEQ ID NO: 32758 - protein, 9 aa, Artificial Sequence
  Description of Artificial Sequence: Synthetic peptide
YILSMNGGE

SEQ ID NO: 32759 - protein, 9 aa, Artificial Sequence
  Description of Artificial Sequence: Synthetic peptide
YQVKFNVMC

SEQ ID NO: 32760 - protein, 9 aa, Artificial Sequence
  Description of Artificial Sequence: Synthetic peptide
YRPPCNRKD

SEQ ID NO: 32761 - protein, 9 aa, Artificial Sequence
  Description of Artificial Sequence: Synthetic peptide
YSTAHNEMP

SEQ ID NO: 32762 - protein, 9 aa, Artificial Sequence
  Description of Artificial Sequence: Synthetic peptide
DHWQFNTHM

SEQ ID NO: 32763 - protein, 9 aa, Artificial Sequence
  Description of Artificial Sequence: Synthetic peptide
EAMVINTES

SEQ ID NO: 32764 - protein, 9 aa, Artificial Sequence
  Description of Artificial Sequence: Synthetic peptide
QHEQSNHIW

SEQ ID NO: 32765 - protein, 9 aa, Artificial Sequence
  Description of Artificial Sequence: Synthetic peptide
FTSNRNWQA

SEQ ID NO: 32766 - protein, 9 aa, Artificial Sequence
  Description of Artificial Sequence: Synthetic peptide
RIVDGNACG

SEQ ID NO: 32767 - protein, 9 aa, Artificial Sequence
  Description of Artificial Sequence: Synthetic peptide
QPQSRNGAR

SEQ ID NO: 32768 - protein, 9 aa, Artificial Sequence
  Description of Artificial Sequence: Synthetic peptide
KISGLNDAS

SEQ ID NO: 32769 - protein, 9 aa, Artificial Sequence
  Description of Artificial Sequence: Synthetic peptide
QESMCNYWQ

SEQ ID NO: 32770 - protein, 9 aa, Artificial Sequence
  Description of Artificial Sequence: Synthetic peptide
TRETMNEWH

SEQ ID NO: 32771 - protein, 9 aa, Artificial Sequence
  Description of Artificial Sequence: Synthetic peptide
GAMLNNNAS

SEQ ID NO: 32772 - protein, 9 aa, Artificial Sequence
  Description of Artificial Sequence: Synthetic peptide
RMTPNNCQR

SEQ ID NO: 32773 - protein, 9 aa, Artificial Sequence
  Description of Artificial Sequence: Synthetic peptide
KIAAWNDFL

SEQ ID NO: 32774 - protein, 9 aa, Artificial Sequence
  Description of Artificial Sequence: Synthetic peptide
KTGATNLAW

SEQ ID NO: 32775 - protein, 9 aa, Artificial Sequence
  Description of Artificial Sequence: Synthetic peptide
SQAHQNRTC

SEQ ID NO: 32776 - protein, 9 aa, Artificial Sequence
  Description of Artificial Sequence: Synthetic peptide
VHHKTNRSY

SEQ ID NO: 32777 - protein, 9 aa, Artificial Sequence
  Description of Artificial Sequence: Synthetic peptide
STVGQNHCG

SEQ ID NO: 32778 - protein, 9 aa, Artificial Sequence
  Description of Artificial Sequence: Synthetic peptide
KMTNSNENS

SEQ ID NO: 32779 - protein, 9 aa, Artificial Sequence
  Description of Artificial Sequence: Synthetic peptide
LPSHCNLGS

SEQ ID NO: 32780 - protein, 9 aa, Artificial Sequence
  Description of Artificial Sequence: Synthetic peptide
TPQPMNVAT

SEQ ID NO: 32781 - protein, 9 aa, Artificial Sequence
  Description of Artificial Sequence: Synthetic peptide
KWTPREKDY

SEQ ID NO: 32782 - protein, 9 aa, Artificial Sequence
  Description of Artificial Sequence: Synthetic peptide
MSQKGFKAG

SEQ ID NO: 32783 - protein, 9 aa, Artificial Sequence
  Description of Artificial Sequence: Synthetic peptide
RKWMKAKAT

SEQ ID NO: 32784 - protein, 9 aa, Artificial Sequence
  Description of Artificial Sequence: Synthetic peptide
SGNPTMKNW

SEQ ID NO: 32785 - protein, 9 aa, Artificial Sequence
  Description of Artificial Sequence: Synthetic peptide
SSVCFPKAG

SEQ ID NO: 32786 - protein, 9 aa, Artificial Sequence
  Description of Artificial Sequence: Synthetic peptide
TWTMNEKDS

SEQ ID NO: 32787 - protein, 9 aa, Artificial Sequence
  Description of Artificial Sequence: Synthetic peptide
AHKPAKKWL

SEQ ID NO: 32788 - protein, 9 aa, Artificial Sequence
  Description of Artificial Sequence: Synthetic peptide
AIWQPSKMD

SEQ ID NO: 32789 - protein, 9 aa, Artificial Sequence
  Description of Artificial Sequence: Synthetic peptide
ALYYPEKYA

SEQ ID NO: 32790 - protein, 9 aa, Artificial Sequence
  Description of Artificial Sequence: Synthetic peptide
ETEPLPKQD

SEQ ID NO: 32791 - protein, 9 aa, Artificial Sequence
  Description of Artificial Sequence: Synthetic peptide
IMTPHWKAC

SEQ ID NO: 32792 - protein, 9 aa, Artificial Sequence
  Description of Artificial Sequence: Synthetic peptide
ITTEFMKAC

SEQ ID NO: 32793 - protein, 9 aa, Artificial Sequence
  Description of Artificial Sequence: Synthetic peptide
MIGISMKGC

SEQ ID NO: 32794 - protein, 9 aa, Artificial Sequence
  Description of Artificial Sequence: Synthetic peptide
MSSALEKCG

SEQ ID NO: 32795 - protein, 9 aa, Artificial Sequence
  Description of Artificial Sequence: Synthetic peptide
RQIEVTKWG

SEQ ID NO: 32796 - protein, 9 aa, Artificial Sequence
  Description of Artificial Sequence: Synthetic peptide
TERKMHKAA

SEQ ID NO: 32797 - protein, 9 aa, Artificial Sequence
  Description of Artificial Sequence: Synthetic peptide
TRASVMKYQ

SEQ ID NO: 32798 - protein, 9 aa, Artificial Sequence
  Description of Artificial Sequence: Synthetic peptide
AEALHIKAY

SEQ ID NO: 32799 - protein, 9 aa, Artificial Sequence
  Description of Artificial Sequence: Synthetic peptide
ANLKHAKFG

SEQ ID NO: 32800 - protein, 9 aa, Artificial Sequence
  Description of Artificial Sequence: Synthetic peptide
DFFYMDKLS

SEQ ID NO: 32801 - protein, 9 aa, Artificial Sequence
  Description of Artificial Sequence: Synthetic peptide
DIIWAQKAA

SEQ ID NO: 32802 - protein, 9 aa, Artificial Sequence
  Description of Artificial Sequence: Synthetic peptide
GFNPVIKYS

SEQ ID NO: 32803 - protein, 9 aa, Artificial Sequence
  Description of Artificial Sequence: Synthetic peptide
GLEWHTKDW

SEQ ID NO: 32804 - protein, 9 aa, Artificial Sequence
  Description of Artificial Sequence: Synthetic peptide
HQVTIFKDR

SEQ ID NO: 32805 - protein, 9 aa, Artificial Sequence
  Description of Artificial Sequence: Synthetic peptide
ICWLITKTE

SEQ ID NO: 32806 - protein, 9 aa, Artificial Sequence
  Description of Artificial Sequence: Synthetic peptide
KMYSSAKSY

SEQ ID NO: 32807 - protein, 9 aa, Artificial Sequence
  Description of Artificial Sequence: Synthetic peptide
LKHPTWKEE

SEQ ID NO: 32808 - protein, 9 aa, Artificial Sequence
  Description of Artificial Sequence: Synthetic peptide
LPGYVEKHQ

SEQ ID NO: 32809 - protein, 9 aa, Artificial Sequence
  Description of Artificial Sequence: Synthetic peptide
MQNACFKDP

SEQ ID NO: 32810 - protein, 9 aa, Artificial Sequence
  Description of Artificial Sequence: Synthetic peptide
NIYETLKRI

SEQ ID NO: 32811 - protein, 9 aa, Artificial Sequence
  Description of Artificial Sequence: Synthetic peptide
QKLNIQKQS

SEQ ID NO: 32812 - protein, 9 aa, Artificial Sequence
  Description of Artificial Sequence: Synthetic peptide
QLMMEEKVS

SEQ ID NO: 32813 - protein, 9 aa, Artificial Sequence
  Description of Artificial Sequence: Synthetic peptide
RASFNDKAG

SEQ ID NO: 32814 - protein, 9 aa, Artificial Sequence
  Description of Artificial Sequence: Synthetic peptide
RCVQPQKEG

SEQ ID NO: 32815 - protein, 9 aa, Artificial Sequence
  Description of Artificial Sequence: Synthetic peptide
SAEHSSKWK

SEQ ID NO: 32816 - protein, 9 aa, Artificial Sequence
  Description of Artificial Sequence: Synthetic peptide
SLGCFHKWE

SEQ ID NO: 32817 - protein, 9 aa, Artificial Sequence
  Description of Artificial Sequence: Synthetic peptide
SQWMIWKCR

SEQ ID NO: 32818 - protein, 9 aa, Artificial Sequence
  Description of Artificial Sequence: Synthetic peptide
TFLCTLKEE

SEQ ID NO: 32819 - protein, 9 aa, Artificial Sequence
  Description of Artificial Sequence: Synthetic peptide
TFLYTLKEE

SEQ ID NO: 32820 - protein, 9 aa, Artificial Sequence
  Description of Artificial Sequence: Synthetic peptide
WSAKSTKEQ

SEQ ID NO: 32821 - protein, 9 aa, Artificial Sequence
  Description of Artificial Sequence: Synthetic peptide
YYSPMVKAH

SEQ ID NO: 32822 - protein, 9 aa, Artificial Sequence
  Description of Artificial Sequence: Synthetic peptide
ETHQRCKMS

SEQ ID NO: 32823 - protein, 9 aa, Artificial Sequence
  Description of Artificial Sequence: Synthetic peptide
RTDVMMKVM

SEQ ID NO: 32824 - protein, 9 aa, Artificial Sequence
  Description of Artificial Sequence: Synthetic peptide
SCSFCPKDC

SEQ ID NO: 32825 - protein, 9 aa, Artificial Sequence
  Description of Artificial Sequence: Synthetic peptide
ATVHMPKHE

SEQ ID NO: 32826 - protein, 9 aa, Artificial Sequence
  Description of Artificial Sequence: Synthetic peptide
DWAWTMKIA

SEQ ID NO: 32827 - protein, 9 aa, Artificial Sequence
  Description of Artificial Sequence: Synthetic peptide
PDLCQDKLN

SEQ ID NO: 32828 - protein, 9 aa, Artificial Sequence
  Description of Artificial Sequence: Synthetic peptide
LFWQFGKQG

SEQ ID NO: 32829 - protein, 9 aa, Artificial Sequence
  Description of Artificial Sequence: Synthetic peptide
PRWQSEKCQ

SEQ ID NO: 32830 - protein, 9 aa, Artificial Sequence
  Description of Artificial Sequence: Synthetic peptide
TFTYEAKFW

SEQ ID NO: 32831 - protein, 9 aa, Artificial Sequence
  Description of Artificial Sequence: Synthetic peptide
NHDPSIKDQ

SEQ ID NO: 32832 - protein, 9 aa, Artificial Sequence
  Description of Artificial Sequence: Synthetic peptide
RKWMNAKAT

SEQ ID NO: 32833 - protein, 9 aa, Artificial Sequence
  Description of Artificial Sequence: Synthetic peptide
IKTTMVKED

SEQ ID NO: 32834 - protein, 9 aa, Artificial Sequence
  Description of Artificial Sequence: Synthetic peptide
FEEFTTISR

SEQ ID NO: 32835 - protein, 9 aa, Artificial Sequence
  Description of Artificial Sequence: Synthetic peptide
GGIFEQSSS

SEQ ID NO: 32836 - protein, 9 aa, Artificial Sequence
  Description of Artificial Sequence: Synthetic peptide
GSFWFTDSK

SEQ ID NO: 32837 - protein, 9 aa, Artificial Sequence
  Description of Artificial Sequence: Synthetic peptide
IAGPAWFSM

SEQ ID NO: 32838 - protein, 9 aa, Artificial Sequence
  Description of Artificial Sequence: Synthetic peptide
KQHYAYLSP

SEQ ID NO: 32839 - protein, 9 aa, Artificial Sequence
  Description of Artificial Sequence: Synthetic peptide
KSTIEPFSI

SEQ ID NO: 32840 - protein, 9 aa, Artificial Sequence
  Description of Artificial Sequence: Synthetic peptide
MSAECLHSD

SEQ ID NO: 32841 - protein, 9 aa, Artificial Sequence
  Description of Artificial Sequence: Synthetic peptide
NCIDMWWSS

SEQ ID NO: 32842 - protein, 9 aa, Artificial Sequence
  Description of Artificial Sequence: Synthetic peptide
PKSEEYTSD

SEQ ID NO: 32843 - protein, 9 aa, Artificial Sequence
  Description of Artificial Sequence: Synthetic peptide
QHNHMWSSW

SEQ ID NO: 32844 - protein, 9 aa, Artificial Sequence
  Description of Artificial Sequence: Synthetic peptide
QTMKFTSSW

SEQ ID NO: 32845 - protein, 9 aa, Artificial Sequence
  Description of Artificial Sequence: Synthetic peptide
RHAPTDISP

SEQ ID NO: 32846 - protein, 9 aa, Artificial Sequence
  Description of Artificial Sequence: Synthetic peptide
THAVLIRSK

SEQ ID NO: 32847 - protein, 9 aa, Artificial Sequence
  Description of Artificial Sequence: Synthetic peptide
TQESSRVSS

SEQ ID NO: 32848 - protein, 9 aa, Artificial Sequence
  Description of Artificial Sequence: Synthetic peptide
TSLKIYHSP

SEQ ID NO: 32849 - protein, 9 aa, Artificial Sequence
  Description of Artificial Sequence: Synthetic peptide
VEPISSQSY

SEQ ID NO: 32850 - protein, 9 aa, Artificial Sequence
  Description of Artificial Sequence: Synthetic peptide
WLMKWLESD

SEQ ID NO: 32851 - protein, 9 aa, Artificial Sequence
  Description of Artificial Sequence: Synthetic peptide
DCIDMWWSS

SEQ ID NO: 32852 - protein, 9 aa, Artificial Sequence
  Description of Artificial Sequence: Synthetic peptide
DFYTVSMSC

SEQ ID NO: 32853 - protein, 9 aa, Artificial Sequence
  Description of Artificial Sequence: Synthetic peptide
FMKFIEGSQ

SEQ ID NO: 32854 - protein, 9 aa, Artificial Sequence
  Description of Artificial Sequence: Synthetic peptide
KTGLPDISA

SEQ ID NO: 32855 - protein, 9 aa, Artificial Sequence
  Description of Artificial Sequence: Synthetic peptide
LGTFTCSSP

SEQ ID NO: 32856 - protein, 9 aa, Artificial Sequence
  Description of Artificial Sequence: Synthetic peptide
LSNTCCMSN

SEQ ID NO: 32857 - protein, 9 aa, Artificial Sequence
  Description of Artificial Sequence: Synthetic peptide
QWQLSWCSC

SEQ ID NO: 32858 - protein, 9 aa, Artificial Sequence
  Description of Artificial Sequence: Synthetic peptide
QWTQWAMSC

SEQ ID NO: 32859 - protein, 9 aa, Artificial Sequence
  Description of Artificial Sequence: Synthetic peptide
RCWHIPNSS

SEQ ID NO: 32860 - protein, 9 aa, Artificial Sequence
  Description of Artificial Sequence: Synthetic peptide
SHGWFHQSQ

SEQ ID NO: 32861 - protein, 9 aa, Artificial Sequence
  Description of Artificial Sequence: Synthetic peptide
TGAQAANSC

SEQ ID NO: 32862 - protein, 9 aa, Artificial Sequence
  Description of Artificial Sequence: Synthetic peptide
TWSYNVTSF

SEQ ID NO: 32863 - protein, 9 aa, Artificial Sequence
  Description of Artificial Sequence: Synthetic peptide
YTVIRCVSN

SEQ ID NO: 32864 - protein, 9 aa, Artificial Sequence
  Description of Artificial Sequence: Synthetic peptide
ALRVGWTSE

SEQ ID NO: 32865 - protein, 9 aa, Artificial Sequence
  Description of Artificial Sequence: Synthetic peptide
DKQAMSHSQ

SEQ ID NO: 32866 - protein, 9 aa, Artificial Sequence
  Description of Artificial Sequence: Synthetic peptide
DTVYNVLSW

SEQ ID NO: 32867 - protein, 9 aa, Artificial Sequence
  Description of Artificial Sequence: Synthetic peptide
EATDNLTSN

SEQ ID NO: 32868 - protein, 9 aa, Artificial Sequence
  Description of Artificial Sequence: Synthetic peptide
EDESLHMSW

SEQ ID NO: 32869 - protein, 9 aa, Artificial Sequence
  Description of Artificial Sequence: Synthetic peptide
EDESRHMSW

SEQ ID NO: 32870 - protein, 9 aa, Artificial Sequence
  Description of Artificial Sequence: Synthetic peptide
EHVNVTYSP

SEQ ID NO: 32871 - protein, 9 aa, Artificial Sequence
  Description of Artificial Sequence: Synthetic peptide
ESKSEQPSA

SEQ ID NO: 32872 - protein, 9 aa, Artificial Sequence
  Description of Artificial Sequence: Synthetic peptide
FLEAWANSM

SEQ ID NO: 32873 - protein, 9 aa, Artificial Sequence
  Description of Artificial Sequence: Synthetic peptide
FRDGMIVSC

SEQ ID NO: 32874 - protein, 9 aa, Artificial Sequence
  Description of Artificial Sequence: Synthetic peptide
GIGQPEDSP

SEQ ID NO: 32875 - protein, 9 aa, Artificial Sequence
  Description of Artificial Sequence: Synthetic peptide
ICATILRSA

SEQ ID NO: 32876 - protein, 9 aa, Artificial Sequence
  Description of Artificial Sequence: Synthetic peptide
KSGISEMSE

SEQ ID NO: 32877 - protein, 9 aa, Artificial Sequence
  Description of Artificial Sequence: Synthetic peptide
LGRDCSRSH

SEQ ID NO: 32878 - protein, 9 aa, Artificial Sequence
  Description of Artificial Sequence: Synthetic peptide
LNMATSLSR

SEQ ID NO: 32879 - protein, 9 aa, Artificial Sequence
  Description of Artificial Sequence: Synthetic peptide
LSKVQQGSY

SEQ ID NO: 32880 - protein, 9 aa, Artificial Sequence
  Description of Artificial Sequence: Synthetic peptide
LYQDLLYSE

SEQ ID NO: 32881 - protein, 9 aa, Artificial Sequence
  Description of Artificial Sequence: Synthetic peptide
NIVESTESP

SEQ ID NO: 32882 - protein, 9 aa, Artificial Sequence
  Description of Artificial Sequence: Synthetic peptide
NNPVLVASC

SEQ ID NO: 32883 - protein, 9 aa, Artificial Sequence
  Description of Artificial Sequence: Synthetic peptide
NNTYVMSSG

SEQ ID NO: 32884 - protein, 9 aa, Artificial Sequence
  Description of Artificial Sequence: Synthetic peptide
QAEYFDASA

SEQ ID NO: 32885 - protein, 9 aa, Artificial Sequence
  Description of Artificial Sequence: Synthetic peptide
RSMWPPSSG

SEQ ID NO: 32886 - protein, 9 aa, Artificial Sequence
  Description of Artificial Sequence: Synthetic peptide
TAHCFTVSP

SEQ ID NO: 32887 - protein, 9 aa, Artificial Sequence
  Description of Artificial Sequence: Synthetic peptide
TASLLWYSN

SEQ ID NO: 32888 - protein, 9 aa, Artificial Sequence
  Description of Artificial Sequence: Synthetic peptide
TEEKCYISP

SEQ ID NO: 32889 - protein, 9 aa, Artificial Sequence
  Description of Artificial Sequence: Synthetic peptide
TQLPTMQSL

SEQ ID NO: 32890 - protein, 9 aa, Artificial Sequence
  Description of Artificial Sequence: Synthetic peptide
TSSPHGASG

SEQ ID NO: 32891 - protein, 9 aa, Artificial Sequence
  Description of Artificial Sequence: Synthetic peptide
VDRFICASW

SEQ ID NO: 32892 - protein, 9 aa, Artificial Sequence
  Description of Artificial Sequence: Synthetic peptide
VSSLHDDSE

SEQ ID NO: 32893 - protein, 9 aa, Artificial Sequence
  Description of Artificial Sequence: Synthetic peptide
DHDFAQFSG

SEQ ID NO: 32894 - protein, 9 aa, Artificial Sequence
  Description of Artificial Sequence: Synthetic peptide
NNGPIWISS

SEQ ID NO: 32895 - protein, 9 aa, Artificial Sequence
  Description of Artificial Sequence: Synthetic peptide
PDAMWMASS

SEQ ID NO: 32896 - protein, 9 aa, Artificial Sequence
  Description of Artificial Sequence: Synthetic peptide
SDRMVSISA

SEQ ID NO: 32897 - protein, 9 aa, Artificial Sequence
  Description of Artificial Sequence: Synthetic peptide
AAMSSSHSY

SEQ ID NO: 32898 - protein, 9 aa, Artificial Sequence
  Description of Artificial Sequence: Synthetic peptide
VHSFHVESY

SEQ ID NO: 32899 - protein, 9 aa, Artificial Sequence
  Description of Artificial Sequence: Synthetic peptide
LRVSQSFSN

SEQ ID NO: 32900 - protein, 9 aa, Artificial Sequence
  Description of Artificial Sequence: Synthetic peptide
ATMEKCRSI

SEQ ID NO: 32901 - protein, 9 aa, Artificial Sequence
  Description of Artificial Sequence: Synthetic peptide
LLFPLMSSS

SEQ ID NO: 32902 - protein, 9 aa, Artificial Sequence
  Description of Artificial Sequence: Synthetic peptide
NTECRQNSD

SEQ ID NO: 32903 - protein, 9 aa, Artificial Sequence
  Description of Artificial Sequence: Synthetic peptide
YGENISPSP

SEQ ID NO: 32904 - protein, 9 aa, Artificial Sequence
  Description of Artificial Sequence: Synthetic peptide
TWQSMVNSE

SEQ ID NO: 32905 - protein, 9 aa, Artificial Sequence
  Description of Artificial Sequence: Synthetic peptide
TSQYSSVST

SEQ ID NO: 32906 - protein, 9 aa, Artificial Sequence
  Description of Artificial Sequence: Synthetic peptide
GAQSMQFSC

SEQ ID NO: 32907 - protein, 9 aa, Artificial Sequence
  Description of Artificial Sequence: Synthetic peptide
KTYSAMYSP

SEQ ID NO: 32908 - protein, 9 aa, Artificial Sequence
  Description of Artificial Sequence: Synthetic peptide
ENTMWQSSQ

SEQ ID NO: 32909 - protein, 9 aa, Artificial Sequence
  Description of Artificial Sequence: Synthetic peptide
KLKESMESA

SEQ ID NO: 32910 - protein, 9 aa, Artificial Sequence
  Description of Artificial Sequence: Synthetic peptide
QWMHCQLSR

SEQ ID NO: 32911 - protein, 9 aa, Artificial Sequence
  Description of Artificial Sequence: Synthetic peptide
MQQHMKYSL

SEQ ID NO: 32912 - protein, 9 aa, Artificial Sequence
  Description of Artificial Sequence: Synthetic peptide
ECRMAVQSC

SEQ ID NO: 32913 - protein, 9 aa, Artificial Sequence
  Description of Artificial Sequence: Synthetic peptide
GAANRIQSW

SEQ ID NO: 32914 - protein, 9 aa, Artificial Sequence
  Description of Artificial Sequence: Synthetic peptide
QRNEMSASR

SEQ ID NO: 32915 - protein, 9 aa, Artificial Sequence
  Description of Artificial Sequence: Synthetic peptide
DMTLQSVSS

SEQ ID NO: 32916 - protein, 9 aa, Artificial Sequence
  Description of Artificial Sequence: Synthetic peptide
ENGAISEPA

SEQ ID NO: 32917 - protein, 9 aa, Artificial Sequence
  Description of Artificial Sequence: Synthetic peptide
HGNLMYTGA

SEQ ID NO: 32918 - protein, 9 aa, Artificial Sequence
  Description of Artificial Sequence: Synthetic peptide
ISVCKQMIA

SEQ ID NO: 32919 - protein, 9 aa, Artificial Sequence
  Description of Artificial Sequence: Synthetic peptide
IWQYKDSDA

SEQ ID NO: 32920 - protein, 9 aa, Artificial Sequence
  Description of Artificial Sequence: Synthetic peptide
LSAFMGRNA

SEQ ID NO: 32921 - protein, 9 aa, Artificial Sequence
  Description of Artificial Sequence: Synthetic peptide
MTNIAWQKA

SEQ ID NO: 32922 - protein, 9 aa, Artificial Sequence
  Description of Artificial Sequence: Synthetic peptide
QSAFMGRNA

SEQ ID NO: 32923 - protein, 9 aa, Artificial Sequence
  Description of Artificial Sequence: Synthetic peptide
QSSLEAGAA

SEQ ID NO: 32924 - protein, 9 aa, Artificial Sequence
  Description of Artificial Sequence: Synthetic peptide
SEKFIIRTA

SEQ ID NO: 32925 - protein, 9 aa, Artificial Sequence
  Description of Artificial Sequence: Synthetic peptide
SIGFWMRQA

SEQ ID NO: 32926 - protein, 9 aa, Artificial Sequence
  Description of Artificial Sequence: Synthetic peptide
TGQWTFATA

SEQ ID NO: 32927 - protein, 9 aa, Artificial Sequence
  Description of Artificial Sequence: Synthetic peptide
WEFSLADVA

SEQ ID NO: 32928 - protein, 9 aa, Artificial Sequence
  Description of Artificial Sequence: Synthetic peptide
AIVKMGNPA

SEQ ID NO: 32929 - protein, 9 aa, Artificial Sequence
  Description of Artificial Sequence: Synthetic peptide
ATNDKVHCA

SEQ ID NO: 32930 - protein, 9 aa, Artificial Sequence
  Description of Artificial Sequence: Synthetic peptide
DASESHFEA

SEQ ID NO: 32931 - protein, 9 aa, Artificial Sequence
  Description of Artificial Sequence: Synthetic peptide
DQHEVQNVA

SEQ ID NO: 32932 - protein, 9 aa, Artificial Sequence
  Description of Artificial Sequence: Synthetic peptide
EWLPCGDLA

SEQ ID NO: 32933 - protein, 9 aa, Artificial Sequence
  Description of Artificial Sequence: Synthetic peptide
FGRLHQWLA

SEQ ID NO: 32934 - protein, 9 aa, Artificial Sequence
  Description of Artificial Sequence: Synthetic peptide
GCHSFCEKA

SEQ ID NO: 32935 - protein, 9 aa, Artificial Sequence
  Description of Artificial Sequence: Synthetic peptide
HCSQMDTYA

SEQ ID NO: 32936 - protein, 9 aa, Artificial Sequence
  Description of Artificial Sequence: Synthetic peptide
KAESFTYNA

SEQ ID NO: 32937 - protein, 9 aa, Artificial Sequence
  Description of Artificial Sequence: Synthetic peptide
LITTGEFLA

SEQ ID NO: 32938 - protein, 9 aa, Artificial Sequence
  Description of Artificial Sequence: Synthetic peptide
MSNSIRWMA

SEQ ID NO: 32939 - protein, 9 aa, Artificial Sequence
  Description of Artificial Sequence: Synthetic peptide
NAELSCYGA

SEQ ID NO: 32940 - protein, 9 aa, Artificial Sequence
  Description of Artificial Sequence: Synthetic peptide
NFAYTMLNA

SEQ ID NO: 32941 - protein, 9 aa, Artificial Sequence
  Description of Artificial Sequence: Synthetic peptide
QNSHVIHEA

SEQ ID NO: 32942 - protein, 9 aa, Artificial Sequence
  Description of Artificial Sequence: Synthetic peptide
SGTYLYDNA

SEQ ID NO: 32943 - protein, 9 aa, Artificial Sequence
  Description of Artificial Sequence: Synthetic peptide
TQTKMMDMA

SEQ ID NO: 32944 - protein, 9 aa, Artificial Sequence
  Description of Artificial Sequence: Synthetic peptide
YMTEWCSWA

SEQ ID NO: 32945 - protein, 9 aa, Artificial Sequence
  Description of Artificial Sequence: Synthetic peptide
EIVQPQCYA

SEQ ID NO: 32946 - protein, 9 aa, Artificial Sequence
  Description of Artificial Sequence: Synthetic peptide
AGGQKPAFA

SEQ ID NO: 32947 - protein, 9 aa, Artificial Sequence
  Description of Artificial Sequence: Synthetic peptide
AISCGKWYA

SEQ ID NO: 32948 - protein, 9 aa, Artificial Sequence
  Description of Artificial Sequence: Synthetic peptide
ALAWMEFCA

SEQ ID NO: 32949 - protein, 9 aa, Artificial Sequence
  Description of Artificial Sequence: Synthetic peptide
FFGTPYHMA

SEQ ID NO: 32950 - protein, 9 aa, Artificial Sequence
  Description of Artificial Sequence: Synthetic peptide
GFELVKAYA

SEQ ID NO: 32951 - protein, 9 aa, Artificial Sequence
  Description of Artificial Sequence: Synthetic peptide
HTMNGVLYA

SEQ ID NO: 32952 - protein, 9 aa, Artificial Sequence
  Description of Artificial Sequence: Synthetic peptide
IDSWQPCDA

SEQ ID NO: 32953 - protein, 9 aa, Artificial Sequence
  Description of Artificial Sequence: Synthetic peptide
KCALIQDIA

SEQ ID NO: 32954 - protein, 9 aa, Artificial Sequence
  Description of Artificial Sequence: Synthetic peptide
KHAQMSSDA

SEQ ID NO: 32955 - protein, 9 aa, Artificial Sequence
  Description of Artificial Sequence: Synthetic peptide
KKGDSTREA

SEQ ID NO: 32956 - protein, 9 aa, Artificial Sequence
  Description of Artificial Sequence: Synthetic peptide
LMMVILDTA

SEQ ID NO: 32957 - protein, 9 aa, Artificial Sequence
  Description of Artificial Sequence: Synthetic peptide
MAANCEVFA

SEQ ID NO: 32958 - protein, 9 aa, Artificial Sequence
  Description of Artificial Sequence: Synthetic peptide
MAEYTDAAA

SEQ ID NO: 32959 - protein, 9 aa, Artificial Sequence
  Description of Artificial Sequence: Synthetic peptide
MWNYGHNYA

SEQ ID NO: 32960 - protein, 9 aa, Artificial Sequence
  Description of Artificial Sequence: Synthetic peptide
MYGQNWNVA

SEQ ID NO: 32961 - protein, 9 aa, Artificial Sequence
  Description of Artificial Sequence: Synthetic peptide
NCIHNWQHA

SEQ ID NO: 32962 - protein, 9 aa, Artificial Sequence
  Description of Artificial Sequence: Synthetic peptide
NHFLASVLA

SEQ ID NO: 32963 - protein, 9 aa, Artificial Sequence
  Description of Artificial Sequence: Synthetic peptide
NSKIVDYCA

SEQ ID NO: 32964 - protein, 9 aa, Artificial Sequence
  Description of Artificial Sequence: Synthetic peptide
QCWFRGDYA

SEQ ID NO: 32965 - protein, 9 aa, Artificial Sequence
  Description of Artificial Sequence: Synthetic peptide
QCWLRGDYA

SEQ ID NO: 32966 - protein, 9 aa, Artificial Sequence
  Description of Artificial Sequence: Synthetic peptide
RATCGISMA

SEQ ID NO: 32967 - protein, 9 aa, Artificial Sequence
  Description of Artificial Sequence: Synthetic peptide
RKHGLLFMA

SEQ ID NO: 32968 - protein, 9 aa, Artificial Sequence
  Description of Artificial Sequence: Synthetic peptide
RMAHTFWDA

SEQ ID NO: 32969 - protein, 9 aa, Artificial Sequence
  Description of Artificial Sequence: Synthetic peptide
SSFPMWWIA

SEQ ID NO: 32970 - protein, 9 aa, Artificial Sequence
  Description of Artificial Sequence: Synthetic peptide
SSGLNWRDA

SEQ ID NO: 32971 - protein, 9 aa, Artificial Sequence
  Description of Artificial Sequence: Synthetic peptide
STGSHGVCA

SEQ ID NO: 32972 - protein, 9 aa, Artificial Sequence
  Description of Artificial Sequence: Synthetic peptide
WTKWECCVA

SEQ ID NO: 32973 - protein, 9 aa, Artificial Sequence
  Description of Artificial Sequence: Synthetic peptide
KMLPTCSDA

SEQ ID NO: 32974 - protein, 9 aa, Artificial Sequence
  Description of Artificial Sequence: Synthetic peptide
KPNPFVAWA

SEQ ID NO: 32975 - protein, 9 aa, Artificial Sequence
  Description of Artificial Sequence: Synthetic peptide
FGQFCCQVA

SEQ ID NO: 32976 - protein, 9 aa, Artificial Sequence
  Description of Artificial Sequence: Synthetic peptide
MPEKDGCPA

SEQ ID NO: 32977 - protein, 9 aa, Artificial Sequence
  Description of Artificial Sequence: Synthetic peptide
DCDWQSAMA

SEQ ID NO: 32978 - protein, 9 aa, Artificial Sequence
  Description of Artificial Sequence: Synthetic peptide
ALQFVSSTA

SEQ ID NO: 32979 - protein, 9 aa, Artificial Sequence
  Description of Artificial Sequence: Synthetic peptide
AWDANLAFA

SEQ ID NO: 32980 - protein, 9 aa, Artificial Sequence
  Description of Artificial Sequence: Synthetic peptide
QKGMMLDCA

SEQ ID NO: 32981 - protein, 9 aa, Artificial Sequence
  Description of Artificial Sequence: Synthetic peptide
VFGSTRSAA

SEQ ID NO: 32982 - protein, 9 aa, Artificial Sequence
  Description of Artificial Sequence: Synthetic peptide
RGGWCMRKA

SEQ ID NO: 32983 - protein, 9 aa, Artificial Sequence
  Description of Artificial Sequence: Synthetic peptide
INENMQWLA

SEQ ID NO: 32984 - protein, 9 aa, Artificial Sequence
  Description of Artificial Sequence: Synthetic peptide
PPMPVSHFA

SEQ ID NO: 32985 - protein, 9 aa, Artificial Sequence
  Description of Artificial Sequence: Synthetic peptide
KRTIEHPCA

SEQ ID NO: 32986 - protein, 9 aa, Artificial Sequence
  Description of Artificial Sequence: Synthetic peptide
RQMCMAHHA

SEQ ID NO: 32987 - protein, 9 aa, Artificial Sequence
  Description of Artificial Sequence: Synthetic peptide
TSEPHCSYA

SEQ ID NO: 32988 - protein, 9 aa, Artificial Sequence
  Description of Artificial Sequence: Synthetic peptide
ICNMDFRCA

SEQ ID NO: 32989 - protein, 9 aa, Artificial Sequence
  Description of Artificial Sequence: Synthetic peptide
AHAWLQHWA

SEQ ID NO: 32990 - protein, 9 aa, Artificial Sequence
  Description of Artificial Sequence: Synthetic peptide
HIHMSDRGA

SEQ ID NO: 32991 - protein, 9 aa, Artificial Sequence
  Description of Artificial Sequence: Synthetic peptide
AADAETPWF

SEQ ID NO: 32992 - protein, 9 aa, Artificial Sequence
  Description of Artificial Sequence: Synthetic peptide
AADPRADCP

SEQ ID NO: 32993 - protein, 9 aa, Artificial Sequence
  Description of Artificial Sequence: Synthetic peptide
AADPRGDCP

SEQ ID NO: 32994 - protein, 9 aa, Artificial Sequence
  Description of Artificial Sequence: Synthetic peptide
AADPRIDCP

SEQ ID NO: 32995 - protein, 9 aa, Artificial Sequence
  Description of Artificial Sequence: Synthetic peptide
AADPRVDCA

SEQ ID NO: 32996 - protein, 9 aa, Artificial Sequence
  Description of Artificial Sequence: Synthetic peptide
AADPRVDCL

SEQ ID NO: 32997 - protein, 9 aa, Artificial Sequence
  Description of Artificial Sequence: Synthetic peptide
AADPRVDCR

SEQ ID NO: 32998 - protein, 9 aa, Artificial Sequence
  Description of Artificial Sequence: Synthetic peptide
AADPRVECP

SEQ ID NO: 32999 - protein, 9 aa, Artificial Sequence
  Description of Artificial Sequence: Synthetic peptide
AADPTKSWC

SEQ ID NO: 33000 - protein, 9 aa, Artificial Sequence
  Description of Artificial Sequence: Synthetic peptide
AADSETPWY

SEQ ID NO: 33001 - protein, 9 aa, Artificial Sequence
  Description of Artificial Sequence: Synthetic peptide
AASPYITYR

SEQ ID NO: 33002 - protein, 9 aa, Artificial Sequence
  Description of Artificial Sequence: Synthetic peptide
AEHCYRHKH

SEQ ID NO: 33003 - protein, 9 aa, Artificial Sequence
  Description of Artificial Sequence: Synthetic peptide
AEPFPCDWS

SEQ ID NO: 33004 - protein, 9 aa, Artificial Sequence
  Description of Artificial Sequence: Synthetic peptide
AFFYMDKLS

SEQ ID NO: 33005 - protein, 9 aa, Artificial Sequence
  Description of Artificial Sequence: Synthetic peptide
AIVCRVNYP

SEQ ID NO: 33006 - protein, 9 aa, Artificial Sequence
  Description of Artificial Sequence: Synthetic peptide
AKRDMDPAQ

SEQ ID NO: 33007 - protein, 9 aa, Artificial Sequence
  Description of Artificial Sequence: Synthetic peptide
AKRDMDPAS

SEQ ID NO: 33008 - protein, 9 aa, Artificial Sequence
  Description of Artificial Sequence: Synthetic peptide
AKRNMDPAP

SEQ ID NO: 33009 - protein, 9 aa, Artificial Sequence
  Description of Artificial Sequence: Synthetic peptide
ANETNDNFH

SEQ ID NO: 33010 - protein, 9 aa, Artificial Sequence
  Description of Artificial Sequence: Synthetic peptide
ANVGCIMIL

SEQ ID NO: 33011 - protein, 9 aa, Artificial Sequence
  Description of Artificial Sequence: Synthetic peptide
ASARYIDFT

SEQ ID NO: 33012 - protein, 9 aa, Artificial Sequence
  Description of Artificial Sequence: Synthetic peptide
ASWCSDERC

SEQ ID NO: 33013 - protein, 9 aa, Artificial Sequence
  Description of Artificial Sequence: Synthetic peptide
ATAGCIMIL

SEQ ID NO: 33014 - protein, 9 aa, Artificial Sequence
  Description of Artificial Sequence: Synthetic peptide
ATDPRVDCP

SEQ ID NO: 33015 - protein, 9 aa, Artificial Sequence
  Description of Artificial Sequence: Synthetic peptide
ATVGFIMIL

SEQ ID NO: 33016 - protein, 9 aa, Artificial Sequence
  Description of Artificial Sequence: Synthetic peptide
AVATRAMYY

SEQ ID NO: 33017 - protein, 9 aa, Artificial Sequence
  Description of Artificial Sequence: Synthetic peptide
AVDPRVDCP

SEQ ID NO: 33018 - protein, 9 aa, Artificial Sequence
  Description of Artificial Sequence: Synthetic peptide
CAFQCYRSP

SEQ ID NO: 33019 - protein, 9 aa, Artificial Sequence
  Description of Artificial Sequence: Synthetic peptide
CAFVQQNFQ

SEQ ID NO: 33020 - protein, 9 aa, Artificial Sequence
  Description of Artificial Sequence: Synthetic peptide
CAGMQATGD

SEQ ID NO: 33021 - protein, 9 aa, Artificial Sequence
  Description of Artificial Sequence: Synthetic peptide
CAHHLNQTI

SEQ ID NO: 33022 - protein, 9 aa, Artificial Sequence
  Description of Artificial Sequence: Synthetic peptide
CAIFNTVDQ

SEQ ID NO: 33023 - protein, 9 aa, Artificial Sequence
  Description of Artificial Sequence: Synthetic peptide
CAIHTQSHS

SEQ ID NO: 33024 - protein, 9 aa, Artificial Sequence
  Description of Artificial Sequence: Synthetic peptide
CAIMCSAGP

SEQ ID NO: 33025 - protein, 9 aa, Artificial Sequence
  Description of Artificial Sequence: Synthetic peptide
CAIMFSAGQ

SEQ ID NO: 33026 - protein, 9 aa, Artificial Sequence
  Description of Artificial Sequence: Synthetic peptide
CAIMFSAGT

SEQ ID NO: 33027 - protein, 9 aa, Artificial Sequence
  Description of Artificial Sequence: Synthetic peptide
CAIMLKHMT

SEQ ID NO: 33028 - protein, 9 aa, Artificial Sequence
  Description of Artificial Sequence: Synthetic peptide
CAIMLQHMA

SEQ ID NO: 33029 - protein, 9 aa, Artificial Sequence
  Description of Artificial Sequence: Synthetic peptide
CAIMLQHMI

SEQ ID NO: 33030 - protein, 9 aa, Artificial Sequence
  Description of Artificial Sequence: Synthetic peptide
CALHTRSHS

SEQ ID NO: 33031 - protein, 9 aa, Artificial Sequence
  Description of Artificial Sequence: Synthetic peptide
CALMFSAGP

SEQ ID NO: 33032 - protein, 9 aa, Artificial Sequence
  Description of Artificial Sequence: Synthetic peptide
CALPVRVAM

SEQ ID NO: 33033 - protein, 9 aa, Artificial Sequence
  Description of Artificial Sequence: Synthetic peptide
CALPYAGSR

SEQ ID NO: 33034 - protein, 9 aa, Artificial Sequence
  Description of Artificial Sequence: Synthetic peptide
CALSMYSHE

SEQ ID NO: 33035 - protein, 9 aa, Artificial Sequence
  Description of Artificial Sequence: Synthetic peptide
CANHLNKTI

SEQ ID NO: 33036 - protein, 9 aa, Artificial Sequence
  Description of Artificial Sequence: Synthetic peptide
CANHLNQTM

SEQ ID NO: 33037 - protein, 9 aa, Artificial Sequence
  Description of Artificial Sequence: Synthetic peptide
CANHLNRTI

SEQ ID NO: 33038 - protein, 9 aa, Artificial Sequence
  Description of Artificial Sequence: Synthetic peptide
CANHLSQTI

SEQ ID NO: 33039 - protein, 9 aa, Artificial Sequence
  Description of Artificial Sequence: Synthetic peptide
CANHVNQTI

SEQ ID NO: 33040 - protein, 9 aa, Artificial Sequence
  Description of Artificial Sequence: Synthetic peptide
CAPISAAPV

SEQ ID NO: 33041 - protein, 9 aa, Artificial Sequence
  Description of Artificial Sequence: Synthetic peptide
CARLIDWCC

SEQ ID NO: 33042 - protein, 9 aa, Artificial Sequence
  Description of Artificial Sequence: Synthetic peptide
CASMFSAGP

SEQ ID NO: 33043 - protein, 9 aa, Artificial Sequence
  Description of Artificial Sequence: Synthetic peptide
CATHLNQTI

SEQ ID NO: 33044 - protein, 9 aa, Artificial Sequence
  Description of Artificial Sequence: Synthetic peptide
CATVKMWHT

SEQ ID NO: 33045 - protein, 9 aa, Artificial Sequence
  Description of Artificial Sequence: Synthetic peptide
CAVMFSAGP

SEQ ID NO: 33046 - protein, 9 aa, Artificial Sequence
  Description of Artificial Sequence: Synthetic peptide
CAVMKFSEH

SEQ ID NO: 33047 - protein, 9 aa, Artificial Sequence
  Description of Artificial Sequence: Synthetic peptide
CAVYFAKCA

SEQ ID NO: 33048 - protein, 9 aa, Artificial Sequence
  Description of Artificial Sequence: Synthetic peptide
CAVYFGKCV

SEQ ID NO: 33049 - protein, 9 aa, Artificial Sequence
  Description of Artificial Sequence: Synthetic peptide
CAVYFGRCA

SEQ ID NO: 33050 - protein, 9 aa, Artificial Sequence
  Description of Artificial Sequence: Synthetic peptide
CAVYYGKCA

SEQ ID NO: 33051 - protein, 9 aa, Artificial Sequence
  Description of Artificial Sequence: Synthetic peptide
CAYFKRHPD

SEQ ID NO: 33052 - protein, 9 aa, Artificial Sequence
  Description of Artificial Sequence: Synthetic peptide
CAYFSMMDR

SEQ ID NO: 33053 - protein, 9 aa, Artificial Sequence
  Description of Artificial Sequence: Synthetic peptide
CAYHLNQTI

SEQ ID NO: 33054 - protein, 9 aa, Artificial Sequence
  Description of Artificial Sequence: Synthetic peptide
CCLYYVNVE

SEQ ID NO: 33055 - protein, 9 aa, Artificial Sequence
  Description of Artificial Sequence: Synthetic peptide
CCTIKQMDI

SEQ ID NO: 33056 - protein, 9 aa, Artificial Sequence
  Description of Artificial Sequence: Synthetic peptide
CCVWEFNYP

SEQ ID NO: 33057 - protein, 9 aa, Artificial Sequence
  Description of Artificial Sequence: Synthetic peptide
CDHQFIDQA

SEQ ID NO: 33058 - protein, 9 aa, Artificial Sequence
  Description of Artificial Sequence: Synthetic peptide
CEHFKRHPD

SEQ ID NO: 33059 - protein, 9 aa, Artificial Sequence
  Description of Artificial Sequence: Synthetic peptide
CERLTQNVD

SEQ ID NO: 33060 - protein, 9 aa, Artificial Sequence
  Description of Artificial Sequence: Synthetic peptide
CEYFKRDPD

SEQ ID NO: 33061 - protein, 9 aa, Artificial Sequence
  Description of Artificial Sequence: Synthetic peptide
CEYFKRHPA

SEQ ID NO: 33062 - protein, 9 aa, Artificial Sequence
  Description of Artificial Sequence: Synthetic peptide
CEYFKRHPG

SEQ ID NO: 33063 - protein, 9 aa, Artificial Sequence
  Description of Artificial Sequence: Synthetic peptide
CEYFKRHTD

SEQ ID NO: 33064 - protein, 9 aa, Artificial Sequence
  Description of Artificial Sequence: Synthetic peptide
CEYFKRRPD

SEQ ID NO: 33065 - protein, 9 aa, Artificial Sequence
  Description of Artificial Sequence: Synthetic peptide
CEYFKRYPD

SEQ ID NO: 33066 - protein, 9 aa, Artificial Sequence
  Description of Artificial Sequence: Synthetic peptide
CEYIKRHPD

SEQ ID NO: 33067 - protein, 9 aa, Artificial Sequence
  Description of Artificial Sequence: Synthetic peptide
CFHPYHQAH

SEQ ID NO: 33068 - protein, 9 aa, Artificial Sequence
  Description of Artificial Sequence: Synthetic peptide
CFHQYNQAH

SEQ ID NO: 33069 - protein, 9 aa, Artificial Sequence
  Description of Artificial Sequence: Synthetic peptide
CFLWEFNYP

SEQ ID NO: 33070 - protein, 9 aa, Artificial Sequence
  Description of Artificial Sequence: Synthetic peptide
CFMALSFHW

SEQ ID NO: 33071 - protein, 9 aa, Artificial Sequence
  Description of Artificial Sequence: Synthetic peptide
CFMGLSFHL

SEQ ID NO: 33072 - protein, 9 aa, Artificial Sequence
  Description of Artificial Sequence: Synthetic peptide
CFMVLSFHW

SEQ ID NO: 33073 - protein, 9 aa, Artificial Sequence
  Description of Artificial Sequence: Synthetic peptide
CFPVYKDWS

SEQ ID NO: 33074 - protein, 9 aa, Artificial Sequence
  Description of Artificial Sequence: Synthetic peptide
CFVGLSFHW

SEQ ID NO: 33075 - protein, 9 aa, Artificial Sequence
  Description of Artificial Sequence: Synthetic peptide
CFVLEFNYP

SEQ ID NO: 33076 - protein, 9 aa, Artificial Sequence
  Description of Artificial Sequence: Synthetic peptide
CFVWAFNYP

SEQ ID NO: 33077 - protein, 9 aa, Artificial Sequence
  Description of Artificial Sequence: Synthetic peptide
CFVWEFDYP

SEQ ID NO: 33078 - protein, 9 aa, Artificial Sequence
  Description of Artificial Sequence: Synthetic peptide
CFVWEFNDP

SEQ ID NO: 33079 - protein, 9 aa, Artificial Sequence
  Description of Artificial Sequence: Synthetic peptide
CFVWEFNHP

SEQ ID NO: 33080 - protein, 9 aa, Artificial Sequence
  Description of Artificial Sequence: Synthetic peptide
CFVWEFNSP

SEQ ID NO: 33081 - protein, 9 aa, Artificial Sequence
  Description of Artificial Sequence: Synthetic peptide
CFVWEFSYP

SEQ ID NO: 33082 - protein, 9 aa, Artificial Sequence
  Description of Artificial Sequence: Synthetic peptide
CFVWGFNYP

SEQ ID NO: 33083 - protein, 9 aa, Artificial Sequence
  Description of Artificial Sequence: Synthetic peptide
CFVWGINYP

SEQ ID NO: 33084 - protein, 9 aa, Artificial Sequence
  Description of Artificial Sequence: Synthetic peptide
CFVWQFNYP

SEQ ID NO: 33085 - protein, 9 aa, Artificial Sequence
  Description of Artificial Sequence: Synthetic peptide
CFVWVFNYP

SEQ ID NO: 33086 - protein, 9 aa, Artificial Sequence
  Description of Artificial Sequence: Synthetic peptide
CFYQYHQAH

SEQ ID NO: 33087 - protein, 9 aa, Artificial Sequence
  Description of Artificial Sequence: Synthetic peptide
CHAPSIMGP

SEQ ID NO: 33088 - protein, 9 aa, Artificial Sequence
  Description of Artificial Sequence: Synthetic peptide
CHCHIRHTG

SEQ ID NO: 33089 - protein, 9 aa, Artificial Sequence
  Description of Artificial Sequence: Synthetic peptide
CHFMFNAGR

SEQ ID NO: 33090 - protein, 9 aa, Artificial Sequence
  Description of Artificial Sequence: Synthetic peptide
CHFMIHAGR

SEQ ID NO: 33091 - protein, 9 aa, Artificial Sequence
  Description of Artificial Sequence: Synthetic peptide
CHFMINAAR

SEQ ID NO: 33092 - protein, 9 aa, Artificial Sequence
  Description of Artificial Sequence: Synthetic peptide
CHFMINACR

SEQ ID NO: 33093 - protein, 9 aa, Artificial Sequence
  Description of Artificial Sequence: Synthetic peptide
CHFMINAGH

SEQ ID NO: 33094 - protein, 9 aa, Artificial Sequence
  Description of Artificial Sequence: Synthetic peptide
CHFMINDGR

SEQ ID NO: 33095 - protein, 9 aa, Artificial Sequence
  Description of Artificial Sequence: Synthetic peptide
CHFMINSGR

SEQ ID NO: 33096 - protein, 9 aa, Artificial Sequence
  Description of Artificial Sequence: Synthetic peptide
CHFMINTGR

SEQ ID NO: 33097 - protein, 9 aa, Artificial Sequence
  Description of Artificial Sequence: Synthetic peptide
CHFMINVGR

SEQ ID NO: 33098 - protein, 9 aa, Artificial Sequence
  Description of Artificial Sequence: Synthetic peptide
CHFMLNAGR

SEQ ID NO: 33099 - protein, 9 aa, Artificial Sequence
  Description of Artificial Sequence: Synthetic peptide
CHFMSNAGR

SEQ ID NO: 33100 - protein, 9 aa, Artificial Sequence
  Description of Artificial Sequence: Synthetic peptide
CHFMTNAGR

SEQ ID NO: 33101 - protein, 9 aa, Artificial Sequence
  Description of Artificial Sequence: Synthetic peptide
CHFMVNAGR

SEQ ID NO: 33102 - protein, 9 aa, Artificial Sequence
  Description of Artificial Sequence: Synthetic peptide
CHFVINAGR

SEQ ID NO: 33103 - protein, 9 aa, Artificial Sequence
  Description of Artificial Sequence: Synthetic peptide
CHHATNTSQ

SEQ ID NO: 33104 - protein, 9 aa, Artificial Sequence
  Description of Artificial Sequence: Synthetic peptide
CHHFATASE

SEQ ID NO: 33105 - protein, 9 aa, Artificial Sequence
  Description of Artificial Sequence: Synthetic peptide
CHHFATETE

SEQ ID NO: 33106 - protein, 9 aa, Artificial Sequence
  Description of Artificial Sequence: Synthetic peptide
CHHFATQSE

SEQ ID NO: 33107 - protein, 9 aa, Artificial Sequence
  Description of Artificial Sequence: Synthetic peptide
CHIMINAGR

SEQ ID NO: 33108 - protein, 9 aa, Artificial Sequence
  Description of Artificial Sequence: Synthetic peptide
CHPVYKDWS

SEQ ID NO: 33109 - protein, 9 aa, Artificial Sequence
  Description of Artificial Sequence: Synthetic peptide
CHSMINAGR

SEQ ID NO: 33110 - protein, 9 aa, Artificial Sequence
  Description of Artificial Sequence: Synthetic peptide
CHTIKQMDI

SEQ ID NO: 33111 - protein, 9 aa, Artificial Sequence
  Description of Artificial Sequence: Synthetic peptide
CHVMINAGR

SEQ ID NO: 33112 - protein, 9 aa, Artificial Sequence
  Description of Artificial Sequence: Synthetic peptide
CHYMINAGR

SEQ ID NO: 33113 - protein, 9 aa, Artificial Sequence
  Description of Artificial Sequence: Synthetic peptide
CIKACNDHE

SEQ ID NO: 33114 - protein, 9 aa, Artificial Sequence
  Description of Artificial Sequence: Synthetic peptide
CIKACYDRE

SEQ ID NO: 33115 - protein, 9 aa, Artificial Sequence
  Description of Artificial Sequence: Synthetic peptide
CIKACYDYE

SEQ ID NO: 33116 - protein, 9 aa, Artificial Sequence
  Description of Artificial Sequence: Synthetic peptide
CIKACYHHE

SEQ ID NO: 33117 - protein, 9 aa, Artificial Sequence
  Description of Artificial Sequence: Synthetic peptide
CIKACYNHE

SEQ ID NO: 33118 - protein, 9 aa, Artificial Sequence
  Description of Artificial Sequence: Synthetic peptide
CIKAYNVMM

SEQ ID NO: 33119 - protein, 9 aa, Artificial Sequence
  Description of Artificial Sequence: Synthetic peptide
CIKAYYDHE

SEQ ID NO: 33120 - protein, 9 aa, Artificial Sequence
  Description of Artificial Sequence: Synthetic peptide
CIKGCYDHE

SEQ ID NO: 33121 - protein, 9 aa, Artificial Sequence
  Description of Artificial Sequence: Synthetic peptide
CIKPCYDHE

SEQ ID NO: 33122 - protein, 9 aa, Artificial Sequence
  Description of Artificial Sequence: Synthetic peptide
CIKSCYDHE

SEQ ID NO: 33123 - protein, 9 aa, Artificial Sequence
  Description of Artificial Sequence: Synthetic peptide
CIKSYNVMV

SEQ ID NO: 33124 - protein, 9 aa, Artificial Sequence
  Description of Artificial Sequence: Synthetic peptide
CIKTYNVMM

SEQ ID NO: 33125 - protein, 9 aa, Artificial Sequence
  Description of Artificial Sequence: Synthetic peptide
CIKYYNVMM

SEQ ID NO: 33126 - protein, 9 aa, Artificial Sequence
  Description of Artificial Sequence: Synthetic peptide
CILHKHNFP

SEQ ID NO: 33127 - protein, 9 aa, Artificial Sequence
  Description of Artificial Sequence: Synthetic peptide
CILHKHSSP

SEQ ID NO: 33128 - protein, 9 aa, Artificial Sequence
  Description of Artificial Sequence: Synthetic peptide
CILHKHSVP

SEQ ID NO: 33129 - protein, 9 aa, Artificial Sequence
  Description of Artificial Sequence: Synthetic peptide
CILHKNSFP

SEQ ID NO: 33130 - protein, 9 aa, Artificial Sequence
  Description of Artificial Sequence: Synthetic peptide
CILQKHSFP

SEQ ID NO: 33131 - protein, 9 aa, Artificial Sequence
  Description of Artificial Sequence: Synthetic peptide
CILYKHSFP

SEQ ID NO: 33132 - protein, 9 aa, Artificial Sequence
  Description of Artificial Sequence: Synthetic peptide
CIMHKHSFP

SEQ ID NO: 33133 - protein, 9 aa, Artificial Sequence
  Description of Artificial Sequence: Synthetic peptide
CIQACYDHE

SEQ ID NO: 33134 - protein, 9 aa, Artificial Sequence
  Description of Artificial Sequence: Synthetic peptide
CIQFTKHQE

SEQ ID NO: 33135 - protein, 9 aa, Artificial Sequence
  Description of Artificial Sequence: Synthetic peptide
CIQLSKMGP

SEQ ID NO: 33136 - protein, 9 aa, Artificial Sequence
  Description of Artificial Sequence: Synthetic peptide
CIQLTKMGP

SEQ ID NO: 33137 - protein, 9 aa, Artificial Sequence
  Description of Artificial Sequence: Synthetic peptide
CIRSYNVMM

SEQ ID NO: 33138 - protein, 9 aa, Artificial Sequence
  Description of Artificial Sequence: Synthetic peptide
CITACYDHE

SEQ ID NO: 33139 - protein, 9 aa, Artificial Sequence
  Description of Artificial Sequence: Synthetic peptide
CITMVRSQT

SEQ ID NO: 33140 - protein, 9 aa, Artificial Sequence
  Description of Artificial Sequence: Synthetic peptide
CKAHCPGQY

SEQ ID NO: 33141 - protein, 9 aa, Artificial Sequence
  Description of Artificial Sequence: Synthetic peptide
CKCHFDQVE

SEQ ID NO: 33142 - protein, 9 aa, Artificial Sequence
  Description of Artificial Sequence: Synthetic peptide
CKDFHWMND

SEQ ID NO: 33143 - protein, 9 aa, Artificial Sequence
  Description of Artificial Sequence: Synthetic peptide
CKFDITKMA

SEQ ID NO: 33144 - protein, 9 aa, Artificial Sequence
  Description of Artificial Sequence: Synthetic peptide
CKFDMASFF

SEQ ID NO: 33145 - protein, 9 aa, Artificial Sequence
  Description of Artificial Sequence: Synthetic peptide
CKFDMPCFF

SEQ ID NO: 33146 - protein, 9 aa, Artificial Sequence
  Description of Artificial Sequence: Synthetic peptide
CKFDMPGFF

SEQ ID NO: 33147 - protein, 9 aa, Artificial Sequence
  Description of Artificial Sequence: Synthetic peptide
CKFDMPSCF

SEQ ID NO: 33148 - protein, 9 aa, Artificial Sequence
  Description of Artificial Sequence: Synthetic peptide
CKFDMPSFI

SEQ ID NO: 33149 - protein, 9 aa, Artificial Sequence
  Description of Artificial Sequence: Synthetic peptide
CKFDMPSFV

SEQ ID NO: 33150 - protein, 9 aa, Artificial Sequence
  Description of Artificial Sequence: Synthetic peptide
CKFDMPSFY

SEQ ID NO: 33151 - protein, 9 aa, Artificial Sequence
  Description of Artificial Sequence: Synthetic peptide
CKFDMPSVF

SEQ ID NO: 33152 - protein, 9 aa, Artificial Sequence
  Description of Artificial Sequence: Synthetic peptide
CKFDMPTFF

SEQ ID NO: 33153 - protein, 9 aa, Artificial Sequence
  Description of Artificial Sequence: Synthetic peptide
CKFDMQGFF

SEQ ID NO: 33154 - protein, 9 aa, Artificial Sequence
  Description of Artificial Sequence: Synthetic peptide
CKFDMQSFF

SEQ ID NO: 33155 - protein, 9 aa, Artificial Sequence
  Description of Artificial Sequence: Synthetic peptide
CKFDMSSFF

SEQ ID NO: 33156 - protein, 9 aa, Artificial Sequence
  Description of Artificial Sequence: Synthetic peptide
CKFDMTSFF

SEQ ID NO: 33157 - protein, 9 aa, Artificial Sequence
  Description of Artificial Sequence: Synthetic peptide
CKFHMPSFF

SEQ ID NO: 33158 - protein, 9 aa, Artificial Sequence
  Description of Artificial Sequence: Synthetic peptide
CKFNMPSFF

SEQ ID NO: 33159 - protein, 9 aa, Artificial Sequence
  Description of Artificial Sequence: Synthetic peptide
CKFYIPSFF

SEQ ID NO: 33160 - protein, 9 aa, Artificial Sequence
  Description of Artificial Sequence: Synthetic peptide
CKGHFDQVE

SEQ ID NO: 33161 - protein, 9 aa, Artificial Sequence
  Description of Artificial Sequence: Synthetic peptide
CKHFHWMND

SEQ ID NO: 33162 - protein, 9 aa, Artificial Sequence
  Description of Artificial Sequence: Synthetic peptide
CKIDMPSFF

SEQ ID NO: 33163 - protein, 9 aa, Artificial Sequence
  Description of Artificial Sequence: Synthetic peptide
CKIHFDQVE

SEQ ID NO: 33164 - protein, 9 aa, Artificial Sequence
  Description of Artificial Sequence: Synthetic peptide
CKNFHLMND

SEQ ID NO: 33165 - protein, 9 aa, Artificial Sequence
  Description of Artificial Sequence: Synthetic peptide
CKNFHRMND

SEQ ID NO: 33166 - protein, 9 aa, Artificial Sequence
  Description of Artificial Sequence: Synthetic peptide
CKNFHWMDD

SEQ ID NO: 33167 - protein, 9 aa, Artificial Sequence
  Description of Artificial Sequence: Synthetic peptide
CKNFHWMHD

SEQ ID NO: 33168 - protein, 9 aa, Artificial Sequence
  Description of Artificial Sequence: Synthetic peptide
CKNFHWMNE

SEQ ID NO: 33169 - protein, 9 aa, Artificial Sequence
  Description of Artificial Sequence: Synthetic peptide
CKNFHWMNH

SEQ ID NO: 33170 - protein, 9 aa, Artificial Sequence
  Description of Artificial Sequence: Synthetic peptide
CKNFHWMSD

SEQ ID NO: 33171 - protein, 9 aa, Artificial Sequence
  Description of Artificial Sequence: Synthetic peptide
CKNFHWRND

SEQ ID NO: 33172 - protein, 9 aa, Artificial Sequence
  Description of Artificial Sequence: Synthetic peptide
CKNFLWMND

SEQ ID NO: 33173 - protein, 9 aa, Artificial Sequence
  Description of Artificial Sequence: Synthetic peptide
CKNFPWMND

SEQ ID NO: 33174 - protein, 9 aa, Artificial Sequence
  Description of Artificial Sequence: Synthetic peptide
CKNFYWMND

SEQ ID NO: 33175 - protein, 9 aa, Artificial Sequence
  Description of Artificial Sequence: Synthetic peptide
CKNHFDQVE

SEQ ID NO: 33176 - protein, 9 aa, Artificial Sequence
  Description of Artificial Sequence: Synthetic peptide
CKNIHWMND

SEQ ID NO: 33177 - protein, 9 aa, Artificial Sequence
  Description of Artificial Sequence: Synthetic peptide
CKPQINDAY

SEQ ID NO: 33178 - protein, 9 aa, Artificial Sequence
  Description of Artificial Sequence: Synthetic peptide
CKQQINDAC

SEQ ID NO: 33179 - protein, 9 aa, Artificial Sequence
  Description of Artificial Sequence: Synthetic peptide
CKQQINDAD

SEQ ID NO: 33180 - protein, 9 aa, Artificial Sequence
  Description of Artificial Sequence: Synthetic peptide
CKQQINDAF

SEQ ID NO: 33181 - protein, 9 aa, Artificial Sequence
  Description of Artificial Sequence: Synthetic peptide
CKQQINDAH

SEQ ID NO: 33182 - protein, 9 aa, Artificial Sequence
  Description of Artificial Sequence: Synthetic peptide
CKQQINDAN

SEQ ID NO: 33183 - protein, 9 aa, Artificial Sequence
  Description of Artificial Sequence: Synthetic peptide
CKQQINDAS

SEQ ID NO: 33184 - protein, 9 aa, Artificial Sequence
  Description of Artificial Sequence: Synthetic peptide
CKQQINDDY

SEQ ID NO: 33185 - protein, 9 aa, Artificial Sequence
  Description of Artificial Sequence: Synthetic peptide
CKQQINDGY

SEQ ID NO: 33186 - protein, 9 aa, Artificial Sequence
  Description of Artificial Sequence: Synthetic peptide
CKQQINDSY

SEQ ID NO: 33187 - protein, 9 aa, Artificial Sequence
  Description of Artificial Sequence: Synthetic peptide
CKQQINHAY

SEQ ID NO: 33188 - protein, 9 aa, Artificial Sequence
  Description of Artificial Sequence: Synthetic peptide
CKQQLNDAY

SEQ ID NO: 33189 - protein, 9 aa, Artificial Sequence
  Description of Artificial Sequence: Synthetic peptide
CKRQINDAY

SEQ ID NO: 33190 - protein, 9 aa, Artificial Sequence
  Description of Artificial Sequence: Synthetic peptide
CKSFHWMND

SEQ ID NO: 33191 - protein, 9 aa, Artificial Sequence
  Description of Artificial Sequence: Synthetic peptide
CKSHFAQVE

SEQ ID NO: 33192 - protein, 9 aa, Artificial Sequence
  Description of Artificial Sequence: Synthetic peptide
CKSHFDKVE

SEQ ID NO: 33193 - protein, 9 aa, Artificial Sequence
  Description of Artificial Sequence: Synthetic peptide
CKSHFNQVE

SEQ ID NO: 33194 - protein, 9 aa, Artificial Sequence
  Description of Artificial Sequence: Synthetic peptide
CKSHIDQVE

SEQ ID NO: 33195 - protein, 9 aa, Artificial Sequence
  Description of Artificial Sequence: Synthetic peptide
CKSHVDQVE

SEQ ID NO: 33196 - protein, 9 aa, Artificial Sequence
  Description of Artificial Sequence: Synthetic peptide
CKTFHWMND

SEQ ID NO: 33197 - protein, 9 aa, Artificial Sequence
  Description of Artificial Sequence: Synthetic peptide
CKTHFDQVE

SEQ ID NO: 33198 - protein, 9 aa, Artificial Sequence
  Description of Artificial Sequence: Synthetic peptide
CKTQCPGQY

SEQ ID NO: 33199 - protein, 9 aa, Artificial Sequence
  Description of Artificial Sequence: Synthetic peptide
CKVDMPSFF

SEQ ID NO: 33200 - protein, 9 aa, Artificial Sequence
  Description of Artificial Sequence: Synthetic peptide
CKYDFTKMA

SEQ ID NO: 33201 - protein, 9 aa, Artificial Sequence
  Description of Artificial Sequence: Synthetic peptide
CKYDIPKMA

SEQ ID NO: 33202 - protein, 9 aa, Artificial Sequence
  Description of Artificial Sequence: Synthetic peptide
CKYDISKMA

SEQ ID NO: 33203 - protein, 9 aa, Artificial Sequence
  Description of Artificial Sequence: Synthetic peptide
CKYDITKMG

SEQ ID NO: 33204 - protein, 9 aa, Artificial Sequence
  Description of Artificial Sequence: Synthetic peptide
CKYDITKMS

SEQ ID NO: 33205 - protein, 9 aa, Artificial Sequence
  Description of Artificial Sequence: Synthetic peptide
CKYDITKMT

SEQ ID NO: 33206 - protein, 9 aa, Artificial Sequence
  Description of Artificial Sequence: Synthetic peptide
CKYDITKMV

SEQ ID NO: 33207 - protein, 9 aa, Artificial Sequence
  Description of Artificial Sequence: Synthetic peptide
CKYDITMMA

SEQ ID NO: 33208 - protein, 9 aa, Artificial Sequence
  Description of Artificial Sequence: Synthetic peptide
CKYDITQMA

SEQ ID NO: 33209 - protein, 9 aa, Artificial Sequence
  Description of Artificial Sequence: Synthetic peptide
CKYDLTKMA

SEQ ID NO: 33210 - protein, 9 aa, Artificial Sequence
  Description of Artificial Sequence: Synthetic peptide
CKYDMPSFF

SEQ ID NO: 33211 - protein, 9 aa, Artificial Sequence
  Description of Artificial Sequence: Synthetic peptide
CKYDNTKMA

SEQ ID NO: 33212 - protein, 9 aa, Artificial Sequence
  Description of Artificial Sequence: Synthetic peptide
CKYDTTKMA

SEQ ID NO: 33213 - protein, 9 aa, Artificial Sequence
  Description of Artificial Sequence: Synthetic peptide
CKYDVTKMA

SEQ ID NO: 33214 - protein, 9 aa, Artificial Sequence
  Description of Artificial Sequence: Synthetic peptide
CKYFHWMND

SEQ ID NO: 33215 - protein, 9 aa, Artificial Sequence
  Description of Artificial Sequence: Synthetic peptide
CLELRTQYA

SEQ ID NO: 33216 - protein, 9 aa, Artificial Sequence
  Description of Artificial Sequence: Synthetic peptide
CLELVKAYE

SEQ ID NO: 33217 - protein, 9 aa, Artificial Sequence
  Description of Artificial Sequence: Synthetic peptide
CLELVKDYE

SEQ ID NO: 33218 - protein, 9 aa, Artificial Sequence
  Description of Artificial Sequence: Synthetic peptide
CMFHNHKGF

SEQ ID NO: 33219 - protein, 9 aa, Artificial Sequence
  Description of Artificial Sequence: Synthetic peptide
CMFQCYRSP

SEQ ID NO: 33220 - protein, 9 aa, Artificial Sequence
  Description of Artificial Sequence: Synthetic peptide
CMFVQQNFQ

SEQ ID NO: 33221 - protein, 9 aa, Artificial Sequence
  Description of Artificial Sequence: Synthetic peptide
CMHLSCDWA

SEQ ID NO: 33222 - protein, 9 aa, Artificial Sequence
  Description of Artificial Sequence: Synthetic peptide
CMHLVNMNS

SEQ ID NO: 33223 - protein, 9 aa, Artificial Sequence
  Description of Artificial Sequence: Synthetic peptide
CMKACYDHE

SEQ ID NO: 33224 - protein, 9 aa, Artificial Sequence
  Description of Artificial Sequence: Synthetic peptide
CMKFIRVGS

SEQ ID NO: 33225 - protein, 9 aa, Artificial Sequence
  Description of Artificial Sequence: Synthetic peptide
CMPFIRVGS

SEQ ID NO: 33226 - protein, 9 aa, Artificial Sequence
  Description of Artificial Sequence: Synthetic peptide
CMQFIRAGS

SEQ ID NO: 33227 - protein, 9 aa, Artificial Sequence
  Description of Artificial Sequence: Synthetic peptide
CMQFIRIGS

SEQ ID NO: 33228 - protein, 9 aa, Artificial Sequence
  Description of Artificial Sequence: Synthetic peptide
CMQFIRLGS

SEQ ID NO: 33229 - protein, 9 aa, Artificial Sequence
  Description of Artificial Sequence: Synthetic peptide
CMQFIRVAS

SEQ ID NO: 33230 - protein, 9 aa, Artificial Sequence
  Description of Artificial Sequence: Synthetic peptide
CMQFIRVGG

SEQ ID NO: 33231 - protein, 9 aa, Artificial Sequence
  Description of Artificial Sequence: Synthetic peptide
CMQFIRVGN

SEQ ID NO: 33232 - protein, 9 aa, Artificial Sequence
  Description of Artificial Sequence: Synthetic peptide
CMQFLRVGS

SEQ ID NO: 33233 - protein, 9 aa, Artificial Sequence
  Description of Artificial Sequence: Synthetic peptide
CMQFNRVGS

SEQ ID NO: 33234 - protein, 9 aa, Artificial Sequence
  Description of Artificial Sequence: Synthetic peptide
CMQFSRVGS

SEQ ID NO: 33235 - protein, 9 aa, Artificial Sequence
  Description of Artificial Sequence: Synthetic peptide
CMQFTRVGS

SEQ ID NO: 33236 - protein, 9 aa, Artificial Sequence
  Description of Artificial Sequence: Synthetic peptide
CMQFVRVGS

SEQ ID NO: 33237 - protein, 9 aa, Artificial Sequence
  Description of Artificial Sequence: Synthetic peptide
CMQVIRVGS

SEQ ID NO: 33238 - protein, 9 aa, Artificial Sequence
  Description of Artificial Sequence: Synthetic peptide
CMQYIRVGS

SEQ ID NO: 33239 - protein, 9 aa, Artificial Sequence
  Description of Artificial Sequence: Synthetic peptide
CMRFIRVGS

SEQ ID NO: 33240 - protein, 9 aa, Artificial Sequence
  Description of Artificial Sequence: Synthetic peptide
CMSWLTNQE

SEQ ID NO: 33241 - protein, 9 aa, Artificial Sequence
  Description of Artificial Sequence: Synthetic peptide
CMVHNHKGS

SEQ ID NO: 33242 - protein, 9 aa, Artificial Sequence
  Description of Artificial Sequence: Synthetic peptide
CMVHNHQGF

SEQ ID NO: 33243 - protein, 9 aa, Artificial Sequence
  Description of Artificial Sequence: Synthetic peptide
CMYWLNNQE

SEQ ID NO: 33244 - protein, 9 aa, Artificial Sequence
  Description of Artificial Sequence: Synthetic peptide
CMYWLTNKE

SEQ ID NO: 33245 - protein, 9 aa, Artificial Sequence
  Description of Artificial Sequence: Synthetic peptide
CNCNLPYAI

SEQ ID NO: 33246 - protein, 9 aa, Artificial Sequence
  Description of Artificial Sequence: Synthetic peptide
CNCPIRHTG

SEQ ID NO: 33247 - protein, 9 aa, Artificial Sequence
  Description of Artificial Sequence: Synthetic peptide
CNCQIRHTG

SEQ ID NO: 33248 - protein, 9 aa, Artificial Sequence
  Description of Artificial Sequence: Synthetic peptide
CNFMINAGR

SEQ ID NO: 33249 - protein, 9 aa, Artificial Sequence
  Description of Artificial Sequence: Synthetic peptide
CNFQTNVHM

SEQ ID NO: 33250 - protein, 9 aa, Artificial Sequence
  Description of Artificial Sequence: Synthetic peptide
CNFQTSVHL

SEQ ID NO: 33251 - protein, 9 aa, Artificial Sequence
  Description of Artificial Sequence: Synthetic peptide
CNHKFIDQA

SEQ ID NO: 33252 - protein, 9 aa, Artificial Sequence
  Description of Artificial Sequence: Synthetic peptide
CNHKVNSWI

SEQ ID NO: 33253 - protein, 9 aa, Artificial Sequence
  Description of Artificial Sequence: Synthetic peptide
CNHPFIDQA

SEQ ID NO: 33254 - protein, 9 aa, Artificial Sequence
  Description of Artificial Sequence: Synthetic peptide
CNHQFIDQG

SEQ ID NO: 33255 - protein, 9 aa, Artificial Sequence
  Description of Artificial Sequence: Synthetic peptide
CNHQFIDQS

SEQ ID NO: 33256 - protein, 9 aa, Artificial Sequence
  Description of Artificial Sequence: Synthetic peptide
CNHQFIDQT

SEQ ID NO: 33257 - protein, 9 aa, Artificial Sequence
  Description of Artificial Sequence: Synthetic peptide
CNHQFIDQV

SEQ ID NO: 33258 - protein, 9 aa, Artificial Sequence
  Description of Artificial Sequence: Synthetic peptide
CNHQFLDQA

SEQ ID NO: 33259 - protein, 9 aa, Artificial Sequence
  Description of Artificial Sequence: Synthetic peptide
CNPQFIDQA

SEQ ID NO: 33260 - protein, 9 aa, Artificial Sequence
  Description of Artificial Sequence: Synthetic peptide
CNYQTNVHL

SEQ ID NO: 33261 - protein, 9 aa, Artificial Sequence
  Description of Artificial Sequence: Synthetic peptide
CPKPFLIKE

SEQ ID NO: 33262 - protein, 9 aa, Artificial Sequence
  Description of Artificial Sequence: Synthetic peptide
CPKPVLIQE

SEQ ID NO: 33263 - protein, 9 aa, Artificial Sequence
  Description of Artificial Sequence: Synthetic peptide
CQELRTQHA

SEQ ID NO: 33264 - protein, 9 aa, Artificial Sequence
  Description of Artificial Sequence: Synthetic peptide
CQELRTQYT

SEQ ID NO: 33265 - protein, 9 aa, Artificial Sequence
  Description of Artificial Sequence: Synthetic peptide
CQEVHAHMS

SEQ ID NO: 33266 - protein, 9 aa, Artificial Sequence
  Description of Artificial Sequence: Synthetic peptide
CQEVYAHMT

SEQ ID NO: 33267 - protein, 9 aa, Artificial Sequence
  Description of Artificial Sequence: Synthetic peptide
CQKWRSIWK

SEQ ID NO: 33268 - protein, 9 aa, Artificial Sequence
  Description of Artificial Sequence: Synthetic peptide
CQQVYAHMS

SEQ ID NO: 33269 - protein, 9 aa, Artificial Sequence
  Description of Artificial Sequence: Synthetic peptide
CQSHFDQVE

SEQ ID NO: 33270 - protein, 9 aa, Artificial Sequence
  Description of Artificial Sequence: Synthetic peptide
CRAAHPVCA

SEQ ID NO: 33271 - protein, 9 aa, Artificial Sequence
  Description of Artificial Sequence: Synthetic peptide
CRAAHSICA

SEQ ID NO: 33272 - protein, 9 aa, Artificial Sequence
  Description of Artificial Sequence: Synthetic peptide
CRAAYSVCA

SEQ ID NO: 33273 - protein, 9 aa, Artificial Sequence
  Description of Artificial Sequence: Synthetic peptide
CRATHSVCA

SEQ ID NO: 33274 - protein, 9 aa, Artificial Sequence
  Description of Artificial Sequence: Synthetic peptide
CRAVHSVCA

SEQ ID NO: 33275 - protein, 9 aa, Artificial Sequence
  Description of Artificial Sequence: Synthetic peptide
CRFMINAGR

SEQ ID NO: 33276 - protein, 9 aa, Artificial Sequence
  Description of Artificial Sequence: Synthetic peptide
CRTAHSVCA

SEQ ID NO: 33277 - protein, 9 aa, Artificial Sequence
  Description of Artificial Sequence: Synthetic peptide
CRVAHSVCA

SEQ ID NO: 33278 - protein, 9 aa, Artificial Sequence
  Description of Artificial Sequence: Synthetic peptide
CSAMVRSQT

SEQ ID NO: 33279 - protein, 9 aa, Artificial Sequence
  Description of Artificial Sequence: Synthetic peptide
CSGCHMKMP

SEQ ID NO: 33280 - protein, 9 aa, Artificial Sequence
  Description of Artificial Sequence: Synthetic peptide
CSGCYMKMS

SEQ ID NO: 33281 - protein, 9 aa, Artificial Sequence
  Description of Artificial Sequence: Synthetic peptide
CSHPVHDNE

SEQ ID NO: 33282 - protein, 9 aa, Artificial Sequence
  Description of Artificial Sequence: Synthetic peptide
CSLHKHSFP

SEQ ID NO: 33283 - protein, 9 aa, Artificial Sequence
  Description of Artificial Sequence: Synthetic peptide
CSLPYAWSR

SEQ ID NO: 33284 - protein, 9 aa, Artificial Sequence
  Description of Artificial Sequence: Synthetic peptide
CSMIQNSFP

SEQ ID NO: 33285 - protein, 9 aa, Artificial Sequence
  Description of Artificial Sequence: Synthetic peptide
CSTMVRSQA

SEQ ID NO: 33286 - protein, 9 aa, Artificial Sequence
  Description of Artificial Sequence: Synthetic peptide
CSVCYMKMP

SEQ ID NO: 33287 - protein, 9 aa, Artificial Sequence
  Description of Artificial Sequence: Synthetic peptide
CSVWEFNYP

SEQ ID NO: 33288 - protein, 9 aa, Artificial Sequence
  Description of Artificial Sequence: Synthetic peptide
CTAMLQRKG

SEQ ID NO: 33289 - protein, 9 aa, Artificial Sequence
  Description of Artificial Sequence: Synthetic peptide
CTAVKMWHT

SEQ ID NO: 33290 - protein, 9 aa, Artificial Sequence
  Description of Artificial Sequence: Synthetic peptide
CTCGYNRGD

SEQ ID NO: 33291 - protein, 9 aa, Artificial Sequence
  Description of Artificial Sequence: Synthetic peptide
CTCHIRHTG

SEQ ID NO: 33292 - protein, 9 aa, Artificial Sequence
  Description of Artificial Sequence: Synthetic peptide
CTCNLPSAI

SEQ ID NO: 33293 - protein, 9 aa, Artificial Sequence
  Description of Artificial Sequence: Synthetic peptide
CTCNVPYAI

SEQ ID NO: 33294 - protein, 9 aa, Artificial Sequence
  Description of Artificial Sequence: Synthetic peptide
CTCWYNRGE

SEQ ID NO: 33295 - protein, 9 aa, Artificial Sequence
  Description of Artificial Sequence: Synthetic peptide
CTEVLQRKG

SEQ ID NO: 33296 - protein, 9 aa, Artificial Sequence
  Description of Artificial Sequence: Synthetic peptide
CTGCYMKMP

SEQ ID NO: 33297 - protein, 9 aa, Artificial Sequence
  Description of Artificial Sequence: Synthetic peptide
CTGIQATGD

SEQ ID NO: 33298 - protein, 9 aa, Artificial Sequence
  Description of Artificial Sequence: Synthetic peptide
CTGLLMHKE

SEQ ID NO: 33299 - protein, 9 aa, Artificial Sequence
  Description of Artificial Sequence: Synthetic peptide
CTGQLMHEE

SEQ ID NO: 33300 - protein, 9 aa, Artificial Sequence
  Description of Artificial Sequence: Synthetic peptide
CTGQLMHQE

SEQ ID NO: 33301 - protein, 9 aa, Artificial Sequence
  Description of Artificial Sequence: Synthetic peptide
CTGQLMRKE

SEQ ID NO: 33302 - protein, 9 aa, Artificial Sequence
  Description of Artificial Sequence: Synthetic peptide
CTGWYNRGD

SEQ ID NO: 33303 - protein, 9 aa, Artificial Sequence
  Description of Artificial Sequence: Synthetic peptide
CTHAVHDNE

SEQ ID NO: 33304 - protein, 9 aa, Artificial Sequence
  Description of Artificial Sequence: Synthetic peptide
CTHGFLTAP

SEQ ID NO: 33305 - protein, 9 aa, Artificial Sequence
  Description of Artificial Sequence: Synthetic peptide
CTHGFLTSP

SEQ ID NO: 33306 - protein, 9 aa, Artificial Sequence
  Description of Artificial Sequence: Synthetic peptide
CTHGFLTVP

SEQ ID NO: 33307 - protein, 9 aa, Artificial Sequence
  Description of Artificial Sequence: Synthetic peptide
CTHGVLTGP

SEQ ID NO: 33308 - protein, 9 aa, Artificial Sequence
  Description of Artificial Sequence: Synthetic peptide
CTHKVNTWI

SEQ ID NO: 33309 - protein, 9 aa, Artificial Sequence
  Description of Artificial Sequence: Synthetic peptide
CTHPVHDHE

SEQ ID NO: 33310 - protein, 9 aa, Artificial Sequence
  Description of Artificial Sequence: Synthetic peptide
CTHPVNDNE

SEQ ID NO: 33311 - protein, 9 aa, Artificial Sequence
  Description of Artificial Sequence: Synthetic peptide
CTHQFIDQA

SEQ ID NO: 33312 - protein, 9 aa, Artificial Sequence
  Description of Artificial Sequence: Synthetic peptide
CTHQVHDNE

SEQ ID NO: 33313 - protein, 9 aa, Artificial Sequence
  Description of Artificial Sequence: Synthetic peptide
CTHTVHDNE

SEQ ID NO: 33314 - protein, 9 aa, Artificial Sequence
  Description of Artificial Sequence: Synthetic peptide
CTHVFLTGP

SEQ ID NO: 33315 - protein, 9 aa, Artificial Sequence
  Description of Artificial Sequence: Synthetic peptide
CTIFHTVDQ

SEQ ID NO: 33316 - protein, 9 aa, Artificial Sequence
  Description of Artificial Sequence: Synthetic peptide
CTIFNNVDQ

SEQ ID NO: 33317 - protein, 9 aa, Artificial Sequence
  Description of Artificial Sequence: Synthetic peptide
CTIFNTVDK

SEQ ID NO: 33318 - protein, 9 aa, Artificial Sequence
  Description of Artificial Sequence: Synthetic peptide
CTIFTTVDQ

SEQ ID NO: 33319 - protein, 9 aa, Artificial Sequence
  Description of Artificial Sequence: Synthetic peptide
CTIMFSAGP

SEQ ID NO: 33320 - protein, 9 aa, Artificial Sequence
  Description of Artificial Sequence: Synthetic peptide
CTIRANLHF

SEQ ID NO: 33321 - protein, 9 aa, Artificial Sequence
  Description of Artificial Sequence: Synthetic peptide
CTIYRNLLS

SEQ ID NO: 33322 - protein, 9 aa, Artificial Sequence
  Description of Artificial Sequence: Synthetic peptide
CTKACYDHE

SEQ ID NO: 33323 - protein, 9 aa, Artificial Sequence
  Description of Artificial Sequence: Synthetic peptide
CTKMLQRKG

SEQ ID NO: 33324 - protein, 9 aa, Artificial Sequence
  Description of Artificial Sequence: Synthetic peptide
CTKSYNVMM

SEQ ID NO: 33325 - protein, 9 aa, Artificial Sequence
  Description of Artificial Sequence: Synthetic peptide
CTLKVNSWI

SEQ ID NO: 33326 - protein, 9 aa, Artificial Sequence
  Description of Artificial Sequence: Synthetic peptide
CTLMHIHTR

SEQ ID NO: 33327 - protein, 9 aa, Artificial Sequence
  Description of Artificial Sequence: Synthetic peptide
CTLMHSHAR

SEQ ID NO: 33328 - protein, 9 aa, Artificial Sequence
  Description of Artificial Sequence: Synthetic peptide
CTLMHSHNR

SEQ ID NO: 33329 - protein, 9 aa, Artificial Sequence
  Description of Artificial Sequence: Synthetic peptide
CTLMHSHTI

SEQ ID NO: 33330 - protein, 9 aa, Artificial Sequence
  Description of Artificial Sequence: Synthetic peptide
CTLMLSHTR

SEQ ID NO: 33331 - protein, 9 aa, Artificial Sequence
  Description of Artificial Sequence: Synthetic peptide
CTMLANHDQ

SEQ ID NO: 33332 - protein, 9 aa, Artificial Sequence
  Description of Artificial Sequence: Synthetic peptide
CTMLANHHQ

SEQ ID NO: 33333 - protein, 9 aa, Artificial Sequence
  Description of Artificial Sequence: Synthetic peptide
CTMLANHYK

SEQ ID NO: 33334 - protein, 9 aa, Artificial Sequence
  Description of Artificial Sequence: Synthetic peptide
CTMLANHYP

SEQ ID NO: 33335 - protein, 9 aa, Artificial Sequence
  Description of Artificial Sequence: Synthetic peptide
CTMLANHYR

SEQ ID NO: 33336 - protein, 9 aa, Artificial Sequence
  Description of Artificial Sequence: Synthetic peptide
CTMLANNYQ

SEQ ID NO: 33337 - protein, 9 aa, Artificial Sequence
  Description of Artificial Sequence: Synthetic peptide
CTMLANYYQ

SEQ ID NO: 33338 - protein, 9 aa, Artificial Sequence
  Description of Artificial Sequence: Synthetic peptide
CTMMANHYQ

SEQ ID NO: 33339 - protein, 9 aa, Artificial Sequence
  Description of Artificial Sequence: Synthetic peptide
CTMVANHYQ

SEQ ID NO: 33340 - protein, 9 aa, Artificial Sequence
  Description of Artificial Sequence: Synthetic peptide
CTMWANHYQ

SEQ ID NO: 33341 - protein, 9 aa, Artificial Sequence
  Description of Artificial Sequence: Synthetic peptide
CTNFHWMND

SEQ ID NO: 33342 - protein, 9 aa, Artificial Sequence
  Description of Artificial Sequence: Synthetic peptide
CTNVKMWHT

SEQ ID NO: 33343 - protein, 9 aa, Artificial Sequence
  Description of Artificial Sequence: Synthetic peptide
CTNYHLKAG

SEQ ID NO: 33344 - protein, 9 aa, Artificial Sequence
  Description of Artificial Sequence: Synthetic peptide
CTNYHVKAV

SEQ ID NO: 33345 - protein, 9 aa, Artificial Sequence
  Description of Artificial Sequence: Synthetic peptide
CTPVKMWHT

SEQ ID NO: 33346 - protein, 9 aa, Artificial Sequence
  Description of Artificial Sequence: Synthetic peptide
CTQFIKHQE

SEQ ID NO: 33347 - protein, 9 aa, Artificial Sequence
  Description of Artificial Sequence: Synthetic peptide
CTQFPKHQE

SEQ ID NO: 33348 - protein, 9 aa, Artificial Sequence
  Description of Artificial Sequence: Synthetic peptide
CTQFTQHQE

SEQ ID NO: 33349 - protein, 9 aa, Artificial Sequence
  Description of Artificial Sequence: Synthetic peptide
CTQFTTHQE

SEQ ID NO: 33350 - protein, 9 aa, Artificial Sequence
  Description of Artificial Sequence: Synthetic peptide
CTQLNKMGP

SEQ ID NO: 33351 - protein, 9 aa, Artificial Sequence
  Description of Artificial Sequence: Synthetic peptide
CTTAWQGTW

SEQ ID NO: 33352 - protein, 9 aa, Artificial Sequence
  Description of Artificial Sequence: Synthetic peptide
CTTFKMWHT

SEQ ID NO: 33353 - protein, 9 aa, Artificial Sequence
  Description of Artificial Sequence: Synthetic peptide
CTTGWQGAW

SEQ ID NO: 33354 - protein, 9 aa, Artificial Sequence
  Description of Artificial Sequence: Synthetic peptide
CTTVKMLHT

SEQ ID NO: 33355 - protein, 9 aa, Artificial Sequence
  Description of Artificial Sequence: Synthetic peptide
CTTVKMWHA

SEQ ID NO: 33356 - protein, 9 aa, Artificial Sequence
  Description of Artificial Sequence: Synthetic peptide
CTTVKMWHI

SEQ ID NO: 33357 - protein, 9 aa, Artificial Sequence
  Description of Artificial Sequence: Synthetic peptide
CTTVKMWNT

SEQ ID NO: 33358 - protein, 9 aa, Artificial Sequence
  Description of Artificial Sequence: Synthetic peptide
CTTVQMWHT

SEQ ID NO: 33359 - protein, 9 aa, Artificial Sequence
  Description of Artificial Sequence: Synthetic peptide
CTTYRNLMS

SEQ ID NO: 33360 - protein, 9 aa, Artificial Sequence
  Description of Artificial Sequence: Synthetic peptide
CTTYRNLPS

SEQ ID NO: 33361 - protein, 9 aa, Artificial Sequence
  Description of Artificial Sequence: Synthetic peptide
CTTYRNVLS

SEQ ID NO: 33362 - protein, 9 aa, Artificial Sequence
  Description of Artificial Sequence: Synthetic peptide
CTVFNTVDQ

SEQ ID NO: 33363 - protein, 9 aa, Artificial Sequence
  Description of Artificial Sequence: Synthetic peptide
CTVLANHYQ

SEQ ID NO: 33364 - protein, 9 aa, Artificial Sequence
  Description of Artificial Sequence: Synthetic peptide
CTYFSMMDP

SEQ ID NO: 33365 - protein, 9 aa, Artificial Sequence
  Description of Artificial Sequence: Synthetic peptide
CTYFSMTDR

SEQ ID NO: 33366 - protein, 9 aa, Artificial Sequence
  Description of Artificial Sequence: Synthetic peptide
CTYKVNSWI

SEQ ID NO: 33367 - protein, 9 aa, Artificial Sequence
  Description of Artificial Sequence: Synthetic peptide
CTYVSMMDR

SEQ ID NO: 33368 - protein, 9 aa, Artificial Sequence
  Description of Artificial Sequence: Synthetic peptide
CVAMKFSEH

SEQ ID NO: 33369 - protein, 9 aa, Artificial Sequence
  Description of Artificial Sequence: Synthetic peptide
CVEPYTDHQ

SEQ ID NO: 33370 - protein, 9 aa, Artificial Sequence
  Description of Artificial Sequence: Synthetic peptide
CVFQCNRSP

SEQ ID NO: 33371 - protein, 9 aa, Artificial Sequence
  Description of Artificial Sequence: Synthetic peptide
CVFQCYGSP

SEQ ID NO: 33372 - protein, 9 aa, Artificial Sequence
  Description of Artificial Sequence: Synthetic peptide
CVFQCYRGP

SEQ ID NO: 33373 - protein, 9 aa, Artificial Sequence
  Description of Artificial Sequence: Synthetic peptide
CVFQCYRNP

SEQ ID NO: 33374 - protein, 9 aa, Artificial Sequence
  Description of Artificial Sequence: Synthetic peptide
CVFQCYRTP

SEQ ID NO: 33375 - protein, 9 aa, Artificial Sequence
  Description of Artificial Sequence: Synthetic peptide
CVFQYYRSP

SEQ ID NO: 33376 - protein, 9 aa, Artificial Sequence
  Description of Artificial Sequence: Synthetic peptide
CVFVPQNFQ

SEQ ID NO: 33377 - protein, 9 aa, Artificial Sequence
  Description of Artificial Sequence: Synthetic peptide
CVFVQENFQ

SEQ ID NO: 33378 - protein, 9 aa, Artificial Sequence
  Description of Artificial Sequence: Synthetic peptide
CVFVQQHFQ

SEQ ID NO: 33379 - protein, 9 aa, Artificial Sequence
  Description of Artificial Sequence: Synthetic peptide
CVFVQQSFQ

SEQ ID NO: 33380 - protein, 9 aa, Artificial Sequence
  Description of Artificial Sequence: Synthetic peptide
CVFVQQTFQ

SEQ ID NO: 33381 - protein, 9 aa, Artificial Sequence
  Description of Artificial Sequence: Synthetic peptide
CVFVRQNFQ

SEQ ID NO: 33382 - protein, 9 aa, Artificial Sequence
  Description of Artificial Sequence: Synthetic peptide
CVGMKFSEH

SEQ ID NO: 33383 - protein, 9 aa, Artificial Sequence
  Description of Artificial Sequence: Synthetic peptide
CVHLVHWQW

SEQ ID NO: 33384 - protein, 9 aa, Artificial Sequence
  Description of Artificial Sequence: Synthetic peptide
CVHQYHQAH

SEQ ID NO: 33385 - protein, 9 aa, Artificial Sequence
  Description of Artificial Sequence: Synthetic peptide
CVLMKFSEH

SEQ ID NO: 33386 - protein, 9 aa, Artificial Sequence
  Description of Artificial Sequence: Synthetic peptide
CVLVQQNFP

SEQ ID NO: 33387 - protein, 9 aa, Artificial Sequence
  Description of Artificial Sequence: Synthetic peptide
CVMGLSFHW

SEQ ID NO: 33388 - protein, 9 aa, Artificial Sequence
  Description of Artificial Sequence: Synthetic peptide
CVRMIDWCC

SEQ ID NO: 33389 - protein, 9 aa, Artificial Sequence
  Description of Artificial Sequence: Synthetic peptide
CVSISAAPV

SEQ ID NO: 33390 - protein, 9 aa, Artificial Sequence
  Description of Artificial Sequence: Synthetic peptide
CVVMKFNEH

SEQ ID NO: 33391 - protein, 9 aa, Artificial Sequence
  Description of Artificial Sequence: Synthetic peptide
CVVMKFSED

SEQ ID NO: 33392 - protein, 9 aa, Artificial Sequence
  Description of Artificial Sequence: Synthetic peptide
CVVMKFSER

SEQ ID NO: 33393 - protein, 9 aa, Artificial Sequence
  Description of Artificial Sequence: Synthetic peptide
CVVMKFSKH

SEQ ID NO: 33394 - protein, 9 aa, Artificial Sequence
  Description of Artificial Sequence: Synthetic peptide
CVVMKFSVH

SEQ ID NO: 33395 - protein, 9 aa, Artificial Sequence
  Description of Artificial Sequence: Synthetic peptide
CVVMKFTEH

SEQ ID NO: 33396 - protein, 9 aa, Artificial Sequence
  Description of Artificial Sequence: Synthetic peptide
CVVMKYSEH

SEQ ID NO: 33397 - protein, 9 aa, Artificial Sequence
  Description of Artificial Sequence: Synthetic peptide
CVVMTFSEH

SEQ ID NO: 33398 - protein, 9 aa, Artificial Sequence
  Description of Artificial Sequence: Synthetic peptide
CVVVQQNFQ

SEQ ID NO: 33399 - protein, 9 aa, Artificial Sequence
  Description of Artificial Sequence: Synthetic peptide
CVVWEFNYP

SEQ ID NO: 33400 - protein, 9 aa, Artificial Sequence
  Description of Artificial Sequence: Synthetic peptide
CVYQCYRSP

SEQ ID NO: 33401 - protein, 9 aa, Artificial Sequence
  Description of Artificial Sequence: Synthetic peptide
CVYWLTNQE

SEQ ID NO: 33402 - protein, 9 aa, Artificial Sequence
  Description of Artificial Sequence: Synthetic peptide
CWAVTSMGS

SEQ ID NO: 33403 - protein, 9 aa, Artificial Sequence
  Description of Artificial Sequence: Synthetic peptide
CWMPQQVAA

SEQ ID NO: 33404 - protein, 9 aa, Artificial Sequence
  Description of Artificial Sequence: Synthetic peptide
CWVVTSMSS

SEQ ID NO: 33405 - protein, 9 aa, Artificial Sequence
  Description of Artificial Sequence: Synthetic peptide
CYAIKQMDI

SEQ ID NO: 33406 - protein, 9 aa, Artificial Sequence
  Description of Artificial Sequence: Synthetic peptide
CYHTTNTSQ

SEQ ID NO: 33407 - protein, 9 aa, Artificial Sequence
  Description of Artificial Sequence: Synthetic peptide
CYHVYKDWS

SEQ ID NO: 33408 - protein, 9 aa, Artificial Sequence
  Description of Artificial Sequence: Synthetic peptide
CYMGLSFHW

SEQ ID NO: 33409 - protein, 9 aa, Artificial Sequence
  Description of Artificial Sequence: Synthetic peptide
CYPFYKDWS

SEQ ID NO: 33410 - protein, 9 aa, Artificial Sequence
  Description of Artificial Sequence: Synthetic peptide
CYPLYKDWS

SEQ ID NO: 33411 - protein, 9 aa, Artificial Sequence
  Description of Artificial Sequence: Synthetic peptide
CYPVSKDWS

SEQ ID NO: 33412 - protein, 9 aa, Artificial Sequence
  Description of Artificial Sequence: Synthetic peptide
CYPVYKAWS

SEQ ID NO: 33413 - protein, 9 aa, Artificial Sequence
  Description of Artificial Sequence: Synthetic peptide
CYPVYKDWT

SEQ ID NO: 33414 - protein, 9 aa, Artificial Sequence
  Description of Artificial Sequence: Synthetic peptide
CYPVYKNWS

SEQ ID NO: 33415 - protein, 9 aa, Artificial Sequence
  Description of Artificial Sequence: Synthetic peptide
CYPVYQDWS

SEQ ID NO: 33416 - protein, 9 aa, Artificial Sequence
  Description of Artificial Sequence: Synthetic peptide
CYPVYTDWS

SEQ ID NO: 33417 - protein, 9 aa, Artificial Sequence
  Description of Artificial Sequence: Synthetic peptide
CYSVYKDWS

SEQ ID NO: 33418 - protein, 9 aa, Artificial Sequence
  Description of Artificial Sequence: Synthetic peptide
CYTIKHMDI

SEQ ID NO: 33419 - protein, 9 aa, Artificial Sequence
  Description of Artificial Sequence: Synthetic peptide
CYTIKKMDI

SEQ ID NO: 33420 - protein, 9 aa, Artificial Sequence
  Description of Artificial Sequence: Synthetic peptide
CYTIKQMAI

SEQ ID NO: 33421 - protein, 9 aa, Artificial Sequence
  Description of Artificial Sequence: Synthetic peptide
CYTIKQMDL

SEQ ID NO: 33422 - protein, 9 aa, Artificial Sequence
  Description of Artificial Sequence: Synthetic peptide
CYTIKQMDM

SEQ ID NO: 33423 - protein, 9 aa, Artificial Sequence
  Description of Artificial Sequence: Synthetic peptide
CYTIKQMDS

SEQ ID NO: 33424 - protein, 9 aa, Artificial Sequence
  Description of Artificial Sequence: Synthetic peptide
CYTIKQMGI

SEQ ID NO: 33425 - protein, 9 aa, Artificial Sequence
  Description of Artificial Sequence: Synthetic peptide
CYTIKQMHI

SEQ ID NO: 33426 - protein, 9 aa, Artificial Sequence
  Description of Artificial Sequence: Synthetic peptide
CYTIKQMNI

SEQ ID NO: 33427 - protein, 9 aa, Artificial Sequence
  Description of Artificial Sequence: Synthetic peptide
CYTIKQVDI

SEQ ID NO: 33428 - protein, 9 aa, Artificial Sequence
  Description of Artificial Sequence: Synthetic peptide
CYTMKQMDI

SEQ ID NO: 33429 - protein, 9 aa, Artificial Sequence
  Description of Artificial Sequence: Synthetic peptide
CYTVYKDWS

SEQ ID NO: 33430 - protein, 9 aa, Artificial Sequence
  Description of Artificial Sequence: Synthetic peptide
DEPCPCDWS

SEQ ID NO: 33431 - protein, 9 aa, Artificial Sequence
  Description of Artificial Sequence: Synthetic peptide
DEPFPCDWA

SEQ ID NO: 33432 - protein, 9 aa, Artificial Sequence
  Description of Artificial Sequence: Synthetic peptide
DEPFPCDWT

SEQ ID NO: 33433 - protein, 9 aa, Artificial Sequence
  Description of Artificial Sequence: Synthetic peptide
DESFPCDWS

SEQ ID NO: 33434 - protein, 9 aa, Artificial Sequence
  Description of Artificial Sequence: Synthetic peptide
DFVRTNLGV

SEQ ID NO: 33435 - protein, 9 aa, Artificial Sequence
  Description of Artificial Sequence: Synthetic peptide
DHANQRVDR

SEQ ID NO: 33436 - protein, 9 aa, Artificial Sequence
  Description of Artificial Sequence: Synthetic peptide
DIFERSMMF

SEQ ID NO: 33437 - protein, 9 aa, Artificial Sequence
  Description of Artificial Sequence: Synthetic peptide
DKAGYGCHE

SEQ ID NO: 33438 - protein, 9 aa, Artificial Sequence
  Description of Artificial Sequence: Synthetic peptide
DKEDPQQWL

SEQ ID NO: 33439 - protein, 9 aa, Artificial Sequence
  Description of Artificial Sequence: Synthetic peptide
DKEEPEQWL

SEQ ID NO: 33440 - protein, 9 aa, Artificial Sequence
  Description of Artificial Sequence: Synthetic peptide
DKGGNGCHE

SEQ ID NO: 33441 - protein, 9 aa, Artificial Sequence
  Description of Artificial Sequence: Synthetic peptide
DKGGYGCNE

SEQ ID NO: 33442 - protein, 9 aa, Artificial Sequence
  Description of Artificial Sequence: Synthetic peptide
DKGGYGGHE

SEQ ID NO: 33443 - protein, 9 aa, Artificial Sequence
  Description of Artificial Sequence: Synthetic peptide
DKGGYSCHE

SEQ ID NO: 33444 - protein, 9 aa, Artificial Sequence
  Description of Artificial Sequence: Synthetic peptide
DKSEESRQE

SEQ ID NO: 33445 - protein, 9 aa, Artificial Sequence
  Description of Artificial Sequence: Synthetic peptide
DKSPWGANH

SEQ ID NO: 33446 - protein, 9 aa, Artificial Sequence
  Description of Artificial Sequence: Synthetic peptide
DKVGYGCHE

SEQ ID NO: 33447 - protein, 9 aa, Artificial Sequence
  Description of Artificial Sequence: Synthetic peptide
DQDGRCYKG

SEQ ID NO: 33448 - protein, 9 aa, Artificial Sequence
  Description of Artificial Sequence: Synthetic peptide
DQDGRCYKQ

SEQ ID NO: 33449 - protein, 9 aa, Artificial Sequence
  Description of Artificial Sequence: Synthetic peptide
DSEPSRGDH

SEQ ID NO: 33450 - protein, 9 aa, Artificial Sequence
  Description of Artificial Sequence: Synthetic peptide
DSQPSRGDY

SEQ ID NO: 33451 - protein, 9 aa, Artificial Sequence
  Description of Artificial Sequence: Synthetic peptide
DYAHQRVDR

SEQ ID NO: 33452 - protein, 9 aa, Artificial Sequence
  Description of Artificial Sequence: Synthetic peptide
DYANERVDR

SEQ ID NO: 33453 - protein, 9 aa, Artificial Sequence
  Description of Artificial Sequence: Synthetic peptide
DYANKRVDR

SEQ ID NO: 33454 - protein, 9 aa, Artificial Sequence
  Description of Artificial Sequence: Synthetic peptide
DYANQRGDR

SEQ ID NO: 33455 - protein, 9 aa, Artificial Sequence
  Description of Artificial Sequence: Synthetic peptide
DYATQRVDR

SEQ ID NO: 33456 - protein, 9 aa, Artificial Sequence
  Description of Artificial Sequence: Synthetic peptide
DYCRRTFHH

SEQ ID NO: 33457 - protein, 9 aa, Artificial Sequence
  Description of Artificial Sequence: Synthetic peptide
DYQPCHVHM

SEQ ID NO: 33458 - protein, 9 aa, Artificial Sequence
  Description of Artificial Sequence: Synthetic peptide
DYSNQRVDR

SEQ ID NO: 33459 - protein, 9 aa, Artificial Sequence
  Description of Artificial Sequence: Synthetic peptide
DYTNQRVDR

SEQ ID NO: 33460 - protein, 9 aa, Artificial Sequence
  Description of Artificial Sequence: Synthetic peptide
EDESRHISW

SEQ ID NO: 33461 - protein, 9 aa, Artificial Sequence
  Description of Artificial Sequence: Synthetic peptide
EDEYRHMSW

SEQ ID NO: 33462 - protein, 9 aa, Artificial Sequence
  Description of Artificial Sequence: Synthetic peptide
EDKSRHMSW

SEQ ID NO: 33463 - protein, 9 aa, Artificial Sequence
  Description of Artificial Sequence: Synthetic peptide
EFVTRKAAD

SEQ ID NO: 33464 - protein, 9 aa, Artificial Sequence
  Description of Artificial Sequence: Synthetic peptide
EFVTRKAAT

SEQ ID NO: 33465 - protein, 9 aa, Artificial Sequence
  Description of Artificial Sequence: Synthetic peptide
EGEDRQAFW

SEQ ID NO: 33466 - protein, 9 aa, Artificial Sequence
  Description of Artificial Sequence: Synthetic peptide
EHCNHDQGG

SEQ ID NO: 33467 - protein, 9 aa, Artificial Sequence
  Description of Artificial Sequence: Synthetic peptide
EIFERSMMY

SEQ ID NO: 33468 - protein, 9 aa, Artificial Sequence
  Description of Artificial Sequence: Synthetic peptide
EKAPWGANH

SEQ ID NO: 33469 - protein, 9 aa, Artificial Sequence
  Description of Artificial Sequence: Synthetic peptide
ESARYIDFA

SEQ ID NO: 33470 - protein, 9 aa, Artificial Sequence
  Description of Artificial Sequence: Synthetic peptide
ESARYLDFT

SEQ ID NO: 33471 - protein, 9 aa, Artificial Sequence
  Description of Artificial Sequence: Synthetic peptide
FAEPYTDHQ

SEQ ID NO: 33472 - protein, 9 aa, Artificial Sequence
  Description of Artificial Sequence: Synthetic peptide
FAERTTDHR

SEQ ID NO: 33473 - protein, 9 aa, Artificial Sequence
  Description of Artificial Sequence: Synthetic peptide
FAQRATDHR

SEQ ID NO: 33474 - protein, 9 aa, Artificial Sequence
  Description of Artificial Sequence: Synthetic peptide
FAQRNTDHR

SEQ ID NO: 33475 - protein, 9 aa, Artificial Sequence
  Description of Artificial Sequence: Synthetic peptide
FAQRTTHHR

SEQ ID NO: 33476 - protein, 9 aa, Artificial Sequence
  Description of Artificial Sequence: Synthetic peptide
FAQRTTNHR

SEQ ID NO: 33477 - protein, 9 aa, Artificial Sequence
  Description of Artificial Sequence: Synthetic peptide
FFGTPYHMS

SEQ ID NO: 33478 - protein, 9 aa, Artificial Sequence
  Description of Artificial Sequence: Synthetic peptide
FGHWAQDAS

SEQ ID NO: 33479 - protein, 9 aa, Artificial Sequence
  Description of Artificial Sequence: Synthetic peptide
FGQLIIKHR

SEQ ID NO: 33480 - protein, 9 aa, Artificial Sequence
  Description of Artificial Sequence: Synthetic peptide
FGQRTTDHR

SEQ ID NO: 33481 - protein, 9 aa, Artificial Sequence
  Description of Artificial Sequence: Synthetic peptide
FHDRHFTFT

SEQ ID NO: 33482 - protein, 9 aa, Artificial Sequence
  Description of Artificial Sequence: Synthetic peptide
FHDRPFNFT

SEQ ID NO: 33483 - protein, 9 aa, Artificial Sequence
  Description of Artificial Sequence: Synthetic peptide
FHDRPFTFA

SEQ ID NO: 33484 - protein, 9 aa, Artificial Sequence
  Description of Artificial Sequence: Synthetic peptide
FICLIKSAS

SEQ ID NO: 33485 - protein, 9 aa, Artificial Sequence
  Description of Artificial Sequence: Synthetic peptide
FICQIKSAA

SEQ ID NO: 33486 - protein, 9 aa, Artificial Sequence
  Description of Artificial Sequence: Synthetic peptide
FKCAHDPTG

SEQ ID NO: 33487 - protein, 9 aa, Artificial Sequence
  Description of Artificial Sequence: Synthetic peptide
FKMQMQYDS

SEQ ID NO: 33488 - protein, 9 aa, Artificial Sequence
  Description of Artificial Sequence: Synthetic peptide
FKVQMQYDN

SEQ ID NO: 33489 - protein, 9 aa, Artificial Sequence
  Description of Artificial Sequence: Synthetic peptide
FRAGMIVSC

SEQ ID NO: 33490 - protein, 9 aa, Artificial Sequence
  Description of Artificial Sequence: Synthetic peptide
FRDAMIVSC

SEQ ID NO: 33491 - protein, 9 aa, Artificial Sequence
  Description of Artificial Sequence: Synthetic peptide
FRDGMIFSC

SEQ ID NO: 33492 - protein, 9 aa, Artificial Sequence
  Description of Artificial Sequence: Synthetic peptide
FRDGMTVSC

SEQ ID NO: 33493 - protein, 9 aa, Artificial Sequence
  Description of Artificial Sequence: Synthetic peptide
FRDRPFTFT

SEQ ID NO: 33494 - protein, 9 aa, Artificial Sequence
  Description of Artificial Sequence: Synthetic peptide
FRHGMIVSC

SEQ ID NO: 33495 - protein, 9 aa, Artificial Sequence
  Description of Artificial Sequence: Synthetic peptide
FRNGMIVSC

SEQ ID NO: 33496 - protein, 9 aa, Artificial Sequence
  Description of Artificial Sequence: Synthetic peptide
FTQQRCAQC

SEQ ID NO: 33497 - protein, 9 aa, Artificial Sequence
  Description of Artificial Sequence: Synthetic peptide
FTQQRCGQC

SEQ ID NO: 33498 - protein, 9 aa, Artificial Sequence
  Description of Artificial Sequence: Synthetic peptide
FTQRTTDHR

SEQ ID NO: 33499 - protein, 9 aa, Artificial Sequence
  Description of Artificial Sequence: Synthetic peptide
FTRQRCVQC

SEQ ID NO: 33500 - protein, 9 aa, Artificial Sequence
  Description of Artificial Sequence: Synthetic peptide
FVEPYTDHR

SEQ ID NO: 33501 - protein, 9 aa, Artificial Sequence
  Description of Artificial Sequence: Synthetic peptide
FVEPYTHHQ

SEQ ID NO: 33502 - protein, 9 aa, Artificial Sequence
  Description of Artificial Sequence: Synthetic peptide
FVQPYTDHQ

SEQ ID NO: 33503 - protein, 9 aa, Artificial Sequence
  Description of Artificial Sequence: Synthetic peptide
FYWCCNREC

SEQ ID NO: 33504 - protein, 9 aa, Artificial Sequence
  Description of Artificial Sequence: Synthetic peptide
FYWCYTREC

SEQ ID NO: 33505 - protein, 9 aa, Artificial Sequence
  Description of Artificial Sequence: Synthetic peptide
FYWFCTREC

SEQ ID NO: 33506 - protein, 9 aa, Artificial Sequence
  Description of Artificial Sequence: Synthetic peptide
GAAVIRKMQ

SEQ ID NO: 33507 - protein, 9 aa, Artificial Sequence
  Description of Artificial Sequence: Synthetic peptide
GFAVIRKMQ

SEQ ID NO: 33508 - protein, 9 aa, Artificial Sequence
  Description of Artificial Sequence: Synthetic peptide
GGWIMRSKR

SEQ ID NO: 33509 - protein, 9 aa, Artificial Sequence
  Description of Artificial Sequence: Synthetic peptide
GIAVIRKMQ

SEQ ID NO: 33510 - protein, 9 aa, Artificial Sequence
  Description of Artificial Sequence: Synthetic peptide
GILPSVKFQ

SEQ ID NO: 33511 - protein, 9 aa, Artificial Sequence
  Description of Artificial Sequence: Synthetic peptide
GILPYGKFQ

SEQ ID NO: 33512 - protein, 9 aa, Artificial Sequence
  Description of Artificial Sequence: Synthetic peptide
GILPYVKVQ

SEQ ID NO: 33513 - protein, 9 aa, Artificial Sequence
  Description of Artificial Sequence: Synthetic peptide
GKCGFDVAA

SEQ ID NO: 33514 - protein, 9 aa, Artificial Sequence
  Description of Artificial Sequence: Synthetic peptide
GKFDMPSFF

SEQ ID NO: 33515 - protein, 9 aa, Artificial Sequence
  Description of Artificial Sequence: Synthetic peptide
GLAVIRKMQ

SEQ ID NO: 33516 - protein, 9 aa, Artificial Sequence
  Description of Artificial Sequence: Synthetic peptide
GLEHCRPGT

SEQ ID NO: 33517 - protein, 9 aa, Artificial Sequence
  Description of Artificial Sequence: Synthetic peptide
GLEWHTKNW

SEQ ID NO: 33518 - protein, 9 aa, Artificial Sequence
  Description of Artificial Sequence: Synthetic peptide
GLQWHTKDW

SEQ ID NO: 33519 - protein, 9 aa, Artificial Sequence
  Description of Artificial Sequence: Synthetic peptide
GNETSDNFH

SEQ ID NO: 33520 - protein, 9 aa, Artificial Sequence
  Description of Artificial Sequence: Synthetic peptide
GSQWLNDSF

SEQ ID NO: 33521 - protein, 9 aa, Artificial Sequence
  Description of Artificial Sequence: Synthetic peptide
GVAAIRKMQ

SEQ ID NO: 33522 - protein, 9 aa, Artificial Sequence
  Description of Artificial Sequence: Synthetic peptide
GVAGIRKMQ

SEQ ID NO: 33523 - protein, 9 aa, Artificial Sequence
  Description of Artificial Sequence: Synthetic peptide
GVAIIRKMQ

SEQ ID NO: 33524 - protein, 9 aa, Artificial Sequence
  Description of Artificial Sequence: Synthetic peptide
GVALIRKMQ

SEQ ID NO: 33525 - protein, 9 aa, Artificial Sequence
  Description of Artificial Sequence: Synthetic peptide
GVAVFRKMQ

SEQ ID NO: 33526 - protein, 9 aa, Artificial Sequence
  Description of Artificial Sequence: Synthetic peptide
GVAVIRKME

SEQ ID NO: 33527 - protein, 9 aa, Artificial Sequence
  Description of Artificial Sequence: Synthetic peptide
GVAVIRKMR

SEQ ID NO: 33528 - protein, 9 aa, Artificial Sequence
  Description of Artificial Sequence: Synthetic peptide
GVEWHTKDW

SEQ ID NO: 33529 - protein, 9 aa, Artificial Sequence
  Description of Artificial Sequence: Synthetic peptide
GVFPNMFAH

SEQ ID NO: 33530 - protein, 9 aa, Artificial Sequence
  Description of Artificial Sequence: Synthetic peptide
GVFPNMFSP

SEQ ID NO: 33531 - protein, 9 aa, Artificial Sequence
  Description of Artificial Sequence: Synthetic peptide
GVTVIRKMQ

SEQ ID NO: 33532 - protein, 9 aa, Artificial Sequence
  Description of Artificial Sequence: Synthetic peptide
GVVVIRKMQ

SEQ ID NO: 33533 - protein, 9 aa, Artificial Sequence
  Description of Artificial Sequence: Synthetic peptide
GVWIVRSKR

SEQ ID NO: 33534 - protein, 9 aa, Artificial Sequence
  Description of Artificial Sequence: Synthetic peptide
GYANQRVDR

SEQ ID NO: 33535 - protein, 9 aa, Artificial Sequence
  Description of Artificial Sequence: Synthetic peptide
HCCFKNGDL

SEQ ID NO: 33536 - protein, 9 aa, Artificial Sequence
  Description of Artificial Sequence: Synthetic peptide
HCCFKNVDM

SEQ ID NO: 33537 - protein, 9 aa, Artificial Sequence
  Description of Artificial Sequence: Synthetic peptide
HCCFKSGDM

SEQ ID NO: 33538 - protein, 9 aa, Artificial Sequence
  Description of Artificial Sequence: Synthetic peptide
HCCFKTGDM

SEQ ID NO: 33539 - protein, 9 aa, Artificial Sequence
  Description of Artificial Sequence: Synthetic peptide
HCCFKYGDM

SEQ ID NO: 33540 - protein, 9 aa, Artificial Sequence
  Description of Artificial Sequence: Synthetic peptide
HCCFRNGDM

SEQ ID NO: 33541 - protein, 9 aa, Artificial Sequence
  Description of Artificial Sequence: Synthetic peptide
HKVNLKGDE

SEQ ID NO: 33542 - protein, 9 aa, Artificial Sequence
  Description of Artificial Sequence: Synthetic peptide
HKVTIFKDR

SEQ ID NO: 33543 - protein, 9 aa, Artificial Sequence
  Description of Artificial Sequence: Synthetic peptide
HQLEFDFVG

SEQ ID NO: 33544 - protein, 9 aa, Artificial Sequence
  Description of Artificial Sequence: Synthetic peptide
HQMEFDFVG

SEQ ID NO: 33545 - protein, 9 aa, Artificial Sequence
  Description of Artificial Sequence: Synthetic peptide
HRVTIFKDR

SEQ ID NO: 33546 - protein, 9 aa, Artificial Sequence
  Description of Artificial Sequence: Synthetic peptide
HYCRSGDVQ

SEQ ID NO: 33547 - protein, 9 aa, Artificial Sequence
  Description of Artificial Sequence: Synthetic peptide
IAAQIDDRE

SEQ ID NO: 33548 - protein, 9 aa, Artificial Sequence
  Description of Artificial Sequence: Synthetic peptide
IAAQSDDRQ

SEQ ID NO: 33549 - protein, 9 aa, Artificial Sequence
  Description of Artificial Sequence: Synthetic peptide
IAARSDDRE

SEQ ID NO: 33550 - protein, 9 aa, Artificial Sequence
  Description of Artificial Sequence: Synthetic peptide
IADQSDDRE

SEQ ID NO: 33551 - protein, 9 aa, Artificial Sequence
  Description of Artificial Sequence: Synthetic peptide
IAVCVIRDN

SEQ ID NO: 33552 - protein, 9 aa, Artificial Sequence
  Description of Artificial Sequence: Synthetic peptide
ICARWHCGP

SEQ ID NO: 33553 - protein, 9 aa, Artificial Sequence
  Description of Artificial Sequence: Synthetic peptide
ICLLITKTE

SEQ ID NO: 33554 - protein, 9 aa, Artificial Sequence
  Description of Artificial Sequence: Synthetic peptide
ICLRWHCGP

SEQ ID NO: 33555 - protein, 9 aa, Artificial Sequence
  Description of Artificial Sequence: Synthetic peptide
ICVRWHCGS

SEQ ID NO: 33556 - protein, 9 aa, Artificial Sequence
  Description of Artificial Sequence: Synthetic peptide
ICVRWHCGT

SEQ ID NO: 33557 - protein, 9 aa, Artificial Sequence
  Description of Artificial Sequence: Synthetic peptide
ICWLFTKTE

SEQ ID NO: 33558 - protein, 9 aa, Artificial Sequence
  Description of Artificial Sequence: Synthetic peptide
ICWLIAKTE

SEQ ID NO: 33559 - protein, 9 aa, Artificial Sequence
  Description of Artificial Sequence: Synthetic peptide
ICWLIKKTE

SEQ ID NO: 33560 - protein, 9 aa, Artificial Sequence
  Description of Artificial Sequence: Synthetic peptide
ICWLIPKTE

SEQ ID NO: 33561 - protein, 9 aa, Artificial Sequence
  Description of Artificial Sequence: Synthetic peptide
ICWLISKTE

SEQ ID NO: 33562 - protein, 9 aa, Artificial Sequence
  Description of Artificial Sequence: Synthetic peptide
ICWLITKNE

SEQ ID NO: 33563 - protein, 9 aa, Artificial Sequence
  Description of Artificial Sequence: Synthetic peptide
ICWLITKTG

SEQ ID NO: 33564 - protein, 9 aa, Artificial Sequence
  Description of Artificial Sequence: Synthetic peptide
ICWLITKTQ

SEQ ID NO: 33565 - protein, 9 aa, Artificial Sequence
  Description of Artificial Sequence: Synthetic peptide
ICWSITKTE

SEQ ID NO: 33566 - protein, 9 aa, Artificial Sequence
  Description of Artificial Sequence: Synthetic peptide
ICWWITKTE

SEQ ID NO: 33567 - protein, 9 aa, Artificial Sequence
  Description of Artificial Sequence: Synthetic peptide
ISACVIRDN

SEQ ID NO: 33568 - protein, 9 aa, Artificial Sequence
  Description of Artificial Sequence: Synthetic peptide
ISCRTQSDC

SEQ ID NO: 33569 - protein, 9 aa, Artificial Sequence
  Description of Artificial Sequence: Synthetic peptide
ISVCVIRDT

SEQ ID NO: 33570 - protein, 9 aa, Artificial Sequence
  Description of Artificial Sequence: Synthetic peptide
IVQQIRDFH

SEQ ID NO: 33571 - protein, 9 aa, Artificial Sequence
  Description of Artificial Sequence: Synthetic peptide
IWECPRAGS

SEQ ID NO: 33572 - protein, 9 aa, Artificial Sequence
  Description of Artificial Sequence: Synthetic peptide
IWECPRLGS

SEQ ID NO: 33573 - protein, 9 aa, Artificial Sequence
  Description of Artificial Sequence: Synthetic peptide
KADRFMVDQ

SEQ ID NO: 33574 - protein, 9 aa, Artificial Sequence
  Description of Artificial Sequence: Synthetic peptide
KAEHEEMWN

SEQ ID NO: 33575 - protein, 9 aa, Artificial Sequence
  Description of Artificial Sequence: Synthetic peptide
KAEYFDASA

SEQ ID NO: 33576 - protein, 9 aa, Artificial Sequence
  Description of Artificial Sequence: Synthetic peptide
KCAFNGIDE

SEQ ID NO: 33577 - protein, 9 aa, Artificial Sequence
  Description of Artificial Sequence: Synthetic peptide
KCDYRNMHF

SEQ ID NO: 33578 - protein, 9 aa, Artificial Sequence
  Description of Artificial Sequence: Synthetic peptide
KELLCSDDA

SEQ ID NO: 33579 - protein, 9 aa, Artificial Sequence
  Description of Artificial Sequence: Synthetic peptide
KGDRFMVDP

SEQ ID NO: 33580 - protein, 9 aa, Artificial Sequence
  Description of Artificial Sequence: Synthetic peptide
KGKPWGHHN

SEQ ID NO: 33581 - protein, 9 aa, Artificial Sequence
  Description of Artificial Sequence: Synthetic peptide
KHCHSMQFG

SEQ ID NO: 33582 - protein, 9 aa, Artificial Sequence
  Description of Artificial Sequence: Synthetic peptide
KHCRSMQFE

SEQ ID NO: 33583 - protein, 9 aa, Artificial Sequence
  Description of Artificial Sequence: Synthetic peptide
KHCYSMQFE

SEQ ID NO: 33584 - protein, 9 aa, Artificial Sequence
  Description of Artificial Sequence: Synthetic peptide
KIVCRVNYP

SEQ ID NO: 33585 - protein, 9 aa, Artificial Sequence
  Description of Artificial Sequence: Synthetic peptide
KKLNIQKQS

SEQ ID NO: 33586 - protein, 9 aa, Artificial Sequence
  Description of Artificial Sequence: Synthetic peptide
KLCFKEDAF

SEQ ID NO: 33587 - protein, 9 aa, Artificial Sequence
  Description of Artificial Sequence: Synthetic peptide
KMCSSAKSY

SEQ ID NO: 33588 - protein, 9 aa, Artificial Sequence
  Description of Artificial Sequence: Synthetic peptide
KMCTLTKAD

SEQ ID NO: 33589 - protein, 9 aa, Artificial Sequence
  Description of Artificial Sequence: Synthetic peptide
KMFSSAKSY

SEQ ID NO: 33590 - protein, 9 aa, Artificial Sequence
  Description of Artificial Sequence: Synthetic peptide
KMYPSAKSY

SEQ ID NO: 33591 - protein, 9 aa, Artificial Sequence
  Description of Artificial Sequence: Synthetic peptide
KMYSSVKSY

SEQ ID NO: 33592 - protein, 9 aa, Artificial Sequence
  Description of Artificial Sequence: Synthetic peptide
KQCHSMQFE

SEQ ID NO: 33593 - protein, 9 aa, Artificial Sequence
  Description of Artificial Sequence: Synthetic peptide
KSAMPMNDD

SEQ ID NO: 33594 - protein, 9 aa, Artificial Sequence
  Description of Artificial Sequence: Synthetic peptide
KSARCTLHM

SEQ ID NO: 33595 - protein, 9 aa, Artificial Sequence
  Description of Artificial Sequence: Synthetic peptide
KSCLYFDAC

SEQ ID NO: 33596 - protein, 9 aa, Artificial Sequence
  Description of Artificial Sequence: Synthetic peptide
KSCLYFDAF

SEQ ID NO: 33597 - protein, 9 aa, Artificial Sequence
  Description of Artificial Sequence: Synthetic peptide
KSCLYFDSY

SEQ ID NO: 33598 - protein, 9 aa, Artificial Sequence
  Description of Artificial Sequence: Synthetic peptide
KSSWTDSFG

SEQ ID NO: 33599 - protein, 9 aa, Artificial Sequence
  Description of Artificial Sequence: Synthetic peptide
KSVRCKLHM

SEQ ID NO: 33600 - protein, 9 aa, Artificial Sequence
  Description of Artificial Sequence: Synthetic peptide
KVCFKEDAI

SEQ ID NO: 33601 - protein, 9 aa, Artificial Sequence
  Description of Artificial Sequence: Synthetic peptide
KVCFKEDGF

SEQ ID NO: 33602 - protein, 9 aa, Artificial Sequence
  Description of Artificial Sequence: Synthetic peptide
KVCFKEDPF

SEQ ID NO: 33603 - protein, 9 aa, Artificial Sequence
  Description of Artificial Sequence: Synthetic peptide
KVCFKEDSF

SEQ ID NO: 33604 - protein, 9 aa, Artificial Sequence
  Description of Artificial Sequence: Synthetic peptide
KVCYKEDAF

SEQ ID NO: 33605 - protein, 9 aa, Artificial Sequence
  Description of Artificial Sequence: Synthetic peptide
KWCLSIDYR

SEQ ID NO: 33606 - protein, 9 aa, Artificial Sequence
  Description of Artificial Sequence: Synthetic peptide
KWFLSIDYP

SEQ ID NO: 33607 - protein, 9 aa, Artificial Sequence
  Description of Artificial Sequence: Synthetic peptide
KWFLSIDYS

SEQ ID NO: 33608 - protein, 9 aa, Artificial Sequence
  Description of Artificial Sequence: Synthetic peptide
KWFLSMDYR

SEQ ID NO: 33609 - protein, 9 aa, Artificial Sequence
  Description of Artificial Sequence: Synthetic peptide
KWFPSIDYR

SEQ ID NO: 33610 - protein, 9 aa, Artificial Sequence
  Description of Artificial Sequence: Synthetic peptide
KWFVSIDYR

SEQ ID NO: 33611 - protein, 9 aa, Artificial Sequence
  Description of Artificial Sequence: Synthetic peptide
KWVLSIDYR

SEQ ID NO: 33612 - protein, 9 aa, Artificial Sequence
  Description of Artificial Sequence: Synthetic peptide
KYARCKLHM

SEQ ID NO: 33613 - protein, 9 aa, Artificial Sequence
  Description of Artificial Sequence: Synthetic peptide
LAAQSDDRE

SEQ ID NO: 33614 - protein, 9 aa, Artificial Sequence
  Description of Artificial Sequence: Synthetic peptide
LAARIGEVK

SEQ ID NO: 33615 - protein, 9 aa, Artificial Sequence
  Description of Artificial Sequence: Synthetic peptide
LAARIGKVE

SEQ ID NO: 33616 - protein, 9 aa, Artificial Sequence
  Description of Artificial Sequence: Synthetic peptide
LAARSGEVE

SEQ ID NO: 33617 - protein, 9 aa, Artificial Sequence
  Description of Artificial Sequence: Synthetic peptide
LCVRWHCGP

SEQ ID NO: 33618 - protein, 9 aa, Artificial Sequence
  Description of Artificial Sequence: Synthetic peptide
LCWLITKTE

SEQ ID NO: 33619 - protein, 9 aa, Artificial Sequence
  Description of Artificial Sequence: Synthetic peptide
LGIRNMELR

SEQ ID NO: 33620 - protein, 9 aa, Artificial Sequence
  Description of Artificial Sequence: Synthetic peptide
LKHPAWKEE

SEQ ID NO: 33621 - protein, 9 aa, Artificial Sequence
  Description of Artificial Sequence: Synthetic peptide
LKHPIWKEE

SEQ ID NO: 33622 - protein, 9 aa, Artificial Sequence
  Description of Artificial Sequence: Synthetic peptide
LKHPNWKEE

SEQ ID NO: 33623 - protein, 9 aa, Artificial Sequence
  Description of Artificial Sequence: Synthetic peptide
LKHPPWKEE

SEQ ID NO: 33624 - protein, 9 aa, Artificial Sequence
  Description of Artificial Sequence: Synthetic peptide
LKHPSWKEE

SEQ ID NO: 33625 - protein, 9 aa, Artificial Sequence
  Description of Artificial Sequence: Synthetic peptide
LKHPTWREE

SEQ ID NO: 33626 - protein, 9 aa, Artificial Sequence
  Description of Artificial Sequence: Synthetic peptide
LKHTTWKEE

SEQ ID NO: 33627 - protein, 9 aa, Artificial Sequence
  Description of Artificial Sequence: Synthetic peptide
LKLPTWKEE

SEQ ID NO: 33628 - protein, 9 aa, Artificial Sequence
  Description of Artificial Sequence: Synthetic peptide
LKPPTWKEE

SEQ ID NO: 33629 - protein, 9 aa, Artificial Sequence
  Description of Artificial Sequence: Synthetic peptide
MAANCEVFG

SEQ ID NO: 33630 - protein, 9 aa, Artificial Sequence
  Description of Artificial Sequence: Synthetic peptide
MANENRGIR

SEQ ID NO: 33631 - protein, 9 aa, Artificial Sequence
  Description of Artificial Sequence: Synthetic peptide
MANENRGVH

SEQ ID NO: 33632 - protein, 9 aa, Artificial Sequence
  Description of Artificial Sequence: Synthetic peptide
MANENRVIH

SEQ ID NO: 33633 - protein, 9 aa, Artificial Sequence
  Description of Artificial Sequence: Synthetic peptide
MASENRGIH

SEQ ID NO: 33634 - protein, 9 aa, Artificial Sequence
  Description of Artificial Sequence: Synthetic peptide
MATPERQMP

SEQ ID NO: 33635 - protein, 9 aa, Artificial Sequence
  Description of Artificial Sequence: Synthetic peptide
MAVNCEVFA

SEQ ID NO: 33636 - protein, 9 aa, Artificial Sequence
  Description of Artificial Sequence: Synthetic peptide
MCIRSGFVV

SEQ ID NO: 33637 - protein, 9 aa, Artificial Sequence
  Description of Artificial Sequence: Synthetic peptide
MCIRSGIIV

SEQ ID NO: 33638 - protein, 9 aa, Artificial Sequence
  Description of Artificial Sequence: Synthetic peptide
MCLRSGFIV

SEQ ID NO: 33639 - protein, 9 aa, Artificial Sequence
  Description of Artificial Sequence: Synthetic peptide
MCVRSGFIV

SEQ ID NO: 33640 - protein, 9 aa, Artificial Sequence
  Description of Artificial Sequence: Synthetic peptide
MCWLITKTE

SEQ ID NO: 33641 - protein, 9 aa, Artificial Sequence
  Description of Artificial Sequence: Synthetic peptide
MEDRLAHYY

SEQ ID NO: 33642 - protein, 9 aa, Artificial Sequence
  Description of Artificial Sequence: Synthetic peptide
MEDRVAHYH

SEQ ID NO: 33643 - protein, 9 aa, Artificial Sequence
  Description of Artificial Sequence: Synthetic peptide
MKHPTWKEE

SEQ ID NO: 33644 - protein, 9 aa, Artificial Sequence
  Description of Artificial Sequence: Synthetic peptide
MKIPNIQTI

SEQ ID NO: 33645 - protein, 9 aa, Artificial Sequence
  Description of Artificial Sequence: Synthetic peptide
MKMPRWGMP

SEQ ID NO: 33646 - protein, 9 aa, Artificial Sequence
  Description of Artificial Sequence: Synthetic peptide
MKMTRWGML

SEQ ID NO: 33647 - protein, 9 aa, Artificial Sequence
  Description of Artificial Sequence: Synthetic peptide
MKMTRWGMQ

SEQ ID NO: 33648 - protein, 9 aa, Artificial Sequence
  Description of Artificial Sequence: Synthetic peptide
MKMTRWGMS

SEQ ID NO: 33649 - protein, 9 aa, Artificial Sequence
  Description of Artificial Sequence: Synthetic peptide
MKTPTIQTI

SEQ ID NO: 33650 - protein, 9 aa, Artificial Sequence
  Description of Artificial Sequence: Synthetic peptide
MKVTRWGMP

SEQ ID NO: 33651 - protein, 9 aa, Artificial Sequence
  Description of Artificial Sequence: Synthetic peptide
MQNACFKNP

SEQ ID NO: 33652 - protein, 9 aa, Artificial Sequence
  Description of Artificial Sequence: Synthetic peptide
MSVCVIRDN

SEQ ID NO: 33653 - protein, 9 aa, Artificial Sequence
  Description of Artificial Sequence: Synthetic peptide
MVAHNRLAN

SEQ ID NO: 33654 - protein, 9 aa, Artificial Sequence
  Description of Artificial Sequence: Synthetic peptide
MVANCEVFA

SEQ ID NO: 33655 - protein, 9 aa, Artificial Sequence
  Description of Artificial Sequence: Synthetic peptide
MVEHNRLAD

SEQ ID NO: 33656 - protein, 9 aa, Artificial Sequence
  Description of Artificial Sequence: Synthetic peptide
MVEHNRLAH

SEQ ID NO: 33657 - protein, 9 aa, Artificial Sequence
  Description of Artificial Sequence: Synthetic peptide
MVEHNRLDN

SEQ ID NO: 33658 - protein, 9 aa, Artificial Sequence
  Description of Artificial Sequence: Synthetic peptide
MVEHNRLGN

SEQ ID NO: 33659 - protein, 9 aa, Artificial Sequence
  Description of Artificial Sequence: Synthetic peptide
MVEHNRVAN

SEQ ID NO: 33660 - protein, 9 aa, Artificial Sequence
  Description of Artificial Sequence: Synthetic peptide
MVVYREHMG

SEQ ID NO: 33661 - protein, 9 aa, Artificial Sequence
  Description of Artificial Sequence: Synthetic peptide
MVVYRENMA

SEQ ID NO: 33662 - protein, 9 aa, Artificial Sequence
  Description of Artificial Sequence: Synthetic peptide
MVVYRETMG

SEQ ID NO: 33663 - protein, 9 aa, Artificial Sequence
  Description of Artificial Sequence: Synthetic peptide
MYAERNADM

SEQ ID NO: 33664 - protein, 9 aa, Artificial Sequence
  Description of Artificial Sequence: Synthetic peptide
MYVWRNDFA

SEQ ID NO: 33665 - protein, 9 aa, Artificial Sequence
  Description of Artificial Sequence: Synthetic peptide
MYVWRNDGA

SEQ ID NO: 33666 - protein, 9 aa, Artificial Sequence
  Description of Artificial Sequence: Synthetic peptide
NAIRIFLFG

SEQ ID NO: 33667 - protein, 9 aa, Artificial Sequence
  Description of Artificial Sequence: Synthetic peptide
NCCFKNGDM

SEQ ID NO: 33668 - protein, 9 aa, Artificial Sequence
  Description of Artificial Sequence: Synthetic peptide
NCIHNWKHA

SEQ ID NO: 33669 - protein, 9 aa, Artificial Sequence
  Description of Artificial Sequence: Synthetic peptide
NCIHNWQHT

SEQ ID NO: 33670 - protein, 9 aa, Artificial Sequence
  Description of Artificial Sequence: Synthetic peptide
NFFYMDKLS

SEQ ID NO: 33671 - protein, 9 aa, Artificial Sequence
  Description of Artificial Sequence: Synthetic peptide
NFQHVRMLE

SEQ ID NO: 33672 - protein, 9 aa, Artificial Sequence
  Description of Artificial Sequence: Synthetic peptide
NFYETLKRI

SEQ ID NO: 33673 - protein, 9 aa, Artificial Sequence
  Description of Artificial Sequence: Synthetic peptide
NGIRIFLFA

SEQ ID NO: 33674 - protein, 9 aa, Artificial Sequence
  Description of Artificial Sequence: Synthetic peptide
NGIRIFLFV

SEQ ID NO: 33675 - protein, 9 aa, Artificial Sequence
  Description of Artificial Sequence: Synthetic peptide
NGIRNFLFG

SEQ ID NO: 33676 - protein, 9 aa, Artificial Sequence
  Description of Artificial Sequence: Synthetic peptide
NGIRSFLFG

SEQ ID NO: 33677 - protein, 9 aa, Artificial Sequence
  Description of Artificial Sequence: Synthetic peptide
NGLRIFLFG

SEQ ID NO: 33678 - protein, 9 aa, Artificial Sequence
  Description of Artificial Sequence: Synthetic peptide
NGVRIFLFG

SEQ ID NO: 33679 - protein, 9 aa, Artificial Sequence
  Description of Artificial Sequence: Synthetic peptide
NKCAHDPTG

SEQ ID NO: 33680 - protein, 9 aa, Artificial Sequence
  Description of Artificial Sequence: Synthetic peptide
NKCGFDVAA

SEQ ID NO: 33681 - protein, 9 aa, Artificial Sequence
  Description of Artificial Sequence: Synthetic peptide
NSCRRTFHH

SEQ ID NO: 33682 - protein, 9 aa, Artificial Sequence
  Description of Artificial Sequence: Synthetic peptide
NYANQRVDR

SEQ ID NO: 33683 - protein, 9 aa, Artificial Sequence
  Description of Artificial Sequence: Synthetic peptide
NYCRRTFHL

SEQ ID NO: 33684 - protein, 9 aa, Artificial Sequence
  Description of Artificial Sequence: Synthetic peptide
NYCRRTFHP

SEQ ID NO: 33685 - protein, 9 aa, Artificial Sequence
  Description of Artificial Sequence: Synthetic peptide
NYCRRTFHQ

SEQ ID NO: 33686 - protein, 9 aa, Artificial Sequence
  Description of Artificial Sequence: Synthetic peptide
NYCRRTFHR

SEQ ID NO: 33687 - protein, 9 aa, Artificial Sequence
  Description of Artificial Sequence: Synthetic peptide
NYCRRTFHY

SEQ ID NO: 33688 - protein, 9 aa, Artificial Sequence
  Description of Artificial Sequence: Synthetic peptide
NYCRRTFYH

SEQ ID NO: 33689 - protein, 9 aa, Artificial Sequence
  Description of Artificial Sequence: Synthetic peptide
PANHARNPE

SEQ ID NO: 33690 - protein, 9 aa, Artificial Sequence
  Description of Artificial Sequence: Synthetic peptide
PANHARNPQ

SEQ ID NO: 33691 - protein, 9 aa, Artificial Sequence
  Description of Artificial Sequence: Synthetic peptide
PANHARNPR

SEQ ID NO: 33692 - protein, 9 aa, Artificial Sequence
  Description of Artificial Sequence: Synthetic peptide
PANHARTPK

SEQ ID NO: 33693 - protein, 9 aa, Artificial Sequence
  Description of Artificial Sequence: Synthetic peptide
PVCPTRYAD

SEQ ID NO: 33694 - protein, 9 aa, Artificial Sequence
  Description of Artificial Sequence: Synthetic peptide
PVNHARNPK

SEQ ID NO: 33695 - protein, 9 aa, Artificial Sequence
  Description of Artificial Sequence: Synthetic peptide
QAESRDVLD

SEQ ID NO: 33696 - protein, 9 aa, Artificial Sequence
  Description of Artificial Sequence: Synthetic peptide
QAKSRDGLD

SEQ ID NO: 33697 - protein, 9 aa, Artificial Sequence
  Description of Artificial Sequence: Synthetic peptide
QAKSRDVLA

SEQ ID NO: 33698 - protein, 9 aa, Artificial Sequence
  Description of Artificial Sequence: Synthetic peptide
QAKSRDVLN

SEQ ID NO: 33699 - protein, 9 aa, Artificial Sequence
  Description of Artificial Sequence: Synthetic peptide
QAKSRDVMD

SEQ ID NO: 33700 - protein, 9 aa, Artificial Sequence
  Description of Artificial Sequence: Synthetic peptide
QCAYRNMHF

SEQ ID NO: 33701 - protein, 9 aa, Artificial Sequence
  Description of Artificial Sequence: Synthetic peptide
QCCFKNGDM

SEQ ID NO: 33702 - protein, 9 aa, Artificial Sequence
  Description of Artificial Sequence: Synthetic peptide
QCDYRDMHF

SEQ ID NO: 33703 - protein, 9 aa, Artificial Sequence
  Description of Artificial Sequence: Synthetic peptide
QCDYRNMDF

SEQ ID NO: 33704 - protein, 9 aa, Artificial Sequence
  Description of Artificial Sequence: Synthetic peptide
QCDYRNMNF

SEQ ID NO: 33705 - protein, 9 aa, Artificial Sequence
  Description of Artificial Sequence: Synthetic peptide
QCHYRNMHF

SEQ ID NO: 33706 - protein, 9 aa, Artificial Sequence
  Description of Artificial Sequence: Synthetic peptide
QCNYRNMHF

SEQ ID NO: 33707 - protein, 9 aa, Artificial Sequence
  Description of Artificial Sequence: Synthetic peptide
QCVYRNMHF

SEQ ID NO: 33708 - protein, 9 aa, Artificial Sequence
  Description of Artificial Sequence: Synthetic peptide
QFDYRNMHF

SEQ ID NO: 33709 - protein, 9 aa, Artificial Sequence
  Description of Artificial Sequence: Synthetic peptide
QGGRILTSA

SEQ ID NO: 33710 - protein, 9 aa, Artificial Sequence
  Description of Artificial Sequence: Synthetic peptide
QGKSRDVLD

SEQ ID NO: 33711 - protein, 9 aa, Artificial Sequence
  Description of Artificial Sequence: Synthetic peptide
QGNDAIVWQ

SEQ ID NO: 33712 - protein, 9 aa, Artificial Sequence
  Description of Artificial Sequence: Synthetic peptide
QHCNHDQGV

SEQ ID NO: 33713 - protein, 9 aa, Artificial Sequence
  Description of Artificial Sequence: Synthetic peptide
QKIPVNDHQ

SEQ ID NO: 33714 - protein, 9 aa, Artificial Sequence
  Description of Artificial Sequence: Synthetic peptide
QKLDIQKQS

SEQ ID NO: 33715 - protein, 9 aa, Artificial Sequence
  Description of Artificial Sequence: Synthetic peptide
QKLKIQKQS

SEQ ID NO: 33716 - protein, 9 aa, Artificial Sequence
  Description of Artificial Sequence: Synthetic peptide
QKLNIKKQS

SEQ ID NO: 33717 - protein, 9 aa, Artificial Sequence
  Description of Artificial Sequence: Synthetic peptide
QKLNIQKQP

SEQ ID NO: 33718 - protein, 9 aa, Artificial Sequence
  Description of Artificial Sequence: Synthetic peptide
QKLNMQKQS

SEQ ID NO: 33719 - protein, 9 aa, Artificial Sequence
  Description of Artificial Sequence: Synthetic peptide
QKLNVQKQS

SEQ ID NO: 33720 - protein, 9 aa, Artificial Sequence
  Description of Artificial Sequence: Synthetic peptide
QKLPVNDHQ

SEQ ID NO: 33721 - protein, 9 aa, Artificial Sequence
  Description of Artificial Sequence: Synthetic peptide
QKVHVNDHQ

SEQ ID NO: 33722 - protein, 9 aa, Artificial Sequence
  Description of Artificial Sequence: Synthetic peptide
QKVNIQKQS

SEQ ID NO: 33723 - protein, 9 aa, Artificial Sequence
  Description of Artificial Sequence: Synthetic peptide
QKVPLNDHQ

SEQ ID NO: 33724 - protein, 9 aa, Artificial Sequence
  Description of Artificial Sequence: Synthetic peptide
QKVPVSDHQ

SEQ ID NO: 33725 - protein, 9 aa, Artificial Sequence
  Description of Artificial Sequence: Synthetic peptide
QKVPVTDHQ

SEQ ID NO: 33726 - protein, 9 aa, Artificial Sequence
  Description of Artificial Sequence: Synthetic peptide
QKVQVNDHQ

SEQ ID NO: 33727 - protein, 9 aa, Artificial Sequence
  Description of Artificial Sequence: Synthetic peptide
QMCTLTKTD

SEQ ID NO: 33728 - protein, 9 aa, Artificial Sequence
  Description of Artificial Sequence: Synthetic peptide
QQVTIFKDR

SEQ ID NO: 33729 - protein, 9 aa, Artificial Sequence
  Description of Artificial Sequence: Synthetic peptide
QSARYIDFT

SEQ ID NO: 33730 - protein, 9 aa, Artificial Sequence
  Description of Artificial Sequence: Synthetic peptide
QTKGRDGAC

SEQ ID NO: 33731 - protein, 9 aa, Artificial Sequence
  Description of Artificial Sequence: Synthetic peptide
QVKSRDVLD

SEQ ID NO: 33732 - protein, 9 aa, Artificial Sequence
  Description of Artificial Sequence: Synthetic peptide
QWTRWLIVT

SEQ ID NO: 33733 - protein, 9 aa, Artificial Sequence
  Description of Artificial Sequence: Synthetic peptide
RACFEMKHI

SEQ ID NO: 33734 - protein, 9 aa, Artificial Sequence
  Description of Artificial Sequence: Synthetic peptide
RADVTNHRY

SEQ ID NO: 33735 - protein, 9 aa, Artificial Sequence
  Description of Artificial Sequence: Synthetic peptide
RAQSQWDGC

SEQ ID NO: 33736 - protein, 9 aa, Artificial Sequence
  Description of Artificial Sequence: Synthetic peptide
RASCGISMA

SEQ ID NO: 33737 - protein, 9 aa, Artificial Sequence
  Description of Artificial Sequence: Synthetic peptide
RAVTPCHYN

SEQ ID NO: 33738 - protein, 9 aa, Artificial Sequence
  Description of Artificial Sequence: Synthetic peptide
RCCFKNGDM

SEQ ID NO: 33739 - protein, 9 aa, Artificial Sequence
  Description of Artificial Sequence: Synthetic peptide
RCVQPQKEA

SEQ ID NO: 33740 - protein, 9 aa, Artificial Sequence
  Description of Artificial Sequence: Synthetic peptide
RCVQPQKKG

SEQ ID NO: 33741 - protein, 9 aa, Artificial Sequence
  Description of Artificial Sequence: Synthetic peptide
RDLMYTDKA

SEQ ID NO: 33742 - protein, 9 aa, Artificial Sequence
  Description of Artificial Sequence: Synthetic peptide
RHKWRSIWK

SEQ ID NO: 33743 - protein, 9 aa, Artificial Sequence
  Description of Artificial Sequence: Synthetic peptide
RINPDIIAP

SEQ ID NO: 33744 - protein, 9 aa, Artificial Sequence
  Description of Artificial Sequence: Synthetic peptide
RISHDIIAP

SEQ ID NO: 33745 - protein, 9 aa, Artificial Sequence
  Description of Artificial Sequence: Synthetic peptide
RISPDIIAL

SEQ ID NO: 33746 - protein, 9 aa, Artificial Sequence
  Description of Artificial Sequence: Synthetic peptide
RISPDIIAS

SEQ ID NO: 33747 - protein, 9 aa, Artificial Sequence
  Description of Artificial Sequence: Synthetic peptide
RISPDIIGP

SEQ ID NO: 33748 - protein, 9 aa, Artificial Sequence
  Description of Artificial Sequence: Synthetic peptide
RISPDILAP

SEQ ID NO: 33749 - protein, 9 aa, Artificial Sequence
  Description of Artificial Sequence: Synthetic peptide
RISPDTIAP

SEQ ID NO: 33750 - protein, 9 aa, Artificial Sequence
  Description of Artificial Sequence: Synthetic peptide
RISPEIIAP

SEQ ID NO: 33751 - protein, 9 aa, Artificial Sequence
  Description of Artificial Sequence: Synthetic peptide
RISPNIIAP

SEQ ID NO: 33752 - protein, 9 aa, Artificial Sequence
  Description of Artificial Sequence: Synthetic peptide
RISRDIIAP

SEQ ID NO: 33753 - protein, 9 aa, Artificial Sequence
  Description of Artificial Sequence: Synthetic peptide
RIVCRVNYP

SEQ ID NO: 33754 - protein, 9 aa, Artificial Sequence
  Description of Artificial Sequence: Synthetic peptide
RKHGLLFMG

SEQ ID NO: 33755 - protein, 9 aa, Artificial Sequence
  Description of Artificial Sequence: Synthetic peptide
RKHGLLFMT

SEQ ID NO: 33756 - protein, 9 aa, Artificial Sequence
  Description of Artificial Sequence: Synthetic peptide
RKHGLLFMV

SEQ ID NO: 33757 - protein, 9 aa, Artificial Sequence
  Description of Artificial Sequence: Synthetic peptide
RKHGMLFMA

SEQ ID NO: 33758 - protein, 9 aa, Artificial Sequence
  Description of Artificial Sequence: Synthetic peptide
RKHPTWKEE

SEQ ID NO: 33759 - protein, 9 aa, Artificial Sequence
  Description of Artificial Sequence: Synthetic peptide
RKLNIQKQS

SEQ ID NO: 33760 - protein, 9 aa, Artificial Sequence
  Description of Artificial Sequence: Synthetic peptide
RLHGMGDVP

SEQ ID NO: 33761 - protein, 9 aa, Artificial Sequence
  Description of Artificial Sequence: Synthetic peptide
RMAHNFWDA

SEQ ID NO: 33762 - protein, 9 aa, Artificial Sequence
  Description of Artificial Sequence: Synthetic peptide
RMAHTFWNA

SEQ ID NO: 33763 - protein, 9 aa, Artificial Sequence
  Description of Artificial Sequence: Synthetic peptide
RMAPTFWDA

SEQ ID NO: 33764 - protein, 9 aa, Artificial Sequence
  Description of Artificial Sequence: Synthetic peptide
RMARTFWDA

SEQ ID NO: 33765 - protein, 9 aa, Artificial Sequence
  Description of Artificial Sequence: Synthetic peptide
RMHVLVIYT

SEQ ID NO: 33766 - protein, 9 aa, Artificial Sequence
  Description of Artificial Sequence: Synthetic peptide
RMSPDIIAP

SEQ ID NO: 33767 - protein, 9 aa, Artificial Sequence
  Description of Artificial Sequence: Synthetic peptide
RMYSSAKSY

SEQ ID NO: 33768 - protein, 9 aa, Artificial Sequence
  Description of Artificial Sequence: Synthetic peptide
RPCFEMKHI

SEQ ID NO: 33769 - protein, 9 aa, Artificial Sequence
  Description of Artificial Sequence: Synthetic peptide
RQEWRSIWK

SEQ ID NO: 33770 - protein, 9 aa, Artificial Sequence
  Description of Artificial Sequence: Synthetic peptide
RQKLRSIWK

SEQ ID NO: 33771 - protein, 9 aa, Artificial Sequence
  Description of Artificial Sequence: Synthetic peptide
RQKWRIIWK

SEQ ID NO: 33772 - protein, 9 aa, Artificial Sequence
  Description of Artificial Sequence: Synthetic peptide
RQKWRNIWK

SEQ ID NO: 33773 - protein, 9 aa, Artificial Sequence
  Description of Artificial Sequence: Synthetic peptide
RQKWRSFWK

SEQ ID NO: 33774 - protein, 9 aa, Artificial Sequence
  Description of Artificial Sequence: Synthetic peptide
RQKWRSIWE

SEQ ID NO: 33775 - protein, 9 aa, Artificial Sequence
  Description of Artificial Sequence: Synthetic peptide
RQKWRSIWQ

SEQ ID NO: 33776 - protein, 9 aa, Artificial Sequence
  Description of Artificial Sequence: Synthetic peptide
RQKWRSIWR

SEQ ID NO: 33777 - protein, 9 aa, Artificial Sequence
  Description of Artificial Sequence: Synthetic peptide
RQKWRSIWT

SEQ ID NO: 33778 - protein, 9 aa, Artificial Sequence
  Description of Artificial Sequence: Synthetic peptide
RQKWRSMWK

SEQ ID NO: 33779 - protein, 9 aa, Artificial Sequence
  Description of Artificial Sequence: Synthetic peptide
RQKWRSVWK

SEQ ID NO: 33780 - protein, 9 aa, Artificial Sequence
  Description of Artificial Sequence: Synthetic peptide
RQQWRSIWK

SEQ ID NO: 33781 - protein, 9 aa, Artificial Sequence
  Description of Artificial Sequence: Synthetic peptide
RQRWRSIWK

SEQ ID NO: 33782 - protein, 9 aa, Artificial Sequence
  Description of Artificial Sequence: Synthetic peptide
RQTWRSIWK

SEQ ID NO: 33783 - protein, 9 aa, Artificial Sequence
  Description of Artificial Sequence: Synthetic peptide
RSATPCHYN

SEQ ID NO: 33784 - protein, 9 aa, Artificial Sequence
  Description of Artificial Sequence: Synthetic peptide
RSCFEMKHL

SEQ ID NO: 33785 - protein, 9 aa, Artificial Sequence
  Description of Artificial Sequence: Synthetic peptide
RSCFEMRHI

SEQ ID NO: 33786 - protein, 9 aa, Artificial Sequence
  Description of Artificial Sequence: Synthetic peptide
RSCFVMKHI

SEQ ID NO: 33787 - protein, 9 aa, Artificial Sequence
  Description of Artificial Sequence: Synthetic peptide
RSCYEMKHI

SEQ ID NO: 33788 - protein, 9 aa, Artificial Sequence
  Description of Artificial Sequence: Synthetic peptide
RSMWPPSSV

SEQ ID NO: 33789 - protein, 9 aa, Artificial Sequence
  Description of Artificial Sequence: Synthetic peptide
RSVTPCHSN

SEQ ID NO: 33790 - protein, 9 aa, Artificial Sequence
  Description of Artificial Sequence: Synthetic peptide
RSVTPCHYS

SEQ ID NO: 33791 - protein, 9 aa, Artificial Sequence
  Description of Artificial Sequence: Synthetic peptide
RSVTPCHYT

SEQ ID NO: 33792 - protein, 9 aa, Artificial Sequence
  Description of Artificial Sequence: Synthetic peptide
RSVTPCHYY

SEQ ID NO: 33793 - protein, 9 aa, Artificial Sequence
  Description of Artificial Sequence: Synthetic peptide
RTHCHAKAD

SEQ ID NO: 33794 - protein, 9 aa, Artificial Sequence
  Description of Artificial Sequence: Synthetic peptide
RTHGNAKAD

SEQ ID NO: 33795 - protein, 9 aa, Artificial Sequence
  Description of Artificial Sequence: Synthetic peptide
RTHGPAKAD

SEQ ID NO: 33796 - protein, 9 aa, Artificial Sequence
  Description of Artificial Sequence: Synthetic peptide
RTSWKWEYY

SEQ ID NO: 33797 - protein, 9 aa, Artificial Sequence
  Description of Artificial Sequence: Synthetic peptide
RVAVTNHRY

SEQ ID NO: 33798 - protein, 9 aa, Artificial Sequence
  Description of Artificial Sequence: Synthetic peptide
RVCFKEDAF

SEQ ID NO: 33799 - protein, 9 aa, Artificial Sequence
  Description of Artificial Sequence: Synthetic peptide
RVDATNHRY

SEQ ID NO: 33800 - protein, 9 aa, Artificial Sequence
  Description of Artificial Sequence: Synthetic peptide
RVDVTNHRF

SEQ ID NO: 33801 - protein, 9 aa, Artificial Sequence
  Description of Artificial Sequence: Synthetic peptide
RVEPTTVAD

SEQ ID NO: 33802 - protein, 9 aa, Artificial Sequence
  Description of Artificial Sequence: Synthetic peptide
RVESQWDGC

SEQ ID NO: 33803 - protein, 9 aa, Artificial Sequence
  Description of Artificial Sequence: Synthetic peptide
RVQSQWHGC

SEQ ID NO: 33804 - protein, 9 aa, Artificial Sequence
  Description of Artificial Sequence: Synthetic peptide
RWFLSIDYR

SEQ ID NO: 33805 - protein, 9 aa, Artificial Sequence
  Description of Artificial Sequence: Synthetic peptide
SADPRVDCP

SEQ ID NO: 33806 - protein, 9 aa, Artificial Sequence
  Description of Artificial Sequence: Synthetic peptide
SADSETPWF

SEQ ID NO: 33807 - protein, 9 aa, Artificial Sequence
  Description of Artificial Sequence: Synthetic peptide
SCWLITKTE

SEQ ID NO: 33808 - protein, 9 aa, Artificial Sequence
  Description of Artificial Sequence: Synthetic peptide
SEHCYRHQH

SEQ ID NO: 33809 - protein, 9 aa, Artificial Sequence
  Description of Artificial Sequence: Synthetic peptide
SEWMIWKCR

SEQ ID NO: 33810 - protein, 9 aa, Artificial Sequence
  Description of Artificial Sequence: Synthetic peptide
SGCFWRHTS

SEQ ID NO: 33811 - protein, 9 aa, Artificial Sequence
  Description of Artificial Sequence: Synthetic peptide
SGCFWRNAS

SEQ ID NO: 33812 - protein, 9 aa, Artificial Sequence
  Description of Artificial Sequence: Synthetic peptide
SGCFWRNTP

SEQ ID NO: 33813 - protein, 9 aa, Artificial Sequence
  Description of Artificial Sequence: Synthetic peptide
SGCFWRSTS

SEQ ID NO: 33814 - protein, 9 aa, Artificial Sequence
  Description of Artificial Sequence: Synthetic peptide
SGCFWRTTS

SEQ ID NO: 33815 - protein, 9 aa, Artificial Sequence
  Description of Artificial Sequence: Synthetic peptide
SGIRIFLFG

SEQ ID NO: 33816 - protein, 9 aa, Artificial Sequence
  Description of Artificial Sequence: Synthetic peptide
SHCLYWMRH

SEQ ID NO: 33817 - protein, 9 aa, Artificial Sequence
  Description of Artificial Sequence: Synthetic peptide
SHCMYWMKH

SEQ ID NO: 33818 - protein, 9 aa, Artificial Sequence
  Description of Artificial Sequence: Synthetic peptide
SHCVYWMKH

SEQ ID NO: 33819 - protein, 9 aa, Artificial Sequence
  Description of Artificial Sequence: Synthetic peptide
SHDVRMHML

SEQ ID NO: 33820 - protein, 9 aa, Artificial Sequence
  Description of Artificial Sequence: Synthetic peptide
SHFLYWMKH

SEQ ID NO: 33821 - protein, 9 aa, Artificial Sequence
  Description of Artificial Sequence: Synthetic peptide
SIVCRVNYP

SEQ ID NO: 33822 - protein, 9 aa, Artificial Sequence
  Description of Artificial Sequence: Synthetic peptide
SKCGFDVAD

SEQ ID NO: 33823 - protein, 9 aa, Artificial Sequence
  Description of Artificial Sequence: Synthetic peptide
SKCGFDVAG

SEQ ID NO: 33824 - protein, 9 aa, Artificial Sequence
  Description of Artificial Sequence: Synthetic peptide
SKCGFDVAP

SEQ ID NO: 33825 - protein, 9 aa, Artificial Sequence
  Description of Artificial Sequence: Synthetic peptide
SKCGFDVAV

SEQ ID NO: 33826 - protein, 9 aa, Artificial Sequence
  Description of Artificial Sequence: Synthetic peptide
SKCGFNVAA

SEQ ID NO: 33827 - protein, 9 aa, Artificial Sequence
  Description of Artificial Sequence: Synthetic peptide
SKCSFDVAA

SEQ ID NO: 33828 - protein, 9 aa, Artificial Sequence
  Description of Artificial Sequence: Synthetic peptide
SKRDMDPAP

SEQ ID NO: 33829 - protein, 9 aa, Artificial Sequence
  Description of Artificial Sequence: Synthetic peptide
SLGNRNADY

SEQ ID NO: 33830 - protein, 9 aa, Artificial Sequence
  Description of Artificial Sequence: Synthetic peptide
SLQNRNADY

SEQ ID NO: 33831 - protein, 9 aa, Artificial Sequence
  Description of Artificial Sequence: Synthetic peptide
SLRDRNADY

SEQ ID NO: 33832 - protein, 9 aa, Artificial Sequence
  Description of Artificial Sequence: Synthetic peptide
SMDTSDWWE

SEQ ID NO: 33833 - protein, 9 aa, Artificial Sequence
  Description of Artificial Sequence: Synthetic peptide
SQWMIWKCQ

SEQ ID NO: 33834 - protein, 9 aa, Artificial Sequence
  Description of Artificial Sequence: Synthetic peptide
SVCPNRYAD

SEQ ID NO: 33835 - protein, 9 aa, Artificial Sequence
  Description of Artificial Sequence: Synthetic peptide
SVCPTRHAD

SEQ ID NO: 33836 - protein, 9 aa, Artificial Sequence
  Description of Artificial Sequence: Synthetic peptide
SVCPTRYAE

SEQ ID NO: 33837 - protein, 9 aa, Artificial Sequence
  Description of Artificial Sequence: Synthetic peptide
SVCPTRYAH

SEQ ID NO: 33838 - protein, 9 aa, Artificial Sequence
  Description of Artificial Sequence: Synthetic peptide
SVCPTRYAN

SEQ ID NO: 33839 - protein, 9 aa, Artificial Sequence
  Description of Artificial Sequence: Synthetic peptide
SVRNRNADY

SEQ ID NO: 33840 - protein, 9 aa, Artificial Sequence
  Description of Artificial Sequence: Synthetic peptide
TAAWRTDDR

SEQ ID NO: 33841 - protein, 9 aa, Artificial Sequence
  Description of Artificial Sequence: Synthetic peptide
TADPRVDCP

SEQ ID NO: 33842 - protein, 9 aa, Artificial Sequence
  Description of Artificial Sequence: Synthetic peptide
TADRWFDAS

SEQ ID NO: 33843 - protein, 9 aa, Artificial Sequence
  Description of Artificial Sequence: Synthetic peptide
TADRWGDAS

SEQ ID NO: 33844 - protein, 9 aa, Artificial Sequence
  Description of Artificial Sequence: Synthetic peptide
TAELRTDDR

SEQ ID NO: 33845 - protein, 9 aa, Artificial Sequence
  Description of Artificial Sequence: Synthetic peptide
TAEPKMDHE

SEQ ID NO: 33846 - protein, 9 aa, Artificial Sequence
  Description of Artificial Sequence: Synthetic peptide
TAEWRNDDR

SEQ ID NO: 33847 - protein, 9 aa, Artificial Sequence
  Description of Artificial Sequence: Synthetic peptide
TAEWRTDAR

SEQ ID NO: 33848 - protein, 9 aa, Artificial Sequence
  Description of Artificial Sequence: Synthetic peptide
TAEWRTDDW

SEQ ID NO: 33849 - protein, 9 aa, Artificial Sequence
  Description of Artificial Sequence: Synthetic peptide
TAEWRTDYR

SEQ ID NO: 33850 - protein, 9 aa, Artificial Sequence
  Description of Artificial Sequence: Synthetic peptide
TAGWRTDDR

SEQ ID NO: 33851 - protein, 9 aa, Artificial Sequence
  Description of Artificial Sequence: Synthetic peptide
TAKWRTDDR

SEQ ID NO: 33852 - protein, 9 aa, Artificial Sequence
  Description of Artificial Sequence: Synthetic peptide
TCILRQSPT

SEQ ID NO: 33853 - protein, 9 aa, Artificial Sequence
  Description of Artificial Sequence: Synthetic peptide
TCLLRQSQT

SEQ ID NO: 33854 - protein, 9 aa, Artificial Sequence
  Description of Artificial Sequence: Synthetic peptide
TCPRKDDDM

SEQ ID NO: 33855 - protein, 9 aa, Artificial Sequence
  Description of Artificial Sequence: Synthetic peptide
TCTRKDDDK

SEQ ID NO: 33856 - protein, 9 aa, Artificial Sequence
  Description of Artificial Sequence: Synthetic peptide
TCTRKDDDT

SEQ ID NO: 33857 - protein, 9 aa, Artificial Sequence
  Description of Artificial Sequence: Synthetic peptide
TCWLITKTE

SEQ ID NO: 33858 - protein, 9 aa, Artificial Sequence
  Description of Artificial Sequence: Synthetic peptide
TFVCRVNYP

SEQ ID NO: 33859 - protein, 9 aa, Artificial Sequence
  Description of Artificial Sequence: Synthetic peptide
TGDRFMVDQ

SEQ ID NO: 33860 - protein, 9 aa, Artificial Sequence
  Description of Artificial Sequence: Synthetic peptide
TGGRIGDSQ

SEQ ID NO: 33861 - protein, 9 aa, Artificial Sequence
  Description of Artificial Sequence: Synthetic peptide
TIVCRINYP

SEQ ID NO: 33862 - protein, 9 aa, Artificial Sequence
  Description of Artificial Sequence: Synthetic peptide
TIVCRVDYP

SEQ ID NO: 33863 - protein, 9 aa, Artificial Sequence
  Description of Artificial Sequence: Synthetic peptide
TIVCRVHYP

SEQ ID NO: 33864 - protein, 9 aa, Artificial Sequence
  Description of Artificial Sequence: Synthetic peptide
TIVCRVNYH

SEQ ID NO: 33865 - protein, 9 aa, Artificial Sequence
  Description of Artificial Sequence: Synthetic peptide
TIVCRVNYR

SEQ ID NO: 33866 - protein, 9 aa, Artificial Sequence
  Description of Artificial Sequence: Synthetic peptide
TIVCRVNYS

SEQ ID NO: 33867 - protein, 9 aa, Artificial Sequence
  Description of Artificial Sequence: Synthetic peptide
TKKKLQCES

SEQ ID NO: 33868 - protein, 9 aa, Artificial Sequence
  Description of Artificial Sequence: Synthetic peptide
TKKKMQCEA

SEQ ID NO: 33869 - protein, 9 aa, Artificial Sequence
  Description of Artificial Sequence: Synthetic peptide
TKKKMQCEY

SEQ ID NO: 33870 - protein, 9 aa, Artificial Sequence
  Description of Artificial Sequence: Synthetic peptide
TKKKMQCQS

SEQ ID NO: 33871 - protein, 9 aa, Artificial Sequence
  Description of Artificial Sequence: Synthetic peptide
TKQKMQCES

SEQ ID NO: 33872 - protein, 9 aa, Artificial Sequence
  Description of Artificial Sequence: Synthetic peptide
TLVCRVNYP

SEQ ID NO: 33873 - protein, 9 aa, Artificial Sequence
  Description of Artificial Sequence: Synthetic peptide
TMKLGDMDG

SEQ ID NO: 33874 - protein, 9 aa, Artificial Sequence
  Description of Artificial Sequence: Synthetic peptide
TSEWRTDDR

SEQ ID NO: 33875 - protein, 9 aa, Artificial Sequence
  Description of Artificial Sequence: Synthetic peptide
TVAMVMDFC

SEQ ID NO: 33876 - protein, 9 aa, Artificial Sequence
  Description of Artificial Sequence: Synthetic peptide
TVEHNRLAN

SEQ ID NO: 33877 - protein, 9 aa, Artificial Sequence
  Description of Artificial Sequence: Synthetic peptide
TVVCRVNYP

SEQ ID NO: 33878 - protein, 9 aa, Artificial Sequence
  Description of Artificial Sequence: Synthetic peptide
VAAQSDDRE

SEQ ID NO: 33879 - protein, 9 aa, Artificial Sequence
  Description of Artificial Sequence: Synthetic peptide
VAQQIRDFH

SEQ ID NO: 33880 - protein, 9 aa, Artificial Sequence
  Description of Artificial Sequence: Synthetic peptide
VAQRTTDHR

SEQ ID NO: 33881 - protein, 9 aa, Artificial Sequence
  Description of Artificial Sequence: Synthetic peptide
VCMHLRQGG

SEQ ID NO: 33882 - protein, 9 aa, Artificial Sequence
  Description of Artificial Sequence: Synthetic peptide
VCMHVRQGA

SEQ ID NO: 33883 - protein, 9 aa, Artificial Sequence
  Description of Artificial Sequence: Synthetic peptide
VCMPVRQGG

SEQ ID NO: 33884 - protein, 9 aa, Artificial Sequence
  Description of Artificial Sequence: Synthetic peptide
VCWLITKTE

SEQ ID NO: 33885 - protein, 9 aa, Artificial Sequence
  Description of Artificial Sequence: Synthetic peptide
VCWMITKTE

SEQ ID NO: 33886 - protein, 9 aa, Artificial Sequence
  Description of Artificial Sequence: Synthetic peptide
VCWVITKTE

SEQ ID NO: 33887 - protein, 9 aa, Artificial Sequence
  Description of Artificial Sequence: Synthetic peptide
VDDKHITGY

SEQ ID NO: 33888 - protein, 9 aa, Artificial Sequence
  Description of Artificial Sequence: Synthetic peptide
VDDKNITCY

SEQ ID NO: 33889 - protein, 9 aa, Artificial Sequence
  Description of Artificial Sequence: Synthetic peptide
VDDKYITCY

SEQ ID NO: 33890 - protein, 9 aa, Artificial Sequence
  Description of Artificial Sequence: Synthetic peptide
VEDKHITCY

SEQ ID NO: 33891 - protein, 9 aa, Artificial Sequence
  Description of Artificial Sequence: Synthetic peptide
VEPFPCDWS

SEQ ID NO: 33892 - protein, 9 aa, Artificial Sequence
  Description of Artificial Sequence: Synthetic peptide
VGGDYFRSD

SEQ ID NO: 33893 - protein, 9 aa, Artificial Sequence
  Description of Artificial Sequence: Synthetic peptide
VKILSEMMT

SEQ ID NO: 33894 - protein, 9 aa, Artificial Sequence
  Description of Artificial Sequence: Synthetic peptide
VKLLSEMMN

SEQ ID NO: 33895 - protein, 9 aa, Artificial Sequence
  Description of Artificial Sequence: Synthetic peptide
VKMLSEMMN

SEQ ID NO: 33896 - protein, 9 aa, Artificial Sequence
  Description of Artificial Sequence: Synthetic peptide
VPVDNLWND

SEQ ID NO: 33897 - protein, 9 aa, Artificial Sequence
  Description of Artificial Sequence: Synthetic peptide
VVAVIRKMQ

SEQ ID NO: 33898 - protein, 9 aa, Artificial Sequence
  Description of Artificial Sequence: Synthetic peptide
VVCMNHCDM

SEQ ID NO: 33899 - protein, 9 aa, Artificial Sequence
  Description of Artificial Sequence: Synthetic peptide
VVEHNRLAN

SEQ ID NO: 33900 - protein, 9 aa, Artificial Sequence
  Description of Artificial Sequence: Synthetic peptide
VVEPYTDHQ

SEQ ID NO: 33901 - protein, 9 aa, Artificial Sequence
  Description of Artificial Sequence: Synthetic peptide
VVQQIRDFN

SEQ ID NO: 33902 - protein, 9 aa, Artificial Sequence
  Description of Artificial Sequence: Synthetic peptide
VVQQIRDFP

SEQ ID NO: 33903 - protein, 9 aa, Artificial Sequence
  Description of Artificial Sequence: Synthetic peptide
VVQQIRDFR

SEQ ID NO: 33904 - protein, 9 aa, Artificial Sequence
  Description of Artificial Sequence: Synthetic peptide
VVQQLRDFH

SEQ ID NO: 33905 - protein, 9 aa, Artificial Sequence
  Description of Artificial Sequence: Synthetic peptide
VVQQSRDFH

SEQ ID NO: 33906 - protein, 9 aa, Artificial Sequence
  Description of Artificial Sequence: Synthetic peptide
VWECPRVGS

SEQ ID NO: 33907 - protein, 9 aa, Artificial Sequence
  Description of Artificial Sequence: Synthetic peptide
WAEYRKTHA

SEQ ID NO: 33908 - protein, 9 aa, Artificial Sequence
  Description of Artificial Sequence: Synthetic peptide
WAEYRKTHH

SEQ ID NO: 33909 - protein, 9 aa, Artificial Sequence
  Description of Artificial Sequence: Synthetic peptide
WAEYRQTHD

SEQ ID NO: 33910 - protein, 9 aa, Artificial Sequence
  Description of Artificial Sequence: Synthetic peptide
WAIRNMELR

SEQ ID NO: 33911 - protein, 9 aa, Artificial Sequence
  Description of Artificial Sequence: Synthetic peptide
WAKYRKTHD

SEQ ID NO: 33912 - protein, 9 aa, Artificial Sequence
  Description of Artificial Sequence: Synthetic peptide
WEHRFPASM

SEQ ID NO: 33913 - protein, 9 aa, Artificial Sequence
  Description of Artificial Sequence: Synthetic peptide
WFAARQHFP

SEQ ID NO: 33914 - protein, 9 aa, Artificial Sequence
  Description of Artificial Sequence: Synthetic peptide
WFIARQHFP

SEQ ID NO: 33915 - protein, 9 aa, Artificial Sequence
  Description of Artificial Sequence: Synthetic peptide
WFVARKHFP

SEQ ID NO: 33916 - protein, 9 aa, Artificial Sequence
  Description of Artificial Sequence: Synthetic peptide
WFVARQHFA

SEQ ID NO: 33917 - protein, 9 aa, Artificial Sequence
  Description of Artificial Sequence: Synthetic peptide
WFVARQHFT

SEQ ID NO: 33918 - protein, 9 aa, Artificial Sequence
  Description of Artificial Sequence: Synthetic peptide
WFVARQNFP

SEQ ID NO: 33919 - protein, 9 aa, Artificial Sequence
  Description of Artificial Sequence: Synthetic peptide
WFVGRQHFP

SEQ ID NO: 33920 - protein, 9 aa, Artificial Sequence
  Description of Artificial Sequence: Synthetic peptide
WGIRNMELG

SEQ ID NO: 33921 - protein, 9 aa, Artificial Sequence
  Description of Artificial Sequence: Synthetic peptide
WGIRNMELQ

SEQ ID NO: 33922 - protein, 9 aa, Artificial Sequence
  Description of Artificial Sequence: Synthetic peptide
WGIRNMEPR

SEQ ID NO: 33923 - protein, 9 aa, Artificial Sequence
  Description of Artificial Sequence: Synthetic peptide
WGIRNMGLR

SEQ ID NO: 33924 - protein, 9 aa, Artificial Sequence
  Description of Artificial Sequence: Synthetic peptide
WGIRNMKLR

SEQ ID NO: 33925 - protein, 9 aa, Artificial Sequence
  Description of Artificial Sequence: Synthetic peptide
WGIRNMVLR

SEQ ID NO: 33926 - protein, 9 aa, Artificial Sequence
  Description of Artificial Sequence: Synthetic peptide
WGIRNTELR

SEQ ID NO: 33927 - protein, 9 aa, Artificial Sequence
  Description of Artificial Sequence: Synthetic peptide
WGNRNMELR

SEQ ID NO: 33928 - protein, 9 aa, Artificial Sequence
  Description of Artificial Sequence: Synthetic peptide
WGSRNMELR

SEQ ID NO: 33929 - protein, 9 aa, Artificial Sequence
  Description of Artificial Sequence: Synthetic peptide
WGVRNMELR

SEQ ID NO: 33930 - protein, 9 aa, Artificial Sequence
  Description of Artificial Sequence: Synthetic peptide
WLVCRCAWE

SEQ ID NO: 33931 - protein, 9 aa, Artificial Sequence
  Description of Artificial Sequence: Synthetic peptide
WSAKSTKKQ

SEQ ID NO: 33932 - protein, 9 aa, Artificial Sequence
  Description of Artificial Sequence: Synthetic peptide
WSAKTTKEQ

SEQ ID NO: 33933 - protein, 9 aa, Artificial Sequence
  Description of Artificial Sequence: Synthetic peptide
WSIRNMELR

SEQ ID NO: 33934 - protein, 9 aa, Artificial Sequence
  Description of Artificial Sequence: Synthetic peptide
WVVCRCDWE

SEQ ID NO: 33935 - protein, 9 aa, Artificial Sequence
  Description of Artificial Sequence: Synthetic peptide
WVVCRCSWE

SEQ ID NO: 33936 - protein, 9 aa, Artificial Sequence
  Description of Artificial Sequence: Synthetic peptide
WVVCRCTWE

SEQ ID NO: 33937 - protein, 9 aa, Artificial Sequence
  Description of Artificial Sequence: Synthetic peptide
YAARFACYQ

SEQ ID NO: 33938 - protein, 9 aa, Artificial Sequence
  Description of Artificial Sequence: Synthetic peptide
YACAIQQHL

SEQ ID NO: 33939 - protein, 9 aa, Artificial Sequence
  Description of Artificial Sequence: Synthetic peptide
YADRFAGYQ

SEQ ID NO: 33940 - protein, 9 aa, Artificial Sequence
  Description of Artificial Sequence: Synthetic peptide
YANLGREHN

SEQ ID NO: 33941 - protein, 9 aa, Artificial Sequence
  Description of Artificial Sequence: Synthetic peptide
YAPDRDGCD

SEQ ID NO: 33942 - protein, 9 aa, Artificial Sequence
  Description of Artificial Sequence: Synthetic peptide
YDEQWNDNS

SEQ ID NO: 33943 - protein, 9 aa, Artificial Sequence
  Description of Artificial Sequence: Synthetic peptide
YDIMNISPF

SEQ ID NO: 33944 - protein, 9 aa, Artificial Sequence
  Description of Artificial Sequence: Synthetic peptide
YDIMTISPC

SEQ ID NO: 33945 - protein, 9 aa, Artificial Sequence
  Description of Artificial Sequence: Synthetic peptide
YDMMTISPF

SEQ ID NO: 33946 - protein, 9 aa, Artificial Sequence
  Description of Artificial Sequence: Synthetic peptide
YENLAREHN

SEQ ID NO: 33947 - protein, 9 aa, Artificial Sequence
  Description of Artificial Sequence: Synthetic peptide
YFASWIRNH

SEQ ID NO: 33948 - protein, 9 aa, Artificial Sequence
  Description of Artificial Sequence: Synthetic peptide
YFNSWIRNH

SEQ ID NO: 33949 - protein, 9 aa, Artificial Sequence
  Description of Artificial Sequence: Synthetic peptide
YFQSMGHMW

SEQ ID NO: 33950 - protein, 9 aa, Artificial Sequence
  Description of Artificial Sequence: Synthetic peptide
YFRAMGHMW

SEQ ID NO: 33951 - protein, 9 aa, Artificial Sequence
  Description of Artificial Sequence: Synthetic peptide
YFTGWIRNH

SEQ ID NO: 33952 - protein, 9 aa, Artificial Sequence
  Description of Artificial Sequence: Synthetic peptide
YGCFWRNTS

SEQ ID NO: 33953 - protein, 9 aa, Artificial Sequence
  Description of Artificial Sequence: Synthetic peptide
YHCQNYVAS

SEQ ID NO: 33954 - protein, 9 aa, Artificial Sequence
  Description of Artificial Sequence: Synthetic peptide
YIALRATFQ

SEQ ID NO: 33955 - protein, 9 aa, Artificial Sequence
  Description of Artificial Sequence: Synthetic peptide
YIDKIAGWL

SEQ ID NO: 33956 - protein, 9 aa, Artificial Sequence
  Description of Artificial Sequence: Synthetic peptide
YIGLRATFE

SEQ ID NO: 33957 - protein, 9 aa, Artificial Sequence
  Description of Artificial Sequence: Synthetic peptide
YIGLRATFK

SEQ ID NO: 33958 - protein, 9 aa, Artificial Sequence
  Description of Artificial Sequence: Synthetic peptide
YIGLRATFP

SEQ ID NO: 33959 - protein, 9 aa, Artificial Sequence
  Description of Artificial Sequence: Synthetic peptide
YIGVRATFQ

SEQ ID NO: 33960 - protein, 9 aa, Artificial Sequence
  Description of Artificial Sequence: Synthetic peptide
YINKIAGWW

SEQ ID NO: 33961 - protein, 9 aa, Artificial Sequence
  Description of Artificial Sequence: Synthetic peptide
YIPDRDGCD

SEQ ID NO: 33962 - protein, 9 aa, Artificial Sequence
  Description of Artificial Sequence: Synthetic peptide
YIVLRATFQ

SEQ ID NO: 33963 - protein, 9 aa, Artificial Sequence
  Description of Artificial Sequence: Synthetic peptide
YKCAHDPNG

SEQ ID NO: 33964 - protein, 9 aa, Artificial Sequence
  Description of Artificial Sequence: Synthetic peptide
YKCAHDPTE

SEQ ID NO: 33965 - protein, 9 aa, Artificial Sequence
  Description of Artificial Sequence: Synthetic peptide
YKCAYDPTG

SEQ ID NO: 33966 - protein, 9 aa, Artificial Sequence
  Description of Artificial Sequence: Synthetic peptide
YKCGHDPTG

SEQ ID NO: 33967 - protein, 9 aa, Artificial Sequence
  Description of Artificial Sequence: Synthetic peptide
YKCPHDPTG

SEQ ID NO: 33968 - protein, 9 aa, Artificial Sequence
  Description of Artificial Sequence: Synthetic peptide
YKCSHDPTG

SEQ ID NO: 33969 - protein, 9 aa, Artificial Sequence
  Description of Artificial Sequence: Synthetic peptide
YKCTHDPTG

SEQ ID NO: 33970 - protein, 9 aa, Artificial Sequence
  Description of Artificial Sequence: Synthetic peptide
YKCVHDPTG

SEQ ID NO: 33971 - protein, 9 aa, Artificial Sequence
  Description of Artificial Sequence: Synthetic peptide
YKFDMPSFF

SEQ ID NO: 33972 - protein, 9 aa, Artificial Sequence
  Description of Artificial Sequence: Synthetic peptide
YKGAHDPTG

SEQ ID NO: 33973 - protein, 9 aa, Artificial Sequence
  Description of Artificial Sequence: Synthetic peptide
YKGGYGCHE

SEQ ID NO: 33974 - protein, 9 aa, Artificial Sequence
  Description of Artificial Sequence: Synthetic peptide
YLGLRATFQ

SEQ ID NO: 33975 - protein, 9 aa, Artificial Sequence
  Description of Artificial Sequence: Synthetic peptide
YQDGRCYKE

SEQ ID NO: 33976 - protein, 9 aa, Artificial Sequence
  Description of Artificial Sequence: Synthetic peptide
YSGQHFRTL

SEQ ID NO: 33977 - protein, 9 aa, Artificial Sequence
  Description of Artificial Sequence: Synthetic peptide
YTMCKANWN

SEQ ID NO: 33978 - protein, 9 aa, Artificial Sequence
  Description of Artificial Sequence: Synthetic peptide
YVHDRDGCD

SEQ ID NO: 33979 - protein, 9 aa, Artificial Sequence
  Description of Artificial Sequence: Synthetic peptide
YVPDRAGCD

SEQ ID NO: 33980 - protein, 9 aa, Artificial Sequence
  Description of Artificial Sequence: Synthetic peptide
YVPDRDGCA

SEQ ID NO: 33981 - protein, 9 aa, Artificial Sequence
  Description of Artificial Sequence: Synthetic peptide
YVPDRDGCC

SEQ ID NO: 33982 - protein, 9 aa, Artificial Sequence
  Description of Artificial Sequence: Synthetic peptide
YVPDRDGCG

SEQ ID NO: 33983 - protein, 9 aa, Artificial Sequence
  Description of Artificial Sequence: Synthetic peptide
YVPDRDGYD

SEQ ID NO: 33984 - protein, 9 aa, Artificial Sequence
  Description of Artificial Sequence: Synthetic peptide
YVPDRDVCD

SEQ ID NO: 33985 - protein, 9 aa, Artificial Sequence
  Description of Artificial Sequence: Synthetic peptide
YVPDRNGCD

SEQ ID NO: 33986 - protein, 9 aa, Artificial Sequence
  Description of Artificial Sequence: Synthetic peptide
YVPDRVGCD

SEQ ID NO: 33987 - protein, 9 aa, Artificial Sequence
  Description of Artificial Sequence: Synthetic peptide
YVPYRDGCD

SEQ ID NO: 33988 - protein, 9 aa, Artificial Sequence
  Description of Artificial Sequence: Synthetic peptide
YVRDRDGCD

SEQ ID NO: 33989 - protein, 9 aa, Artificial Sequence
  Description of Artificial Sequence: Synthetic peptide
YVTDRDGCD

SEQ ID NO: 33990 - protein, 9 aa, Artificial Sequence
  Description of Artificial Sequence: Synthetic peptide
YYCRRTFHH

SEQ ID NO: 33991 - protein, 9 aa, Artificial Sequence
  Description of Artificial Sequence: Synthetic peptide
NMWYSFVMI

SEQ ID NO: 33992 - protein, 9 aa, Artificial Sequence
  Description of Artificial Sequence: Synthetic peptide
FWLGLFPAK

SEQ ID NO: 33993 - protein, 9 aa, Artificial Sequence
  Description of Artificial Sequence: Synthetic peptide
DSQYHVKCG

SEQ ID NO: 33994 - protein, 9 aa, Artificial Sequence
  Description of Artificial Sequence: Synthetic peptide
AIEWKSTVT

SEQ ID NO: 33995 - protein, 9 aa, Artificial Sequence
  Description of Artificial Sequence: Synthetic peptide
AIEWRSTVT

SEQ ID NO: 33996 - protein, 9 aa, Artificial Sequence
  Description of Artificial Sequence: Synthetic peptide
ANAHQAESF

SEQ ID NO: 33997 - protein, 9 aa, Artificial Sequence
  Description of Artificial Sequence: Synthetic peptide
ANAHQAGSF

SEQ ID NO: 33998 - protein, 9 aa, Artificial Sequence
  Description of Artificial Sequence: Synthetic peptide
ANLEQSLMA

SEQ ID NO: 33999 - protein, 9 aa, Artificial Sequence
  Description of Artificial Sequence: Synthetic peptide
ANLEQSLMT

SEQ ID NO: 34000 - protein, 9 aa, Artificial Sequence
  Description of Artificial Sequence: Synthetic peptide
ANLKQSLMA

SEQ ID NO: 34001 - protein, 9 aa, Artificial Sequence
  Description of Artificial Sequence: Synthetic peptide
ANTHQAESF

SEQ ID NO: 34002 - protein, 9 aa, Artificial Sequence
  Description of Artificial Sequence: Synthetic peptide
ATKNRWPIA

SEQ ID NO: 34003 - protein, 9 aa, Artificial Sequence
  Description of Artificial Sequence: Synthetic peptide
ATKNRWPIV

SEQ ID NO: 34004 - protein, 9 aa, Artificial Sequence
  Description of Artificial Sequence: Synthetic peptide
CCHGWHNGA

SEQ ID NO: 34005 - protein, 9 aa, Artificial Sequence
  Description of Artificial Sequence: Synthetic peptide
CCHGWHNGS

SEQ ID NO: 34006 - protein, 9 aa, Artificial Sequence
  Description of Artificial Sequence: Synthetic peptide
CCHGWYNGS

SEQ ID NO: 34007 - protein, 9 aa, Artificial Sequence
  Description of Artificial Sequence: Synthetic peptide
CECEKLGTS

SEQ ID NO: 34008 - protein, 9 aa, Artificial Sequence
  Description of Artificial Sequence: Synthetic peptide
CEGEKLGTS

SEQ ID NO: 34009 - protein, 9 aa, Artificial Sequence
  Description of Artificial Sequence: Synthetic peptide
CEYEKLGTS

SEQ ID NO: 34010 - protein, 9 aa, Artificial Sequence
  Description of Artificial Sequence: Synthetic peptide
CFHGWHNGS

SEQ ID NO: 34011 - protein, 9 aa, Artificial Sequence
  Description of Artificial Sequence: Synthetic peptide
CIALLEQYM

SEQ ID NO: 34012 - protein, 9 aa, Artificial Sequence
  Description of Artificial Sequence: Synthetic peptide
CNATYQQND

SEQ ID NO: 34013 - protein, 9 aa, Artificial Sequence
  Description of Artificial Sequence: Synthetic peptide
CSCQWYISV

SEQ ID NO: 34014 - protein, 9 aa, Artificial Sequence
  Description of Artificial Sequence: Synthetic peptide
CSCRWYISV

SEQ ID NO: 34015 - protein, 9 aa, Artificial Sequence
  Description of Artificial Sequence: Synthetic peptide
CSYRWYISV

SEQ ID NO: 34016 - protein, 9 aa, Artificial Sequence
  Description of Artificial Sequence: Synthetic peptide
CYLWCAYQH

SEQ ID NO: 34017 - protein, 9 aa, Artificial Sequence
  Description of Artificial Sequence: Synthetic peptide
CYLWCDYQH

SEQ ID NO: 34018 - protein, 9 aa, Artificial Sequence
  Description of Artificial Sequence: Synthetic peptide
CYLWCDYQR

SEQ ID NO: 34019 - protein, 9 aa, Artificial Sequence
  Description of Artificial Sequence: Synthetic peptide
CYLWCDYRH

SEQ ID NO: 34020 - protein, 9 aa, Artificial Sequence
  Description of Artificial Sequence: Synthetic peptide
CYLWCVYQH

SEQ ID NO: 34021 - protein, 9 aa, Artificial Sequence
  Description of Artificial Sequence: Synthetic peptide
CYLWYDYQH

SEQ ID NO: 34022 - protein, 9 aa, Artificial Sequence
  Description of Artificial Sequence: Synthetic peptide
DHPPVKEVS

SEQ ID NO: 34023 - protein, 9 aa, Artificial Sequence
  Description of Artificial Sequence: Synthetic peptide
DNLNFNSPT

SEQ ID NO: 34024 - protein, 9 aa, Artificial Sequence
  Description of Artificial Sequence: Synthetic peptide
DRPPVKEVS

SEQ ID NO: 34025 - protein, 9 aa, Artificial Sequence
  Description of Artificial Sequence: Synthetic peptide
DTYQNYMFM

SEQ ID NO: 34026 - protein, 9 aa, Artificial Sequence
  Description of Artificial Sequence: Synthetic peptide
DVHPSNNVQ

SEQ ID NO: 34027 - protein, 9 aa, Artificial Sequence
  Description of Artificial Sequence: Synthetic peptide
DVHPSNTVQ

SEQ ID NO: 34028 - protein, 9 aa, Artificial Sequence
  Description of Artificial Sequence: Synthetic peptide
EGPWMFAQG

SEQ ID NO: 34029 - protein, 9 aa, Artificial Sequence
  Description of Artificial Sequence: Synthetic peptide
EGPWMFTQG

SEQ ID NO: 34030 - protein, 9 aa, Artificial Sequence
  Description of Artificial Sequence: Synthetic peptide
EYQCWGRFT

SEQ ID NO: 34031 - protein, 9 aa, Artificial Sequence
  Description of Artificial Sequence: Synthetic peptide
EYQCWGWFT

SEQ ID NO: 34032 - protein, 9 aa, Artificial Sequence
  Description of Artificial Sequence: Synthetic peptide
GYELQLQMN

SEQ ID NO: 34033 - protein, 9 aa, Artificial Sequence
  Description of Artificial Sequence: Synthetic peptide
HMYDNELNP

SEQ ID NO: 34034 - protein, 9 aa, Artificial Sequence
  Description of Artificial Sequence: Synthetic peptide
IAEPQWHKQ

SEQ ID NO: 34035 - protein, 9 aa, Artificial Sequence
  Description of Artificial Sequence: Synthetic peptide
ITEPQWHKQ

SEQ ID NO: 34036 - protein, 9 aa, Artificial Sequence
  Description of Artificial Sequence: Synthetic peptide
MCFMAFRFD

SEQ ID NO: 34037 - protein, 9 aa, Artificial Sequence
  Description of Artificial Sequence: Synthetic peptide
MDYCCEHFP

SEQ ID NO: 34038 - protein, 9 aa, Artificial Sequence
  Description of Artificial Sequence: Synthetic peptide
MHYCCEHFP

SEQ ID NO: 34039 - protein, 9 aa, Artificial Sequence
  Description of Artificial Sequence: Synthetic peptide
MLFLKRNIA

SEQ ID NO: 34040 - protein, 9 aa, Artificial Sequence
  Description of Artificial Sequence: Synthetic peptide
MRFMAFRFD

SEQ ID NO: 34041 - protein, 9 aa, Artificial Sequence
  Description of Artificial Sequence: Synthetic peptide
MRFMAFRFG

SEQ ID NO: 34042 - protein, 9 aa, Artificial Sequence
  Description of Artificial Sequence: Synthetic peptide
MRFMAFWFD

SEQ ID NO: 34043 - protein, 9 aa, Artificial Sequence
  Description of Artificial Sequence: Synthetic peptide
PTPPMQHTA

SEQ ID NO: 34044 - protein, 9 aa, Artificial Sequence
  Description of Artificial Sequence: Synthetic peptide
QAAHEPQIC

SEQ ID NO: 34045 - protein, 9 aa, Artificial Sequence
  Description of Artificial Sequence: Synthetic peptide
RHIVHKRTE

SEQ ID NO: 34046 - protein, 9 aa, Artificial Sequence
  Description of Artificial Sequence: Synthetic peptide
RMYDNELNP

SEQ ID NO: 34047 - protein, 9 aa, Artificial Sequence
  Description of Artificial Sequence: Synthetic peptide
RRIVHKRTA

SEQ ID NO: 34048 - protein, 9 aa, Artificial Sequence
  Description of Artificial Sequence: Synthetic peptide
RRIVHKRTE

SEQ ID NO: 34049 - protein, 9 aa, Artificial Sequence
  Description of Artificial Sequence: Synthetic peptide
RRIVHKRTG

SEQ ID NO: 34050 - protein, 9 aa, Artificial Sequence
  Description of Artificial Sequence: Synthetic peptide
RSKCPVEIH

SEQ ID NO: 34051 - protein, 9 aa, Artificial Sequence
  Description of Artificial Sequence: Synthetic peptide
RSKCPVEIR

SEQ ID NO: 34052 - protein, 9 aa, Artificial Sequence
  Description of Artificial Sequence: Synthetic peptide
TIEWKSTVT

SEQ ID NO: 34053 - protein, 9 aa, Artificial Sequence
  Description of Artificial Sequence: Synthetic peptide
TNAHQAESF

SEQ ID NO: 34054 - protein, 9 aa, Artificial Sequence
  Description of Artificial Sequence: Synthetic peptide
TNLEQSLMA

SEQ ID NO: 34055 - protein, 9 aa, Artificial Sequence
  Description of Artificial Sequence: Synthetic peptide
TTHPMQHTA

SEQ ID NO: 34056 - protein, 9 aa, Artificial Sequence
  Description of Artificial Sequence: Synthetic peptide
TTPPMQHTA

SEQ ID NO: 34057 - protein, 9 aa, Artificial Sequence
  Description of Artificial Sequence: Synthetic peptide
WCHGWHNGS

SEQ ID NO: 34058 - protein, 9 aa, Artificial Sequence
  Description of Artificial Sequence: Synthetic peptide
WPAQGRITT

SEQ ID NO: 34059 - protein, 9 aa, Artificial Sequence
  Description of Artificial Sequence: Synthetic peptide
YSCRWYISV

SEQ ID NO: 34060 - protein, 9 aa, Artificial Sequence
  Description of Artificial Sequence: Synthetic peptide
AAVQMSSLS

SEQ ID NO: 34061 - protein, 9 aa, Artificial Sequence
  Description of Artificial Sequence: Synthetic peptide
ACANTDQRG

SEQ ID NO: 34062 - protein, 9 aa, Artificial Sequence
  Description of Artificial Sequence: Synthetic peptide
ACMSILEKE

SEQ ID NO: 34063 - protein, 9 aa, Artificial Sequence
  Description of Artificial Sequence: Synthetic peptide
AEHQNNCAF

SEQ ID NO: 34064 - protein, 9 aa, Artificial Sequence
  Description of Artificial Sequence: Synthetic peptide
AELPEGWMC

SEQ ID NO: 34065 - protein, 9 aa, Artificial Sequence
  Description of Artificial Sequence: Synthetic peptide
AGFYEHRSN

SEQ ID NO: 34066 - protein, 9 aa, Artificial Sequence
  Description of Artificial Sequence: Synthetic peptide
AHGCTNAMS

SEQ ID NO: 34067 - protein, 9 aa, Artificial Sequence
  Description of Artificial Sequence: Synthetic peptide
AIRISSLVT

SEQ ID NO: 34068 - protein, 9 aa, Artificial Sequence
  Description of Artificial Sequence: Synthetic peptide
AIVHHGKEP

SEQ ID NO: 34069 - protein, 9 aa, Artificial Sequence
  Description of Artificial Sequence: Synthetic peptide
AKNYQFQVG

SEQ ID NO: 34070 - protein, 9 aa, Artificial Sequence
  Description of Artificial Sequence: Synthetic peptide
ALDSCMVSE

SEQ ID NO: 34071 - protein, 9 aa, Artificial Sequence
  Description of Artificial Sequence: Synthetic peptide
AMIHRNDHC

SEQ ID NO: 34072 - protein, 9 aa, Artificial Sequence
  Description of Artificial Sequence: Synthetic peptide
ARGMCQDLQ

SEQ ID NO: 34073 - protein, 9 aa, Artificial Sequence
  Description of Artificial Sequence: Synthetic peptide
ASEVHHAEF

SEQ ID NO: 34074 - protein, 9 aa, Artificial Sequence
  Description of Artificial Sequence: Synthetic peptide
ASHCMILHT

SEQ ID NO: 34075 - protein, 9 aa, Artificial Sequence
  Description of Artificial Sequence: Synthetic peptide
ASVDNSGSP

SEQ ID NO: 34076 - protein, 9 aa, Artificial Sequence
  Description of Artificial Sequence: Synthetic peptide
ASWCLNHMA

SEQ ID NO: 34077 - protein, 9 aa, Artificial Sequence
  Description of Artificial Sequence: Synthetic peptide
ATSTRQQHA

SEQ ID NO: 34078 - protein, 9 aa, Artificial Sequence
  Description of Artificial Sequence: Synthetic peptide
AVDPAWHGC

SEQ ID NO: 34079 - protein, 9 aa, Artificial Sequence
  Description of Artificial Sequence: Synthetic peptide
AVSAFQQDN

SEQ ID NO: 34080 - protein, 9 aa, Artificial Sequence
  Description of Artificial Sequence: Synthetic peptide
AVSMKAFAI

SEQ ID NO: 34081 - protein, 9 aa, Artificial Sequence
  Description of Artificial Sequence: Synthetic peptide
CAAHVVLTF

SEQ ID NO: 34082 - protein, 9 aa, Artificial Sequence
  Description of Artificial Sequence: Synthetic peptide
CAKAKKMTA

SEQ ID NO: 34083 - protein, 9 aa, Artificial Sequence
  Description of Artificial Sequence: Synthetic peptide
CAQQIYSQT

SEQ ID NO: 34084 - protein, 9 aa, Artificial Sequence
  Description of Artificial Sequence: Synthetic peptide
CCARIAVAE

SEQ ID NO: 34085 - protein, 9 aa, Artificial Sequence
  Description of Artificial Sequence: Synthetic peptide
CDTESLAML

SEQ ID NO: 34086 - protein, 9 aa, Artificial Sequence
  Description of Artificial Sequence: Synthetic peptide
CEHCCITQF

SEQ ID NO: 34087 - protein, 9 aa, Artificial Sequence
  Description of Artificial Sequence: Synthetic peptide
CEHCCITRF

SEQ ID NO: 34088 - protein, 9 aa, Artificial Sequence
  Description of Artificial Sequence: Synthetic peptide
CFAFQNMDD

SEQ ID NO: 34089 - protein, 9 aa, Artificial Sequence
  Description of Artificial Sequence: Synthetic peptide
CFQSNITAN

SEQ ID NO: 34090 - protein, 9 aa, Artificial Sequence
  Description of Artificial Sequence: Synthetic peptide
CFRSADNWW

SEQ ID NO: 34091 - protein, 9 aa, Artificial Sequence
  Description of Artificial Sequence: Synthetic peptide
CGAHIMSGH

SEQ ID NO: 34092 - protein, 9 aa, Artificial Sequence
  Description of Artificial Sequence: Synthetic peptide
CIQWWEMWN

SEQ ID NO: 34093 - protein, 9 aa, Artificial Sequence
  Description of Artificial Sequence: Synthetic peptide
CKQYIVTDV

SEQ ID NO: 34094 - protein, 9 aa, Artificial Sequence
  Description of Artificial Sequence: Synthetic peptide
CLNRIQTAS

SEQ ID NO: 34095 - protein, 9 aa, Artificial Sequence
  Description of Artificial Sequence: Synthetic peptide
CMMPWQSQS

SEQ ID NO: 34096 - protein, 9 aa, Artificial Sequence
  Description of Artificial Sequence: Synthetic peptide
CMTLILAQE

SEQ ID NO: 34097 - protein, 9 aa, Artificial Sequence
  Description of Artificial Sequence: Synthetic peptide
CMVWTNVSP

SEQ ID NO: 34098 - protein, 9 aa, Artificial Sequence
  Description of Artificial Sequence: Synthetic peptide
CNRSIQCMV

SEQ ID NO: 34099 - protein, 9 aa, Artificial Sequence
  Description of Artificial Sequence: Synthetic peptide
CPGRYWKVG

SEQ ID NO: 34100 - protein, 9 aa, Artificial Sequence
  Description of Artificial Sequence: Synthetic peptide
CPKLIRQFA

SEQ ID NO: 34101 - protein, 9 aa, Artificial Sequence
  Description of Artificial Sequence: Synthetic peptide
CPNVWARPW

SEQ ID NO: 34102 - protein, 9 aa, Artificial Sequence
  Description of Artificial Sequence: Synthetic peptide
CQCRYFDWC

SEQ ID NO: 34103 - protein, 9 aa, Artificial Sequence
  Description of Artificial Sequence: Synthetic peptide
CSAFTAHQS

SEQ ID NO: 34104 - protein, 9 aa, Artificial Sequence
  Description of Artificial Sequence: Synthetic peptide
CTFDCNGYW

SEQ ID NO: 34105 - protein, 9 aa, Artificial Sequence
  Description of Artificial Sequence: Synthetic peptide
CTFSTSEQP

SEQ ID NO: 34106 - protein, 9 aa, Artificial Sequence
  Description of Artificial Sequence: Synthetic peptide
CTSWVWMQG

SEQ ID NO: 34107 - protein, 9 aa, Artificial Sequence
  Description of Artificial Sequence: Synthetic peptide
CVAWHAHSA

SEQ ID NO: 34108 - protein, 9 aa, Artificial Sequence
  Description of Artificial Sequence: Synthetic peptide
CVKQTFTDS

SEQ ID NO: 34109 - protein, 9 aa, Artificial Sequence
  Description of Artificial Sequence: Synthetic peptide
CVLPLFQET

SEQ ID NO: 34110 - protein, 9 aa, Artificial Sequence
  Description of Artificial Sequence: Synthetic peptide
CVMAGAIHR

SEQ ID NO: 34111 - protein, 9 aa, Artificial Sequence
  Description of Artificial Sequence: Synthetic peptide
CVNPMAVAC

SEQ ID NO: 34112 - protein, 9 aa, Artificial Sequence
  Description of Artificial Sequence: Synthetic peptide
CVQYTRIGR

SEQ ID NO: 34113 - protein, 9 aa, Artificial Sequence
  Description of Artificial Sequence: Synthetic peptide
CVSPENGMM

SEQ ID NO: 34114 - protein, 9 aa, Artificial Sequence
  Description of Artificial Sequence: Synthetic peptide
CVWLKQMYE

SEQ ID NO: 34115 - protein, 9 aa, Artificial Sequence
  Description of Artificial Sequence: Synthetic peptide
CWMNTHIGE

SEQ ID NO: 34116 - protein, 9 aa, Artificial Sequence
  Description of Artificial Sequence: Synthetic peptide
CWQYQMVTA

SEQ ID NO: 34117 - protein, 9 aa, Artificial Sequence
  Description of Artificial Sequence: Synthetic peptide
DASPVSRSV

SEQ ID NO: 34118 - protein, 9 aa, Artificial Sequence
  Description of Artificial Sequence: Synthetic peptide
DFVLRSDPA

SEQ ID NO: 34119 - protein, 9 aa, Artificial Sequence
  Description of Artificial Sequence: Synthetic peptide
DGTHMDTWL

SEQ ID NO: 34120 - protein, 9 aa, Artificial Sequence
  Description of Artificial Sequence: Synthetic peptide
DIVGPNTGF

SEQ ID NO: 34121 - protein, 9 aa, Artificial Sequence
  Description of Artificial Sequence: Synthetic peptide
DKGFKTNSL

SEQ ID NO: 34122 - protein, 9 aa, Artificial Sequence
  Description of Artificial Sequence: Synthetic peptide
DKHLFDMCR

SEQ ID NO: 34123 - protein, 9 aa, Artificial Sequence
  Description of Artificial Sequence: Synthetic peptide
DLYTISTRD

SEQ ID NO: 34124 - protein, 9 aa, Artificial Sequence
  Description of Artificial Sequence: Synthetic peptide
DMFMWNTQE

SEQ ID NO: 34125 - protein, 9 aa, Artificial Sequence
  Description of Artificial Sequence: Synthetic peptide
DMQCYKRPG

SEQ ID NO: 34126 - protein, 9 aa, Artificial Sequence
  Description of Artificial Sequence: Synthetic peptide
DMTNCQRCR

SEQ ID NO: 34127 - protein, 9 aa, Artificial Sequence
  Description of Artificial Sequence: Synthetic peptide
DQRWFNQHA

SEQ ID NO: 34128 - protein, 9 aa, Artificial Sequence
  Description of Artificial Sequence: Synthetic peptide
DTYLNVMFE

SEQ ID NO: 34129 - protein, 9 aa, Artificial Sequence
  Description of Artificial Sequence: Synthetic peptide
DVAKKRTAG

SEQ ID NO: 34130 - protein, 9 aa, Artificial Sequence
  Description of Artificial Sequence: Synthetic peptide
DVCRKGEQF

SEQ ID NO: 34131 - protein, 9 aa, Artificial Sequence
  Description of Artificial Sequence: Synthetic peptide
DVPLNECDT

SEQ ID NO: 34132 - protein, 9 aa, Artificial Sequence
  Description of Artificial Sequence: Synthetic peptide
DWRRNTEKQ

SEQ ID NO: 34133 - protein, 9 aa, Artificial Sequence
  Description of Artificial Sequence: Synthetic peptide
DYAVMKIAM

SEQ ID NO: 34134 - protein, 9 aa, Artificial Sequence
  Description of Artificial Sequence: Synthetic peptide
EAEEGMGSW

SEQ ID NO: 34135 - protein, 9 aa, Artificial Sequence
  Description of Artificial Sequence: Synthetic peptide
EARMWHHQW

SEQ ID NO: 34136 - protein, 9 aa, Artificial Sequence
  Description of Artificial Sequence: Synthetic peptide
ECLESGIQT

SEQ ID NO: 34137 - protein, 9 aa, Artificial Sequence
  Description of Artificial Sequence: Synthetic peptide
EGWLMMKTG

SEQ ID NO: 34138 - protein, 9 aa, Artificial Sequence
  Description of Artificial Sequence: Synthetic peptide
EHIHGKFFL

SEQ ID NO: 34139 - protein, 9 aa, Artificial Sequence
  Description of Artificial Sequence: Synthetic peptide
EIERDTSHE

SEQ ID NO: 34140 - protein, 9 aa, Artificial Sequence
  Description of Artificial Sequence: Synthetic peptide
EIHTSEMDL

SEQ ID NO: 34141 - protein, 9 aa, Artificial Sequence
  Description of Artificial Sequence: Synthetic peptide
EIKSWHQVY

SEQ ID NO: 34142 - protein, 9 aa, Artificial Sequence
  Description of Artificial Sequence: Synthetic peptide
EKNSPWQFA

SEQ ID NO: 34143 - protein, 9 aa, Artificial Sequence
  Description of Artificial Sequence: Synthetic peptide
ELCWHHGVA

SEQ ID NO: 34144 - protein, 9 aa, Artificial Sequence
  Description of Artificial Sequence: Synthetic peptide
ENKHHEAFY

SEQ ID NO: 34145 - protein, 9 aa, Artificial Sequence
  Description of Artificial Sequence: Synthetic peptide
ERMNMIRYA

SEQ ID NO: 34146 - protein, 9 aa, Artificial Sequence
  Description of Artificial Sequence: Synthetic peptide
ESKIEEAME

SEQ ID NO: 34147 - protein, 9 aa, Artificial Sequence
  Description of Artificial Sequence: Synthetic peptide
ESVHDNGGH

SEQ ID NO: 34148 - protein, 9 aa, Artificial Sequence
  Description of Artificial Sequence: Synthetic peptide
ETHHNACSP

SEQ ID NO: 34149 - protein, 9 aa, Artificial Sequence
  Description of Artificial Sequence: Synthetic peptide
ETHRMTWTT

SEQ ID NO: 34150 - protein, 9 aa, Artificial Sequence
  Description of Artificial Sequence: Synthetic peptide
ETHTVDADM

SEQ ID NO: 34151 - protein, 9 aa, Artificial Sequence
  Description of Artificial Sequence: Synthetic peptide
EVNIECCNG

SEQ ID NO: 34152 - protein, 9 aa, Artificial Sequence
  Description of Artificial Sequence: Synthetic peptide
EVWTWQDAH

SEQ ID NO: 34153 - protein, 9 aa, Artificial Sequence
  Description of Artificial Sequence: Synthetic peptide
FITGRHSGG

SEQ ID NO: 34154 - protein, 9 aa, Artificial Sequence
  Description of Artificial Sequence: Synthetic peptide
FPCMSWKQA

SEQ ID NO: 34155 - protein, 9 aa, Artificial Sequence
  Description of Artificial Sequence: Synthetic peptide
FVFPKHVTL

SEQ ID NO: 34156 - protein, 9 aa, Artificial Sequence
  Description of Artificial Sequence: Synthetic peptide
FVVPISAYQ

SEQ ID NO: 34157 - protein, 9 aa, Artificial Sequence
  Description of Artificial Sequence: Synthetic peptide
GACNYMAHM

SEQ ID NO: 34158 - protein, 9 aa, Artificial Sequence
  Description of Artificial Sequence: Synthetic peptide
GACVMFVGR

SEQ ID NO: 34159 - protein, 9 aa, Artificial Sequence
  Description of Artificial Sequence: Synthetic peptide
GAQCFIMTP

SEQ ID NO: 34160 - protein, 9 aa, Artificial Sequence
  Description of Artificial Sequence: Synthetic peptide
GHCACWVAG

SEQ ID NO: 34161 - protein, 9 aa, Artificial Sequence
  Description of Artificial Sequence: Synthetic peptide
GHFLTTCSF

SEQ ID NO: 34162 - protein, 9 aa, Artificial Sequence
  Description of Artificial Sequence: Synthetic peptide
GIGFVDMQL

SEQ ID NO: 34163 - protein, 9 aa, Artificial Sequence
  Description of Artificial Sequence: Synthetic peptide
GIVDCIAAM

SEQ ID NO: 34164 - protein, 9 aa, Artificial Sequence
  Description of Artificial Sequence: Synthetic peptide
GNDKFLVHN

SEQ ID NO: 34165 - protein, 9 aa, Artificial Sequence
  Description of Artificial Sequence: Synthetic peptide
GQVATISQF

SEQ ID NO: 34166 - protein, 9 aa, Artificial Sequence
  Description of Artificial Sequence: Synthetic peptide
GSSQIVKAE

SEQ ID NO: 34167 - protein, 9 aa, Artificial Sequence
  Description of Artificial Sequence: Synthetic peptide
GTCPYRAIS

SEQ ID NO: 34168 - protein, 9 aa, Artificial Sequence
  Description of Artificial Sequence: Synthetic peptide
GTFMSSRQS

SEQ ID NO: 34169 - protein, 9 aa, Artificial Sequence
  Description of Artificial Sequence: Synthetic peptide
GTTAKTEQI

SEQ ID NO: 34170 - protein, 9 aa, Artificial Sequence
  Description of Artificial Sequence: Synthetic peptide
GTVNFEKMS

SEQ ID NO: 34171 - protein, 9 aa, Artificial Sequence
  Description of Artificial Sequence: Synthetic peptide
GVNDYRDAG

SEQ ID NO: 34172 - protein, 9 aa, Artificial Sequence
  Description of Artificial Sequence: Synthetic peptide
GYAMKYLNA

SEQ ID NO: 34173 - protein, 9 aa, Artificial Sequence
  Description of Artificial Sequence: Synthetic peptide
HAYWCQMFM

SEQ ID NO: 34174 - protein, 9 aa, Artificial Sequence
  Description of Artificial Sequence: Synthetic peptide
HCDVIVGDW

SEQ ID NO: 34175 - protein, 9 aa, Artificial Sequence
  Description of Artificial Sequence: Synthetic peptide
HCVPHVGYQ

SEQ ID NO: 34176 - protein, 9 aa, Artificial Sequence
  Description of Artificial Sequence: Synthetic peptide
HFMCCWFKR

SEQ ID NO: 34177 - protein, 9 aa, Artificial Sequence
  Description of Artificial Sequence: Synthetic peptide
HHAASATCF

SEQ ID NO: 34178 - protein, 9 aa, Artificial Sequence
  Description of Artificial Sequence: Synthetic peptide
HIQGMNMWG

SEQ ID NO: 34179 - protein, 9 aa, Artificial Sequence
  Description of Artificial Sequence: Synthetic peptide
HKMRAIWFA

SEQ ID NO: 34180 - protein, 9 aa, Artificial Sequence
  Description of Artificial Sequence: Synthetic peptide
HMGMMQCQE

SEQ ID NO: 34181 - protein, 9 aa, Artificial Sequence
  Description of Artificial Sequence: Synthetic peptide
HNMCPCVDY

SEQ ID NO: 34182 - protein, 9 aa, Artificial Sequence
  Description of Artificial Sequence: Synthetic peptide
HSGPFCRHG

SEQ ID NO: 34183 - protein, 9 aa, Artificial Sequence
  Description of Artificial Sequence: Synthetic peptide
HSSPFCRHG

SEQ ID NO: 34184 - protein, 9 aa, Artificial Sequence
  Description of Artificial Sequence: Synthetic peptide
HSSSKEACF

SEQ ID NO: 34185 - protein, 9 aa, Artificial Sequence
  Description of Artificial Sequence: Synthetic peptide
HTNWKDGYG

SEQ ID NO: 34186 - protein, 9 aa, Artificial Sequence
  Description of Artificial Sequence: Synthetic peptide
HTYPAHWLQ

SEQ ID NO: 34187 - protein, 9 aa, Artificial Sequence
  Description of Artificial Sequence: Synthetic peptide
HWCMLINVE

SEQ ID NO: 34188 - protein, 9 aa, Artificial Sequence
  Description of Artificial Sequence: Synthetic peptide
IDIDRGHYG

SEQ ID NO: 34189 - protein, 9 aa, Artificial Sequence
  Description of Artificial Sequence: Synthetic peptide
IFGCIQSAR

SEQ ID NO: 34190 - protein, 9 aa, Artificial Sequence
  Description of Artificial Sequence: Synthetic peptide
IGFQYGSVE

SEQ ID NO: 34191 - protein, 9 aa, Artificial Sequence
  Description of Artificial Sequence: Synthetic peptide
IGVSLLNDP

SEQ ID NO: 34192 - protein, 9 aa, Artificial Sequence
  Description of Artificial Sequence: Synthetic peptide
IIKESVYCQ

SEQ ID NO: 34193 - protein, 9 aa, Artificial Sequence
  Description of Artificial Sequence: Synthetic peptide
IISMTNRGP

SEQ ID NO: 34194 - protein, 9 aa, Artificial Sequence
  Description of Artificial Sequence: Synthetic peptide
IMFYTNERV

SEQ ID NO: 34195 - protein, 9 aa, Artificial Sequence
  Description of Artificial Sequence: Synthetic peptide
IMSKTPSFL

SEQ ID NO: 34196 - protein, 9 aa, Artificial Sequence
  Description of Artificial Sequence: Synthetic peptide
INVEGGFEY

SEQ ID NO: 34197 - protein, 9 aa, Artificial Sequence
  Description of Artificial Sequence: Synthetic peptide
IPMEWEHAG

SEQ ID NO: 34198 - protein, 9 aa, Artificial Sequence
  Description of Artificial Sequence: Synthetic peptide
IRVHDNRQQ

SEQ ID NO: 34199 - protein, 9 aa, Artificial Sequence
  Description of Artificial Sequence: Synthetic peptide
ISVDCMQRI

SEQ ID NO: 34200 - protein, 9 aa, Artificial Sequence
  Description of Artificial Sequence: Synthetic peptide
ITAPKWQEK

SEQ ID NO: 34201 - protein, 9 aa, Artificial Sequence
  Description of Artificial Sequence: Synthetic peptide
ITVEAVHHC

SEQ ID NO: 34202 - protein, 9 aa, Artificial Sequence
  Description of Artificial Sequence: Synthetic peptide
IWDVRQDMD

SEQ ID NO: 34203 - protein, 9 aa, Artificial Sequence
  Description of Artificial Sequence: Synthetic peptide
KFDTFIGYQ

SEQ ID NO: 34204 - protein, 9 aa, Artificial Sequence
  Description of Artificial Sequence: Synthetic peptide
KFWCGHMEE

SEQ ID NO: 34205 - protein, 9 aa, Artificial Sequence
  Description of Artificial Sequence: Synthetic peptide
KMTSVSWSV

SEQ ID NO: 34206 - protein, 9 aa, Artificial Sequence
  Description of Artificial Sequence: Synthetic peptide
KNDLEAFSA

SEQ ID NO: 34207 - protein, 9 aa, Artificial Sequence
  Description of Artificial Sequence: Synthetic peptide
KNGDTMAVG

SEQ ID NO: 34208 - protein, 9 aa, Artificial Sequence
  Description of Artificial Sequence: Synthetic peptide
KPKCTYPLA

SEQ ID NO: 34209 - protein, 9 aa, Artificial Sequence
  Description of Artificial Sequence: Synthetic peptide
KTDILDTIV

SEQ ID NO: 34210 - protein, 9 aa, Artificial Sequence
  Description of Artificial Sequence: Synthetic peptide
KTQEFEVQP

SEQ ID NO: 34211 - protein, 9 aa, Artificial Sequence
  Description of Artificial Sequence: Synthetic peptide
KVESTTQLC

SEQ ID NO: 34212 - protein, 9 aa, Artificial Sequence
  Description of Artificial Sequence: Synthetic peptide
KWSYNHFRV

SEQ ID NO: 34213 - protein, 9 aa, Artificial Sequence
  Description of Artificial Sequence: Synthetic peptide
LAKCGRWSV

SEQ ID NO: 34214 - protein, 9 aa, Artificial Sequence
  Description of Artificial Sequence: Synthetic peptide
LATLLAQIY

SEQ ID NO: 34215 - protein, 9 aa, Artificial Sequence
  Description of Artificial Sequence: Synthetic peptide
LCWFLLGVP

SEQ ID NO: 34216 - protein, 9 aa, Artificial Sequence
  Description of Artificial Sequence: Synthetic peptide
LENCMWGGN

SEQ ID NO: 34217 - protein, 9 aa, Artificial Sequence
  Description of Artificial Sequence: Synthetic peptide
LFWPDCHFP

SEQ ID NO: 34218 - protein, 9 aa, Artificial Sequence
  Description of Artificial Sequence: Synthetic peptide
LGLQEWNTP

SEQ ID NO: 34219 - protein, 9 aa, Artificial Sequence
  Description of Artificial Sequence: Synthetic peptide
LGMPCAWCP

SEQ ID NO: 34220 - protein, 9 aa, Artificial Sequence
  Description of Artificial Sequence: Synthetic peptide
LIYPWKPGA

SEQ ID NO: 34221 - protein, 9 aa, Artificial Sequence
  Description of Artificial Sequence: Synthetic peptide
LPEKWNIWK

SEQ ID NO: 34222 - protein, 9 aa, Artificial Sequence
  Description of Artificial Sequence: Synthetic peptide
LQMNYKAQN

SEQ ID NO: 34223 - protein, 9 aa, Artificial Sequence
  Description of Artificial Sequence: Synthetic peptide
LSAYLTEAG

SEQ ID NO: 34224 - protein, 9 aa, Artificial Sequence
  Description of Artificial Sequence: Synthetic peptide
LSIPKEQCW

SEQ ID NO: 34225 - protein, 9 aa, Artificial Sequence
  Description of Artificial Sequence: Synthetic peptide
LSMWRWESE

SEQ ID NO: 34226 - protein, 9 aa, Artificial Sequence
  Description of Artificial Sequence: Synthetic peptide
LSNFFGAMQ

SEQ ID NO: 34227 - protein, 9 aa, Artificial Sequence
  Description of Artificial Sequence: Synthetic peptide
LSSTFPHWH

SEQ ID NO: 34228 - protein, 9 aa, Artificial Sequence
  Description of Artificial Sequence: Synthetic peptide
LTAKPCTAP

SEQ ID NO: 34229 - protein, 9 aa, Artificial Sequence
  Description of Artificial Sequence: Synthetic peptide
LTGLQEMAA

SEQ ID NO: 34230 - protein, 9 aa, Artificial Sequence
  Description of Artificial Sequence: Synthetic peptide
LVQFIYPFE

SEQ ID NO: 34231 - protein, 9 aa, Artificial Sequence
  Description of Artificial Sequence: Synthetic peptide
LVQFTYPFE

SEQ ID NO: 34232 - protein, 9 aa, Artificial Sequence
  Description of Artificial Sequence: Synthetic peptide
LWSLRSANF

SEQ ID NO: 34233 - protein, 9 aa, Artificial Sequence
  Description of Artificial Sequence: Synthetic peptide
LYLMDIAMC

SEQ ID NO: 34234 - protein, 9 aa, Artificial Sequence
  Description of Artificial Sequence: Synthetic peptide
LYLMDITMC

SEQ ID NO: 34235 - protein, 9 aa, Artificial Sequence
  Description of Artificial Sequence: Synthetic peptide
LYNLFMHTE

SEQ ID NO: 34236 - protein, 9 aa, Artificial Sequence
  Description of Artificial Sequence: Synthetic peptide
MAIVDPRSC

SEQ ID NO: 34237 - protein, 9 aa, Artificial Sequence
  Description of Artificial Sequence: Synthetic peptide
MAQKKCKCP

SEQ ID NO: 34238 - protein, 9 aa, Artificial Sequence
  Description of Artificial Sequence: Synthetic peptide
MAYCYLMHN

SEQ ID NO: 34239 - protein, 9 aa, Artificial Sequence
  Description of Artificial Sequence: Synthetic peptide
MDGSYHWDQ

SEQ ID NO: 34240 - protein, 9 aa, Artificial Sequence
  Description of Artificial Sequence: Synthetic peptide
MFMCYINDN

SEQ ID NO: 34241 - protein, 9 aa, Artificial Sequence
  Description of Artificial Sequence: Synthetic peptide
MGVEVTQAM

SEQ ID NO: 34242 - protein, 9 aa, Artificial Sequence
  Description of Artificial Sequence: Synthetic peptide
MIDRHWTAS

SEQ ID NO: 34243 - protein, 9 aa, Artificial Sequence
  Description of Artificial Sequence: Synthetic peptide
MIRPSINGS

SEQ ID NO: 34244 - protein, 9 aa, Artificial Sequence
  Description of Artificial Sequence: Synthetic peptide
MITLLPNWP

SEQ ID NO: 34245 - protein, 9 aa, Artificial Sequence
  Description of Artificial Sequence: Synthetic peptide
MLFKAQAFF

SEQ ID NO: 34246 - protein, 9 aa, Artificial Sequence
  Description of Artificial Sequence: Synthetic peptide
MLFMAQAFF

SEQ ID NO: 34247 - protein, 9 aa, Artificial Sequence
  Description of Artificial Sequence: Synthetic peptide
MMCTFDFAG

SEQ ID NO: 34248 - protein, 9 aa, Artificial Sequence
  Description of Artificial Sequence: Synthetic peptide
MMEIQESCE

SEQ ID NO: 34249 - protein, 9 aa, Artificial Sequence
  Description of Artificial Sequence: Synthetic peptide
MPEHGMDNW

SEQ ID NO: 34250 - protein, 9 aa, Artificial Sequence
  Description of Artificial Sequence: Synthetic peptide
MPPWYRHHL

SEQ ID NO: 34251 - protein, 9 aa, Artificial Sequence
  Description of Artificial Sequence: Synthetic peptide
MQLEANKYH

SEQ ID NO: 34252 - protein, 9 aa, Artificial Sequence
  Description of Artificial Sequence: Synthetic peptide
MRCIEVKGF

SEQ ID NO: 34253 - protein, 9 aa, Artificial Sequence
  Description of Artificial Sequence: Synthetic peptide
MSDHLSNGA

SEQ ID NO: 34254 - protein, 9 aa, Artificial Sequence
  Description of Artificial Sequence: Synthetic peptide
MTHDRAMQC

SEQ ID NO: 34255 - protein, 9 aa, Artificial Sequence
  Description of Artificial Sequence: Synthetic peptide
MTQCNTEHL

SEQ ID NO: 34256 - protein, 9 aa, Artificial Sequence
  Description of Artificial Sequence: Synthetic peptide
MTTVHWHSS

SEQ ID NO: 34257 - protein, 9 aa, Artificial Sequence
  Description of Artificial Sequence: Synthetic peptide
MVLHEMFVY

SEQ ID NO: 34258 - protein, 9 aa, Artificial Sequence
  Description of Artificial Sequence: Synthetic peptide
MVNPCLLGN

SEQ ID NO: 34259 - protein, 9 aa, Artificial Sequence
  Description of Artificial Sequence: Synthetic peptide
MVTCAGPTV

SEQ ID NO: 34260 - protein, 9 aa, Artificial Sequence
  Description of Artificial Sequence: Synthetic peptide
NAGSSGQGA

SEQ ID NO: 34261 - protein, 9 aa, Artificial Sequence
  Description of Artificial Sequence: Synthetic peptide
NCKYRMELE

SEQ ID NO: 34262 - protein, 9 aa, Artificial Sequence
  Description of Artificial Sequence: Synthetic peptide
NCVRYKNMD

SEQ ID NO: 34263 - protein, 9 aa, Artificial Sequence
  Description of Artificial Sequence: Synthetic peptide
NFQMEMDAF

SEQ ID NO: 34264 - protein, 9 aa, Artificial Sequence
  Description of Artificial Sequence: Synthetic peptide
NFSLTNNGQ

SEQ ID NO: 34265 - protein, 9 aa, Artificial Sequence
  Description of Artificial Sequence: Synthetic peptide
NILVLCQNN

SEQ ID NO: 34266 - protein, 9 aa, Artificial Sequence
  Description of Artificial Sequence: Synthetic peptide
NKLDQDNWK

SEQ ID NO: 34267 - protein, 9 aa, Artificial Sequence
  Description of Artificial Sequence: Synthetic peptide
NKYCFPTSW

SEQ ID NO: 34268 - protein, 9 aa, Artificial Sequence
  Description of Artificial Sequence: Synthetic peptide
NLMAHGVAP

SEQ ID NO: 34269 - protein, 9 aa, Artificial Sequence
  Description of Artificial Sequence: Synthetic peptide
NMPNTHCNG

SEQ ID NO: 34270 - protein, 9 aa, Artificial Sequence
  Description of Artificial Sequence: Synthetic peptide
NQVCWPRIV

SEQ ID NO: 34271 - protein, 9 aa, Artificial Sequence
  Description of Artificial Sequence: Synthetic peptide
NRLSFMHYG

SEQ ID NO: 34272 - protein, 9 aa, Artificial Sequence
  Description of Artificial Sequence: Synthetic peptide
NTEFSHLFP

SEQ ID NO: 34273 - protein, 9 aa, Artificial Sequence
  Description of Artificial Sequence: Synthetic peptide
NVNVNKHNH

SEQ ID NO: 34274 - protein, 9 aa, Artificial Sequence
  Description of Artificial Sequence: Synthetic peptide
NVNVNKHNR

SEQ ID NO: 34275 - protein, 9 aa, Artificial Sequence
  Description of Artificial Sequence: Synthetic peptide
NVRDTMRGF

SEQ ID NO: 34276 - protein, 9 aa, Artificial Sequence
  Description of Artificial Sequence: Synthetic peptide
NVRVEFIQC

SEQ ID NO: 34277 - protein, 9 aa, Artificial Sequence
  Description of Artificial Sequence: Synthetic peptide
NVVHVGDVK

SEQ ID NO: 34278 - protein, 9 aa, Artificial Sequence
  Description of Artificial Sequence: Synthetic peptide
PACNCPKTH

SEQ ID NO: 34279 - protein, 9 aa, Artificial Sequence
  Description of Artificial Sequence: Synthetic peptide
PIWPGVLQH

SEQ ID NO: 34280 - protein, 9 aa, Artificial Sequence
  Description of Artificial Sequence: Synthetic peptide
PTIKTQFSC

SEQ ID NO: 34281 - protein, 9 aa, Artificial Sequence
  Description of Artificial Sequence: Synthetic peptide
PTMSLFNEQ

SEQ ID NO: 34282 - protein, 9 aa, Artificial Sequence
  Description of Artificial Sequence: Synthetic peptide
QAKYVTESA

SEQ ID NO: 34283 - protein, 9 aa, Artificial Sequence
  Description of Artificial Sequence: Synthetic peptide
QAMKHAFYQ

SEQ ID NO: 34284 - protein, 9 aa, Artificial Sequence
  Description of Artificial Sequence: Synthetic peptide
QATIWNNRE

SEQ ID NO: 34285 - protein, 9 aa, Artificial Sequence
  Description of Artificial Sequence: Synthetic peptide
QCCQQPCHN

SEQ ID NO: 34286 - protein, 9 aa, Artificial Sequence
  Description of Artificial Sequence: Synthetic peptide
QCCQTLFQS

SEQ ID NO: 34287 - protein, 9 aa, Artificial Sequence
  Description of Artificial Sequence: Synthetic peptide
QCFDNQDEH

SEQ ID NO: 34288 - protein, 9 aa, Artificial Sequence
  Description of Artificial Sequence: Synthetic peptide
QEAGECKWC

SEQ ID NO: 34289 - protein, 9 aa, Artificial Sequence
  Description of Artificial Sequence: Synthetic peptide
QHQCYYNQQ

SEQ ID NO: 34290 - protein, 9 aa, Artificial Sequence
  Description of Artificial Sequence: Synthetic peptide
QIMCNTTGH

SEQ ID NO: 34291 - protein, 9 aa, Artificial Sequence
  Description of Artificial Sequence: Synthetic peptide
QKSWIVGEK

SEQ ID NO: 34292 - protein, 9 aa, Artificial Sequence
  Description of Artificial Sequence: Synthetic peptide
QPIFYDRSQ

SEQ ID NO: 34293 - protein, 9 aa, Artificial Sequence
  Description of Artificial Sequence: Synthetic peptide
QQDGDQQPL

SEQ ID NO: 34294 - protein, 9 aa, Artificial Sequence
  Description of Artificial Sequence: Synthetic peptide
QQKAISSLP

SEQ ID NO: 34295 - protein, 9 aa, Artificial Sequence
  Description of Artificial Sequence: Synthetic peptide
QSNNALMGN

SEQ ID NO: 34296 - protein, 9 aa, Artificial Sequence
  Description of Artificial Sequence: Synthetic peptide
QTFSFAPGY

SEQ ID NO: 34297 - protein, 9 aa, Artificial Sequence
  Description of Artificial Sequence: Synthetic peptide
QVMDLVYPT

SEQ ID NO: 34298 - protein, 9 aa, Artificial Sequence
  Description of Artificial Sequence: Synthetic peptide
RAEPFPEEK

SEQ ID NO: 34299 - protein, 9 aa, Artificial Sequence
  Description of Artificial Sequence: Synthetic peptide
RCEHDKLCL

SEQ ID NO: 34300 - protein, 9 aa, Artificial Sequence
  Description of Artificial Sequence: Synthetic peptide
RCWFSELHE

SEQ ID NO: 34301 - protein, 9 aa, Artificial Sequence
  Description of Artificial Sequence: Synthetic peptide
REVYGLFMD

SEQ ID NO: 34302 - protein, 9 aa, Artificial Sequence
  Description of Artificial Sequence: Synthetic peptide
RGLMCEMMN

SEQ ID NO: 34303 - protein, 9 aa, Artificial Sequence
  Description of Artificial Sequence: Synthetic peptide
RHMFHEAGW

SEQ ID NO: 34304 - protein, 9 aa, Artificial Sequence
  Description of Artificial Sequence: Synthetic peptide
RKPPFGPPY

SEQ ID NO: 34305 - protein, 9 aa, Artificial Sequence
  Description of Artificial Sequence: Synthetic peptide
RLMSGAIVE

SEQ ID NO: 34306 - protein, 9 aa, Artificial Sequence
  Description of Artificial Sequence: Synthetic peptide
RNKHDMIGC

SEQ ID NO: 34307 - protein, 9 aa, Artificial Sequence
  Description of Artificial Sequence: Synthetic peptide
RRDCMDSAF

SEQ ID NO: 34308 - protein, 9 aa, Artificial Sequence
  Description of Artificial Sequence: Synthetic peptide
RVAAPWLPE

SEQ ID NO: 34309 - protein, 9 aa, Artificial Sequence
  Description of Artificial Sequence: Synthetic peptide
RVILAMGPY

SEQ ID NO: 34310 - protein, 9 aa, Artificial Sequence
  Description of Artificial Sequence: Synthetic peptide
SAHQFQDYQ

SEQ ID NO: 34311 - protein, 9 aa, Artificial Sequence
  Description of Artificial Sequence: Synthetic peptide
SAPQFQDYQ

SEQ ID NO: 34312 - protein, 9 aa, Artificial Sequence
  Description of Artificial Sequence: Synthetic peptide
SDMPHPPLS

SEQ ID NO: 34313 - protein, 9 aa, Artificial Sequence
  Description of Artificial Sequence: Synthetic peptide
SGCRYNQEQ

SEQ ID NO: 34314 - protein, 9 aa, Artificial Sequence
  Description of Artificial Sequence: Synthetic peptide
SGLQLMWHH

SEQ ID NO: 34315 - protein, 9 aa, Artificial Sequence
  Description of Artificial Sequence: Synthetic peptide
SHKFMDLMM

SEQ ID NO: 34316 - protein, 9 aa, Artificial Sequence
  Description of Artificial Sequence: Synthetic peptide
SHQLIRREN

SEQ ID NO: 34317 - protein, 9 aa, Artificial Sequence
  Description of Artificial Sequence: Synthetic peptide
SIRYDFYVP

SEQ ID NO: 34318 - protein, 9 aa, Artificial Sequence
  Description of Artificial Sequence: Synthetic peptide
SLCSMLCTR

SEQ ID NO: 34319 - protein, 9 aa, Artificial Sequence
  Description of Artificial Sequence: Synthetic peptide
SLCWMHAHH

SEQ ID NO: 34320 - protein, 9 aa, Artificial Sequence
  Description of Artificial Sequence: Synthetic peptide
SMASVSEIK

SEQ ID NO: 34321 - protein, 9 aa, Artificial Sequence
  Description of Artificial Sequence: Synthetic peptide
SMEQYWTSN

SEQ ID NO: 34322 - protein, 9 aa, Artificial Sequence
  Description of Artificial Sequence: Synthetic peptide
SMGVPQAAN

SEQ ID NO: 34323 - protein, 9 aa, Artificial Sequence
  Description of Artificial Sequence: Synthetic peptide
SMMPKCKAS

SEQ ID NO: 34324 - protein, 9 aa, Artificial Sequence
  Description of Artificial Sequence: Synthetic peptide
SMQCEVVGP

SEQ ID NO: 34325 - protein, 9 aa, Artificial Sequence
  Description of Artificial Sequence: Synthetic peptide
SMQCEVVGS

SEQ ID NO: 34326 - protein, 9 aa, Artificial Sequence
  Description of Artificial Sequence: Synthetic peptide
SMQEYQKHI

SEQ ID NO: 34327 - protein, 9 aa, Artificial Sequence
  Description of Artificial Sequence: Synthetic peptide
SMYQFADPM

SEQ ID NO: 34328 - protein, 9 aa, Artificial Sequence
  Description of Artificial Sequence: Synthetic peptide
SQDIESLWP

SEQ ID NO: 34329 - protein, 9 aa, Artificial Sequence
  Description of Artificial Sequence: Synthetic peptide
SRMQFHNQE

SEQ ID NO: 34330 - protein, 9 aa, Artificial Sequence
  Description of Artificial Sequence: Synthetic peptide
SRWCPKVPF

SEQ ID NO: 34331 - protein, 9 aa, Artificial Sequence
  Description of Artificial Sequence: Synthetic peptide
SSGEGKAED

SEQ ID NO: 34332 - protein, 9 aa, Artificial Sequence
  Description of Artificial Sequence: Synthetic peptide
SSRPKYFCV

SEQ ID NO: 34333 - protein, 9 aa, Artificial Sequence
  Description of Artificial Sequence: Synthetic peptide
STCHVGKMQ

SEQ ID NO: 34334 - protein, 9 aa, Artificial Sequence
  Description of Artificial Sequence: Synthetic peptide
STCSIDAQM

SEQ ID NO: 34335 - protein, 9 aa, Artificial Sequence
  Description of Artificial Sequence: Synthetic peptide
SVCWSNKVP

SEQ ID NO: 34336 - protein, 9 aa, Artificial Sequence
  Description of Artificial Sequence: Synthetic peptide
SVDRQFVHS

SEQ ID NO: 34337 - protein, 9 aa, Artificial Sequence
  Description of Artificial Sequence: Synthetic peptide
SVQLWGYQP

SEQ ID NO: 34338 - protein, 9 aa, Artificial Sequence
  Description of Artificial Sequence: Synthetic peptide
SVRYECSHG

SEQ ID NO: 34339 - protein, 9 aa, Artificial Sequence
  Description of Artificial Sequence: Synthetic peptide
SYQSCESMQ

SEQ ID NO: 34340 - protein, 9 aa, Artificial Sequence
  Description of Artificial Sequence: Synthetic peptide
SYSWKQYGV

SEQ ID NO: 34341 - protein, 9 aa, Artificial Sequence
  Description of Artificial Sequence: Synthetic peptide
TALGIYAHK

SEQ ID NO: 34342 - protein, 9 aa, Artificial Sequence
  Description of Artificial Sequence: Synthetic peptide
TCIRAMTSC

SEQ ID NO: 34343 - protein, 9 aa, Artificial Sequence
  Description of Artificial Sequence: Synthetic peptide
TCRPSDWAW

SEQ ID NO: 34344 - protein, 9 aa, Artificial Sequence
  Description of Artificial Sequence: Synthetic peptide
TCYQNQRSH

SEQ ID NO: 34345 - protein, 9 aa, Artificial Sequence
  Description of Artificial Sequence: Synthetic peptide
TEWEQNWTP

SEQ ID NO: 34346 - protein, 9 aa, Artificial Sequence
  Description of Artificial Sequence: Synthetic peptide
TFGTTAIHN

SEQ ID NO: 34347 - protein, 9 aa, Artificial Sequence
  Description of Artificial Sequence: Synthetic peptide
TGNASNDCW

SEQ ID NO: 34348 - protein, 9 aa, Artificial Sequence
  Description of Artificial Sequence: Synthetic peptide
THFSKMSDQ

SEQ ID NO: 34349 - protein, 9 aa, Artificial Sequence
  Description of Artificial Sequence: Synthetic peptide
TKCSWNHIS

SEQ ID NO: 34350 - protein, 9 aa, Artificial Sequence
  Description of Artificial Sequence: Synthetic peptide
TLCIVPPLI

SEQ ID NO: 34351 - protein, 9 aa, Artificial Sequence
  Description of Artificial Sequence: Synthetic peptide
TMSTCQQML

SEQ ID NO: 34352 - protein, 9 aa, Artificial Sequence
  Description of Artificial Sequence: Synthetic peptide
TNQLYRGFW

SEQ ID NO: 34353 - protein, 9 aa, Artificial Sequence
  Description of Artificial Sequence: Synthetic peptide
TSFMPPSEA

SEQ ID NO: 34354 - protein, 9 aa, Artificial Sequence
  Description of Artificial Sequence: Synthetic peptide
TSGFFHMYY

SEQ ID NO: 34355 - protein, 9 aa, Artificial Sequence
  Description of Artificial Sequence: Synthetic peptide
TSHCIPEVE

SEQ ID NO: 34356 - protein, 9 aa, Artificial Sequence
  Description of Artificial Sequence: Synthetic peptide
TTIGWHVCQ

SEQ ID NO: 34357 - protein, 9 aa, Artificial Sequence
  Description of Artificial Sequence: Synthetic peptide
TYCKSYRTR

SEQ ID NO: 34358 - protein, 9 aa, Artificial Sequence
  Description of Artificial Sequence: Synthetic peptide
TYKCWIADN

SEQ ID NO: 34359 - protein, 9 aa, Artificial Sequence
  Description of Artificial Sequence: Synthetic peptide
VAVDLSWCG

SEQ ID NO: 34360 - protein, 9 aa, Artificial Sequence
  Description of Artificial Sequence: Synthetic peptide
VFASEWCGS

SEQ ID NO: 34361 - protein, 9 aa, Artificial Sequence
  Description of Artificial Sequence: Synthetic peptide
VGTKHDVWY

SEQ ID NO: 34362 - protein, 9 aa, Artificial Sequence
  Description of Artificial Sequence: Synthetic peptide
VKKRDNQST

SEQ ID NO: 34363 - protein, 9 aa, Artificial Sequence
  Description of Artificial Sequence: Synthetic peptide
VKKRVNQST

SEQ ID NO: 34364 - protein, 9 aa, Artificial Sequence
  Description of Artificial Sequence: Synthetic peptide
VMKHQHSGR

SEQ ID NO: 34365 - protein, 9 aa, Artificial Sequence
  Description of Artificial Sequence: Synthetic peptide
VQGYKDSNE

SEQ ID NO: 34366 - protein, 9 aa, Artificial Sequence
  Description of Artificial Sequence: Synthetic peptide
VSCYTHRQD

SEQ ID NO: 34367 - protein, 9 aa, Artificial Sequence
  Description of Artificial Sequence: Synthetic peptide
VTFCVHRYQ

SEQ ID NO: 34368 - protein, 9 aa, Artificial Sequence
  Description of Artificial Sequence: Synthetic peptide
VTTSRWELI

SEQ ID NO: 34369 - protein, 9 aa, Artificial Sequence
  Description of Artificial Sequence: Synthetic peptide
VYILEGGIH

SEQ ID NO: 34370 - protein, 9 aa, Artificial Sequence
  Description of Artificial Sequence: Synthetic peptide
WFRITDTCG

SEQ ID NO: 34371 - protein, 9 aa, Artificial Sequence
  Description of Artificial Sequence: Synthetic peptide
WIITKSTEF

SEQ ID NO: 34372 - protein, 9 aa, Artificial Sequence
  Description of Artificial Sequence: Synthetic peptide
WMTCFPMQN

SEQ ID NO: 34373 - protein, 9 aa, Artificial Sequence
  Description of Artificial Sequence: Synthetic peptide
WRDFFNFSH

SEQ ID NO: 34374 - protein, 9 aa, Artificial Sequence
  Description of Artificial Sequence: Synthetic peptide
WTKMQQNDT

SEQ ID NO: 34375 - protein, 9 aa, Artificial Sequence
  Description of Artificial Sequence: Synthetic peptide
WVAVLNLNA

SEQ ID NO: 34376 - protein, 9 aa, Artificial Sequence
  Description of Artificial Sequence: Synthetic peptide
WWQLMNLLP

SEQ ID NO: 34377 - protein, 9 aa, Artificial Sequence
  Description of Artificial Sequence: Synthetic peptide
YCGIYWNSF

SEQ ID NO: 34378 - protein, 9 aa, Artificial Sequence
  Description of Artificial Sequence: Synthetic peptide
YEHIDWTFC

SEQ ID NO: 34379 - protein, 9 aa, Artificial Sequence
  Description of Artificial Sequence: Synthetic peptide
YLHKRCWPS

SEQ ID NO: 34380 - protein, 9 aa, Artificial Sequence
  Description of Artificial Sequence: Synthetic peptide
YRLLTCASA

SEQ ID NO: 34381 - protein, 9 aa, Artificial Sequence
  Description of Artificial Sequence: Synthetic peptide
YSALNSYAC

SEQ ID NO: 34382 - protein, 9 aa, Artificial Sequence
  Description of Artificial Sequence: Synthetic peptide
YSQLFQMTN

SEQ ID NO: 34383 - protein, 9 aa, Artificial Sequence
  Description of Artificial Sequence: Synthetic peptide
YTFWINNHA

SEQ ID NO: 34384 - protein, 9 aa, Artificial Sequence
  Description of Artificial Sequence: Synthetic peptide
DTSPVEYAH

SEQ ID NO: 34385 - protein, 9 aa, Artificial Sequence
  Description of Artificial Sequence: Synthetic peptide
GMVDDKWLY

SEQ ID NO: 34386 - protein, 9 aa, Artificial Sequence
  Description of Artificial Sequence: Synthetic peptide
QKNVSTKYD

SEQ ID NO: 34387 - protein, 9 aa, Artificial Sequence
  Description of Artificial Sequence: Synthetic peptide
YCHQEDRIT

SEQ ID NO: 34388 - protein, 9 aa, Artificial Sequence
  Description of Artificial Sequence: Synthetic peptide
SQETFQKMD

SEQ ID NO: 34389 - protein, 9 aa, Artificial Sequence
  Description of Artificial Sequence: Synthetic peptide
SRYVNNGTV

SEQ ID NO: 34390 - protein, 9 aa, Artificial Sequence
  Description of Artificial Sequence: Synthetic peptide
DGDFLQNHH

SEQ ID NO: 34391 - protein, 9 aa, Artificial Sequence
  Description of Artificial Sequence: Synthetic peptide
ICHTEVMFN

SEQ ID NO: 34392 - protein, 9 aa, Artificial Sequence
  Description of Artificial Sequence: Synthetic peptide
QTANVKAMY

SEQ ID NO: 34393 - protein, 9 aa, Artificial Sequence
  Description of Artificial Sequence: Synthetic peptide
SAICQNYDA

SEQ ID NO: 34394 - protein, 9 aa, Artificial Sequence
  Description of Artificial Sequence: Synthetic peptide
MALTVYWKG

SEQ ID NO: 34395 - protein, 9 aa, Artificial Sequence
  Description of Artificial Sequence: Synthetic peptide
DTSKTGKHV

SEQ ID NO: 34396 - protein, 9 aa, Artificial Sequence
  Description of Artificial Sequence: Synthetic peptide
TQCKQLTVM

SEQ ID NO: 34397 - protein, 9 aa, Artificial Sequence
  Description of Artificial Sequence: Synthetic peptide
KTMGIGGGP

SEQ ID NO: 34398 - protein, 9 aa, Artificial Sequence
  Description of Artificial Sequence: Synthetic peptide
RVMMGNNQA

SEQ ID NO: 34399 - protein, 9 aa, Artificial Sequence
  Description of Artificial Sequence: Synthetic peptide
MNSFYRAEW

SEQ ID NO: 34400 - protein, 9 aa, Artificial Sequence
  Description of Artificial Sequence: Synthetic peptide
AAGHIGSVM

SEQ ID NO: 34401 - protein, 9 aa, Artificial Sequence
  Description of Artificial Sequence: Synthetic peptide
AAILTDYDE

SEQ ID NO: 34402 - protein, 9 aa, Artificial Sequence
  Description of Artificial Sequence: Synthetic peptide
AATGFTFFE

SEQ ID NO: 34403 - protein, 9 aa, Artificial Sequence
  Description of Artificial Sequence: Synthetic peptide
ACDQQQRES

SEQ ID NO: 34404 - protein, 9 aa, Artificial Sequence
  Description of Artificial Sequence: Synthetic peptide
AHAPQFGPC

SEQ ID NO: 34405 - protein, 9 aa, Artificial Sequence
  Description of Artificial Sequence: Synthetic peptide
APEIHDYCA

SEQ ID NO: 34406 - protein, 9 aa, Artificial Sequence
  Description of Artificial Sequence: Synthetic peptide
AYMWEEQAT

SEQ ID NO: 34407 - protein, 9 aa, Artificial Sequence
  Description of Artificial Sequence: Synthetic peptide
CSMPSVNSD

SEQ ID NO: 34408 - protein, 9 aa, Artificial Sequence
  Description of Artificial Sequence: Synthetic peptide
CSSCNCHCS

SEQ ID NO: 34409 - protein, 9 aa, Artificial Sequence
  Description of Artificial Sequence: Synthetic peptide
CTKAYRKPG

SEQ ID NO: 34410 - protein, 9 aa, Artificial Sequence
  Description of Artificial Sequence: Synthetic peptide
DCMLVPVSG

SEQ ID NO: 34411 - protein, 9 aa, Artificial Sequence
  Description of Artificial Sequence: Synthetic peptide
DEPFPCDWS

SEQ ID NO: 34412 - protein, 9 aa, Artificial Sequence
  Description of Artificial Sequence: Synthetic peptide
DGRQVWFFQ

SEQ ID NO: 34413 - protein, 9 aa, Artificial Sequence
  Description of Artificial Sequence: Synthetic peptide
DHSQNTEPT

SEQ ID NO: 34414 - protein, 9 aa, Artificial Sequence
  Description of Artificial Sequence: Synthetic peptide
DKFSLPSQD

SEQ ID NO: 34415 - protein, 9 aa, Artificial Sequence
  Description of Artificial Sequence: Synthetic peptide
DNVTTKKVQ

SEQ ID NO: 34416 - protein, 9 aa, Artificial Sequence
  Description of Artificial Sequence: Synthetic peptide
DQCPGHISV

SEQ ID NO: 34417 - protein, 9 aa, Artificial Sequence
  Description of Artificial Sequence: Synthetic peptide
DYCNKKRPV

SEQ ID NO: 34418 - protein, 9 aa, Artificial Sequence
  Description of Artificial Sequence: Synthetic peptide
EAYANMFHG

SEQ ID NO: 34419 - protein, 9 aa, Artificial Sequence
  Description of Artificial Sequence: Synthetic peptide
EDEQHLWND

SEQ ID NO: 34420 - protein, 9 aa, Artificial Sequence
  Description of Artificial Sequence: Synthetic peptide
EEGTVPEVL

SEQ ID NO: 34421 - protein, 9 aa, Artificial Sequence
  Description of Artificial Sequence: Synthetic peptide
ELPRNYPDP

SEQ ID NO: 34422 - protein, 9 aa, Artificial Sequence
  Description of Artificial Sequence: Synthetic peptide
EQMPLTNVP

SEQ ID NO: 34423 - protein, 9 aa, Artificial Sequence
  Description of Artificial Sequence: Synthetic peptide
EQPSVNYLR

SEQ ID NO: 34424 - protein, 9 aa, Artificial Sequence
  Description of Artificial Sequence: Synthetic peptide
EQTGDFVHH

SEQ ID NO: 34425 - protein, 9 aa, Artificial Sequence
  Description of Artificial Sequence: Synthetic peptide
ERQARNHYA

SEQ ID NO: 34426 - protein, 9 aa, Artificial Sequence
  Description of Artificial Sequence: Synthetic peptide
EVNCDWHWQ

SEQ ID NO: 34427 - protein, 9 aa, Artificial Sequence
  Description of Artificial Sequence: Synthetic peptide
FGPCLMNER

SEQ ID NO: 34428 - protein, 9 aa, Artificial Sequence
  Description of Artificial Sequence: Synthetic peptide
FGQLIIKHP

SEQ ID NO: 34429 - protein, 9 aa, Artificial Sequence
  Description of Artificial Sequence: Synthetic peptide
FKMFNWPAY

SEQ ID NO: 34430 - protein, 9 aa, Artificial Sequence
  Description of Artificial Sequence: Synthetic peptide
FSGVYKQYE

SEQ ID NO: 34431 - protein, 9 aa, Artificial Sequence
  Description of Artificial Sequence: Synthetic peptide
GDSYYMWKA

SEQ ID NO: 34432 - protein, 9 aa, Artificial Sequence
  Description of Artificial Sequence: Synthetic peptide
GERGHGERY

SEQ ID NO: 34433 - protein, 9 aa, Artificial Sequence
  Description of Artificial Sequence: Synthetic peptide
GFHDCSMMI

SEQ ID NO: 34434 - protein, 9 aa, Artificial Sequence
  Description of Artificial Sequence: Synthetic peptide
GIHEIVVNQ

SEQ ID NO: 34435 - protein, 9 aa, Artificial Sequence
  Description of Artificial Sequence: Synthetic peptide
GKCIMQMCM

SEQ ID NO: 34436 - protein, 9 aa, Artificial Sequence
  Description of Artificial Sequence: Synthetic peptide
GLSMVMHFV

SEQ ID NO: 34437 - protein, 9 aa, Artificial Sequence
  Description of Artificial Sequence: Synthetic peptide
GSMQHRRDC

SEQ ID NO: 34438 - protein, 9 aa, Artificial Sequence
  Description of Artificial Sequence: Synthetic peptide
GSMRHQRDC

SEQ ID NO: 34439 - protein, 9 aa, Artificial Sequence
  Description of Artificial Sequence: Synthetic peptide
HGYEHMMSG

SEQ ID NO: 34440 - protein, 9 aa, Artificial Sequence
  Description of Artificial Sequence: Synthetic peptide
HTERWHMLG

SEQ ID NO: 34441 - protein, 9 aa, Artificial Sequence
  Description of Artificial Sequence: Synthetic peptide
HTHDWYSAG

SEQ ID NO: 34442 - protein, 9 aa, Artificial Sequence
  Description of Artificial Sequence: Synthetic peptide
HVYEHMMSG

SEQ ID NO: 34443 - protein, 9 aa, Artificial Sequence
  Description of Artificial Sequence: Synthetic peptide
IAGISMHNH

SEQ ID NO: 34444 - protein, 9 aa, Artificial Sequence
  Description of Artificial Sequence: Synthetic peptide
IDDPTMFEV

SEQ ID NO: 34445 - protein, 9 aa, Artificial Sequence
  Description of Artificial Sequence: Synthetic peptide
IHWHCWPKW

SEQ ID NO: 34446 - protein, 9 aa, Artificial Sequence
  Description of Artificial Sequence: Synthetic peptide
IIQQYGCST

SEQ ID NO: 34447 - protein, 9 aa, Artificial Sequence
  Description of Artificial Sequence: Synthetic peptide
IMQPPWHTG

SEQ ID NO: 34448 - protein, 9 aa, Artificial Sequence
  Description of Artificial Sequence: Synthetic peptide
KEPMPRGFL

SEQ ID NO: 34449 - protein, 9 aa, Artificial Sequence
  Description of Artificial Sequence: Synthetic peptide
KICHEDISV

SEQ ID NO: 34450 - protein, 9 aa, Artificial Sequence
  Description of Artificial Sequence: Synthetic peptide
KQALYDTFK

SEQ ID NO: 34451 - protein, 9 aa, Artificial Sequence
  Description of Artificial Sequence: Synthetic peptide
KQMPLTNVP

SEQ ID NO: 34452 - protein, 9 aa, Artificial Sequence
  Description of Artificial Sequence: Synthetic peptide
LAYPHERDG

SEQ ID NO: 34453 - protein, 9 aa, Artificial Sequence
  Description of Artificial Sequence: Synthetic peptide
LHYDTMKNE

SEQ ID NO: 34454 - protein, 9 aa, Artificial Sequence
  Description of Artificial Sequence: Synthetic peptide
LLANYMVHT

SEQ ID NO: 34455 - protein, 9 aa, Artificial Sequence
  Description of Artificial Sequence: Synthetic peptide
LPIEQVKWF

SEQ ID NO: 34456 - protein, 9 aa, Artificial Sequence
  Description of Artificial Sequence: Synthetic peptide
LWSWYDQPS

SEQ ID NO: 34457 - protein, 9 aa, Artificial Sequence
  Description of Artificial Sequence: Synthetic peptide
MCWSWQDAY

SEQ ID NO: 34458 - protein, 9 aa, Artificial Sequence
  Description of Artificial Sequence: Synthetic peptide
MQTPQAVMS

SEQ ID NO: 34459 - protein, 9 aa, Artificial Sequence
  Description of Artificial Sequence: Synthetic peptide
MSMKYLEQT

SEQ ID NO: 34460 - protein, 9 aa, Artificial Sequence
  Description of Artificial Sequence: Synthetic peptide
MTFQDAATY

SEQ ID NO: 34461 - protein, 9 aa, Artificial Sequence
  Description of Artificial Sequence: Synthetic peptide
MTIDIDQWC

SEQ ID NO: 34462 - protein, 9 aa, Artificial Sequence
  Description of Artificial Sequence: Synthetic peptide
MTVIWIWSH

SEQ ID NO: 34463 - protein, 9 aa, Artificial Sequence
  Description of Artificial Sequence: Synthetic peptide
NNVEQHCQV

SEQ ID NO: 34464 - protein, 9 aa, Artificial Sequence
  Description of Artificial Sequence: Synthetic peptide
PEYQFECIF

SEQ ID NO: 34465 - protein, 9 aa, Artificial Sequence
  Description of Artificial Sequence: Synthetic peptide
PGWSVANCS

SEQ ID NO: 34466 - protein, 9 aa, Artificial Sequence
  Description of Artificial Sequence: Synthetic peptide
PKVNLKGDE

SEQ ID NO: 34467 - protein, 9 aa, Artificial Sequence
  Description of Artificial Sequence: Synthetic peptide
PQVMWPGWF

SEQ ID NO: 34468 - protein, 9 aa, Artificial Sequence
  Description of Artificial Sequence: Synthetic peptide
PSTHHTQGM

SEQ ID NO: 34469 - protein, 9 aa, Artificial Sequence
  Description of Artificial Sequence: Synthetic peptide
PVEELYGTF

SEQ ID NO: 34470 - protein, 9 aa, Artificial Sequence
  Description of Artificial Sequence: Synthetic peptide
QFFACGVYD

SEQ ID NO: 34471 - protein, 9 aa, Artificial Sequence
  Description of Artificial Sequence: Synthetic peptide
QPTSHMNMN

SEQ ID NO: 34472 - protein, 9 aa, Artificial Sequence
  Description of Artificial Sequence: Synthetic peptide
QTIWFIDDN

SEQ ID NO: 34473 - protein, 9 aa, Artificial Sequence
  Description of Artificial Sequence: Synthetic peptide
RDLMYTDQA

SEQ ID NO: 34474 - protein, 9 aa, Artificial Sequence
  Description of Artificial Sequence: Synthetic peptide
RIEWEMISD

SEQ ID NO: 34475 - protein, 9 aa, Artificial Sequence
  Description of Artificial Sequence: Synthetic peptide
SCATAHARE

SEQ ID NO: 34476 - protein, 9 aa, Artificial Sequence
  Description of Artificial Sequence: Synthetic peptide
SHEKYWYFS

SEQ ID NO: 34477 - protein, 9 aa, Artificial Sequence
  Description of Artificial Sequence: Synthetic peptide
SKCIMQMCM

SEQ ID NO: 34478 - protein, 9 aa, Artificial Sequence
  Description of Artificial Sequence: Synthetic peptide
SMFMGRRTE

SEQ ID NO: 34479 - protein, 9 aa, Artificial Sequence
  Description of Artificial Sequence: Synthetic peptide
SPYSCWMQE

SEQ ID NO: 34480 - protein, 9 aa, Artificial Sequence
  Description of Artificial Sequence: Synthetic peptide
SRYLYYNYH

SEQ ID NO: 34481 - protein, 9 aa, Artificial Sequence
  Description of Artificial Sequence: Synthetic peptide
SSYYFMGTP

SEQ ID NO: 34482 - protein, 9 aa, Artificial Sequence
  Description of Artificial Sequence: Synthetic peptide
SVNRMDQDH

SEQ ID NO: 34483 - protein, 9 aa, Artificial Sequence
  Description of Artificial Sequence: Synthetic peptide
TCELTMCYL

SEQ ID NO: 34484 - protein, 9 aa, Artificial Sequence
  Description of Artificial Sequence: Synthetic peptide
THSSCWYQA

SEQ ID NO: 34485 - protein, 9 aa, Artificial Sequence
  Description of Artificial Sequence: Synthetic peptide
TIRPVMWGH

SEQ ID NO: 34486 - protein, 9 aa, Artificial Sequence
  Description of Artificial Sequence: Synthetic peptide
TKPPLGCSS

SEQ ID NO: 34487 - protein, 9 aa, Artificial Sequence
  Description of Artificial Sequence: Synthetic peptide
TQTNKTFMK

SEQ ID NO: 34488 - protein, 9 aa, Artificial Sequence
  Description of Artificial Sequence: Synthetic peptide
TVCEPKCAA

SEQ ID NO: 34489 - protein, 9 aa, Artificial Sequence
  Description of Artificial Sequence: Synthetic peptide
TVICIPSGS

SEQ ID NO: 34490 - protein, 9 aa, Artificial Sequence
  Description of Artificial Sequence: Synthetic peptide
VIWYCFCTL

SEQ ID NO: 34491 - protein, 9 aa, Artificial Sequence
  Description of Artificial Sequence: Synthetic peptide
VMGIVEPSK

SEQ ID NO: 34492 - protein, 9 aa, Artificial Sequence
  Description of Artificial Sequence: Synthetic peptide
VMWNQNKTE

SEQ ID NO: 34493 - protein, 9 aa, Artificial Sequence
  Description of Artificial Sequence: Synthetic peptide
VVHNVKDVH

SEQ ID NO: 34494 - protein, 9 aa, Artificial Sequence
  Description of Artificial Sequence: Synthetic peptide
WTSILDHSS

SEQ ID NO: 34495 - protein, 9 aa, Artificial Sequence
  Description of Artificial Sequence: Synthetic peptide
WVASSYKPG

SEQ ID NO: 34496 - protein, 9 aa, Artificial Sequence
  Description of Artificial Sequence: Synthetic peptide
WYQPRFGRQ

SEQ ID NO: 34497 - protein, 9 aa, Artificial Sequence
  Description of Artificial Sequence: Synthetic peptide
YDAVWRKYT

SEQ ID NO: 34498 - protein, 9 aa, Artificial Sequence
  Description of Artificial Sequence: Synthetic peptide
YDEHWNDNS

SEQ ID NO: 34499 - protein, 9 aa, Artificial Sequence
  Description of Artificial Sequence: Synthetic peptide
YDIMTISPF

SEQ ID NO: 34500 - protein, 9 aa, Artificial Sequence
  Description of Artificial Sequence: Synthetic peptide
YHKDYMCLG

SEQ ID NO: 34501 - protein, 9 aa, Artificial Sequence
  Description of Artificial Sequence: Synthetic peptide
YTGRFTCMS

SEQ ID NO: 34502 - protein, 9 aa, Artificial Sequence
  Description of Artificial Sequence: Synthetic peptide
AATTYNQHA

SEQ ID NO: 34503 - protein, 9 aa, Artificial Sequence
  Description of Artificial Sequence: Synthetic peptide
ACEQQQRES

SEQ ID NO: 34504 - protein, 9 aa, Artificial Sequence
  Description of Artificial Sequence: Synthetic peptide
AGDWYIALI

SEQ ID NO: 34505 - protein, 9 aa, Artificial Sequence
  Description of Artificial Sequence: Synthetic peptide
AGHLQFTCP

SEQ ID NO: 34506 - protein, 9 aa, Artificial Sequence
  Description of Artificial Sequence: Synthetic peptide
AGVRTQCDN

SEQ ID NO: 34507 - protein, 9 aa, Artificial Sequence
  Description of Artificial Sequence: Synthetic peptide
ALCSCNQLF

SEQ ID NO: 34508 - protein, 9 aa, Artificial Sequence
  Description of Artificial Sequence: Synthetic peptide
AMRKIGVWH

SEQ ID NO: 34509 - protein, 9 aa, Artificial Sequence
  Description of Artificial Sequence: Synthetic peptide
AQGHKCYCS

SEQ ID NO: 34510 - protein, 9 aa, Artificial Sequence
  Description of Artificial Sequence: Synthetic peptide
AQTNKTFMK

SEQ ID NO: 34511 - protein, 9 aa, Artificial Sequence
  Description of Artificial Sequence: Synthetic peptide
ASMPVWKHY

SEQ ID NO: 34512 - protein, 9 aa, Artificial Sequence
  Description of Artificial Sequence: Synthetic peptide
ATIMMHQFG

SEQ ID NO: 34513 - protein, 9 aa, Artificial Sequence
  Description of Artificial Sequence: Synthetic peptide
AYVEHNASR

SEQ ID NO: 34514 - protein, 9 aa, Artificial Sequence
  Description of Artificial Sequence: Synthetic peptide
CKTHCPGQY

SEQ ID NO: 34515 - protein, 9 aa, Artificial Sequence
  Description of Artificial Sequence: Synthetic peptide
CNHQFIDQA

SEQ ID NO: 34516 - protein, 9 aa, Artificial Sequence
  Description of Artificial Sequence: Synthetic peptide
CSCSYQDMM

SEQ ID NO: 34517 - protein, 9 aa, Artificial Sequence
  Description of Artificial Sequence: Synthetic peptide
CVNMEMMTA

SEQ ID NO: 34518 - protein, 9 aa, Artificial Sequence
  Description of Artificial Sequence: Synthetic peptide
CYEQVNSND

SEQ ID NO: 34519 - protein, 9 aa, Artificial Sequence
  Description of Artificial Sequence: Synthetic peptide
DCADMGYRR

SEQ ID NO: 34520 - protein, 9 aa, Artificial Sequence
  Description of Artificial Sequence: Synthetic peptide
DCEWMIRLG

SEQ ID NO: 34521 - protein, 9 aa, Artificial Sequence
  Description of Artificial Sequence: Synthetic peptide
DDEYPAHWD

SEQ ID NO: 34522 - protein, 9 aa, Artificial Sequence
  Description of Artificial Sequence: Synthetic peptide
DHLPMNQER

SEQ ID NO: 34523 - protein, 9 aa, Artificial Sequence
  Description of Artificial Sequence: Synthetic peptide
DHQWTDAWV

SEQ ID NO: 34524 - protein, 9 aa, Artificial Sequence
  Description of Artificial Sequence: Synthetic peptide
DIGYRSTTF

SEQ ID NO: 34525 - protein, 9 aa, Artificial Sequence
  Description of Artificial Sequence: Synthetic peptide
DRAYRPWND

SEQ ID NO: 34526 - protein, 9 aa, Artificial Sequence
  Description of Artificial Sequence: Synthetic peptide
DSKSYWMDH

SEQ ID NO: 34527 - protein, 9 aa, Artificial Sequence
  Description of Artificial Sequence: Synthetic peptide
DVGCLQNMY

SEQ ID NO: 34528 - protein, 9 aa, Artificial Sequence
  Description of Artificial Sequence: Synthetic peptide
EAYTNMFHG

SEQ ID NO: 34529 - protein, 9 aa, Artificial Sequence
  Description of Artificial Sequence: Synthetic peptide
ECRMYWFED

SEQ ID NO: 34530 - protein, 9 aa, Artificial Sequence
  Description of Artificial Sequence: Synthetic peptide
EMMHKMDAG

SEQ ID NO: 34531 - protein, 9 aa, Artificial Sequence
  Description of Artificial Sequence: Synthetic peptide
ESRQVHVGN

SEQ ID NO: 34532 - protein, 9 aa, Artificial Sequence
  Description of Artificial Sequence: Synthetic peptide
ESSYVNGIG

SEQ ID NO: 34533 - protein, 9 aa, Artificial Sequence
  Description of Artificial Sequence: Synthetic peptide
FASYDNTHL

SEQ ID NO: 34534 - protein, 9 aa, Artificial Sequence
  Description of Artificial Sequence: Synthetic peptide
FGEDGGFKG

SEQ ID NO: 34535 - protein, 9 aa, Artificial Sequence
  Description of Artificial Sequence: Synthetic peptide
FGPRENNHN

SEQ ID NO: 34536 - protein, 9 aa, Artificial Sequence
  Description of Artificial Sequence: Synthetic peptide
FHGNYQHDS

SEQ ID NO: 34537 - protein, 9 aa, Artificial Sequence
  Description of Artificial Sequence: Synthetic peptide
FLCLPQGHI

SEQ ID NO: 34538 - protein, 9 aa, Artificial Sequence
  Description of Artificial Sequence: Synthetic peptide
FQKVVEWQA

SEQ ID NO: 34539 - protein, 9 aa, Artificial Sequence
  Description of Artificial Sequence: Synthetic peptide
FQRPNFSLT

SEQ ID NO: 34540 - protein, 9 aa, Artificial Sequence
  Description of Artificial Sequence: Synthetic peptide
FQSLNKNQS

SEQ ID NO: 34541 - protein, 9 aa, Artificial Sequence
  Description of Artificial Sequence: Synthetic peptide
FVTQQHSHE

SEQ ID NO: 34542 - protein, 9 aa, Artificial Sequence
  Description of Artificial Sequence: Synthetic peptide
FWNHHDVAR

SEQ ID NO: 34543 - protein, 9 aa, Artificial Sequence
  Description of Artificial Sequence: Synthetic peptide
GLCSLNNMP

SEQ ID NO: 34544 - protein, 9 aa, Artificial Sequence
  Description of Artificial Sequence: Synthetic peptide
GSMQHQRDC

SEQ ID NO: 34545 - protein, 9 aa, Artificial Sequence
  Description of Artificial Sequence: Synthetic peptide
HEWWGPVSH

SEQ ID NO: 34546 - protein, 9 aa, Artificial Sequence
  Description of Artificial Sequence: Synthetic peptide
HKELILQPT

SEQ ID NO: 34547 - protein, 9 aa, Artificial Sequence
  Description of Artificial Sequence: Synthetic peptide
HVQHWMNDR

SEQ ID NO: 34548 - protein, 9 aa, Artificial Sequence
  Description of Artificial Sequence: Synthetic peptide
IADIDLTSF

SEQ ID NO: 34549 - protein, 9 aa, Artificial Sequence
  Description of Artificial Sequence: Synthetic peptide
ICQPDMKQS

SEQ ID NO: 34550 - protein, 9 aa, Artificial Sequence
  Description of Artificial Sequence: Synthetic peptide
IPKYKQFFD

SEQ ID NO: 34551 - protein, 9 aa, Artificial Sequence
  Description of Artificial Sequence: Synthetic peptide
ISAQCPHVH

SEQ ID NO: 34552 - protein, 9 aa, Artificial Sequence
  Description of Artificial Sequence: Synthetic peptide
ISHWQQRAE

SEQ ID NO: 34553 - protein, 9 aa, Artificial Sequence
  Description of Artificial Sequence: Synthetic peptide
ISKAQQHNP

SEQ ID NO: 34554 - protein, 9 aa, Artificial Sequence
  Description of Artificial Sequence: Synthetic peptide
KHDLTQQRQ

SEQ ID NO: 34555 - protein, 9 aa, Artificial Sequence
  Description of Artificial Sequence: Synthetic peptide
KHVITGGWW

SEQ ID NO: 34556 - protein, 9 aa, Artificial Sequence
  Description of Artificial Sequence: Synthetic peptide
KKPWDDHTR

SEQ ID NO: 34557 - protein, 9 aa, Artificial Sequence
  Description of Artificial Sequence: Synthetic peptide
KLESMAMSM

SEQ ID NO: 34558 - protein, 9 aa, Artificial Sequence
  Description of Artificial Sequence: Synthetic peptide
KLVCVDAYQ

SEQ ID NO: 34559 - protein, 9 aa, Artificial Sequence
  Description of Artificial Sequence: Synthetic peptide
KMNTGDNYH

SEQ ID NO: 34560 - protein, 9 aa, Artificial Sequence
  Description of Artificial Sequence: Synthetic peptide
KQPTPVNGI

SEQ ID NO: 34561 - protein, 9 aa, Artificial Sequence
  Description of Artificial Sequence: Synthetic peptide
KSARCKLHM

SEQ ID NO: 34562 - protein, 9 aa, Artificial Sequence
  Description of Artificial Sequence: Synthetic peptide
KSLSGEKNY

SEQ ID NO: 34563 - protein, 9 aa, Artificial Sequence
  Description of Artificial Sequence: Synthetic peptide
LDMWGDFLL

SEQ ID NO: 34564 - protein, 9 aa, Artificial Sequence
  Description of Artificial Sequence: Synthetic peptide
LDQSMDIAP

SEQ ID NO: 34565 - protein, 9 aa, Artificial Sequence
  Description of Artificial Sequence: Synthetic peptide
LQSHSQCFR

SEQ ID NO: 34566 - protein, 9 aa, Artificial Sequence
  Description of Artificial Sequence: Synthetic peptide
LTWGANAYT

SEQ ID NO: 34567 - protein, 9 aa, Artificial Sequence
  Description of Artificial Sequence: Synthetic peptide
LVCFADIMQ

SEQ ID NO: 34568 - protein, 9 aa, Artificial Sequence
  Description of Artificial Sequence: Synthetic peptide
LYRLVAQMN

SEQ ID NO: 34569 - protein, 9 aa, Artificial Sequence
  Description of Artificial Sequence: Synthetic peptide
MDQLVINSK

SEQ ID NO: 34570 - protein, 9 aa, Artificial Sequence
  Description of Artificial Sequence: Synthetic peptide
MIKTVAKKE

SEQ ID NO: 34571 - protein, 9 aa, Artificial Sequence
  Description of Artificial Sequence: Synthetic peptide
MILYFWKSH

SEQ ID NO: 34572 - protein, 9 aa, Artificial Sequence
  Description of Artificial Sequence: Synthetic peptide
MLAPIDCNT

SEQ ID NO: 34573 - protein, 9 aa, Artificial Sequence
  Description of Artificial Sequence: Synthetic peptide
MLGPLWKDQ

SEQ ID NO: 34574 - protein, 9 aa, Artificial Sequence
  Description of Artificial Sequence: Synthetic peptide
MNTRKDPPL

SEQ ID NO: 34575 - protein, 9 aa, Artificial Sequence
  Description of Artificial Sequence: Synthetic peptide
MTGWSSKQS

SEQ ID NO: 34576 - protein, 9 aa, Artificial Sequence
  Description of Artificial Sequence: Synthetic peptide
MTYQHVAGA

SEQ ID NO: 34577 - protein, 9 aa, Artificial Sequence
  Description of Artificial Sequence: Synthetic peptide
MVCGNQRNN

SEQ ID NO: 34578 - protein, 9 aa, Artificial Sequence
  Description of Artificial Sequence: Synthetic peptide
MVLADNEFI

SEQ ID NO: 34579 - protein, 9 aa, Artificial Sequence
  Description of Artificial Sequence: Synthetic peptide
NNDRWAIPQ

SEQ ID NO: 34580 - protein, 9 aa, Artificial Sequence
  Description of Artificial Sequence: Synthetic peptide
NPGWYGLAP

SEQ ID NO: 34581 - protein, 9 aa, Artificial Sequence
  Description of Artificial Sequence: Synthetic peptide
NQKGHDYSQ

SEQ ID NO: 34582 - protein, 9 aa, Artificial Sequence
  Description of Artificial Sequence: Synthetic peptide
NQVEVIYQS

SEQ ID NO: 34583 - protein, 9 aa, Artificial Sequence
  Description of Artificial Sequence: Synthetic peptide
NTSYVTMCT

SEQ ID NO: 34584 - protein, 9 aa, Artificial Sequence
  Description of Artificial Sequence: Synthetic peptide
PAFVCESPQ

SEQ ID NO: 34585 - protein, 9 aa, Artificial Sequence
  Description of Artificial Sequence: Synthetic peptide
PKPPLGCSS

SEQ ID NO: 34586 - protein, 9 aa, Artificial Sequence
  Description of Artificial Sequence: Synthetic peptide
QCEMKHHLA

SEQ ID NO: 34587 - protein, 9 aa, Artificial Sequence
  Description of Artificial Sequence: Synthetic peptide
QDPHKCRRS

SEQ ID NO: 34588 - protein, 9 aa, Artificial Sequence
  Description of Artificial Sequence: Synthetic peptide
QPAAKNKWN

SEQ ID NO: 34589 - protein, 9 aa, Artificial Sequence
  Description of Artificial Sequence: Synthetic peptide
QQNTEVKWE

SEQ ID NO: 34590 - protein, 9 aa, Artificial Sequence
  Description of Artificial Sequence: Synthetic peptide
QVVVRVQDH

SEQ ID NO: 34591 - protein, 9 aa, Artificial Sequence
  Description of Artificial Sequence: Synthetic peptide
SCEHCNKPY

SEQ ID NO: 34592 - protein, 9 aa, Artificial Sequence
  Description of Artificial Sequence: Synthetic peptide
SCHKYTDGN

SEQ ID NO: 34593 - protein, 9 aa, Artificial Sequence
  Description of Artificial Sequence: Synthetic peptide
SDPDIACVH

SEQ ID NO: 34594 - protein, 9 aa, Artificial Sequence
  Description of Artificial Sequence: Synthetic peptide
SFCTMQHSV

SEQ ID NO: 34595 - protein, 9 aa, Artificial Sequence
  Description of Artificial Sequence: Synthetic peptide
SHQWSRQMM

SEQ ID NO: 34596 - protein, 9 aa, Artificial Sequence
  Description of Artificial Sequence: Synthetic peptide
SNTYAGFQW

SEQ ID NO: 34597 - protein, 9 aa, Artificial Sequence
  Description of Artificial Sequence: Synthetic peptide
SRMGLELVN

SEQ ID NO: 34598 - protein, 9 aa, Artificial Sequence
  Description of Artificial Sequence: Synthetic peptide
SSMIMCGYV

SEQ ID NO: 34599 - protein, 9 aa, Artificial Sequence
  Description of Artificial Sequence: Synthetic peptide
TGTNLHQCQ

SEQ ID NO: 34600 - protein, 9 aa, Artificial Sequence
  Description of Artificial Sequence: Synthetic peptide
TMHIKRNSH

SEQ ID NO: 34601 - protein, 9 aa, Artificial Sequence
  Description of Artificial Sequence: Synthetic peptide
TMQCISHLS

SEQ ID NO: 34602 - protein, 9 aa, Artificial Sequence
  Description of Artificial Sequence: Synthetic peptide
TMRGSNHEP

SEQ ID NO: 34603 - protein, 9 aa, Artificial Sequence
  Description of Artificial Sequence: Synthetic peptide
TSMKTHFDR

SEQ ID NO: 34604 - protein, 9 aa, Artificial Sequence
  Description of Artificial Sequence: Synthetic peptide
TSNHENRAD

SEQ ID NO: 34605 - protein, 9 aa, Artificial Sequence
  Description of Artificial Sequence: Synthetic peptide
TWNEPHQNQ

SEQ ID NO: 34606 - protein, 9 aa, Artificial Sequence
  Description of Artificial Sequence: Synthetic peptide
VDDQHPTQK

SEQ ID NO: 34607 - protein, 9 aa, Artificial Sequence
  Description of Artificial Sequence: Synthetic peptide
VIFMPIVHC

SEQ ID NO: 34608 - protein, 9 aa, Artificial Sequence
  Description of Artificial Sequence: Synthetic peptide
VLVDHPVNE

SEQ ID NO: 34609 - protein, 9 aa, Artificial Sequence
  Description of Artificial Sequence: Synthetic peptide
WYQSYLNWS

SEQ ID NO: 34610 - protein, 9 aa, Artificial Sequence
  Description of Artificial Sequence: Synthetic peptide
YAQHEFRLD

SEQ ID NO: 34611 - protein, 9 aa, Artificial Sequence
  Description of Artificial Sequence: Synthetic peptide
YERQMATPG

SEQ ID NO: 34612 - protein, 9 aa, Artificial Sequence
  Description of Artificial Sequence: Synthetic peptide
YHPLQSDFG

SEQ ID NO: 34613 - protein, 9 aa, Artificial Sequence
  Description of Artificial Sequence: Synthetic peptide
YPHHEQHAT

SEQ ID NO: 34614 - protein, 9 aa, Artificial Sequence
  Description of Artificial Sequence: Synthetic peptide
ATQFYQACI

SEQ ID NO: 34615 - protein, 9 aa, Artificial Sequence
  Description of Artificial Sequence: Synthetic peptide
GFHDRSMMI

SEQ ID NO: 34616 - protein, 9 aa, Artificial Sequence
  Description of Artificial Sequence: Synthetic peptide
NCWVNEKCE

SEQ ID NO: 34617 - protein, 9 aa, Artificial Sequence
  Description of Artificial Sequence: Synthetic peptide
QGSKQMYQA

SEQ ID NO: 34618 - protein, 9 aa, Artificial Sequence
  Description of Artificial Sequence: Synthetic peptide
RTHGHAKAD

SEQ ID NO: 34619 - protein, 9 aa, Artificial Sequence
  Description of Artificial Sequence: Synthetic peptide
TSKSISHMD

SEQ ID NO: 34620 - protein, 9 aa, Artificial Sequence
  Description of Artificial Sequence: Synthetic peptide
YTQFCAAMW

SEQ ID NO: 34621 - protein, 9 aa, Artificial Sequence
  Description of Artificial Sequence: Synthetic peptide
AQDINRLQA

SEQ ID NO: 34622 - protein, 9 aa, Artificial Sequence
  Description of Artificial Sequence: Synthetic peptide
IAQSEADYW

SEQ ID NO: 34623 - protein, 9 aa, Artificial Sequence
  Description of Artificial Sequence: Synthetic peptide
DAVIHTGFA

SEQ ID NO: 34624 - protein, 9 aa, Artificial Sequence
  Description of Artificial Sequence: Synthetic peptide
DHLNEEQTK

SEQ ID NO: 34625 - protein, 9 aa, Artificial Sequence
  Description of Artificial Sequence: Synthetic peptide
LHQFEAYYK

SEQ ID NO: 34626 - protein, 9 aa, Artificial Sequence
  Description of Artificial Sequence: Synthetic peptide
KQQMMIVGN

SEQ ID NO: 34627 - protein, 9 aa, Artificial Sequence
  Description of Artificial Sequence: Synthetic peptide
YKTSWGQHV

SEQ ID NO: 34628 - protein, 9 aa, Artificial Sequence
  Description of Artificial Sequence: Synthetic peptide
VDNTDPWIM

SEQ ID NO: 34629 - protein, 9 aa, Artificial Sequence
  Description of Artificial Sequence: Synthetic peptide
ANIPIEMVC

SEQ ID NO: 34630 - protein, 9 aa, Artificial Sequence
  Description of Artificial Sequence: Synthetic peptide
TGNHEDPDN

SEQ ID NO: 34631 - protein, 9 aa, Artificial Sequence
  Description of Artificial Sequence: Synthetic peptide
MMAMKQGFY

SEQ ID NO: 34632 - protein, 9 aa, Artificial Sequence
  Description of Artificial Sequence: Synthetic peptide
ALTHDDGRT

SEQ ID NO: 34633 - protein, 9 aa, Artificial Sequence
  Description of Artificial Sequence: Synthetic peptide
AEHCYRHQH

SEQ ID NO: 34634 - protein, 9 aa, Artificial Sequence
  Description of Artificial Sequence: Synthetic peptide
IEFGVKISG

SEQ ID NO: 34635 - protein, 9 aa, Artificial Sequence
  Description of Artificial Sequence: Synthetic peptide
KELLCSHDA

SEQ ID NO: 34636 - protein, 9 aa, Artificial Sequence
  Description of Artificial Sequence: Synthetic peptide
LGDQKLVDE

SEQ ID NO: 34637 - protein, 9 aa, Artificial Sequence
  Description of Artificial Sequence: Synthetic peptide
HCTETHHTN

SEQ ID NO: 34638 - protein, 9 aa, Artificial Sequence
  Description of Artificial Sequence: Synthetic peptide
TVGFRFDRA

SEQ ID NO: 34639 - protein, 9 aa, Artificial Sequence
  Description of Artificial Sequence: Synthetic peptide
GGAEIVSAD

SEQ ID NO: 34640 - protein, 9 aa, Artificial Sequence
  Description of Artificial Sequence: Synthetic peptide
YIQFEAYAN

SEQ ID NO: 34641 - protein, 9 aa, Artificial Sequence
  Description of Artificial Sequence: Synthetic peptide
KVHFAKVRI

SEQ ID NO: 34642 - protein, 9 aa, Artificial Sequence
  Description of Artificial Sequence: Synthetic peptide
LIAYKSHAH

SEQ ID NO: 34643 - protein, 9 aa, Artificial Sequence
  Description of Artificial Sequence: Synthetic peptide
SPQQPSVFH

SEQ ID NO: 34644 - protein, 9 aa, Artificial Sequence
  Description of Artificial Sequence: Synthetic peptide
PAEAKQRFD

SEQ ID NO: 34645 - protein, 9 aa, Artificial Sequence
  Description of Artificial Sequence: Synthetic peptide
MKVSNWVFP

SEQ ID NO: 34646 - protein, 9 aa, Artificial Sequence
  Description of Artificial Sequence: Synthetic peptide
TIAFNGAVC

SEQ ID NO: 34647 - protein, 9 aa, Artificial Sequence
  Description of Artificial Sequence: Synthetic peptide
MNTNVMQKD

SEQ ID NO: 34648 - protein, 9 aa, Artificial Sequence
  Description of Artificial Sequence: Synthetic peptide
PANHARNPK

SEQ ID NO: 34649 - protein, 9 aa, Artificial Sequence
  Description of Artificial Sequence: Synthetic peptide
YYTKHEQDP

SEQ ID NO: 34650 - protein, 9 aa, Artificial Sequence
  Description of Artificial Sequence: Synthetic peptide
RQAWPKDGM

SEQ ID NO: 34651 - protein, 9 aa, Artificial Sequence
  Description of Artificial Sequence: Synthetic peptide
QTAEWYCGA

SEQ ID NO: 34652 - protein, 9 aa, Artificial Sequence
  Description of Artificial Sequence: Synthetic peptide
THVKRFDYE

SEQ ID NO: 34653 - protein, 9 aa, Artificial Sequence
  Description of Artificial Sequence: Synthetic peptide
EISICTAKF

SEQ ID NO: 34654 - protein, 9 aa, Artificial Sequence
  Description of Artificial Sequence: Synthetic peptide
CSECQAIHS

SEQ ID NO: 34655 - protein, 9 aa, Artificial Sequence
  Description of Artificial Sequence: Synthetic peptide
KERMQVSKA

SEQ ID NO: 34656 - protein, 9 aa, Artificial Sequence
  Description of Artificial Sequence: Synthetic peptide
FHNAPEHHF

SEQ ID NO: 34657 - protein, 9 aa, Artificial Sequence
  Description of Artificial Sequence: Synthetic peptide
EPRLYCAQE

SEQ ID NO: 34658 - protein, 9 aa, Artificial Sequence
  Description of Artificial Sequence: Synthetic peptide
DIEFLDCEN

SEQ ID NO: 34659 - protein, 9 aa, Artificial Sequence
  Description of Artificial Sequence: Synthetic peptide
DATKEMSWK

SEQ ID NO: 34660 - protein, 9 aa, Artificial Sequence
  Description of Artificial Sequence: Synthetic peptide
QQAMWLHSS

SEQ ID NO: 34661 - protein, 9 aa, Artificial Sequence
  Description of Artificial Sequence: Synthetic peptide
CADPQERCD

SEQ ID NO: 34662 - protein, 9 aa, Artificial Sequence
  Description of Artificial Sequence: Synthetic peptide
TTYPHNTHG

SEQ ID NO: 34663 - protein, 9 aa, Artificial Sequence
  Description of Artificial Sequence: Synthetic peptide
AVNQWMHSL

SEQ ID NO: 34664 - protein, 9 aa, Artificial Sequence
  Description of Artificial Sequence: Synthetic peptide
CTNYHVKAG

SEQ ID NO: 34665 - protein, 9 aa, Artificial Sequence
  Description of Artificial Sequence: Synthetic peptide
WPNIKHQPI

SEQ ID NO: 34666 - protein, 9 aa, Artificial Sequence
  Description of Artificial Sequence: Synthetic peptide
KNCIMLASN

SEQ ID NO: 34667 - protein, 9 aa, Artificial Sequence
  Description of Artificial Sequence: Synthetic peptide
PLTIEVNCT

SEQ ID NO: 34668 - protein, 9 aa, Artificial Sequence
  Description of Artificial Sequence: Synthetic peptide
ATGTYNLQE

SEQ ID NO: 34669 - protein, 9 aa, Artificial Sequence
  Description of Artificial Sequence: Synthetic peptide
WATWPEPLQ

SEQ ID NO: 34670 - protein, 9 aa, Artificial Sequence
  Description of Artificial Sequence: Synthetic peptide
YVDHWTLGD

SEQ ID NO: 34671 - protein, 9 aa, Artificial Sequence
  Description of Artificial Sequence: Synthetic peptide
GLFEGSPGA

SEQ ID NO: 34672 - protein, 9 aa, Artificial Sequence
  Description of Artificial Sequence: Synthetic peptide
SVLHVQALA

SEQ ID NO: 34673 - protein, 9 aa, Artificial Sequence
  Description of Artificial Sequence: Synthetic peptide
NGVGRSGDN

SEQ ID NO: 34674 - protein, 9 aa, Artificial Sequence
  Description of Artificial Sequence: Synthetic peptide
MNLQIGSKG

SEQ ID NO: 34675 - protein, 9 aa, Artificial Sequence
  Description of Artificial Sequence: Synthetic peptide
NWTGNMQWA

SEQ ID NO: 34676 - protein, 9 aa, Artificial Sequence
  Description of Artificial Sequence: Synthetic peptide
EVRIQCKID

SEQ ID NO: 34677 - protein, 9 aa, Artificial Sequence
  Description of Artificial Sequence: Synthetic peptide
SNVACIQAF

SEQ ID NO: 34678 - protein, 9 aa, Artificial Sequence
  Description of Artificial Sequence: Synthetic peptide
ATMNLSWGL

SEQ ID NO: 34679 - protein, 9 aa, Artificial Sequence
  Description of Artificial Sequence: Synthetic peptide
QSAHPEPMC

SEQ ID NO: 34680 - protein, 9 aa, Artificial Sequence
  Description of Artificial Sequence: Synthetic peptide
DHSQNPEPT

SEQ ID NO: 34681 - protein, 9 aa, Artificial Sequence
  Description of Artificial Sequence: Synthetic peptide
EECPNCEAP

SEQ ID NO: 34682 - protein, 9 aa, Artificial Sequence
  Description of Artificial Sequence: Synthetic peptide
GWNYMFGSA

SEQ ID NO: 34683 - protein, 9 aa, Artificial Sequence
  Description of Artificial Sequence: Synthetic peptide
HHTMPIDWN

SEQ ID NO: 34684 - protein, 9 aa, Artificial Sequence
  Description of Artificial Sequence: Synthetic peptide
GTMPMTGQC

SEQ ID NO: 34685 - protein, 9 aa, Artificial Sequence
  Description of Artificial Sequence: Synthetic peptide
AQAAAVICW

SEQ ID NO: 34686 - protein, 9 aa, Artificial Sequence
  Description of Artificial Sequence: Synthetic peptide
DQLAHNAQE

SEQ ID NO: 34687 - protein, 9 aa, Artificial Sequence
  Description of Artificial Sequence: Synthetic peptide
INMPCPNTK

SEQ ID NO: 34688 - protein, 9 aa, Artificial Sequence
  Description of Artificial Sequence: Synthetic peptide
RMWMEQYQA

SEQ ID NO: 34689 - protein, 9 aa, Artificial Sequence
  Description of Artificial Sequence: Synthetic peptide
IMQMHPASG

SEQ ID NO: 34690 - protein, 9 aa, Artificial Sequence
  Description of Artificial Sequence: Synthetic peptide
IPSHMDAHQ

SEQ ID NO: 34691 - protein, 9 aa, Artificial Sequence
  Description of Artificial Sequence: Synthetic peptide
HTDSDCRHS

SEQ ID NO: 34692 - protein, 9 aa, Artificial Sequence
  Description of Artificial Sequence: Synthetic peptide
SYLPRHHKG

SEQ ID NO: 34693 - protein, 9 aa, Artificial Sequence
  Description of Artificial Sequence: Synthetic peptide
ASDCDGKTW

SEQ ID NO: 34694 - protein, 9 aa, Artificial Sequence
  Description of Artificial Sequence: Synthetic peptide
QIIMLQHEN

SEQ ID NO: 34695 - protein, 9 aa, Artificial Sequence
  Description of Artificial Sequence: Synthetic peptide
EICHEDISV

SEQ ID NO: 34696 - protein, 9 aa, Artificial Sequence
  Description of Artificial Sequence: Synthetic peptide
KTTPAPDQG

SEQ ID NO: 34697 - protein, 9 aa, Artificial Sequence
  Description of Artificial Sequence: Synthetic peptide
SWYLYYNYH

SEQ ID NO: 34698 - protein, 9 aa, Artificial Sequence
  Description of Artificial Sequence: Synthetic peptide
LSIRNGMCD

SEQ ID NO: 34699 - protein, 9 aa, Artificial Sequence
  Description of Artificial Sequence: Synthetic peptide
QFMYCAKGN

SEQ ID NO: 34700 - protein, 9 aa, Artificial Sequence
  Description of Artificial Sequence: Synthetic peptide
HSSCKNCPW

SEQ ID NO: 34701 - protein, 9 aa, Artificial Sequence
  Description of Artificial Sequence: Synthetic peptide
DGDYACFKN

SEQ ID NO: 34702 - protein, 9 aa, Artificial Sequence
  Description of Artificial Sequence: Synthetic peptide
QFLGGPKIQ

SEQ ID NO: 34703 - protein, 9 aa, Artificial Sequence
  Description of Artificial Sequence: Synthetic peptide
RAVHARQYQ

SEQ ID NO: 34704 - protein, 9 aa, Artificial Sequence
  Description of Artificial Sequence: Synthetic peptide
EHTQRMDMA

SEQ ID NO: 34705 - protein, 9 aa, Artificial Sequence
  Description of Artificial Sequence: Synthetic peptide
IVTMQMDSW

SEQ ID NO: 34706 - protein, 9 aa, Artificial Sequence
  Description of Artificial Sequence: Synthetic peptide
QEINDLKMH

SEQ ID NO: 34707 - protein, 9 aa, Artificial Sequence
  Description of Artificial Sequence: Synthetic peptide
YTYLHQSSG

SEQ ID NO: 34708 - protein, 9 aa, Artificial Sequence
  Description of Artificial Sequence: Synthetic peptide
DDRRNTKWE

SEQ ID NO: 34709 - protein, 9 aa, Artificial Sequence
  Description of Artificial Sequence: Synthetic peptide
VCCSIGPEH

SEQ ID NO: 34710 - protein, 9 aa, Artificial Sequence
  Description of Artificial Sequence: Synthetic peptide
ALKSFNWCS

SEQ ID NO: 34711 - protein, 9 aa, Artificial Sequence
  Description of Artificial Sequence: Synthetic peptide
TNDWGEKNA

SEQ ID NO: 34712 - protein, 9 aa, Artificial Sequence
  Description of Artificial Sequence: Synthetic peptide
CWPEAMIDD

SEQ ID NO: 34713 - protein, 9 aa, Artificial Sequence
  Description of Artificial Sequence: Synthetic peptide
GAETEPKDS

SEQ ID NO: 34714 - protein, 9 aa, Artificial Sequence
  Description of Artificial Sequence: Synthetic peptide
CPTYKNKDQ

SEQ ID NO: 34715 - protein, 9 aa, Artificial Sequence
  Description of Artificial Sequence: Synthetic peptide
HVGAGGMPG

SEQ ID NO: 34716 - protein, 9 aa, Artificial Sequence
  Description of Artificial Sequence: Synthetic peptide
VTHMTCVEG

SEQ ID NO: 34717 - protein, 9 aa, Artificial Sequence
  Description of Artificial Sequence: Synthetic peptide
AYMWEGQAT

SEQ ID NO: 34718 - protein, 9 aa, Artificial Sequence
  Description of Artificial Sequence: Synthetic peptide
KCGNVLCEV

SEQ ID NO: 34719 - protein, 9 aa, Artificial Sequence
  Description of Artificial Sequence: Synthetic peptide
EHDWRMFHQ

SEQ ID NO: 34720 - protein, 9 aa, Artificial Sequence
  Description of Artificial Sequence: Synthetic peptide
GPKEHNLCD

SEQ ID NO: 34721 - protein, 9 aa, Artificial Sequence
  Description of Artificial Sequence: Synthetic peptide
ANSLEGGFE

SEQ ID NO: 34722 - protein, 9 aa, Artificial Sequence
  Description of Artificial Sequence: Synthetic peptide
YLHERTDKD

SEQ ID NO: 34723 - protein, 9 aa, Artificial Sequence
  Description of Artificial Sequence: Synthetic peptide
VAEAGYCYK

SEQ ID NO: 34724 - protein, 9 aa, Artificial Sequence
  Description of Artificial Sequence: Synthetic peptide
KECCFPPCE

SEQ ID NO: 34725 - protein, 9 aa, Artificial Sequence
  Description of Artificial Sequence: Synthetic peptide
IGEVFDAFS

SEQ ID NO: 34726 - protein, 9 aa, Artificial Sequence
  Description of Artificial Sequence: Synthetic peptide
AFDGEMSWE

SEQ ID NO: 34727 - protein, 9 aa, Artificial Sequence
  Description of Artificial Sequence: Synthetic peptide
IEMPTESKH

SEQ ID NO: 34728 - protein, 9 aa, Artificial Sequence
  Description of Artificial Sequence: Synthetic peptide
YRLHCCNRA

SEQ ID NO: 34729 - protein, 9 aa, Artificial Sequence
  Description of Artificial Sequence: Synthetic peptide
DAMAYGQFM

SEQ ID NO: 34730 - protein, 9 aa, Artificial Sequence
  Description of Artificial Sequence: Synthetic peptide
ITELMGCLH

SEQ ID NO: 34731 - protein, 9 aa, Artificial Sequence
  Description of Artificial Sequence: Synthetic peptide
RGMAHHHLC

SEQ ID NO: 34732 - protein, 9 aa, Artificial Sequence
  Description of Artificial Sequence: Synthetic peptide
TGGWQRGAF

SEQ ID NO: 34733 - protein, 9 aa, Artificial Sequence
  Description of Artificial Sequence: Synthetic peptide
FCWSMCEAC

SEQ ID NO: 34734 - protein, 9 aa, Artificial Sequence
  Description of Artificial Sequence: Synthetic peptide
FCIKDQHVR

SEQ ID NO: 34735 - protein, 9 aa, Artificial Sequence
  Description of Artificial Sequence: Synthetic peptide
PVTHPQTSK

SEQ ID NO: 34736 - protein, 9 aa, Artificial Sequence
  Description of Artificial Sequence: Synthetic peptide
RSGVQCCAE

SEQ ID NO: 34737 - protein, 9 aa, Artificial Sequence
  Description of Artificial Sequence: Synthetic peptide
IWQQCNQKN

SEQ ID NO: 34738 - protein, 9 aa, Artificial Sequence
  Description of Artificial Sequence: Synthetic peptide
KQSDKWGDD

SEQ ID NO: 34739 - protein, 9 aa, Artificial Sequence
  Description of Artificial Sequence: Synthetic peptide
MIVHQVSQI

SEQ ID NO: 34740 - protein, 9 aa, Artificial Sequence
  Description of Artificial Sequence: Synthetic peptide
TSNKKGEAA

SEQ ID NO: 34741 - protein, 9 aa, Artificial Sequence
  Description of Artificial Sequence: Synthetic peptide
TMFYCHGPN

SEQ ID NO: 34742 - protein, 9 aa, Artificial Sequence
  Description of Artificial Sequence: Synthetic peptide
LCMNDDRLN

SEQ ID NO: 34743 - protein, 9 aa, Artificial Sequence
  Description of Artificial Sequence: Synthetic peptide
DCLKKNHSL

SEQ ID NO: 34744 - protein, 9 aa, Artificial Sequence
  Description of Artificial Sequence: Synthetic peptide
RMDCKWEDL

SEQ ID NO: 34745 - protein, 9 aa, Artificial Sequence
  Description of Artificial Sequence: Synthetic peptide
TGWNFPVSC

SEQ ID NO: 34746 - protein, 9 aa, Artificial Sequence
  Description of Artificial Sequence: Synthetic peptide
GSQQMQASQ

SEQ ID NO: 34747 - protein, 9 aa, Artificial Sequence
  Description of Artificial Sequence: Synthetic peptide
NSKACRGCT

SEQ ID NO: 34748 - protein, 9 aa, Artificial Sequence
  Description of Artificial Sequence: Synthetic peptide
QCLWVDSNV

SEQ ID NO: 34749 - protein, 9 aa, Artificial Sequence
  Description of Artificial Sequence: Synthetic peptide
EFCHQHSAI

SEQ ID NO: 34750 - protein, 9 aa, Artificial Sequence
  Description of Artificial Sequence: Synthetic peptide
HQNLLICNE

SEQ ID NO: 34751 - protein, 9 aa, Artificial Sequence
  Description of Artificial Sequence: Synthetic peptide
FAGFTPVWM

SEQ ID NO: 34752 - protein, 9 aa, Artificial Sequence
  Description of Artificial Sequence: Synthetic peptide
NSPHSGVGD

SEQ ID NO: 34753 - protein, 9 aa, Artificial Sequence
  Description of Artificial Sequence: Synthetic peptide
DKTCYLTCP

SEQ ID NO: 34754 - protein, 9 aa, Artificial Sequence
  Description of Artificial Sequence: Synthetic peptide
CHGFSGCQT

SEQ ID NO: 34755 - protein, 9 aa, Artificial Sequence
  Description of Artificial Sequence: Synthetic peptide
NSRLLIKHL

SEQ ID NO: 34756 - protein, 9 aa, Artificial Sequence
  Description of Artificial Sequence: Synthetic peptide
NCKPDQIAM

SEQ ID NO: 34757 - protein, 9 aa, Artificial Sequence
  Description of Artificial Sequence: Synthetic peptide
TAMVSECKD

SEQ ID NO: 34758 - protein, 9 aa, Artificial Sequence
  Description of Artificial Sequence: Synthetic peptide
YDYYKMREG

SEQ ID NO: 34759 - protein, 9 aa, Artificial Sequence
  Description of Artificial Sequence: Synthetic peptide
SAPEFSVIC

SEQ ID NO: 34760 - protein, 9 aa, Artificial Sequence
  Description of Artificial Sequence: Synthetic peptide
REAWGIRDS

SEQ ID NO: 34761 - protein, 9 aa, Artificial Sequence
  Description of Artificial Sequence: Synthetic peptide
KIETRPTCT

SEQ ID NO: 34762 - protein, 9 aa, Artificial Sequence
  Description of Artificial Sequence: Synthetic peptide
HCTEGYRQT

SEQ ID NO: 34763 - protein, 9 aa, Artificial Sequence
  Description of Artificial Sequence: Synthetic peptide
MCLNMAKQG

SEQ ID NO: 34764 - protein, 9 aa, Artificial Sequence
  Description of Artificial Sequence: Synthetic peptide
QNPNCKVMW

SEQ ID NO: 34765 - protein, 9 aa, Artificial Sequence
  Description of Artificial Sequence: Synthetic peptide
YFHWHDCIG

SEQ ID NO: 34766 - protein, 9 aa, Artificial Sequence
  Description of Artificial Sequence: Synthetic peptide
KYINFDHHQ

SEQ ID NO: 34767 - protein, 9 aa, Artificial Sequence
  Description of Artificial Sequence: Synthetic peptide
SFFHQTINP

SEQ ID NO: 34768 - protein, 9 aa, Artificial Sequence
  Description of Artificial Sequence: Synthetic peptide
KAGYQEGSC

SEQ ID NO: 34769 - protein, 9 aa, Artificial Sequence
  Description of Artificial Sequence: Synthetic peptide
IACISMHNH

SEQ ID NO: 34770 - protein, 9 aa, Artificial Sequence
  Description of Artificial Sequence: Synthetic peptide
QPGVRTDDY

SEQ ID NO: 34771 - protein, 9 aa, Artificial Sequence
  Description of Artificial Sequence: Synthetic peptide
QCQNWRHLS

SEQ ID NO: 34772 - protein, 9 aa, Artificial Sequence
  Description of Artificial Sequence: Synthetic peptide
LIEMCCSSL

SEQ ID NO: 34773 - protein, 9 aa, Artificial Sequence
  Description of Artificial Sequence: Synthetic peptide
PTEFRVCPV

SEQ ID NO: 34774 - protein, 9 aa, Artificial Sequence
  Description of Artificial Sequence: Synthetic peptide
DVCNQSGMS

SEQ ID NO: 34775 - protein, 9 aa, Artificial Sequence
  Description of Artificial Sequence: Synthetic peptide
RYEISERRC

SEQ ID NO: 34776 - protein, 9 aa, Artificial Sequence
  Description of Artificial Sequence: Synthetic peptide
NCERWFQIE

SEQ ID NO: 34777 - protein, 9 aa, Artificial Sequence
  Description of Artificial Sequence: Synthetic peptide
DRREKQLMK

SEQ ID NO: 34778 - protein, 9 aa, Artificial Sequence
  Description of Artificial Sequence: Synthetic peptide
ENQARCIFE

SEQ ID NO: 34779 - protein, 9 aa, Artificial Sequence
  Description of Artificial Sequence: Synthetic peptide
ESTHMLYEM

SEQ ID NO: 34780 - protein, 9 aa, Artificial Sequence
  Description of Artificial Sequence: Synthetic peptide
TWHQGWAEY

SEQ ID NO: 34781 - protein, 9 aa, Artificial Sequence
  Description of Artificial Sequence: Synthetic peptide
EGGFRDFCE

SEQ ID NO: 34782 - protein, 9 aa, Artificial Sequence
  Description of Artificial Sequence: Synthetic peptide
AFARQEYAN

SEQ ID NO: 34783 - protein, 9 aa, Artificial Sequence
  Description of Artificial Sequence: Synthetic peptide
ASSFCKFAS

SEQ ID NO: 34784 - protein, 9 aa, Artificial Sequence
  Description of Artificial Sequence: Synthetic peptide
ASSRFGSYG

SEQ ID NO: 34785 - protein, 9 aa, Artificial Sequence
  Description of Artificial Sequence: Synthetic peptide
CHQPKNSDR

SEQ ID NO: 34786 - protein, 9 aa, Artificial Sequence
  Description of Artificial Sequence: Synthetic peptide
CIAKQIARC

SEQ ID NO: 34787 - protein, 9 aa, Artificial Sequence
  Description of Artificial Sequence: Synthetic peptide
CMYHEQPGR

SEQ ID NO: 34788 - protein, 9 aa, Artificial Sequence
  Description of Artificial Sequence: Synthetic peptide
CPQCDVMTS

SEQ ID NO: 34789 - protein, 9 aa, Artificial Sequence
  Description of Artificial Sequence: Synthetic peptide
CSHETGAMC

SEQ ID NO: 34790 - protein, 9 aa, Artificial Sequence
  Description of Artificial Sequence: Synthetic peptide
CSNCRQIMG

SEQ ID NO: 34791 - protein, 9 aa, Artificial Sequence
  Description of Artificial Sequence: Synthetic peptide
CSVCLKYEQ

SEQ ID NO: 34792 - protein, 9 aa, Artificial Sequence
  Description of Artificial Sequence: Synthetic peptide
CTLKTQAET

SEQ ID NO: 34793 - protein, 9 aa, Artificial Sequence
  Description of Artificial Sequence: Synthetic peptide
CVKFSHHHA

SEQ ID NO: 34794 - protein, 9 aa, Artificial Sequence
  Description of Artificial Sequence: Synthetic peptide
DANHCMWWQ

SEQ ID NO: 34795 - protein, 9 aa, Artificial Sequence
  Description of Artificial Sequence: Synthetic peptide
DCVKSSDGI

SEQ ID NO: 34796 - protein, 9 aa, Artificial Sequence
  Description of Artificial Sequence: Synthetic peptide
DGCPMTRDL

SEQ ID NO: 34797 - protein, 9 aa, Artificial Sequence
  Description of Artificial Sequence: Synthetic peptide
DGLFEGHIP

SEQ ID NO: 34798 - protein, 9 aa, Artificial Sequence
  Description of Artificial Sequence: Synthetic peptide
DIKWQHGAH

SEQ ID NO: 34799 - protein, 9 aa, Artificial Sequence
  Description of Artificial Sequence: Synthetic peptide
DMYDHEWLM

SEQ ID NO: 34800 - protein, 9 aa, Artificial Sequence
  Description of Artificial Sequence: Synthetic peptide
DPKCFVWSY

SEQ ID NO: 34801 - protein, 9 aa, Artificial Sequence
  Description of Artificial Sequence: Synthetic peptide
DWIVMSQKA

SEQ ID NO: 34802 - protein, 9 aa, Artificial Sequence
  Description of Artificial Sequence: Synthetic peptide
EFNWLLWSG

SEQ ID NO: 34803 - protein, 9 aa, Artificial Sequence
  Description of Artificial Sequence: Synthetic peptide
EIAHDTSMS

SEQ ID NO: 34804 - protein, 9 aa, Artificial Sequence
  Description of Artificial Sequence: Synthetic peptide
EIGHKQMAI

SEQ ID NO: 34805 - protein, 9 aa, Artificial Sequence
  Description of Artificial Sequence: Synthetic peptide
EIVQPQYYA

SEQ ID NO: 34806 - protein, 9 aa, Artificial Sequence
  Description of Artificial Sequence: Synthetic peptide
EMHKVPSGM

SEQ ID NO: 34807 - protein, 9 aa, Artificial Sequence
  Description of Artificial Sequence: Synthetic peptide
EVTAVEHIW

SEQ ID NO: 34808 - protein, 9 aa, Artificial Sequence
  Description of Artificial Sequence: Synthetic peptide
EWTKKTADH

SEQ ID NO: 34809 - protein, 9 aa, Artificial Sequence
  Description of Artificial Sequence: Synthetic peptide
FLHISSWYQ

SEQ ID NO: 34810 - protein, 9 aa, Artificial Sequence
  Description of Artificial Sequence: Synthetic peptide
FNMNTNDSG

SEQ ID NO: 34811 - protein, 9 aa, Artificial Sequence
  Description of Artificial Sequence: Synthetic peptide
GCKKSEWIT

SEQ ID NO: 34812 - protein, 9 aa, Artificial Sequence
  Description of Artificial Sequence: Synthetic peptide
GGSMLGNGY

SEQ ID NO: 34813 - protein, 9 aa, Artificial Sequence
  Description of Artificial Sequence: Synthetic peptide
GNKLKNDQM

SEQ ID NO: 34814 - protein, 9 aa, Artificial Sequence
  Description of Artificial Sequence: Synthetic peptide
HCLAGESYV

SEQ ID NO: 34815 - protein, 9 aa, Artificial Sequence
  Description of Artificial Sequence: Synthetic peptide
HFHEVAWGS

SEQ ID NO: 34816 - protein, 9 aa, Artificial Sequence
  Description of Artificial Sequence: Synthetic peptide
HPETMIYGW

SEQ ID NO: 34817 - protein, 9 aa, Artificial Sequence
  Description of Artificial Sequence: Synthetic peptide
ICNAMLGSE

SEQ ID NO: 34818 - protein, 9 aa, Artificial Sequence
  Description of Artificial Sequence: Synthetic peptide
IFNHLLPTE

SEQ ID NO: 34819 - protein, 9 aa, Artificial Sequence
  Description of Artificial Sequence: Synthetic peptide
IRVMFGKHN

SEQ ID NO: 34820 - protein, 9 aa, Artificial Sequence
  Description of Artificial Sequence: Synthetic peptide
KAIWQGTEN

SEQ ID NO: 34821 - protein, 9 aa, Artificial Sequence
  Description of Artificial Sequence: Synthetic peptide
KFICTTIAC

SEQ ID NO: 34822 - protein, 9 aa, Artificial Sequence
  Description of Artificial Sequence: Synthetic peptide
KICPTEYAS

SEQ ID NO: 34823 - protein, 9 aa, Artificial Sequence
  Description of Artificial Sequence: Synthetic peptide
KIVNQENMK

SEQ ID NO: 34824 - protein, 9 aa, Artificial Sequence
  Description of Artificial Sequence: Synthetic peptide
KNTMCDNDA

SEQ ID NO: 34825 - protein, 9 aa, Artificial Sequence
  Description of Artificial Sequence: Synthetic peptide
KSDKVWYVL

SEQ ID NO: 34826 - protein, 9 aa, Artificial Sequence
  Description of Artificial Sequence: Synthetic peptide
KTQTHTSEP

SEQ ID NO: 34827 - protein, 9 aa, Artificial Sequence
  Description of Artificial Sequence: Synthetic peptide
KWEQRSKMS

SEQ ID NO: 34828 - protein, 9 aa, Artificial Sequence
  Description of Artificial Sequence: Synthetic peptide
LMAQWEQTG

SEQ ID NO: 34829 - protein, 9 aa, Artificial Sequence
  Description of Artificial Sequence: Synthetic peptide
LMAYCYANN

SEQ ID NO: 34830 - protein, 9 aa, Artificial Sequence
  Description of Artificial Sequence: Synthetic peptide
LMHGVMDHV

SEQ ID NO: 34831 - protein, 9 aa, Artificial Sequence
  Description of Artificial Sequence: Synthetic peptide
LTQKNLSWQ

SEQ ID NO: 34832 - protein, 9 aa, Artificial Sequence
  Description of Artificial Sequence: Synthetic peptide
LWPQVMEQR

SEQ ID NO: 34833 - protein, 9 aa, Artificial Sequence
  Description of Artificial Sequence: Synthetic peptide
MAGHYFNSR

SEQ ID NO: 34834 - protein, 9 aa, Artificial Sequence
  Description of Artificial Sequence: Synthetic peptide
MAIDNLECK

SEQ ID NO: 34835 - protein, 9 aa, Artificial Sequence
  Description of Artificial Sequence: Synthetic peptide
MAIISQIEF

SEQ ID NO: 34836 - protein, 9 aa, Artificial Sequence
  Description of Artificial Sequence: Synthetic peptide
MATISQIEF

SEQ ID NO: 34837 - protein, 9 aa, Artificial Sequence
  Description of Artificial Sequence: Synthetic peptide
MIHTPDAGC

SEQ ID NO: 34838 - protein, 9 aa, Artificial Sequence
  Description of Artificial Sequence: Synthetic peptide
MIKFPAKQQ

SEQ ID NO: 34839 - protein, 9 aa, Artificial Sequence
  Description of Artificial Sequence: Synthetic peptide
MMGSNHCSS

SEQ ID NO: 34840 - protein, 9 aa, Artificial Sequence
  Description of Artificial Sequence: Synthetic peptide
MNSFYRAEL

SEQ ID NO: 34841 - protein, 9 aa, Artificial Sequence
  Description of Artificial Sequence: Synthetic peptide
MSPFFWEQG

SEQ ID NO: 34842 - protein, 9 aa, Artificial Sequence
  Description of Artificial Sequence: Synthetic peptide
MTSTQIRAG

SEQ ID NO: 34843 - protein, 9 aa, Artificial Sequence
  Description of Artificial Sequence: Synthetic peptide
MYMEQACYD

SEQ ID NO: 34844 - protein, 9 aa, Artificial Sequence
  Description of Artificial Sequence: Synthetic peptide
NADEKYNNT

SEQ ID NO: 34845 - protein, 9 aa, Artificial Sequence
  Description of Artificial Sequence: Synthetic peptide
NAPMMACQI

SEQ ID NO: 34846 - protein, 9 aa, Artificial Sequence
  Description of Artificial Sequence: Synthetic peptide
NGLFEGHIP

SEQ ID NO: 34847 - protein, 9 aa, Artificial Sequence
  Description of Artificial Sequence: Synthetic peptide
NWDRGDKCI

SEQ ID NO: 34848 - protein, 9 aa, Artificial Sequence
  Description of Artificial Sequence: Synthetic peptide
QCMVMTEAD

SEQ ID NO: 34849 - protein, 9 aa, Artificial Sequence
  Description of Artificial Sequence: Synthetic peptide
QDFRMNAGA

SEQ ID NO: 34850 - protein, 9 aa, Artificial Sequence
  Description of Artificial Sequence: Synthetic peptide
QDFWMNAGA

SEQ ID NO: 34851 - protein, 9 aa, Artificial Sequence
  Description of Artificial Sequence: Synthetic peptide
QILPHMYAY

SEQ ID NO: 34852 - protein, 9 aa, Artificial Sequence
  Description of Artificial Sequence: Synthetic peptide
QNNVITVDW

SEQ ID NO: 34853 - protein, 9 aa, Artificial Sequence
  Description of Artificial Sequence: Synthetic peptide
QPFLHRPCA

SEQ ID NO: 34854 - protein, 9 aa, Artificial Sequence
  Description of Artificial Sequence: Synthetic peptide
QPFLHRPCV

SEQ ID NO: 34855 - protein, 9 aa, Artificial Sequence
  Description of Artificial Sequence: Synthetic peptide
QQPRKINLC

SEQ ID NO: 34856 - protein, 9 aa, Artificial Sequence
  Description of Artificial Sequence: Synthetic peptide
QTMCITIHP

SEQ ID NO: 34857 - protein, 9 aa, Artificial Sequence
  Description of Artificial Sequence: Synthetic peptide
QWDEFKMRM

SEQ ID NO: 34858 - protein, 9 aa, Artificial Sequence
  Description of Artificial Sequence: Synthetic peptide
QYQTHPMMH

SEQ ID NO: 34859 - protein, 9 aa, Artificial Sequence
  Description of Artificial Sequence: Synthetic peptide
QYWWPATHD

SEQ ID NO: 34860 - protein, 9 aa, Artificial Sequence
  Description of Artificial Sequence: Synthetic peptide
RCEPFNWRE

SEQ ID NO: 34861 - protein, 9 aa, Artificial Sequence
  Description of Artificial Sequence: Synthetic peptide
REVHVNQNN

SEQ ID NO: 34862 - protein, 9 aa, Artificial Sequence
  Description of Artificial Sequence: Synthetic peptide
RGSQQMETH

SEQ ID NO: 34863 - protein, 9 aa, Artificial Sequence
  Description of Artificial Sequence: Synthetic peptide
RKKVEVVVE

SEQ ID NO: 34864 - protein, 9 aa, Artificial Sequence
  Description of Artificial Sequence: Synthetic peptide
RLKLSAVQR

SEQ ID NO: 34865 - protein, 9 aa, Artificial Sequence
  Description of Artificial Sequence: Synthetic peptide
RSTWGHIQR

SEQ ID NO: 34866 - protein, 9 aa, Artificial Sequence
  Description of Artificial Sequence: Synthetic peptide
RVNWEQRMN

SEQ ID NO: 34867 - protein, 9 aa, Artificial Sequence
  Description of Artificial Sequence: Synthetic peptide
RYQPFSRQW

SEQ ID NO: 34868 - protein, 9 aa, Artificial Sequence
  Description of Artificial Sequence: Synthetic peptide
SALAHHANF

SEQ ID NO: 34869 - protein, 9 aa, Artificial Sequence
  Description of Artificial Sequence: Synthetic peptide
SALAHRANF

SEQ ID NO: 34870 - protein, 9 aa, Artificial Sequence
  Description of Artificial Sequence: Synthetic peptide
SAMCSGSLL

SEQ ID NO: 34871 - protein, 9 aa, Artificial Sequence
  Description of Artificial Sequence: Synthetic peptide
SANQAHGEF

SEQ ID NO: 34872 - protein, 9 aa, Artificial Sequence
  Description of Artificial Sequence: Synthetic peptide
SANQRYHDW

SEQ ID NO: 34873 - protein, 9 aa, Artificial Sequence
  Description of Artificial Sequence: Synthetic peptide
SAVQEERYN

SEQ ID NO: 34874 - protein, 9 aa, Artificial Sequence
  Description of Artificial Sequence: Synthetic peptide
SAVQKERYN

SEQ ID NO: 34875 - protein, 9 aa, Artificial Sequence
  Description of Artificial Sequence: Synthetic peptide
SDHQYRGCL

SEQ ID NO: 34876 - protein, 9 aa, Artificial Sequence
  Description of Artificial Sequence: Synthetic peptide
SMTTWWMFP

SEQ ID NO: 34877 - protein, 9 aa, Artificial Sequence
  Description of Artificial Sequence: Synthetic peptide
SNSHPFQSH

SEQ ID NO: 34878 - protein, 9 aa, Artificial Sequence
  Description of Artificial Sequence: Synthetic peptide
SWRWHHWHW

SEQ ID NO: 34879 - protein, 9 aa, Artificial Sequence
  Description of Artificial Sequence: Synthetic peptide
SYVMNLLGQ

SEQ ID NO: 34880 - protein, 9 aa, Artificial Sequence
  Description of Artificial Sequence: Synthetic peptide
TAHIMTDVI

SEQ ID NO: 34881 - protein, 9 aa, Artificial Sequence
  Description of Artificial Sequence: Synthetic peptide
TIDGMMGDH

SEQ ID NO: 34882 - protein, 9 aa, Artificial Sequence
  Description of Artificial Sequence: Synthetic peptide
TLPKMHMWP

SEQ ID NO: 34883 - protein, 9 aa, Artificial Sequence
  Description of Artificial Sequence: Synthetic peptide
TQQYTWRDA

SEQ ID NO: 34884 - protein, 9 aa, Artificial Sequence
  Description of Artificial Sequence: Synthetic peptide
TSYLRKIHS

SEQ ID NO: 34885 - protein, 9 aa, Artificial Sequence
  Description of Artificial Sequence: Synthetic peptide
TTAGKFAAQ

SEQ ID NO: 34886 - protein, 9 aa, Artificial Sequence
  Description of Artificial Sequence: Synthetic peptide
TWARYKVGE

SEQ ID NO: 34887 - protein, 9 aa, Artificial Sequence
  Description of Artificial Sequence: Synthetic peptide
TYDTFGCME

SEQ ID NO: 34888 - protein, 9 aa, Artificial Sequence
  Description of Artificial Sequence: Synthetic peptide
TYRTRHTDC

SEQ ID NO: 34889 - protein, 9 aa, Artificial Sequence
  Description of Artificial Sequence: Synthetic peptide
VKHLFYWLP

SEQ ID NO: 34890 - protein, 9 aa, Artificial Sequence
  Description of Artificial Sequence: Synthetic peptide
VLKSCDRHG

SEQ ID NO: 34891 - protein, 9 aa, Artificial Sequence
  Description of Artificial Sequence: Synthetic peptide
VVKHGVTTN

SEQ ID NO: 34892 - protein, 9 aa, Artificial Sequence
  Description of Artificial Sequence: Synthetic peptide
WGATSEFMG

SEQ ID NO: 34893 - protein, 9 aa, Artificial Sequence
  Description of Artificial Sequence: Synthetic peptide
WHCVAPNSF

SEQ ID NO: 34894 - protein, 9 aa, Artificial Sequence
  Description of Artificial Sequence: Synthetic peptide
WNDLVRCEE

SEQ ID NO: 34895 - protein, 9 aa, Artificial Sequence
  Description of Artificial Sequence: Synthetic peptide
WWQPVEYAW

SEQ ID NO: 34896 - protein, 9 aa, Artificial Sequence
  Description of Artificial Sequence: Synthetic peptide
YHAPMLMCN

SEQ ID NO: 34897 - protein, 9 aa, Artificial Sequence
  Description of Artificial Sequence: Synthetic peptide
YLAMMMSGD

SEQ ID NO: 34898 - protein, 9 aa, Artificial Sequence
  Description of Artificial Sequence: Synthetic peptide
YLAMTMSGD

SEQ ID NO: 34899 - protein, 9 aa, Artificial Sequence
  Description of Artificial Sequence: Synthetic peptide
YQNHYQKKW

SEQ ID NO: 34900 - protein, 9 aa, Artificial Sequence
  Description of Artificial Sequence: Synthetic peptide
YSVVMRTSY

SEQ ID NO: 34901 - protein, 9 aa, Artificial Sequence
  Description of Artificial Sequence: Synthetic peptide
YWDACYDQK

SEQ ID NO: 34902 - protein, 9 aa, Artificial Sequence
  Description of Artificial Sequence: Synthetic peptide
DADCYVPAD

SEQ ID NO: 34903 - protein, 9 aa, Artificial Sequence
  Description of Artificial Sequence: Synthetic peptide
EGKVPGQFA

SEQ ID NO: 34904 - protein, 9 aa, Artificial Sequence
  Description of Artificial Sequence: Synthetic peptide
ACDLVKKDQ

SEQ ID NO: 34905 - protein, 9 aa, Artificial Sequence
  Description of Artificial Sequence: Synthetic peptide
ACEAYQDEK

SEQ ID NO: 34906 - protein, 9 aa, Artificial Sequence
  Description of Artificial Sequence: Synthetic peptide
AFSQQDYSF

SEQ ID NO: 34907 - protein, 9 aa, Artificial Sequence
  Description of Artificial Sequence: Synthetic peptide
AGQLNFCSI

SEQ ID NO: 34908 - protein, 9 aa, Artificial Sequence
  Description of Artificial Sequence: Synthetic peptide
AHNVRCATA

SEQ ID NO: 34909 - protein, 9 aa, Artificial Sequence
  Description of Artificial Sequence: Synthetic peptide
ALCWKQMDH

SEQ ID NO: 34910 - protein, 9 aa, Artificial Sequence
  Description of Artificial Sequence: Synthetic peptide
AMCWYYHMQ

SEQ ID NO: 34911 - protein, 9 aa, Artificial Sequence
  Description of Artificial Sequence: Synthetic peptide
ANVISPQSN

SEQ ID NO: 34912 - protein, 9 aa, Artificial Sequence
  Description of Artificial Sequence: Synthetic peptide
ASCNTHHEV

SEQ ID NO: 34913 - protein, 9 aa, Artificial Sequence
  Description of Artificial Sequence: Synthetic peptide
ASGTKYRCN

SEQ ID NO: 34914 - protein, 9 aa, Artificial Sequence
  Description of Artificial Sequence: Synthetic peptide
ASTMFIDVE

SEQ ID NO: 34915 - protein, 9 aa, Artificial Sequence
  Description of Artificial Sequence: Synthetic peptide
ATHNVHMFH

SEQ ID NO: 34916 - protein, 9 aa, Artificial Sequence
  Description of Artificial Sequence: Synthetic peptide
ATMAYRHVN

SEQ ID NO: 34917 - protein, 9 aa, Artificial Sequence
  Description of Artificial Sequence: Synthetic peptide
AVDCSDHSY

SEQ ID NO: 34918 - protein, 9 aa, Artificial Sequence
  Description of Artificial Sequence: Synthetic peptide
AVEQWVNHD

SEQ ID NO: 34919 - protein, 9 aa, Artificial Sequence
  Description of Artificial Sequence: Synthetic peptide
AVVIAQKVV

SEQ ID NO: 34920 - protein, 9 aa, Artificial Sequence
  Description of Artificial Sequence: Synthetic peptide
AWELVVHQA

SEQ ID NO: 34921 - protein, 9 aa, Artificial Sequence
  Description of Artificial Sequence: Synthetic peptide
AWNFIRVGN

SEQ ID NO: 34922 - protein, 9 aa, Artificial Sequence
  Description of Artificial Sequence: Synthetic peptide
CAANVTKMG

SEQ ID NO: 34923 - protein, 9 aa, Artificial Sequence
  Description of Artificial Sequence: Synthetic peptide
CAAPTFADK

SEQ ID NO: 34924 - protein, 9 aa, Artificial Sequence
  Description of Artificial Sequence: Synthetic peptide
CAEHLTPSE

SEQ ID NO: 34925 - protein, 9 aa, Artificial Sequence
  Description of Artificial Sequence: Synthetic peptide
CAGLLGFHW

SEQ ID NO: 34926 - protein, 9 aa, Artificial Sequence
  Description of Artificial Sequence: Synthetic peptide
CAGVQTTWW

SEQ ID NO: 34927 - protein, 9 aa, Artificial Sequence
  Description of Artificial Sequence: Synthetic peptide
CAHYFAHAG

SEQ ID NO: 34928 - protein, 9 aa, Artificial Sequence
  Description of Artificial Sequence: Synthetic peptide
CAKWFDVQI

SEQ ID NO: 34929 - protein, 9 aa, Artificial Sequence
  Description of Artificial Sequence: Synthetic peptide
CAQSWCSFE

SEQ ID NO: 34930 - protein, 9 aa, Artificial Sequence
  Description of Artificial Sequence: Synthetic peptide
CCFLINWDR

SEQ ID NO: 34931 - protein, 9 aa, Artificial Sequence
  Description of Artificial Sequence: Synthetic peptide
CCGWYHEFG

SEQ ID NO: 34932 - protein, 9 aa, Artificial Sequence
  Description of Artificial Sequence: Synthetic peptide
CCMEVFMYN

SEQ ID NO: 34933 - protein, 9 aa, Artificial Sequence
  Description of Artificial Sequence: Synthetic peptide
CFTMPVHWG

SEQ ID NO: 34934 - protein, 9 aa, Artificial Sequence
  Description of Artificial Sequence: Synthetic peptide
CHIQLHAGI

SEQ ID NO: 34935 - protein, 9 aa, Artificial Sequence
  Description of Artificial Sequence: Synthetic peptide
CIHYKEQYA

SEQ ID NO: 34936 - protein, 9 aa, Artificial Sequence
  Description of Artificial Sequence: Synthetic peptide
CIHYKEQYE

SEQ ID NO: 34937 - protein, 9 aa, Artificial Sequence
  Description of Artificial Sequence: Synthetic peptide
CIIHQSKYG

SEQ ID NO: 34938 - protein, 9 aa, Artificial Sequence
  Description of Artificial Sequence: Synthetic peptide
CIMSRQQDC

SEQ ID NO: 34939 - protein, 9 aa, Artificial Sequence
  Description of Artificial Sequence: Synthetic peptide
CIRRDDHHH

SEQ ID NO: 34940 - protein, 9 aa, Artificial Sequence
  Description of Artificial Sequence: Synthetic peptide
CIRWFDWLG

SEQ ID NO: 34941 - protein, 9 aa, Artificial Sequence
  Description of Artificial Sequence: Synthetic peptide
CIWYTQMGT

SEQ ID NO: 34942 - protein, 9 aa, Artificial Sequence
  Description of Artificial Sequence: Synthetic peptide
CKETVETVY

SEQ ID NO: 34943 - protein, 9 aa, Artificial Sequence
  Description of Artificial Sequence: Synthetic peptide
CKMQLFSHG

SEQ ID NO: 34944 - protein, 9 aa, Artificial Sequence
  Description of Artificial Sequence: Synthetic peptide
CLGWCTACP

SEQ ID NO: 34945 - protein, 9 aa, Artificial Sequence
  Description of Artificial Sequence: Synthetic peptide
CLTALMKLS

SEQ ID NO: 34946 - protein, 9 aa, Artificial Sequence
  Description of Artificial Sequence: Synthetic peptide
CLVRYFRDG

SEQ ID NO: 34947 - protein, 9 aa, Artificial Sequence
  Description of Artificial Sequence: Synthetic peptide
CMTKTSKMS

SEQ ID NO: 34948 - protein, 9 aa, Artificial Sequence
  Description of Artificial Sequence: Synthetic peptide
CQCSIMSIE

SEQ ID NO: 34949 - protein, 9 aa, Artificial Sequence
  Description of Artificial Sequence: Synthetic peptide
CRGHIWSMD

SEQ ID NO: 34950 - protein, 9 aa, Artificial Sequence
  Description of Artificial Sequence: Synthetic peptide
CSACIASAT

SEQ ID NO: 34951 - protein, 9 aa, Artificial Sequence
  Description of Artificial Sequence: Synthetic peptide
CSLKGPPTH

SEQ ID NO: 34952 - protein, 9 aa, Artificial Sequence
  Description of Artificial Sequence: Synthetic peptide
CSSSLFSAC

SEQ ID NO: 34953 - protein, 9 aa, Artificial Sequence
  Description of Artificial Sequence: Synthetic peptide
CSTPITAAV

SEQ ID NO: 34954 - protein, 9 aa, Artificial Sequence
  Description of Artificial Sequence: Synthetic peptide
CSTPITTAV

SEQ ID NO: 34955 - protein, 9 aa, Artificial Sequence
  Description of Artificial Sequence: Synthetic peptide
CTCAGVVTC

SEQ ID NO: 34956 - protein, 9 aa, Artificial Sequence
  Description of Artificial Sequence: Synthetic peptide
CTNLYAMAC

SEQ ID NO: 34957 - protein, 9 aa, Artificial Sequence
  Description of Artificial Sequence: Synthetic peptide
CTQHMYVKD

SEQ ID NO: 34958 - protein, 9 aa, Artificial Sequence
  Description of Artificial Sequence: Synthetic peptide
CTWKMMWGG

SEQ ID NO: 34959 - protein, 9 aa, Artificial Sequence
  Description of Artificial Sequence: Synthetic peptide
CTWTTGEAS

SEQ ID NO: 34960 - protein, 9 aa, Artificial Sequence
  Description of Artificial Sequence: Synthetic peptide
CVCLAEYVV

SEQ ID NO: 34961 - protein, 9 aa, Artificial Sequence
  Description of Artificial Sequence: Synthetic peptide
CVFYLPHSP

SEQ ID NO: 34962 - protein, 9 aa, Artificial Sequence
  Description of Artificial Sequence: Synthetic peptide
CVMSRWNYD

SEQ ID NO: 34963 - protein, 9 aa, Artificial Sequence
  Description of Artificial Sequence: Synthetic peptide
CVQHFHWDK

SEQ ID NO: 34964 - protein, 9 aa, Artificial Sequence
  Description of Artificial Sequence: Synthetic peptide
CVRFLNRVA

SEQ ID NO: 34965 - protein, 9 aa, Artificial Sequence
  Description of Artificial Sequence: Synthetic peptide
CVTRCMARD

SEQ ID NO: 34966 - protein, 9 aa, Artificial Sequence
  Description of Artificial Sequence: Synthetic peptide
CVVYHNHHT

SEQ ID NO: 34967 - protein, 9 aa, Artificial Sequence
  Description of Artificial Sequence: Synthetic peptide
CWAQMNHVF

SEQ ID NO: 34968 - protein, 9 aa, Artificial Sequence
  Description of Artificial Sequence: Synthetic peptide
CWMGIKRQD

SEQ ID NO: 34969 - protein, 9 aa, Artificial Sequence
  Description of Artificial Sequence: Synthetic peptide
CWMLQHKMM

SEQ ID NO: 34970 - protein, 9 aa, Artificial Sequence
  Description of Artificial Sequence: Synthetic peptide
CWSINYNYY

SEQ ID NO: 34971 - protein, 9 aa, Artificial Sequence
  Description of Artificial Sequence: Synthetic peptide
CWTIRHGGP

SEQ ID NO: 34972 - protein, 9 aa, Artificial Sequence
  Description of Artificial Sequence: Synthetic peptide
CWYLWYNMP

SEQ ID NO: 34973 - protein, 9 aa, Artificial Sequence
  Description of Artificial Sequence: Synthetic peptide
CYYMLQAAD

SEQ ID NO: 34974 - protein, 9 aa, Artificial Sequence
  Description of Artificial Sequence: Synthetic peptide
DDDTENDFM

SEQ ID NO: 34975 - protein, 9 aa, Artificial Sequence
  Description of Artificial Sequence: Synthetic peptide
DGGQTHVSY

SEQ ID NO: 34976 - protein, 9 aa, Artificial Sequence
  Description of Artificial Sequence: Synthetic peptide
DIHNYLMSE

SEQ ID NO: 34977 - protein, 9 aa, Artificial Sequence
  Description of Artificial Sequence: Synthetic peptide
DISMNQDVN

SEQ ID NO: 34978 - protein, 9 aa, Artificial Sequence
  Description of Artificial Sequence: Synthetic peptide
DKRCNKWDP

SEQ ID NO: 34979 - protein, 9 aa, Artificial Sequence
  Description of Artificial Sequence: Synthetic peptide
DMRLQDHVR

SEQ ID NO: 34980 - protein, 9 aa, Artificial Sequence
  Description of Artificial Sequence: Synthetic peptide
DNFFTQYLA

SEQ ID NO: 34981 - protein, 9 aa, Artificial Sequence
  Description of Artificial Sequence: Synthetic peptide
DQESLNAHY

SEQ ID NO: 34982 - protein, 9 aa, Artificial Sequence
  Description of Artificial Sequence: Synthetic peptide
DREQNEMLG

SEQ ID NO: 34983 - protein, 9 aa, Artificial Sequence
  Description of Artificial Sequence: Synthetic peptide
DSSSSIGHW

SEQ ID NO: 34984 - protein, 9 aa, Artificial Sequence
  Description of Artificial Sequence: Synthetic peptide
DTCRRLINE

SEQ ID NO: 34985 - protein, 9 aa, Artificial Sequence
  Description of Artificial Sequence: Synthetic peptide
DVDWANSLL

SEQ ID NO: 34986 - protein, 9 aa, Artificial Sequence
  Description of Artificial Sequence: Synthetic peptide
DVRLIGHEA

SEQ ID NO: 34987 - protein, 9 aa, Artificial Sequence
  Description of Artificial Sequence: Synthetic peptide
DYARCQSVW

SEQ ID NO: 34988 - protein, 9 aa, Artificial Sequence
  Description of Artificial Sequence: Synthetic peptide
EAEPNGFGL

SEQ ID NO: 34989 - protein, 9 aa, Artificial Sequence
  Description of Artificial Sequence: Synthetic peptide
EAGDVRRFG

SEQ ID NO: 34990 - protein, 9 aa, Artificial Sequence
  Description of Artificial Sequence: Synthetic peptide
EAGPHSDTW

SEQ ID NO: 34991 - protein, 9 aa, Artificial Sequence
  Description of Artificial Sequence: Synthetic peptide
KYNMLYHMD

SEQ ID NO: 34992 - protein, 9 aa, Artificial Sequence
  Description of Artificial Sequence: Synthetic peptide
KGESQCTSQ

SEQ ID NO: 34993 - protein, 9 aa, Artificial Sequence
  Description of Artificial Sequence: Synthetic peptide
KGQHKENRS

SEQ ID NO: 34994 - protein, 9 aa, Artificial Sequence
  Description of Artificial Sequence: Synthetic peptide
KWHGGPGVV

SEQ ID NO: 34995 - protein, 9 aa, Artificial Sequence
  Description of Artificial Sequence: Synthetic peptide
KRMLYPMCF

SEQ ID NO: 34996 - protein, 9 aa, Artificial Sequence
  Description of Artificial Sequence: Synthetic peptide
KATNADGET

SEQ ID NO: 34997 - protein, 9 aa, Artificial Sequence
  Description of Artificial Sequence: Synthetic peptide
KQSDKWGDD

SEQ ID NO: 34998 - protein, 9 aa, Artificial Sequence
  Description of Artificial Sequence: Synthetic peptide
KIMHSWYND

SEQ ID NO: 34999 - protein, 9 aa, Artificial Sequence
  Description of Artificial Sequence: Synthetic peptide
KKEQDHWDK

SEQ ID NO: 35000 - protein, 9 aa, Artificial Sequence
  Description of Artificial Sequence: Synthetic peptide
KASLGACVE

SEQ ID NO: 35001 - protein, 9 aa, Artificial Sequence
  Description of Artificial Sequence: Synthetic peptide
KGGFYGESA

SEQ ID NO: 35002 - protein, 9 aa, Artificial Sequence
  Description of Artificial Sequence: Synthetic peptide
KQNPSMRQD

SEQ ID NO: 35003 - protein, 9 aa, Artificial Sequence
  Description of Artificial Sequence: Synthetic peptide
KSFSWDSSA

SEQ ID NO: 35004 - protein, 9 aa, Artificial Sequence
  Description of Artificial Sequence: Synthetic peptide
KFLIAFEVT

SEQ ID NO: 35005 - protein, 9 aa, Artificial Sequence
  Description of Artificial Sequence: Synthetic peptide
KEFMPCCHR

SEQ ID NO: 35006 - protein, 9 aa, Artificial Sequence
  Description of Artificial Sequence: Synthetic peptide
KEGITGLEL

SEQ ID NO: 35007 - protein, 9 aa, Artificial Sequence
  Description of Artificial Sequence: Synthetic peptide
KTCTEWPGE

SEQ ID NO: 35008 - protein, 9 aa, Artificial Sequence
  Description of Artificial Sequence: Synthetic peptide
KVNRSNRIW

SEQ ID NO: 35009 - protein, 9 aa, Artificial Sequence
  Description of Artificial Sequence: Synthetic peptide
KVTNYYHSG

SEQ ID NO: 35010 - protein, 9 aa, Artificial Sequence
  Description of Artificial Sequence: Synthetic peptide
KYSPTPFMY

SEQ ID NO: 35011 - protein, 9 aa, Artificial Sequence
  Description of Artificial Sequence: Synthetic peptide
KCEGEEVGR

SEQ ID NO: 35012 - protein, 9 aa, Artificial Sequence
  Description of Artificial Sequence: Synthetic peptide
KQEYIMRQR

SEQ ID NO: 35013 - protein, 9 aa, Artificial Sequence
  Description of Artificial Sequence: Synthetic peptide
KWDDMHTQM

SEQ ID NO: 35014 - protein, 9 aa, Artificial Sequence
  Description of Artificial Sequence: Synthetic peptide
KNETFIAST

SEQ ID NO: 35015 - protein, 9 aa, Artificial Sequence
  Description of Artificial Sequence: Synthetic peptide
KAVTRADAS

SEQ ID NO: 35016 - protein, 9 aa, Artificial Sequence
  Description of Artificial Sequence: Synthetic peptide
KVAEGQNML

SEQ ID NO: 35017 - protein, 9 aa, Artificial Sequence
  Description of Artificial Sequence: Synthetic peptide
KHLDMTSCH

SEQ ID NO: 35018 - protein, 9 aa, Artificial Sequence
  Description of Artificial Sequence: Synthetic peptide
KATRDPKFP

SEQ ID NO: 35019 - protein, 9 aa, Artificial Sequence
  Description of Artificial Sequence: Synthetic peptide
KTLPCSNSE

SEQ ID NO: 35020 - protein, 9 aa, Artificial Sequence
  Description of Artificial Sequence: Synthetic peptide
KFNTKDQLM

SEQ ID NO: 35021 - protein, 9 aa, Artificial Sequence
  Description of Artificial Sequence: Synthetic peptide
KGGLSTTNA

SEQ ID NO: 35022 - protein, 9 aa, Artificial Sequence
  Description of Artificial Sequence: Synthetic peptide
KIQPTNHHE

SEQ ID NO: 35023 - protein, 9 aa, Artificial Sequence
  Description of Artificial Sequence: Synthetic peptide
KTGWDSHWS

SEQ ID NO: 35024 - protein, 9 aa, Artificial Sequence
  Description of Artificial Sequence: Synthetic peptide
KGCVPWSKI

SEQ ID NO: 35025 - protein, 9 aa, Artificial Sequence
  Description of Artificial Sequence: Synthetic peptide
KMEVNMSEL

SEQ ID NO: 35026 - protein, 9 aa, Artificial Sequence
  Description of Artificial Sequence: Synthetic peptide
KTLHMLESK

SEQ ID NO: 35027 - protein, 9 aa, Artificial Sequence
  Description of Artificial Sequence: Synthetic peptide
KTGATNLAW

SEQ ID NO: 35028 - protein, 9 aa, Artificial Sequence
  Description of Artificial Sequence: Synthetic peptide
KCRYKDCQC

SEQ ID NO: 35029 - protein, 9 aa, Artificial Sequence
  Description of Artificial Sequence: Synthetic peptide
KSIMMSQLD

SEQ ID NO: 35030 - protein, 9 aa, Artificial Sequence
  Description of Artificial Sequence: Synthetic peptide
KSGMIQEET

SEQ ID NO: 35031 - protein, 9 aa, Artificial Sequence
  Description of Artificial Sequence: Synthetic peptide
KAIPQGSSC

SEQ ID NO: 35032 - protein, 9 aa, Artificial Sequence
  Description of Artificial Sequence: Synthetic peptide
KGQRRDSVS

SEQ ID NO: 35033 - protein, 9 aa, Artificial Sequence
  Description of Artificial Sequence: Synthetic peptide
KIEYGHWIH

SEQ ID NO: 35034 - protein, 9 aa, Artificial Sequence
  Description of Artificial Sequence: Synthetic peptide
KAHDITWNL

SEQ ID NO: 35035 - protein, 9 aa, Artificial Sequence
  Description of Artificial Sequence: Synthetic peptide
KSAQVYWHP

SEQ ID NO: 35036 - protein, 9 aa, Artificial Sequence
  Description of Artificial Sequence: Synthetic peptide
KIQPMMVKA

SEQ ID NO: 35037 - protein, 9 aa, Artificial Sequence
  Description of Artificial Sequence: Synthetic peptide
KEFQLQMEP

SEQ ID NO: 35038 - protein, 9 aa, Artificial Sequence
  Description of Artificial Sequence: Synthetic peptide
KSTMLEHHD

SEQ ID NO: 35039 - protein, 9 aa, Artificial Sequence
  Description of Artificial Sequence: Synthetic peptide
KRFVDMPEM

SEQ ID NO: 35040 - protein, 9 aa, Artificial Sequence
  Description of Artificial Sequence: Synthetic peptide
KYSPFQEHN

SEQ ID NO: 35041 - protein, 9 aa, Artificial Sequence
  Description of Artificial Sequence: Synthetic peptide
KNCIMLASN

SEQ ID NO: 35042 - protein, 9 aa, Artificial Sequence
  Description of Artificial Sequence: Synthetic peptide
KSFQEQGGA

SEQ ID NO: 35043 - protein, 9 aa, Artificial Sequence
  Description of Artificial Sequence: Synthetic peptide
KTMGIGGGP

SEQ ID NO: 35044 - protein, 9 aa, Artificial Sequence
  Description of Artificial Sequence: Synthetic peptide
KVEGYGWTR

SEQ ID NO: 35045 - protein, 9 aa, Artificial Sequence
  Description of Artificial Sequence: Synthetic peptide
KPLTYTVGS

SEQ ID NO: 35046 - protein, 9 aa, Artificial Sequence
  Description of Artificial Sequence: Synthetic peptide
KQATNNNGW

SEQ ID NO: 35047 - protein, 9 aa, Artificial Sequence
  Description of Artificial Sequence: Synthetic peptide
KVEIINWHP

SEQ ID NO: 35048 - protein, 9 aa, Artificial Sequence
  Description of Artificial Sequence: Synthetic peptide
KSEHHWINA

SEQ ID NO: 35049 - protein, 9 aa, Artificial Sequence
  Description of Artificial Sequence: Synthetic peptide
KGNPLDGDT

SEQ ID NO: 35050 - protein, 9 aa, Artificial Sequence
  Description of Artificial Sequence: Synthetic peptide
KCDDRNTQH

SEQ ID NO: 35051 - protein, 9 aa, Artificial Sequence
  Description of Artificial Sequence: Synthetic peptide
KLMYKVMSC

SEQ ID NO: 35052 - protein, 9 aa, Artificial Sequence
  Description of Artificial Sequence: Synthetic peptide
KQKTQNRNA

SEQ ID NO: 35053 - protein, 9 aa, Artificial Sequence
  Description of Artificial Sequence: Synthetic peptide
KCADLIIRS

SEQ ID NO: 35054 - protein, 9 aa, Artificial Sequence
  Description of Artificial Sequence: Synthetic peptide
KHEPMCVQL

SEQ ID NO: 35055 - protein, 9 aa, Artificial Sequence
  Description of Artificial Sequence: Synthetic peptide
KIGCMYSSQ

SEQ ID NO: 35056 - protein, 9 aa, Artificial Sequence
  Description of Artificial Sequence: Synthetic peptide
LIAAQKNFK

SEQ ID NO: 35057 - protein, 9 aa, Artificial Sequence
  Description of Artificial Sequence: Synthetic peptide
QIMQKYQYS

SEQ ID NO: 35058 - protein, 9 aa, Artificial Sequence
  Description of Artificial Sequence: Synthetic peptide
WIPAMTYWC

SEQ ID NO: 35059 - protein, 9 aa, Artificial Sequence
  Description of Artificial Sequence: Synthetic peptide
WIPAMTYWY

SEQ ID NO: 35060 - protein, 9 aa, Artificial Sequence
  Description of Artificial Sequence: Synthetic peptide
WINMPHDRH

SEQ ID NO: 35061 - protein, 9 aa, Artificial Sequence
  Description of Artificial Sequence: Synthetic peptide
DIVCLMNST

SEQ ID NO: 35062 - protein, 9 aa, Artificial Sequence
  Description of Artificial Sequence: Synthetic peptide
MIRPLTHCK

SEQ ID NO: 35063 - protein, 9 aa, Artificial Sequence
  Description of Artificial Sequence: Synthetic peptide
FIIRCMLIW

SEQ ID NO: 35064 - protein, 9 aa, Artificial Sequence
  Description of Artificial Sequence: Synthetic peptide
TISSVFLLD

SEQ ID NO: 35065 - protein, 9 aa, Artificial Sequence
  Description of Artificial Sequence: Synthetic peptide
EICQHMGMA

SEQ ID NO: 35066 - protein, 9 aa, Artificial Sequence
  Description of Artificial Sequence: Synthetic peptide
SIVNHNEAR

SEQ ID NO: 35067 - protein, 9 aa, Artificial Sequence
  Description of Artificial Sequence: Synthetic peptide
GIELPVKHH

SEQ ID NO: 35068 - protein, 9 aa, Artificial Sequence
  Description of Artificial Sequence: Synthetic peptide
EICSRGRTI

SEQ ID NO: 35069 - protein, 9 aa, Artificial Sequence
  Description of Artificial Sequence: Synthetic peptide
GIKYKDVLS

SEQ ID NO: 35070 - protein, 9 aa, Artificial Sequence
  Description of Artificial Sequence: Synthetic peptide
GIKFFVDNC

SEQ ID NO: 35071 - protein, 9 aa, Artificial Sequence
  Description of Artificial Sequence: Synthetic peptide
GIIERYGDC

SEQ ID NO: 35072 - protein, 9 aa, Artificial Sequence
  Description of Artificial Sequence: Synthetic peptide
NICAKHRMS

SEQ ID NO: 35073 - protein, 9 aa, Artificial Sequence
  Description of Artificial Sequence: Synthetic peptide
RIQKLKWCQ

SEQ ID NO: 35074 - protein, 9 aa, Artificial Sequence
  Description of Artificial Sequence: Synthetic peptide
SIDVPPTAN

SEQ ID NO: 35075 - protein, 9 aa, Artificial Sequence
  Description of Artificial Sequence: Synthetic peptide
TIVWSECAW

SEQ ID NO: 35076 - protein, 9 aa, Artificial Sequence
  Description of Artificial Sequence: Synthetic peptide
NIDAVERIW

SEQ ID NO: 35077 - protein, 9 aa, Artificial Sequence
  Description of Artificial Sequence: Synthetic peptide
TIGWKELNE

SEQ ID NO: 35078 - protein, 9 aa, Artificial Sequence
  Description of Artificial Sequence: Synthetic peptide
TIMFGCLAE

SEQ ID NO: 35079 - protein, 9 aa, Artificial Sequence
  Description of Artificial Sequence: Synthetic peptide
GIFMEVAWC

SEQ ID NO: 35080 - protein, 9 aa, Artificial Sequence
  Description of Artificial Sequence: Synthetic peptide
RICPLFCIK

SEQ ID NO: 35081 - protein, 9 aa, Artificial Sequence
  Description of Artificial Sequence: Synthetic peptide
LIQSYPHQC

SEQ ID NO: 35082 - protein, 9 aa, Artificial Sequence
  Description of Artificial Sequence: Synthetic peptide
MISAPPDTC

SEQ ID NO: 35083 - protein, 9 aa, Artificial Sequence
  Description of Artificial Sequence: Synthetic peptide
QIGPKAFGW

SEQ ID NO: 35084 - protein, 9 aa, Artificial Sequence
  Description of Artificial Sequence: Synthetic peptide
DIACLDQWQ

SEQ ID NO: 35085 - protein, 9 aa, Artificial Sequence
  Description of Artificial Sequence: Synthetic peptide
GILVQGGSM

SEQ ID NO: 35086 - protein, 9 aa, Artificial Sequence
  Description of Artificial Sequence: Synthetic peptide
TIRPHHAKS

SEQ ID NO: 35087 - protein, 9 aa, Artificial Sequence
  Description of Artificial Sequence: Synthetic peptide
AIFHACNSG

SEQ ID NO: 35088 - protein, 9 aa, Artificial Sequence
  Description of Artificial Sequence: Synthetic peptide
RIVDGNACG

SEQ ID NO: 35089 - protein, 9 aa, Artificial Sequence
  Description of Artificial Sequence: Synthetic peptide
CIHSQGMVC

SEQ ID NO: 35090 - protein, 9 aa, Artificial Sequence
  Description of Artificial Sequence: Synthetic peptide
QILQWDCPS

SEQ ID NO: 35091 - protein, 9 aa, Artificial Sequence
  Description of Artificial Sequence: Synthetic peptide
QIYSLASTW

SEQ ID NO: 35092 - protein, 9 aa, Artificial Sequence
  Description of Artificial Sequence: Synthetic peptide
SIKFHERQH

SEQ ID NO: 35093 - protein, 9 aa, Artificial Sequence
  Description of Artificial Sequence: Synthetic peptide
TILQQMEEI

SEQ ID NO: 35094 - protein, 9 aa, Artificial Sequence
  Description of Artificial Sequence: Synthetic peptide
AIGPDRSNN

SEQ ID NO: 35095 - protein, 9 aa, Artificial Sequence
  Description of Artificial Sequence: Synthetic peptide
TIHPAWVTL

SEQ ID NO: 35096 - protein, 9 aa, Artificial Sequence
  Description of Artificial Sequence: Synthetic peptide
QISMKGEHG

SEQ ID NO: 35097 - protein, 9 aa, Artificial Sequence
  Description of Artificial Sequence: Synthetic peptide
EIIQAHLIN

SEQ ID NO: 35098 - protein, 9 aa, Artificial Sequence
  Description of Artificial Sequence: Synthetic peptide
CIIGRQEWL

SEQ ID NO: 35099 - protein, 9 aa, Artificial Sequence
  Description of Artificial Sequence: Synthetic peptide
TIWVHEYGM

SEQ ID NO: 35100 - protein, 9 aa, Artificial Sequence
  Description of Artificial Sequence: Synthetic peptide
SIAQDQVWS

SEQ ID NO: 35101 - protein, 9 aa, Artificial Sequence
  Description of Artificial Sequence: Synthetic peptide
PIWQGYWPW

SEQ ID NO: 35102 - protein, 9 aa, Artificial Sequence
  Description of Artificial Sequence: Synthetic peptide
IIKFLWRPT

SEQ ID NO: 35103 - protein, 9 aa, Artificial Sequence
  Description of Artificial Sequence: Synthetic peptide
DITSLGCIM

SEQ ID NO: 35104 - protein, 9 aa, Artificial Sequence
  Description of Artificial Sequence: Synthetic peptide
WINEANCLM

SEQ ID NO: 35105 - protein, 9 aa, Artificial Sequence
  Description of Artificial Sequence: Synthetic peptide
GIKKPNEDN

SEQ ID NO: 35106 - protein, 9 aa, Artificial Sequence
  Description of Artificial Sequence: Synthetic peptide
EIRQFVKGA

SEQ ID NO: 35107 - protein, 9 aa, Artificial Sequence
  Description of Artificial Sequence: Synthetic peptide
TILPKKTLC

SEQ ID NO: 35108 - protein, 9 aa, Artificial Sequence
  Description of Artificial Sequence: Synthetic peptide
DIGRFTAYY

SEQ ID NO: 35109 - protein, 9 aa, Artificial Sequence
  Description of Artificial Sequence: Synthetic peptide
TISQIPWVR

SEQ ID NO: 35110 - protein, 9 aa, Artificial Sequence
  Description of Artificial Sequence: Synthetic peptide
TIVVIPIKS

SEQ ID NO: 35111 - protein, 9 aa, Artificial Sequence
  Description of Artificial Sequence: Synthetic peptide
LINSIVCGD

SEQ ID NO: 35112 - protein, 9 aa, Artificial Sequence
  Description of Artificial Sequence: Synthetic peptide
GIPLWVFID

SEQ ID NO: 35113 - protein, 9 aa, Artificial Sequence
  Description of Artificial Sequence: Synthetic peptide
FIDEKQCHE

SEQ ID NO: 35114 - protein, 9 aa, Artificial Sequence
  Description of Artificial Sequence: Synthetic peptide
DICQKQSPN

SEQ ID NO: 35115 - protein, 9 aa, Artificial Sequence
  Description of Artificial Sequence: Synthetic peptide
NIGVIPHIQ

SEQ ID NO: 35116 - protein, 9 aa, Artificial Sequence
  Description of Artificial Sequence: Synthetic peptide
CIDVLFKHL

SEQ ID NO: 35117 - protein, 9 aa, Artificial Sequence
  Description of Artificial Sequence: Synthetic peptide
QIIYRCRST

SEQ ID NO: 35118 - protein, 9 aa, Artificial Sequence
  Description of Artificial Sequence: Synthetic peptide
EIHMFGQSE

SEQ ID NO: 35119 - protein, 9 aa, Artificial Sequence
  Description of Artificial Sequence: Synthetic peptide
QIHSEHCAT

SEQ ID NO: 35120 - protein, 9 aa, Artificial Sequence
  Description of Artificial Sequence: Synthetic peptide
HIHMSDRGA

SEQ ID NO: 35121 - protein, 9 aa, Artificial Sequence
  Description of Artificial Sequence: Synthetic peptide
AIGCFQNGG

SEQ ID NO: 35122 - protein, 9 aa, Artificial Sequence
  Description of Artificial Sequence: Synthetic peptide
HIKVEHEEV

SEQ ID NO: 35123 - protein, 9 aa, Artificial Sequence
  Description of Artificial Sequence: Synthetic peptide
LIEKQRWML

SEQ ID NO: 35124 - protein, 9 aa, Artificial Sequence
  Description of Artificial Sequence: Synthetic peptide
GIWVRDTYN

SEQ ID NO: 35125 - protein, 9 aa, Artificial Sequence
  Description of Artificial Sequence: Synthetic peptide
EICMRSGFI

SEQ ID NO: 35126 - protein, 9 aa, Artificial Sequence
  Description of Artificial Sequence: Synthetic peptide
CIQPTWDSY

SEQ ID NO: 35127 - protein, 9 aa, Artificial Sequence
  Description of Artificial Sequence: Synthetic peptide
QISKPSVQC

SEQ ID NO: 35128 - protein, 9 aa, Artificial Sequence
  Description of Artificial Sequence: Synthetic peptide
SGITFPGSN

SEQ ID NO: 35129 - protein, 9 aa, Artificial Sequence
  Description of Artificial Sequence: Synthetic peptide
DFIPDWSST

SEQ ID NO: 35130 - protein, 9 aa, Artificial Sequence
  Description of Artificial Sequence: Synthetic peptide
EMISNNCHR

SEQ ID NO: 35131 - protein, 9 aa, Artificial Sequence
  Description of Artificial Sequence: Synthetic peptide
EMINACFQA

SEQ ID NO: 35132 - protein, 9 aa, Artificial Sequence
  Description of Artificial Sequence: Synthetic peptide
APIFVCDCC

SEQ ID NO: 35133 - protein, 9 aa, Artificial Sequence
  Description of Artificial Sequence: Synthetic peptide
YSIIWRVYR

SEQ ID NO: 35134 - protein, 9 aa, Artificial Sequence
  Description of Artificial Sequence: Synthetic peptide
RKIESYCIT

SEQ ID NO: 35135 - protein, 9 aa, Artificial Sequence
  Description of Artificial Sequence: Synthetic peptide
EKIMVKRAF

SEQ ID NO: 35136 - protein, 9 aa, Artificial Sequence
  Description of Artificial Sequence: Synthetic peptide
ATISKLECQ

SEQ ID NO: 35137 - protein, 9 aa, Artificial Sequence
  Description of Artificial Sequence: Synthetic peptide
LKICFSPTV

SEQ ID NO: 35138 - protein, 9 aa, Artificial Sequence
  Description of Artificial Sequence: Synthetic peptide
ELIYKIKTD

SEQ ID NO: 35139 - protein, 9 aa, Artificial Sequence
  Description of Artificial Sequence: Synthetic peptide
ARIWNDSMA

SEQ ID NO: 35140 - protein, 9 aa, Artificial Sequence
  Description of Artificial Sequence: Synthetic peptide
DQILPMNGV

SEQ ID NO: 35141 - protein, 9 aa, Artificial Sequence
  Description of Artificial Sequence: Synthetic peptide
IHIHFNWFY

SEQ ID NO: 35142 - protein, 9 aa, Artificial Sequence
  Description of Artificial Sequence: Synthetic peptide
RGIYCYYVC

SEQ ID NO: 35143 - protein, 9 aa, Artificial Sequence
  Description of Artificial Sequence: Synthetic peptide
WRIYEEDPT

SEQ ID NO: 35144 - protein, 9 aa, Artificial Sequence
  Description of Artificial Sequence: Synthetic peptide
YKIGAAECD

SEQ ID NO: 35145 - protein, 9 aa, Artificial Sequence
  Description of Artificial Sequence: Synthetic peptide
DPILQTYLS

SEQ ID NO: 35146 - protein, 9 aa, Artificial Sequence
  Description of Artificial Sequence: Synthetic peptide
DQILSMNGV

SEQ ID NO: 35147 - protein, 9 aa, Artificial Sequence
  Description of Artificial Sequence: Synthetic peptide
GFIERYGDC

SEQ ID NO: 35148 - protein, 9 aa, Artificial Sequence
  Description of Artificial Sequence: Synthetic peptide
DSIIKDQSD

SEQ ID NO: 35149 - protein, 9 aa, Artificial Sequence
  Description of Artificial Sequence: Synthetic peptide
LFIKVKDTS

SEQ ID NO: 35150 - protein, 9 aa, Artificial Sequence
  Description of Artificial Sequence: Synthetic peptide
MAIQVFMSD

SEQ ID NO: 35151 - protein, 9 aa, Artificial Sequence
  Description of Artificial Sequence: Synthetic peptide
ISIENEIMG

SEQ ID NO: 35152 - protein, 9 aa, Artificial Sequence
  Description of Artificial Sequence: Synthetic peptide
APIQITKAY

SEQ ID NO: 35153 - protein, 9 aa, Artificial Sequence
  Description of Artificial Sequence: Synthetic peptide
EKIRQNAAP

SEQ ID NO: 35154 - protein, 9 aa, Artificial Sequence
  Description of Artificial Sequence: Synthetic peptide
ISICAQDID

SEQ ID NO: 35155 - protein, 9 aa, Artificial Sequence
  Description of Artificial Sequence: Synthetic peptide
VGIMRNDTG

SEQ ID NO: 35156 - protein, 9 aa, Artificial Sequence
  Description of Artificial Sequence: Synthetic peptide
GTIHMYCGW

SEQ ID NO: 35157 - protein, 9 aa, Artificial Sequence
  Description of Artificial Sequence: Synthetic peptide
TRILNEFFC

SEQ ID NO: 35158 - protein, 9 aa, Artificial Sequence
  Description of Artificial Sequence: Synthetic peptide
QNIRLGVPT

SEQ ID NO: 35159 - protein, 9 aa, Artificial Sequence
  Description of Artificial Sequence: Synthetic peptide
DVIHTTHSG

SEQ ID NO: 35160 - protein, 9 aa, Artificial Sequence
  Description of Artificial Sequence: Synthetic peptide
SHIQLNAWR

SEQ ID NO: 35161 - protein, 9 aa, Artificial Sequence
  Description of Artificial Sequence: Synthetic peptide
ILIFIQNCP

SEQ ID NO: 35162 - protein, 9 aa, Artificial Sequence
  Description of Artificial Sequence: Synthetic peptide
TRIVEPDAN

SEQ ID NO: 35163 - protein, 9 aa, Artificial Sequence
  Description of Artificial Sequence: Synthetic peptide
ATIAQWCVH

SEQ ID NO: 35164 - protein, 9 aa, Artificial Sequence
  Description of Artificial Sequence: Synthetic peptide
HVIGMGAGE

SEQ ID NO: 35165 - protein, 9 aa, Artificial Sequence
  Description of Artificial Sequence: Synthetic peptide
RAIYNDMTE

SEQ ID NO: 35166 - protein, 9 aa, Artificial Sequence
  Description of Artificial Sequence: Synthetic peptide
SAICQNYDA

SEQ ID NO: 35167 - protein, 9 aa, Artificial Sequence
  Description of Artificial Sequence: Synthetic peptide
SQIQIRQAD

SEQ ID NO: 35168 - protein, 9 aa, Artificial Sequence
  Description of Artificial Sequence: Synthetic peptide
NRIQMTDFQ

SEQ ID NO: 35169 - protein, 9 aa, Artificial Sequence
  Description of Artificial Sequence: Synthetic peptide
FTIFPGNAG

SEQ ID NO: 35170 - protein, 9 aa, Artificial Sequence
  Description of Artificial Sequence: Synthetic peptide
YVIGQKDEM

SEQ ID NO: 35171 - protein, 9 aa, Artificial Sequence
  Description of Artificial Sequence: Synthetic peptide
IWITCPYAA

SEQ ID NO: 35172 - protein, 9 aa, Artificial Sequence
  Description of Artificial Sequence: Synthetic peptide
NAIPYFVQA

SEQ ID NO: 35173 - protein, 9 aa, Artificial Sequence
  Description of Artificial Sequence: Synthetic peptide
AVIHEKPHG

SEQ ID NO: 35174 - protein, 9 aa, Artificial Sequence
  Description of Artificial Sequence: Synthetic peptide
ACIPQMHSA

SEQ ID NO: 35175 - protein, 9 aa, Artificial Sequence
  Description of Artificial Sequence: Synthetic peptide
TSIEGLKTM

SEQ ID NO: 35176 - protein, 9 aa, Artificial Sequence
  Description of Artificial Sequence: Synthetic peptide
ASIATMDRI

SEQ ID NO: 35177 - protein, 9 aa, Artificial Sequence
  Description of Artificial Sequence: Synthetic peptide
PVICVWHDN

SEQ ID NO: 35178 - protein, 9 aa, Artificial Sequence
  Description of Artificial Sequence: Synthetic peptide
CWILHHRCS

SEQ ID NO: 35179 - protein, 9 aa, Artificial Sequence
  Description of Artificial Sequence: Synthetic peptide
VTWVHYDMY

SEQ ID NO: 35180 - protein, 9 aa, Artificial Sequence
  Description of Artificial Sequence: Synthetic peptide
YTMVAPDYE

SEQ ID NO: 35181 - protein, 9 aa, Artificial Sequence
  Description of Artificial Sequence: Synthetic peptide
SMPVGTKID

SEQ ID NO: 35182 - protein, 9 aa, Artificial Sequence
  Description of Artificial Sequence: Synthetic peptide
MPKVHCASC

SEQ ID NO: 35183 - protein, 9 aa, Artificial Sequence
  Description of Artificial Sequence: Synthetic peptide
WCLVNELPT

SEQ ID NO: 35184 - protein, 9 aa, Artificial Sequence
  Description of Artificial Sequence: Synthetic peptide
VTSVAGGGE

SEQ ID NO: 35185 - protein, 9 aa, Artificial Sequence
  Description of Artificial Sequence: Synthetic peptide
QQTVVQFCL

SEQ ID NO: 35186 - protein, 9 aa, Artificial Sequence
  Description of Artificial Sequence: Synthetic peptide
ADVVMQTCC

SEQ ID NO: 35187 - protein, 9 aa, Artificial Sequence
  Description of Artificial Sequence: Synthetic peptide
GVHVTESGA

SEQ ID NO: 35188 - protein, 9 aa, Artificial Sequence
  Description of Artificial Sequence: Synthetic peptide
NYCVNKRAV

SEQ ID NO: 35189 - protein, 9 aa, Artificial Sequence
  Description of Artificial Sequence: Synthetic peptide
MTSVCNWDS

SEQ ID NO: 35190 - protein, 9 aa, Artificial Sequence
  Description of Artificial Sequence: Synthetic peptide
REKVWSDLK

SEQ ID NO: 35191 - protein, 9 aa, Artificial Sequence
  Description of Artificial Sequence: Synthetic peptide
ICFVNLDHV

SEQ ID NO: 35192 - protein, 9 aa, Artificial Sequence
  Description of Artificial Sequence: Synthetic peptide
MKHVSTMTK

SEQ ID NO: 35193 - protein, 9 aa, Artificial Sequence
  Description of Artificial Sequence: Synthetic peptide
SGFVILEGI

SEQ ID NO: 35194 - protein, 9 aa, Artificial Sequence
  Description of Artificial Sequence: Synthetic peptide
VFTVAHCVH

SEQ ID NO: 35195 - protein, 9 aa, Artificial Sequence
  Description of Artificial Sequence: Synthetic peptide
WFNVRQNGQ

SEQ ID NO: 35196 - protein, 9 aa, Artificial Sequence
  Description of Artificial Sequence: Synthetic peptide
QAPVIPIMA

SEQ ID NO: 35197 - protein, 9 aa, Artificial Sequence
  Description of Artificial Sequence: Synthetic peptide
TNGVQIMHV

SEQ ID NO: 35198 - protein, 9 aa, Artificial Sequence
  Description of Artificial Sequence: Synthetic peptide
INMVSMYAY

SEQ ID NO: 35199 - protein, 9 aa, Artificial Sequence
  Description of Artificial Sequence: Synthetic peptide
QGFVVHSPS

SEQ ID NO: 35200 - protein, 9 aa, Artificial Sequence
  Description of Artificial Sequence: Synthetic peptide
QFYVAEHLE

SEQ ID NO: 35201 - protein, 9 aa, Artificial Sequence
  Description of Artificial Sequence: Synthetic peptide
RQCVIGDYD

SEQ ID NO: 35202 - protein, 9 aa, Artificial Sequence
  Description of Artificial Sequence: Synthetic peptide
HTRVVKSTG

SEQ ID NO: 35203 - protein, 9 aa, Artificial Sequence
  Description of Artificial Sequence: Synthetic peptide
GTAVSRQSK

SEQ ID NO: 35204 - protein, 9 aa, Artificial Sequence
  Description of Artificial Sequence: Synthetic peptide
QTDVKVNFD

SEQ ID NO: 35205 - protein, 9 aa, Artificial Sequence
  Description of Artificial Sequence: Synthetic peptide
NWTVHLIYG

SEQ ID NO: 35206 - protein, 9 aa, Artificial Sequence
  Description of Artificial Sequence: Synthetic peptide
TAMVSECKD

SEQ ID NO: 35207 - protein, 9 aa, Artificial Sequence
  Description of Artificial Sequence: Synthetic peptide
GHLVPFDCG

SEQ ID NO: 35208 - protein, 9 aa, Artificial Sequence
  Description of Artificial Sequence: Synthetic peptide
HYVVRHEDP

SEQ ID NO: 35209 - protein, 9 aa, Artificial Sequence
  Description of Artificial Sequence: Synthetic peptide
PTDVITTDQ

SEQ ID NO: 35210 - protein, 9 aa, Artificial Sequence
  Description of Artificial Sequence: Synthetic peptide
CMEVTCFVV

SEQ ID NO: 35211 - protein, 9 aa, Artificial Sequence
  Description of Artificial Sequence: Synthetic peptide
IQAVMASGW

SEQ ID NO: 35212 - protein, 9 aa, Artificial Sequence
  Description of Artificial Sequence: Synthetic peptide
LESVKMDCN

SEQ ID NO: 35213 - protein, 9 aa, Artificial Sequence
  Description of Artificial Sequence: Synthetic peptide
EMYVQRHSL

SEQ ID NO: 35214 - protein, 9 aa, Artificial Sequence
  Description of Artificial Sequence: Synthetic peptide
AAFVMNGDG

SEQ ID NO: 35215 - protein, 9 aa, Artificial Sequence
  Description of Artificial Sequence: Synthetic peptide
HCWVNEKCE

SEQ ID NO: 35216 - protein, 9 aa, Artificial Sequence
  Description of Artificial Sequence: Synthetic peptide
SKDVYGMYC

SEQ ID NO: 35217 - protein, 9 aa, Artificial Sequence
  Description of Artificial Sequence: Synthetic peptide
EDLVVYMGS

SEQ ID NO: 35218 - protein, 9 aa, Artificial Sequence
  Description of Artificial Sequence: Synthetic peptide
VGNVMIKMC

SEQ ID NO: 35219 - protein, 9 aa, Artificial Sequence
  Description of Artificial Sequence: Synthetic peptide
IHRVVCRDH

SEQ ID NO: 35220 - protein, 9 aa, Artificial Sequence
  Description of Artificial Sequence: Synthetic peptide
MFVVNQNWA

SEQ ID NO: 35221 - protein, 9 aa, Artificial Sequence
  Description of Artificial Sequence: Synthetic peptide
HEWVLDFFP

SEQ ID NO: 35222 - protein, 9 aa, Artificial Sequence
  Description of Artificial Sequence: Synthetic peptide
RVEAYAPTT

SEQ ID NO: 35223 - protein, 9 aa, Artificial Sequence
  Description of Artificial Sequence: Synthetic peptide
THCHYQGND

SEQ ID NO: 35224 - protein, 9 aa, Artificial Sequence
  Description of Artificial Sequence: Synthetic peptide
WAGCYTYAN

SEQ ID NO: 35225 - protein, 9 aa, Artificial Sequence
  Description of Artificial Sequence: Synthetic peptide
WDHNYFTYL

SEQ ID NO: 35226 - protein, 9 aa, Artificial Sequence
  Description of Artificial Sequence: Synthetic peptide
IVMEYAFIP

SEQ ID NO: 35227 - protein, 9 aa, Artificial Sequence
  Description of Artificial Sequence: Synthetic peptide
NSCTYNKDA

SEQ ID NO: 35228 - protein, 9 aa, Artificial Sequence
  Description of Artificial Sequence: Synthetic peptide
FKNWYINMH

SEQ ID NO: 35229 - protein, 9 aa, Artificial Sequence
  Description of Artificial Sequence: Synthetic peptide
ETNSYNSHH

SEQ ID NO: 35230 - protein, 9 aa, Artificial Sequence
  Description of Artificial Sequence: Synthetic peptide
LSSCYYMTY

SEQ ID NO: 35231 - protein, 9 aa, Artificial Sequence
  Description of Artificial Sequence: Synthetic peptide
GSTQYPCCK

SEQ ID NO: 35232 - protein, 9 aa, Artificial Sequence
  Description of Artificial Sequence: Synthetic peptide
QAEGYRDCY

SEQ ID NO: 35233 - protein, 9 aa, Artificial Sequence
  Description of Artificial Sequence: Synthetic peptide
IGQWYECMT

SEQ ID NO: 35234 - protein, 9 aa, Artificial Sequence
  Description of Artificial Sequence: Synthetic peptide
GNAGYQADL

SEQ ID NO: 35235 - protein, 9 aa, Artificial Sequence
  Description of Artificial Sequence: Synthetic peptide
GCMPYQINV

SEQ ID NO: 35236 - protein, 9 aa, Artificial Sequence
  Description of Artificial Sequence: Synthetic peptide
SLCIYDHRH

SEQ ID NO: 35237 - protein, 9 aa, Artificial Sequence
  Description of Artificial Sequence: Synthetic peptide
ETNHYLISD

SEQ ID NO: 35238 - protein, 9 aa, Artificial Sequence
  Description of Artificial Sequence: Synthetic peptide
EGSDYVGYN

SEQ ID NO: 35239 - protein, 9 aa, Artificial Sequence
  Description of Artificial Sequence: Synthetic peptide
NMMQYQWAI

SEQ ID NO: 35240 - protein, 9 aa, Artificial Sequence
  Description of Artificial Sequence: Synthetic peptide
LPKIYLSFC

SEQ ID NO: 35241 - protein, 9 aa, Artificial Sequence
  Description of Artificial Sequence: Synthetic peptide
QNLMYCSSV

SEQ ID NO: 35242 - protein, 9 aa, Artificial Sequence
  Description of Artificial Sequence: Synthetic peptide
RPVTYPHTA

SEQ ID NO: 35243 - protein, 9 aa, Artificial Sequence
  Description of Artificial Sequence: Synthetic peptide
FDKTYFHDC

SEQ ID NO: 35244 - protein, 9 aa, Artificial Sequence
  Description of Artificial Sequence: Synthetic peptide
LMEHYLREG

SEQ ID NO: 35245 - protein, 9 aa, Artificial Sequence
  Description of Artificial Sequence: Synthetic peptide
NVWYYFRTW

SEQ ID NO: 35246 - protein, 9 aa, Artificial Sequence
  Description of Artificial Sequence: Synthetic peptide
WPSFYANYR

SEQ ID NO: 35247 - protein, 9 aa, Artificial Sequence
  Description of Artificial Sequence: Synthetic peptide
IACKYERVC

SEQ ID NO: 35248 - protein, 9 aa, Artificial Sequence
  Description of Artificial Sequence: Synthetic peptide
LMEHYLREW

SEQ ID NO: 35249 - protein, 9 aa, Artificial Sequence
  Description of Artificial Sequence: Synthetic peptide
SMHDYNFNV

SEQ ID NO: 35250 - protein, 9 aa, Artificial Sequence
  Description of Artificial Sequence: Synthetic peptide
GYRNYFIWP

SEQ ID NO: 35251 - protein, 9 aa, Artificial Sequence
  Description of Artificial Sequence: Synthetic peptide
FAMSYQRQN

SEQ ID NO: 35252 - protein, 9 aa, Artificial Sequence
  Description of Artificial Sequence: Synthetic peptide
EVYCYQLQS

SEQ ID NO: 35253 - protein, 9 aa, Artificial Sequence
  Description of Artificial Sequence: Synthetic peptide
YKNSYSQWP

SEQ ID NO: 35254 - protein, 9 aa, Artificial Sequence
  Description of Artificial Sequence: Synthetic peptide
SHMSYGQVQ

SEQ ID NO: 35255 - protein, 9 aa, Artificial Sequence
  Description of Artificial Sequence: Synthetic peptide
IQCKYIHFT

SEQ ID NO: 35256 - protein, 9 aa, Artificial Sequence
  Description of Artificial Sequence: Synthetic peptide
ANHLYHAAN

SEQ ID NO: 35257 - protein, 9 aa, Artificial Sequence
  Description of Artificial Sequence: Synthetic peptide
NYHNYMFGM

SEQ ID NO: 35258 - protein, 9 aa, Artificial Sequence
  Description of Artificial Sequence: Synthetic peptide
CFNTYDQCF

SEQ ID NO: 35259 - protein, 9 aa, Artificial Sequence
  Description of Artificial Sequence: Synthetic peptide
SDNMYHTIE

SEQ ID NO: 35260 - protein, 9 aa, Artificial Sequence
  Description of Artificial Sequence: Synthetic peptide
RPVHYQGTN

SEQ ID NO: 35261 - protein, 9 aa, Artificial Sequence
  Description of Artificial Sequence: Synthetic peptide
MEHFYDRES

SEQ ID NO: 35262 - protein, 9 aa, Artificial Sequence
  Description of Artificial Sequence: Synthetic peptide
PNGHYWMIP

SEQ ID NO: 35263 - protein, 9 aa, Artificial Sequence
  Description of Artificial Sequence: Synthetic peptide
ATNKYANAI

SEQ ID NO: 35264 - protein, 9 aa, Artificial Sequence
  Description of Artificial Sequence: Synthetic peptide
DKTCYLTCP

SEQ ID NO: 35265 - protein, 9 aa, Artificial Sequence
  Description of Artificial Sequence: Synthetic peptide
TMSNYGCLQ

SEQ ID NO: 35266 - protein, 9 aa, Artificial Sequence
  Description of Artificial Sequence: Synthetic peptide
MGMAYSDSE

SEQ ID NO: 35267 - protein, 9 aa, Artificial Sequence
  Description of Artificial Sequence: Synthetic peptide
ELPRYYGQM

SEQ ID NO: 35268 - protein, 9 aa, Artificial Sequence
  Description of Artificial Sequence: Synthetic peptide
DKYLYMYSD

SEQ ID NO: 35269 - protein, 9 aa, Artificial Sequence
  Description of Artificial Sequence: Synthetic peptide
LLAKYMVHT

SEQ ID NO: 35270 - protein, 9 aa, Artificial Sequence
  Description of Artificial Sequence: Synthetic peptide
MTERYYWCQ

SEQ ID NO: 35271 - protein, 9 aa, Artificial Sequence
  Description of Artificial Sequence: Synthetic peptide
DFMWYHICS

SEQ ID NO: 35272 - protein, 9 aa, Artificial Sequence
  Description of Artificial Sequence: Synthetic peptide
HGSSYNTVQ

SEQ ID NO: 35273 - protein, 9 aa, Artificial Sequence
  Description of Artificial Sequence: Synthetic peptide
SLTQYQWRG

SEQ ID NO: 35274 - protein, 9 aa, Artificial Sequence
  Description of Artificial Sequence: Synthetic peptide
TVNWYSGFG

SEQ ID NO: 35275 - protein, 9 aa, Artificial Sequence
  Description of Artificial Sequence: Synthetic peptide
MEPHYWEWP

SEQ ID NO: 35276 - protein, 9 aa, Artificial Sequence
  Description of Artificial Sequence: Synthetic peptide
STTAYHQDY

SEQ ID NO: 35277 - protein, 9 aa, Artificial Sequence
  Description of Artificial Sequence: Synthetic peptide
VVTQYVDAP

SEQ ID NO: 35278 - protein, 9 aa, Artificial Sequence
  Description of Artificial Sequence: Synthetic peptide
AVDHYSNGA

SEQ ID NO: 35279 - protein, 9 aa, Artificial Sequence
  Description of Artificial Sequence: Synthetic peptide
NGNHYNAMR

SEQ ID NO: 35280 - protein, 9 aa, Artificial Sequence
  Description of Artificial Sequence: Synthetic peptide
LHKAYVTDS

SEQ ID NO: 35281 - protein, 9 aa, Artificial Sequence
  Description of Artificial Sequence: Synthetic peptide
SGNMYESGE

SEQ ID NO: 35282 - protein, 9 aa, Artificial Sequence
  Description of Artificial Sequence: Synthetic peptide
CSESYRGPD

SEQ ID NO: 35283 - protein, 9 aa, Artificial Sequence
  Description of Artificial Sequence: Synthetic peptide
YLEMYSKDW

SEQ ID NO: 35284 - protein, 9 aa, Artificial Sequence
  Description of Artificial Sequence: Synthetic peptide
DPGWYGLAP

SEQ ID NO: 35285 - protein, 9 aa, Artificial Sequence
  Description of Artificial Sequence: Synthetic peptide
MNSFYRAEW

SEQ ID NO: 35286 - protein, 9 aa, Artificial Sequence
  Description of Artificial Sequence: Synthetic peptide
NEDQYMHVE

SEQ ID NO: 35287 - protein, 9 aa, Artificial Sequence
  Description of Artificial Sequence: Synthetic peptide
WHGFYKIMF

SEQ ID NO: 35288 - protein, 9 aa, Artificial Sequence
  Description of Artificial Sequence: Synthetic peptide
YTWPYPETH

SEQ ID NO: 35289 - protein, 9 aa, Artificial Sequence
  Description of Artificial Sequence: Synthetic peptide
PGGCYRMME

SEQ ID NO: 35290 - protein, 9 aa, Artificial Sequence
  Description of Artificial Sequence: Synthetic peptide
MYLNYRHFA

SEQ ID NO: 35291 - protein, 9 aa, Artificial Sequence
  Description of Artificial Sequence: Synthetic peptide
WVHPYSYCA

SEQ ID NO: 35292 - protein, 9 aa, Artificial Sequence
  Description of Artificial Sequence: Synthetic peptide
DYFQYNEAP

SEQ ID NO: 35293 - protein, 9 aa, Artificial Sequence
  Description of Artificial Sequence: Synthetic peptide
RQTTYDCLD

SEQ ID NO: 35294 - protein, 9 aa, Artificial Sequence
  Description of Artificial Sequence: Synthetic peptide
AVEDYWRYF

SEQ ID NO: 35295 - protein, 9 aa, Artificial Sequence
  Description of Artificial Sequence: Synthetic peptide
TSCCYESSS

SEQ ID NO: 35296 - protein, 9 aa, Artificial Sequence
  Description of Artificial Sequence: Synthetic peptide
EPRLYCAQE

SEQ ID NO: 35297 - protein, 9 aa, Artificial Sequence
  Description of Artificial Sequence: Synthetic peptide
HTLLWYGIC

SEQ ID NO: 35298 - protein, 9 aa, Artificial Sequence
  Description of Artificial Sequence: Synthetic peptide
MDHPTYGIY

SEQ ID NO: 35299 - protein, 9 aa, Artificial Sequence
  Description of Artificial Sequence: Synthetic peptide
DGCQKYQEQ

SEQ ID NO: 35300 - protein, 9 aa, Artificial Sequence
  Description of Artificial Sequence: Synthetic peptide
FKFISYVGD

SEQ ID NO: 35301 - protein, 9 aa, Artificial Sequence
  Description of Artificial Sequence: Synthetic peptide
IYLKFYFSL

SEQ ID NO: 35302 - protein, 9 aa, Artificial Sequence
  Description of Artificial Sequence: Synthetic peptide
DCDMKYLYE

SEQ ID NO: 35303 - protein, 9 aa, Artificial Sequence
  Description of Artificial Sequence: Synthetic peptide
LGSPFYECG

SEQ ID NO: 35304 - protein, 9 aa, Artificial Sequence
  Description of Artificial Sequence: Synthetic peptide
LLLNSYKWY

SEQ ID NO: 35305 - protein, 9 aa, Artificial Sequence
  Description of Artificial Sequence: Synthetic peptide
RLSLWYFCH

SEQ ID NO: 35306 - protein, 9 aa, Artificial Sequence
  Description of Artificial Sequence: Synthetic peptide
MDRMMYMLG

SEQ ID NO: 35307 - protein, 9 aa, Artificial Sequence
  Description of Artificial Sequence: Synthetic peptide
AMGYQYLYE

SEQ ID NO: 35308 - protein, 9 aa, Artificial Sequence
  Description of Artificial Sequence: Synthetic peptide
SVMLDYHDM

SEQ ID NO: 35309 - protein, 9 aa, Artificial Sequence
  Description of Artificial Sequence: Synthetic peptide
IVKQCYDCH

SEQ ID NO: 35310 - protein, 9 aa, Artificial Sequence
  Description of Artificial Sequence: Synthetic peptide
QVEDGYWSY

SEQ ID NO: 35311 - protein, 9 aa, Artificial Sequence
  Description of Artificial Sequence: Synthetic peptide
EWLSLYCHW

SEQ ID NO: 35312 - protein, 9 aa, Artificial Sequence
  Description of Artificial Sequence: Synthetic peptide
CTEIRYYGT

SEQ ID NO: 35313 - protein, 9 aa, Artificial Sequence
  Description of Artificial Sequence: Synthetic peptide
CLHHHYPVT

SEQ ID NO: 35314 - protein, 9 aa, Artificial Sequence
  Description of Artificial Sequence: Synthetic peptide
QYVGMYTQQ

SEQ ID NO: 35315 - protein, 9 aa, Artificial Sequence
  Description of Artificial Sequence: Synthetic peptide
QHSRAYMWY

SEQ ID NO: 35316 - protein, 9 aa, Artificial Sequence
  Description of Artificial Sequence: Synthetic peptide
TSSDHYALP

SEQ ID NO: 35317 - protein, 9 aa, Artificial Sequence
  Description of Artificial Sequence: Synthetic peptide
YAMPLYFCE

SEQ ID NO: 35318 - protein, 9 aa, Artificial Sequence
  Description of Artificial Sequence: Synthetic peptide
ECVSDYACC

SEQ ID NO: 35319 - protein, 9 aa, Artificial Sequence
  Description of Artificial Sequence: Synthetic peptide
GHHQCYKAD

SEQ ID NO: 35320 - protein, 9 aa, Artificial Sequence
  Description of Artificial Sequence: Synthetic peptide
VSLQKYDMT

SEQ ID NO: 35321 - protein, 9 aa, Artificial Sequence
  Description of Artificial Sequence: Synthetic peptide
NQQRTYNNG

SEQ ID NO: 35322 - protein, 9 aa, Artificial Sequence
  Description of Artificial Sequence: Synthetic peptide
QEYHIYFPF

SEQ ID NO: 35323 - protein, 9 aa, Artificial Sequence
  Description of Artificial Sequence: Synthetic peptide
AEDTPYTIY

SEQ ID NO: 35324 - protein, 9 aa, Artificial Sequence
  Description of Artificial Sequence: Synthetic peptide
YSVQAYMAN

SEQ ID NO: 35325 - protein, 9 aa, Artificial Sequence
  Description of Artificial Sequence: Synthetic peptide
QTAEWYCGA

SEQ ID NO: 35326 - protein, 9 aa, Artificial Sequence
  Description of Artificial Sequence: Synthetic peptide
ECGCMYWGY

SEQ ID NO: 35327 - protein, 9 aa, Artificial Sequence
  Description of Artificial Sequence: Synthetic peptide
RKWSCHRGH

SEQ ID NO: 35328 - protein, 9 aa, Artificial Sequence
  Description of Artificial Sequence: Synthetic peptide
RQTDTHRAN

SEQ ID NO: 35329 - protein, 9 aa, Artificial Sequence
  Description of Artificial Sequence: Synthetic peptide
NVDAHERYR

SEQ ID NO: 35330 - protein, 9 aa, Artificial Sequence
  Description of Artificial Sequence: Synthetic peptide
SRENLGRYN

SEQ ID NO: 35331 - protein, 9 aa, Artificial Sequence
  Description of Artificial Sequence: Synthetic peptide
WMPNQSRGW

SEQ ID NO: 35332 - protein, 9 aa, Artificial Sequence
  Description of Artificial Sequence: Synthetic peptide
SATARFRDN

SEQ ID NO: 35333 - protein, 9 aa, Artificial Sequence
  Description of Artificial Sequence: Synthetic peptide
EKRLFDRTY

SEQ ID NO: 35334 - protein, 9 aa, Artificial Sequence
  Description of Artificial Sequence: Synthetic peptide
LGHHKGRWH

SEQ ID NO: 35335 - protein, 9 aa, Artificial Sequence
  Description of Artificial Sequence: Synthetic peptide
YEWPWQRGL

SEQ ID NO: 35336 - protein, 9 aa, Artificial Sequence
  Description of Artificial Sequence: Synthetic peptide
YEWPWQRWL

SEQ ID NO: 35337 - protein, 9 aa, Artificial Sequence
  Description of Artificial Sequence: Synthetic peptide
YEWPWRRWL

SEQ ID NO: 35338 - protein, 9 aa, Artificial Sequence
  Description of Artificial Sequence: Synthetic peptide
GCLGTKRQI

SEQ ID NO: 35339 - protein, 9 aa, Artificial Sequence
  Description of Artificial Sequence: Synthetic peptide
HDSLFKRTE

SEQ ID NO: 35340 - protein, 9 aa, Artificial Sequence
  Description of Artificial Sequence: Synthetic peptide
HEWPWQRWL

SEQ ID NO: 35341 - protein, 9 aa, Artificial Sequence
  Description of Artificial Sequence: Synthetic peptide
SYLRQQRDT

SEQ ID NO: 35342 - protein, 9 aa, Artificial Sequence
  Description of Artificial Sequence: Synthetic peptide
ALANKRRNH

SEQ ID NO: 35343 - protein, 9 aa, Artificial Sequence
  Description of Artificial Sequence: Synthetic peptide
HEGLIMRLE

SEQ ID NO: 35344 - protein, 9 aa, Artificial Sequence
  Description of Artificial Sequence: Synthetic peptide
AQRCFHRWG

SEQ ID NO: 35345 - protein, 9 aa, Artificial Sequence
  Description of Artificial Sequence: Synthetic peptide
LFCPTCRYA

SEQ ID NO: 35346 - protein, 9 aa, Artificial Sequence
  Description of Artificial Sequence: Synthetic peptide
HLYSDGRGS

SEQ ID NO: 35347 - protein, 9 aa, Artificial Sequence
  Description of Artificial Sequence: Synthetic peptide
QCKTHPRSF

SEQ ID NO: 35348 - protein, 9 aa, Artificial Sequence
  Description of Artificial Sequence: Synthetic peptide
LFTDTKRPE

SEQ ID NO: 35349 - protein, 9 aa, Artificial Sequence
  Description of Artificial Sequence: Synthetic peptide
EFTHAIRQC

SEQ ID NO: 35350 - protein, 9 aa, Artificial Sequence
  Description of Artificial Sequence: Synthetic peptide
GATWLFRFP

SEQ ID NO: 35351 - protein, 9 aa, Artificial Sequence
  Description of Artificial Sequence: Synthetic peptide
ASWLCGRNV

SEQ ID NO: 35352 - protein, 9 aa, Artificial Sequence
  Description of Artificial Sequence: Synthetic peptide
AMLQKKRQD

SEQ ID NO: 35353 - protein, 9 aa, Artificial Sequence
  Description of Artificial Sequence: Synthetic peptide
DWYLSSRDQ

SEQ ID NO: 35354 - protein, 9 aa, Artificial Sequence
  Description of Artificial Sequence: Synthetic peptide
LHSYQWRLG

SEQ ID NO: 35355 - protein, 9 aa, Artificial Sequence
  Description of Artificial Sequence: Synthetic peptide
CGHLLRRAE

SEQ ID NO: 35356 - protein, 9 aa, Artificial Sequence
  Description of Artificial Sequence: Synthetic peptide
IEFTHSRKV

SEQ ID NO: 35357 - protein, 9 aa, Artificial Sequence
  Description of Artificial Sequence: Synthetic peptide
PWYNWDRRC

SEQ ID NO: 35358 - protein, 9 aa, Artificial Sequence
  Description of Artificial Sequence: Synthetic peptide
LCTSTERQG

SEQ ID NO: 35359 - protein, 9 aa, Artificial Sequence
  Description of Artificial Sequence: Synthetic peptide
LVDRSGRTA

SEQ ID NO: 35360 - protein, 9 aa, Artificial Sequence
  Description of Artificial Sequence: Synthetic peptide
NLDMSRRDF

SEQ ID NO: 35361 - protein, 9 aa, Artificial Sequence
  Description of Artificial Sequence: Synthetic peptide
NAMCFGRAK

SEQ ID NO: 35362 - protein, 9 aa, Artificial Sequence
  Description of Artificial Sequence: Synthetic peptide
VHHKTNRSY

SEQ ID NO: 35363 - protein, 9 aa, Artificial Sequence
  Description of Artificial Sequence: Synthetic peptide
TVNRAMREE

SEQ ID NO: 35364 - protein, 9 aa, Artificial Sequence
  Description of Artificial Sequence: Synthetic peptide
EAGPRKRDV

SEQ ID NO: 35365 - protein, 9 aa, Artificial Sequence
  Description of Artificial Sequence: Synthetic peptide
CSVWMQRDR

SEQ ID NO: 35366 - protein, 9 aa, Artificial Sequence
  Description of Artificial Sequence: Synthetic peptide
TFVYGERDR

SEQ ID NO: 35367 - protein, 9 aa, Artificial Sequence
  Description of Artificial Sequence: Synthetic peptide
LREEELMTR

SEQ ID NO: 35368 - protein, 9 aa, Artificial Sequence
  Description of Artificial Sequence: Synthetic peptide
WHRDEMLTT

SEQ ID NO: 35369 - protein, 9 aa, Artificial Sequence
  Description of Artificial Sequence: Synthetic peptide
AMKPMILTN

SEQ ID NO: 35370 - protein, 9 aa, Artificial Sequence
  Description of Artificial Sequence: Synthetic peptide
RAAGIQGTA

SEQ ID NO: 35371 - protein, 9 aa, Artificial Sequence
  Description of Artificial Sequence: Synthetic peptide
EQELKNSTQ

SEQ ID NO: 35372 - protein, 9 aa, Artificial Sequence
  Description of Artificial Sequence: Synthetic peptide
MATYSDPTS

SEQ ID NO: 35373 - protein, 9 aa, Artificial Sequence
  Description of Artificial Sequence: Synthetic peptide
NPPHRNCTI

SEQ ID NO: 35374 - protein, 9 aa, Artificial Sequence
  Description of Artificial Sequence: Synthetic peptide
SVTPDSITT

SEQ ID NO: 35375 - protein, 9 aa, Artificial Sequence
  Description of Artificial Sequence: Synthetic peptide
EACHPDLTP

SEQ ID NO: 35376 - protein, 9 aa, Artificial Sequence
  Description of Artificial Sequence: Synthetic peptide
ASEHKANTT

SEQ ID NO: 35377 - protein, 9 aa, Artificial Sequence
  Description of Artificial Sequence: Synthetic peptide
AYPLENDTD

SEQ ID NO: 35378 - protein, 9 aa, Artificial Sequence
  Description of Artificial Sequence: Synthetic peptide
TYYNMWHTK

SEQ ID NO: 35379 - protein, 9 aa, Artificial Sequence
  Description of Artificial Sequence: Synthetic peptide
DDYQQHWTG

SEQ ID NO: 35380 - protein, 9 aa, Artificial Sequence
  Description of Artificial Sequence: Synthetic peptide
DTLDMPETN

SEQ ID NO: 35381 - protein, 9 aa, Artificial Sequence
  Description of Artificial Sequence: Synthetic peptide
NEQCHAKTS

SEQ ID NO: 35382 - protein, 9 aa, Artificial Sequence
  Description of Artificial Sequence: Synthetic peptide
NEQCHVKTS

SEQ ID NO: 35383 - protein, 9 aa, Artificial Sequence
  Description of Artificial Sequence: Synthetic peptide
PYKIVMITR

SEQ ID NO: 35384 - protein, 9 aa, Artificial Sequence
  Description of Artificial Sequence: Synthetic peptide
IKHITHNTY

SEQ ID NO: 35385 - protein, 9 aa, Artificial Sequence
  Description of Artificial Sequence: Synthetic peptide
STNPNTETR

SEQ ID NO: 35386 - protein, 9 aa, Artificial Sequence
  Description of Artificial Sequence: Synthetic peptide
HMALVMQTA

SEQ ID NO: 35387 - protein, 9 aa, Artificial Sequence
  Description of Artificial Sequence: Synthetic peptide
YDLWGWSTR

SEQ ID NO: 35388 - protein, 9 aa, Artificial Sequence
  Description of Artificial Sequence: Synthetic peptide
IYMSTGNTP

SEQ ID NO: 35389 - protein, 9 aa, Artificial Sequence
  Description of Artificial Sequence: Synthetic peptide
QQTKNNSTD

SEQ ID NO: 35390 - protein, 9 aa, Artificial Sequence
  Description of Artificial Sequence: Synthetic peptide
DTFSNQNTV

SEQ ID NO: 35391 - protein, 9 aa, Artificial Sequence
  Description of Artificial Sequence: Synthetic peptide
SAPRNEITR

SEQ ID NO: 35392 - protein, 9 aa, Artificial Sequence
  Description of Artificial Sequence: Synthetic peptide
GSKIIMHTE

SEQ ID NO: 35393 - protein, 9 aa, Artificial Sequence
  Description of Artificial Sequence: Synthetic peptide
MTKMMCETI

SEQ ID NO: 35394 - protein, 9 aa, Artificial Sequence
  Description of Artificial Sequence: Synthetic peptide
WCHITWPTN

SEQ ID NO: 35395 - protein, 9 aa, Artificial Sequence
  Description of Artificial Sequence: Synthetic peptide
CVGYKSNTP

SEQ ID NO: 35396 - protein, 9 aa, Artificial Sequence
  Description of Artificial Sequence: Synthetic peptide
NCDHRFGTL

SEQ ID NO: 35397 - protein, 9 aa, Artificial Sequence
  Description of Artificial Sequence: Synthetic peptide
SSQHASHTD

SEQ ID NO: 35398 - protein, 9 aa, Artificial Sequence
  Description of Artificial Sequence: Synthetic peptide
IMTMQMDTA

SEQ ID NO: 35399 - protein, 9 aa, Artificial Sequence
  Description of Artificial Sequence: Synthetic peptide
IKHITRNTY

SEQ ID NO: 35400 - protein, 9 aa, Artificial Sequence
  Description of Artificial Sequence: Synthetic peptide
QFMMGQQTP

SEQ ID NO: 35401 - protein, 9 aa, Artificial Sequence
  Description of Artificial Sequence: Synthetic peptide
MAMWIADTH

SEQ ID NO: 35402 - protein, 9 aa, Artificial Sequence
  Description of Artificial Sequence: Synthetic peptide
RKVAVESTW

SEQ ID NO: 35403 - protein, 9 aa, Artificial Sequence
  Description of Artificial Sequence: Synthetic peptide
IGQHNVQTT

SEQ ID NO: 35404 - protein, 9 aa, Artificial Sequence
  Description of Artificial Sequence: Synthetic peptide
MLMHADMTQ

SEQ ID NO: 35405 - protein, 9 aa, Artificial Sequence
  Description of Artificial Sequence: Synthetic peptide
MQPMESATW

SEQ ID NO: 35406 - protein, 9 aa, Artificial Sequence
  Description of Artificial Sequence: Synthetic peptide
HRVHSEKTD

SEQ ID NO: 35407 - protein, 9 aa, Artificial Sequence
  Description of Artificial Sequence: Synthetic peptide
RFDQFWDTY

SEQ ID NO: 35408 - protein, 9 aa, Artificial Sequence
  Description of Artificial Sequence: Synthetic peptide
QSRCVDNTV

SEQ ID NO: 35409 - protein, 9 aa, Artificial Sequence
  Description of Artificial Sequence: Synthetic peptide
FNESGWPTW

SEQ ID NO: 35410 - protein, 9 aa, Artificial Sequence
  Description of Artificial Sequence: Synthetic peptide
ESSQEIKTC

SEQ ID NO: 35411 - protein, 9 aa, Artificial Sequence
  Description of Artificial Sequence: Synthetic peptide
DQEAQVVTG

SEQ ID NO: 35412 - protein, 9 aa, Artificial Sequence
  Description of Artificial Sequence: Synthetic peptide
TCKNLTYYI

SEQ ID NO: 35413 - protein, 9 aa, Artificial Sequence
  Description of Artificial Sequence: Synthetic peptide
ECLLFLVGI

SEQ ID NO: 35414 - protein, 9 aa, Artificial Sequence
  Description of Artificial Sequence: Synthetic peptide
EMKCIGAGI

SEQ ID NO: 35415 - protein, 9 aa, Artificial Sequence
  Description of Artificial Sequence: Synthetic peptide
QPHEAEFKI

SEQ ID NO: 35416 - protein, 9 aa, Artificial Sequence
  Description of Artificial Sequence: Synthetic peptide
YTNFEDVLI

SEQ ID NO: 35417 - protein, 9 aa, Artificial Sequence
  Description of Artificial Sequence: Synthetic peptide
PPHIGTQFI

SEQ ID NO: 35418 - protein, 9 aa, Artificial Sequence
  Description of Artificial Sequence: Synthetic peptide
WDNWSNTQI

SEQ ID NO: 35419 - protein, 9 aa, Artificial Sequence
  Description of Artificial Sequence: Synthetic peptide
WVTLCADLI

SEQ ID NO: 35420 - protein, 9 aa, Artificial Sequence
  Description of Artificial Sequence: Synthetic peptide
RSLDIQYDI

SEQ ID NO: 35421 - protein, 9 aa, Artificial Sequence
  Description of Artificial Sequence: Synthetic peptide
RSFYHPKLI

SEQ ID NO: 35422 - protein, 9 aa, Artificial Sequence
  Description of Artificial Sequence: Synthetic peptide
DHFYMSYGI

SEQ ID NO: 35423 - protein, 9 aa, Artificial Sequence
  Description of Artificial Sequence: Synthetic peptide
VEQMVWADI

SEQ ID NO: 35424 - protein, 9 aa, Artificial Sequence
  Description of Artificial Sequence: Synthetic peptide
CPWFIKWGI

SEQ ID NO: 35425 - protein, 9 aa, Artificial Sequence
  Description of Artificial Sequence: Synthetic peptide
PHVSGEGKI

SEQ ID NO: 35426 - protein, 9 aa, Artificial Sequence
  Description of Artificial Sequence: Synthetic peptide
QAWPKTEYI

SEQ ID NO: 35427 - protein, 9 aa, Artificial Sequence
  Description of Artificial Sequence: Synthetic peptide
FNWFVRAYI

SEQ ID NO: 35428 - protein, 9 aa, Artificial Sequence
  Description of Artificial Sequence: Synthetic peptide
DMGMDNKGI

SEQ ID NO: 35429 - protein, 9 aa, Artificial Sequence
  Description of Artificial Sequence: Synthetic peptide
GTMCREQMI

SEQ ID NO: 35430 - protein, 9 aa, Artificial Sequence
  Description of Artificial Sequence: Synthetic peptide
TSVIRLFWI

SEQ ID NO: 35431 - protein, 9 aa, Artificial Sequence
  Description of Artificial Sequence: Synthetic peptide
YMHFRQYPI

SEQ ID NO: 35432 - protein, 9 aa, Artificial Sequence
  Description of Artificial Sequence: Synthetic peptide
EFVLGCQGI

SEQ ID NO: 35433 - protein, 9 aa, Artificial Sequence
  Description of Artificial Sequence: Synthetic peptide
WPNIKHQPI

SEQ ID NO: 35434 - protein, 9 aa, Artificial Sequence
  Description of Artificial Sequence: Synthetic peptide
AAMESCAEI

SEQ ID NO: 35435 - protein, 9 aa, Artificial Sequence
  Description of Artificial Sequence: Synthetic peptide
HQCQSRSYI

SEQ ID NO: 35436 - protein, 9 aa, Artificial Sequence
  Description of Artificial Sequence: Synthetic peptide
YSDPKNMSI

SEQ ID NO: 35437 - protein, 9 aa, Artificial Sequence
  Description of Artificial Sequence: Synthetic peptide
FFRICGSYI

SEQ ID NO: 35438 - protein, 9 aa, Artificial Sequence
  Description of Artificial Sequence: Synthetic peptide
ACLLFLVGI

SEQ ID NO: 35439 - protein, 9 aa, Artificial Sequence
  Description of Artificial Sequence: Synthetic peptide
ACYWLLNWF

SEQ ID NO: 35440 - protein, 9 aa, Artificial Sequence
  Description of Artificial Sequence: Synthetic peptide
ACYWWLNWF

SEQ ID NO: 35441 - protein, 9 aa, Artificial Sequence
  Description of Artificial Sequence: Synthetic peptide
ACYWWMNWF

SEQ ID NO: 35442 - protein, 9 aa, Artificial Sequence
  Description of Artificial Sequence: Synthetic peptide
ADHPENFSD

SEQ ID NO: 35443 - protein, 9 aa, Artificial Sequence
  Description of Artificial Sequence: Synthetic peptide
ADWLRRNIW

SEQ ID NO: 35444 - protein, 9 aa, Artificial Sequence
  Description of Artificial Sequence: Synthetic peptide
AEFRPKISR

SEQ ID NO: 35445 - protein, 9 aa, Artificial Sequence
  Description of Artificial Sequence: Synthetic peptide
AFIQQNNQD

SEQ ID NO: 35446 - protein, 9 aa, Artificial Sequence
  Description of Artificial Sequence: Synthetic peptide
AFIQQSDQD

SEQ ID NO: 35447 - protein, 9 aa, Artificial Sequence
  Description of Artificial Sequence: Synthetic peptide
AFIQQSNED

SEQ ID NO: 35448 - protein, 9 aa, Artificial Sequence
  Description of Artificial Sequence: Synthetic peptide
AFIQQSTQD

SEQ ID NO: 35449 - protein, 9 aa, Artificial Sequence
  Description of Artificial Sequence: Synthetic peptide
AFIQRSNQD

SEQ ID NO: 35450 - protein, 9 aa, Artificial Sequence
  Description of Artificial Sequence: Synthetic peptide
AFVQQSNQD

SEQ ID NO: 35451 - protein, 9 aa, Artificial Sequence
  Description of Artificial Sequence: Synthetic peptide
AFWYSMAFP

SEQ ID NO: 35452 - protein, 9 aa, Artificial Sequence
  Description of Artificial Sequence: Synthetic peptide
AGDRTISMW

SEQ ID NO: 35453 - protein, 9 aa, Artificial Sequence
  Description of Artificial Sequence: Synthetic peptide
AHFRAYTQY

SEQ ID NO: 35454 - protein, 9 aa, Artificial Sequence
  Description of Artificial Sequence: Synthetic peptide
AHKWFCEGS

SEQ ID NO: 35455 - protein, 9 aa, Artificial Sequence
  Description of Artificial Sequence: Synthetic peptide
AHKWVCEDS

SEQ ID NO: 35456 - protein, 9 aa, Artificial Sequence
  Description of Artificial Sequence: Synthetic peptide
AKNVFEEHV

SEQ ID NO: 35457 - protein, 9 aa, Artificial Sequence
  Description of Artificial Sequence: Synthetic peptide
ALFAPNGEV

SEQ ID NO: 35458 - protein, 9 aa, Artificial Sequence
  Description of Artificial Sequence: Synthetic peptide
ALFYMEKMP

SEQ ID NO: 35459 - protein, 9 aa, Artificial Sequence
  Description of Artificial Sequence: Synthetic peptide
AMVLFLVDI

SEQ ID NO: 35460 - protein, 9 aa, Artificial Sequence
  Description of Artificial Sequence: Synthetic peptide
AMWIRGIWG

SEQ ID NO: 35461 - protein, 9 aa, Artificial Sequence
  Description of Artificial Sequence: Synthetic peptide
ANDMCNYYG

SEQ ID NO: 35462 - protein, 9 aa, Artificial Sequence
  Description of Artificial Sequence: Synthetic peptide
AQGNKTYVI

SEQ ID NO: 35463 - protein, 9 aa, Artificial Sequence
  Description of Artificial Sequence: Synthetic peptide
AQKKCLSFG

SEQ ID NO: 35464 - protein, 9 aa, Artificial Sequence
  Description of Artificial Sequence: Synthetic peptide
AQKWFCEDS

SEQ ID NO: 35465 - protein, 9 aa, Artificial Sequence
  Description of Artificial Sequence: Synthetic peptide
AQQKCLSFG

SEQ ID NO: 35466 - protein, 9 aa, Artificial Sequence
  Description of Artificial Sequence: Synthetic peptide
AQVNKTYLI

SEQ ID NO: 35467 - protein, 9 aa, Artificial Sequence
  Description of Artificial Sequence: Synthetic peptide
AQVNKTYVI

SEQ ID NO: 35468 - protein, 9 aa, Artificial Sequence
  Description of Artificial Sequence: Synthetic peptide
AQVTKTYVI

SEQ ID NO: 35469 - protein, 9 aa, Artificial Sequence
  Description of Artificial Sequence: Synthetic peptide
ATMFSVIHQ

SEQ ID NO: 35470 - protein, 9 aa, Artificial Sequence
  Description of Artificial Sequence: Synthetic peptide
ATWVHYDMY

SEQ ID NO: 35471 - protein, 9 aa, Artificial Sequence
  Description of Artificial Sequence: Synthetic peptide
AVIQQSNQD

SEQ ID NO: 35472 - protein, 9 aa, Artificial Sequence
  Description of Artificial Sequence: Synthetic peptide
AWFDMEKMP

SEQ ID NO: 35473 - protein, 9 aa, Artificial Sequence
  Description of Artificial Sequence: Synthetic peptide
AWFHMEKMP

SEQ ID NO: 35474 - protein, 9 aa, Artificial Sequence
  Description of Artificial Sequence: Synthetic peptide
AWFNMEKMP

SEQ ID NO: 35475 - protein, 9 aa, Artificial Sequence
  Description of Artificial Sequence: Synthetic peptide
AWFYKEKMP

SEQ ID NO: 35476 - protein, 9 aa, Artificial Sequence
  Description of Artificial Sequence: Synthetic peptide
AWFYMEEMP

SEQ ID NO: 35477 - protein, 9 aa, Artificial Sequence
  Description of Artificial Sequence: Synthetic peptide
AWFYMEKMS

SEQ ID NO: 35478 - protein, 9 aa, Artificial Sequence
  Description of Artificial Sequence: Synthetic peptide
AWFYMENMP

SEQ ID NO: 35479 - protein, 9 aa, Artificial Sequence
  Description of Artificial Sequence: Synthetic peptide
AWFYMGKMP

SEQ ID NO: 35480 - protein, 9 aa, Artificial Sequence
  Description of Artificial Sequence: Synthetic peptide
AWFYREKMP

SEQ ID NO: 35481 - protein, 9 aa, Artificial Sequence
  Description of Artificial Sequence: Synthetic peptide
AWLQGGIYN

SEQ ID NO: 35482 - protein, 9 aa, Artificial Sequence
  Description of Artificial Sequence: Synthetic peptide
AWSYMEKMP

SEQ ID NO: 35483 - protein, 9 aa, Artificial Sequence
  Description of Artificial Sequence: Synthetic peptide
CAVKQECSR

SEQ ID NO: 35484 - protein, 9 aa, Artificial Sequence
  Description of Artificial Sequence: Synthetic peptide
CCCSEIGVN

SEQ ID NO: 35485 - protein, 9 aa, Artificial Sequence
  Description of Artificial Sequence: Synthetic peptide
CHVMSVPCA

SEQ ID NO: 35486 - protein, 9 aa, Artificial Sequence
  Description of Artificial Sequence: Synthetic peptide
CKNWYINMH

SEQ ID NO: 35487 - protein, 9 aa, Artificial Sequence
  Description of Artificial Sequence: Synthetic peptide
CQWTPEIFQ

SEQ ID NO: 35488 - protein, 9 aa, Artificial Sequence
  Description of Artificial Sequence: Synthetic peptide
CTQCYGDMP

SEQ ID NO: 35489 - protein, 9 aa, Artificial Sequence
  Description of Artificial Sequence: Synthetic peptide
CWAEFRMRD

SEQ ID NO: 35490 - protein, 9 aa, Artificial Sequence
  Description of Artificial Sequence: Synthetic peptide
CWGEFRMRV

SEQ ID NO: 35491 - protein, 9 aa, Artificial Sequence
  Description of Artificial Sequence: Synthetic peptide
CWTEFRMRV

SEQ ID NO: 35492 - protein, 9 aa, Artificial Sequence
  Description of Artificial Sequence: Synthetic peptide
CWVEFRMRV

SEQ ID NO: 35493 - protein, 9 aa, Artificial Sequence
  Description of Artificial Sequence: Synthetic peptide
CWWTPEIFQ

SEQ ID NO: 35494 - protein, 9 aa, Artificial Sequence
  Description of Artificial Sequence: Synthetic peptide
DAKSPCDSV

SEQ ID NO: 35495 - protein, 9 aa, Artificial Sequence
  Description of Artificial Sequence: Synthetic peptide
DAKSPCESF

SEQ ID NO: 35496 - protein, 9 aa, Artificial Sequence
  Description of Artificial Sequence: Synthetic peptide
DAVNDLTWP

SEQ ID NO: 35497 - protein, 9 aa, Artificial Sequence
  Description of Artificial Sequence: Synthetic peptide
DCIPDWSST

SEQ ID NO: 35498 - protein, 9 aa, Artificial Sequence
  Description of Artificial Sequence: Synthetic peptide
DCYWWLNWF

SEQ ID NO: 35499 - protein, 9 aa, Artificial Sequence
  Description of Artificial Sequence: Synthetic peptide
DEANKTYVI

SEQ ID NO: 35500 - protein, 9 aa, Artificial Sequence
  Description of Artificial Sequence: Synthetic peptide
DEDNKTYVI

SEQ ID NO: 35501 - protein, 9 aa, Artificial Sequence
  Description of Artificial Sequence: Synthetic peptide
DEVNKTYVI

SEQ ID NO: 35502 - protein, 9 aa, Artificial Sequence
  Description of Artificial Sequence: Synthetic peptide
DFILDWSST

SEQ ID NO: 35503 - protein, 9 aa, Artificial Sequence
  Description of Artificial Sequence: Synthetic peptide
DFIPDWSSI

SEQ ID NO: 35504 - protein, 9 aa, Artificial Sequence
  Description of Artificial Sequence: Synthetic peptide
DFIRDWSST

SEQ ID NO: 35505 - protein, 9 aa, Artificial Sequence
  Description of Artificial Sequence: Synthetic peptide
DFITDWSST

SEQ ID NO: 35506 - protein, 9 aa, Artificial Sequence
  Description of Artificial Sequence: Synthetic peptide
DFVPDWSST

SEQ ID NO: 35507 - protein, 9 aa, Artificial Sequence
  Description of Artificial Sequence: Synthetic peptide
DFWYGMAFP

SEQ ID NO: 35508 - protein, 9 aa, Artificial Sequence
  Description of Artificial Sequence: Synthetic peptide
DFWYSMACP

SEQ ID NO: 35509 - protein, 9 aa, Artificial Sequence
  Description of Artificial Sequence: Synthetic peptide
DFWYSMAVP

SEQ ID NO: 35510 - protein, 9 aa, Artificial Sequence
  Description of Artificial Sequence: Synthetic peptide
DFWYSMTFP

SEQ ID NO: 35511 - protein, 9 aa, Artificial Sequence
  Description of Artificial Sequence: Synthetic peptide
DFWYSRAFP

SEQ ID NO: 35512 - protein, 9 aa, Artificial Sequence
  Description of Artificial Sequence: Synthetic peptide
DFWYSVAFP

SEQ ID NO: 35513 - protein, 9 aa, Artificial Sequence
  Description of Artificial Sequence: Synthetic peptide
DFWYTMAFP

SEQ ID NO: 35514 - protein, 9 aa, Artificial Sequence
  Description of Artificial Sequence: Synthetic peptide
DHVNKPYVI

SEQ ID NO: 35515 - protein, 9 aa, Artificial Sequence
  Description of Artificial Sequence: Synthetic peptide
DIIPDWSST

SEQ ID NO: 35516 - protein, 9 aa, Artificial Sequence
  Description of Artificial Sequence: Synthetic peptide
DIRIVTDGR

SEQ ID NO: 35517 - protein, 9 aa, Artificial Sequence
  Description of Artificial Sequence: Synthetic peptide
DIWYSMAFP

SEQ ID NO: 35518 - protein, 9 aa, Artificial Sequence
  Description of Artificial Sequence: Synthetic peptide
DKGNKTYVI

SEQ ID NO: 35519 - protein, 9 aa, Artificial Sequence
  Description of Artificial Sequence: Synthetic peptide
DKNVFEEDV

SEQ ID NO: 35520 - protein, 9 aa, Artificial Sequence
  Description of Artificial Sequence: Synthetic peptide
DKNVFEQHV

SEQ ID NO: 35521 - protein, 9 aa, Artificial Sequence
  Description of Artificial Sequence: Synthetic peptide
DKNVYEEHV

SEQ ID NO: 35522 - protein, 9 aa, Artificial Sequence
  Description of Artificial Sequence: Synthetic peptide
DNVNKTYVI

SEQ ID NO: 35523 - protein, 9 aa, Artificial Sequence
  Description of Artificial Sequence: Synthetic peptide
DPGNKTYVI

SEQ ID NO: 35524 - protein, 9 aa, Artificial Sequence
  Description of Artificial Sequence: Synthetic peptide
DPVNKTYVL

SEQ ID NO: 35525 - protein, 9 aa, Artificial Sequence
  Description of Artificial Sequence: Synthetic peptide
DPVNKTYVV

SEQ ID NO: 35526 - protein, 9 aa, Artificial Sequence
  Description of Artificial Sequence: Synthetic peptide
DPVTKTYVI

SEQ ID NO: 35527 - protein, 9 aa, Artificial Sequence
  Description of Artificial Sequence: Synthetic peptide
DQAEVLSDH

SEQ ID NO: 35528 - protein, 9 aa, Artificial Sequence
  Description of Artificial Sequence: Synthetic peptide
DQANKTYVI

SEQ ID NO: 35529 - protein, 9 aa, Artificial Sequence
  Description of Artificial Sequence: Synthetic peptide
DQDNKTYVI

SEQ ID NO: 35530 - protein, 9 aa, Artificial Sequence
  Description of Artificial Sequence: Synthetic peptide
DQDTKTYVI

SEQ ID NO: 35531 - protein, 9 aa, Artificial Sequence
  Description of Artificial Sequence: Synthetic peptide
DQGNKTYVI

SEQ ID NO: 35532 - protein, 9 aa, Artificial Sequence
  Description of Artificial Sequence: Synthetic peptide
DQGSKTYVI

SEQ ID NO: 35533 - protein, 9 aa, Artificial Sequence
  Description of Artificial Sequence: Synthetic peptide
DQINKPYVI

SEQ ID NO: 35534 - protein, 9 aa, Artificial Sequence
  Description of Artificial Sequence: Synthetic peptide
DQINKTYVI

SEQ ID NO: 35535 - protein, 9 aa, Artificial Sequence
  Description of Artificial Sequence: Synthetic peptide
DQINKTYVS

SEQ ID NO: 35536 - protein, 9 aa, Artificial Sequence
  Description of Artificial Sequence: Synthetic peptide
DQLNKTYVI

SEQ ID NO: 35537 - protein, 9 aa, Artificial Sequence
  Description of Artificial Sequence: Synthetic peptide
DQVDKTYVI

SEQ ID NO: 35538 - protein, 9 aa, Artificial Sequence
  Description of Artificial Sequence: Synthetic peptide
DQVNKNYVI

SEQ ID NO: 35539 - protein, 9 aa, Artificial Sequence
  Description of Artificial Sequence: Synthetic peptide
DQVNKPYEI

SEQ ID NO: 35540 - protein, 9 aa, Artificial Sequence
  Description of Artificial Sequence: Synthetic peptide
DQVNKTHVI

SEQ ID NO: 35541 - protein, 9 aa, Artificial Sequence
  Description of Artificial Sequence: Synthetic peptide
DQVNKTNVI

SEQ ID NO: 35542 - protein, 9 aa, Artificial Sequence
  Description of Artificial Sequence: Synthetic peptide
DQVNKTSVI

SEQ ID NO: 35543 - protein, 9 aa, Artificial Sequence
  Description of Artificial Sequence: Synthetic peptide
DQVNKTYAI

SEQ ID NO: 35544 - protein, 9 aa, Artificial Sequence
  Description of Artificial Sequence: Synthetic peptide
DQVNKTYEI

SEQ ID NO: 35545 - protein, 9 aa, Artificial Sequence
  Description of Artificial Sequence: Synthetic peptide
DQVNKTYML

SEQ ID NO: 35546 - protein, 9 aa, Artificial Sequence
  Description of Artificial Sequence: Synthetic peptide
DQVNKTYVF

SEQ ID NO: 35547 - protein, 9 aa, Artificial Sequence
  Description of Artificial Sequence: Synthetic peptide
DQVNKTYVN

SEQ ID NO: 35548 - protein, 9 aa, Artificial Sequence
  Description of Artificial Sequence: Synthetic peptide
DQVNKTYVV

SEQ ID NO: 35549 - protein, 9 aa, Artificial Sequence
  Description of Artificial Sequence: Synthetic peptide
DQVNMTYVI

SEQ ID NO: 35550 - protein, 9 aa, Artificial Sequence
  Description of Artificial Sequence: Synthetic peptide
DQVNNTYMI

SEQ ID NO: 35551 - protein, 9 aa, Artificial Sequence
  Description of Artificial Sequence: Synthetic peptide
DQVNQTYVI

SEQ ID NO: 35552 - protein, 9 aa, Artificial Sequence
  Description of Artificial Sequence: Synthetic peptide
DQVNRTYVI

SEQ ID NO: 35553 - protein, 9 aa, Artificial Sequence
  Description of Artificial Sequence: Synthetic peptide
DQVSKTYVI

SEQ ID NO: 35554 - protein, 9 aa, Artificial Sequence
  Description of Artificial Sequence: Synthetic peptide
DQVTKTYVI

SEQ ID NO: 35555 - protein, 9 aa, Artificial Sequence
  Description of Artificial Sequence: Synthetic peptide
DQVTQTYVI

SEQ ID NO: 35556 - protein, 9 aa, Artificial Sequence
  Description of Artificial Sequence: Synthetic peptide
DRNVFEEHV

SEQ ID NO: 35557 - protein, 9 aa, Artificial Sequence
  Description of Artificial Sequence: Synthetic peptide
DRVNKTYLI

SEQ ID NO: 35558 - protein, 9 aa, Artificial Sequence
  Description of Artificial Sequence: Synthetic peptide
DRVNKTYVS

SEQ ID NO: 35559 - protein, 9 aa, Artificial Sequence
  Description of Artificial Sequence: Synthetic peptide
DVNLKITTH

SEQ ID NO: 35560 - protein, 9 aa, Artificial Sequence
  Description of Artificial Sequence: Synthetic peptide
DVNLQIATH

SEQ ID NO: 35561 - protein, 9 aa, Artificial Sequence
  Description of Artificial Sequence: Synthetic peptide
DVYYCPEAI

SEQ ID NO: 35562 - protein, 9 aa, Artificial Sequence
  Description of Artificial Sequence: Synthetic peptide
DWMQGGIYH

SEQ ID NO: 35563 - protein, 9 aa, Artificial Sequence
  Description of Artificial Sequence: Synthetic peptide
DWMQGGIYY

SEQ ID NO: 35564 - protein, 9 aa, Artificial Sequence
  Description of Artificial Sequence: Synthetic peptide
DYAQYYRTW

SEQ ID NO: 35565 - protein, 9 aa, Artificial Sequence
  Description of Artificial Sequence: Synthetic peptide
DYDPDIKDP

SEQ ID NO: 35566 - protein, 9 aa, Artificial Sequence
  Description of Artificial Sequence: Synthetic peptide
DYDPDLKDQ

SEQ ID NO: 35567 - protein, 9 aa, Artificial Sequence
  Description of Artificial Sequence: Synthetic peptide
DYGPDIKDQ

SEQ ID NO: 35568 - protein, 9 aa, Artificial Sequence
  Description of Artificial Sequence: Synthetic peptide
ECLLFLIGI

SEQ ID NO: 35569 - protein, 9 aa, Artificial Sequence
  Description of Artificial Sequence: Synthetic peptide
ECMLFLVGI

SEQ ID NO: 35570 - protein, 9 aa, Artificial Sequence
  Description of Artificial Sequence: Synthetic peptide
ECVSKWIVF

SEQ ID NO: 35571 - protein, 9 aa, Artificial Sequence
  Description of Artificial Sequence: Synthetic peptide
EDWIRRNIW

SEQ ID NO: 35572 - protein, 9 aa, Artificial Sequence
  Description of Artificial Sequence: Synthetic peptide
EDWLRCNIW

SEQ ID NO: 35573 - protein, 9 aa, Artificial Sequence
  Description of Artificial Sequence: Synthetic peptide
EDWLRRDIW

SEQ ID NO: 35574 - protein, 9 aa, Artificial Sequence
  Description of Artificial Sequence: Synthetic peptide
EFIQQSNQD

SEQ ID NO: 35575 - protein, 9 aa, Artificial Sequence
  Description of Artificial Sequence: Synthetic peptide
EHFRAYAQY

SEQ ID NO: 35576 - protein, 9 aa, Artificial Sequence
  Description of Artificial Sequence: Synthetic peptide
EHFRAYIQY

SEQ ID NO: 35577 - protein, 9 aa, Artificial Sequence
  Description of Artificial Sequence: Synthetic peptide
EHFRDYTQY

SEQ ID NO: 35578 - protein, 9 aa, Artificial Sequence
  Description of Artificial Sequence: Synthetic peptide
EHFRSYTQY

SEQ ID NO: 35579 - protein, 9 aa, Artificial Sequence
  Description of Artificial Sequence: Synthetic peptide
EHWLRRNIW

SEQ ID NO: 35580 - protein, 9 aa, Artificial Sequence
  Description of Artificial Sequence: Synthetic peptide
EIIPQFAYF

SEQ ID NO: 35581 - protein, 9 aa, Artificial Sequence
  Description of Artificial Sequence: Synthetic peptide
EINREVREN

SEQ ID NO: 35582 - protein, 9 aa, Artificial Sequence
  Description of Artificial Sequence: Synthetic peptide
EINRVVRQN

SEQ ID NO: 35583 - protein, 9 aa, Artificial Sequence
  Description of Artificial Sequence: Synthetic peptide
EISREVRQN

SEQ ID NO: 35584 - protein, 9 aa, Artificial Sequence
  Description of Artificial Sequence: Synthetic peptide
EKELKNSTQ

SEQ ID NO: 35585 - protein, 9 aa, Artificial Sequence
  Description of Artificial Sequence: Synthetic peptide
ELIYKFKTD

SEQ ID NO: 35586 - protein, 9 aa, Artificial Sequence
  Description of Artificial Sequence: Synthetic peptide
ELIYKIETD

SEQ ID NO: 35587 - protein, 9 aa, Artificial Sequence
  Description of Artificial Sequence: Synthetic peptide
ELIYKMKTD

SEQ ID NO: 35588 - protein, 9 aa, Artificial Sequence
  Description of Artificial Sequence: Synthetic peptide
ELVNKTYVI

SEQ ID NO: 35589 - protein, 9 aa, Artificial Sequence
  Description of Artificial Sequence: Synthetic peptide
ELVYKIKTD

SEQ ID NO: 35590 - protein, 9 aa, Artificial Sequence
  Description of Artificial Sequence: Synthetic peptide
EMINACFQT

SEQ ID NO: 35591 - protein, 9 aa, Artificial Sequence
  Description of Artificial Sequence: Synthetic peptide
EMKCIGAAI

SEQ ID NO: 35592 - protein, 9 aa, Artificial Sequence
  Description of Artificial Sequence: Synthetic peptide
EMKCMGAGI

SEQ ID NO: 35593 - protein, 9 aa, Artificial Sequence
  Description of Artificial Sequence: Synthetic peptide
EMKCTGAGI

SEQ ID NO: 35594 - protein, 9 aa, Artificial Sequence
  Description of Artificial Sequence: Synthetic peptide
EMKWLGAGI

SEQ ID NO: 35595 - protein, 9 aa, Artificial Sequence
  Description of Artificial Sequence: Synthetic peptide
EMKYIGAGI

SEQ ID NO: 35596 - protein, 9 aa, Artificial Sequence
  Description of Artificial Sequence: Synthetic peptide
EMWIGGIWG

SEQ ID NO: 35597 - protein, 9 aa, Artificial Sequence
  Description of Artificial Sequence: Synthetic peptide
EMWIRGVWG

SEQ ID NO: 35598 - protein, 9 aa, Artificial Sequence
  Description of Artificial Sequence: Synthetic peptide
EMWVRGVWG

SEQ ID NO: 35599 - protein, 9 aa, Artificial Sequence
  Description of Artificial Sequence: Synthetic peptide
EQEIKNSTQ

SEQ ID NO: 35600 - protein, 9 aa, Artificial Sequence
  Description of Artificial Sequence: Synthetic peptide
EQELKDSTQ

SEQ ID NO: 35601 - protein, 9 aa, Artificial Sequence
  Description of Artificial Sequence: Synthetic peptide
EQELKNSTL

SEQ ID NO: 35602 - protein, 9 aa, Artificial Sequence
  Description of Artificial Sequence: Synthetic peptide
EQELKTSTQ

SEQ ID NO: 35603 - protein, 9 aa, Artificial Sequence
  Description of Artificial Sequence: Synthetic peptide
EQEVKNSTQ

SEQ ID NO: 35604 - protein, 9 aa, Artificial Sequence
  Description of Artificial Sequence: Synthetic peptide
EQQLKNSTQ

SEQ ID NO: 35605 - protein, 9 aa, Artificial Sequence
  Description of Artificial Sequence: Synthetic peptide
ERFRAYTQY

SEQ ID NO: 35606 - protein, 9 aa, Artificial Sequence
  Description of Artificial Sequence: Synthetic peptide
ETFHNTATI

SEQ ID NO: 35607 - protein, 9 aa, Artificial Sequence
  Description of Artificial Sequence: Synthetic peptide
ETWVHYDMY

SEQ ID NO: 35608 - protein, 9 aa, Artificial Sequence
  Description of Artificial Sequence: Synthetic peptide
EYGTKVKMD

SEQ ID NO: 35609 - protein, 9 aa, Artificial Sequence
  Description of Artificial Sequence: Synthetic peptide
EYSTKVKMD

SEQ ID NO: 35610 - protein, 9 aa, Artificial Sequence
  Description of Artificial Sequence: Synthetic peptide
EYVTKVKMD

SEQ ID NO: 35611 - protein, 9 aa, Artificial Sequence
  Description of Artificial Sequence: Synthetic peptide
FAEASITRW

SEQ ID NO: 35612 - protein, 9 aa, Artificial Sequence
  Description of Artificial Sequence: Synthetic peptide
FASAFANTD

SEQ ID NO: 35613 - protein, 9 aa, Artificial Sequence
  Description of Artificial Sequence: Synthetic peptide
FASAFSNSD

SEQ ID NO: 35614 - protein, 9 aa, Artificial Sequence
  Description of Artificial Sequence: Synthetic peptide
FASAFVNSD

SEQ ID NO: 35615 - protein, 9 aa, Artificial Sequence
  Description of Artificial Sequence: Synthetic peptide
FASVFANSD

SEQ ID NO: 35616 - protein, 9 aa, Artificial Sequence
  Description of Artificial Sequence: Synthetic peptide
FCMEWEVMD

SEQ ID NO: 35617 - protein, 9 aa, Artificial Sequence
  Description of Artificial Sequence: Synthetic peptide
FFMAWEVMD

SEQ ID NO: 35618 - protein, 9 aa, Artificial Sequence
  Description of Artificial Sequence: Synthetic peptide
FFMDWEVMD

SEQ ID NO: 35619 - protein, 9 aa, Artificial Sequence
  Description of Artificial Sequence: Synthetic peptide
FFMEWEGMD

SEQ ID NO: 35620 - protein, 9 aa, Artificial Sequence
  Description of Artificial Sequence: Synthetic peptide
FFMEWELMD

SEQ ID NO: 35621 - protein, 9 aa, Artificial Sequence
  Description of Artificial Sequence: Synthetic peptide
FFMEWEVKD

SEQ ID NO: 35622 - protein, 9 aa, Artificial Sequence
  Description of Artificial Sequence: Synthetic peptide
FFMEWEVRD

SEQ ID NO: 35623 - protein, 9 aa, Artificial Sequence
  Description of Artificial Sequence: Synthetic peptide
FFMEWEVTD

SEQ ID NO: 35624 - protein, 9 aa, Artificial Sequence
  Description of Artificial Sequence: Synthetic peptide
FFMEWEVVD

SEQ ID NO: 35625 - protein, 9 aa, Artificial Sequence
  Description of Artificial Sequence: Synthetic peptide
FFMEWKVMD

SEQ ID NO: 35626 - protein, 9 aa, Artificial Sequence
  Description of Artificial Sequence: Synthetic peptide
FFMEWQVMD

SEQ ID NO: 35627 - protein, 9 aa, Artificial Sequence
  Description of Artificial Sequence: Synthetic peptide
FFYECYSNK

SEQ ID NO: 35628 - protein, 9 aa, Artificial Sequence
  Description of Artificial Sequence: Synthetic peptide
FIIGCMLIW

SEQ ID NO: 35629 - protein, 9 aa, Artificial Sequence
  Description of Artificial Sequence: Synthetic peptide
FIIHCMLIW

SEQ ID NO: 35630 - protein, 9 aa, Artificial Sequence
  Description of Artificial Sequence: Synthetic peptide
FIIRAMLIW

SEQ ID NO: 35631 - protein, 9 aa, Artificial Sequence
  Description of Artificial Sequence: Synthetic peptide
FIIRCMLIL

SEQ ID NO: 35632 - protein, 9 aa, Artificial Sequence
  Description of Artificial Sequence: Synthetic peptide
FIIRCMLVW

SEQ ID NO: 35633 - protein, 9 aa, Artificial Sequence
  Description of Artificial Sequence: Synthetic peptide
FIIRCMVIW

SEQ ID NO: 35634 - protein, 9 aa, Artificial Sequence
  Description of Artificial Sequence: Synthetic peptide
FIIRCVLIW

SEQ ID NO: 35635 - protein, 9 aa, Artificial Sequence
  Description of Artificial Sequence: Synthetic peptide
FIIRCVLVW

SEQ ID NO: 35636 - protein, 9 aa, Artificial Sequence
  Description of Artificial Sequence: Synthetic peptide
FIIRGMLIW

SEQ ID NO: 35637 - protein, 9 aa, Artificial Sequence
  Description of Artificial Sequence: Synthetic peptide
FIIRWMLIW

SEQ ID NO: 35638 - protein, 9 aa, Artificial Sequence
  Description of Artificial Sequence: Synthetic peptide
FILRCLLIW

SEQ ID NO: 35639 - protein, 9 aa, Artificial Sequence
  Description of Artificial Sequence: Synthetic peptide
FILRCMLIC

SEQ ID NO: 35640 - protein, 9 aa, Artificial Sequence
  Description of Artificial Sequence: Synthetic peptide
FILRCMLIW

SEQ ID NO: 35641 - protein, 9 aa, Artificial Sequence
  Description of Artificial Sequence: Synthetic peptide
FIVGGLAFA

SEQ ID NO: 35642 - protein, 9 aa, Artificial Sequence
  Description of Artificial Sequence: Synthetic peptide
FIVRCMLIW

SEQ ID NO: 35643 - protein, 9 aa, Artificial Sequence
  Description of Artificial Sequence: Synthetic peptide
FKFISYIGD

SEQ ID NO: 35644 - protein, 9 aa, Artificial Sequence
  Description of Artificial Sequence: Synthetic peptide
FKHWYINMH

SEQ ID NO: 35645 - protein, 9 aa, Artificial Sequence
  Description of Artificial Sequence: Synthetic peptide
FKICFSPTV

SEQ ID NO: 35646 - protein, 9 aa, Artificial Sequence
  Description of Artificial Sequence: Synthetic peptide
FKNGYINMH

SEQ ID NO: 35647 - protein, 9 aa, Artificial Sequence
  Description of Artificial Sequence: Synthetic peptide
FKNHYEGGP

SEQ ID NO: 35648 - protein, 9 aa, Artificial Sequence
  Description of Artificial Sequence: Synthetic peptide
FKNLYINMH

SEQ ID NO: 35649 - protein, 9 aa, Artificial Sequence
  Description of Artificial Sequence: Synthetic peptide
FKNWFINMH

SEQ ID NO: 35650 - protein, 9 aa, Artificial Sequence
  Description of Artificial Sequence: Synthetic peptide
FKNWHINMH

SEQ ID NO: 35651 - protein, 9 aa, Artificial Sequence
  Description of Artificial Sequence: Synthetic peptide
FKNWSINMH

SEQ ID NO: 35652 - protein, 9 aa, Artificial Sequence
  Description of Artificial Sequence: Synthetic peptide
FKNWYIHMH

SEQ ID NO: 35653 - protein, 9 aa, Artificial Sequence
  Description of Artificial Sequence: Synthetic peptide
FKNWYINMD

SEQ ID NO: 35654 - protein, 9 aa, Artificial Sequence
  Description of Artificial Sequence: Synthetic peptide
FKNWYINMF

SEQ ID NO: 35655 - protein, 9 aa, Artificial Sequence
  Description of Artificial Sequence: Synthetic peptide
FKNWYINML

SEQ ID NO: 35656 - protein, 9 aa, Artificial Sequence
  Description of Artificial Sequence: Synthetic peptide
FKNWYINMN

SEQ ID NO: 35657 - protein, 9 aa, Artificial Sequence
  Description of Artificial Sequence: Synthetic peptide
FKNWYINMP

SEQ ID NO: 35658 - protein, 9 aa, Artificial Sequence
  Description of Artificial Sequence: Synthetic peptide
FKNWYINMR

SEQ ID NO: 35659 - protein, 9 aa, Artificial Sequence
  Description of Artificial Sequence: Synthetic peptide
FKNWYINMY

SEQ ID NO: 35660 - protein, 9 aa, Artificial Sequence
  Description of Artificial Sequence: Synthetic peptide
FKNWYINRH

SEQ ID NO: 35661 - protein, 9 aa, Artificial Sequence
  Description of Artificial Sequence: Synthetic peptide
FKNWYINTH

SEQ ID NO: 35662 - protein, 9 aa, Artificial Sequence
  Description of Artificial Sequence: Synthetic peptide
FKNWYINVH

SEQ ID NO: 35663 - protein, 9 aa, Artificial Sequence
  Description of Artificial Sequence: Synthetic peptide
FKNWYISMH

SEQ ID NO: 35664 - protein, 9 aa, Artificial Sequence
  Description of Artificial Sequence: Synthetic peptide
FKNWYLHMH

SEQ ID NO: 35665 - protein, 9 aa, Artificial Sequence
  Description of Artificial Sequence: Synthetic peptide
FKNWYNNMH

SEQ ID NO: 35666 - protein, 9 aa, Artificial Sequence
  Description of Artificial Sequence: Synthetic peptide
FKNWYVNMH

SEQ ID NO: 35667 - protein, 9 aa, Artificial Sequence
  Description of Artificial Sequence: Synthetic peptide
FKSWYINMH

SEQ ID NO: 35668 - protein, 9 aa, Artificial Sequence
  Description of Artificial Sequence: Synthetic peptide
FKVGGLAFA

SEQ ID NO: 35669 - protein, 9 aa, Artificial Sequence
  Description of Artificial Sequence: Synthetic peptide
FKYWYINMH

SEQ ID NO: 35670 - protein, 9 aa, Artificial Sequence
  Description of Artificial Sequence: Synthetic peptide
FLIRCMLIW

SEQ ID NO: 35671 - protein, 9 aa, Artificial Sequence
  Description of Artificial Sequence: Synthetic peptide
FMIRCMLIW

SEQ ID NO: 35672 - protein, 9 aa, Artificial Sequence
  Description of Artificial Sequence: Synthetic peptide
FPEASLTRW

SEQ ID NO: 35673 - protein, 9 aa, Artificial Sequence
  Description of Artificial Sequence: Synthetic peptide
FQNWYINMH

SEQ ID NO: 35674 - protein, 9 aa, Artificial Sequence
  Description of Artificial Sequence: Synthetic peptide
FRNWYINMH

SEQ ID NO: 35675 - protein, 9 aa, Artificial Sequence
  Description of Artificial Sequence: Synthetic peptide
FRNWYMNMH

SEQ ID NO: 35676 - protein, 9 aa, Artificial Sequence
  Description of Artificial Sequence: Synthetic peptide
FTFGGLAFA

SEQ ID NO: 35677 - protein, 9 aa, Artificial Sequence
  Description of Artificial Sequence: Synthetic peptide
FTIGGLAFA

SEQ ID NO: 35678 - protein, 9 aa, Artificial Sequence
  Description of Artificial Sequence: Synthetic peptide
FTNTKKQAF

SEQ ID NO: 35679 - protein, 9 aa, Artificial Sequence
  Description of Artificial Sequence: Synthetic peptide
FTNWYINMD

SEQ ID NO: 35680 - protein, 9 aa, Artificial Sequence
  Description of Artificial Sequence: Synthetic peptide
FTNWYINMH

SEQ ID NO: 35681 - protein, 9 aa, Artificial Sequence
  Description of Artificial Sequence: Synthetic peptide
FTNWYINMN

SEQ ID NO: 35682 - protein, 9 aa, Artificial Sequence
  Description of Artificial Sequence: Synthetic peptide
FTVAGLAFA

SEQ ID NO: 35683 - protein, 9 aa, Artificial Sequence
  Description of Artificial Sequence: Synthetic peptide
FTVGGLAFG

SEQ ID NO: 35684 - protein, 9 aa, Artificial Sequence
  Description of Artificial Sequence: Synthetic peptide
FTVGGLAFP

SEQ ID NO: 35685 - protein, 9 aa, Artificial Sequence
  Description of Artificial Sequence: Synthetic peptide
FTVGGLAFT

SEQ ID NO: 35686 - protein, 9 aa, Artificial Sequence
  Description of Artificial Sequence: Synthetic peptide
FTVGGLAFV

SEQ ID NO: 35687 - protein, 9 aa, Artificial Sequence
  Description of Artificial Sequence: Synthetic peptide
FTVGGLGFA

SEQ ID NO: 35688 - protein, 9 aa, Artificial Sequence
  Description of Artificial Sequence: Synthetic peptide
FTVGGLSFA

SEQ ID NO: 35689 - protein, 9 aa, Artificial Sequence
  Description of Artificial Sequence: Synthetic peptide
FTVGGLTFA

SEQ ID NO: 35690 - protein, 9 aa, Artificial Sequence
  Description of Artificial Sequence: Synthetic peptide
FTVGGMAFA

SEQ ID NO: 35691 - protein, 9 aa, Artificial Sequence
  Description of Artificial Sequence: Synthetic peptide
FWCHIIGIY

SEQ ID NO: 35692 - protein, 9 aa, Artificial Sequence
  Description of Artificial Sequence: Synthetic peptide
FWCNIIGIY

SEQ ID NO: 35693 - protein, 9 aa, Artificial Sequence
  Description of Artificial Sequence: Synthetic peptide
FWGNIIGIY

SEQ ID NO: 35694 - protein, 9 aa, Artificial Sequence
  Description of Artificial Sequence: Synthetic peptide
FWSNFIGIY

SEQ ID NO: 35695 - protein, 9 aa, Artificial Sequence
  Description of Artificial Sequence: Synthetic peptide
FWSNIIGFY

SEQ ID NO: 35696 - protein, 9 aa, Artificial Sequence
  Description of Artificial Sequence: Synthetic peptide
FWSNIIGIC

SEQ ID NO: 35697 - protein, 9 aa, Artificial Sequence
  Description of Artificial Sequence: Synthetic peptide
FWSNIIGIH

SEQ ID NO: 35698 - protein, 9 aa, Artificial Sequence
  Description of Artificial Sequence: Synthetic peptide
FWSNIIGIN

SEQ ID NO: 35699 - protein, 9 aa, Artificial Sequence
  Description of Artificial Sequence: Synthetic peptide
FWSNIIGLY

SEQ ID NO: 35700 - protein, 9 aa, Artificial Sequence
  Description of Artificial Sequence: Synthetic peptide
FWSNIIGMY

SEQ ID NO: 35701 - protein, 9 aa, Artificial Sequence
  Description of Artificial Sequence: Synthetic peptide
FWSNIIGVY

SEQ ID NO: 35702 - protein, 9 aa, Artificial Sequence
  Description of Artificial Sequence: Synthetic peptide
FWSNIMGIY

SEQ ID NO: 35703 - protein, 9 aa, Artificial Sequence
  Description of Artificial Sequence: Synthetic peptide
FWSNLIGIY

SEQ ID NO: 35704 - protein, 9 aa, Artificial Sequence
  Description of Artificial Sequence: Synthetic peptide
FWSNMIGIY

SEQ ID NO: 35705 - protein, 9 aa, Artificial Sequence
  Description of Artificial Sequence: Synthetic peptide
FWSNVIGIY

SEQ ID NO: 35706 - protein, 9 aa, Artificial Sequence
  Description of Artificial Sequence: Synthetic peptide
FWSSIIGIY

SEQ ID NO: 35707 - protein, 9 aa, Artificial Sequence
  Description of Artificial Sequence: Synthetic peptide
FWSTIIGIY

SEQ ID NO: 35708 - protein, 9 aa, Artificial Sequence
  Description of Artificial Sequence: Synthetic peptide
FWTNIIGIY

SEQ ID NO: 35709 - protein, 9 aa, Artificial Sequence
  Description of Artificial Sequence: Synthetic peptide
FYMEWEVMD

SEQ ID NO: 35710 - protein, 9 aa, Artificial Sequence
  Description of Artificial Sequence: Synthetic peptide
GCYWWLNWF

SEQ ID NO: 35711 - protein, 9 aa, Artificial Sequence
  Description of Artificial Sequence: Synthetic peptide
GDEYYDIMG

SEQ ID NO: 35712 - protein, 9 aa, Artificial Sequence
  Description of Artificial Sequence: Synthetic peptide
GDHTENFSD

SEQ ID NO: 35713 - protein, 9 aa, Artificial Sequence
  Description of Artificial Sequence: Synthetic peptide
GEFRPKISR

SEQ ID NO: 35714 - protein, 9 aa, Artificial Sequence
  Description of Artificial Sequence: Synthetic peptide
GFIQQSNQD

SEQ ID NO: 35715 - protein, 9 aa, Artificial Sequence
  Description of Artificial Sequence: Synthetic peptide
GHVMTVPCA

SEQ ID NO: 35716 - protein, 9 aa, Artificial Sequence
  Description of Artificial Sequence: Synthetic peptide
GIKYKDILS

SEQ ID NO: 35717 - protein, 9 aa, Artificial Sequence
  Description of Artificial Sequence: Synthetic peptide
GINREVRQN

SEQ ID NO: 35718 - protein, 9 aa, Artificial Sequence
  Description of Artificial Sequence: Synthetic peptide
GKNVFEEHV

SEQ ID NO: 35719 - protein, 9 aa, Artificial Sequence
  Description of Artificial Sequence: Synthetic peptide
GQGNKTYVI

SEQ ID NO: 35720 - protein, 9 aa, Artificial Sequence
  Description of Artificial Sequence: Synthetic peptide
GSASRNQRD

SEQ ID NO: 35721 - protein, 9 aa, Artificial Sequence
  Description of Artificial Sequence: Synthetic peptide
GSSPGKGWM

SEQ ID NO: 35722 - protein, 9 aa, Artificial Sequence
  Description of Artificial Sequence: Synthetic peptide
GSSSRNQRD

SEQ ID NO: 35723 - protein, 9 aa, Artificial Sequence
  Description of Artificial Sequence: Synthetic peptide
GTWVHYDMF

SEQ ID NO: 35724 - protein, 9 aa, Artificial Sequence
  Description of Artificial Sequence: Synthetic peptide
GWAEFRMRV

SEQ ID NO: 35725 - protein, 9 aa, Artificial Sequence
  Description of Artificial Sequence: Synthetic peptide
GWAEFRVRV

SEQ ID NO: 35726 - protein, 9 aa, Artificial Sequence
  Description of Artificial Sequence: Synthetic peptide
GWSEFRMRV

SEQ ID NO: 35727 - protein, 9 aa, Artificial Sequence
  Description of Artificial Sequence: Synthetic peptide
HPVNKTYVI

SEQ ID NO: 35728 - protein, 9 aa, Artificial Sequence
  Description of Artificial Sequence: Synthetic peptide
HQGNKTYVI

SEQ ID NO: 35729 - protein, 9 aa, Artificial Sequence
  Description of Artificial Sequence: Synthetic peptide
HRFQEKGSR

SEQ ID NO: 35730 - protein, 9 aa, Artificial Sequence
  Description of Artificial Sequence: Synthetic peptide
HRFQEKGTH

SEQ ID NO: 35731 - protein, 9 aa, Artificial Sequence
  Description of Artificial Sequence: Synthetic peptide
HRFREKGSH

SEQ ID NO: 35732 - protein, 9 aa, Artificial Sequence
  Description of Artificial Sequence: Synthetic peptide
HTLLWYGIW

SEQ ID NO: 35733 - protein, 9 aa, Artificial Sequence
  Description of Artificial Sequence: Synthetic peptide
HTLLWYGIY

SEQ ID NO: 35734 - protein, 9 aa, Artificial Sequence
  Description of Artificial Sequence: Synthetic peptide
HVYCCPEAI

SEQ ID NO: 35735 - protein, 9 aa, Artificial Sequence
  Description of Artificial Sequence: Synthetic peptide
ICHCCMAWG

SEQ ID NO: 35736 - protein, 9 aa, Artificial Sequence
  Description of Artificial Sequence: Synthetic peptide
ICHCCMVWG

SEQ ID NO: 35737 - protein, 9 aa, Artificial Sequence
  Description of Artificial Sequence: Synthetic peptide
ICHCCMYWG

SEQ ID NO: 35738 - protein, 9 aa, Artificial Sequence
  Description of Artificial Sequence: Synthetic peptide
ICHWCMDWG

SEQ ID NO: 35739 - protein, 9 aa, Artificial Sequence
  Description of Artificial Sequence: Synthetic peptide
ICYCCMDWG

SEQ ID NO: 35740 - protein, 9 aa, Artificial Sequence
  Description of Artificial Sequence: Synthetic peptide
ICYWWLNCF

SEQ ID NO: 35741 - protein, 9 aa, Artificial Sequence
  Description of Artificial Sequence: Synthetic peptide
ICYWWLNWF

SEQ ID NO: 35742 - protein, 9 aa, Artificial Sequence
  Description of Artificial Sequence: Synthetic peptide
IDRWWVIDV

SEQ ID NO: 35743 - protein, 9 aa, Artificial Sequence
  Description of Artificial Sequence: Synthetic peptide
IHIGTNSYA

SEQ ID NO: 35744 - protein, 9 aa, Artificial Sequence
  Description of Artificial Sequence: Synthetic peptide
IHTATNSYA

SEQ ID NO: 35745 - protein, 9 aa, Artificial Sequence
  Description of Artificial Sequence: Synthetic peptide
IHTGTNSYV

SEQ ID NO: 35746 - protein, 9 aa, Artificial Sequence
  Description of Artificial Sequence: Synthetic peptide
IIYECYSNK

SEQ ID NO: 35747 - protein, 9 aa, Artificial Sequence
  Description of Artificial Sequence: Synthetic peptide
IKHIAAESR

SEQ ID NO: 35748 - protein, 9 aa, Artificial Sequence
  Description of Artificial Sequence: Synthetic peptide
IKHIATETR

SEQ ID NO: 35749 - protein, 9 aa, Artificial Sequence
  Description of Artificial Sequence: Synthetic peptide
IKHISTESR

SEQ ID NO: 35750 - protein, 9 aa, Artificial Sequence
  Description of Artificial Sequence: Synthetic peptide
IKNWYINMH

SEQ ID NO: 35751 - protein, 9 aa, Artificial Sequence
  Description of Artificial Sequence: Synthetic peptide
IKNWYINMP

SEQ ID NO: 35752 - protein, 9 aa, Artificial Sequence
  Description of Artificial Sequence: Synthetic peptide
IKSQTLTDC

SEQ ID NO: 35753 - protein, 9 aa, Artificial Sequence
  Description of Artificial Sequence: Synthetic peptide
IMFHCREMG

SEQ ID NO: 35754 - protein, 9 aa, Artificial Sequence
  Description of Artificial Sequence: Synthetic peptide
IMVHCRQMG

SEQ ID NO: 35755 - protein, 9 aa, Artificial Sequence
  Description of Artificial Sequence: Synthetic peptide
IMVHCRVMG

SEQ ID NO: 35756 - protein, 9 aa, Artificial Sequence
  Description of Artificial Sequence: Synthetic peptide
IRNMFEQYT

SEQ ID NO: 35757 - protein, 9 aa, Artificial Sequence
  Description of Artificial Sequence: Synthetic peptide
IRSHTLTYC

SEQ ID NO: 35758 - protein, 9 aa, Artificial Sequence
  Description of Artificial Sequence: Synthetic peptide
IRSQTITDC

SEQ ID NO: 35759 - protein, 9 aa, Artificial Sequence
  Description of Artificial Sequence: Synthetic peptide
IRSQTLTDW

SEQ ID NO: 35760 - protein, 9 aa, Artificial Sequence
  Description of Artificial Sequence: Synthetic peptide
IRSQTLTDY

SEQ ID NO: 35761 - protein, 9 aa, Artificial Sequence
  Description of Artificial Sequence: Synthetic peptide
IRSQTLTNC

SEQ ID NO: 35762 - protein, 9 aa, Artificial Sequence
  Description of Artificial Sequence: Synthetic peptide
IRSQTVTDC

SEQ ID NO: 35763 - protein, 9 aa, Artificial Sequence
  Description of Artificial Sequence: Synthetic peptide
IRSRTLTDC

SEQ ID NO: 35764 - protein, 9 aa, Artificial Sequence
  Description of Artificial Sequence: Synthetic peptide
IRWLRLHKK

SEQ ID NO: 35765 - protein, 9 aa, Artificial Sequence
  Description of Artificial Sequence: Synthetic peptide
ISWIIRADI

SEQ ID NO: 35766 - protein, 9 aa, Artificial Sequence
  Description of Artificial Sequence: Synthetic peptide
ISWINRADI

SEQ ID NO: 35767 - protein, 9 aa, Artificial Sequence
  Description of Artificial Sequence: Synthetic peptide
ISWITRADV

SEQ ID NO: 35768 - protein, 9 aa, Artificial Sequence
  Description of Artificial Sequence: Synthetic peptide
ISWITRAGI

SEQ ID NO: 35769 - protein, 9 aa, Artificial Sequence
  Description of Artificial Sequence: Synthetic peptide
ISWITRTDI

SEQ ID NO: 35770 - protein, 9 aa, Artificial Sequence
  Description of Artificial Sequence: Synthetic peptide
ITSQTLTDC

SEQ ID NO: 35771 - protein, 9 aa, Artificial Sequence
  Description of Artificial Sequence: Synthetic peptide
ITWLHYDMY

SEQ ID NO: 35772 - protein, 9 aa, Artificial Sequence
  Description of Artificial Sequence: Synthetic peptide
IWFYMEKMP

SEQ ID NO: 35773 - protein, 9 aa, Artificial Sequence
  Description of Artificial Sequence: Synthetic peptide
IWSNIIGIY

SEQ ID NO: 35774 - protein, 9 aa, Artificial Sequence
  Description of Artificial Sequence: Synthetic peptide
IWYWWLNWF

SEQ ID NO: 35775 - protein, 9 aa, Artificial Sequence
  Description of Artificial Sequence: Synthetic peptide
KAVWDPSSM

SEQ ID NO: 35776 - protein, 9 aa, Artificial Sequence
  Description of Artificial Sequence: Synthetic peptide
KCWDCHDAG

SEQ ID NO: 35777 - protein, 9 aa, Artificial Sequence
  Description of Artificial Sequence: Synthetic peptide
KCWDCHEGG

SEQ ID NO: 35778 - protein, 9 aa, Artificial Sequence
  Description of Artificial Sequence: Synthetic peptide
KEDFGWKHV

SEQ ID NO: 35779 - protein, 9 aa, Artificial Sequence
  Description of Artificial Sequence: Synthetic peptide
KESRSQTGD

SEQ ID NO: 35780 - protein, 9 aa, Artificial Sequence
  Description of Artificial Sequence: Synthetic peptide
KEVFGWKHM

SEQ ID NO: 35781 - protein, 9 aa, Artificial Sequence
  Description of Artificial Sequence: Synthetic peptide
KGVWDPGSM

SEQ ID NO: 35782 - protein, 9 aa, Artificial Sequence
  Description of Artificial Sequence: Synthetic peptide
KGVWDPSST

SEQ ID NO: 35783 - protein, 9 aa, Artificial Sequence
  Description of Artificial Sequence: Synthetic peptide
KHIGSYTQF

SEQ ID NO: 35784 - protein, 9 aa, Artificial Sequence
  Description of Artificial Sequence: Synthetic peptide
KHNMLYHMD

SEQ ID NO: 35785 - protein, 9 aa, Artificial Sequence
  Description of Artificial Sequence: Synthetic peptide
KHYKWGHGQ

SEQ ID NO: 35786 - protein, 9 aa, Artificial Sequence
  Description of Artificial Sequence: Synthetic peptide
KINREVRQN

SEQ ID NO: 35787 - protein, 9 aa, Artificial Sequence
  Description of Artificial Sequence: Synthetic peptide
KKWSCHRGH

SEQ ID NO: 35788 - protein, 9 aa, Artificial Sequence
  Description of Artificial Sequence: Synthetic peptide
KKYQDTHTF

SEQ ID NO: 35789 - protein, 9 aa, Artificial Sequence
  Description of Artificial Sequence: Synthetic peptide
KMWIRGIWG

SEQ ID NO: 35790 - protein, 9 aa, Artificial Sequence
  Description of Artificial Sequence: Synthetic peptide
KRIKMPPPR

SEQ ID NO: 35791 - protein, 9 aa, Artificial Sequence
  Description of Artificial Sequence: Synthetic peptide
KRIKMPPTK

SEQ ID NO: 35792 - protein, 9 aa, Artificial Sequence
  Description of Artificial Sequence: Synthetic peptide
KWHAGPGVV

SEQ ID NO: 35793 - protein, 9 aa, Artificial Sequence
  Description of Artificial Sequence: Synthetic peptide
KWHCGPGVV

SEQ ID NO: 35794 - protein, 9 aa, Artificial Sequence
  Description of Artificial Sequence: Synthetic peptide
KWHGGPGAV

SEQ ID NO: 35795 - protein, 9 aa, Artificial Sequence
  Description of Artificial Sequence: Synthetic peptide
KWHGGPGDV

SEQ ID NO: 35796 - protein, 9 aa, Artificial Sequence
  Description of Artificial Sequence: Synthetic peptide
KWHGGPGFV

SEQ ID NO: 35797 - protein, 9 aa, Artificial Sequence
  Description of Artificial Sequence: Synthetic peptide
KWHGGPGVM

SEQ ID NO: 35798 - protein, 9 aa, Artificial Sequence
  Description of Artificial Sequence: Synthetic peptide
KWHGGQGVV

SEQ ID NO: 35799 - protein, 9 aa, Artificial Sequence
  Description of Artificial Sequence: Synthetic peptide
KWHGGRGVV

SEQ ID NO: 35800 - protein, 9 aa, Artificial Sequence
  Description of Artificial Sequence: Synthetic peptide
KWLGGPGVV

SEQ ID NO: 35801 - protein, 9 aa, Artificial Sequence
  Description of Artificial Sequence: Synthetic peptide
KWLYGWPIK

SEQ ID NO: 35802 - protein, 9 aa, Artificial Sequence
  Description of Artificial Sequence: Synthetic peptide
KWYGGPGVV

SEQ ID NO: 35803 - protein, 9 aa, Artificial Sequence
  Description of Artificial Sequence: Synthetic peptide
KYNMMYHMD

SEQ ID NO: 35804 - protein, 9 aa, Artificial Sequence
  Description of Artificial Sequence: Synthetic peptide
KYNMRYHMD

SEQ ID NO: 35805 - protein, 9 aa, Artificial Sequence
  Description of Artificial Sequence: Synthetic peptide
KYNMVYHMD

SEQ ID NO: 35806 - protein, 9 aa, Artificial Sequence
  Description of Artificial Sequence: Synthetic peptide
KYNVLYHMD

SEQ ID NO: 35807 - protein, 9 aa, Artificial Sequence
  Description of Artificial Sequence: Synthetic peptide
KYSMLYHMD

SEQ ID NO: 35808 - protein, 9 aa, Artificial Sequence
  Description of Artificial Sequence: Synthetic peptide
LATMSLTWW

SEQ ID NO: 35809 - protein, 9 aa, Artificial Sequence
  Description of Artificial Sequence: Synthetic peptide
LCYWWLNWF

SEQ ID NO: 35810 - protein, 9 aa, Artificial Sequence
  Description of Artificial Sequence: Synthetic peptide
LEKWGHMHT

SEQ ID NO: 35811 - protein, 9 aa, Artificial Sequence
  Description of Artificial Sequence: Synthetic peptide
LKICFGPTV

SEQ ID NO: 35812 - protein, 9 aa, Artificial Sequence
  Description of Artificial Sequence: Synthetic peptide
LKIGFSPTV

SEQ ID NO: 35813 - protein, 9 aa, Artificial Sequence
  Description of Artificial Sequence: Synthetic peptide
LPEIYLSFC

SEQ ID NO: 35814 - protein, 9 aa, Artificial Sequence
  Description of Artificial Sequence: Synthetic peptide
LPKRYLSFC

SEQ ID NO: 35815 - protein, 9 aa, Artificial Sequence
  Description of Artificial Sequence: Synthetic peptide
LPQIYLSFC

SEQ ID NO: 35816 - protein, 9 aa, Artificial Sequence
  Description of Artificial Sequence: Synthetic peptide
LPTIYLSFC

SEQ ID NO: 35817 - protein, 9 aa, Artificial Sequence
  Description of Artificial Sequence: Synthetic peptide
LQICFSPTV

SEQ ID NO: 35818 - protein, 9 aa, Artificial Sequence
  Description of Artificial Sequence: Synthetic peptide
LRICFSPTV

SEQ ID NO: 35819 - protein, 9 aa, Artificial Sequence
  Description of Artificial Sequence: Synthetic peptide
LRWVRLHKK

SEQ ID NO: 35820 - protein, 9 aa, Artificial Sequence
  Description of Artificial Sequence: Synthetic peptide
LSKIYLSFC

SEQ ID NO: 35821 - protein, 9 aa, Artificial Sequence
  Description of Artificial Sequence: Synthetic peptide
LSSCYYTTY

SEQ ID NO: 35822 - protein, 9 aa, Artificial Sequence
  Description of Artificial Sequence: Synthetic peptide
LSWITRADI

SEQ ID NO: 35823 - protein, 9 aa, Artificial Sequence
  Description of Artificial Sequence: Synthetic peptide
LVFLRGQHY

SEQ ID NO: 35824 - protein, 9 aa, Artificial Sequence
  Description of Artificial Sequence: Synthetic peptide
LWFYMEEMP

SEQ ID NO: 35825 - protein, 9 aa, Artificial Sequence
  Description of Artificial Sequence: Synthetic peptide
LWFYMEKMP

SEQ ID NO: 35826 - protein, 9 aa, Artificial Sequence
  Description of Artificial Sequence: Synthetic peptide
LWSNMIGIY

SEQ ID NO: 35827 - protein, 9 aa, Artificial Sequence
  Description of Artificial Sequence: Synthetic peptide
MFRIEAVCP

SEQ ID NO: 35828 - protein, 9 aa, Artificial Sequence
  Description of Artificial Sequence: Synthetic peptide
MKFQDTHTF

SEQ ID NO: 35829 - protein, 9 aa, Artificial Sequence
  Description of Artificial Sequence: Synthetic peptide
MKRDAAFCA

SEQ ID NO: 35830 - protein, 9 aa, Artificial Sequence
  Description of Artificial Sequence: Synthetic peptide
MKREAAVCA

SEQ ID NO: 35831 - protein, 9 aa, Artificial Sequence
  Description of Artificial Sequence: Synthetic peptide
MKRETAFCP

SEQ ID NO: 35832 - protein, 9 aa, Artificial Sequence
  Description of Artificial Sequence: Synthetic peptide
MKRETAFCS

SEQ ID NO: 35833 - protein, 9 aa, Artificial Sequence
  Description of Artificial Sequence: Synthetic peptide
MKRETAFCT

SEQ ID NO: 35834 - protein, 9 aa, Artificial Sequence
  Description of Artificial Sequence: Synthetic peptide
MKRETAVCA

SEQ ID NO: 35835 - protein, 9 aa, Artificial Sequence
  Description of Artificial Sequence: Synthetic peptide
MKRETGFCA

SEQ ID NO: 35836 - protein, 9 aa, Artificial Sequence
  Description of Artificial Sequence: Synthetic peptide
MKYKDTHTF

SEQ ID NO: 35837 - protein, 9 aa, Artificial Sequence
  Description of Artificial Sequence: Synthetic peptide
MKYQDTHTC

SEQ ID NO: 35838 - protein, 9 aa, Artificial Sequence
  Description of Artificial Sequence: Synthetic peptide
MKYQDTHTI

SEQ ID NO: 35839 - protein, 9 aa, Artificial Sequence
  Description of Artificial Sequence: Synthetic peptide
MKYWDTHTF

SEQ ID NO: 35840 - protein, 9 aa, Artificial Sequence
  Description of Artificial Sequence: Synthetic peptide
MYFFVWRFM

SEQ ID NO: 35841 - protein, 9 aa, Artificial Sequence
  Description of Artificial Sequence: Synthetic peptide
MYIFGWRFM

SEQ ID NO: 35842 - protein, 9 aa, Artificial Sequence
  Description of Artificial Sequence: Synthetic peptide
MYIFVWGFM

SEQ ID NO: 35843 - protein, 9 aa, Artificial Sequence
  Description of Artificial Sequence: Synthetic peptide
MYIFVWRFT

SEQ ID NO: 35844 - protein, 9 aa, Artificial Sequence
  Description of Artificial Sequence: Synthetic peptide
MYIFVWRIM

SEQ ID NO: 35845 - protein, 9 aa, Artificial Sequence
  Description of Artificial Sequence: Synthetic peptide
MYIFVWRVM

SEQ ID NO: 35846 - protein, 9 aa, Artificial Sequence
  Description of Artificial Sequence: Synthetic peptide
MYIFYWRFM

SEQ ID NO: 35847 - protein, 9 aa, Artificial Sequence
  Description of Artificial Sequence: Synthetic peptide
MYIIVWRFM

SEQ ID NO: 35848 - protein, 9 aa, Artificial Sequence
  Description of Artificial Sequence: Synthetic peptide
MYISVWRFM

SEQ ID NO: 35849 - protein, 9 aa, Artificial Sequence
  Description of Artificial Sequence: Synthetic peptide
MYIVVWRFM

SEQ ID NO: 35850 - protein, 9 aa, Artificial Sequence
  Description of Artificial Sequence: Synthetic peptide
MYIYFWRFM

SEQ ID NO: 35851 - protein, 9 aa, Artificial Sequence
  Description of Artificial Sequence: Synthetic peptide
MYIYVWRFM

SEQ ID NO: 35852 - protein, 9 aa, Artificial Sequence
  Description of Artificial Sequence: Synthetic peptide
MYLFVWRFM

SEQ ID NO: 35853 - protein, 9 aa, Artificial Sequence
  Description of Artificial Sequence: Synthetic peptide
NANDVQWYD

SEQ ID NO: 35854 - protein, 9 aa, Artificial Sequence
  Description of Artificial Sequence: Synthetic peptide
NAPDVQWYD

SEQ ID NO: 35855 - protein, 9 aa, Artificial Sequence
  Description of Artificial Sequence: Synthetic peptide
NATDFQWYD

SEQ ID NO: 35856 - protein, 9 aa, Artificial Sequence
  Description of Artificial Sequence: Synthetic peptide
NATDGQWHD

SEQ ID NO: 35857 - protein, 9 aa, Artificial Sequence
  Description of Artificial Sequence: Synthetic peptide
NATDVEWYD

SEQ ID NO: 35858 - protein, 9 aa, Artificial Sequence
  Description of Artificial Sequence: Synthetic peptide
NATDVKWYD

SEQ ID NO: 35859 - protein, 9 aa, Artificial Sequence
  Description of Artificial Sequence: Synthetic peptide
NATDVLWYD

SEQ ID NO: 35860 - protein, 9 aa, Artificial Sequence
  Description of Artificial Sequence: Synthetic peptide
NATDVRWYD

SEQ ID NO: 35861 - protein, 9 aa, Artificial Sequence
  Description of Artificial Sequence: Synthetic peptide
NCDRSLAEY

SEQ ID NO: 35862 - protein, 9 aa, Artificial Sequence
  Description of Artificial Sequence: Synthetic peptide
NCHIDRVQD

SEQ ID NO: 35863 - protein, 9 aa, Artificial Sequence
  Description of Artificial Sequence: Synthetic peptide
NCHVDHVQD

SEQ ID NO: 35864 - protein, 9 aa, Artificial Sequence
  Description of Artificial Sequence: Synthetic peptide
NCKNLTYYI

SEQ ID NO: 35865 - protein, 9 aa, Artificial Sequence
  Description of Artificial Sequence: Synthetic peptide
NFIPDWSST

SEQ ID NO: 35866 - protein, 9 aa, Artificial Sequence
  Description of Artificial Sequence: Synthetic peptide
NFWYSMAFP

SEQ ID NO: 35867 - protein, 9 aa, Artificial Sequence
  Description of Artificial Sequence: Synthetic peptide
NIDAHERYR

SEQ ID NO: 35868 - protein, 9 aa, Artificial Sequence
  Description of Artificial Sequence: Synthetic peptide
NKNVFEEHV

SEQ ID NO: 35869 - protein, 9 aa, Artificial Sequence
  Description of Artificial Sequence: Synthetic peptide
NLCRHLFQC

SEQ ID NO: 35870 - protein, 9 aa, Artificial Sequence
  Description of Artificial Sequence: Synthetic peptide
NLCRHLFQF

SEQ ID NO: 35871 - protein, 9 aa, Artificial Sequence
  Description of Artificial Sequence: Synthetic peptide
NNYKFQQDG

SEQ ID NO: 35872 - protein, 9 aa, Artificial Sequence
  Description of Artificial Sequence: Synthetic peptide
NNYKGQQDG

SEQ ID NO: 35873 - protein, 9 aa, Artificial Sequence
  Description of Artificial Sequence: Synthetic peptide
NNYKLQQDG

SEQ ID NO: 35874 - protein, 9 aa, Artificial Sequence
  Description of Artificial Sequence: Synthetic peptide
NNYKVQEDG

SEQ ID NO: 35875 - protein, 9 aa, Artificial Sequence
  Description of Artificial Sequence: Synthetic peptide
NPAYGRGHI

SEQ ID NO: 35876 - protein, 9 aa, Artificial Sequence
  Description of Artificial Sequence: Synthetic peptide
NPELGKCEI

SEQ ID NO: 35877 - protein, 9 aa, Artificial Sequence
  Description of Artificial Sequence: Synthetic peptide
NPGWRYMWF

SEQ ID NO: 35878 - protein, 9 aa, Artificial Sequence
  Description of Artificial Sequence: Synthetic peptide
NPGWRYMWW

SEQ ID NO: 35879 - protein, 9 aa, Artificial Sequence
  Description of Artificial Sequence: Synthetic peptide
NQAYGRGHI

SEQ ID NO: 35880 - protein, 9 aa, Artificial Sequence
  Description of Artificial Sequence: Synthetic peptide
NQVNKTYVI

SEQ ID NO: 35881 - protein, 9 aa, Artificial Sequence
  Description of Artificial Sequence: Synthetic peptide
NRAYGRGHV

SEQ ID NO: 35882 - protein, 9 aa, Artificial Sequence
  Description of Artificial Sequence: Synthetic peptide
NSWITRADI

SEQ ID NO: 35883 - protein, 9 aa, Artificial Sequence
  Description of Artificial Sequence: Synthetic peptide
NSWRHICDH

SEQ ID NO: 35884 - protein, 9 aa, Artificial Sequence
  Description of Artificial Sequence: Synthetic peptide
NVAAHERYR

SEQ ID NO: 35885 - protein, 9 aa, Artificial Sequence
  Description of Artificial Sequence: Synthetic peptide
NVCRHLFQF

SEQ ID NO: 35886 - protein, 9 aa, Artificial Sequence
  Description of Artificial Sequence: Synthetic peptide
NVDAHERYK

SEQ ID NO: 35887 - protein, 9 aa, Artificial Sequence
  Description of Artificial Sequence: Synthetic peptide
NVDAPERYR

SEQ ID NO: 35888 - protein, 9 aa, Artificial Sequence
  Description of Artificial Sequence: Synthetic peptide
NVDVHERYR

SEQ ID NO: 35889 - protein, 9 aa, Artificial Sequence
  Description of Artificial Sequence: Synthetic peptide
NVGAHERYR

SEQ ID NO: 35890 - protein, 9 aa, Artificial Sequence
  Description of Artificial Sequence: Synthetic peptide
NVYYCPEAI

SEQ ID NO: 35891 - protein, 9 aa, Artificial Sequence
  Description of Artificial Sequence: Synthetic peptide
NWCKHLFQF

SEQ ID NO: 35892 - protein, 9 aa, Artificial Sequence
  Description of Artificial Sequence: Synthetic peptide
NWCRDLFQF

SEQ ID NO: 35893 - protein, 9 aa, Artificial Sequence
  Description of Artificial Sequence: Synthetic peptide
NWCRHLFEC

SEQ ID NO: 35894 - protein, 9 aa, Artificial Sequence
  Description of Artificial Sequence: Synthetic peptide
NWCRHLFEF

SEQ ID NO: 35895 - protein, 9 aa, Artificial Sequence
  Description of Artificial Sequence: Synthetic peptide
NWCRHLFKF

SEQ ID NO: 35896 - protein, 9 aa, Artificial Sequence
  Description of Artificial Sequence: Synthetic peptide
NWCRHLFKY

SEQ ID NO: 35897 - protein, 9 aa, Artificial Sequence
  Description of Artificial Sequence: Synthetic peptide
NWCRHLFQC

SEQ ID NO: 35898 - protein, 9 aa, Artificial Sequence
  Description of Artificial Sequence: Synthetic peptide
NWCRHLFQI

SEQ ID NO: 35899 - protein, 9 aa, Artificial Sequence
  Description of Artificial Sequence: Synthetic peptide
NWCRHLFQV

SEQ ID NO: 35900 - protein, 9 aa, Artificial Sequence
  Description of Artificial Sequence: Synthetic peptide
NWCRHLFQY

SEQ ID NO: 35901 - protein, 9 aa, Artificial Sequence
  Description of Artificial Sequence: Synthetic peptide
NWCRHLFRF

SEQ ID NO: 35902 - protein, 9 aa, Artificial Sequence
  Description of Artificial Sequence: Synthetic peptide
NWCRHLIQF

SEQ ID NO: 35903 - protein, 9 aa, Artificial Sequence
  Description of Artificial Sequence: Synthetic peptide
NWCRHLVQF

SEQ ID NO: 35904 - protein, 9 aa, Artificial Sequence
  Description of Artificial Sequence: Synthetic peptide
NWCRHRFQF

SEQ ID NO: 35905 - protein, 9 aa, Artificial Sequence
  Description of Artificial Sequence: Synthetic peptide
NWCRILFQF

SEQ ID NO: 35906 - protein, 9 aa, Artificial Sequence
  Description of Artificial Sequence: Synthetic peptide
NWCRLLFQF

SEQ ID NO: 35907 - protein, 9 aa, Artificial Sequence
  Description of Artificial Sequence: Synthetic peptide
NWCRNLFQF

SEQ ID NO: 35908 - protein, 9 aa, Artificial Sequence
  Description of Artificial Sequence: Synthetic peptide
NWCRQLFQV

SEQ ID NO: 35909 - protein, 9 aa, Artificial Sequence
  Description of Artificial Sequence: Synthetic peptide
NWCRVLFHF

SEQ ID NO: 35910 - protein, 9 aa, Artificial Sequence
  Description of Artificial Sequence: Synthetic peptide
NWFRHLFQF

SEQ ID NO: 35911 - protein, 9 aa, Artificial Sequence
  Description of Artificial Sequence: Synthetic peptide
NWGRHLFQF

SEQ ID NO: 35912 - protein, 9 aa, Artificial Sequence
  Description of Artificial Sequence: Synthetic peptide
NWWRHLFQF

SEQ ID NO: 35913 - protein, 9 aa, Artificial Sequence
  Description of Artificial Sequence: Synthetic peptide
NYAQHYRTW

SEQ ID NO: 35914 - protein, 9 aa, Artificial Sequence
  Description of Artificial Sequence: Synthetic peptide
NYSQYYRTW

SEQ ID NO: 35915 - protein, 9 aa, Artificial Sequence
  Description of Artificial Sequence: Synthetic peptide
PADRTISMW

SEQ ID NO: 35916 - protein, 9 aa, Artificial Sequence
  Description of Artificial Sequence: Synthetic peptide
PDDRTISMW

SEQ ID NO: 35917 - protein, 9 aa, Artificial Sequence
  Description of Artificial Sequence: Synthetic peptide
PGDRTISKW

SEQ ID NO: 35918 - protein, 9 aa, Artificial Sequence
  Description of Artificial Sequence: Synthetic peptide
PGDRTITMW

SEQ ID NO: 35919 - protein, 9 aa, Artificial Sequence
  Description of Artificial Sequence: Synthetic peptide
PGDRTLSMW

SEQ ID NO: 35920 - protein, 9 aa, Artificial Sequence
  Description of Artificial Sequence: Synthetic peptide
PGNRTISMW

SEQ ID NO: 35921 - protein, 9 aa, Artificial Sequence
  Description of Artificial Sequence: Synthetic peptide
PHKWFCEDS

SEQ ID NO: 35922 - protein, 9 aa, Artificial Sequence
  Description of Artificial Sequence: Synthetic peptide
PPDIGTQFI

SEQ ID NO: 35923 - protein, 9 aa, Artificial Sequence
  Description of Artificial Sequence: Synthetic peptide
PPHIGTEFI

SEQ ID NO: 35924 - protein, 9 aa, Artificial Sequence
  Description of Artificial Sequence: Synthetic peptide
PPHIGTKFI

SEQ ID NO: 35925 - protein, 9 aa, Artificial Sequence
  Description of Artificial Sequence: Synthetic peptide
PPHLGTQFI

SEQ ID NO: 35926 - protein, 9 aa, Artificial Sequence
  Description of Artificial Sequence: Synthetic peptide
PPHMGTQFI

SEQ ID NO: 35927 - protein, 9 aa, Artificial Sequence
  Description of Artificial Sequence: Synthetic peptide
PPHTGTQFI

SEQ ID NO: 35928 - protein, 9 aa, Artificial Sequence
  Description of Artificial Sequence: Synthetic peptide
PPLIGTQFI

SEQ ID NO: 35929 - protein, 9 aa, Artificial Sequence
  Description of Artificial Sequence: Synthetic peptide
PRFQEKGSH

SEQ ID NO: 35930 - protein, 9 aa, Artificial Sequence
  Description of Artificial Sequence: Synthetic peptide
PRHIGTQFI

SEQ ID NO: 35931 - protein, 9 aa, Artificial Sequence
  Description of Artificial Sequence: Synthetic peptide
PWFYLEKMP

SEQ ID NO: 35932 - protein, 9 aa, Artificial Sequence
  Description of Artificial Sequence: Synthetic peptide
PWFYMEEMP

SEQ ID NO: 35933 - protein, 9 aa, Artificial Sequence
  Description of Artificial Sequence: Synthetic peptide
QCLLFLVGI

SEQ ID NO: 35934 - protein, 9 aa, Artificial Sequence
  Description of Artificial Sequence: Synthetic peptide
QEKWGHKHT

SEQ ID NO: 35935 - protein, 9 aa, Artificial Sequence
  Description of Artificial Sequence: Synthetic peptide
QEKWGHMHA

SEQ ID NO: 35936 - protein, 9 aa, Artificial Sequence
  Description of Artificial Sequence: Synthetic peptide
QEKWGHVHT

SEQ ID NO: 35937 - protein, 9 aa, Artificial Sequence
  Description of Artificial Sequence: Synthetic peptide
QTIIGNVWV

SEQ ID NO: 35938 - protein, 9 aa, Artificial Sequence
  Description of Artificial Sequence: Synthetic peptide
QWFYMEKMP

SEQ ID NO: 35939 - protein, 9 aa, Artificial Sequence
  Description of Artificial Sequence: Synthetic peptide
RAHWSDIAD

SEQ ID NO: 35940 - protein, 9 aa, Artificial Sequence
  Description of Artificial Sequence: Synthetic peptide
RAPADWACA

SEQ ID NO: 35941 - protein, 9 aa, Artificial Sequence
  Description of Artificial Sequence: Synthetic peptide
RDGSNWLCI

SEQ ID NO: 35942 - protein, 9 aa, Artificial Sequence
  Description of Artificial Sequence: Synthetic peptide
RDPADWACG

SEQ ID NO: 35943 - protein, 9 aa, Artificial Sequence
  Description of Artificial Sequence: Synthetic peptide
RDPADWACS

SEQ ID NO: 35944 - protein, 9 aa, Artificial Sequence
  Description of Artificial Sequence: Synthetic peptide
RDPADWTCA

SEQ ID NO: 35945 - protein, 9 aa, Artificial Sequence
  Description of Artificial Sequence: Synthetic peptide
RDPADWVCA

SEQ ID NO: 35946 - protein, 9 aa, Artificial Sequence
  Description of Artificial Sequence: Synthetic peptide
RDPSDWACA

SEQ ID NO: 35947 - protein, 9 aa, Artificial Sequence
  Description of Artificial Sequence: Synthetic peptide
RDPTDWACA

SEQ ID NO: 35948 - protein, 9 aa, Artificial Sequence
  Description of Artificial Sequence: Synthetic peptide
RDTADWACA

SEQ ID NO: 35949 - protein, 9 aa, Artificial Sequence
  Description of Artificial Sequence: Synthetic peptide
REDFGWKHM

SEQ ID NO: 35950 - protein, 9 aa, Artificial Sequence
  Description of Artificial Sequence: Synthetic peptide
RHIGSYTQF

SEQ ID NO: 35951 - protein, 9 aa, Artificial Sequence
  Description of Artificial Sequence: Synthetic peptide
RHIHRYWEC

SEQ ID NO: 35952 - protein, 9 aa, Artificial Sequence
  Description of Artificial Sequence: Synthetic peptide
RHKWFCEAS

SEQ ID NO: 35953 - protein, 9 aa, Artificial Sequence
  Description of Artificial Sequence: Synthetic peptide
RHPADWACA

SEQ ID NO: 35954 - protein, 9 aa, Artificial Sequence
  Description of Artificial Sequence: Synthetic peptide
RHVHPYWEC

SEQ ID NO: 35955 - protein, 9 aa, Artificial Sequence
  Description of Artificial Sequence: Synthetic peptide
RHVHQYWEC

SEQ ID NO: 35956 - protein, 9 aa, Artificial Sequence
  Description of Artificial Sequence: Synthetic peptide
RHVHRFWEC

SEQ ID NO: 35957 - protein, 9 aa, Artificial Sequence
  Description of Artificial Sequence: Synthetic peptide
RHVHRYWVC

SEQ ID NO: 35958 - protein, 9 aa, Artificial Sequence
  Description of Artificial Sequence: Synthetic peptide
RIMHSWYND

SEQ ID NO: 35959 - protein, 9 aa, Artificial Sequence
  Description of Artificial Sequence: Synthetic peptide
RKEQDHWDK

SEQ ID NO: 35960 - protein, 9 aa, Artificial Sequence
  Description of Artificial Sequence: Synthetic peptide
RKVESYCIT

SEQ ID NO: 35961 - protein, 9 aa, Artificial Sequence
  Description of Artificial Sequence: Synthetic peptide
RKWSCHRAH

SEQ ID NO: 35962 - protein, 9 aa, Artificial Sequence
  Description of Artificial Sequence: Synthetic peptide
RKWSCHRCH

SEQ ID NO: 35963 - protein, 9 aa, Artificial Sequence
  Description of Artificial Sequence: Synthetic peptide
RKWSCHRGL

SEQ ID NO: 35964 - protein, 9 aa, Artificial Sequence
  Description of Artificial Sequence: Synthetic peptide
RKWSCHRGY

SEQ ID NO: 35965 - protein, 9 aa, Artificial Sequence
  Description of Artificial Sequence: Synthetic peptide
RKWSCHRVH

SEQ ID NO: 35966 - protein, 9 aa, Artificial Sequence
  Description of Artificial Sequence: Synthetic peptide
RKWSCNRGH

SEQ ID NO: 35967 - protein, 9 aa, Artificial Sequence
  Description of Artificial Sequence: Synthetic peptide
RKWYCHRGH

SEQ ID NO: 35968 - protein, 9 aa, Artificial Sequence
  Description of Artificial Sequence: Synthetic peptide
RPHIGTQFI

SEQ ID NO: 35969 - protein, 9 aa, Artificial Sequence
  Description of Artificial Sequence: Synthetic peptide
RPVQEDGCG

SEQ ID NO: 35970 - protein, 9 aa, Artificial Sequence
  Description of Artificial Sequence: Synthetic peptide
RQNDTHRAN

SEQ ID NO: 35971 - protein, 9 aa, Artificial Sequence
  Description of Artificial Sequence: Synthetic peptide
RQVQRYWEC

SEQ ID NO: 35972 - protein, 9 aa, Artificial Sequence
  Description of Artificial Sequence: Synthetic peptide
RQWSCHRGH

SEQ ID NO: 35973 - protein, 9 aa, Artificial Sequence
  Description of Artificial Sequence: Synthetic peptide
RRFQEKGSH

SEQ ID NO: 35974 - protein, 9 aa, Artificial Sequence
  Description of Artificial Sequence: Synthetic peptide
RRIESYCIT

SEQ ID NO: 35975 - protein, 9 aa, Artificial Sequence
  Description of Artificial Sequence: Synthetic peptide
RRIKMPPPK

SEQ ID NO: 35976 - protein, 9 aa, Artificial Sequence
  Description of Artificial Sequence: Synthetic peptide
RTVKEDGCG

SEQ ID NO: 35977 - protein, 9 aa, Artificial Sequence
  Description of Artificial Sequence: Synthetic peptide
RVPADWACA

SEQ ID NO: 35978 - protein, 9 aa, Artificial Sequence
  Description of Artificial Sequence: Synthetic peptide
RWSYMKAGK

SEQ ID NO: 35979 - protein, 9 aa, Artificial Sequence
  Description of Artificial Sequence: Synthetic peptide
RWSYMQAGI

SEQ ID NO: 35980 - protein, 9 aa, Artificial Sequence
  Description of Artificial Sequence: Synthetic peptide
RWSYMQTGK

SEQ ID NO: 35981 - protein, 9 aa, Artificial Sequence
  Description of Artificial Sequence: Synthetic peptide
RWSYMQVGK

SEQ ID NO: 35982 - protein, 9 aa, Artificial Sequence
  Description of Artificial Sequence: Synthetic peptide
RWSYMRAGK

SEQ ID NO: 35983 - protein, 9 aa, Artificial Sequence
  Description of Artificial Sequence: Synthetic peptide
RYIFVWRLM

SEQ ID NO: 35984 - protein, 9 aa, Artificial Sequence
  Description of Artificial Sequence: Synthetic peptide
RYNMLYHMD

SEQ ID NO: 35985 - protein, 9 aa, Artificial Sequence
  Description of Artificial Sequence: Synthetic peptide
RYPADWACA

SEQ ID NO: 35986 - protein, 9 aa, Artificial Sequence
  Description of Artificial Sequence: Synthetic peptide
SAAWQFGES

SEQ ID NO: 35987 - protein, 9 aa, Artificial Sequence
  Description of Artificial Sequence: Synthetic peptide
SAAWQFGVS

SEQ ID NO: 35988 - protein, 9 aa, Artificial Sequence
  Description of Artificial Sequence: Synthetic peptide
SDDMCNYYG

SEQ ID NO: 35989 - protein, 9 aa, Artificial Sequence
  Description of Artificial Sequence: Synthetic peptide
SDMIKLAEI

SEQ ID NO: 35990 - protein, 9 aa, Artificial Sequence
  Description of Artificial Sequence: Synthetic peptide
SGADHYHLK

SEQ ID NO: 35991 - protein, 9 aa, Artificial Sequence
  Description of Artificial Sequence: Synthetic peptide
SGFYMEMMP

SEQ ID NO: 35992 - protein, 9 aa, Artificial Sequence
  Description of Artificial Sequence: Synthetic peptide
SGFYMEQMP

SEQ ID NO: 35993 - protein, 9 aa, Artificial Sequence
  Description of Artificial Sequence: Synthetic peptide
SGFYMERMP

SEQ ID NO: 35994 - protein, 9 aa, Artificial Sequence
  Description of Artificial Sequence: Synthetic peptide
SHKWFCEDS

SEQ ID NO: 35995 - protein, 9 aa, Artificial Sequence
  Description of Artificial Sequence: Synthetic peptide
SHYWPMCWS

SEQ ID NO: 35996 - protein, 9 aa, Artificial Sequence
  Description of Artificial Sequence: Synthetic peptide
SLFYMDKMP

SEQ ID NO: 35997 - protein, 9 aa, Artificial Sequence
  Description of Artificial Sequence: Synthetic peptide
SLFYMEKML

SEQ ID NO: 35998 - protein, 9 aa, Artificial Sequence
  Description of Artificial Sequence: Synthetic peptide
SLFYMEKMP

SEQ ID NO: 35999 - protein, 9 aa, Artificial Sequence
  Description of Artificial Sequence: Synthetic peptide
SLLRFQPSI

SEQ ID NO: 36000 - protein, 9 aa, Artificial Sequence
  Description of Artificial Sequence: Synthetic peptide
SLMLFLPSI

SEQ ID NO: 36001 - protein, 9 aa, Artificial Sequence
  Description of Artificial Sequence: Synthetic peptide
SLMRCLPSI

SEQ ID NO: 36002 - protein, 9 aa, Artificial Sequence
  Description of Artificial Sequence: Synthetic peptide
SLMRFLASI

SEQ ID NO: 36003 - protein, 9 aa, Artificial Sequence
  Description of Artificial Sequence: Synthetic peptide
SLMRFLHSI

SEQ ID NO: 36004 - protein, 9 aa, Artificial Sequence
  Description of Artificial Sequence: Synthetic peptide
SLMRFLPAI

SEQ ID NO: 36005 - protein, 9 aa, Artificial Sequence
  Description of Artificial Sequence: Synthetic peptide
SLMRFLPST

SEQ ID NO: 36006 - protein, 9 aa, Artificial Sequence
  Description of Artificial Sequence: Synthetic peptide
SLMRFLPSV

SEQ ID NO: 36007 - protein, 9 aa, Artificial Sequence
  Description of Artificial Sequence: Synthetic peptide
SLMRFLPYI

SEQ ID NO: 36008 - protein, 9 aa, Artificial Sequence
  Description of Artificial Sequence: Synthetic peptide
SLMRFLRSI

SEQ ID NO: 36009 - protein, 9 aa, Artificial Sequence
  Description of Artificial Sequence: Synthetic peptide
SLMRFLSSI

SEQ ID NO: 36010 - protein, 9 aa, Artificial Sequence
  Description of Artificial Sequence: Synthetic peptide
SLMRFLTSI

SEQ ID NO: 36011 - protein, 9 aa, Artificial Sequence
  Description of Artificial Sequence: Synthetic peptide
SLMRFPPSI

SEQ ID NO: 36012 - protein, 9 aa, Artificial Sequence
  Description of Artificial Sequence: Synthetic peptide
SLMRFVPSI

SEQ ID NO: 36013 - protein, 9 aa, Artificial Sequence
  Description of Artificial Sequence: Synthetic peptide
SLMRVLPSI

SEQ ID NO: 36014 - protein, 9 aa, Artificial Sequence
  Description of Artificial Sequence: Synthetic peptide
SLVRFLLSI

SEQ ID NO: 36015 - protein, 9 aa, Artificial Sequence
  Description of Artificial Sequence: Synthetic peptide
SLVRFLPSI

SEQ ID NO: 36016 - protein, 9 aa, Artificial Sequence
  Description of Artificial Sequence: Synthetic peptide
SMHDSNFNV

SEQ ID NO: 36017 - protein, 9 aa, Artificial Sequence
  Description of Artificial Sequence: Synthetic peptide
SMHDYNFNI

SEQ ID NO: 36018 - protein, 9 aa, Artificial Sequence
  Description of Artificial Sequence: Synthetic peptide
SMHDYTFNV

SEQ ID NO: 36019 - protein, 9 aa, Artificial Sequence
  Description of Artificial Sequence: Synthetic peptide
SNDKCNYYG

SEQ ID NO: 36020 - protein, 9 aa, Artificial Sequence
  Description of Artificial Sequence: Synthetic peptide
SNDMCDYYG

SEQ ID NO: 36021 - protein, 9 aa, Artificial Sequence
  Description of Artificial Sequence: Synthetic peptide
SNDMCNHYG

SEQ ID NO: 36022 - protein, 9 aa, Artificial Sequence
  Description of Artificial Sequence: Synthetic peptide
SNDMCNSYG

SEQ ID NO: 36023 - protein, 9 aa, Artificial Sequence
  Description of Artificial Sequence: Synthetic peptide
SNNMCNYYG

SEQ ID NO: 36024 - protein, 9 aa, Artificial Sequence
  Description of Artificial Sequence: Synthetic peptide
SPYWLMRMG

SEQ ID NO: 36025 - protein, 9 aa, Artificial Sequence
  Description of Artificial Sequence: Synthetic peptide
SQDCGRPEI

SEQ ID NO: 36026 - protein, 9 aa, Artificial Sequence
  Description of Artificial Sequence: Synthetic peptide
SRMRFLPSI

SEQ ID NO: 36027 - protein, 9 aa, Artificial Sequence
  Description of Artificial Sequence: Synthetic peptide
SRMRLLPSI

SEQ ID NO: 36028 - protein, 9 aa, Artificial Sequence
  Description of Artificial Sequence: Synthetic peptide
SSASVNHTS

SEQ ID NO: 36029 - protein, 9 aa, Artificial Sequence
  Description of Artificial Sequence: Synthetic peptide
SSDMCNYYG

SEQ ID NO: 36030 - protein, 9 aa, Artificial Sequence
  Description of Artificial Sequence: Synthetic peptide
SSFYMEKMP

SEQ ID NO: 36031 - protein, 9 aa, Artificial Sequence
  Description of Artificial Sequence: Synthetic peptide
SSSPGKGWK

SEQ ID NO: 36032 - protein, 9 aa, Artificial Sequence
  Description of Artificial Sequence: Synthetic peptide
SSWITRADI

SEQ ID NO: 36033 - protein, 9 aa, Artificial Sequence
  Description of Artificial Sequence: Synthetic peptide
STDMCNYYG

SEQ ID NO: 36034 - protein, 9 aa, Artificial Sequence
  Description of Artificial Sequence: Synthetic peptide
SVADHYHRK

SEQ ID NO: 36035 - protein, 9 aa, Artificial Sequence
  Description of Artificial Sequence: Synthetic peptide
SVADHYNLK

SEQ ID NO: 36036 - protein, 9 aa, Artificial Sequence
  Description of Artificial Sequence: Synthetic peptide
SVADYYHLK

SEQ ID NO: 36037 - protein, 9 aa, Artificial Sequence
  Description of Artificial Sequence: Synthetic peptide
SVAHHYHLK

SEQ ID NO: 36038 - protein, 9 aa, Artificial Sequence
  Description of Artificial Sequence: Synthetic peptide
SVARQMHSW

SEQ ID NO: 36039 - protein, 9 aa, Artificial Sequence
  Description of Artificial Sequence: Synthetic peptide
SVMRFLPSI

SEQ ID NO: 36040 - protein, 9 aa, Artificial Sequence
  Description of Artificial Sequence: Synthetic peptide
SVSDHYHLK

SEQ ID NO: 36041 - protein, 9 aa, Artificial Sequence
  Description of Artificial Sequence: Synthetic peptide
SWCFMEKMP

SEQ ID NO: 36042 - protein, 9 aa, Artificial Sequence
  Description of Artificial Sequence: Synthetic peptide
SWCRHLFEF

SEQ ID NO: 36043 - protein, 9 aa, Artificial Sequence
  Description of Artificial Sequence: Synthetic peptide
SWCRHLFQF

SEQ ID NO: 36044 - protein, 9 aa, Artificial Sequence
  Description of Artificial Sequence: Synthetic peptide
SWCYIEKMP

SEQ ID NO: 36045 - protein, 9 aa, Artificial Sequence
  Description of Artificial Sequence: Synthetic peptide
SWCYMEEMP

SEQ ID NO: 36046 - protein, 9 aa, Artificial Sequence
  Description of Artificial Sequence: Synthetic peptide
SWCYMEQMP

SEQ ID NO: 36047 - protein, 9 aa, Artificial Sequence
  Description of Artificial Sequence: Synthetic peptide
SWCYMVKMP

SEQ ID NO: 36048 - protein, 9 aa, Artificial Sequence
  Description of Artificial Sequence: Synthetic peptide
SWFCVEKMP

SEQ ID NO: 36049 - protein, 9 aa, Artificial Sequence
  Description of Artificial Sequence: Synthetic peptide
SWFDMEKMP

SEQ ID NO: 36050 - protein, 9 aa, Artificial Sequence
  Description of Artificial Sequence: Synthetic peptide
SWFFMEKMP

SEQ ID NO: 36051 - protein, 9 aa, Artificial Sequence
  Description of Artificial Sequence: Synthetic peptide
SWFFMVKMP

SEQ ID NO: 36052 - protein, 9 aa, Artificial Sequence
  Description of Artificial Sequence: Synthetic peptide
SWFFVEKMP

SEQ ID NO: 36053 - protein, 9 aa, Artificial Sequence
  Description of Artificial Sequence: Synthetic peptide
SWFHMEKMP

SEQ ID NO: 36054 - protein, 9 aa, Artificial Sequence
  Description of Artificial Sequence: Synthetic peptide
SWFHMEKMQ

SEQ ID NO: 36055 - protein, 9 aa, Artificial Sequence
  Description of Artificial Sequence: Synthetic peptide
SWFNMEQMP

SEQ ID NO: 36056 - protein, 9 aa, Artificial Sequence
  Description of Artificial Sequence: Synthetic peptide
SWFSKEKMP

SEQ ID NO: 36057 - protein, 9 aa, Artificial Sequence
  Description of Artificial Sequence: Synthetic peptide
SWFSVEKMP

SEQ ID NO: 36058 - protein, 9 aa, Artificial Sequence
  Description of Artificial Sequence: Synthetic peptide
SWFYIERMP

SEQ ID NO: 36059 - protein, 9 aa, Artificial Sequence
  Description of Artificial Sequence: Synthetic peptide
SWFYKETMP

SEQ ID NO: 36060 - protein, 9 aa, Artificial Sequence
  Description of Artificial Sequence: Synthetic peptide
SWFYMAQMP

SEQ ID NO: 36061 - protein, 9 aa, Artificial Sequence
  Description of Artificial Sequence: Synthetic peptide
SWFYMDKMT

SEQ ID NO: 36062 - protein, 9 aa, Artificial Sequence
  Description of Artificial Sequence: Synthetic peptide
SWFYMDMMP

SEQ ID NO: 36063 - protein, 9 aa, Artificial Sequence
  Description of Artificial Sequence: Synthetic peptide
SWFYMEAMP

SEQ ID NO: 36064 - protein, 9 aa, Artificial Sequence
  Description of Artificial Sequence: Synthetic peptide
SWFYMEDMP

SEQ ID NO: 36065 - protein, 9 aa, Artificial Sequence
  Description of Artificial Sequence: Synthetic peptide
SWFYMEEVP

SEQ ID NO: 36066 - protein, 9 aa, Artificial Sequence
  Description of Artificial Sequence: Synthetic peptide
SWFYMEGMP

SEQ ID NO: 36067 - protein, 9 aa, Artificial Sequence
  Description of Artificial Sequence: Synthetic peptide
SWFYMEKIR

SEQ ID NO: 36068 - protein, 9 aa, Artificial Sequence
  Description of Artificial Sequence: Synthetic peptide
SWFYMEKMA

SEQ ID NO: 36069 - protein, 9 aa, Artificial Sequence
  Description of Artificial Sequence: Synthetic peptide
SWFYMEKMI

SEQ ID NO: 36070 - protein, 9 aa, Artificial Sequence
  Description of Artificial Sequence: Synthetic peptide
SWFYMEKMR

SEQ ID NO: 36071 - protein, 9 aa, Artificial Sequence
  Description of Artificial Sequence: Synthetic peptide
SWFYMEKMT

SEQ ID NO: 36072 - protein, 9 aa, Artificial Sequence
  Description of Artificial Sequence: Synthetic peptide
SWFYMEKRP

SEQ ID NO: 36073 - protein, 9 aa, Artificial Sequence
  Description of Artificial Sequence: Synthetic peptide
SWFYMEKVP

SEQ ID NO: 36074 - protein, 9 aa, Artificial Sequence
  Description of Artificial Sequence: Synthetic peptide
SWFYMEMMP

SEQ ID NO: 36075 - protein, 9 aa, Artificial Sequence
  Description of Artificial Sequence: Synthetic peptide
SWFYMERMP

SEQ ID NO: 36076 - protein, 9 aa, Artificial Sequence
  Description of Artificial Sequence: Synthetic peptide
SWFYMETMP

SEQ ID NO: 36077 - protein, 9 aa, Artificial Sequence
  Description of Artificial Sequence: Synthetic peptide
SWFYMEWMP

SEQ ID NO: 36078 - protein, 9 aa, Artificial Sequence
  Description of Artificial Sequence: Synthetic peptide
SWFYMKKMP

SEQ ID NO: 36079 - protein, 9 aa, Artificial Sequence
  Description of Artificial Sequence: Synthetic peptide
SWFYMQKMP

SEQ ID NO: 36080 - protein, 9 aa, Artificial Sequence
  Description of Artificial Sequence: Synthetic peptide
SWFYMVKMP

SEQ ID NO: 36081 - protein, 9 aa, Artificial Sequence
  Description of Artificial Sequence: Synthetic peptide
SWFYRDKMP

SEQ ID NO: 36082 - protein, 9 aa, Artificial Sequence
  Description of Artificial Sequence: Synthetic peptide
SWFYREKLP

SEQ ID NO: 36083 - protein, 9 aa, Artificial Sequence
  Description of Artificial Sequence: Synthetic peptide
SWFYVEEMP

SEQ ID NO: 36084 - protein, 9 aa, Artificial Sequence
  Description of Artificial Sequence: Synthetic peptide
SWFYVEKIP

SEQ ID NO: 36085 - protein, 9 aa, Artificial Sequence
  Description of Artificial Sequence: Synthetic peptide
SWFYVEKMP

SEQ ID NO: 36086 - protein, 9 aa, Artificial Sequence
  Description of Artificial Sequence: Synthetic peptide
SWIYMDKMP

SEQ ID NO: 36087 - protein, 9 aa, Artificial Sequence
  Description of Artificial Sequence: Synthetic peptide
SWIYMEKMT

SEQ ID NO: 36088 - protein, 9 aa, Artificial Sequence
  Description of Artificial Sequence: Synthetic peptide
SWIYMEQMP

SEQ ID NO: 36089 - protein, 9 aa, Artificial Sequence
  Description of Artificial Sequence: Synthetic peptide
SWTYMEKMP

SEQ ID NO: 36090 - protein, 9 aa, Artificial Sequence
  Description of Artificial Sequence: Synthetic peptide
SWVCMEKMP

SEQ ID NO: 36091 - protein, 9 aa, Artificial Sequence
  Description of Artificial Sequence: Synthetic peptide
SWVYMEKMQ

SEQ ID NO: 36092 - protein, 9 aa, Artificial Sequence
  Description of Artificial Sequence: Synthetic peptide
SWVYMEKMS

SEQ ID NO: 36093 - protein, 9 aa, Artificial Sequence
  Description of Artificial Sequence: Synthetic peptide
SWVYMEMMP

SEQ ID NO: 36094 - protein, 9 aa, Artificial Sequence
  Description of Artificial Sequence: Synthetic peptide
SWVYMEQMP

SEQ ID NO: 36095 - protein, 9 aa, Artificial Sequence
  Description of Artificial Sequence: Synthetic peptide
SWVYMKKMP

SEQ ID NO: 36096 - protein, 9 aa, Artificial Sequence
  Description of Artificial Sequence: Synthetic peptide
SWYCMEKMP

SEQ ID NO: 36097 - protein, 9 aa, Artificial Sequence
  Description of Artificial Sequence: Synthetic peptide
SWYYDERSN

SEQ ID NO: 36098 - protein, 9 aa, Artificial Sequence
  Description of Artificial Sequence: Synthetic peptide
SWYYMEEMP

SEQ ID NO: 36099 - protein, 9 aa, Artificial Sequence
  Description of Artificial Sequence: Synthetic peptide
SWYYMEKMP

SEQ ID NO: 36100 - protein, 9 aa, Artificial Sequence
  Description of Artificial Sequence: Synthetic peptide
TAEKFICFP

SEQ ID NO: 36101 - protein, 9 aa, Artificial Sequence
  Description of Artificial Sequence: Synthetic peptide
TCARSLAEY

SEQ ID NO: 36102 - protein, 9 aa, Artificial Sequence
  Description of Artificial Sequence: Synthetic peptide
TCDRSLAQY

SEQ ID NO: 36103 - protein, 9 aa, Artificial Sequence
  Description of Artificial Sequence: Synthetic peptide
TCDRSLGEY

SEQ ID NO: 36104 - protein, 9 aa, Artificial Sequence
  Description of Artificial Sequence: Synthetic peptide
TCDRSLPEY

SEQ ID NO: 36105 - protein, 9 aa, Artificial Sequence
  Description of Artificial Sequence: Synthetic peptide
TCDRSLTEY

SEQ ID NO: 36106 - protein, 9 aa, Artificial Sequence
  Description of Artificial Sequence: Synthetic peptide
TCDRSLVEY

SEQ ID NO: 36107 - protein, 9 aa, Artificial Sequence
  Description of Artificial Sequence: Synthetic peptide
TCDRTLAEY

SEQ ID NO: 36108 - protein, 9 aa, Artificial Sequence
  Description of Artificial Sequence: Synthetic peptide
TCKNLTYSI

SEQ ID NO: 36109 - protein, 9 aa, Artificial Sequence
  Description of Artificial Sequence: Synthetic peptide
TCKNMTYYI

SEQ ID NO: 36110 - protein, 9 aa, Artificial Sequence
  Description of Artificial Sequence: Synthetic peptide
TCKSLTYYI

SEQ ID NO: 36111 - protein, 9 aa, Artificial Sequence
  Description of Artificial Sequence: Synthetic peptide
TCNRSLAEY

SEQ ID NO: 36112 - protein, 9 aa, Artificial Sequence
  Description of Artificial Sequence: Synthetic peptide
TCRNLTYYI

SEQ ID NO: 36113 - protein, 9 aa, Artificial Sequence
  Description of Artificial Sequence: Synthetic peptide
TCTNLTYYI

SEQ ID NO: 36114 - protein, 9 aa, Artificial Sequence
  Description of Artificial Sequence: Synthetic peptide
TDKWFCVDS

SEQ ID NO: 36115 - protein, 9 aa, Artificial Sequence
  Description of Artificial Sequence: Synthetic peptide
THIASYTQF

SEQ ID NO: 36116 - protein, 9 aa, Artificial Sequence
  Description of Artificial Sequence: Synthetic peptide
THICSYTQF

SEQ ID NO: 36117 - protein, 9 aa, Artificial Sequence
  Description of Artificial Sequence: Synthetic peptide
THIGSYTEF

SEQ ID NO: 36118 - protein, 9 aa, Artificial Sequence
  Description of Artificial Sequence: Synthetic peptide
THIGTYTQF

SEQ ID NO: 36119 - protein, 9 aa, Artificial Sequence
  Description of Artificial Sequence: Synthetic peptide
THIVSYTQF

SEQ ID NO: 36120 - protein, 9 aa, Artificial Sequence
  Description of Artificial Sequence: Synthetic peptide
THKWCCEDS

SEQ ID NO: 36121 - protein, 9 aa, Artificial Sequence
  Description of Artificial Sequence: Synthetic peptide
THKWFCDYS

SEQ ID NO: 36122 - protein, 9 aa, Artificial Sequence
  Description of Artificial Sequence: Synthetic peptide
THKWFCEDC

SEQ ID NO: 36123 - protein, 9 aa, Artificial Sequence
  Description of Artificial Sequence: Synthetic peptide
THKWFCEDI

SEQ ID NO: 36124 - protein, 9 aa, Artificial Sequence
  Description of Artificial Sequence: Synthetic peptide
THKWFCEDN

SEQ ID NO: 36125 - protein, 9 aa, Artificial Sequence
  Description of Artificial Sequence: Synthetic peptide
THKWFCEDT

SEQ ID NO: 36126 - protein, 9 aa, Artificial Sequence
  Description of Artificial Sequence: Synthetic peptide
THKWFCEHS

SEQ ID NO: 36127 - protein, 9 aa, Artificial Sequence
  Description of Artificial Sequence: Synthetic peptide
THKWFCENI

SEQ ID NO: 36128 - protein, 9 aa, Artificial Sequence
  Description of Artificial Sequence: Synthetic peptide
THKWFCENS

SEQ ID NO: 36129 - protein, 9 aa, Artificial Sequence
  Description of Artificial Sequence: Synthetic peptide
THKWFCEVS

SEQ ID NO: 36130 - protein, 9 aa, Artificial Sequence
  Description of Artificial Sequence: Synthetic peptide
THKWFCEYS

SEQ ID NO: 36131 - protein, 9 aa, Artificial Sequence
  Description of Artificial Sequence: Synthetic peptide
THKWFCGDI

SEQ ID NO: 36132 - protein, 9 aa, Artificial Sequence
  Description of Artificial Sequence: Synthetic peptide
THKWFCQDS

SEQ ID NO: 36133 - protein, 9 aa, Artificial Sequence
  Description of Artificial Sequence: Synthetic peptide
THKWFCVDS

SEQ ID NO: 36134 - protein, 9 aa, Artificial Sequence
  Description of Artificial Sequence: Synthetic peptide
THKWICEDI

SEQ ID NO: 36135 - protein, 9 aa, Artificial Sequence
  Description of Artificial Sequence: Synthetic peptide
THKWVCEDS

SEQ ID NO: 36136 - protein, 9 aa, Artificial Sequence
  Description of Artificial Sequence: Synthetic peptide
THRWFCEDS

SEQ ID NO: 36137 - protein, 9 aa, Artificial Sequence
  Description of Artificial Sequence: Synthetic peptide
THRWFCEES

SEQ ID NO: 36138 - protein, 9 aa, Artificial Sequence
  Description of Artificial Sequence: Synthetic peptide
THRWLCEDS

SEQ ID NO: 36139 - protein, 9 aa, Artificial Sequence
  Description of Artificial Sequence: Synthetic peptide
TLMRFLPSI

SEQ ID NO: 36140 - protein, 9 aa, Artificial Sequence
  Description of Artificial Sequence: Synthetic peptide
TPKWFCEDN

SEQ ID NO: 36141 - protein, 9 aa, Artificial Sequence
  Description of Artificial Sequence: Synthetic peptide
TPKWFCEDS

SEQ ID NO: 36142 - protein, 9 aa, Artificial Sequence
  Description of Artificial Sequence: Synthetic peptide
TPKWVCEDS

SEQ ID NO: 36143 - protein, 9 aa, Artificial Sequence
  Description of Artificial Sequence: Synthetic peptide
TRKWFCEDS

SEQ ID NO: 36144 - protein, 9 aa, Artificial Sequence
  Description of Artificial Sequence: Synthetic peptide
TSERFICFP

SEQ ID NO: 36145 - protein, 9 aa, Artificial Sequence
  Description of Artificial Sequence: Synthetic peptide
TTDHFICFP

SEQ ID NO: 36146 - protein, 9 aa, Artificial Sequence
  Description of Artificial Sequence: Synthetic peptide
TTELYICFP

SEQ ID NO: 36147 - protein, 9 aa, Artificial Sequence
  Description of Artificial Sequence: Synthetic peptide
TWCRHLFQF

SEQ ID NO: 36148 - protein, 9 aa, Artificial Sequence
  Description of Artificial Sequence: Synthetic peptide
TWFHMEKMP

SEQ ID NO: 36149 - protein, 9 aa, Artificial Sequence
  Description of Artificial Sequence: Synthetic peptide
TWFYMDKMP

SEQ ID NO: 36150 - protein, 9 aa, Artificial Sequence
  Description of Artificial Sequence: Synthetic peptide
TWFYMEKMP

SEQ ID NO: 36151 - protein, 9 aa, Artificial Sequence
  Description of Artificial Sequence: Synthetic peptide
TWFYMEKMQ

SEQ ID NO: 36152 - protein, 9 aa, Artificial Sequence
  Description of Artificial Sequence: Synthetic peptide
TWFYMEQMP

SEQ ID NO: 36153 - protein, 9 aa, Artificial Sequence
  Description of Artificial Sequence: Synthetic peptide
TWLCGWPIK

SEQ ID NO: 36154 - protein, 9 aa, Artificial Sequence
  Description of Artificial Sequence: Synthetic peptide
TWLFGWPIK

SEQ ID NO: 36155 - protein, 9 aa, Artificial Sequence
  Description of Artificial Sequence: Synthetic peptide
TWLGGCKSV

SEQ ID NO: 36156 - protein, 9 aa, Artificial Sequence
  Description of Artificial Sequence: Synthetic peptide
TWLYGWPFK

SEQ ID NO: 36157 - protein, 9 aa, Artificial Sequence
  Description of Artificial Sequence: Synthetic peptide
TWLYGWPIQ

SEQ ID NO: 36158 - protein, 9 aa, Artificial Sequence
  Description of Artificial Sequence: Synthetic peptide
TWLYGWPIR

SEQ ID NO: 36159 - protein, 9 aa, Artificial Sequence
  Description of Artificial Sequence: Synthetic peptide
TWLYGWPIT

SEQ ID NO: 36160 - protein, 9 aa, Artificial Sequence
  Description of Artificial Sequence: Synthetic peptide
TWLYGWPVK

SEQ ID NO: 36161 - protein, 9 aa, Artificial Sequence
  Description of Artificial Sequence: Synthetic peptide
TWLYGWSIK

SEQ ID NO: 36162 - protein, 9 aa, Artificial Sequence
  Description of Artificial Sequence: Synthetic peptide
TWLYGWTIK

SEQ ID NO: 36163 - protein, 9 aa, Artificial Sequence
  Description of Artificial Sequence: Synthetic peptide
TWMYGWPIK

SEQ ID NO: 36164 - protein, 9 aa, Artificial Sequence
  Description of Artificial Sequence: Synthetic peptide
TWPVGCKSV

SEQ ID NO: 36165 - protein, 9 aa, Artificial Sequence
  Description of Artificial Sequence: Synthetic peptide
TWRGGCKSV

SEQ ID NO: 36166 - protein, 9 aa, Artificial Sequence
  Description of Artificial Sequence: Synthetic peptide
TYAQYYRTW

SEQ ID NO: 36167 - protein, 9 aa, Artificial Sequence
  Description of Artificial Sequence: Synthetic peptide
VAFRPKISR

SEQ ID NO: 36168 - protein, 9 aa, Artificial Sequence
  Description of Artificial Sequence: Synthetic peptide
VCCWWLNWF

SEQ ID NO: 36169 - protein, 9 aa, Artificial Sequence
  Description of Artificial Sequence: Synthetic peptide
VCSWWLNWF

SEQ ID NO: 36170 - protein, 9 aa, Artificial Sequence
  Description of Artificial Sequence: Synthetic peptide
VCYWWLDWF

SEQ ID NO: 36171 - protein, 9 aa, Artificial Sequence
  Description of Artificial Sequence: Synthetic peptide
VCYWWLHWI

SEQ ID NO: 36172 - protein, 9 aa, Artificial Sequence
  Description of Artificial Sequence: Synthetic peptide
VCYWWLIWF

SEQ ID NO: 36173 - protein, 9 aa, Artificial Sequence
  Description of Artificial Sequence: Synthetic peptide
VCYWWLNLF

SEQ ID NO: 36174 - protein, 9 aa, Artificial Sequence
  Description of Artificial Sequence: Synthetic peptide
VCYWWLNWC

SEQ ID NO: 36175 - protein, 9 aa, Artificial Sequence
  Description of Artificial Sequence: Synthetic peptide
VCYWWLNWI

SEQ ID NO: 36176 - protein, 9 aa, Artificial Sequence
  Description of Artificial Sequence: Synthetic peptide
VCYWWLNWY

SEQ ID NO: 36177 - protein, 9 aa, Artificial Sequence
  Description of Artificial Sequence: Synthetic peptide
VCYWWLSWL

SEQ ID NO: 36178 - protein, 9 aa, Artificial Sequence
  Description of Artificial Sequence: Synthetic peptide
VCYWWLTWF

SEQ ID NO: 36179 - protein, 9 aa, Artificial Sequence
  Description of Artificial Sequence: Synthetic peptide
VCYWWMNWF

SEQ ID NO: 36180 - protein, 9 aa, Artificial Sequence
  Description of Artificial Sequence: Synthetic peptide
VEFGPKISR

SEQ ID NO: 36181 - protein, 9 aa, Artificial Sequence
  Description of Artificial Sequence: Synthetic peptide
VEFKPKISR

SEQ ID NO: 36182 - protein, 9 aa, Artificial Sequence
  Description of Artificial Sequence: Synthetic peptide
VEFRHKISR

SEQ ID NO: 36183 - protein, 9 aa, Artificial Sequence
  Description of Artificial Sequence: Synthetic peptide
VEFRPEISR

SEQ ID NO: 36184 - protein, 9 aa, Artificial Sequence
  Description of Artificial Sequence: Synthetic peptide
VEFRPKFSR

SEQ ID NO: 36185 - protein, 9 aa, Artificial Sequence
  Description of Artificial Sequence: Synthetic peptide
VEFRPKLSR

SEQ ID NO: 36186 - protein, 9 aa, Artificial Sequence
  Description of Artificial Sequence: Synthetic peptide
VEFRPKMSR

SEQ ID NO: 36187 - protein, 9 aa, Artificial Sequence
  Description of Artificial Sequence: Synthetic peptide
VEFRPKTSR

SEQ ID NO: 36188 - protein, 9 aa, Artificial Sequence
  Description of Artificial Sequence: Synthetic peptide
VEFRPKVSR

SEQ ID NO: 36189 - protein, 9 aa, Artificial Sequence
  Description of Artificial Sequence: Synthetic peptide
VEFRPRISR

SEQ ID NO: 36190 - protein, 9 aa, Artificial Sequence
  Description of Artificial Sequence: Synthetic peptide
VEFRPTISR

SEQ ID NO: 36191 - protein, 9 aa, Artificial Sequence
  Description of Artificial Sequence: Synthetic peptide
VEFRRKISR

SEQ ID NO: 36192 - protein, 9 aa, Artificial Sequence
  Description of Artificial Sequence: Synthetic peptide
VEFRSKISR

SEQ ID NO: 36193 - protein, 9 aa, Artificial Sequence
  Description of Artificial Sequence: Synthetic peptide
VEFRTKISR

SEQ ID NO: 36194 - protein, 9 aa, Artificial Sequence
  Description of Artificial Sequence: Synthetic peptide
VEFTPKISR

SEQ ID NO: 36195 - protein, 9 aa, Artificial Sequence
  Description of Artificial Sequence: Synthetic peptide
VEYRPKISR

SEQ ID NO: 36196 - protein, 9 aa, Artificial Sequence
  Description of Artificial Sequence: Synthetic peptide
VFIQQSNQD

SEQ ID NO: 36197 - protein, 9 aa, Artificial Sequence
  Description of Artificial Sequence: Synthetic peptide
VFYWWLNWF

SEQ ID NO: 36198 - protein, 9 aa, Artificial Sequence
  Description of Artificial Sequence: Synthetic peptide
VGYWWLNWF

SEQ ID NO: 36199 - protein, 9 aa, Artificial Sequence
  Description of Artificial Sequence: Synthetic peptide
VIWVHYDMY

SEQ ID NO: 36200 - protein, 9 aa, Artificial Sequence
  Description of Artificial Sequence: Synthetic peptide
VKFRPKISR

SEQ ID NO: 36201 - protein, 9 aa, Artificial Sequence
  Description of Artificial Sequence: Synthetic peptide
VKKCHTCGA

SEQ ID NO: 36202 - protein, 9 aa, Artificial Sequence
  Description of Artificial Sequence: Synthetic peptide
VKNWYINMH

SEQ ID NO: 36203 - protein, 9 aa, Artificial Sequence
  Description of Artificial Sequence: Synthetic peptide
VKWVRLHKK

SEQ ID NO: 36204 - protein, 9 aa, Artificial Sequence
  Description of Artificial Sequence: Synthetic peptide
VNWVHYDMY

SEQ ID NO: 36205 - protein, 9 aa, Artificial Sequence
  Description of Artificial Sequence: Synthetic peptide
VQVNKTYVI

SEQ ID NO: 36206 - protein, 9 aa, Artificial Sequence
  Description of Artificial Sequence: Synthetic peptide
VRWLRLHKK

SEQ ID NO: 36207 - protein, 9 aa, Artificial Sequence
  Description of Artificial Sequence: Synthetic peptide
VRWVRIHKK

SEQ ID NO: 36208 - protein, 9 aa, Artificial Sequence
  Description of Artificial Sequence: Synthetic peptide
VRWVRLHEK

SEQ ID NO: 36209 - protein, 9 aa, Artificial Sequence
  Description of Artificial Sequence: Synthetic peptide
VRWVRLHKQ

SEQ ID NO: 36210 - protein, 9 aa, Artificial Sequence
  Description of Artificial Sequence: Synthetic peptide
VRWVRLHKR

SEQ ID NO: 36211 - protein, 9 aa, Artificial Sequence
  Description of Artificial Sequence: Synthetic peptide
VRWVRLHKT

SEQ ID NO: 36212 - protein, 9 aa, Artificial Sequence
  Description of Artificial Sequence: Synthetic peptide
VRWVRLHRK

SEQ ID NO: 36213 - protein, 9 aa, Artificial Sequence
  Description of Artificial Sequence: Synthetic peptide
VRWVRLHTK

SEQ ID NO: 36214 - protein, 9 aa, Artificial Sequence
  Description of Artificial Sequence: Synthetic peptide
VRYWWLNCF

SEQ ID NO: 36215 - protein, 9 aa, Artificial Sequence
  Description of Artificial Sequence: Synthetic peptide
VSWITRADI

SEQ ID NO: 36216 - protein, 9 aa, Artificial Sequence
  Description of Artificial Sequence: Synthetic peptide
VTVGGLAFA

SEQ ID NO: 36217 - protein, 9 aa, Artificial Sequence
  Description of Artificial Sequence: Synthetic peptide
VTWMHYDMY

SEQ ID NO: 36218 - protein, 9 aa, Artificial Sequence
  Description of Artificial Sequence: Synthetic peptide
VTWVHYAMY

SEQ ID NO: 36219 - protein, 9 aa, Artificial Sequence
  Description of Artificial Sequence: Synthetic peptide
VTWVHYDMF

SEQ ID NO: 36220 - protein, 9 aa, Artificial Sequence
  Description of Artificial Sequence: Synthetic peptide
VTWVHYDMH

SEQ ID NO: 36221 - protein, 9 aa, Artificial Sequence
  Description of Artificial Sequence: Synthetic peptide
VTWVHYNMY

SEQ ID NO: 36222 - protein, 9 aa, Artificial Sequence
  Description of Artificial Sequence: Synthetic peptide
VTWVHYVMY

SEQ ID NO: 36223 - protein, 9 aa, Artificial Sequence
  Description of Artificial Sequence: Synthetic peptide
VTWVHYYMY

SEQ ID NO: 36224 - protein, 9 aa, Artificial Sequence
  Description of Artificial Sequence: Synthetic peptide
VVFLRDQHY

SEQ ID NO: 36225 - protein, 9 aa, Artificial Sequence
  Description of Artificial Sequence: Synthetic peptide
VWSNIIGIY

SEQ ID NO: 36226 - protein, 9 aa, Artificial Sequence
  Description of Artificial Sequence: Synthetic peptide
VWYWWLNWF

SEQ ID NO: 36227 - protein, 9 aa, Artificial Sequence
  Description of Artificial Sequence: Synthetic peptide
VWYWWLNWL

SEQ ID NO: 36228 - protein, 9 aa, Artificial Sequence
  Description of Artificial Sequence: Synthetic peptide
VYYWWLNWF

SEQ ID NO: 36229 - protein, 9 aa, Artificial Sequence
  Description of Artificial Sequence: Synthetic peptide
WANFKTLNR

SEQ ID NO: 36230 - protein, 9 aa, Artificial Sequence
  Description of Artificial Sequence: Synthetic peptide
WANFQTLNK

SEQ ID NO: 36231 - protein, 9 aa, Artificial Sequence
  Description of Artificial Sequence: Synthetic peptide
WAPTPWRTH

SEQ ID NO: 36232 - protein, 9 aa, Artificial Sequence
  Description of Artificial Sequence: Synthetic peptide
WCCKMWSWW

SEQ ID NO: 36233 - protein, 9 aa, Artificial Sequence
  Description of Artificial Sequence: Synthetic peptide
WCMSQQYED

SEQ ID NO: 36234 - protein, 9 aa, Artificial Sequence
  Description of Artificial Sequence: Synthetic peptide
WDGKFWETM

SEQ ID NO: 36235 - protein, 9 aa, Artificial Sequence
  Description of Artificial Sequence: Synthetic peptide
WDIKFWETM

SEQ ID NO: 36236 - protein, 9 aa, Artificial Sequence
  Description of Artificial Sequence: Synthetic peptide
WDLKFWETM

SEQ ID NO: 36237 - protein, 9 aa, Artificial Sequence
  Description of Artificial Sequence: Synthetic peptide
WDMSQQYED

SEQ ID NO: 36238 - protein, 9 aa, Artificial Sequence
  Description of Artificial Sequence: Synthetic peptide
WDNLRNTQI

SEQ ID NO: 36239 - protein, 9 aa, Artificial Sequence
  Description of Artificial Sequence: Synthetic peptide
WDNSSNTQI

SEQ ID NO: 36240 - protein, 9 aa, Artificial Sequence
  Description of Artificial Sequence: Synthetic peptide
WDNWINTQI

SEQ ID NO: 36241 - protein, 9 aa, Artificial Sequence
  Description of Artificial Sequence: Synthetic peptide
WDNWSDTQI

SEQ ID NO: 36242 - protein, 9 aa, Artificial Sequence
  Description of Artificial Sequence: Synthetic peptide
WDNWSHTQI

SEQ ID NO: 36243 - protein, 9 aa, Artificial Sequence
  Description of Artificial Sequence: Synthetic peptide
WDNWSITQI

SEQ ID NO: 36244 - protein, 9 aa, Artificial Sequence
  Description of Artificial Sequence: Synthetic peptide
WDNWSNTEI

SEQ ID NO: 36245 - protein, 9 aa, Artificial Sequence
  Description of Artificial Sequence: Synthetic peptide
WDNWSNTKI

SEQ ID NO: 36246 - protein, 9 aa, Artificial Sequence
  Description of Artificial Sequence: Synthetic peptide
WDNWSNTKK

SEQ ID NO: 36247 - protein, 9 aa, Artificial Sequence
  Description of Artificial Sequence: Synthetic peptide
WDNWSNTLI

SEQ ID NO: 36248 - protein, 9 aa, Artificial Sequence
  Description of Artificial Sequence: Synthetic peptide
WDNWSNTPI

SEQ ID NO: 36249 - protein, 9 aa, Artificial Sequence
  Description of Artificial Sequence: Synthetic peptide
WDNWSNTQM

SEQ ID NO: 36250 - protein, 9 aa, Artificial Sequence
  Description of Artificial Sequence: Synthetic peptide
WDNWSNTQV

SEQ ID NO: 36251 - protein, 9 aa, Artificial Sequence
  Description of Artificial Sequence: Synthetic peptide
WDNWSNTRI

SEQ ID NO: 36252 - protein, 9 aa, Artificial Sequence
  Description of Artificial Sequence: Synthetic peptide
WDNWSTTQI

SEQ ID NO: 36253 - protein, 9 aa, Artificial Sequence
  Description of Artificial Sequence: Synthetic peptide
WDNWTNTQI

SEQ ID NO: 36254 - protein, 9 aa, Artificial Sequence
  Description of Artificial Sequence: Synthetic peptide
WDNWTNTQM

SEQ ID NO: 36255 - protein, 9 aa, Artificial Sequence
  Description of Artificial Sequence: Synthetic peptide
WDSWSNTQI

SEQ ID NO: 36256 - protein, 9 aa, Artificial Sequence
  Description of Artificial Sequence: Synthetic peptide
WDVKFWESM

SEQ ID NO: 36257 - protein, 9 aa, Artificial Sequence
  Description of Artificial Sequence: Synthetic peptide
WDVKYWETM

SEQ ID NO: 36258 - protein, 9 aa, Artificial Sequence
  Description of Artificial Sequence: Synthetic peptide
WDVMFWETM

SEQ ID NO: 36259 - protein, 9 aa, Artificial Sequence
  Description of Artificial Sequence: Synthetic peptide
WENWSNSQI

SEQ ID NO: 36260 - protein, 9 aa, Artificial Sequence
  Description of Artificial Sequence: Synthetic peptide
WFCKKWSWW

SEQ ID NO: 36261 - protein, 9 aa, Artificial Sequence
  Description of Artificial Sequence: Synthetic peptide
WFCKMLSWW

SEQ ID NO: 36262 - protein, 9 aa, Artificial Sequence
  Description of Artificial Sequence: Synthetic peptide
WFCKMWGWG

SEQ ID NO: 36263 - protein, 9 aa, Artificial Sequence
  Description of Artificial Sequence: Synthetic peptide
WFCKMWGWW

SEQ ID NO: 36264 - protein, 9 aa, Artificial Sequence
  Description of Artificial Sequence: Synthetic peptide
WFCKMWIWW

SEQ ID NO: 36265 - protein, 9 aa, Artificial Sequence
  Description of Artificial Sequence: Synthetic peptide
WFCKMWSGW

SEQ ID NO: 36266 - protein, 9 aa, Artificial Sequence
  Description of Artificial Sequence: Synthetic peptide
WFCKMWSLW

SEQ ID NO: 36267 - protein, 9 aa, Artificial Sequence
  Description of Artificial Sequence: Synthetic peptide
WFCKMWSWG

SEQ ID NO: 36268 - protein, 9 aa, Artificial Sequence
  Description of Artificial Sequence: Synthetic peptide
WFCKMWSWL

SEQ ID NO: 36269 - protein, 9 aa, Artificial Sequence
  Description of Artificial Sequence: Synthetic peptide
WFCKMWTWW

SEQ ID NO: 36270 - protein, 9 aa, Artificial Sequence
  Description of Artificial Sequence: Synthetic peptide
WFCKVWSWW

SEQ ID NO: 36271 - protein, 9 aa, Artificial Sequence
  Description of Artificial Sequence: Synthetic peptide
WFCNLWSWW

SEQ ID NO: 36272 - protein, 9 aa, Artificial Sequence
  Description of Artificial Sequence: Synthetic peptide
WFCQMWSWW

SEQ ID NO: 36273 - protein, 9 aa, Artificial Sequence
  Description of Artificial Sequence: Synthetic peptide
WFCRMWSWW

SEQ ID NO: 36274 - protein, 9 aa, Artificial Sequence
  Description of Artificial Sequence: Synthetic peptide
WFCTLWSWW

SEQ ID NO: 36275 - protein, 9 aa, Artificial Sequence
  Description of Artificial Sequence: Synthetic peptide
WFCTMWSWW

SEQ ID NO: 36276 - protein, 9 aa, Artificial Sequence
  Description of Artificial Sequence: Synthetic peptide
WFFKMWSWW

SEQ ID NO: 36277 - protein, 9 aa, Artificial Sequence
  Description of Artificial Sequence: Synthetic peptide
WFGKMWSWW

SEQ ID NO: 36278 - protein, 9 aa, Artificial Sequence
  Description of Artificial Sequence: Synthetic peptide
WFNMPHDRH

SEQ ID NO: 36279 - protein, 9 aa, Artificial Sequence
  Description of Artificial Sequence: Synthetic peptide
WFWKMWSWW

SEQ ID NO: 36280 - protein, 9 aa, Artificial Sequence
  Description of Artificial Sequence: Synthetic peptide
WFYKMWSWW

SEQ ID NO: 36281 - protein, 9 aa, Artificial Sequence
  Description of Artificial Sequence: Synthetic peptide
WGNWSNTQI

SEQ ID NO: 36282 - protein, 9 aa, Artificial Sequence
  Description of Artificial Sequence: Synthetic peptide
WGVKFWETM

SEQ ID NO: 36283 - protein, 9 aa, Artificial Sequence
  Description of Artificial Sequence: Synthetic peptide
WHCSVYTCS

SEQ ID NO: 36284 - protein, 9 aa, Artificial Sequence
  Description of Artificial Sequence: Synthetic peptide
WHRDEMLTP

SEQ ID NO: 36285 - protein, 9 aa, Artificial Sequence
  Description of Artificial Sequence: Synthetic peptide
WHREEMLTT

SEQ ID NO: 36286 - protein, 9 aa, Artificial Sequence
  Description of Artificial Sequence: Synthetic peptide
WHVKFWETM

SEQ ID NO: 36287 - protein, 9 aa, Artificial Sequence
  Description of Artificial Sequence: Synthetic peptide
WHWDEMLTT

SEQ ID NO: 36288 - protein, 9 aa, Artificial Sequence
  Description of Artificial Sequence: Synthetic peptide
WIAAMTYWC

SEQ ID NO: 36289 - protein, 9 aa, Artificial Sequence
  Description of Artificial Sequence: Synthetic peptide
WICKMWSWW

SEQ ID NO: 36290 - protein, 9 aa, Artificial Sequence
  Description of Artificial Sequence: Synthetic peptide
WIHAMTYWC

SEQ ID NO: 36291 - protein, 9 aa, Artificial Sequence
  Description of Artificial Sequence: Synthetic peptide
WIHMPHDRH

SEQ ID NO: 36292 - protein, 9 aa, Artificial Sequence
  Description of Artificial Sequence: Synthetic peptide
WINMAHDRH

SEQ ID NO: 36293 - protein, 9 aa, Artificial Sequence
  Description of Artificial Sequence: Synthetic peptide
WINMHHDRH

SEQ ID NO: 36294 - protein, 9 aa, Artificial Sequence
  Description of Artificial Sequence: Synthetic peptide
WINMPDDRH

SEQ ID NO: 36295 - protein, 9 aa, Artificial Sequence
  Description of Artificial Sequence: Synthetic peptide
WINMPHARH

SEQ ID NO: 36296 - protein, 9 aa, Artificial Sequence
  Description of Artificial Sequence: Synthetic peptide
WINMPHDGH

SEQ ID NO: 36297 - protein, 9 aa, Artificial Sequence
  Description of Artificial Sequence: Synthetic peptide
WINMPHDKH

SEQ ID NO: 36298 - protein, 9 aa, Artificial Sequence
  Description of Artificial Sequence: Synthetic peptide
WINMPHDRD

SEQ ID NO: 36299 - protein, 9 aa, Artificial Sequence
  Description of Artificial Sequence: Synthetic peptide
WINMPHDRL

SEQ ID NO: 36300 - protein, 9 aa, Artificial Sequence
  Description of Artificial Sequence: Synthetic peptide
WINMPHDRN

SEQ ID NO: 36301 - protein, 9 aa, Artificial Sequence
  Description of Artificial Sequence: Synthetic peptide
WINMPHDRP

SEQ ID NO: 36302 - protein, 9 aa, Artificial Sequence
  Description of Artificial Sequence: Synthetic peptide
WINMPHDRR

SEQ ID NO: 36303 - protein, 9 aa, Artificial Sequence
  Description of Artificial Sequence: Synthetic peptide
WINMPHDRY

SEQ ID NO: 36304 - protein, 9 aa, Artificial Sequence
  Description of Artificial Sequence: Synthetic peptide
WINMPHGRH

SEQ ID NO: 36305 - protein, 9 aa, Artificial Sequence
  Description of Artificial Sequence: Synthetic peptide
WINMPLDRH

SEQ ID NO: 36306 - protein, 9 aa, Artificial Sequence
  Description of Artificial Sequence: Synthetic peptide
WINMPNDRH

SEQ ID NO: 36307 - protein, 9 aa, Artificial Sequence
  Description of Artificial Sequence: Synthetic peptide
WINMPPDRH

SEQ ID NO: 36308 - protein, 9 aa, Artificial Sequence
  Description of Artificial Sequence: Synthetic peptide
WINMPRDRH

SEQ ID NO: 36309 - protein, 9 aa, Artificial Sequence
  Description of Artificial Sequence: Synthetic peptide
WINMTHDRH

SEQ ID NO: 36310 - protein, 9 aa, Artificial Sequence
  Description of Artificial Sequence: Synthetic peptide
WINRPHDRH

SEQ ID NO: 36311 - protein, 9 aa, Artificial Sequence
  Description of Artificial Sequence: Synthetic peptide
WINVPHDRH

SEQ ID NO: 36312 - protein, 9 aa, Artificial Sequence
  Description of Artificial Sequence: Synthetic peptide
WIPAKTYWC

SEQ ID NO: 36313 - protein, 9 aa, Artificial Sequence
  Description of Artificial Sequence: Synthetic peptide
WIPAMAYWC

SEQ ID NO: 36314 - protein, 9 aa, Artificial Sequence
  Description of Artificial Sequence: Synthetic peptide
WIPAMPYWC

SEQ ID NO: 36315 - protein, 9 aa, Artificial Sequence
  Description of Artificial Sequence: Synthetic peptide
WIPAMTYLC

SEQ ID NO: 36316 - protein, 9 aa, Artificial Sequence
  Description of Artificial Sequence: Synthetic peptide
WIPAMTYWF

SEQ ID NO: 36317 - protein, 9 aa, Artificial Sequence
  Description of Artificial Sequence: Synthetic peptide
WIPAMTYWW

SEQ ID NO: 36318 - protein, 9 aa, Artificial Sequence
  Description of Artificial Sequence: Synthetic peptide
WIPAMTYWY

SEQ ID NO: 36319 - protein, 9 aa, Artificial Sequence
  Description of Artificial Sequence: Synthetic peptide
WIPARTYWC

SEQ ID NO: 36320 - protein, 9 aa, Artificial Sequence
  Description of Artificial Sequence: Synthetic peptide
WIPAVTYWC

SEQ ID NO: 36321 - protein, 9 aa, Artificial Sequence
  Description of Artificial Sequence: Synthetic peptide
WIPGMTYWC

SEQ ID NO: 36322 - protein, 9 aa, Artificial Sequence
  Description of Artificial Sequence: Synthetic peptide
WIPSMTYWC

SEQ ID NO: 36323 - protein, 9 aa, Artificial Sequence
  Description of Artificial Sequence: Synthetic peptide
WIPTMTYWC

SEQ ID NO: 36324 - protein, 9 aa, Artificial Sequence
  Description of Artificial Sequence: Synthetic peptide
WIPVVTYWC

SEQ ID NO: 36325 - protein, 9 aa, Artificial Sequence
  Description of Artificial Sequence: Synthetic peptide
WISAMTYWC

SEQ ID NO: 36326 - protein, 9 aa, Artificial Sequence
  Description of Artificial Sequence: Synthetic peptide
WISMPHDRH

SEQ ID NO: 36327 - protein, 9 aa, Artificial Sequence
  Description of Artificial Sequence: Synthetic peptide
WITAMTYWC

SEQ ID NO: 36328 - protein, 9 aa, Artificial Sequence
  Description of Artificial Sequence: Synthetic peptide
WITMPHDRH

SEQ ID NO: 36329 - protein, 9 aa, Artificial Sequence
  Description of Artificial Sequence: Synthetic peptide
WKNVCPSRQ

SEQ ID NO: 36330 - protein, 9 aa, Artificial Sequence
  Description of Artificial Sequence: Synthetic peptide
WKSVCPSRQ

SEQ ID NO: 36331 - protein, 9 aa, Artificial Sequence
  Description of Artificial Sequence: Synthetic peptide
WKTVCPSRH

SEQ ID NO: 36332 - protein, 9 aa, Artificial Sequence
  Description of Artificial Sequence: Synthetic peptide
WLCQMWSWW

SEQ ID NO: 36333 - protein, 9 aa, Artificial Sequence
  Description of Artificial Sequence: Synthetic peptide
WLPAMTYWC

SEQ ID NO: 36334 - protein, 9 aa, Artificial Sequence
  Description of Artificial Sequence: Synthetic peptide
WMLLGLTWF

SEQ ID NO: 36335 - protein, 9 aa, Artificial Sequence
  Description of Artificial Sequence: Synthetic peptide
WMLLGMAWC

SEQ ID NO: 36336 - protein, 9 aa, Artificial Sequence
  Description of Artificial Sequence: Synthetic peptide
WMLLGMHWC

SEQ ID NO: 36337 - protein, 9 aa, Artificial Sequence
  Description of Artificial Sequence: Synthetic peptide
WMLLGMNWC

SEQ ID NO: 36338 - protein, 9 aa, Artificial Sequence
  Description of Artificial Sequence: Synthetic peptide
WMLLGMPWC

SEQ ID NO: 36339 - protein, 9 aa, Artificial Sequence
  Description of Artificial Sequence: Synthetic peptide
WMLLGMTLC

SEQ ID NO: 36340 - protein, 9 aa, Artificial Sequence
  Description of Artificial Sequence: Synthetic peptide
WMLLGMTWF

SEQ ID NO: 36341 - protein, 9 aa, Artificial Sequence
  Description of Artificial Sequence: Synthetic peptide
WMLLGMTWG

SEQ ID NO: 36342 - protein, 9 aa, Artificial Sequence
  Description of Artificial Sequence: Synthetic peptide
WMLLGMTWW

SEQ ID NO: 36343 - protein, 9 aa, Artificial Sequence
  Description of Artificial Sequence: Synthetic peptide
WMLLGMTWY

SEQ ID NO: 36344 - protein, 9 aa, Artificial Sequence
  Description of Artificial Sequence: Synthetic peptide
WMLLGTTWC

SEQ ID NO: 36345 - protein, 9 aa, Artificial Sequence
  Description of Artificial Sequence: Synthetic peptide
WMLLGVTWC

SEQ ID NO: 36346 - protein, 9 aa, Artificial Sequence
  Description of Artificial Sequence: Synthetic peptide
WMLLVMTWC

SEQ ID NO: 36347 - protein, 9 aa, Artificial Sequence
  Description of Artificial Sequence: Synthetic peptide
WMLNQSRGW

SEQ ID NO: 36348 - protein, 9 aa, Artificial Sequence
  Description of Artificial Sequence: Synthetic peptide
WMLQGMTWC

SEQ ID NO: 36349 - protein, 9 aa, Artificial Sequence
  Description of Artificial Sequence: Synthetic peptide
WMMLGMTWC

SEQ ID NO: 36350 - protein, 9 aa, Artificial Sequence
  Description of Artificial Sequence: Synthetic peptide
WMMMGLTWC

SEQ ID NO: 36351 - protein, 9 aa, Artificial Sequence
  Description of Artificial Sequence: Synthetic peptide
WMNMPHDRH

SEQ ID NO: 36352 - protein, 9 aa, Artificial Sequence
  Description of Artificial Sequence: Synthetic peptide
WMPNQSRVW

SEQ ID NO: 36353 - protein, 9 aa, Artificial Sequence
  Description of Artificial Sequence: Synthetic peptide
WMVLGMNWC

SEQ ID NO: 36354 - protein, 9 aa, Artificial Sequence
  Description of Artificial Sequence: Synthetic peptide
WMVLGMTWC

SEQ ID NO: 36355 - protein, 9 aa, Artificial Sequence
  Description of Artificial Sequence: Synthetic peptide
WNCSVYTCI

SEQ ID NO: 36356 - protein, 9 aa, Artificial Sequence
  Description of Artificial Sequence: Synthetic peptide
WNNWSNTQI

SEQ ID NO: 36357 - protein, 9 aa, Artificial Sequence
  Description of Artificial Sequence: Synthetic peptide
WRLLGMTWC

SEQ ID NO: 36358 - protein, 9 aa, Artificial Sequence
  Description of Artificial Sequence: Synthetic peptide
WSCKMWSWW

SEQ ID NO: 36359 - protein, 9 aa, Artificial Sequence
  Description of Artificial Sequence: Synthetic peptide
WTLLGMTWC

SEQ ID NO: 36360 - protein, 9 aa, Artificial Sequence
  Description of Artificial Sequence: Synthetic peptide
WVCKMWGWW

SEQ ID NO: 36361 - protein, 9 aa, Artificial Sequence
  Description of Artificial Sequence: Synthetic peptide
WVCKMWSWW

SEQ ID NO: 36362 - protein, 9 aa, Artificial Sequence
  Description of Artificial Sequence: Synthetic peptide
WVNLCADLI

SEQ ID NO: 36363 - protein, 9 aa, Artificial Sequence
  Description of Artificial Sequence: Synthetic peptide
WVPAMTYWC

SEQ ID NO: 36364 - protein, 9 aa, Artificial Sequence
  Description of Artificial Sequence: Synthetic peptide
WVPAPWRTH

SEQ ID NO: 36365 - protein, 9 aa, Artificial Sequence
  Description of Artificial Sequence: Synthetic peptide
WVPPPWRTH

SEQ ID NO: 36366 - protein, 9 aa, Artificial Sequence
  Description of Artificial Sequence: Synthetic peptide
WVPTHWRTH

SEQ ID NO: 36367 - protein, 9 aa, Artificial Sequence
  Description of Artificial Sequence: Synthetic peptide
WVPTPGRTH

SEQ ID NO: 36368 - protein, 9 aa, Artificial Sequence
  Description of Artificial Sequence: Synthetic peptide
WVPTPWQTH

SEQ ID NO: 36369 - protein, 9 aa, Artificial Sequence
  Description of Artificial Sequence: Synthetic peptide
WVPTPWRSH

SEQ ID NO: 36370 - protein, 9 aa, Artificial Sequence
  Description of Artificial Sequence: Synthetic peptide
WVPTPWRTN

SEQ ID NO: 36371 - protein, 9 aa, Artificial Sequence
  Description of Artificial Sequence: Synthetic peptide
WVPTPWRTQ

SEQ ID NO: 36372 - protein, 9 aa, Artificial Sequence
  Description of Artificial Sequence: Synthetic peptide
WVPTPWRTY

SEQ ID NO: 36373 - protein, 9 aa, Artificial Sequence
  Description of Artificial Sequence: Synthetic peptide
WVPTTWRTH

SEQ ID NO: 36374 - protein, 9 aa, Artificial Sequence
  Description of Artificial Sequence: Synthetic peptide
WVTLCAVLI

SEQ ID NO: 36375 - protein, 9 aa, Artificial Sequence
  Description of Artificial Sequence: Synthetic peptide
WVTTPWRTH

SEQ ID NO: 36376 - protein, 9 aa, Artificial Sequence
  Description of Artificial Sequence: Synthetic peptide
WYMSKQYED

SEQ ID NO: 36377 - protein, 9 aa, Artificial Sequence
  Description of Artificial Sequence: Synthetic peptide
WYMSQEYED

SEQ ID NO: 36378 - protein, 9 aa, Artificial Sequence
  Description of Artificial Sequence: Synthetic peptide
WYMSQQNED

SEQ ID NO: 36379 - protein, 9 aa, Artificial Sequence
  Description of Artificial Sequence: Synthetic peptide
WYMSQQSED

SEQ ID NO: 36380 - protein, 9 aa, Artificial Sequence
  Description of Artificial Sequence: Synthetic peptide
WYMSQQYAD

SEQ ID NO: 36381 - protein, 9 aa, Artificial Sequence
  Description of Artificial Sequence: Synthetic peptide
WYMSQQYKD

SEQ ID NO: 36382 - protein, 9 aa, Artificial Sequence
  Description of Artificial Sequence: Synthetic peptide
WYMSQQYQD

SEQ ID NO: 36383 - protein, 9 aa, Artificial Sequence
  Description of Artificial Sequence: Synthetic peptide
WYMSQRYED

SEQ ID NO: 36384 - protein, 9 aa, Artificial Sequence
  Description of Artificial Sequence: Synthetic peptide
WYMTQQYED

SEQ ID NO: 36385 - protein, 9 aa, Artificial Sequence
  Description of Artificial Sequence: Synthetic peptide
WYTSQQYED

SEQ ID NO: 36386 - protein, 9 aa, Artificial Sequence
  Description of Artificial Sequence: Synthetic peptide
WYVKFWETM

SEQ ID NO: 36387 - protein, 9 aa, Artificial Sequence
  Description of Artificial Sequence: Synthetic peptide
WYVSQQYED

SEQ ID NO: 36388 - protein, 9 aa, Artificial Sequence
  Description of Artificial Sequence: Synthetic peptide
YAQPDWFMT

SEQ ID NO: 36389 - protein, 9 aa, Artificial Sequence
  Description of Artificial Sequence: Synthetic peptide
YAQRDWFMA

SEQ ID NO: 36390 - protein, 9 aa, Artificial Sequence
  Description of Artificial Sequence: Synthetic peptide
YAWFYWADY

SEQ ID NO: 36391 - protein, 9 aa, Artificial Sequence
  Description of Artificial Sequence: Synthetic peptide
YDQPDWFMA

SEQ ID NO: 36392 - protein, 9 aa, Artificial Sequence
  Description of Artificial Sequence: Synthetic peptide
YDYWPMCWS

SEQ ID NO: 36393 - protein, 9 aa, Artificial Sequence
  Description of Artificial Sequence: Synthetic peptide
YFMEWEVMD

SEQ ID NO: 36394 - protein, 9 aa, Artificial Sequence
  Description of Artificial Sequence: Synthetic peptide
YFWYSMAFP

SEQ ID NO: 36395 - protein, 9 aa, Artificial Sequence
  Description of Artificial Sequence: Synthetic peptide
YHYWHMCWS

SEQ ID NO: 36396 - protein, 9 aa, Artificial Sequence
  Description of Artificial Sequence: Synthetic peptide
YHYWPMCWA

SEQ ID NO: 36397 - protein, 9 aa, Artificial Sequence
  Description of Artificial Sequence: Synthetic peptide
YHYWPMCWC

SEQ ID NO: 36398 - protein, 9 aa, Artificial Sequence
  Description of Artificial Sequence: Synthetic peptide
YHYWPMCWP

SEQ ID NO: 36399 - protein, 9 aa, Artificial Sequence
  Description of Artificial Sequence: Synthetic peptide
YHYWPMCWT

SEQ ID NO: 36400 - protein, 9 aa, Artificial Sequence
  Description of Artificial Sequence: Synthetic peptide
YHYWPMCWY

SEQ ID NO: 36401 - protein, 9 aa, Artificial Sequence
  Description of Artificial Sequence: Synthetic peptide
YHYWPMGWS

SEQ ID NO: 36402 - protein, 9 aa, Artificial Sequence
  Description of Artificial Sequence: Synthetic peptide
YIIRCMLIW

SEQ ID NO: 36403 - protein, 9 aa, Artificial Sequence
  Description of Artificial Sequence: Synthetic peptide
YKNWYINMH

SEQ ID NO: 36404 - protein, 9 aa, Artificial Sequence
  Description of Artificial Sequence: Synthetic peptide
YLEAKTIHA

SEQ ID NO: 36405 - protein, 9 aa, Artificial Sequence
  Description of Artificial Sequence: Synthetic peptide
YLESKTIHP

SEQ ID NO: 36406 - protein, 9 aa, Artificial Sequence
  Description of Artificial Sequence: Synthetic peptide
YPELGKGEI

SEQ ID NO: 36407 - protein, 9 aa, Artificial Sequence
  Description of Artificial Sequence: Synthetic peptide
YPELGQCEI

SEQ ID NO: 36408 - protein, 9 aa, Artificial Sequence
  Description of Artificial Sequence: Synthetic peptide
YPQPDWFMA

SEQ ID NO: 36409 - protein, 9 aa, Artificial Sequence
  Description of Artificial Sequence: Synthetic peptide
YPYWPMCWS

SEQ ID NO: 36410 - protein, 9 aa, Artificial Sequence
  Description of Artificial Sequence: Synthetic peptide
YSWFNWADY

SEQ ID NO: 36411 - protein, 9 aa, Artificial Sequence
  Description of Artificial Sequence: Synthetic peptide
YSWFYWADC

SEQ ID NO: 36412 - protein, 9 aa, Artificial Sequence
  Description of Artificial Sequence: Synthetic peptide
YSWFYWADF

SEQ ID NO: 36413 - protein, 9 aa, Artificial Sequence
  Description of Artificial Sequence: Synthetic peptide
YSWFYWADS

SEQ ID NO: 36414 - protein, 9 aa, Artificial Sequence
  Description of Artificial Sequence: Synthetic peptide
YSWFYWAVY

SEQ ID NO: 36415 - protein, 9 aa, Artificial Sequence
  Description of Artificial Sequence: Synthetic peptide
YSWFYWPDY

SEQ ID NO: 36416 - protein, 9 aa, Artificial Sequence
  Description of Artificial Sequence: Synthetic peptide
YSWFYWSDY

SEQ ID NO: 36417 - protein, 9 aa, Artificial Sequence
  Description of Artificial Sequence: Synthetic peptide
YSWFYWTDY

SEQ ID NO: 36418 - protein, 9 aa, Artificial Sequence
  Description of Artificial Sequence: Synthetic peptide
YSWFYWVDY

SEQ ID NO: 36419 - protein, 9 aa, Artificial Sequence
  Description of Artificial Sequence: Synthetic peptide
YSWIYWADY

SEQ ID NO: 36420 - protein, 9 aa, Artificial Sequence
  Description of Artificial Sequence: Synthetic peptide
YSWVYWADY

SEQ ID NO: 36421 - protein, 9 aa, Artificial Sequence
  Description of Artificial Sequence: Synthetic peptide
YSWYYWADY

SEQ ID NO: 36422 - protein, 9 aa, Artificial Sequence
  Description of Artificial Sequence: Synthetic peptide
YTALMWVWA

SEQ ID NO: 36423 - protein, 9 aa, Artificial Sequence
  Description of Artificial Sequence: Synthetic peptide
YTELGKCEI

SEQ ID NO: 36424 - protein, 9 aa, Artificial Sequence
  Description of Artificial Sequence: Synthetic peptide
YTLLWYGIC

SEQ ID NO: 36425 - protein, 9 aa, Artificial Sequence
  Description of Artificial Sequence: Synthetic peptide
YTNFEAVLI

SEQ ID NO: 36426 - protein, 9 aa, Artificial Sequence
  Description of Artificial Sequence: Synthetic peptide
YTNFEDALI

SEQ ID NO: 36427 - protein, 9 aa, Artificial Sequence
  Description of Artificial Sequence: Synthetic peptide
YTNFEDVII

SEQ ID NO: 36428 - protein, 9 aa, Artificial Sequence
  Description of Artificial Sequence: Synthetic peptide
YTNFEGVLI

SEQ ID NO: 36429 - protein, 9 aa, Artificial Sequence
  Description of Artificial Sequence: Synthetic peptide
YTNFENVLI

SEQ ID NO: 36430 - protein, 9 aa, Artificial Sequence
  Description of Artificial Sequence: Synthetic peptide
YTNIEDVLI

SEQ ID NO: 36431 - protein, 9 aa, Artificial Sequence
  Description of Artificial Sequence: Synthetic peptide
YTNLDDVLI

SEQ ID NO: 36432 - protein, 9 aa, Artificial Sequence
  Description of Artificial Sequence: Synthetic peptide
YTWFYWADY

SEQ ID NO: 36433 - protein, 9 aa, Artificial Sequence
  Description of Artificial Sequence: Synthetic peptide
YWSHIIGIY

SEQ ID NO: 36434 - protein, 9 aa, Artificial Sequence
  Description of Artificial Sequence: Synthetic peptide
YWSNIIGIY

SEQ ID NO: 36435 - protein, 9 aa, Artificial Sequence
  Description of Artificial Sequence: Synthetic peptide
YYAQYYRTW

SEQ ID NO: 36436 - protein, 9 aa, Artificial Sequence
  Description of Artificial Sequence: Synthetic peptide
YYWFYWADY

SEQ ID NO: 36437 - protein, 9 aa, Artificial Sequence
  Description of Artificial Sequence: Synthetic peptide
YYWFYWSDY

SEQ ID NO: 36438 - protein, 9 aa, Artificial Sequence
  Description of Artificial Sequence: Synthetic peptide
GCLQIERRH

SEQ ID NO: 36439 - protein, 9 aa, Artificial Sequence
  Description of Artificial Sequence: Synthetic peptide
EVTRNHHFN

SEQ ID NO: 36440 - protein, 9 aa, Artificial Sequence
  Description of Artificial Sequence: Synthetic peptide
CCKPQCKCQ

SEQ ID NO: 36441 - protein, 9 aa, Artificial Sequence
  Description of Artificial Sequence: Synthetic peptide
MVFLEQHGR

SEQ ID NO: 36442 - protein, 9 aa, Artificial Sequence
  Description of Artificial Sequence: Synthetic peptide
YITCQYSHH

SEQ ID NO: 36443 - protein, 9 aa, Artificial Sequence
  Description of Artificial Sequence: Synthetic peptide
ILVPYYTGS

SEQ ID NO: 36444 - protein, 9 aa, Artificial Sequence
  Description of Artificial Sequence: Synthetic peptide
AWSDLMNCW

SEQ ID NO: 36445 - protein, 9 aa, Artificial Sequence
  Description of Artificial Sequence: Synthetic peptide
MIEPYTSYN

SEQ ID NO: 36446 - protein, 9 aa, Artificial Sequence
  Description of Artificial Sequence: Synthetic peptide
NWYTTWIDE

SEQ ID NO: 36447 - protein, 9 aa, Artificial Sequence
  Description of Artificial Sequence: Synthetic peptide
MMKRNRFIC

SEQ ID NO: 36448 - protein, 9 aa, Artificial Sequence
  Description of Artificial Sequence: Synthetic peptide
ACVERLHHK

SEQ ID NO: 36449 - protein, 9 aa, Artificial Sequence
  Description of Artificial Sequence: Synthetic peptide
ECRMAVQSC

SEQ ID NO: 36450 - protein, 9 aa, Artificial Sequence
  Description of Artificial Sequence: Synthetic peptide
APFFTFTNH

SEQ ID NO: 36451 - protein, 9 aa, Artificial Sequence
  Description of Artificial Sequence: Synthetic peptide
ASLVKWDFE

SEQ ID NO: 36452 - protein, 9 aa, Artificial Sequence
  Description of Artificial Sequence: Synthetic peptide
ATMWGDCDY

SEQ ID NO: 36453 - protein, 9 aa, Artificial Sequence
  Description of Artificial Sequence: Synthetic peptide
AWKMAHNSF

SEQ ID NO: 36454 - protein, 9 aa, Artificial Sequence
  Description of Artificial Sequence: Synthetic peptide
CHHDVNVPI

SEQ ID NO: 36455 - protein, 9 aa, Artificial Sequence
  Description of Artificial Sequence: Synthetic peptide
CIMLNGCFQ

SEQ ID NO: 36456 - protein, 9 aa, Artificial Sequence
  Description of Artificial Sequence: Synthetic peptide
DLCAGNKSQ

SEQ ID NO: 36457 - protein, 9 aa, Artificial Sequence
  Description of Artificial Sequence: Synthetic peptide
DLCEGNKSQ

SEQ ID NO: 36458 - protein, 9 aa, Artificial Sequence
  Description of Artificial Sequence: Synthetic peptide
DLCGGNKSQ

SEQ ID NO: 36459 - protein, 9 aa, Artificial Sequence
  Description of Artificial Sequence: Synthetic peptide
DPMKIFVSH

SEQ ID NO: 36460 - protein, 9 aa, Artificial Sequence
  Description of Artificial Sequence: Synthetic peptide
EKEWRPLQW

SEQ ID NO: 36461 - protein, 9 aa, Artificial Sequence
  Description of Artificial Sequence: Synthetic peptide
ESNGMYFDR

SEQ ID NO: 36462 - protein, 9 aa, Artificial Sequence
  Description of Artificial Sequence: Synthetic peptide
GNCVYHCYE

SEQ ID NO: 36463 - protein, 9 aa, Artificial Sequence
  Description of Artificial Sequence: Synthetic peptide
HITCQYSHH

SEQ ID NO: 36464 - protein, 9 aa, Artificial Sequence
  Description of Artificial Sequence: Synthetic peptide
KHMPTLQWQ

SEQ ID NO: 36465 - protein, 9 aa, Artificial Sequence
  Description of Artificial Sequence: Synthetic peptide
KSTEQMHRA

SEQ ID NO: 36466 - protein, 9 aa, Artificial Sequence
  Description of Artificial Sequence: Synthetic peptide
KVNCRMIIM

SEQ ID NO: 36467 - protein, 9 aa, Artificial Sequence
  Description of Artificial Sequence: Synthetic peptide
LNLARYEAP

SEQ ID NO: 36468 - protein, 9 aa, Artificial Sequence
  Description of Artificial Sequence: Synthetic peptide
MGMWKVWAQ

SEQ ID NO: 36469 - protein, 9 aa, Artificial Sequence
  Description of Artificial Sequence: Synthetic peptide
MTGDSGKFR

SEQ ID NO: 36470 - protein, 9 aa, Artificial Sequence
  Description of Artificial Sequence: Synthetic peptide
NIHAVFVQS

SEQ ID NO: 36471 - protein, 9 aa, Artificial Sequence
  Description of Artificial Sequence: Synthetic peptide
NIHDVFVQS

SEQ ID NO: 36472 - protein, 9 aa, Artificial Sequence
  Description of Artificial Sequence: Synthetic peptide
NITLVMGQH

SEQ ID NO: 36473 - protein, 9 aa, Artificial Sequence
  Description of Artificial Sequence: Synthetic peptide
QCCVTYVNS

SEQ ID NO: 36474 - protein, 9 aa, Artificial Sequence
  Description of Artificial Sequence: Synthetic peptide
QEFYCWIDG

SEQ ID NO: 36475 - protein, 9 aa, Artificial Sequence
  Description of Artificial Sequence: Synthetic peptide
QNEGRGSIV

SEQ ID NO: 36476 - protein, 9 aa, Artificial Sequence
  Description of Artificial Sequence: Synthetic peptide
RTAMFESRL

SEQ ID NO: 36477 - protein, 9 aa, Artificial Sequence
  Description of Artificial Sequence: Synthetic peptide
SHARKVYDC

SEQ ID NO: 36478 - protein, 9 aa, Artificial Sequence
  Description of Artificial Sequence: Synthetic peptide
SIYQKWVTN

SEQ ID NO: 36479 - protein, 9 aa, Artificial Sequence
  Description of Artificial Sequence: Synthetic peptide
SKCPWFHNG

SEQ ID NO: 36480 - protein, 9 aa, Artificial Sequence
  Description of Artificial Sequence: Synthetic peptide
SKNIRNYDI

SEQ ID NO: 36481 - protein, 9 aa, Artificial Sequence
  Description of Artificial Sequence: Synthetic peptide
SQCVMQFPL

SEQ ID NO: 36482 - protein, 9 aa, Artificial Sequence
  Description of Artificial Sequence: Synthetic peptide
SYARKVYDC

SEQ ID NO: 36483 - protein, 9 aa, Artificial Sequence
  Description of Artificial Sequence: Synthetic peptide
TAALGHSFC

SEQ ID NO: 36484 - protein, 9 aa, Artificial Sequence
  Description of Artificial Sequence: Synthetic peptide
TQGMYVESY

SEQ ID NO: 36485 - protein, 9 aa, Artificial Sequence
  Description of Artificial Sequence: Synthetic peptide
TTLLVQAEW

SEQ ID NO: 36486 - protein, 9 aa, Artificial Sequence
  Description of Artificial Sequence: Synthetic peptide
VIIYPQFKC

SEQ ID NO: 36487 - protein, 9 aa, Artificial Sequence
  Description of Artificial Sequence: Synthetic peptide
YGGMEFEDC

SEQ ID NO: 36488 - protein, 9 aa, Artificial Sequence
  Description of Artificial Sequence: Synthetic peptide
YGGVEFEDC

SEQ ID NO: 36489 - protein, 9 aa, Artificial Sequence
  Description of Artificial Sequence: Synthetic peptide
YQTLCMHQD

SEQ ID NO: 36490 - protein, 9 aa, Artificial Sequence
  Description of Artificial Sequence: Synthetic peptide
YSKVFYFFS

SEQ ID NO: 36491 - protein, 9 aa, Artificial Sequence
  Description of Artificial Sequence: Synthetic peptide
YTQAMCITA

SEQ ID NO: 36492 - protein, 9 aa, Artificial Sequence
  Description of Artificial Sequence: Synthetic peptide
ADQHTSPTS

SEQ ID NO: 36493 - protein, 9 aa, Artificial Sequence
  Description of Artificial Sequence: Synthetic peptide
AIILLCHAE

SEQ ID NO: 36494 - protein, 9 aa, Artificial Sequence
  Description of Artificial Sequence: Synthetic peptide
ATRCWWREI

SEQ ID NO: 36495 - protein, 9 aa, Artificial Sequence
  Description of Artificial Sequence: Synthetic peptide
CIIARSTAA

SEQ ID NO: 36496 - protein, 9 aa, Artificial Sequence
  Description of Artificial Sequence: Synthetic peptide
CNIHWTMAE

SEQ ID NO: 36497 - protein, 9 aa, Artificial Sequence
  Description of Artificial Sequence: Synthetic peptide
CNNRLDVFN

SEQ ID NO: 36498 - protein, 9 aa, Artificial Sequence
  Description of Artificial Sequence: Synthetic peptide
CVHERANAN

SEQ ID NO: 36499 - protein, 9 aa, Artificial Sequence
  Description of Artificial Sequence: Synthetic peptide
DIRPNMFWS

SEQ ID NO: 36500 - protein, 9 aa, Artificial Sequence
  Description of Artificial Sequence: Synthetic peptide
DNAVNSHVF

SEQ ID NO: 36501 - protein, 9 aa, Artificial Sequence
  Description of Artificial Sequence: Synthetic peptide
DNYYYWGSL

SEQ ID NO: 36502 - protein, 9 aa, Artificial Sequence
  Description of Artificial Sequence: Synthetic peptide
EDFVTTSEL

SEQ ID NO: 36503 - protein, 9 aa, Artificial Sequence
  Description of Artificial Sequence: Synthetic peptide
ETANGMCST

SEQ ID NO: 36504 - protein, 9 aa, Artificial Sequence
  Description of Artificial Sequence: Synthetic peptide
EVKQGFTQG

SEQ ID NO: 36505 - protein, 9 aa, Artificial Sequence
  Description of Artificial Sequence: Synthetic peptide
EWHYRNKDA

SEQ ID NO: 36506 - protein, 9 aa, Artificial Sequence
  Description of Artificial Sequence: Synthetic peptide
GEPDHSPAN

SEQ ID NO: 36507 - protein, 9 aa, Artificial Sequence
  Description of Artificial Sequence: Synthetic peptide
GIKSCWQNS

SEQ ID NO: 36508 - protein, 9 aa, Artificial Sequence
  Description of Artificial Sequence: Synthetic peptide
GITEQPLAR

SEQ ID NO: 36509 - protein, 9 aa, Artificial Sequence
  Description of Artificial Sequence: Synthetic peptide
GSKGMAFCS

SEQ ID NO: 36510 - protein, 9 aa, Artificial Sequence
  Description of Artificial Sequence: Synthetic peptide
GVNEFLDTN

SEQ ID NO: 36511 - protein, 9 aa, Artificial Sequence
  Description of Artificial Sequence: Synthetic peptide
HMGYVNNQS

SEQ ID NO: 36512 - protein, 9 aa, Artificial Sequence
  Description of Artificial Sequence: Synthetic peptide
HQHEAPMDI

SEQ ID NO: 36513 - protein, 9 aa, Artificial Sequence
  Description of Artificial Sequence: Synthetic peptide
HTTPCARSR

SEQ ID NO: 36514 - protein, 9 aa, Artificial Sequence
  Description of Artificial Sequence: Synthetic peptide
KSDGQMRQS

SEQ ID NO: 36515 - protein, 9 aa, Artificial Sequence
  Description of Artificial Sequence: Synthetic peptide
KTYSAMYSP

SEQ ID NO: 36516 - protein, 9 aa, Artificial Sequence
  Description of Artificial Sequence: Synthetic peptide
LFYMKEDMR

SEQ ID NO: 36517 - protein, 9 aa, Artificial Sequence
  Description of Artificial Sequence: Synthetic peptide
LPTLRVADK

SEQ ID NO: 36518 - protein, 9 aa, Artificial Sequence
  Description of Artificial Sequence: Synthetic peptide
MHMSYHWHE

SEQ ID NO: 36519 - protein, 9 aa, Artificial Sequence
  Description of Artificial Sequence: Synthetic peptide
MHMSYHWRE

SEQ ID NO: 36520 - protein, 9 aa, Artificial Sequence
  Description of Artificial Sequence: Synthetic peptide
MMLSDDRTP

SEQ ID NO: 36521 - protein, 9 aa, Artificial Sequence
  Description of Artificial Sequence: Synthetic peptide
NIDQWKHQQ

SEQ ID NO: 36522 - protein, 9 aa, Artificial Sequence
  Description of Artificial Sequence: Synthetic peptide
QISMAHFLP

SEQ ID NO: 36523 - protein, 9 aa, Artificial Sequence
  Description of Artificial Sequence: Synthetic peptide
QMEQWHRGG

SEQ ID NO: 36524 - protein, 9 aa, Artificial Sequence
  Description of Artificial Sequence: Synthetic peptide
QNWAALACP

SEQ ID NO: 36525 - protein, 9 aa, Artificial Sequence
  Description of Artificial Sequence: Synthetic peptide
QVSVSVIAW

SEQ ID NO: 36526 - protein, 9 aa, Artificial Sequence
  Description of Artificial Sequence: Synthetic peptide
SITEQPLAR

SEQ ID NO: 36527 - protein, 9 aa, Artificial Sequence
  Description of Artificial Sequence: Synthetic peptide
SMAICMHDN

SEQ ID NO: 36528 - protein, 9 aa, Artificial Sequence
  Description of Artificial Sequence: Synthetic peptide
SMQSAEPSC

SEQ ID NO: 36529 - protein, 9 aa, Artificial Sequence
  Description of Artificial Sequence: Synthetic peptide
STHQSEFTT

SEQ ID NO: 36530 - protein, 9 aa, Artificial Sequence
  Description of Artificial Sequence: Synthetic peptide
STVYRWDMP

SEQ ID NO: 36531 - protein, 9 aa, Artificial Sequence
  Description of Artificial Sequence: Synthetic peptide
SVMLKANEV

SEQ ID NO: 36532 - protein, 9 aa, Artificial Sequence
  Description of Artificial Sequence: Synthetic peptide
SVYHCWRSQ

SEQ ID NO: 36533 - protein, 9 aa, Artificial Sequence
  Description of Artificial Sequence: Synthetic peptide
TAEVRWPCP

SEQ ID NO: 36534 - protein, 9 aa, Artificial Sequence
  Description of Artificial Sequence: Synthetic peptide
TASFAQRRS

SEQ ID NO: 36535 - protein, 9 aa, Artificial Sequence
  Description of Artificial Sequence: Synthetic peptide
TDDPPLLTY

SEQ ID NO: 36536 - protein, 9 aa, Artificial Sequence
  Description of Artificial Sequence: Synthetic peptide
TFCESMPWV

SEQ ID NO: 36537 - protein, 9 aa, Artificial Sequence
  Description of Artificial Sequence: Synthetic peptide
TIRYIGMSG

SEQ ID NO: 36538 - protein, 9 aa, Artificial Sequence
  Description of Artificial Sequence: Synthetic peptide
TKKQMEWQM

SEQ ID NO: 36539 - protein, 9 aa, Artificial Sequence
  Description of Artificial Sequence: Synthetic peptide
TQQTGWVYN

SEQ ID NO: 36540 - protein, 9 aa, Artificial Sequence
  Description of Artificial Sequence: Synthetic peptide
TTYIPASAA

SEQ ID NO: 36541 - protein, 9 aa, Artificial Sequence
  Description of Artificial Sequence: Synthetic peptide
VCHNPDPFT

SEQ ID NO: 36542 - protein, 9 aa, Artificial Sequence
  Description of Artificial Sequence: Synthetic peptide
VSSDKQVLE

SEQ ID NO: 36543 - protein, 9 aa, Artificial Sequence
  Description of Artificial Sequence: Synthetic peptide
WECQWDMSM

SEQ ID NO: 36544 - protein, 9 aa, Artificial Sequence
  Description of Artificial Sequence: Synthetic peptide
WFCYLSPMI

SEQ ID NO: 36545 - protein, 9 aa, Artificial Sequence
  Description of Artificial Sequence: Synthetic peptide
WFEPSNLIK

SEQ ID NO: 36546 - protein, 9 aa, Artificial Sequence
  Description of Artificial Sequence: Synthetic peptide
LGMHYKDNC

SEQ ID NO: 36547 - protein, 9 aa, Artificial Sequence
  Description of Artificial Sequence: Synthetic peptide
ATGTYDLQE

SEQ ID NO: 36548 - protein, 9 aa, Artificial Sequence
  Description of Artificial Sequence: Synthetic peptide
APKAPKMYH

SEQ ID NO: 36549 - protein, 9 aa, Artificial Sequence
  Description of Artificial Sequence: Synthetic peptide
DMVTTRSPF

SEQ ID NO: 36550 - protein, 9 aa, Artificial Sequence
  Description of Artificial Sequence: Synthetic peptide
DQVNKTYVI

SEQ ID NO: 36551 - protein, 9 aa, Artificial Sequence
  Description of Artificial Sequence: Synthetic peptide
DWSVWIMET

SEQ ID NO: 36552 - protein, 9 aa, Artificial Sequence
  Description of Artificial Sequence: Synthetic peptide
FLTTVLRVC

SEQ ID NO: 36553 - protein, 9 aa, Artificial Sequence
  Description of Artificial Sequence: Synthetic peptide
HLTTIPGDR

SEQ ID NO: 36554 - protein, 9 aa, Artificial Sequence
  Description of Artificial Sequence: Synthetic peptide
IFYECYSNK

SEQ ID NO: 36555 - protein, 9 aa, Artificial Sequence
  Description of Artificial Sequence: Synthetic peptide
MYIFVWRFM

SEQ ID NO: 36556 - protein, 9 aa, Artificial Sequence
  Description of Artificial Sequence: Synthetic peptide
PEKVWSDLK

SEQ ID NO: 36557 - protein, 9 aa, Artificial Sequence
  Description of Artificial Sequence: Synthetic peptide
SWFYMEKMP

SEQ ID NO: 36558 - protein, 9 aa, Artificial Sequence
  Description of Artificial Sequence: Synthetic peptide
TWLYGWPIK

SEQ ID NO: 36559 - protein, 9 aa, Artificial Sequence
  Description of Artificial Sequence: Synthetic peptide
VMPIAWQQD

SEQ ID NO: 36560 - protein, 9 aa, Artificial Sequence
  Description of Artificial Sequence: Synthetic peptide
VQKCHTCGA

SEQ ID NO: 36561 - protein, 9 aa, Artificial Sequence
  Description of Artificial Sequence: Synthetic peptide
VQKCRTCGA

SEQ ID NO: 36562 - protein, 9 aa, Artificial Sequence
  Description of Artificial Sequence: Synthetic peptide
WMLLGMTWC

SEQ ID NO: 36563 - protein, 9 aa, Artificial Sequence
  Description of Artificial Sequence: Synthetic peptide
FTNTKEQAF

SEQ ID NO: 36564 - protein, 9 aa, Artificial Sequence
  Description of Artificial Sequence: Synthetic peptide
YSWFYWADY

SEQ ID NO: 36565 - protein, 9 aa, Artificial Sequence
  Description of Artificial Sequence: Synthetic peptide
VRWVRLHKK

SEQ ID NO: 36566 - protein, 9 aa, Artificial Sequence
  Description of Artificial Sequence: Synthetic peptide
VCYWWLNWF

SEQ ID NO: 36567 - protein, 9 aa, Artificial Sequence
  Description of Artificial Sequence: Synthetic peptide
THKWFCEDS

SEQ ID NO: 36568 - protein, 9 aa, Artificial Sequence
  Description of Artificial Sequence: Synthetic peptide
DPYSSKYES

SEQ ID NO: 36569 - protein, 9 aa, Artificial Sequence
  Description of Artificial Sequence: Synthetic peptide
EDWLRRNIW

SEQ ID NO: 36570 - protein, 9 aa, Artificial Sequence
  Description of Artificial Sequence: Synthetic peptide
KHYKWGHCQ

SEQ ID NO: 36571 - protein, 9 aa, Artificial Sequence
  Description of Artificial Sequence: Synthetic peptide
ESVPLRETT

SEQ ID NO: 36572 - protein, 9 aa, Artificial Sequence
  Description of Artificial Sequence: Synthetic peptide
SSSPGKGWM

SEQ ID NO: 36573 - protein, 9 aa, Artificial Sequence
  Description of Artificial Sequence: Synthetic peptide
GSTSRNQRD

SEQ ID NO: 36574 - protein, 9 aa, Artificial Sequence
  Description of Artificial Sequence: Synthetic peptide
AHTQYQGQN

SEQ ID NO: 36575 - protein, 9 aa, Artificial Sequence
  Description of Artificial Sequence: Synthetic peptide
KFDVIRQAM

SEQ ID NO: 36576 - protein, 9 aa, Artificial Sequence
  Description of Artificial Sequence: Synthetic peptide
GTIPKQHEF

SEQ ID NO: 36577 - protein, 9 aa, Artificial Sequence
  Description of Artificial Sequence: Synthetic peptide
QKAIVTQND

SEQ ID NO: 36578 - protein, 9 aa, Artificial Sequence
  Description of Artificial Sequence: Synthetic peptide
MDYHCQVED

SEQ ID NO: 36579 - protein, 9 aa, Artificial Sequence
  Description of Artificial Sequence: Synthetic peptide
ERQSTHGQY

SEQ ID NO: 36580 - protein, 9 aa, Artificial Sequence
  Description of Artificial Sequence: Synthetic peptide
KCWDCHEAG

SEQ ID NO: 36581 - protein, 9 aa, Artificial Sequence
  Description of Artificial Sequence: Synthetic peptide
NHDEKLWAP

SEQ ID NO: 36582 - protein, 9 aa, Artificial Sequence
  Description of Artificial Sequence: Synthetic peptide
DGMHRELYS

SEQ ID NO: 36583 - protein, 9 aa, Artificial Sequence
  Description of Artificial Sequence: Synthetic peptide
AKMWQLENP

SEQ ID NO: 36584 - protein, 9 aa, Artificial Sequence
  Description of Artificial Sequence: Synthetic peptide
LTNRTQESW

SEQ ID NO: 36585 - protein, 9 aa, Artificial Sequence
  Description of Artificial Sequence: Synthetic peptide
STALMDANM

SEQ ID NO: 36586 - protein, 9 aa, Artificial Sequence
  Description of Artificial Sequence: Synthetic peptide
KQAGYDFFH

SEQ ID NO: 36587 - protein, 9 aa, Artificial Sequence
  Description of Artificial Sequence: Synthetic peptide
SPQQPSVFH

SEQ ID NO: 36588 - protein, 9 aa, Artificial Sequence
  Description of Artificial Sequence: Synthetic peptide
TTYPHNTHG

SEQ ID NO: 36589 - protein, 9 aa, Artificial Sequence
  Description of Artificial Sequence: Synthetic peptide
CMEAQGECY

SEQ ID NO: 36590 - protein, 9 aa, Artificial Sequence
  Description of Artificial Sequence: Synthetic peptide
ISLVWMHYP

SEQ ID NO: 36591 - protein, 9 aa, Artificial Sequence
  Description of Artificial Sequence: Synthetic peptide
NNGPIWISS

SEQ ID NO: 36592 - protein, 9 aa, Artificial Sequence
  Description of Artificial Sequence: Synthetic peptide
AHLHNQFMP

SEQ ID NO: 36593 - protein, 9 aa, Artificial Sequence
  Description of Artificial Sequence: Synthetic peptide
RTEAHLPAP

SEQ ID NO: 36594 - protein, 9 aa, Artificial Sequence
  Description of Artificial Sequence: Synthetic peptide
EGASPLACT

SEQ ID NO: 36595 - protein, 9 aa, Artificial Sequence
  Description of Artificial Sequence: Synthetic peptide
DANHCMWWQ

SEQ ID NO: 36596 - protein, 9 aa, Artificial Sequence
  Description of Artificial Sequence: Synthetic peptide
EKYQIHWDR

SEQ ID NO: 36597 - protein, 9 aa, Artificial Sequence
  Description of Artificial Sequence: Synthetic peptide
KQEWHVHTE

SEQ ID NO: 36598 - protein, 9 aa, Artificial Sequence
  Description of Artificial Sequence: Synthetic peptide
KLYGLNHSC

SEQ ID NO: 36599 - protein, 9 aa, Artificial Sequence
  Description of Artificial Sequence: Synthetic peptide
QSSSSYLWG

SEQ ID NO: 36600 - protein, 9 aa, Artificial Sequence
  Description of Artificial Sequence: Synthetic peptide
DIRIVSDGK

SEQ ID NO: 36601 - protein, 9 aa, Artificial Sequence
  Description of Artificial Sequence: Synthetic peptide
MALPLHVLS

SEQ ID NO: 36602 - protein, 9 aa, Artificial Sequence
  Description of Artificial Sequence: Synthetic peptide
QTMCITIHP

SEQ ID NO: 36603 - protein, 9 aa, Artificial Sequence
  Description of Artificial Sequence: Synthetic peptide
RHWYIALYA

SEQ ID NO: 36604 - protein, 9 aa, Artificial Sequence
  Description of Artificial Sequence: Synthetic peptide
LSAKQQFFC

SEQ ID NO: 36605 - protein, 9 aa, Artificial Sequence
  Description of Artificial Sequence: Synthetic peptide
GEGVEQMDG

SEQ ID NO: 36606 - protein, 9 aa, Artificial Sequence
  Description of Artificial Sequence: Synthetic peptide
RQIGTGNME

SEQ ID NO: 36607 - protein, 9 aa, Artificial Sequence
  Description of Artificial Sequence: Synthetic peptide
IMTIIPYGP

SEQ ID NO: 36608 - protein, 9 aa, Artificial Sequence
  Description of Artificial Sequence: Synthetic peptide
VNDDYECGI

SEQ ID NO: 36609 - protein, 9 aa, Artificial Sequence
  Description of Artificial Sequence: Synthetic peptide
NTQYSAKND

SEQ ID NO: 36610 - protein, 9 aa, Artificial Sequence
  Description of Artificial Sequence: Synthetic peptide
SRTICVHGN

SEQ ID NO: 36611 - protein, 9 aa, Artificial Sequence
  Description of Artificial Sequence: Synthetic peptide
KHIVGQDGG

SEQ ID NO: 36612 - protein, 9 aa, Artificial Sequence
  Description of Artificial Sequence: Synthetic peptide
KCLPYMEMF

SEQ ID NO: 36613 - protein, 9 aa, Artificial Sequence
  Description of Artificial Sequence: Synthetic peptide
KAYMMMEGP

SEQ ID NO: 36614 - protein, 9 aa, Artificial Sequence
  Description of Artificial Sequence: Synthetic peptide
SVTYHEWHP

SEQ ID NO: 36615 - protein, 9 aa, Artificial Sequence
  Description of Artificial Sequence: Synthetic peptide
YSDMFHKDH

SEQ ID NO: 36616 - protein, 9 aa, Artificial Sequence
  Description of Artificial Sequence: Synthetic peptide
GNECFHNVE

SEQ ID NO: 36617 - protein, 9 aa, Artificial Sequence
  Description of Artificial Sequence: Synthetic peptide
IAKIGNCVW

SEQ ID NO: 36618 - protein, 9 aa, Artificial Sequence
  Description of Artificial Sequence: Synthetic peptide
SGNQIVQAP

SEQ ID NO: 36619 - protein, 9 aa, Artificial Sequence
  Description of Artificial Sequence: Synthetic peptide
ASFFLNPLE

SEQ ID NO: 36620 - protein, 9 aa, Artificial Sequence
  Description of Artificial Sequence: Synthetic peptide
DMKQKAEYT

SEQ ID NO: 36621 - protein, 9 aa, Artificial Sequence
  Description of Artificial Sequence: Synthetic peptide
MMEATHKLS

SEQ ID NO: 36622 - protein, 9 aa, Artificial Sequence
  Description of Artificial Sequence: Synthetic peptide
GCEEVGRCQ

SEQ ID NO: 36623 - protein, 9 aa, Artificial Sequence
  Description of Artificial Sequence: Synthetic peptide
CIHPVLVTM

SEQ ID NO: 36624 - protein, 9 aa, Artificial Sequence
  Description of Artificial Sequence: Synthetic peptide
YDWGRVTLN

SEQ ID NO: 36625 - protein, 9 aa, Artificial Sequence
  Description of Artificial Sequence: Synthetic peptide
QKAIVAQND

SEQ ID NO: 36626 - protein, 9 aa, Artificial Sequence
  Description of Artificial Sequence: Synthetic peptide
TFTYEAKFW

SEQ ID NO: 36627 - protein, 9 aa, Artificial Sequence
  Description of Artificial Sequence: Synthetic peptide
ISWISHASP

SEQ ID NO: 36628 - protein, 9 aa, Artificial Sequence
  Description of Artificial Sequence: Synthetic peptide
PCQQLMCFM

SEQ ID NO: 36629 - protein, 9 aa, Artificial Sequence
  Description of Artificial Sequence: Synthetic peptide
VSVQSRAQL

SEQ ID NO: 36630 - protein, 9 aa, Artificial Sequence
  Description of Artificial Sequence: Synthetic peptide
NVCDNGHEI

SEQ ID NO: 36631 - protein, 9 aa, Artificial Sequence
  Description of Artificial Sequence: Synthetic peptide
HFQPVFMQP

SEQ ID NO: 36632 - protein, 9 aa, Artificial Sequence
  Description of Artificial Sequence: Synthetic peptide
HMEQCWCNE

SEQ ID NO: 36633 - protein, 9 aa, Artificial Sequence
  Description of Artificial Sequence: Synthetic peptide
LPPPEEKWL

SEQ ID NO: 36634 - protein, 9 aa, Artificial Sequence
  Description of Artificial Sequence: Synthetic peptide
ESAEPRMIP

SEQ ID NO: 36635 - protein, 9 aa, Artificial Sequence
  Description of Artificial Sequence: Synthetic peptide
ICIRGARAD

SEQ ID NO: 36636 - protein, 9 aa, Artificial Sequence
  Description of Artificial Sequence: Synthetic peptide
KKHKGWCRA

SEQ ID NO: 36637 - protein, 9 aa, Artificial Sequence
  Description of Artificial Sequence: Synthetic peptide
AEVPYVMQQ

SEQ ID NO: 36638 - protein, 9 aa, Artificial Sequence
  Description of Artificial Sequence: Synthetic peptide
MAEQMERDF

SEQ ID NO: 36639 - protein, 9 aa, Artificial Sequence
  Description of Artificial Sequence: Synthetic peptide
ITASIKDQW

SEQ ID NO: 36640 - protein, 9 aa, Artificial Sequence
  Description of Artificial Sequence: Synthetic peptide
ETDCMEGGH

SEQ ID NO: 36641 - protein, 9 aa, Artificial Sequence
  Description of Artificial Sequence: Synthetic peptide
QFAQLWCAK

SEQ ID NO: 36642 - protein, 9 aa, Artificial Sequence
  Description of Artificial Sequence: Synthetic peptide
KACMSHQGR

SEQ ID NO: 36643 - protein, 9 aa, Artificial Sequence
  Description of Artificial Sequence: Synthetic peptide
GLFEGSPGA

SEQ ID NO: 36644 - protein, 9 aa, Artificial Sequence
  Description of Artificial Sequence: Synthetic peptide
AYHCYMSWM

SEQ ID NO: 36645 - protein, 9 aa, Artificial Sequence
  Description of Artificial Sequence: Synthetic peptide
GQQTIEMSY

SEQ ID NO: 36646 - protein, 9 aa, Artificial Sequence
  Description of Artificial Sequence: Synthetic peptide
ATGTYNLQE

SEQ ID NO: 36647 - protein, 9 aa, Artificial Sequence
  Description of Artificial Sequence: Synthetic peptide
GHLFNNNEW

SEQ ID NO: 36648 - protein, 9 aa, Artificial Sequence
  Description of Artificial Sequence: Synthetic peptide
FAQQIINAS

SEQ ID NO: 36649 - protein, 9 aa, Artificial Sequence
  Description of Artificial Sequence: Synthetic peptide
AGMYKCQED

SEQ ID NO: 36650 - protein, 9 aa, Artificial Sequence
  Description of Artificial Sequence: Synthetic peptide
LEIGGKTRT

SEQ ID NO: 36651 - protein, 9 aa, Artificial Sequence
  Description of Artificial Sequence: Synthetic peptide
NWTGNMQWA

SEQ ID NO: 36652 - protein, 9 aa, Artificial Sequence
  Description of Artificial Sequence: Synthetic peptide
DIEFLDCEN

SEQ ID NO: 36653 - protein, 9 aa, Artificial Sequence
  Description of Artificial Sequence: Synthetic peptide
KMAGIGCWY

SEQ ID NO: 36654 - protein, 9 aa, Artificial Sequence
  Description of Artificial Sequence: Synthetic peptide
QCTAHNTCM

SEQ ID NO: 36655 - protein, 9 aa, Artificial Sequence
  Description of Artificial Sequence: Synthetic peptide
LHGIINQDN

SEQ ID NO: 36656 - protein, 9 aa, Artificial Sequence
  Description of Artificial Sequence: Synthetic peptide
AAGREYWLY

SEQ ID NO: 36657 - protein, 9 aa, Artificial Sequence
  Description of Artificial Sequence: Synthetic peptide
AAVPVNKLT

SEQ ID NO: 36658 - protein, 9 aa, Artificial Sequence
  Description of Artificial Sequence: Synthetic peptide
ADQSYNEYY

SEQ ID NO: 36659 - protein, 9 aa, Artificial Sequence
  Description of Artificial Sequence: Synthetic peptide
AELCNNIIK

SEQ ID NO: 36660 - protein, 9 aa, Artificial Sequence
  Description of Artificial Sequence: Synthetic peptide
AEYTHDCAM

SEQ ID NO: 36661 - protein, 9 aa, Artificial Sequence
  Description of Artificial Sequence: Synthetic peptide
AGHVFWDGE

SEQ ID NO: 36662 - protein, 9 aa, Artificial Sequence
  Description of Artificial Sequence: Synthetic peptide
AIGPSWMGV

SEQ ID NO: 36663 - protein, 9 aa, Artificial Sequence
  Description of Artificial Sequence: Synthetic peptide
AIRPHHAKS

SEQ ID NO: 36664 - protein, 9 aa, Artificial Sequence
  Description of Artificial Sequence: Synthetic peptide
AQKMEDQSL

SEQ ID NO: 36665 - protein, 9 aa, Artificial Sequence
  Description of Artificial Sequence: Synthetic peptide
AQKMKDQSL

SEQ ID NO: 36666 - protein, 9 aa, Artificial Sequence
  Description of Artificial Sequence: Synthetic peptide
ATEMFVQHD

SEQ ID NO: 36667 - protein, 9 aa, Artificial Sequence
  Description of Artificial Sequence: Synthetic peptide
ATIAQWCIH

SEQ ID NO: 36668 - protein, 9 aa, Artificial Sequence
  Description of Artificial Sequence: Synthetic peptide
AYQWFMSQP

SEQ ID NO: 36669 - protein, 9 aa, Artificial Sequence
  Description of Artificial Sequence: Synthetic peptide
CDSIYHHMP

SEQ ID NO: 36670 - protein, 9 aa, Artificial Sequence
  Description of Artificial Sequence: Synthetic peptide
CHFKYPRIE

SEQ ID NO: 36671 - protein, 9 aa, Artificial Sequence
  Description of Artificial Sequence: Synthetic peptide
CSYIESWQI

SEQ ID NO: 36672 - protein, 9 aa, Artificial Sequence
  Description of Artificial Sequence: Synthetic peptide
CTGHFSCQQ

SEQ ID NO: 36673 - protein, 9 aa, Artificial Sequence
  Description of Artificial Sequence: Synthetic peptide
CTYTMATNR

SEQ ID NO: 36674 - protein, 9 aa, Artificial Sequence
  Description of Artificial Sequence: Synthetic peptide
DAHKFARYP

SEQ ID NO: 36675 - protein, 9 aa, Artificial Sequence
  Description of Artificial Sequence: Synthetic peptide
DAKSPCDSF

SEQ ID NO: 36676 - protein, 9 aa, Artificial Sequence
  Description of Artificial Sequence: Synthetic peptide
DAVNDLTCP

SEQ ID NO: 36677 - protein, 9 aa, Artificial Sequence
  Description of Artificial Sequence: Synthetic peptide
DDTEMSYCY

SEQ ID NO: 36678 - protein, 9 aa, Artificial Sequence
  Description of Artificial Sequence: Synthetic peptide
DFWYSMAFP

SEQ ID NO: 36679 - protein, 9 aa, Artificial Sequence
  Description of Artificial Sequence: Synthetic peptide
DGAWVKMMY

SEQ ID NO: 36680 - protein, 9 aa, Artificial Sequence
  Description of Artificial Sequence: Synthetic peptide
DQAELLSDH

SEQ ID NO: 36681 - protein, 9 aa, Artificial Sequence
  Description of Artificial Sequence: Synthetic peptide
DQFRALDLR

SEQ ID NO: 36682 - protein, 9 aa, Artificial Sequence
  Description of Artificial Sequence: Synthetic peptide
DVASYCQLQ

SEQ ID NO: 36683 - protein, 9 aa, Artificial Sequence
  Description of Artificial Sequence: Synthetic peptide
EAGMWPSKA

SEQ ID NO: 36684 - protein, 9 aa, Artificial Sequence
  Description of Artificial Sequence: Synthetic peptide
EAWMVMNDQ

SEQ ID NO: 36685 - protein, 9 aa, Artificial Sequence
  Description of Artificial Sequence: Synthetic peptide
ECRSNDYDR

SEQ ID NO: 36686 - protein, 9 aa, Artificial Sequence
  Description of Artificial Sequence: Synthetic peptide
EDVFYQCNH

SEQ ID NO: 36687 - protein, 9 aa, Artificial Sequence
  Description of Artificial Sequence: Synthetic peptide
EFRRNELGA

SEQ ID NO: 36688 - protein, 9 aa, Artificial Sequence
  Description of Artificial Sequence: Synthetic peptide
EFWVCTRNH

SEQ ID NO: 36689 - protein, 9 aa, Artificial Sequence
  Description of Artificial Sequence: Synthetic peptide
EGEARCHWH

SEQ ID NO: 36690 - protein, 9 aa, Artificial Sequence
  Description of Artificial Sequence: Synthetic peptide
EHFRAYTQY

SEQ ID NO: 36691 - protein, 9 aa, Artificial Sequence
  Description of Artificial Sequence: Synthetic peptide
EIKCSGGYA

SEQ ID NO: 36692 - protein, 9 aa, Artificial Sequence
  Description of Artificial Sequence: Synthetic peptide
EKRESFGCG

SEQ ID NO: 36693 - protein, 9 aa, Artificial Sequence
  Description of Artificial Sequence: Synthetic peptide
ENEMYMKQD

SEQ ID NO: 36694 - protein, 9 aa, Artificial Sequence
  Description of Artificial Sequence: Synthetic peptide
EQDRGPMQC

SEQ ID NO: 36695 - protein, 9 aa, Artificial Sequence
  Description of Artificial Sequence: Synthetic peptide
ESMKFRTFS

SEQ ID NO: 36696 - protein, 9 aa, Artificial Sequence
  Description of Artificial Sequence: Synthetic peptide
FASAFANSD

SEQ ID NO: 36697 - protein, 9 aa, Artificial Sequence
  Description of Artificial Sequence: Synthetic peptide
FMHSYEKFD

SEQ ID NO: 36698 - protein, 9 aa, Artificial Sequence
  Description of Artificial Sequence: Synthetic peptide
FNIAESTPM

SEQ ID NO: 36699 - protein, 9 aa, Artificial Sequence
  Description of Artificial Sequence: Synthetic peptide
FNPNFVTKT

SEQ ID NO: 36700 - protein, 9 aa, Artificial Sequence
  Description of Artificial Sequence: Synthetic peptide
FNVFIDRSN

SEQ ID NO: 36701 - protein, 9 aa, Artificial Sequence
  Description of Artificial Sequence: Synthetic peptide
FQRRTQLIT

SEQ ID NO: 36702 - protein, 9 aa, Artificial Sequence
  Description of Artificial Sequence: Synthetic peptide
FTVFYRLQW

SEQ ID NO: 36703 - protein, 9 aa, Artificial Sequence
  Description of Artificial Sequence: Synthetic peptide
FTVGGLAFA

SEQ ID NO: 36704 - protein, 9 aa, Artificial Sequence
  Description of Artificial Sequence: Synthetic peptide
GDEYYDTMG

SEQ ID NO: 36705 - protein, 9 aa, Artificial Sequence
  Description of Artificial Sequence: Synthetic peptide
GDLSRDQED

SEQ ID NO: 36706 - protein, 9 aa, Artificial Sequence
  Description of Artificial Sequence: Synthetic peptide
GFRTQDMIE

SEQ ID NO: 36707 - protein, 9 aa, Artificial Sequence
  Description of Artificial Sequence: Synthetic peptide
GPCMETQHH

SEQ ID NO: 36708 - protein, 9 aa, Artificial Sequence
  Description of Artificial Sequence: Synthetic peptide
GSEQKIHIN

SEQ ID NO: 36709 - protein, 9 aa, Artificial Sequence
  Description of Artificial Sequence: Synthetic peptide
GTQSYLVKN

SEQ ID NO: 36710 - protein, 9 aa, Artificial Sequence
  Description of Artificial Sequence: Synthetic peptide
HATFTWRCL

SEQ ID NO: 36711 - protein, 9 aa, Artificial Sequence
  Description of Artificial Sequence: Synthetic peptide
HFWITEQMD

SEQ ID NO: 36712 - protein, 9 aa, Artificial Sequence
  Description of Artificial Sequence: Synthetic peptide
HGCVETNEH

SEQ ID NO: 36713 - protein, 9 aa, Artificial Sequence
  Description of Artificial Sequence: Synthetic peptide
HMLKMEMFN

SEQ ID NO: 36714 - protein, 9 aa, Artificial Sequence
  Description of Artificial Sequence: Synthetic peptide
HNDQYEHDE

SEQ ID NO: 36715 - protein, 9 aa, Artificial Sequence
  Description of Artificial Sequence: Synthetic peptide
HVDNDNMHE

SEQ ID NO: 36716 - protein, 9 aa, Artificial Sequence
  Description of Artificial Sequence: Synthetic peptide
HVYYCPEAI

SEQ ID NO: 36717 - protein, 9 aa, Artificial Sequence
  Description of Artificial Sequence: Synthetic peptide
IACPMGIHD

SEQ ID NO: 36718 - protein, 9 aa, Artificial Sequence
  Description of Artificial Sequence: Synthetic peptide
IAESYRMMH

SEQ ID NO: 36719 - protein, 9 aa, Artificial Sequence
  Description of Artificial Sequence: Synthetic peptide
IDSWMMIPS

SEQ ID NO: 36720 - protein, 9 aa, Artificial Sequence
  Description of Artificial Sequence: Synthetic peptide
IGEPQAYMT

SEQ ID NO: 36721 - protein, 9 aa, Artificial Sequence
  Description of Artificial Sequence: Synthetic peptide
INHGVNHQW

SEQ ID NO: 36722 - protein, 9 aa, Artificial Sequence
  Description of Artificial Sequence: Synthetic peptide
ISMRSECKD

SEQ ID NO: 36723 - protein, 9 aa, Artificial Sequence
  Description of Artificial Sequence: Synthetic peptide
ISWITRADI

SEQ ID NO: 36724 - protein, 9 aa, Artificial Sequence
  Description of Artificial Sequence: Synthetic peptide
IVNLQHYHG

SEQ ID NO: 36725 - protein, 9 aa, Artificial Sequence
  Description of Artificial Sequence: Synthetic peptide
IVSTSGNND

SEQ ID NO: 36726 - protein, 9 aa, Artificial Sequence
  Description of Artificial Sequence: Synthetic peptide
IWEDMKGKF

SEQ ID NO: 36727 - protein, 9 aa, Artificial Sequence
  Description of Artificial Sequence: Synthetic peptide
KAHLVLAGD

SEQ ID NO: 36728 - protein, 9 aa, Artificial Sequence
  Description of Artificial Sequence: Synthetic peptide
KAMTDAANW

SEQ ID NO: 36729 - protein, 9 aa, Artificial Sequence
  Description of Artificial Sequence: Synthetic peptide
KCAITETSD

SEQ ID NO: 36730 - protein, 9 aa, Artificial Sequence
  Description of Artificial Sequence: Synthetic peptide
KFTTAMTEF

SEQ ID NO: 36731 - protein, 9 aa, Artificial Sequence
  Description of Artificial Sequence: Synthetic peptide
KIVESHGTN

SEQ ID NO: 36732 - protein, 9 aa, Artificial Sequence
  Description of Artificial Sequence: Synthetic peptide
KKTEEMPVT

SEQ ID NO: 36733 - protein, 9 aa, Artificial Sequence
  Description of Artificial Sequence: Synthetic peptide
KPCTQAAEP

SEQ ID NO: 36734 - protein, 9 aa, Artificial Sequence
  Description of Artificial Sequence: Synthetic peptide
KSYSCEQTS

SEQ ID NO: 36735 - protein, 9 aa, Artificial Sequence
  Description of Artificial Sequence: Synthetic peptide
KTHVMHWEV

SEQ ID NO: 36736 - protein, 9 aa, Artificial Sequence
  Description of Artificial Sequence: Synthetic peptide
KTYSVMYSP

SEQ ID NO: 36737 - protein, 9 aa, Artificial Sequence
  Description of Artificial Sequence: Synthetic peptide
KVCNHELFG

SEQ ID NO: 36738 - protein, 9 aa, Artificial Sequence
  Description of Artificial Sequence: Synthetic peptide
LAAMSLTWW

SEQ ID NO: 36739 - protein, 9 aa, Artificial Sequence
  Description of Artificial Sequence: Synthetic peptide
LDGVFFEFF

SEQ ID NO: 36740 - protein, 9 aa, Artificial Sequence
  Description of Artificial Sequence: Synthetic peptide
LFRSHTCHH

SEQ ID NO: 36741 - protein, 9 aa, Artificial Sequence
  Description of Artificial Sequence: Synthetic peptide
LRTQLLLQD

SEQ ID NO: 36742 - protein, 9 aa, Artificial Sequence
  Description of Artificial Sequence: Synthetic peptide
LSDSYVRKF

SEQ ID NO: 36743 - protein, 9 aa, Artificial Sequence
  Description of Artificial Sequence: Synthetic peptide
LVKGREQFN

SEQ ID NO: 36744 - protein, 9 aa, Artificial Sequence
  Description of Artificial Sequence: Synthetic peptide
LVQCHHVHC

SEQ ID NO: 36745 - protein, 9 aa, Artificial Sequence
  Description of Artificial Sequence: Synthetic peptide
MAMWARTEP

SEQ ID NO: 36746 - protein, 9 aa, Artificial Sequence
  Description of Artificial Sequence: Synthetic peptide
MDSQHNKWQ

SEQ ID NO: 36747 - protein, 9 aa, Artificial Sequence
  Description of Artificial Sequence: Synthetic peptide
MEQFDHCPI

SEQ ID NO: 36748 - protein, 9 aa, Artificial Sequence
  Description of Artificial Sequence: Synthetic peptide
MFRIEAACP

SEQ ID NO: 36749 - protein, 9 aa, Artificial Sequence
  Description of Artificial Sequence: Synthetic peptide
MGAHFMNPP

SEQ ID NO: 36750 - protein, 9 aa, Artificial Sequence
  Description of Artificial Sequence: Synthetic peptide
MKTFWDATF

SEQ ID NO: 36751 - protein, 9 aa, Artificial Sequence
  Description of Artificial Sequence: Synthetic peptide
MVGPSWDTT

SEQ ID NO: 36752 - protein, 9 aa, Artificial Sequence
  Description of Artificial Sequence: Synthetic peptide
MYYLMQKTG

SEQ ID NO: 36753 - protein, 9 aa, Artificial Sequence
  Description of Artificial Sequence: Synthetic peptide
NAMLWRMHN

SEQ ID NO: 36754 - protein, 9 aa, Artificial Sequence
  Description of Artificial Sequence: Synthetic peptide
NCCQEHNVG

SEQ ID NO: 36755 - protein, 9 aa, Artificial Sequence
  Description of Artificial Sequence: Synthetic peptide
NEGKWFWAS

SEQ ID NO: 36756 - protein, 9 aa, Artificial Sequence
  Description of Artificial Sequence: Synthetic peptide
NHDEKLWVP

SEQ ID NO: 36757 - protein, 9 aa, Artificial Sequence
  Description of Artificial Sequence: Synthetic peptide
NHPVGWDND

SEQ ID NO: 36758 - protein, 9 aa, Artificial Sequence
  Description of Artificial Sequence: Synthetic peptide
NHVTMCVLR

SEQ ID NO: 36759 - protein, 9 aa, Artificial Sequence
  Description of Artificial Sequence: Synthetic peptide
NIVDCDDVR

SEQ ID NO: 36760 - protein, 9 aa, Artificial Sequence
  Description of Artificial Sequence: Synthetic peptide
NLGWQEWDS

SEQ ID NO: 36761 - protein, 9 aa, Artificial Sequence
  Description of Artificial Sequence: Synthetic peptide
NNPFSRYMP

SEQ ID NO: 36762 - protein, 9 aa, Artificial Sequence
  Description of Artificial Sequence: Synthetic peptide
NSMWLCTNQ

SEQ ID NO: 36763 - protein, 9 aa, Artificial Sequence
  Description of Artificial Sequence: Synthetic peptide
NSVMMTMIA

SEQ ID NO: 36764 - protein, 9 aa, Artificial Sequence
  Description of Artificial Sequence: Synthetic peptide
NSVVMTMIA

SEQ ID NO: 36765 - protein, 9 aa, Artificial Sequence
  Description of Artificial Sequence: Synthetic peptide
NTIKVEDLG

SEQ ID NO: 36766 - protein, 9 aa, Artificial Sequence
  Description of Artificial Sequence: Synthetic peptide
NWGDQRRHV

SEQ ID NO: 36767 - protein, 9 aa, Artificial Sequence
  Description of Artificial Sequence: Synthetic peptide
NYAQYYRAW

SEQ ID NO: 36768 - protein, 9 aa, Artificial Sequence
  Description of Artificial Sequence: Synthetic peptide
NYCTYHSTH

SEQ ID NO: 36769 - protein, 9 aa, Artificial Sequence
  Description of Artificial Sequence: Synthetic peptide
PADHKQTSV

SEQ ID NO: 36770 - protein, 9 aa, Artificial Sequence
  Description of Artificial Sequence: Synthetic peptide
PFCESACHI

SEQ ID NO: 36771 - protein, 9 aa, Artificial Sequence
  Description of Artificial Sequence: Synthetic peptide
PGDRTISMW

SEQ ID NO: 36772 - protein, 9 aa, Artificial Sequence
  Description of Artificial Sequence: Synthetic peptide
PGMMYQFAW

SEQ ID NO: 36773 - protein, 9 aa, Artificial Sequence
  Description of Artificial Sequence: Synthetic peptide
PHVCGEGKI

SEQ ID NO: 36774 - protein, 9 aa, Artificial Sequence
  Description of Artificial Sequence: Synthetic peptide
PKGWADPCP

SEQ ID NO: 36775 - protein, 9 aa, Artificial Sequence
  Description of Artificial Sequence: Synthetic peptide
PNWGLDMAP

SEQ ID NO: 36776 - protein, 9 aa, Artificial Sequence
  Description of Artificial Sequence: Synthetic peptide
PTCIIMKGN

SEQ ID NO: 36777 - protein, 9 aa, Artificial Sequence
  Description of Artificial Sequence: Synthetic peptide
PTFHRIGSY

SEQ ID NO: 36778 - protein, 9 aa, Artificial Sequence
  Description of Artificial Sequence: Synthetic peptide
QAARMQKYQ

SEQ ID NO: 36779 - protein, 9 aa, Artificial Sequence
  Description of Artificial Sequence: Synthetic peptide
QAVSAVDKC

SEQ ID NO: 36780 - protein, 9 aa, Artificial Sequence
  Description of Artificial Sequence: Synthetic peptide
QDLEWIAGC

SEQ ID NO: 36781 - protein, 9 aa, Artificial Sequence
  Description of Artificial Sequence: Synthetic peptide
QHHPINCAT

SEQ ID NO: 36782 - protein, 9 aa, Artificial Sequence
  Description of Artificial Sequence: Synthetic peptide
QHMVTSHNP

SEQ ID NO: 36783 - protein, 9 aa, Artificial Sequence
  Description of Artificial Sequence: Synthetic peptide
QHNTSYPSF

SEQ ID NO: 36784 - protein, 9 aa, Artificial Sequence
  Description of Artificial Sequence: Synthetic peptide
QPTLPDEHE

SEQ ID NO: 36785 - protein, 9 aa, Artificial Sequence
  Description of Artificial Sequence: Synthetic peptide
QTVPPMVQE

SEQ ID NO: 36786 - protein, 9 aa, Artificial Sequence
  Description of Artificial Sequence: Synthetic peptide
QWIVFTCII

SEQ ID NO: 36787 - protein, 9 aa, Artificial Sequence
  Description of Artificial Sequence: Synthetic peptide
QWSDIMNCD

SEQ ID NO: 36788 - protein, 9 aa, Artificial Sequence
  Description of Artificial Sequence: Synthetic peptide
QYAHHYNIE

SEQ ID NO: 36789 - protein, 9 aa, Artificial Sequence
  Description of Artificial Sequence: Synthetic peptide
QYVDMYTQQ

SEQ ID NO: 36790 - protein, 9 aa, Artificial Sequence
  Description of Artificial Sequence: Synthetic peptide
RCDTHRSCT

SEQ ID NO: 36791 - protein, 9 aa, Artificial Sequence
  Description of Artificial Sequence: Synthetic peptide
RDSSNWLCI

SEQ ID NO: 36792 - protein, 9 aa, Artificial Sequence
  Description of Artificial Sequence: Synthetic peptide
RNYLPLQFD

SEQ ID NO: 36793 - protein, 9 aa, Artificial Sequence
  Description of Artificial Sequence: Synthetic peptide
RSMLGCHTN

SEQ ID NO: 36794 - protein, 9 aa, Artificial Sequence
  Description of Artificial Sequence: Synthetic peptide
RTEACTSLP

SEQ ID NO: 36795 - protein, 9 aa, Artificial Sequence
  Description of Artificial Sequence: Synthetic peptide
RTQWCIADP

SEQ ID NO: 36796 - protein, 9 aa, Artificial Sequence
  Description of Artificial Sequence: Synthetic peptide
RTYYEENGR

SEQ ID NO: 36797 - protein, 9 aa, Artificial Sequence
  Description of Artificial Sequence: Synthetic peptide
SATDMTMLT

SEQ ID NO: 36798 - protein, 9 aa, Artificial Sequence
  Description of Artificial Sequence: Synthetic peptide
SDYEKFLAY

SEQ ID NO: 36799 - protein, 9 aa, Artificial Sequence
  Description of Artificial Sequence: Synthetic peptide
SEHWHEDAW

SEQ ID NO: 36800 - protein, 9 aa, Artificial Sequence
  Description of Artificial Sequence: Synthetic peptide
SGNSQNAFM

SEQ ID NO: 36801 - protein, 9 aa, Artificial Sequence
  Description of Artificial Sequence: Synthetic peptide
SHQHMWHQT

SEQ ID NO: 36802 - protein, 9 aa, Artificial Sequence
  Description of Artificial Sequence: Synthetic peptide
SIETMDTNA

SEQ ID NO: 36803 - protein, 9 aa, Artificial Sequence
  Description of Artificial Sequence: Synthetic peptide
SILNAMSLQ

SEQ ID NO: 36804 - protein, 9 aa, Artificial Sequence
  Description of Artificial Sequence: Synthetic peptide
SNYFNNFGF

SEQ ID NO: 36805 - protein, 9 aa, Artificial Sequence
  Description of Artificial Sequence: Synthetic peptide
SNYFNNFWF

SEQ ID NO: 36806 - protein, 9 aa, Artificial Sequence
  Description of Artificial Sequence: Synthetic peptide
SPPNLRAFP

SEQ ID NO: 36807 - protein, 9 aa, Artificial Sequence
  Description of Artificial Sequence: Synthetic peptide
SPSIDRFWV

SEQ ID NO: 36808 - protein, 9 aa, Artificial Sequence
  Description of Artificial Sequence: Synthetic peptide
SPYWVMRMG

SEQ ID NO: 36809 - protein, 9 aa, Artificial Sequence
  Description of Artificial Sequence: Synthetic peptide
SQKVHIDNN

SEQ ID NO: 36810 - protein, 9 aa, Artificial Sequence
  Description of Artificial Sequence: Synthetic peptide
STHYASTYL

SEQ ID NO: 36811 - protein, 9 aa, Artificial Sequence
  Description of Artificial Sequence: Synthetic peptide
SVADHYHLK

SEQ ID NO: 36812 - protein, 9 aa, Artificial Sequence
  Description of Artificial Sequence: Synthetic peptide
SVAMQMHSW

SEQ ID NO: 36813 - protein, 9 aa, Artificial Sequence
  Description of Artificial Sequence: Synthetic peptide
SVCWIWWTF

SEQ ID NO: 36814 - protein, 9 aa, Artificial Sequence
  Description of Artificial Sequence: Synthetic peptide
SVKPHYSCW

SEQ ID NO: 36815 - protein, 9 aa, Artificial Sequence
  Description of Artificial Sequence: Synthetic peptide
SVVYEAIWA

SEQ ID NO: 36816 - protein, 9 aa, Artificial Sequence
  Description of Artificial Sequence: Synthetic peptide
SWHAEVVNQ

SEQ ID NO: 36817 - protein, 9 aa, Artificial Sequence
  Description of Artificial Sequence: Synthetic peptide
TAIHMNWRQ

SEQ ID NO: 36818 - protein, 9 aa, Artificial Sequence
  Description of Artificial Sequence: Synthetic peptide
TAPLVYPHC

SEQ ID NO: 36819 - protein, 9 aa, Artificial Sequence
  Description of Artificial Sequence: Synthetic peptide
TASDAENYQ

SEQ ID NO: 36820 - protein, 9 aa, Artificial Sequence
  Description of Artificial Sequence: Synthetic peptide
TCDRSLAEY

SEQ ID NO: 36821 - protein, 9 aa, Artificial Sequence
  Description of Artificial Sequence: Synthetic peptide
TCDWSLAEY

SEQ ID NO: 36822 - protein, 9 aa, Artificial Sequence
  Description of Artificial Sequence: Synthetic peptide
TCGYTHIFS

SEQ ID NO: 36823 - protein, 9 aa, Artificial Sequence
  Description of Artificial Sequence: Synthetic peptide
TCQHNQHVA

SEQ ID NO: 36824 - protein, 9 aa, Artificial Sequence
  Description of Artificial Sequence: Synthetic peptide
TCSPDEQLD

SEQ ID NO: 36825 - protein, 9 aa, Artificial Sequence
  Description of Artificial Sequence: Synthetic peptide
TEALAQFMA

SEQ ID NO: 36826 - protein, 9 aa, Artificial Sequence
  Description of Artificial Sequence: Synthetic peptide
TEKEFMYIC

SEQ ID NO: 36827 - protein, 9 aa, Artificial Sequence
  Description of Artificial Sequence: Synthetic peptide
THIGSYTQF

SEQ ID NO: 36828 - protein, 9 aa, Artificial Sequence
  Description of Artificial Sequence: Synthetic peptide
THQYWYGQE

SEQ ID NO: 36829 - protein, 9 aa, Artificial Sequence
  Description of Artificial Sequence: Synthetic peptide
TIKGQHGMT

SEQ ID NO: 36830 - protein, 9 aa, Artificial Sequence
  Description of Artificial Sequence: Synthetic peptide
TISDHGAEW

SEQ ID NO: 36831 - protein, 9 aa, Artificial Sequence
  Description of Artificial Sequence: Synthetic peptide
TLLFAHDYA

SEQ ID NO: 36832 - protein, 9 aa, Artificial Sequence
  Description of Artificial Sequence: Synthetic peptide
TRATSLTPC

SEQ ID NO: 36833 - protein, 9 aa, Artificial Sequence
  Description of Artificial Sequence: Synthetic peptide
TTIAQWCVH

SEQ ID NO: 36834 - protein, 9 aa, Artificial Sequence
  Description of Artificial Sequence: Synthetic peptide
TTNQNSEAM

SEQ ID NO: 36835 - protein, 9 aa, Artificial Sequence
  Description of Artificial Sequence: Synthetic peptide
TWHNPRNDK

SEQ ID NO: 36836 - protein, 9 aa, Artificial Sequence
  Description of Artificial Sequence: Synthetic peptide
VCQYCELRG

SEQ ID NO: 36837 - protein, 9 aa, Artificial Sequence
  Description of Artificial Sequence: Synthetic peptide
VRMVPESEW

SEQ ID NO: 36838 - protein, 9 aa, Artificial Sequence
  Description of Artificial Sequence: Synthetic peptide
VTNWLSLQY

SEQ ID NO: 36839 - protein, 9 aa, Artificial Sequence
  Description of Artificial Sequence: Synthetic peptide
VVLPWGLRE

SEQ ID NO: 36840 - protein, 9 aa, Artificial Sequence
  Description of Artificial Sequence: Synthetic peptide
WKFMFEKWR

SEQ ID NO: 36841 - protein, 9 aa, Artificial Sequence
  Description of Artificial Sequence: Synthetic peptide
WKTVCPSRQ

SEQ ID NO: 36842 - protein, 9 aa, Artificial Sequence
  Description of Artificial Sequence: Synthetic peptide
WLAPCAKCG

SEQ ID NO: 36843 - protein, 9 aa, Artificial Sequence
  Description of Artificial Sequence: Synthetic peptide
WNCSVYTCS

SEQ ID NO: 36844 - protein, 9 aa, Artificial Sequence
  Description of Artificial Sequence: Synthetic peptide
WSPLYQTVR

SEQ ID NO: 36845 - protein, 9 aa, Artificial Sequence
  Description of Artificial Sequence: Synthetic peptide
YIHTVENND

SEQ ID NO: 36846 - protein, 9 aa, Artificial Sequence
  Description of Artificial Sequence: Synthetic peptide
YQNHYQKKW

SEQ ID NO: 36847 - protein, 9 aa, Artificial Sequence
  Description of Artificial Sequence: Synthetic peptide
IKHIATESR

SEQ ID NO: 36848 - protein, 9 aa, Artificial Sequence
  Description of Artificial Sequence: Synthetic peptide
VMGTGRMQH

SEQ ID NO: 36849 - protein, 9 aa, Artificial Sequence
  Description of Artificial Sequence: Synthetic peptide
NWGDQRQHV

SEQ ID NO: 36850 - protein, 9 aa, Artificial Sequence
  Description of Artificial Sequence: Synthetic peptide
LVFLRDQHY

SEQ ID NO: 36851 - protein, 9 aa, Artificial Sequence
  Description of Artificial Sequence: Synthetic peptide
CRWTPEIFQ

SEQ ID NO: 36852 - protein, 9 aa, Artificial Sequence
  Description of Artificial Sequence: Synthetic peptide
KRIKMPPPK

SEQ ID NO: 36853 - protein, 9 aa, Artificial Sequence
  Description of Artificial Sequence: Synthetic peptide
SWYYDEQSN

SEQ ID NO: 36854 - protein, 9 aa, Artificial Sequence
  Description of Artificial Sequence: Synthetic peptide
NNYKVQQDG

SEQ ID NO: 36855 - protein, 9 aa, Artificial Sequence
  Description of Artificial Sequence: Synthetic peptide
HHQLHLKDS

SEQ ID NO: 36856 - protein, 9 aa, Artificial Sequence
  Description of Artificial Sequence: Synthetic peptide
QDDVLDVTE

SEQ ID NO: 36857 - protein, 9 aa, Artificial Sequence
  Description of Artificial Sequence: Synthetic peptide
VKNHYEGGP

SEQ ID NO: 36858 - protein, 9 aa, Artificial Sequence
  Description of Artificial Sequence: Synthetic peptide
KPSQCLPHN

SEQ ID NO: 36859 - protein, 9 aa, Artificial Sequence
  Description of Artificial Sequence: Synthetic peptide
DYDPDIKDQ

SEQ ID NO: 36860 - protein, 9 aa, Artificial Sequence
  Description of Artificial Sequence: Synthetic peptide
CDSIYRHMP

SEQ ID NO: 36861 - protein, 9 aa, Artificial Sequence
  Description of Artificial Sequence: Synthetic peptide
GAMMGNSLP

SEQ ID NO: 36862 - protein, 9 aa, Artificial Sequence
  Description of Artificial Sequence: Synthetic peptide
CTQGYGDMP

SEQ ID NO: 36863 - protein, 9 aa, Artificial Sequence
  Description of Artificial Sequence: Synthetic peptide
MIYTGWDMM

SEQ ID NO: 36864 - protein, 9 aa, Artificial Sequence
  Description of Artificial Sequence: Synthetic peptide
IGKEFIVMP

SEQ ID NO: 36865 - protein, 9 aa, Artificial Sequence
  Description of Artificial Sequence: Synthetic peptide
TVNTYEHCW

SEQ ID NO: 36866 - protein, 9 aa, Artificial Sequence
  Description of Artificial Sequence: Synthetic peptide
ECASVDISY

SEQ ID NO: 36867 - protein, 9 aa, Artificial Sequence
  Description of Artificial Sequence: Synthetic peptide
VNSCRHAWY

SEQ ID NO: 36868 - protein, 9 aa, Artificial Sequence
  Description of Artificial Sequence: Synthetic peptide
AVFAPNGEV

SEQ ID NO: 36869 - protein, 9 aa, Artificial Sequence
  Description of Artificial Sequence: Synthetic peptide
KIESRNHYS

SEQ ID NO: 36870 - protein, 9 aa, Artificial Sequence
  Description of Artificial Sequence: Synthetic peptide
NSQYAHEPP

SEQ ID NO: 36871 - protein, 9 aa, Artificial Sequence
  Description of Artificial Sequence: Synthetic peptide
AIGHMTQLP

SEQ ID NO: 36872 - protein, 9 aa, Artificial Sequence
  Description of Artificial Sequence: Synthetic peptide
QIIPQFAYF

SEQ ID NO: 36873 - protein, 9 aa, Artificial Sequence
  Description of Artificial Sequence: Synthetic peptide
YFMTWGKCD

SEQ ID NO: 36874 - protein, 9 aa, Artificial Sequence
  Description of Artificial Sequence: Synthetic peptide
IKHGGWGFH

SEQ ID NO: 36875 - protein, 9 aa, Artificial Sequence
  Description of Artificial Sequence: Synthetic peptide
ECVSKWVVF

SEQ ID NO: 36876 - protein, 9 aa, Artificial Sequence
  Description of Artificial Sequence: Synthetic peptide
SPPNWRAFP

SEQ ID NO: 36877 - protein, 9 aa, Artificial Sequence
  Description of Artificial Sequence: Synthetic peptide
AFIQQSNQD

SEQ ID NO: 36878 - protein, 9 aa, Artificial Sequence
  Description of Artificial Sequence: Synthetic peptide
VSNQFKYND

SEQ ID NO: 36879 - protein, 9 aa, Artificial Sequence
  Description of Artificial Sequence: Synthetic peptide
QMHRLFNDE

SEQ ID NO: 36880 - protein, 9 aa, Artificial Sequence
  Description of Artificial Sequence: Synthetic peptide
SKMEEVMDP

SEQ ID NO: 36881 - protein, 9 aa, Artificial Sequence
  Description of Artificial Sequence: Synthetic peptide
MEQPTCMME

SEQ ID NO: 36882 - protein, 9 aa, Artificial Sequence
  Description of Artificial Sequence: Synthetic peptide
QPGTQEVLQ

SEQ ID NO: 36883 - protein, 9 aa, Artificial Sequence
  Description of Artificial Sequence: Synthetic peptide
GCQGIPRMQ

SEQ ID NO: 36884 - protein, 9 aa, Artificial Sequence
  Description of Artificial Sequence: Synthetic peptide
YSDNLERCG

SEQ ID NO: 36885 - protein, 9 aa, Artificial Sequence
  Description of Artificial Sequence: Synthetic peptide
YANQAMDYM

SEQ ID NO: 36886 - protein, 9 aa, Artificial Sequence
  Description of Artificial Sequence: Synthetic peptide
TWPGGCKSV

SEQ ID NO: 36887 - protein, 9 aa, Artificial Sequence
  Description of Artificial Sequence: Synthetic peptide
AVDDCESER

SEQ ID NO: 36888 - protein, 9 aa, Artificial Sequence
  Description of Artificial Sequence: Synthetic peptide
KGVWDPSSM

SEQ ID NO: 36889 - protein, 9 aa, Artificial Sequence
  Description of Artificial Sequence: Synthetic peptide
MTGIVLQNN

SEQ ID NO: 36890 - protein, 9 aa, Artificial Sequence
  Description of Artificial Sequence: Synthetic peptide
QVNYYTKGM

SEQ ID NO: 36891 - protein, 9 aa, Artificial Sequence
  Description of Artificial Sequence: Synthetic peptide
QIGSHSFSC

SEQ ID NO: 36892 - protein, 9 aa, Artificial Sequence
  Description of Artificial Sequence: Synthetic peptide
EINREVRQN

SEQ ID NO: 36893 - protein, 9 aa, Artificial Sequence
  Description of Artificial Sequence: Synthetic peptide
QTIIGNVWG

SEQ ID NO: 36894 - protein, 9 aa, Artificial Sequence
  Description of Artificial Sequence: Synthetic peptide
EIGLNGAGT

SEQ ID NO: 36895 - protein, 9 aa, Artificial Sequence
  Description of Artificial Sequence: Synthetic peptide
RTVQEDGCG

SEQ ID NO: 36896 - protein, 9 aa, Artificial Sequence
  Description of Artificial Sequence: Synthetic peptide
NCHIDHVQD

SEQ ID NO: 36897 - protein, 9 aa, Artificial Sequence
  Description of Artificial Sequence: Synthetic peptide
EIKCSVKLE

SEQ ID NO: 36898 - protein, 9 aa, Artificial Sequence
  Description of Artificial Sequence: Synthetic peptide
WVPTPWRTH

SEQ ID NO: 36899 - protein, 9 aa, Artificial Sequence
  Description of Artificial Sequence: Synthetic peptide
CTSTMHAFQ

SEQ ID NO: 36900 - protein, 9 aa, Artificial Sequence
  Description of Artificial Sequence: Synthetic peptide
MSANMMTKG

SEQ ID NO: 36901 - protein, 9 aa, Artificial Sequence
  Description of Artificial Sequence: Synthetic peptide
LFNYEGRTQ

SEQ ID NO: 36902 - protein, 9 aa, Artificial Sequence
  Description of Artificial Sequence: Synthetic peptide
CPNLPGMIN

SEQ ID NO: 36903 - protein, 9 aa, Artificial Sequence
  Description of Artificial Sequence: Synthetic peptide
SAAWQFGGS

SEQ ID NO: 36904 - protein, 9 aa, Artificial Sequence
  Description of Artificial Sequence: Synthetic peptide
MMATAPELQ

SEQ ID NO: 36905 - protein, 9 aa, Artificial Sequence
  Description of Artificial Sequence: Synthetic peptide
NYAQYYRTW

SEQ ID NO: 36906 - protein, 9 aa, Artificial Sequence
  Description of Artificial Sequence: Synthetic peptide
SQDCGRPES

SEQ ID NO: 36907 - protein, 9 aa, Artificial Sequence
  Description of Artificial Sequence: Synthetic peptide
HEAQKEDCN

SEQ ID NO: 36908 - protein, 9 aa, Artificial Sequence
  Description of Artificial Sequence: Synthetic peptide
EMDSITQFH

SEQ ID NO: 36909 - protein, 9 aa, Artificial Sequence
  Description of Artificial Sequence: Synthetic peptide
FHMNSWLSR

SEQ ID NO: 36910 - protein, 9 aa, Artificial Sequence
  Description of Artificial Sequence: Synthetic peptide
YWIPTHVLN

SEQ ID NO: 36911 - protein, 9 aa, Artificial Sequence
  Description of Artificial Sequence: Synthetic peptide
WYEMMVGYH

SEQ ID NO: 36912 - protein, 9 aa, Artificial Sequence
  Description of Artificial Sequence: Synthetic peptide
WDVKFWETM

SEQ ID NO: 36913 - protein, 9 aa, Artificial Sequence
  Description of Artificial Sequence: Synthetic peptide
SGTSIHTYL

SEQ ID NO: 36914 - protein, 9 aa, Artificial Sequence
  Description of Artificial Sequence: Synthetic peptide
ECVEWNAPD

SEQ ID NO: 36915 - protein, 9 aa, Artificial Sequence
  Description of Artificial Sequence: Synthetic peptide
MIEGHAAPR

SEQ ID NO: 36916 - protein, 9 aa, Artificial Sequence
  Description of Artificial Sequence: Synthetic peptide
PILLCHAPE

SEQ ID NO: 36917 - protein, 9 aa, Artificial Sequence
  Description of Artificial Sequence: Synthetic peptide
VFLPIARDQ

SEQ ID NO: 36918 - protein, 9 aa, Artificial Sequence
  Description of Artificial Sequence: Synthetic peptide
FPEASITRW

SEQ ID NO: 36919 - protein, 9 aa, Artificial Sequence
  Description of Artificial Sequence: Synthetic peptide
PKGVSCPNL

SEQ ID NO: 36920 - protein, 9 aa, Artificial Sequence
  Description of Artificial Sequence: Synthetic peptide
KHDGEIRVL

SEQ ID NO: 36921 - protein, 9 aa, Artificial Sequence
  Description of Artificial Sequence: Synthetic peptide
DSDPITVDL

SEQ ID NO: 36922 - protein, 9 aa, Artificial Sequence
  Description of Artificial Sequence: Synthetic peptide
SDCEKFLAY

SEQ ID NO: 36923 - protein, 9 aa, Artificial Sequence
  Description of Artificial Sequence: Synthetic peptide
DNVVMWWNQ

SEQ ID NO: 36924 - protein, 9 aa, Artificial Sequence
  Description of Artificial Sequence: Synthetic peptide
KDFNFEAQG

SEQ ID NO: 36925 - protein, 9 aa, Artificial Sequence
  Description of Artificial Sequence: Synthetic peptide
PYGQCMRTF

SEQ ID NO: 36926 - protein, 9 aa, Artificial Sequence
  Description of Artificial Sequence: Synthetic peptide
TNKPKNVLM

SEQ ID NO: 36927 - protein, 9 aa, Artificial Sequence
  Description of Artificial Sequence: Synthetic peptide
TLGMLLENI

SEQ ID NO: 36928 - protein, 9 aa, Artificial Sequence
  Description of Artificial Sequence: Synthetic peptide
DVNLQITTH

SEQ ID NO: 36929 - protein, 9 aa, Artificial Sequence
  Description of Artificial Sequence: Synthetic peptide
ENDYVHGCM

SEQ ID NO: 36930 - protein, 9 aa, Artificial Sequence
  Description of Artificial Sequence: Synthetic peptide
IDLSHCRCT

SEQ ID NO: 36931 - protein, 9 aa, Artificial Sequence
  Description of Artificial Sequence: Synthetic peptide
NRTAGSCAC

SEQ ID NO: 36932 - protein, 9 aa, Artificial Sequence
  Description of Artificial Sequence: Synthetic peptide
LAKPKCKLT

SEQ ID NO: 36933 - protein, 9 aa, Artificial Sequence
  Description of Artificial Sequence: Synthetic peptide
ATGLPARFP

SEQ ID NO: 36934 - protein, 9 aa, Artificial Sequence
  Description of Artificial Sequence: Synthetic peptide
NHAWTKPWQ

SEQ ID NO: 36935 - protein, 9 aa, Artificial Sequence
  Description of Artificial Sequence: Synthetic peptide
CCTQFKCVS

SEQ ID NO: 36936 - protein, 9 aa, Artificial Sequence
  Description of Artificial Sequence: Synthetic peptide
AHVFEPQRV

SEQ ID NO: 36937 - protein, 9 aa, Artificial Sequence
  Description of Artificial Sequence: Synthetic peptide
ALFCYNDHV

SEQ ID NO: 36938 - protein, 9 aa, Artificial Sequence
  Description of Artificial Sequence: Synthetic peptide
AMMPCVGWQ

SEQ ID NO: 36939 - protein, 9 aa, Artificial Sequence
  Description of Artificial Sequence: Synthetic peptide
AQLCCHNET

SEQ ID NO: 36940 - protein, 9 aa, Artificial Sequence
  Description of Artificial Sequence: Synthetic peptide
ASCEWSWRL

SEQ ID NO: 36941 - protein, 9 aa, Artificial Sequence
  Description of Artificial Sequence: Synthetic peptide
AVHWTQKRE

SEQ ID NO: 36942 - protein, 9 aa, Artificial Sequence
  Description of Artificial Sequence: Synthetic peptide
AVTKCMKTP

SEQ ID NO: 36943 - protein, 9 aa, Artificial Sequence
  Description of Artificial Sequence: Synthetic peptide
AWAEWCEYS

SEQ ID NO: 36944 - protein, 9 aa, Artificial Sequence
  Description of Artificial Sequence: Synthetic peptide
AWKDIPSAA

SEQ ID NO: 36945 - protein, 9 aa, Artificial Sequence
  Description of Artificial Sequence: Synthetic peptide
AWMHAQLSR

SEQ ID NO: 36946 - protein, 9 aa, Artificial Sequence
  Description of Artificial Sequence: Synthetic peptide
AWMHTQLSR

SEQ ID NO: 36947 - protein, 9 aa, Artificial Sequence
  Description of Artificial Sequence: Synthetic peptide
AWTEWCEYS

SEQ ID NO: 36948 - protein, 9 aa, Artificial Sequence
  Description of Artificial Sequence: Synthetic peptide
AYYQTICAA

SEQ ID NO: 36949 - protein, 9 aa, Artificial Sequence
  Description of Artificial Sequence: Synthetic peptide
CCDLWDDMS

SEQ ID NO: 36950 - protein, 9 aa, Artificial Sequence
  Description of Artificial Sequence: Synthetic peptide
CCGPSATAQ

SEQ ID NO: 36951 - protein, 9 aa, Artificial Sequence
  Description of Artificial Sequence: Synthetic peptide
CFCMKEWPN

SEQ ID NO: 36952 - protein, 9 aa, Artificial Sequence
  Description of Artificial Sequence: Synthetic peptide
CIPPPGYKD

SEQ ID NO: 36953 - protein, 9 aa, Artificial Sequence
  Description of Artificial Sequence: Synthetic peptide
CKEAWADCT

SEQ ID NO: 36954 - protein, 9 aa, Artificial Sequence
  Description of Artificial Sequence: Synthetic peptide
CKNVETQMA

SEQ ID NO: 36955 - protein, 9 aa, Artificial Sequence
  Description of Artificial Sequence: Synthetic peptide
CSAAFQLQP

SEQ ID NO: 36956 - protein, 9 aa, Artificial Sequence
  Description of Artificial Sequence: Synthetic peptide
CSTKAHRQY

SEQ ID NO: 36957 - protein, 9 aa, Artificial Sequence
  Description of Artificial Sequence: Synthetic peptide
CTEQIHRHV

SEQ ID NO: 36958 - protein, 9 aa, Artificial Sequence
  Description of Artificial Sequence: Synthetic peptide
CTQQEASMM

SEQ ID NO: 36959 - protein, 9 aa, Artificial Sequence
  Description of Artificial Sequence: Synthetic peptide
CVLQENANA

SEQ ID NO: 36960 - protein, 9 aa, Artificial Sequence
  Description of Artificial Sequence: Synthetic peptide
CVTYLDAWA

SEQ ID NO: 36961 - protein, 9 aa, Artificial Sequence
  Description of Artificial Sequence: Synthetic peptide
CWGFACLLI

SEQ ID NO: 36962 - protein, 9 aa, Artificial Sequence
  Description of Artificial Sequence: Synthetic peptide
CWWFACLLI

SEQ ID NO: 36963 - protein, 9 aa, Artificial Sequence
  Description of Artificial Sequence: Synthetic peptide
DADSSIQLG

SEQ ID NO: 36964 - protein, 9 aa, Artificial Sequence
  Description of Artificial Sequence: Synthetic peptide
DADSTIQLG

SEQ ID NO: 36965 - protein, 9 aa, Artificial Sequence
  Description of Artificial Sequence: Synthetic peptide
DAGIGMKFY

SEQ ID NO: 36966 - protein, 9 aa, Artificial Sequence
  Description of Artificial Sequence: Synthetic peptide
DELWWIANG

SEQ ID NO: 36967 - protein, 9 aa, Artificial Sequence
  Description of Artificial Sequence: Synthetic peptide
DFAYQCYLN

SEQ ID NO: 36968 - protein, 9 aa, Artificial Sequence
  Description of Artificial Sequence: Synthetic peptide
DFRTFNQES

SEQ ID NO: 36969 - protein, 9 aa, Artificial Sequence
  Description of Artificial Sequence: Synthetic peptide
DHEHYTWFG

SEQ ID NO: 36970 - protein, 9 aa, Artificial Sequence
  Description of Artificial Sequence: Synthetic peptide
DHHTCLEQY

SEQ ID NO: 36971 - protein, 9 aa, Artificial Sequence
  Description of Artificial Sequence: Synthetic peptide
DKRAWDWLR

SEQ ID NO: 36972 - protein, 9 aa, Artificial Sequence
  Description of Artificial Sequence: Synthetic peptide
DLMKIDKWD

SEQ ID NO: 36973 - protein, 9 aa, Artificial Sequence
  Description of Artificial Sequence: Synthetic peptide
DMHMLNCCE

SEQ ID NO: 36974 - protein, 9 aa, Artificial Sequence
  Description of Artificial Sequence: Synthetic peptide
DMHMLNCCG

SEQ ID NO: 36975 - protein, 9 aa, Artificial Sequence
  Description of Artificial Sequence: Synthetic peptide
DPLKHCYDN

SEQ ID NO: 36976 - protein, 9 aa, Artificial Sequence
  Description of Artificial Sequence: Synthetic peptide
DRHNHDVAI

SEQ ID NO: 36977 - protein, 9 aa, Artificial Sequence
  Description of Artificial Sequence: Synthetic peptide
DRHNHDVTI

SEQ ID NO: 36978 - protein, 9 aa, Artificial Sequence
  Description of Artificial Sequence: Synthetic peptide
DSRQQMSLE

SEQ ID NO: 36979 - protein, 9 aa, Artificial Sequence
  Description of Artificial Sequence: Synthetic peptide
DTEYQTNAN

SEQ ID NO: 36980 - protein, 9 aa, Artificial Sequence
  Description of Artificial Sequence: Synthetic peptide
DVAHKDDML

SEQ ID NO: 36981 - protein, 9 aa, Artificial Sequence
  Description of Artificial Sequence: Synthetic peptide
DVQQANGRY

SEQ ID NO: 36982 - protein, 9 aa, Artificial Sequence
  Description of Artificial Sequence: Synthetic peptide
DVTMAEVIG

SEQ ID NO: 36983 - protein, 9 aa, Artificial Sequence
  Description of Artificial Sequence: Synthetic peptide
DVWTLPECS

SEQ ID NO: 36984 - protein, 9 aa, Artificial Sequence
  Description of Artificial Sequence: Synthetic peptide
DYEVCGNWS

SEQ ID NO: 36985 - protein, 9 aa, Artificial Sequence
  Description of Artificial Sequence: Synthetic peptide
DYEYVMSIK

SEQ ID NO: 36986 - protein, 9 aa, Artificial Sequence
  Description of Artificial Sequence: Synthetic peptide
DYNESDMQN

SEQ ID NO: 36987 - protein, 9 aa, Artificial Sequence
  Description of Artificial Sequence: Synthetic peptide
EEMLVTRAS

SEQ ID NO: 36988 - protein, 9 aa, Artificial Sequence
  Description of Artificial Sequence: Synthetic peptide
EHETVWHNP

SEQ ID NO: 36989 - protein, 9 aa, Artificial Sequence
  Description of Artificial Sequence: Synthetic peptide
EHNIYNNGL

SEQ ID NO: 36990 - protein, 9 aa, Artificial Sequence
  Description of Artificial Sequence: Synthetic peptide
EIMQPMQGM

SEQ ID NO: 36991 - protein, 9 aa, Artificial Sequence
  Description of Artificial Sequence: Synthetic peptide
ELNCLSRYV

SEQ ID NO: 36992 - protein, 9 aa, Artificial Sequence
  Description of Artificial Sequence: Synthetic peptide
ENGPVRRIG

SEQ ID NO: 36993 - protein, 9 aa, Artificial Sequence
  Description of Artificial Sequence: Synthetic peptide
ENQRMRQIN

SEQ ID NO: 36994 - protein, 9 aa, Artificial Sequence
  Description of Artificial Sequence: Synthetic peptide
ERTDTNLWS

SEQ ID NO: 36995 - protein, 9 aa, Artificial Sequence
  Description of Artificial Sequence: Synthetic peptide
ERTDTNVWS

SEQ ID NO: 36996 - protein, 9 aa, Artificial Sequence
  Description of Artificial Sequence: Synthetic peptide
ESGSTRNDG

SEQ ID NO: 36997 - protein, 9 aa, Artificial Sequence
  Description of Artificial Sequence: Synthetic peptide
ESYEHQMHR

SEQ ID NO: 36998 - protein, 9 aa, Artificial Sequence
  Description of Artificial Sequence: Synthetic peptide
ETHRTSNNC

SEQ ID NO: 36999 - protein, 9 aa, Artificial Sequence
  Description of Artificial Sequence: Synthetic peptide
ETHYPKCQE

SEQ ID NO: 37000 - protein, 9 aa, Artificial Sequence
  Description of Artificial Sequence: Synthetic peptide
ETHYPKYQE

SEQ ID NO: 37001 - protein, 9 aa, Artificial Sequence
  Description of Artificial Sequence: Synthetic peptide
ETKFRLFPK

SEQ ID NO: 37002 - protein, 9 aa, Artificial Sequence
  Description of Artificial Sequence: Synthetic peptide
EVMIAAALP

SEQ ID NO: 37003 - protein, 9 aa, Artificial Sequence
  Description of Artificial Sequence: Synthetic peptide
EVMIAAALS

SEQ ID NO: 37004 - protein, 9 aa, Artificial Sequence
  Description of Artificial Sequence: Synthetic peptide
EVVGYPIIC

SEQ ID NO: 37005 - protein, 9 aa, Artificial Sequence
  Description of Artificial Sequence: Synthetic peptide
EWDDWYSQS

SEQ ID NO: 37006 - protein, 9 aa, Artificial Sequence
  Description of Artificial Sequence: Synthetic peptide
FAQLKWMMS

SEQ ID NO: 37007 - protein, 9 aa, Artificial Sequence
  Description of Artificial Sequence: Synthetic peptide
FICQIPETK

SEQ ID NO: 37008 - protein, 9 aa, Artificial Sequence
  Description of Artificial Sequence: Synthetic peptide
FWHCINACP

SEQ ID NO: 37009 - protein, 9 aa, Artificial Sequence
  Description of Artificial Sequence: Synthetic peptide
FWPCINACP

SEQ ID NO: 37010 - protein, 9 aa, Artificial Sequence
  Description of Artificial Sequence: Synthetic peptide
GAPRYHESR

SEQ ID NO: 37011 - protein, 9 aa, Artificial Sequence
  Description of Artificial Sequence: Synthetic peptide
GATRQEHAF

SEQ ID NO: 37012 - protein, 9 aa, Artificial Sequence
  Description of Artificial Sequence: Synthetic peptide
GATWQEHAF

SEQ ID NO: 37013 - protein, 9 aa, Artificial Sequence
  Description of Artificial Sequence: Synthetic peptide
GELWWIANG

SEQ ID NO: 37014 - protein, 9 aa, Artificial Sequence
  Description of Artificial Sequence: Synthetic peptide
GFVQKVNDT

SEQ ID NO: 37015 - protein, 9 aa, Artificial Sequence
  Description of Artificial Sequence: Synthetic peptide
GICWPNWYH

SEQ ID NO: 37016 - protein, 9 aa, Artificial Sequence
  Description of Artificial Sequence: Synthetic peptide
GQNIVEMSW

SEQ ID NO: 37017 - protein, 9 aa, Artificial Sequence
  Description of Artificial Sequence: Synthetic peptide
GVYKTNQPQ

SEQ ID NO: 37018 - protein, 9 aa, Artificial Sequence
  Description of Artificial Sequence: Synthetic peptide
GYEGFEIVD

SEQ ID NO: 37019 - protein, 9 aa, Artificial Sequence
  Description of Artificial Sequence: Synthetic peptide
GYEGSEIVD

SEQ ID NO: 37020 - protein, 9 aa, Artificial Sequence
  Description of Artificial Sequence: Synthetic peptide
GYEYVMSIK

SEQ ID NO: 37021 - protein, 9 aa, Artificial Sequence
  Description of Artificial Sequence: Synthetic peptide
HCSPDDMKC

SEQ ID NO: 37022 - protein, 9 aa, Artificial Sequence
  Description of Artificial Sequence: Synthetic peptide
HDFPFWSKG

SEQ ID NO: 37023 - protein, 9 aa, Artificial Sequence
  Description of Artificial Sequence: Synthetic peptide
HIHFDEWNC

SEQ ID NO: 37024 - protein, 9 aa, Artificial Sequence
  Description of Artificial Sequence: Synthetic peptide
HKGFLQEWI

SEQ ID NO: 37025 - protein, 9 aa, Artificial Sequence
  Description of Artificial Sequence: Synthetic peptide
HPAGYEKWW

SEQ ID NO: 37026 - protein, 9 aa, Artificial Sequence
  Description of Artificial Sequence: Synthetic peptide
HQKSEWPNT

SEQ ID NO: 37027 - protein, 9 aa, Artificial Sequence
  Description of Artificial Sequence: Synthetic peptide
HSDRDEIEE

SEQ ID NO: 37028 - protein, 9 aa, Artificial Sequence
  Description of Artificial Sequence: Synthetic peptide
HSDRDEIEG

SEQ ID NO: 37029 - protein, 9 aa, Artificial Sequence
  Description of Artificial Sequence: Synthetic peptide
HVLHQDFFI

SEQ ID NO: 37030 - protein, 9 aa, Artificial Sequence
  Description of Artificial Sequence: Synthetic peptide
HVLHQDFFT

SEQ ID NO: 37031 - protein, 9 aa, Artificial Sequence
  Description of Artificial Sequence: Synthetic peptide
HWNTGMLTN

SEQ ID NO: 37032 - protein, 9 aa, Artificial Sequence
  Description of Artificial Sequence: Synthetic peptide
HWYVVLRDW

SEQ ID NO: 37033 - protein, 9 aa, Artificial Sequence
  Description of Artificial Sequence: Synthetic peptide
IAKDMHEMS

SEQ ID NO: 37034 - protein, 9 aa, Artificial Sequence
  Description of Artificial Sequence: Synthetic peptide
IAVLHSSQR

SEQ ID NO: 37035 - protein, 9 aa, Artificial Sequence
  Description of Artificial Sequence: Synthetic peptide
IFALIPDAN

SEQ ID NO: 37036 - protein, 9 aa, Artificial Sequence
  Description of Artificial Sequence: Synthetic peptide
ILDNDQVTY

SEQ ID NO: 37037 - protein, 9 aa, Artificial Sequence
  Description of Artificial Sequence: Synthetic peptide
ILQCHEAIG

SEQ ID NO: 37038 - protein, 9 aa, Artificial Sequence
  Description of Artificial Sequence: Synthetic peptide
IMLMCTPRK

SEQ ID NO: 37039 - protein, 9 aa, Artificial Sequence
  Description of Artificial Sequence: Synthetic peptide
IPGFKHSDW

SEQ ID NO: 37040 - protein, 9 aa, Artificial Sequence
  Description of Artificial Sequence: Synthetic peptide
ISTTFQWYS

SEQ ID NO: 37041 - protein, 9 aa, Artificial Sequence
  Description of Artificial Sequence: Synthetic peptide
ITGAVQPFL

SEQ ID NO: 37042 - protein, 9 aa, Artificial Sequence
  Description of Artificial Sequence: Synthetic peptide
KGGACDACI

SEQ ID NO: 37043 - protein, 9 aa, Artificial Sequence
  Description of Artificial Sequence: Synthetic peptide
KKGWEFMYG

SEQ ID NO: 37044 - protein, 9 aa, Artificial Sequence
  Description of Artificial Sequence: Synthetic peptide
KKGWEVMYG

SEQ ID NO: 37045 - protein, 9 aa, Artificial Sequence
  Description of Artificial Sequence: Synthetic peptide
KVDPIRHGQ

SEQ ID NO: 37046 - protein, 9 aa, Artificial Sequence
  Description of Artificial Sequence: Synthetic peptide
KVPTDGANS

SEQ ID NO: 37047 - protein, 9 aa, Artificial Sequence
  Description of Artificial Sequence: Synthetic peptide
KYVRWFQAW

SEQ ID NO: 37048 - protein, 9 aa, Artificial Sequence
  Description of Artificial Sequence: Synthetic peptide
LAESHYPFE

SEQ ID NO: 37049 - protein, 9 aa, Artificial Sequence
  Description of Artificial Sequence: Synthetic peptide
LDTKWDQHI

SEQ ID NO: 37050 - protein, 9 aa, Artificial Sequence
  Description of Artificial Sequence: Synthetic peptide
LDTKWDQHV

SEQ ID NO: 37051 - protein, 9 aa, Artificial Sequence
  Description of Artificial Sequence: Synthetic peptide
LGGMHPCNN

SEQ ID NO: 37052 - protein, 9 aa, Artificial Sequence
  Description of Artificial Sequence: Synthetic peptide
LGGMHPYNN

SEQ ID NO: 37053 - protein, 9 aa, Artificial Sequence
  Description of Artificial Sequence: Synthetic peptide
LINKFPQQE

SEQ ID NO: 37054 - protein, 9 aa, Artificial Sequence
  Description of Artificial Sequence: Synthetic peptide
LISKFPQQE

SEQ ID NO: 37055 - protein, 9 aa, Artificial Sequence
  Description of Artificial Sequence: Synthetic peptide
LMEMTLRMG

SEQ ID NO: 37056 - protein, 9 aa, Artificial Sequence
  Description of Artificial Sequence: Synthetic peptide
LNNHMKKYP

SEQ ID NO: 37057 - protein, 9 aa, Artificial Sequence
  Description of Artificial Sequence: Synthetic peptide
LRISKWMTG

SEQ ID NO: 37058 - protein, 9 aa, Artificial Sequence
  Description of Artificial Sequence: Synthetic peptide
LVCDSGYAA

SEQ ID NO: 37059 - protein, 9 aa, Artificial Sequence
  Description of Artificial Sequence: Synthetic peptide
LVRIWHETM

SEQ ID NO: 37060 - protein, 9 aa, Artificial Sequence
  Description of Artificial Sequence: Synthetic peptide
LWECYGTHG

SEQ ID NO: 37061 - protein, 9 aa, Artificial Sequence
  Description of Artificial Sequence: Synthetic peptide
MAFMQGLGW

SEQ ID NO: 37062 - protein, 9 aa, Artificial Sequence
  Description of Artificial Sequence: Synthetic peptide
MDGQACLNQ

SEQ ID NO: 37063 - protein, 9 aa, Artificial Sequence
  Description of Artificial Sequence: Synthetic peptide
MDNQEDRCE

SEQ ID NO: 37064 - protein, 9 aa, Artificial Sequence
  Description of Artificial Sequence: Synthetic peptide
MFALIPDAN

SEQ ID NO: 37065 - protein, 9 aa, Artificial Sequence
  Description of Artificial Sequence: Synthetic peptide
MHAQRMKYP

SEQ ID NO: 37066 - protein, 9 aa, Artificial Sequence
  Description of Artificial Sequence: Synthetic peptide
MHTQRMKYP

SEQ ID NO: 37067 - protein, 9 aa, Artificial Sequence
  Description of Artificial Sequence: Synthetic peptide
MLMYLGHLT

SEQ ID NO: 37068 - protein, 9 aa, Artificial Sequence
  Description of Artificial Sequence: Synthetic peptide
MLMYLGHRT

SEQ ID NO: 37069 - protein, 9 aa, Artificial Sequence
  Description of Artificial Sequence: Synthetic peptide
MNEDCMQTS

SEQ ID NO: 37070 - protein, 9 aa, Artificial Sequence
  Description of Artificial Sequence: Synthetic peptide
MNHEHGPIG

SEQ ID NO: 37071 - protein, 9 aa, Artificial Sequence
  Description of Artificial Sequence: Synthetic peptide
MPRHKHSQT

SEQ ID NO: 37072 - protein, 9 aa, Artificial Sequence
  Description of Artificial Sequence: Synthetic peptide
MSDDVVLAL

SEQ ID NO: 37073 - protein, 9 aa, Artificial Sequence
  Description of Artificial Sequence: Synthetic peptide
MTVQNVPEM

SEQ ID NO: 37074 - protein, 9 aa, Artificial Sequence
  Description of Artificial Sequence: Synthetic peptide
MVDGPAASG

SEQ ID NO: 37075 - protein, 9 aa, Artificial Sequence
  Description of Artificial Sequence: Synthetic peptide
MYYVTQMCN

SEQ ID NO: 37076 - protein, 9 aa, Artificial Sequence
  Description of Artificial Sequence: Synthetic peptide
NAWMYVNMS

SEQ ID NO: 37077 - protein, 9 aa, Artificial Sequence
  Description of Artificial Sequence: Synthetic peptide
NAYPWHLFC

SEQ ID NO: 37078 - protein, 9 aa, Artificial Sequence
  Description of Artificial Sequence: Synthetic peptide
NAYSWHLFC

SEQ ID NO: 37079 - protein, 9 aa, Artificial Sequence
  Description of Artificial Sequence: Synthetic peptide
NIIKCVECC

SEQ ID NO: 37080 - protein, 9 aa, Artificial Sequence
  Description of Artificial Sequence: Synthetic peptide
NIIKCVEGC

SEQ ID NO: 37081 - protein, 9 aa, Artificial Sequence
  Description of Artificial Sequence: Synthetic peptide
NLRIHAHRT

SEQ ID NO: 37082 - protein, 9 aa, Artificial Sequence
  Description of Artificial Sequence: Synthetic peptide
NPMRPSVEQ

SEQ ID NO: 37083 - protein, 9 aa, Artificial Sequence
  Description of Artificial Sequence: Synthetic peptide
NVPIRALQK

SEQ ID NO: 37084 - protein, 9 aa, Artificial Sequence
  Description of Artificial Sequence: Synthetic peptide
PIALYANCS

SEQ ID NO: 37085 - protein, 9 aa, Artificial Sequence
  Description of Artificial Sequence: Synthetic peptide
PIELYANCS

SEQ ID NO: 37086 - protein, 9 aa, Artificial Sequence
  Description of Artificial Sequence: Synthetic peptide
PIGLYANCS

SEQ ID NO: 37087 - protein, 9 aa, Artificial Sequence
  Description of Artificial Sequence: Synthetic peptide
PLTTDCSPN

SEQ ID NO: 37088 - protein, 9 aa, Artificial Sequence
  Description of Artificial Sequence: Synthetic peptide
QGFADGRPT

SEQ ID NO: 37089 - protein, 9 aa, Artificial Sequence
  Description of Artificial Sequence: Synthetic peptide
QHLEINCVS

SEQ ID NO: 37090 - protein, 9 aa, Artificial Sequence
  Description of Artificial Sequence: Synthetic peptide
QLVYNMWDC

SEQ ID NO: 37091 - protein, 9 aa, Artificial Sequence
  Description of Artificial Sequence: Synthetic peptide
QMCMNISHY

SEQ ID NO: 37092 - protein, 9 aa, Artificial Sequence
  Description of Artificial Sequence: Synthetic peptide
QMCPSCCVT

SEQ ID NO: 37093 - protein, 9 aa, Artificial Sequence
  Description of Artificial Sequence: Synthetic peptide
QPDYEEPPS

SEQ ID NO: 37094 - protein, 9 aa, Artificial Sequence
  Description of Artificial Sequence: Synthetic peptide
QPWVPSILH

SEQ ID NO: 37095 - protein, 9 aa, Artificial Sequence
  Description of Artificial Sequence: Synthetic peptide
QVETVPYLS

SEQ ID NO: 37096 - protein, 9 aa, Artificial Sequence
  Description of Artificial Sequence: Synthetic peptide
QYGHKQFEY

SEQ ID NO: 37097 - protein, 9 aa, Artificial Sequence
  Description of Artificial Sequence: Synthetic peptide
QYRVDSYPF

SEQ ID NO: 37098 - protein, 9 aa, Artificial Sequence
  Description of Artificial Sequence: Synthetic peptide
RCQDKVMPY

SEQ ID NO: 37099 - protein, 9 aa, Artificial Sequence
  Description of Artificial Sequence: Synthetic peptide
RCSHDDMKC

SEQ ID NO: 37100 - protein, 9 aa, Artificial Sequence
  Description of Artificial Sequence: Synthetic peptide
RCSPDVMKC

SEQ ID NO: 37101 - protein, 9 aa, Artificial Sequence
  Description of Artificial Sequence: Synthetic peptide
RFDMWWLFI

SEQ ID NO: 37102 - protein, 9 aa, Artificial Sequence
  Description of Artificial Sequence: Synthetic peptide
RHKDTEWFI

SEQ ID NO: 37103 - protein, 9 aa, Artificial Sequence
  Description of Artificial Sequence: Synthetic peptide
RIEMFWCNN

SEQ ID NO: 37104 - protein, 9 aa, Artificial Sequence
  Description of Artificial Sequence: Synthetic peptide
RIEMFWCTN

SEQ ID NO: 37105 - protein, 9 aa, Artificial Sequence
  Description of Artificial Sequence: Synthetic peptide
RIKMFWCNN

SEQ ID NO: 37106 - protein, 9 aa, Artificial Sequence
  Description of Artificial Sequence: Synthetic peptide
RLDCNQFWE

SEQ ID NO: 37107 - protein, 9 aa, Artificial Sequence
  Description of Artificial Sequence: Synthetic peptide
SALTEPPFP

SEQ ID NO: 37108 - protein, 9 aa, Artificial Sequence
  Description of Artificial Sequence: Synthetic peptide
SAPTELPFP

SEQ ID NO: 37109 - protein, 9 aa, Artificial Sequence
  Description of Artificial Sequence: Synthetic peptide
SCGQFEWDN

SEQ ID NO: 37110 - protein, 9 aa, Artificial Sequence
  Description of Artificial Sequence: Synthetic peptide
SGSWEAFGF

SEQ ID NO: 37111 - protein, 9 aa, Artificial Sequence
  Description of Artificial Sequence: Synthetic peptide
SGSWEDFGF

SEQ ID NO: 37112 - protein, 9 aa, Artificial Sequence
  Description of Artificial Sequence: Synthetic peptide
SGSWEGFGF

SEQ ID NO: 37113 - protein, 9 aa, Artificial Sequence
  Description of Artificial Sequence: Synthetic peptide
SHVFEPQRV

SEQ ID NO: 37114 - protein, 9 aa, Artificial Sequence
  Description of Artificial Sequence: Synthetic peptide
SIEMFWCNN

SEQ ID NO: 37115 - protein, 9 aa, Artificial Sequence
  Description of Artificial Sequence: Synthetic peptide
SMHTWQTAK

SEQ ID NO: 37116 - protein, 9 aa, Artificial Sequence
  Description of Artificial Sequence: Synthetic peptide
SMHTWQTTK

SEQ ID NO: 37117 - protein, 9 aa, Artificial Sequence
  Description of Artificial Sequence: Synthetic peptide
SNERRHMCA

SEQ ID NO: 37118 - protein, 9 aa, Artificial Sequence
  Description of Artificial Sequence: Synthetic peptide
SPMGVAMNG

SEQ ID NO: 37119 - protein, 9 aa, Artificial Sequence
  Description of Artificial Sequence: Synthetic peptide
SSIPWNYYT

SEQ ID NO: 37120 - protein, 9 aa, Artificial Sequence
  Description of Artificial Sequence: Synthetic peptide
SVTYLDAWA

SEQ ID NO: 37121 - protein, 9 aa, Artificial Sequence
  Description of Artificial Sequence: Synthetic peptide
TCAGFCAPE

SEQ ID NO: 37122 - protein, 9 aa, Artificial Sequence
  Description of Artificial Sequence: Synthetic peptide
TCLHDYGYG

SEQ ID NO: 37123 - protein, 9 aa, Artificial Sequence
  Description of Artificial Sequence: Synthetic peptide
TLFCYNDHV

SEQ ID NO: 37124 - protein, 9 aa, Artificial Sequence
  Description of Artificial Sequence: Synthetic peptide
TNAYQYHVG

SEQ ID NO: 37125 - protein, 9 aa, Artificial Sequence
  Description of Artificial Sequence: Synthetic peptide
TPEHGLMVG

SEQ ID NO: 37126 - protein, 9 aa, Artificial Sequence
  Description of Artificial Sequence: Synthetic peptide
TQCEIFEAH

SEQ ID NO: 37127 - protein, 9 aa, Artificial Sequence
  Description of Artificial Sequence: Synthetic peptide
TRKVAEEMW

SEQ ID NO: 37128 - protein, 9 aa, Artificial Sequence
  Description of Artificial Sequence: Synthetic peptide
TRPVEMQPG

SEQ ID NO: 37129 - protein, 9 aa, Artificial Sequence
  Description of Artificial Sequence: Synthetic peptide
TVEPEYFQA

SEQ ID NO: 37130 - protein, 9 aa, Artificial Sequence
  Description of Artificial Sequence: Synthetic peptide
TVEPEYFQD

SEQ ID NO: 37131 - protein, 9 aa, Artificial Sequence
  Description of Artificial Sequence: Synthetic peptide
TVEPEYFRD

SEQ ID NO: 37132 - protein, 9 aa, Artificial Sequence
  Description of Artificial Sequence: Synthetic peptide
TVFMNAHWA

SEQ ID NO: 37133 - protein, 9 aa, Artificial Sequence
  Description of Artificial Sequence: Synthetic peptide
TVNEGEYGP

SEQ ID NO: 37134 - protein, 9 aa, Artificial Sequence
  Description of Artificial Sequence: Synthetic peptide
TWSYDPASS

SEQ ID NO: 37135 - protein, 9 aa, Artificial Sequence
  Description of Artificial Sequence: Synthetic peptide
VAEPSWQNN

SEQ ID NO: 37136 - protein, 9 aa, Artificial Sequence
  Description of Artificial Sequence: Synthetic peptide
VCTLNNHTM

SEQ ID NO: 37137 - protein, 9 aa, Artificial Sequence
  Description of Artificial Sequence: Synthetic peptide
VGNETHLGD

SEQ ID NO: 37138 - protein, 9 aa, Artificial Sequence
  Description of Artificial Sequence: Synthetic peptide
VGNKTHLGD

SEQ ID NO: 37139 - protein, 9 aa, Artificial Sequence
  Description of Artificial Sequence: Synthetic peptide
VHITVCRYG

SEQ ID NO: 37140 - protein, 9 aa, Artificial Sequence
  Description of Artificial Sequence: Synthetic peptide
VIYCHPMVP

SEQ ID NO: 37141 - protein, 9 aa, Artificial Sequence
  Description of Artificial Sequence: Synthetic peptide
VMDWWLDEN

SEQ ID NO: 37142 - protein, 9 aa, Artificial Sequence
  Description of Artificial Sequence: Synthetic peptide
VPHTTCHTH

SEQ ID NO: 37143 - protein, 9 aa, Artificial Sequence
  Description of Artificial Sequence: Synthetic peptide
VPHTTYHTH

SEQ ID NO: 37144 - protein, 9 aa, Artificial Sequence
  Description of Artificial Sequence: Synthetic peptide
VQKWGLMQQ

SEQ ID NO: 37145 - protein, 9 aa, Artificial Sequence
  Description of Artificial Sequence: Synthetic peptide
VSGSTWNDG

SEQ ID NO: 37146 - protein, 9 aa, Artificial Sequence
  Description of Artificial Sequence: Synthetic peptide
VTEFIMHCG

SEQ ID NO: 37147 - protein, 9 aa, Artificial Sequence
  Description of Artificial Sequence: Synthetic peptide
VTEVIMHCG

SEQ ID NO: 37148 - protein, 9 aa, Artificial Sequence
  Description of Artificial Sequence: Synthetic peptide
VTHTVHQET

SEQ ID NO: 37149 - protein, 9 aa, Artificial Sequence
  Description of Artificial Sequence: Synthetic peptide
VVVVNGVTE

SEQ ID NO: 37150 - protein, 9 aa, Artificial Sequence
  Description of Artificial Sequence: Synthetic peptide
VYQRFCGKR

SEQ ID NO: 37151 - protein, 9 aa, Artificial Sequence
  Description of Artificial Sequence: Synthetic peptide
WINPTEMGA

SEQ ID NO: 37152 - protein, 9 aa, Artificial Sequence
  Description of Artificial Sequence: Synthetic peptide
WIVLSDTIG

SEQ ID NO: 37153 - protein, 9 aa, Artificial Sequence
  Description of Artificial Sequence: Synthetic peptide
WKHCWMLMQ

SEQ ID NO: 37154 - protein, 9 aa, Artificial Sequence
  Description of Artificial Sequence: Synthetic peptide
WLRILRAPH

SEQ ID NO: 37155 - protein, 9 aa, Artificial Sequence
  Description of Artificial Sequence: Synthetic peptide
WLRILRAPY

SEQ ID NO: 37156 - protein, 9 aa, Artificial Sequence
  Description of Artificial Sequence: Synthetic peptide
WSQEQITFD

SEQ ID NO: 37157 - protein, 9 aa, Artificial Sequence
  Description of Artificial Sequence: Synthetic peptide
YNGKWPRLT

SEQ ID NO: 37158 - protein, 9 aa, Artificial Sequence
  Description of Artificial Sequence: Synthetic peptide
YNMCSAGSE

SEQ ID NO: 37159 - protein, 9 aa, Artificial Sequence
  Description of Artificial Sequence: Synthetic peptide
YNMYSAGSE

SEQ ID NO: 37160 - protein, 9 aa, Artificial Sequence
  Description of Artificial Sequence: Synthetic peptide
YSGCWWQHG

SEQ ID NO: 37161 - protein, 9 aa, Artificial Sequence
  Description of Artificial Sequence: Synthetic peptide
YSNRIPIGF

SEQ ID NO: 37162 - protein, 9 aa, Artificial Sequence
  Description of Artificial Sequence: Synthetic peptide
YVPPNYTEQ

SEQ ID NO: 37163 - protein, 9 aa, Artificial Sequence
  Description of Artificial Sequence: Synthetic peptide
LHWPITVQP

SEQ ID NO: 37164 - protein, 9 aa, Artificial Sequence
  Description of Artificial Sequence: Synthetic peptide
VLNKNWTMC

SEQ ID NO: 37165 - protein, 9 aa, Artificial Sequence
  Description of Artificial Sequence: Synthetic peptide
ISDCMDNYW

SEQ ID NO: 37166 - protein, 9 aa, Artificial Sequence
  Description of Artificial Sequence: Synthetic peptide
YCVNMQYDV

SEQ ID NO: 37167 - protein, 9 aa, Artificial Sequence
  Description of Artificial Sequence: Synthetic peptide
NSEREYAIR

SEQ ID NO: 37168 - protein, 9 aa, Artificial Sequence
  Description of Artificial Sequence: Synthetic peptide
RAQSHMEDY

SEQ ID NO: 37169 - protein, 9 aa, Artificial Sequence
  Description of Artificial Sequence: Synthetic peptide
EKFSANKFQ

SEQ ID NO: 37170 - protein, 9 aa, Artificial Sequence
  Description of Artificial Sequence: Synthetic peptide
RSGQGEGHM

SEQ ID NO: 37171 - protein, 9 aa, Artificial Sequence
  Description of Artificial Sequence: Synthetic peptide
GSHQLMWIG

SEQ ID NO: 37172 - protein, 9 aa, Artificial Sequence
  Description of Artificial Sequence: Synthetic peptide
YMWGTELGC

SEQ ID NO: 37173 - protein, 9 aa, Artificial Sequence
  Description of Artificial Sequence: Synthetic peptide
VTNLYEGSG

SEQ ID NO: 37174 - protein, 9 aa, Artificial Sequence
  Description of Artificial Sequence: Synthetic peptide
EMWHHLSTP

SEQ ID NO: 37175 - protein, 9 aa, Artificial Sequence
  Description of Artificial Sequence: Synthetic peptide
WWRATFGQA

SEQ ID NO: 37176 - protein, 9 aa, Artificial Sequence
  Description of Artificial Sequence: Synthetic peptide
NWQWIAVQD

SEQ ID NO: 37177 - protein, 9 aa, Artificial Sequence
  Description of Artificial Sequence: Synthetic peptide
HNLYGVYWG

SEQ ID NO: 37178 - protein, 9 aa, Artificial Sequence
  Description of Artificial Sequence: Synthetic peptide
NQSANWLQN

SEQ ID NO: 37179 - protein, 9 aa, Artificial Sequence
  Description of Artificial Sequence: Synthetic peptide
TGGQNYAHE

SEQ ID NO: 37180 - protein, 9 aa, Artificial Sequence
  Description of Artificial Sequence: Synthetic peptide
CSEPDPAWN

SEQ ID NO: 37181 - protein, 9 aa, Artificial Sequence
  Description of Artificial Sequence: Synthetic peptide
AFSSERVYA

SEQ ID NO: 37182 - protein, 9 aa, Artificial Sequence
  Description of Artificial Sequence: Synthetic peptide
CCILWESGT

SEQ ID NO: 37183 - protein, 9 aa, Artificial Sequence
  Description of Artificial Sequence: Synthetic peptide
CPQCDVMTS

SEQ ID NO: 37184 - protein, 9 aa, Artificial Sequence
  Description of Artificial Sequence: Synthetic peptide
QSSFWPAPT

SEQ ID NO: 37185 - protein, 9 aa, Artificial Sequence
  Description of Artificial Sequence: Synthetic peptide
SKWHFYLRQ

SEQ ID NO: 37186 - protein, 9 aa, Artificial Sequence
  Description of Artificial Sequence: Synthetic peptide
VRFTRTSLQ

SEQ ID NO: 37187 - protein, 9 aa, Artificial Sequence
  Description of Artificial Sequence: Synthetic peptide
KAEMKMGCN

SEQ ID NO: 37188 - protein, 9 aa, Artificial Sequence
  Description of Artificial Sequence: Synthetic peptide
MANHSISAD

SEQ ID NO: 37189 - protein, 9 aa, Artificial Sequence
  Description of Artificial Sequence: Synthetic peptide
IDRCCWDYA

SEQ ID NO: 37190 - protein, 9 aa, Artificial Sequence
  Description of Artificial Sequence: Synthetic peptide
EPGLLWHTQ

SEQ ID NO: 37191 - protein, 9 aa, Artificial Sequence
  Description of Artificial Sequence: Synthetic peptide
HTHDVRVHK

SEQ ID NO: 37192 - protein, 9 aa, Artificial Sequence
  Description of Artificial Sequence: Synthetic peptide
WKPAAYSNC

SEQ ID NO: 37193 - protein, 9 aa, Artificial Sequence
  Description of Artificial Sequence: Synthetic peptide
CGHTACSQC

SEQ ID NO: 37194 - protein, 9 aa, Artificial Sequence
  Description of Artificial Sequence: Synthetic peptide
DICLTHDHC

SEQ ID NO: 37195 - protein, 9 aa, Artificial Sequence
  Description of Artificial Sequence: Synthetic peptide
REIRDDYIY

SEQ ID NO: 37196 - protein, 9 aa, Artificial Sequence
  Description of Artificial Sequence: Synthetic peptide
VYTPKYQDL

SEQ ID NO: 37197 - protein, 9 aa, Artificial Sequence
  Description of Artificial Sequence: Synthetic peptide
KCESWKDFF

SEQ ID NO: 37198 - protein, 9 aa, Artificial Sequence
  Description of Artificial Sequence: Synthetic peptide
QNEPEKQVK

SEQ ID NO: 37199 - protein, 9 aa, Artificial Sequence
  Description of Artificial Sequence: Synthetic peptide
LASYESVEY

SEQ ID NO: 37200 - protein, 9 aa, Artificial Sequence
  Description of Artificial Sequence: Synthetic peptide
HMHFDEWNC

SEQ ID NO: 37201 - protein, 9 aa, Artificial Sequence
  Description of Artificial Sequence: Synthetic peptide
KPFHVEMSL

SEQ ID NO: 37202 - protein, 9 aa, Artificial Sequence
  Description of Artificial Sequence: Synthetic peptide
GRHYIAAGY

SEQ ID NO: 37203 - protein, 9 aa, Artificial Sequence
  Description of Artificial Sequence: Synthetic peptide
TTMTHSTLD

SEQ ID NO: 37204 - protein, 9 aa, Artificial Sequence
  Description of Artificial Sequence: Synthetic peptide
AEICHKRED

SEQ ID NO: 37205 - protein, 9 aa, Artificial Sequence
  Description of Artificial Sequence: Synthetic peptide
DAAEELRNA

SEQ ID NO: 37206 - protein, 9 aa, Artificial Sequence
  Description of Artificial Sequence: Synthetic peptide
LIAHDHKCF

SEQ ID NO: 37207 - protein, 9 aa, Artificial Sequence
  Description of Artificial Sequence: Synthetic peptide
YTKIESVHL

SEQ ID NO: 37208 - protein, 9 aa, Artificial Sequence
  Description of Artificial Sequence: Synthetic peptide
ALMMDDITP

SEQ ID NO: 37209 - protein, 9 aa, Artificial Sequence
  Description of Artificial Sequence: Synthetic peptide
TQSHWNKMS

SEQ ID NO: 37210 - protein, 9 aa, Artificial Sequence
  Description of Artificial Sequence: Synthetic peptide
KTFQYMGPT

SEQ ID NO: 37211 - protein, 9 aa, Artificial Sequence
  Description of Artificial Sequence: Synthetic peptide
SNHESMHMD

SEQ ID NO: 37212 - protein, 9 aa, Artificial Sequence
  Description of Artificial Sequence: Synthetic peptide
SCGQFEWGN

SEQ ID NO: 37213 - protein, 9 aa, Artificial Sequence
  Description of Artificial Sequence: Synthetic peptide
VEPYMFAPM

SEQ ID NO: 37214 - protein, 9 aa, Artificial Sequence
  Description of Artificial Sequence: Synthetic peptide
TTETRNWVL

SEQ ID NO: 37215 - protein, 9 aa, Artificial Sequence
  Description of Artificial Sequence: Synthetic peptide
TAQQFAHSG

SEQ ID NO: 37216 - protein, 9 aa, Artificial Sequence
  Description of Artificial Sequence: Synthetic peptide
EANPYTATK

SEQ ID NO: 37217 - protein, 9 aa, Artificial Sequence
  Description of Artificial Sequence: Synthetic peptide
FQGMCQLRE

SEQ ID NO: 37218 - protein, 9 aa, Artificial Sequence
  Description of Artificial Sequence: Synthetic peptide
IIIQRSRTY

SEQ ID NO: 37219 - protein, 9 aa, Artificial Sequence
  Description of Artificial Sequence: Synthetic peptide
DFTEEGEAY

SEQ ID NO: 37220 - protein, 9 aa, Artificial Sequence
  Description of Artificial Sequence: Synthetic peptide
MVKLDAQDA

SEQ ID NO: 37221 - protein, 9 aa, Artificial Sequence
  Description of Artificial Sequence: Synthetic peptide
EIMQPLQGM

SEQ ID NO: 37222 - protein, 9 aa, Artificial Sequence
  Description of Artificial Sequence: Synthetic peptide
VPNRNCQFS

SEQ ID NO: 37223 - protein, 9 aa, Artificial Sequence
  Description of Artificial Sequence: Synthetic peptide
CIHSVHFAA

SEQ ID NO: 37224 - protein, 9 aa, Artificial Sequence
  Description of Artificial Sequence: Synthetic peptide
MFAKWMSGS

SEQ ID NO: 37225 - protein, 9 aa, Artificial Sequence
  Description of Artificial Sequence: Synthetic peptide
ESESWIHMP

SEQ ID NO: 37226 - protein, 9 aa, Artificial Sequence
  Description of Artificial Sequence: Synthetic peptide
SALTELPFP

SEQ ID NO: 37227 - protein, 9 aa, Artificial Sequence
  Description of Artificial Sequence: Synthetic peptide
FGLQMMYIV

SEQ ID NO: 37228 - protein, 9 aa, Artificial Sequence
  Description of Artificial Sequence: Synthetic peptide
PAPMSEYNF

SEQ ID NO: 37229 - protein, 9 aa, Artificial Sequence
  Description of Artificial Sequence: Synthetic peptide
ECALAQYGS

SEQ ID NO: 37230 - protein, 9 aa, Artificial Sequence
  Description of Artificial Sequence: Synthetic peptide
SHMGKHHHM

SEQ ID NO: 37231 - protein, 9 aa, Artificial Sequence
  Description of Artificial Sequence: Synthetic peptide
ITAKQEVTS

SEQ ID NO: 37232 - protein, 9 aa, Artificial Sequence
  Description of Artificial Sequence: Synthetic peptide
AADCGSFDH

SEQ ID NO: 37233 - protein, 9 aa, Artificial Sequence
  Description of Artificial Sequence: Synthetic peptide
AADCGSFYH

SEQ ID NO: 37234 - protein, 9 aa, Artificial Sequence
  Description of Artificial Sequence: Synthetic peptide
ADHTENFSD

SEQ ID NO: 37235 - protein, 9 aa, Artificial Sequence
  Description of Artificial Sequence: Synthetic peptide
AEDCGSFDH

SEQ ID NO: 37236 - protein, 9 aa, Artificial Sequence
  Description of Artificial Sequence: Synthetic peptide
AEDTPYNIY

SEQ ID NO: 37237 - protein, 9 aa, Artificial Sequence
  Description of Artificial Sequence: Synthetic peptide
AESPQRWAL

SEQ ID NO: 37238 - protein, 9 aa, Artificial Sequence
  Description of Artificial Sequence: Synthetic peptide
AEWSEGECA

SEQ ID NO: 37239 - protein, 9 aa, Artificial Sequence
  Description of Artificial Sequence: Synthetic peptide
AEWSEWECA

SEQ ID NO: 37240 - protein, 9 aa, Artificial Sequence
  Description of Artificial Sequence: Synthetic peptide
AEWSEWEGA

SEQ ID NO: 37241 - protein, 9 aa, Artificial Sequence
  Description of Artificial Sequence: Synthetic peptide
AGQKHWHYS

SEQ ID NO: 37242 - protein, 9 aa, Artificial Sequence
  Description of Artificial Sequence: Synthetic peptide
AIDHHTEVV

SEQ ID NO: 37243 - protein, 9 aa, Artificial Sequence
  Description of Artificial Sequence: Synthetic peptide
ATFTFNEDN

SEQ ID NO: 37244 - protein, 9 aa, Artificial Sequence
  Description of Artificial Sequence: Synthetic peptide
AVCMEEREP

SEQ ID NO: 37245 - protein, 9 aa, Artificial Sequence
  Description of Artificial Sequence: Synthetic peptide
AWCWQVILM

SEQ ID NO: 37246 - protein, 9 aa, Artificial Sequence
  Description of Artificial Sequence: Synthetic peptide
CAPKQECSR

SEQ ID NO: 37247 - protein, 9 aa, Artificial Sequence
  Description of Artificial Sequence: Synthetic peptide
CDVWWFPNL

SEQ ID NO: 37248 - protein, 9 aa, Artificial Sequence
  Description of Artificial Sequence: Synthetic peptide
CNRQKYTAK

SEQ ID NO: 37249 - protein, 9 aa, Artificial Sequence
  Description of Artificial Sequence: Synthetic peptide
CNSSESHYY

SEQ ID NO: 37250 - protein, 9 aa, Artificial Sequence
  Description of Artificial Sequence: Synthetic peptide
CWTMLMFST

SEQ ID NO: 37251 - protein, 9 aa, Artificial Sequence
  Description of Artificial Sequence: Synthetic peptide
CYQHLNTMN

SEQ ID NO: 37252 - protein, 9 aa, Artificial Sequence
  Description of Artificial Sequence: Synthetic peptide
DANHCMWWR

SEQ ID NO: 37253 - protein, 9 aa, Artificial Sequence
  Description of Artificial Sequence: Synthetic peptide
DDHCCTTPT

SEQ ID NO: 37254 - protein, 9 aa, Artificial Sequence
  Description of Artificial Sequence: Synthetic peptide
DEPTLEEDM

SEQ ID NO: 37255 - protein, 9 aa, Artificial Sequence
  Description of Artificial Sequence: Synthetic peptide
DGTLAILCT

SEQ ID NO: 37256 - protein, 9 aa, Artificial Sequence
  Description of Artificial Sequence: Synthetic peptide
DGTLAIMCA

SEQ ID NO: 37257 - protein, 9 aa, Artificial Sequence
  Description of Artificial Sequence: Synthetic peptide
DGTLAIMCT

SEQ ID NO: 37258 - protein, 9 aa, Artificial Sequence
  Description of Artificial Sequence: Synthetic peptide
DGYQKYQEQ

SEQ ID NO: 37259 - protein, 9 aa, Artificial Sequence
  Description of Artificial Sequence: Synthetic peptide
DIACLMNST

SEQ ID NO: 37260 - protein, 9 aa, Artificial Sequence
  Description of Artificial Sequence: Synthetic peptide
DIEGYGHSW

SEQ ID NO: 37261 - protein, 9 aa, Artificial Sequence
  Description of Artificial Sequence: Synthetic peptide
DISQTTITK

SEQ ID NO: 37262 - protein, 9 aa, Artificial Sequence
  Description of Artificial Sequence: Synthetic peptide
DKLPMAMDR

SEQ ID NO: 37263 - protein, 9 aa, Artificial Sequence
  Description of Artificial Sequence: Synthetic peptide
DKNVFEEHV

SEQ ID NO: 37264 - protein, 9 aa, Artificial Sequence
  Description of Artificial Sequence: Synthetic peptide
DNCQVENHL

SEQ ID NO: 37265 - protein, 9 aa, Artificial Sequence
  Description of Artificial Sequence: Synthetic peptide
DPPHRNCTI

SEQ ID NO: 37266 - protein, 9 aa, Artificial Sequence
  Description of Artificial Sequence: Synthetic peptide
DQEKCLSFG

SEQ ID NO: 37267 - protein, 9 aa, Artificial Sequence
  Description of Artificial Sequence: Synthetic peptide
EARMPDDWS

SEQ ID NO: 37268 - protein, 9 aa, Artificial Sequence
  Description of Artificial Sequence: Synthetic peptide
EARMPNDWP

SEQ ID NO: 37269 - protein, 9 aa, Artificial Sequence
  Description of Artificial Sequence: Synthetic peptide
EFGFKIHRY

SEQ ID NO: 37270 - protein, 9 aa, Artificial Sequence
  Description of Artificial Sequence: Synthetic peptide
EIFHACNSG

SEQ ID NO: 37271 - protein, 9 aa, Artificial Sequence
  Description of Artificial Sequence: Synthetic peptide
ELQYYKEHT

SEQ ID NO: 37272 - protein, 9 aa, Artificial Sequence
  Description of Artificial Sequence: Synthetic peptide
ELYGLNHSC

SEQ ID NO: 37273 - protein, 9 aa, Artificial Sequence
  Description of Artificial Sequence: Synthetic peptide
EMGIRGIWG

SEQ ID NO: 37274 - protein, 9 aa, Artificial Sequence
  Description of Artificial Sequence: Synthetic peptide
ESCHLQHEE

SEQ ID NO: 37275 - protein, 9 aa, Artificial Sequence
  Description of Artificial Sequence: Synthetic peptide
ESCHPQHGE

SEQ ID NO: 37276 - protein, 9 aa, Artificial Sequence
  Description of Artificial Sequence: Synthetic peptide
EVCTDDGNV

SEQ ID NO: 37277 - protein, 9 aa, Artificial Sequence
  Description of Artificial Sequence: Synthetic peptide
EYATKVKMD

SEQ ID NO: 37278 - protein, 9 aa, Artificial Sequence
  Description of Artificial Sequence: Synthetic peptide
FHCAMEGRT

SEQ ID NO: 37279 - protein, 9 aa, Artificial Sequence
  Description of Artificial Sequence: Synthetic peptide
FSRHWECVQ

SEQ ID NO: 37280 - protein, 9 aa, Artificial Sequence
  Description of Artificial Sequence: Synthetic peptide
FSRRWECVQ

SEQ ID NO: 37281 - protein, 9 aa, Artificial Sequence
  Description of Artificial Sequence: Synthetic peptide
FWSNIIGIY

SEQ ID NO: 37282 - protein, 9 aa, Artificial Sequence
  Description of Artificial Sequence: Synthetic peptide
GFNMNNMVA

SEQ ID NO: 37283 - protein, 9 aa, Artificial Sequence
  Description of Artificial Sequence: Synthetic peptide
GHLDPFDCG

SEQ ID NO: 37284 - protein, 9 aa, Artificial Sequence
  Description of Artificial Sequence: Synthetic peptide
GLCIYDHRH

SEQ ID NO: 37285 - protein, 9 aa, Artificial Sequence
  Description of Artificial Sequence: Synthetic peptide
GMSMSQSHK

SEQ ID NO: 37286 - protein, 9 aa, Artificial Sequence
  Description of Artificial Sequence: Synthetic peptide
GNECFHNVA

SEQ ID NO: 37287 - protein, 9 aa, Artificial Sequence
  Description of Artificial Sequence: Synthetic peptide
GNHTFNQDQ

SEQ ID NO: 37288 - protein, 9 aa, Artificial Sequence
  Description of Artificial Sequence: Synthetic peptide
GQNLNRGVC

SEQ ID NO: 37289 - protein, 9 aa, Artificial Sequence
  Description of Artificial Sequence: Synthetic peptide
GTAGPCRSS

SEQ ID NO: 37290 - protein, 9 aa, Artificial Sequence
  Description of Artificial Sequence: Synthetic peptide
GWCWQVILM

SEQ ID NO: 37291 - protein, 9 aa, Artificial Sequence
  Description of Artificial Sequence: Synthetic peptide
GYNKWGRNE

SEQ ID NO: 37292 - protein, 9 aa, Artificial Sequence
  Description of Artificial Sequence: Synthetic peptide
HEGLIMRLA

SEQ ID NO: 37293 - protein, 9 aa, Artificial Sequence
  Description of Artificial Sequence: Synthetic peptide
HIGNKHIEC

SEQ ID NO: 37294 - protein, 9 aa, Artificial Sequence
  Description of Artificial Sequence: Synthetic peptide
HMEQCRCNE

SEQ ID NO: 37295 - protein, 9 aa, Artificial Sequence
  Description of Artificial Sequence: Synthetic peptide
HMYATEHCS

SEQ ID NO: 37296 - protein, 9 aa, Artificial Sequence
  Description of Artificial Sequence: Synthetic peptide
IACRTHQTE

SEQ ID NO: 37297 - protein, 9 aa, Artificial Sequence
  Description of Artificial Sequence: Synthetic peptide
IARRTHQTE

SEQ ID NO: 37298 - protein, 9 aa, Artificial Sequence
  Description of Artificial Sequence: Synthetic peptide
ICHCCMDWG

SEQ ID NO: 37299 - protein, 9 aa, Artificial Sequence
  Description of Artificial Sequence: Synthetic peptide
ICIRGARAA

SEQ ID NO: 37300 - protein, 9 aa, Artificial Sequence
  Description of Artificial Sequence: Synthetic peptide
ICIRGVRAD

SEQ ID NO: 37301 - protein, 9 aa, Artificial Sequence
  Description of Artificial Sequence: Synthetic peptide
ICTFYQPSP

SEQ ID NO: 37302 - protein, 9 aa, Artificial Sequence
  Description of Artificial Sequence: Synthetic peptide
IHSPFMPYH

SEQ ID NO: 37303 - protein, 9 aa, Artificial Sequence
  Description of Artificial Sequence: Synthetic peptide
ITTARNQYN

SEQ ID NO: 37304 - protein, 9 aa, Artificial Sequence
  Description of Artificial Sequence: Synthetic peptide
IVSPFQTGT

SEQ ID NO: 37305 - protein, 9 aa, Artificial Sequence
  Description of Artificial Sequence: Synthetic peptide
IYRLCQDSD

SEQ ID NO: 37306 - protein, 9 aa, Artificial Sequence
  Description of Artificial Sequence: Synthetic peptide
KAEVKSPAP

SEQ ID NO: 37307 - protein, 9 aa, Artificial Sequence
  Description of Artificial Sequence: Synthetic peptide
KATMTNCCF

SEQ ID NO: 37308 - protein, 9 aa, Artificial Sequence
  Description of Artificial Sequence: Synthetic peptide
KCEGEEAGR

SEQ ID NO: 37309 - protein, 9 aa, Artificial Sequence
  Description of Artificial Sequence: Synthetic peptide
KEDFGWKHM

SEQ ID NO: 37310 - protein, 9 aa, Artificial Sequence
  Description of Artificial Sequence: Synthetic peptide
KKEQDHRDK

SEQ ID NO: 37311 - protein, 9 aa, Artificial Sequence
  Description of Artificial Sequence: Synthetic peptide
KQAGYGFFH

SEQ ID NO: 37312 - protein, 9 aa, Artificial Sequence
  Description of Artificial Sequence: Synthetic peptide
KYEVPGKYG

SEQ ID NO: 37313 - protein, 9 aa, Artificial Sequence
  Description of Artificial Sequence: Synthetic peptide
LGSPFYERG

SEQ ID NO: 37314 - protein, 9 aa, Artificial Sequence
  Description of Artificial Sequence: Synthetic peptide
LHSYQWPLG

SEQ ID NO: 37315 - protein, 9 aa, Artificial Sequence
  Description of Artificial Sequence: Synthetic peptide
LKVVQAYEC

SEQ ID NO: 37316 - protein, 9 aa, Artificial Sequence
  Description of Artificial Sequence: Synthetic peptide
LNNRTQESW

SEQ ID NO: 37317 - protein, 9 aa, Artificial Sequence
  Description of Artificial Sequence: Synthetic peptide
LQLIVVSQT

SEQ ID NO: 37318 - protein, 9 aa, Artificial Sequence
  Description of Artificial Sequence: Synthetic peptide
LQYPTACGC

SEQ ID NO: 37319 - protein, 9 aa, Artificial Sequence
  Description of Artificial Sequence: Synthetic peptide
LSAKRQFFC

SEQ ID NO: 37320 - protein, 9 aa, Artificial Sequence
  Description of Artificial Sequence: Synthetic peptide
LTNRTQESR

SEQ ID NO: 37321 - protein, 9 aa, Artificial Sequence
  Description of Artificial Sequence: Synthetic peptide
MAIQVFMYD

SEQ ID NO: 37322 - protein, 9 aa, Artificial Sequence
  Description of Artificial Sequence: Synthetic peptide
MAIQVIMSD

SEQ ID NO: 37323 - protein, 9 aa, Artificial Sequence
  Description of Artificial Sequence: Synthetic peptide
MGTILQEVA

SEQ ID NO: 37324 - protein, 9 aa, Artificial Sequence
  Description of Artificial Sequence: Synthetic peptide
MHAEDVTSV

SEQ ID NO: 37325 - protein, 9 aa, Artificial Sequence
  Description of Artificial Sequence: Synthetic peptide
MISAPPDTY

SEQ ID NO: 37326 - protein, 9 aa, Artificial Sequence
  Description of Artificial Sequence: Synthetic peptide
MKRGTAFCA

SEQ ID NO: 37327 - protein, 9 aa, Artificial Sequence
  Description of Artificial Sequence: Synthetic peptide
MKYQDTHTF

SEQ ID NO: 37328 - protein, 9 aa, Artificial Sequence
  Description of Artificial Sequence: Synthetic peptide
MTIQVFMSD

SEQ ID NO: 37329 - protein, 9 aa, Artificial Sequence
  Description of Artificial Sequence: Synthetic peptide
MVASVAAEE

SEQ ID NO: 37330 - protein, 9 aa, Artificial Sequence
  Description of Artificial Sequence: Synthetic peptide
MYMHHALSP

SEQ ID NO: 37331 - protein, 9 aa, Artificial Sequence
  Description of Artificial Sequence: Synthetic peptide
NGKTNPCQK

SEQ ID NO: 37332 - protein, 9 aa, Artificial Sequence
  Description of Artificial Sequence: Synthetic peptide
NGTQCLNMG

SEQ ID NO: 37333 - protein, 9 aa, Artificial Sequence
  Description of Artificial Sequence: Synthetic peptide
NGTQCPNMD

SEQ ID NO: 37334 - protein, 9 aa, Artificial Sequence
  Description of Artificial Sequence: Synthetic peptide
NISWIQDYM

SEQ ID NO: 37335 - protein, 9 aa, Artificial Sequence
  Description of Artificial Sequence: Synthetic peptide
NMMTLWSHL

SEQ ID NO: 37336 - protein, 9 aa, Artificial Sequence
  Description of Artificial Sequence: Synthetic peptide
NPGWRYMWC

SEQ ID NO: 37337 - protein, 9 aa, Artificial Sequence
  Description of Artificial Sequence: Synthetic peptide
NQDEKLWAP

SEQ ID NO: 37338 - protein, 9 aa, Artificial Sequence
  Description of Artificial Sequence: Synthetic peptide
NSEKVYGMF

SEQ ID NO: 37339 - protein, 9 aa, Artificial Sequence
  Description of Artificial Sequence: Synthetic peptide
NSNHYNAMR

SEQ ID NO: 37340 - protein, 9 aa, Artificial Sequence
  Description of Artificial Sequence: Synthetic peptide
NTEPTLVTR

SEQ ID NO: 37341 - protein, 9 aa, Artificial Sequence
  Description of Artificial Sequence: Synthetic peptide
NTEYSAKND

SEQ ID NO: 37342 - protein, 9 aa, Artificial Sequence
  Description of Artificial Sequence: Synthetic peptide
NVDAHEQYR

SEQ ID NO: 37343 - protein, 9 aa, Artificial Sequence
  Description of Artificial Sequence: Synthetic peptide
NVDRQHAQG

SEQ ID NO: 37344 - protein, 9 aa, Artificial Sequence
  Description of Artificial Sequence: Synthetic peptide
NVRNGTNTC

SEQ ID NO: 37345 - protein, 9 aa, Artificial Sequence
  Description of Artificial Sequence: Synthetic peptide
NVYVTPVVC

SEQ ID NO: 37346 - protein, 9 aa, Artificial Sequence
  Description of Artificial Sequence: Synthetic peptide
NYRCFDPMH

SEQ ID NO: 37347 - protein, 9 aa, Artificial Sequence
  Description of Artificial Sequence: Synthetic peptide
PMMIIPYVA

SEQ ID NO: 37348 - protein, 9 aa, Artificial Sequence
  Description of Artificial Sequence: Synthetic peptide
PNGHHWMIP

SEQ ID NO: 37349 - protein, 9 aa, Artificial Sequence
  Description of Artificial Sequence: Synthetic peptide
QAPVIPIMT

SEQ ID NO: 37350 - protein, 9 aa, Artificial Sequence
  Description of Artificial Sequence: Synthetic peptide
QHNSCKDAW

SEQ ID NO: 37351 - protein, 9 aa, Artificial Sequence
  Description of Artificial Sequence: Synthetic peptide
QMNCLKLGP

SEQ ID NO: 37352 - protein, 9 aa, Artificial Sequence
  Description of Artificial Sequence: Synthetic peptide
QNIATMRGF

SEQ ID NO: 37353 - protein, 9 aa, Artificial Sequence
  Description of Artificial Sequence: Synthetic peptide
QNICLGVPT

SEQ ID NO: 37354 - protein, 9 aa, Artificial Sequence
  Description of Artificial Sequence: Synthetic peptide
QSFPCMFKD

SEQ ID NO: 37355 - protein, 9 aa, Artificial Sequence
  Description of Artificial Sequence: Synthetic peptide
QSPVPNRYA

SEQ ID NO: 37356 - protein, 9 aa, Artificial Sequence
  Description of Artificial Sequence: Synthetic peptide
QTFSEGWRL

SEQ ID NO: 37357 - protein, 9 aa, Artificial Sequence
  Description of Artificial Sequence: Synthetic peptide
QVNKGAPQE

SEQ ID NO: 37358 - protein, 9 aa, Artificial Sequence
  Description of Artificial Sequence: Synthetic peptide
RADWSDIAD

SEQ ID NO: 37359 - protein, 9 aa, Artificial Sequence
  Description of Artificial Sequence: Synthetic peptide
RCNLYLEYS

SEQ ID NO: 37360 - protein, 9 aa, Artificial Sequence
  Description of Artificial Sequence: Synthetic peptide
RDGDANCSL

SEQ ID NO: 37361 - protein, 9 aa, Artificial Sequence
  Description of Artificial Sequence: Synthetic peptide
REKWGHMHT

SEQ ID NO: 37362 - protein, 9 aa, Artificial Sequence
  Description of Artificial Sequence: Synthetic peptide
REQHIAGAD

SEQ ID NO: 37363 - protein, 9 aa, Artificial Sequence
  Description of Artificial Sequence: Synthetic peptide
RGLVQDCCR

SEQ ID NO: 37364 - protein, 9 aa, Artificial Sequence
  Description of Artificial Sequence: Synthetic peptide
RHVHRYWEC

SEQ ID NO: 37365 - protein, 9 aa, Artificial Sequence
  Description of Artificial Sequence: Synthetic peptide
RVKAYAPTT

SEQ ID NO: 37366 - protein, 9 aa, Artificial Sequence
  Description of Artificial Sequence: Synthetic peptide
RWSYMQADK

SEQ ID NO: 37367 - protein, 9 aa, Artificial Sequence
  Description of Artificial Sequence: Synthetic peptide
SAMYGSTWA

SEQ ID NO: 37368 - protein, 9 aa, Artificial Sequence
  Description of Artificial Sequence: Synthetic peptide
SAVYTAACN

SEQ ID NO: 37369 - protein, 9 aa, Artificial Sequence
  Description of Artificial Sequence: Synthetic peptide
SGMTWNFHA

SEQ ID NO: 37370 - protein, 9 aa, Artificial Sequence
  Description of Artificial Sequence: Synthetic peptide
SHIQLNAWW

SEQ ID NO: 37371 - protein, 9 aa, Artificial Sequence
  Description of Artificial Sequence: Synthetic peptide
SIFMEVAWC

SEQ ID NO: 37372 - protein, 9 aa, Artificial Sequence
  Description of Artificial Sequence: Synthetic peptide
SIQRNCAFW

SEQ ID NO: 37373 - protein, 9 aa, Artificial Sequence
  Description of Artificial Sequence: Synthetic peptide
SLMRFLPSI

SEQ ID NO: 37374 - protein, 9 aa, Artificial Sequence
  Description of Artificial Sequence: Synthetic peptide
SMGWAILEG

SEQ ID NO: 37375 - protein, 9 aa, Artificial Sequence
  Description of Artificial Sequence: Synthetic peptide
SMPVGTEID

SEQ ID NO: 37376 - protein, 9 aa, Artificial Sequence
  Description of Artificial Sequence: Synthetic peptide
SSASVNHTN

SEQ ID NO: 37377 - protein, 9 aa, Artificial Sequence
  Description of Artificial Sequence: Synthetic peptide
SSDMQVCWT

SEQ ID NO: 37378 - protein, 9 aa, Artificial Sequence
  Description of Artificial Sequence: Synthetic peptide
SSDNSHQGR

SEQ ID NO: 37379 - protein, 9 aa, Artificial Sequence
  Description of Artificial Sequence: Synthetic peptide
SSKFHERQH

SEQ ID NO: 37380 - protein, 9 aa, Artificial Sequence
  Description of Artificial Sequence: Synthetic peptide
STDNTGTAC

SEQ ID NO: 37381 - protein, 9 aa, Artificial Sequence
  Description of Artificial Sequence: Synthetic peptide
STGSCAPLY

SEQ ID NO: 37382 - protein, 9 aa, Artificial Sequence
  Description of Artificial Sequence: Synthetic peptide
TAVKSEAST

SEQ ID NO: 37383 - protein, 9 aa, Artificial Sequence
  Description of Artificial Sequence: Synthetic peptide
TDHTENFSD

SEQ ID NO: 37384 - protein, 9 aa, Artificial Sequence
  Description of Artificial Sequence: Synthetic peptide
TFANPPENA

SEQ ID NO: 37385 - protein, 9 aa, Artificial Sequence
  Description of Artificial Sequence: Synthetic peptide
THGIYGTHD

SEQ ID NO: 37386 - protein, 9 aa, Artificial Sequence
  Description of Artificial Sequence: Synthetic peptide
TISWLDTEV

SEQ ID NO: 37387 - protein, 9 aa, Artificial Sequence
  Description of Artificial Sequence: Synthetic peptide
TISWPDTEV

SEQ ID NO: 37388 - protein, 9 aa, Artificial Sequence
  Description of Artificial Sequence: Synthetic peptide
TKDAWNGLC

SEQ ID NO: 37389 - protein, 9 aa, Artificial Sequence
  Description of Artificial Sequence: Synthetic peptide
TMSNYGCPQ

SEQ ID NO: 37390 - protein, 9 aa, Artificial Sequence
  Description of Artificial Sequence: Synthetic peptide
TQIMRVISV

SEQ ID NO: 37391 - protein, 9 aa, Artificial Sequence
  Description of Artificial Sequence: Synthetic peptide
TTQRDGQWY

SEQ ID NO: 37392 - protein, 9 aa, Artificial Sequence
  Description of Artificial Sequence: Synthetic peptide
TVGPAGISE

SEQ ID NO: 37393 - protein, 9 aa, Artificial Sequence
  Description of Artificial Sequence: Synthetic peptide
VDGLQCCCP

SEQ ID NO: 37394 - protein, 9 aa, Artificial Sequence
  Description of Artificial Sequence: Synthetic peptide
VDIMRNDTG

SEQ ID NO: 37395 - protein, 9 aa, Artificial Sequence
  Description of Artificial Sequence: Synthetic peptide
VEFRPKISR

SEQ ID NO: 37396 - protein, 9 aa, Artificial Sequence
  Description of Artificial Sequence: Synthetic peptide
VGIMWNDTG

SEQ ID NO: 37397 - protein, 9 aa, Artificial Sequence
  Description of Artificial Sequence: Synthetic peptide
VNWFVRAYI

SEQ ID NO: 37398 - protein, 9 aa, Artificial Sequence
  Description of Artificial Sequence: Synthetic peptide
VSYWFQWGS

SEQ ID NO: 37399 - protein, 9 aa, Artificial Sequence
  Description of Artificial Sequence: Synthetic peptide
VTATSPGIE

SEQ ID NO: 37400 - protein, 9 aa, Artificial Sequence
  Description of Artificial Sequence: Synthetic peptide
VVTKPAYFV

SEQ ID NO: 37401 - protein, 9 aa, Artificial Sequence
  Description of Artificial Sequence: Synthetic peptide
WADLWQYQW

SEQ ID NO: 37402 - protein, 9 aa, Artificial Sequence
  Description of Artificial Sequence: Synthetic peptide
WATPPLQRC

SEQ ID NO: 37403 - protein, 9 aa, Artificial Sequence
  Description of Artificial Sequence: Synthetic peptide
WRIRPQQEI

SEQ ID NO: 37404 - protein, 9 aa, Artificial Sequence
  Description of Artificial Sequence: Synthetic peptide
WRMFESAPG

SEQ ID NO: 37405 - protein, 9 aa, Artificial Sequence
  Description of Artificial Sequence: Synthetic peptide
YAQPDWVMA

SEQ ID NO: 37406 - protein, 9 aa, Artificial Sequence
  Description of Artificial Sequence: Synthetic peptide
YCMWYATPP

SEQ ID NO: 37407 - protein, 9 aa, Artificial Sequence
  Description of Artificial Sequence: Synthetic peptide
YHVPYQHLP

SEQ ID NO: 37408 - protein, 9 aa, Artificial Sequence
  Description of Artificial Sequence: Synthetic peptide
YHWHINSFD

SEQ ID NO: 37409 - protein, 9 aa, Artificial Sequence
  Description of Artificial Sequence: Synthetic peptide
YPELGKCEI

SEQ ID NO: 37410 - protein, 9 aa, Artificial Sequence
  Description of Artificial Sequence: Synthetic peptide
YTGHTNNGR

SEQ ID NO: 37411 - protein, 9 aa, Artificial Sequence
  Description of Artificial Sequence: Synthetic peptide
YTGLMWVWA

SEQ ID NO: 37412 - protein, 9 aa, Artificial Sequence
  Description of Artificial Sequence: Synthetic peptide
AMVLFLVDN

SEQ ID NO: 37413 - protein, 9 aa, Artificial Sequence
  Description of Artificial Sequence: Synthetic peptide
CALKQECSR

SEQ ID NO: 37414 - protein, 9 aa, Artificial Sequence
  Description of Artificial Sequence: Synthetic peptide
CHNQMWQIC

SEQ ID NO: 37415 - protein, 9 aa, Artificial Sequence
  Description of Artificial Sequence: Synthetic peptide
CISQTFRYY

SEQ ID NO: 37416 - protein, 9 aa, Artificial Sequence
  Description of Artificial Sequence: Synthetic peptide
CWAEFRMRV

SEQ ID NO: 37417 - protein, 9 aa, Artificial Sequence
  Description of Artificial Sequence: Synthetic peptide
CWMLGRDCC

SEQ ID NO: 37418 - protein, 9 aa, Artificial Sequence
  Description of Artificial Sequence: Synthetic peptide
DGAAPLTFC

SEQ ID NO: 37419 - protein, 9 aa, Artificial Sequence
  Description of Artificial Sequence: Synthetic peptide
DIAMNPRMC

SEQ ID NO: 37420 - protein, 9 aa, Artificial Sequence
  Description of Artificial Sequence: Synthetic peptide
DITLWMATE

SEQ ID NO: 37421 - protein, 9 aa, Artificial Sequence
  Description of Artificial Sequence: Synthetic peptide
DLMWHVNAI

SEQ ID NO: 37422 - protein, 9 aa, Artificial Sequence
  Description of Artificial Sequence: Synthetic peptide
EMCHSMGDF

SEQ ID NO: 37423 - protein, 9 aa, Artificial Sequence
  Description of Artificial Sequence: Synthetic peptide
EMCVMSFGY

SEQ ID NO: 37424 - protein, 9 aa, Artificial Sequence
  Description of Artificial Sequence: Synthetic peptide
FFGWKKSNY

SEQ ID NO: 37425 - protein, 9 aa, Artificial Sequence
  Description of Artificial Sequence: Synthetic peptide
FGREGCPTE

SEQ ID NO: 37426 - protein, 9 aa, Artificial Sequence
  Description of Artificial Sequence: Synthetic peptide
FVELHCHTE

SEQ ID NO: 37427 - protein, 9 aa, Artificial Sequence
  Description of Artificial Sequence: Synthetic peptide
GDTVMLVPS

SEQ ID NO: 37428 - protein, 9 aa, Artificial Sequence
  Description of Artificial Sequence: Synthetic peptide
GGPFKVASS

SEQ ID NO: 37429 - protein, 9 aa, Artificial Sequence
  Description of Artificial Sequence: Synthetic peptide
GTFHNTATI

SEQ ID NO: 37430 - protein, 9 aa, Artificial Sequence
  Description of Artificial Sequence: Synthetic peptide
HTRVVESTG

SEQ ID NO: 37431 - protein, 9 aa, Artificial Sequence
  Description of Artificial Sequence: Synthetic peptide
IAKIGNCVC

SEQ ID NO: 37432 - protein, 9 aa, Artificial Sequence
  Description of Artificial Sequence: Synthetic peptide
IHTGTNSYA

SEQ ID NO: 37433 - protein, 9 aa, Artificial Sequence
  Description of Artificial Sequence: Synthetic peptide
IMVHCREMG

SEQ ID NO: 37434 - protein, 9 aa, Artificial Sequence
  Description of Artificial Sequence: Synthetic peptide
IPQVCQFGQ

SEQ ID NO: 37435 - protein, 9 aa, Artificial Sequence
  Description of Artificial Sequence: Synthetic peptide
IRSQTLTDC

SEQ ID NO: 37436 - protein, 9 aa, Artificial Sequence
  Description of Artificial Sequence: Synthetic peptide
IVHKLESVN

SEQ ID NO: 37437 - protein, 9 aa, Artificial Sequence
  Description of Artificial Sequence: Synthetic peptide
KEARSQTGD

SEQ ID NO: 37438 - protein, 9 aa, Artificial Sequence
  Description of Artificial Sequence: Synthetic peptide
PANFGQAYP

SEQ ID NO: 37439 - protein, 9 aa, Artificial Sequence
  Description of Artificial Sequence: Synthetic peptide
PCVQDLRAI

SEQ ID NO: 37440 - protein, 9 aa, Artificial Sequence
  Description of Artificial Sequence: Synthetic peptide
PCYGQTDWN

SEQ ID NO: 37441 - protein, 9 aa, Artificial Sequence
  Description of Artificial Sequence: Synthetic peptide
PDAQNEMWH

SEQ ID NO: 37442 - protein, 9 aa, Artificial Sequence
  Description of Artificial Sequence: Synthetic peptide
PDPRPATND

SEQ ID NO: 37443 - protein, 9 aa, Artificial Sequence
  Description of Artificial Sequence: Synthetic peptide
PDTGHEWWW

SEQ ID NO: 37444 - protein, 9 aa, Artificial Sequence
  Description of Artificial Sequence: Synthetic peptide
PDWREATVV

SEQ ID NO: 37445 - protein, 9 aa, Artificial Sequence
  Description of Artificial Sequence: Synthetic peptide
PEDPTVTNH

SEQ ID NO: 37446 - protein, 9 aa, Artificial Sequence
  Description of Artificial Sequence: Synthetic peptide
PEKHSCSTT

SEQ ID NO: 37447 - protein, 9 aa, Artificial Sequence
  Description of Artificial Sequence: Synthetic peptide
PFILKQRNQ

SEQ ID NO: 37448 - protein, 9 aa, Artificial Sequence
  Description of Artificial Sequence: Synthetic peptide
PGMTTTPSF

SEQ ID NO: 37449 - protein, 9 aa, Artificial Sequence
  Description of Artificial Sequence: Synthetic peptide
PGSLECAAL

SEQ ID NO: 37450 - protein, 9 aa, Artificial Sequence
  Description of Artificial Sequence: Synthetic peptide
PHVANMGPG

SEQ ID NO: 37451 - protein, 9 aa, Artificial Sequence
  Description of Artificial Sequence: Synthetic peptide
PHVNYDTLC

SEQ ID NO: 37452 - protein, 9 aa, Artificial Sequence
  Description of Artificial Sequence: Synthetic peptide
PIWGNCAKT

SEQ ID NO: 37453 - protein, 9 aa, Artificial Sequence
  Description of Artificial Sequence: Synthetic peptide
PKGSQYGEQ

SEQ ID NO: 37454 - protein, 9 aa, Artificial Sequence
  Description of Artificial Sequence: Synthetic peptide
PKGVLLGGA

SEQ ID NO: 37455 - protein, 9 aa, Artificial Sequence
  Description of Artificial Sequence: Synthetic peptide
PKLQYHSES

SEQ ID NO: 37456 - protein, 9 aa, Artificial Sequence
  Description of Artificial Sequence: Synthetic peptide
PLARIEPLW

SEQ ID NO: 37457 - protein, 9 aa, Artificial Sequence
  Description of Artificial Sequence: Synthetic peptide
PLECKMWYN

SEQ ID NO: 37458 - protein, 9 aa, Artificial Sequence
  Description of Artificial Sequence: Synthetic peptide
PMPFCKHQF

SEQ ID NO: 37459 - protein, 9 aa, Artificial Sequence
  Description of Artificial Sequence: Synthetic peptide
PMQQKLWME

SEQ ID NO: 37460 - protein, 9 aa, Artificial Sequence
  Description of Artificial Sequence: Synthetic peptide
PMRWNKFVP

SEQ ID NO: 37461 - protein, 9 aa, Artificial Sequence
  Description of Artificial Sequence: Synthetic peptide
PMVKLEETS

SEQ ID NO: 37462 - protein, 9 aa, Artificial Sequence
  Description of Artificial Sequence: Synthetic peptide
PNCKHSIAV

SEQ ID NO: 37463 - protein, 9 aa, Artificial Sequence
  Description of Artificial Sequence: Synthetic peptide
PNTCTKDGL

SEQ ID NO: 37464 - protein, 9 aa, Artificial Sequence
  Description of Artificial Sequence: Synthetic peptide
PPHRFRHIP

SEQ ID NO: 37465 - protein, 9 aa, Artificial Sequence
  Description of Artificial Sequence: Synthetic peptide
PPWPPETAE

SEQ ID NO: 37466 - protein, 9 aa, Artificial Sequence
  Description of Artificial Sequence: Synthetic peptide
PQASKAFSK

SEQ ID NO: 37467 - protein, 9 aa, Artificial Sequence
  Description of Artificial Sequence: Synthetic peptide
PQQQYLSVC

SEQ ID NO: 37468 - protein, 9 aa, Artificial Sequence
  Description of Artificial Sequence: Synthetic peptide
PQTAYMQAY

SEQ ID NO: 37469 - protein, 9 aa, Artificial Sequence
  Description of Artificial Sequence: Synthetic peptide
PRYFVEACE

SEQ ID NO: 37470 - protein, 9 aa, Artificial Sequence
  Description of Artificial Sequence: Synthetic peptide
PSHWFCGGA

SEQ ID NO: 37471 - protein, 9 aa, Artificial Sequence
  Description of Artificial Sequence: Synthetic peptide
PTDFIRVNE

SEQ ID NO: 37472 - protein, 9 aa, Artificial Sequence
  Description of Artificial Sequence: Synthetic peptide
PTRATMFID

SEQ ID NO: 37473 - protein, 9 aa, Artificial Sequence
  Description of Artificial Sequence: Synthetic peptide
PVAWRENSL

SEQ ID NO: 37474 - protein, 9 aa, Artificial Sequence
  Description of Artificial Sequence: Synthetic peptide
PVTRFECCK

SEQ ID NO: 37475 - protein, 9 aa, Artificial Sequence
  Description of Artificial Sequence: Synthetic peptide
PYCICTQPY

SEQ ID NO: 37476 - protein, 9 aa, Artificial Sequence
  Description of Artificial Sequence: Synthetic peptide
PYHDNSAPQ

SEQ ID NO: 37477 - protein, 9 aa, Artificial Sequence
  Description of Artificial Sequence: Synthetic peptide
PYHLNQDNN

SEQ ID NO: 37478 - protein, 9 aa, Artificial Sequence
  Description of Artificial Sequence: Synthetic peptide
PWAIEYSLV

SEQ ID NO: 37479 - protein, 9 aa, Artificial Sequence
  Description of Artificial Sequence: Synthetic peptide
PYIMEFHPF

SEQ ID NO: 37480 - protein, 9 aa, Artificial Sequence
  Description of Artificial Sequence: Synthetic peptide
PKEHFPTCM

SEQ ID NO: 37481 - protein, 9 aa, Artificial Sequence
  Description of Artificial Sequence: Synthetic peptide
PAAAMFLPS

SEQ ID NO: 37482 - protein, 9 aa, Artificial Sequence
  Description of Artificial Sequence: Synthetic peptide
PAAHKEWEW

SEQ ID NO: 37483 - protein, 9 aa, Artificial Sequence
  Description of Artificial Sequence: Synthetic peptide
PAAHNACHC

SEQ ID NO: 37484 - protein, 9 aa, Artificial Sequence
  Description of Artificial Sequence: Synthetic peptide
PAALDLYNG

SEQ ID NO: 37485 - protein, 9 aa, Artificial Sequence
  Description of Artificial Sequence: Synthetic peptide
PACLGRTDA

SEQ ID NO: 37486 - protein, 9 aa, Artificial Sequence
  Description of Artificial Sequence: Synthetic peptide
PACNCQIAS

SEQ ID NO: 37487 - protein, 9 aa, Artificial Sequence
  Description of Artificial Sequence: Synthetic peptide
PACRKGYWN

SEQ ID NO: 37488 - protein, 9 aa, Artificial Sequence
  Description of Artificial Sequence: Synthetic peptide
PADEAFVEC

SEQ ID NO: 37489 - protein, 9 aa, Artificial Sequence
  Description of Artificial Sequence: Synthetic peptide
PADKSQLGA

SEQ ID NO: 37490 - protein, 9 aa, Artificial Sequence
  Description of Artificial Sequence: Synthetic peptide
PADLNLSIP

SEQ ID NO: 37491 - protein, 9 aa, Artificial Sequence
  Description of Artificial Sequence: Synthetic peptide
PADNLHCHG

SEQ ID NO: 37492 - protein, 9 aa, Artificial Sequence
  Description of Artificial Sequence: Synthetic peptide
PADSAKQRK

SEQ ID NO: 37493 - protein, 9 aa, Artificial Sequence
  Description of Artificial Sequence: Synthetic peptide
PADYGWCVG

SEQ ID NO: 37494 - protein, 9 aa, Artificial Sequence
  Description of Artificial Sequence: Synthetic peptide
PADYRAYGD

SEQ ID NO: 37495 - protein, 9 aa, Artificial Sequence
  Description of Artificial Sequence: Synthetic peptide
PAECKYIYA

SEQ ID NO: 37496 - protein, 9 aa, Artificial Sequence
  Description of Artificial Sequence: Synthetic peptide
PAEFPFMIH

SEQ ID NO: 37497 - protein, 9 aa, Artificial Sequence
  Description of Artificial Sequence: Synthetic peptide
PAEFRCTPF

SEQ ID NO: 37498 - protein, 9 aa, Artificial Sequence
  Description of Artificial Sequence: Synthetic peptide
PAEPGQSMG

SEQ ID NO: 37499 - protein, 9 aa, Artificial Sequence
  Description of Artificial Sequence: Synthetic peptide
PAEVTNFGV

SEQ ID NO: 37500 - protein, 9 aa, Artificial Sequence
  Description of Artificial Sequence: Synthetic peptide
PAEWCLQHV

SEQ ID NO: 37501 - protein, 9 aa, Artificial Sequence
  Description of Artificial Sequence: Synthetic peptide
PAFGCMLNH

SEQ ID NO: 37502 - protein, 9 aa, Artificial Sequence
  Description of Artificial Sequence: Synthetic peptide
PAGCHGKTH

SEQ ID NO: 37503 - protein, 9 aa, Artificial Sequence
  Description of Artificial Sequence: Synthetic peptide
PAGCVCASS

SEQ ID NO: 37504 - protein, 9 aa, Artificial Sequence
  Description of Artificial Sequence: Synthetic peptide
PAGMAMPGT

SEQ ID NO: 37505 - protein, 9 aa, Artificial Sequence
  Description of Artificial Sequence: Synthetic peptide
PAGNAAWTT

SEQ ID NO: 37506 - protein, 9 aa, Artificial Sequence
  Description of Artificial Sequence: Synthetic peptide
PAGWNECAC

SEQ ID NO: 37507 - protein, 9 aa, Artificial Sequence
  Description of Artificial Sequence: Synthetic peptide
PAHKVDLCF

SEQ ID NO: 37508 - protein, 9 aa, Artificial Sequence
  Description of Artificial Sequence: Synthetic peptide
PAHQCTVHD

SEQ ID NO: 37509 - protein, 9 aa, Artificial Sequence
  Description of Artificial Sequence: Synthetic peptide
PAHYVPGIE

SEQ ID NO: 37510 - protein, 9 aa, Artificial Sequence
  Description of Artificial Sequence: Synthetic peptide
PAISNKFAG

SEQ ID NO: 37511 - protein, 9 aa, Artificial Sequence
  Description of Artificial Sequence: Synthetic peptide
PAKLYITVR

SEQ ID NO: 37512 - protein, 9 aa, Artificial Sequence
  Description of Artificial Sequence: Synthetic peptide
PAKQAADYG

SEQ ID NO: 37513 - protein, 9 aa, Artificial Sequence
  Description of Artificial Sequence: Synthetic peptide
PAKYLPWQY

SEQ ID NO: 37514 - protein, 9 aa, Artificial Sequence
  Description of Artificial Sequence: Synthetic peptide
PALRETPWT

SEQ ID NO: 37515 - protein, 9 aa, Artificial Sequence
  Description of Artificial Sequence: Synthetic peptide
PALWRYYKQ

SEQ ID NO: 37516 - protein, 9 aa, Artificial Sequence
  Description of Artificial Sequence: Synthetic peptide
PAMMMPTKQ

SEQ ID NO: 37517 - protein, 9 aa, Artificial Sequence
  Description of Artificial Sequence: Synthetic peptide
PAMRYDSLY

SEQ ID NO: 37518 - protein, 9 aa, Artificial Sequence
  Description of Artificial Sequence: Synthetic peptide
PANNCRIHT

SEQ ID NO: 37519 - protein, 9 aa, Artificial Sequence
  Description of Artificial Sequence: Synthetic peptide
PAPCWWNVT

SEQ ID NO: 37520 - protein, 9 aa, Artificial Sequence
  Description of Artificial Sequence: Synthetic peptide
PAPDNSDTC

SEQ ID NO: 37521 - protein, 9 aa, Artificial Sequence
  Description of Artificial Sequence: Synthetic peptide
PAPHAWDVH

SEQ ID NO: 37522 - protein, 9 aa, Artificial Sequence
  Description of Artificial Sequence: Synthetic peptide
PAPIWQVLD

SEQ ID NO: 37523 - protein, 9 aa, Artificial Sequence
  Description of Artificial Sequence: Synthetic peptide
PAPKHSYQN

SEQ ID NO: 37524 - protein, 9 aa, Artificial Sequence
  Description of Artificial Sequence: Synthetic peptide
PAPPLAQSN

SEQ ID NO: 37525 - protein, 9 aa, Artificial Sequence
  Description of Artificial Sequence: Synthetic peptide
PAQNAPMCG

SEQ ID NO: 37526 - protein, 9 aa, Artificial Sequence
  Description of Artificial Sequence: Synthetic peptide
PAQQLTCIK

SEQ ID NO: 37527 - protein, 9 aa, Artificial Sequence
  Description of Artificial Sequence: Synthetic peptide
PARCAQFVA

SEQ ID NO: 37528 - protein, 9 aa, Artificial Sequence
  Description of Artificial Sequence: Synthetic peptide
PAREDGNGW

SEQ ID NO: 37529 - protein, 9 aa, Artificial Sequence
  Description of Artificial Sequence: Synthetic peptide
PARKAYCLP

SEQ ID NO: 37530 - protein, 9 aa, Artificial Sequence
  Description of Artificial Sequence: Synthetic peptide
PARLISDYE

SEQ ID NO: 37531 - protein, 9 aa, Artificial Sequence
  Description of Artificial Sequence: Synthetic peptide
PARSLWQTY

SEQ ID NO: 37532 - protein, 9 aa, Artificial Sequence
  Description of Artificial Sequence: Synthetic peptide
PARSTYGAA

SEQ ID NO: 37533 - protein, 9 aa, Artificial Sequence
  Description of Artificial Sequence: Synthetic peptide
PASCMWFSH

SEQ ID NO: 37534 - protein, 9 aa, Artificial Sequence
  Description of Artificial Sequence: Synthetic peptide
PASLGIPKM

SEQ ID NO: 37535 - protein, 9 aa, Artificial Sequence
  Description of Artificial Sequence: Synthetic peptide
PATEVQQFM

SEQ ID NO: 37536 - protein, 9 aa, Artificial Sequence
  Description of Artificial Sequence: Synthetic peptide
PATNQCKRI

SEQ ID NO: 37537 - protein, 9 aa, Artificial Sequence
  Description of Artificial Sequence: Synthetic peptide
PATQERGEK

SEQ ID NO: 37538 - protein, 9 aa, Artificial Sequence
  Description of Artificial Sequence: Synthetic peptide
PAVADDMYK

SEQ ID NO: 37539 - protein, 9 aa, Artificial Sequence
  Description of Artificial Sequence: Synthetic peptide
PAVHMQLDP

SEQ ID NO: 37540 - protein, 9 aa, Artificial Sequence
  Description of Artificial Sequence: Synthetic peptide
PAVNANATN

SEQ ID NO: 37541 - protein, 9 aa, Artificial Sequence
  Description of Artificial Sequence: Synthetic peptide
PAVNVPMST

SEQ ID NO: 37542 - protein, 9 aa, Artificial Sequence
  Description of Artificial Sequence: Synthetic peptide
PAVQCSWHG

SEQ ID NO: 37543 - protein, 9 aa, Artificial Sequence
  Description of Artificial Sequence: Synthetic peptide
PAVQGLPKM

SEQ ID NO: 37544 - protein, 9 aa, Artificial Sequence
  Description of Artificial Sequence: Synthetic peptide
PAVSACPYW

SEQ ID NO: 37545 - protein, 9 aa, Artificial Sequence
  Description of Artificial Sequence: Synthetic peptide
PAYGSPPWA

SEQ ID NO: 37546 - protein, 9 aa, Artificial Sequence
  Description of Artificial Sequence: Synthetic peptide
PCADTMSVW

SEQ ID NO: 37547 - protein, 9 aa, Artificial Sequence
  Description of Artificial Sequence: Synthetic peptide
PCAFETTQH

SEQ ID NO: 37548 - protein, 9 aa, Artificial Sequence
  Description of Artificial Sequence: Synthetic peptide
PCAGKDICN

SEQ ID NO: 37549 - protein, 9 aa, Artificial Sequence
  Description of Artificial Sequence: Synthetic peptide
PCAPYARSK

SEQ ID NO: 37550 - protein, 9 aa, Artificial Sequence
  Description of Artificial Sequence: Synthetic peptide
PCAQWYCDC

SEQ ID NO: 37551 - protein, 9 aa, Artificial Sequence
  Description of Artificial Sequence: Synthetic peptide
PCCEDVSNI

SEQ ID NO: 37552 - protein, 9 aa, Artificial Sequence
  Description of Artificial Sequence: Synthetic peptide
PCCEGTMDN

SEQ ID NO: 37553 - protein, 9 aa, Artificial Sequence
  Description of Artificial Sequence: Synthetic peptide
PCCQICNTW

SEQ ID NO: 37554 - protein, 9 aa, Artificial Sequence
  Description of Artificial Sequence: Synthetic peptide
PCCYTQRPT

SEQ ID NO: 37555 - protein, 9 aa, Artificial Sequence
  Description of Artificial Sequence: Synthetic peptide
PCDRTCPDM

SEQ ID NO: 37556 - protein, 9 aa, Artificial Sequence
  Description of Artificial Sequence: Synthetic peptide
PCEFKSTET

SEQ ID NO: 37557 - protein, 9 aa, Artificial Sequence
  Description of Artificial Sequence: Synthetic peptide
PCEGHEKPQ

SEQ ID NO: 37558 - protein, 9 aa, Artificial Sequence
  Description of Artificial Sequence: Synthetic peptide
PCERALLQH

SEQ ID NO: 37559 - protein, 9 aa, Artificial Sequence
  Description of Artificial Sequence: Synthetic peptide
PCEVQNAQT

SEQ ID NO: 37560 - protein, 9 aa, Artificial Sequence
  Description of Artificial Sequence: Synthetic peptide
PCFAVMAGC

SEQ ID NO: 37561 - protein, 9 aa, Artificial Sequence
  Description of Artificial Sequence: Synthetic peptide
PCFCHYTNC

SEQ ID NO: 37562 - protein, 9 aa, Artificial Sequence
  Description of Artificial Sequence: Synthetic peptide
PCFGPSYAD

SEQ ID NO: 37563 - protein, 9 aa, Artificial Sequence
  Description of Artificial Sequence: Synthetic peptide
PCFVKDSTA

SEQ ID NO: 37564 - protein, 9 aa, Artificial Sequence
  Description of Artificial Sequence: Synthetic peptide
PCGGLTHPH

SEQ ID NO: 37565 - protein, 9 aa, Artificial Sequence
  Description of Artificial Sequence: Synthetic peptide
PCGLMDDYP

SEQ ID NO: 37566 - protein, 9 aa, Artificial Sequence
  Description of Artificial Sequence: Synthetic peptide
PCGQWKIQN

SEQ ID NO: 37567 - protein, 9 aa, Artificial Sequence
  Description of Artificial Sequence: Synthetic peptide
PCHAFEPDH

SEQ ID NO: 37568 - protein, 9 aa, Artificial Sequence
  Description of Artificial Sequence: Synthetic peptide
PCHMMVIAN

SEQ ID NO: 37569 - protein, 9 aa, Artificial Sequence
  Description of Artificial Sequence: Synthetic peptide
PCHQQELDK

SEQ ID NO: 37570 - protein, 9 aa, Artificial Sequence
  Description of Artificial Sequence: Synthetic peptide
PCHQYWIED

SEQ ID NO: 37571 - protein, 9 aa, Artificial Sequence
  Description of Artificial Sequence: Synthetic peptide
PCHRYSKFM

SEQ ID NO: 37572 - protein, 9 aa, Artificial Sequence
  Description of Artificial Sequence: Synthetic peptide
PCKCYPRKC

SEQ ID NO: 37573 - protein, 9 aa, Artificial Sequence
  Description of Artificial Sequence: Synthetic peptide
PCLHMQYNP

SEQ ID NO: 37574 - protein, 9 aa, Artificial Sequence
  Description of Artificial Sequence: Synthetic peptide
PCLHTCHRG

SEQ ID NO: 37575 - protein, 9 aa, Artificial Sequence
  Description of Artificial Sequence: Synthetic peptide
PCLWPMGCY

SEQ ID NO: 37576 - protein, 9 aa, Artificial Sequence
  Description of Artificial Sequence: Synthetic peptide
PCMHVQQWE

SEQ ID NO: 37577 - protein, 9 aa, Artificial Sequence
  Description of Artificial Sequence: Synthetic peptide
PCMKKHSST

SEQ ID NO: 37578 - protein, 9 aa, Artificial Sequence
  Description of Artificial Sequence: Synthetic peptide
PCMQNFDDG

SEQ ID NO: 37579 - protein, 9 aa, Artificial Sequence
  Description of Artificial Sequence: Synthetic peptide
PCNKWNPKQ

SEQ ID NO: 37580 - protein, 9 aa, Artificial Sequence
  Description of Artificial Sequence: Synthetic peptide
PCNLMRDQN

SEQ ID NO: 37581 - protein, 9 aa, Artificial Sequence
  Description of Artificial Sequence: Synthetic peptide
PCNLVWNCE

SEQ ID NO: 37582 - protein, 9 aa, Artificial Sequence
  Description of Artificial Sequence: Synthetic peptide
PCNTDPSIH

SEQ ID NO: 37583 - protein, 9 aa, Artificial Sequence
  Description of Artificial Sequence: Synthetic peptide
PCPDWYVMS

SEQ ID NO: 37584 - protein, 9 aa, Artificial Sequence
  Description of Artificial Sequence: Synthetic peptide
PCPHDRLNA

SEQ ID NO: 37585 - protein, 9 aa, Artificial Sequence
  Description of Artificial Sequence: Synthetic peptide
PCPIIWESG

SEQ ID NO: 37586 - protein, 9 aa, Artificial Sequence
  Description of Artificial Sequence: Synthetic peptide
PCPLSQYQT

SEQ ID NO: 37587 - protein, 9 aa, Artificial Sequence
  Description of Artificial Sequence: Synthetic peptide
PCPSEDWFW

SEQ ID NO: 37588 - protein, 9 aa, Artificial Sequence
  Description of Artificial Sequence: Synthetic peptide
PCQSIKCCW

SEQ ID NO: 37589 - protein, 9 aa, Artificial Sequence
  Description of Artificial Sequence: Synthetic peptide
PCQSSWLMI

SEQ ID NO: 37590 - protein, 9 aa, Artificial Sequence
  Description of Artificial Sequence: Synthetic peptide
PCRVGFSYE

SEQ ID NO: 37591 - protein, 9 aa, Artificial Sequence
  Description of Artificial Sequence: Synthetic peptide
PCSESWSNT

SEQ ID NO: 37592 - protein, 9 aa, Artificial Sequence
  Description of Artificial Sequence: Synthetic peptide
PCSHYCART

SEQ ID NO: 37593 - protein, 9 aa, Artificial Sequence
  Description of Artificial Sequence: Synthetic peptide
PCSWFYHGG

SEQ ID NO: 37594 - protein, 9 aa, Artificial Sequence
  Description of Artificial Sequence: Synthetic peptide
PCSYTIFDT

SEQ ID NO: 37595 - protein, 9 aa, Artificial Sequence
  Description of Artificial Sequence: Synthetic peptide
PCTCCFNRQ

SEQ ID NO: 37596 - protein, 9 aa, Artificial Sequence
  Description of Artificial Sequence: Synthetic peptide
PCTCVWYRC

SEQ ID NO: 37597 - protein, 9 aa, Artificial Sequence
  Description of Artificial Sequence: Synthetic peptide
PCTGQLFMA

SEQ ID NO: 37598 - protein, 9 aa, Artificial Sequence
  Description of Artificial Sequence: Synthetic peptide
PCTQKQKPF

SEQ ID NO: 37599 - protein, 9 aa, Artificial Sequence
  Description of Artificial Sequence: Synthetic peptide
PCTWAHSHD

SEQ ID NO: 37600 - protein, 9 aa, Artificial Sequence
  Description of Artificial Sequence: Synthetic peptide
PCVHGTQTW

SEQ ID NO: 37601 - protein, 9 aa, Artificial Sequence
  Description of Artificial Sequence: Synthetic peptide
PCVKKDCEE

SEQ ID NO: 37602 - protein, 9 aa, Artificial Sequence
  Description of Artificial Sequence: Synthetic peptide
PCVNKVGTM

SEQ ID NO: 37603 - protein, 9 aa, Artificial Sequence
  Description of Artificial Sequence: Synthetic peptide
PCVWQWHCT

SEQ ID NO: 37604 - protein, 9 aa, Artificial Sequence
  Description of Artificial Sequence: Synthetic peptide
PCWLKPTSW

SEQ ID NO: 37605 - protein, 9 aa, Artificial Sequence
  Description of Artificial Sequence: Synthetic peptide
PCWRRDIHP

SEQ ID NO: 37606 - protein, 9 aa, Artificial Sequence
  Description of Artificial Sequence: Synthetic peptide
PCWVNDHPM

SEQ ID NO: 37607 - protein, 9 aa, Artificial Sequence
  Description of Artificial Sequence: Synthetic peptide
PCWWKWMCG

SEQ ID NO: 37608 - protein, 9 aa, Artificial Sequence
  Description of Artificial Sequence: Synthetic peptide
PCYLCMLIL

SEQ ID NO: 37609 - protein, 9 aa, Artificial Sequence
  Description of Artificial Sequence: Synthetic peptide
PCYWAIAGV

SEQ ID NO: 37610 - protein, 9 aa, Artificial Sequence
  Description of Artificial Sequence: Synthetic peptide
PCYYFGMPH

SEQ ID NO: 37611 - protein, 9 aa, Artificial Sequence
  Description of Artificial Sequence: Synthetic peptide
PDACSPFGA

SEQ ID NO: 37612 - protein, 9 aa, Artificial Sequence
  Description of Artificial Sequence: Synthetic peptide
PDADQFVPQ

SEQ ID NO: 37613 - protein, 9 aa, Artificial Sequence
  Description of Artificial Sequence: Synthetic peptide
PDAGWQNSP

SEQ ID NO: 37614 - protein, 9 aa, Artificial Sequence
  Description of Artificial Sequence: Synthetic peptide
PDAMKDCVT

SEQ ID NO: 37615 - protein, 9 aa, Artificial Sequence
  Description of Artificial Sequence: Synthetic peptide
PDANIEFLC

SEQ ID NO: 37616 - protein, 9 aa, Artificial Sequence
  Description of Artificial Sequence: Synthetic peptide
PDAPWEGWH

SEQ ID NO: 37617 - protein, 9 aa, Artificial Sequence
  Description of Artificial Sequence: Synthetic peptide
PDCCDMQCF

SEQ ID NO: 37618 - protein, 9 aa, Artificial Sequence
  Description of Artificial Sequence: Synthetic peptide
PDCTERFME

SEQ ID NO: 37619 - protein, 9 aa, Artificial Sequence
  Description of Artificial Sequence: Synthetic peptide
PDDEQVRVN

SEQ ID NO: 37620 - protein, 9 aa, Artificial Sequence
  Description of Artificial Sequence: Synthetic peptide
PDDEVCSKV

SEQ ID NO: 37621 - protein, 9 aa, Artificial Sequence
  Description of Artificial Sequence: Synthetic peptide
PDDGHKHPF

SEQ ID NO: 37622 - protein, 9 aa, Artificial Sequence
  Description of Artificial Sequence: Synthetic peptide
PDDMWQYEA

SEQ ID NO: 37623 - protein, 9 aa, Artificial Sequence
  Description of Artificial Sequence: Synthetic peptide
PDEEYAQYW

SEQ ID NO: 37624 - protein, 9 aa, Artificial Sequence
  Description of Artificial Sequence: Synthetic peptide
PDEGFLYDN

SEQ ID NO: 37625 - protein, 9 aa, Artificial Sequence
  Description of Artificial Sequence: Synthetic peptide
PDELHLEDG

SEQ ID NO: 37626 - protein, 9 aa, Artificial Sequence
  Description of Artificial Sequence: Synthetic peptide
PDEPRSKCQ

SEQ ID NO: 37627 - protein, 9 aa, Artificial Sequence
  Description of Artificial Sequence: Synthetic peptide
PDEQHMGYW

SEQ ID NO: 37628 - protein, 9 aa, Artificial Sequence
  Description of Artificial Sequence: Synthetic peptide
PDFQRENFE

SEQ ID NO: 37629 - protein, 9 aa, Artificial Sequence
  Description of Artificial Sequence: Synthetic peptide
PDGFGVSMP

SEQ ID NO: 37630 - protein, 9 aa, Artificial Sequence
  Description of Artificial Sequence: Synthetic peptide
PDGRRYVCS

SEQ ID NO: 37631 - protein, 9 aa, Artificial Sequence
  Description of Artificial Sequence: Synthetic peptide
PDHAMEYQC

SEQ ID NO: 37632 - protein, 9 aa, Artificial Sequence
  Description of Artificial Sequence: Synthetic peptide
PDHEPNGDA

SEQ ID NO: 37633 - protein, 9 aa, Artificial Sequence
  Description of Artificial Sequence: Synthetic peptide
PDHGIQFGW

SEQ ID NO: 37634 - protein, 9 aa, Artificial Sequence
  Description of Artificial Sequence: Synthetic peptide
PDHIRMVTP

SEQ ID NO: 37635 - protein, 9 aa, Artificial Sequence
  Description of Artificial Sequence: Synthetic peptide
PDHKLIVYD

SEQ ID NO: 37636 - protein, 9 aa, Artificial Sequence
  Description of Artificial Sequence: Synthetic peptide
PDHMGLPYH

SEQ ID NO: 37637 - protein, 9 aa, Artificial Sequence
  Description of Artificial Sequence: Synthetic peptide
PDHVHCIHA

SEQ ID NO: 37638 - protein, 9 aa, Artificial Sequence
  Description of Artificial Sequence: Synthetic peptide
PDHVREHCM

SEQ ID NO: 37639 - protein, 9 aa, Artificial Sequence
  Description of Artificial Sequence: Synthetic peptide
PDIHGPQSE

SEQ ID NO: 37640 - protein, 9 aa, Artificial Sequence
  Description of Artificial Sequence: Synthetic peptide
PDKACSHHP

SEQ ID NO: 37641 - protein, 9 aa, Artificial Sequence
  Description of Artificial Sequence: Synthetic peptide
PDKDNHVAY

SEQ ID NO: 37642 - protein, 9 aa, Artificial Sequence
  Description of Artificial Sequence: Synthetic peptide
PDKSEAQRQ

SEQ ID NO: 37643 - protein, 9 aa, Artificial Sequence
  Description of Artificial Sequence: Synthetic peptide
PDKVSDYQE

SEQ ID NO: 37644 - protein, 9 aa, Artificial Sequence
  Description of Artificial Sequence: Synthetic peptide
PDLQPRDTT

SEQ ID NO: 37645 - protein, 9 aa, Artificial Sequence
  Description of Artificial Sequence: Synthetic peptide
PDLVCDYCQ

SEQ ID NO: 37646 - protein, 9 aa, Artificial Sequence
  Description of Artificial Sequence: Synthetic peptide
PDLVPIVGN

SEQ ID NO: 37647 - protein, 9 aa, Artificial Sequence
  Description of Artificial Sequence: Synthetic peptide
PDLWSPFWY

SEQ ID NO: 37648 - protein, 9 aa, Artificial Sequence
  Description of Artificial Sequence: Synthetic peptide
PDMFKERSQ

SEQ ID NO: 37649 - protein, 9 aa, Artificial Sequence
  Description of Artificial Sequence: Synthetic peptide
PDMIVDPDN

SEQ ID NO: 37650 - protein, 9 aa, Artificial Sequence
  Description of Artificial Sequence: Synthetic peptide
PDMLTDSTC

SEQ ID NO: 37651 - protein, 9 aa, Artificial Sequence
  Description of Artificial Sequence: Synthetic peptide
PDMPHDRHC

SEQ ID NO: 37652 - protein, 9 aa, Artificial Sequence
  Description of Artificial Sequence: Synthetic peptide
PDMQWNGEW

SEQ ID NO: 37653 - protein, 9 aa, Artificial Sequence
  Description of Artificial Sequence: Synthetic peptide
PDMTCTINI

SEQ ID NO: 37654 - protein, 9 aa, Artificial Sequence
  Description of Artificial Sequence: Synthetic peptide
PDNIFWGEA

SEQ ID NO: 37655 - protein, 9 aa, Artificial Sequence
  Description of Artificial Sequence: Synthetic peptide
PDNLAPYVP

SEQ ID NO: 37656 - protein, 9 aa, Artificial Sequence
  Description of Artificial Sequence: Synthetic peptide
PDNMITMQH

SEQ ID NO: 37657 - protein, 9 aa, Artificial Sequence
  Description of Artificial Sequence: Synthetic peptide
PDNNFLSNQ

SEQ ID NO: 37658 - protein, 9 aa, Artificial Sequence
  Description of Artificial Sequence: Synthetic peptide
PDPGHRMYA

SEQ ID NO: 37659 - protein, 9 aa, Artificial Sequence
  Description of Artificial Sequence: Synthetic peptide
PDPHCEDRK

SEQ ID NO: 37660 - protein, 9 aa, Artificial Sequence
  Description of Artificial Sequence: Synthetic peptide
PDPHIVWCG

SEQ ID NO: 37661 - protein, 9 aa, Artificial Sequence
  Description of Artificial Sequence: Synthetic peptide
PDPLARRFE

SEQ ID NO: 37662 - protein, 9 aa, Artificial Sequence
  Description of Artificial Sequence: Synthetic peptide
PDQHTHLAM

SEQ ID NO: 37663 - protein, 9 aa, Artificial Sequence
  Description of Artificial Sequence: Synthetic peptide
PDQRGQTGQ

SEQ ID NO: 37664 - protein, 9 aa, Artificial Sequence
  Description of Artificial Sequence: Synthetic peptide
PDRPCEDVN

SEQ ID NO: 37665 - protein, 9 aa, Artificial Sequence
  Description of Artificial Sequence: Synthetic peptide
PDSCLHRTA

SEQ ID NO: 37666 - protein, 9 aa, Artificial Sequence
  Description of Artificial Sequence: Synthetic peptide
PDSVPVQHN

SEQ ID NO: 37667 - protein, 9 aa, Artificial Sequence
  Description of Artificial Sequence: Synthetic peptide
PDTAKQDMS

SEQ ID NO: 37668 - protein, 9 aa, Artificial Sequence
  Description of Artificial Sequence: Synthetic peptide
PDTCWNWPR

SEQ ID NO: 37669 - protein, 9 aa, Artificial Sequence
  Description of Artificial Sequence: Synthetic peptide
PDTSMECDH

SEQ ID NO: 37670 - protein, 9 aa, Artificial Sequence
  Description of Artificial Sequence: Synthetic peptide
PDTTMKNTL

SEQ ID NO: 37671 - protein, 9 aa, Artificial Sequence
  Description of Artificial Sequence: Synthetic peptide
PDWATLMGN

SEQ ID NO: 37672 - protein, 9 aa, Artificial Sequence
  Description of Artificial Sequence: Synthetic peptide
PDWAVMKAP

SEQ ID NO: 37673 - protein, 9 aa, Artificial Sequence
  Description of Artificial Sequence: Synthetic peptide
PDWFEENTV

SEQ ID NO: 37674 - protein, 9 aa, Artificial Sequence
  Description of Artificial Sequence: Synthetic peptide
PDWGSHYCN

SEQ ID NO: 37675 - protein, 9 aa, Artificial Sequence
  Description of Artificial Sequence: Synthetic peptide
PDWHASYGN

SEQ ID NO: 37676 - protein, 9 aa, Artificial Sequence
  Description of Artificial Sequence: Synthetic peptide
PDWNMRMYP

SEQ ID NO: 37677 - protein, 9 aa, Artificial Sequence
  Description of Artificial Sequence: Synthetic peptide
PDWRYGWYS

SEQ ID NO: 37678 - protein, 9 aa, Artificial Sequence
  Description of Artificial Sequence: Synthetic peptide
PDWSGKYDI

SEQ ID NO: 37679 - protein, 9 aa, Artificial Sequence
  Description of Artificial Sequence: Synthetic peptide
PDWSPPIQN

SEQ ID NO: 37680 - protein, 9 aa, Artificial Sequence
  Description of Artificial Sequence: Synthetic peptide
PDWWAIEMG

SEQ ID NO: 37681 - protein, 9 aa, Artificial Sequence
  Description of Artificial Sequence: Synthetic peptide
PDYHIGCNH

SEQ ID NO: 37682 - protein, 9 aa, Artificial Sequence
  Description of Artificial Sequence: Synthetic peptide
PDYMDCAPM

SEQ ID NO: 37683 - protein, 9 aa, Artificial Sequence
  Description of Artificial Sequence: Synthetic peptide
PDYWKSAFA

SEQ ID NO: 37684 - protein, 9 aa, Artificial Sequence
  Description of Artificial Sequence: Synthetic peptide
PEAKWKEHD

SEQ ID NO: 37685 - protein, 9 aa, Artificial Sequence
  Description of Artificial Sequence: Synthetic peptide
PEAMIGQEN

SEQ ID NO: 37686 - protein, 9 aa, Artificial Sequence
  Description of Artificial Sequence: Synthetic peptide
PEANEVQTR

SEQ ID NO: 37687 - protein, 9 aa, Artificial Sequence
  Description of Artificial Sequence: Synthetic peptide
PEARSWWAQ

SEQ ID NO: 37688 - protein, 9 aa, Artificial Sequence
  Description of Artificial Sequence: Synthetic peptide
PEAVWCAFA

SEQ ID NO: 37689 - protein, 9 aa, Artificial Sequence
  Description of Artificial Sequence: Synthetic peptide
PECAESPTT

SEQ ID NO: 37690 - protein, 9 aa, Artificial Sequence
  Description of Artificial Sequence: Synthetic peptide
PECFLDSNV

SEQ ID NO: 37691 - protein, 9 aa, Artificial Sequence
  Description of Artificial Sequence: Synthetic peptide
PECFSPENM

SEQ ID NO: 37692 - protein, 9 aa, Artificial Sequence
  Description of Artificial Sequence: Synthetic peptide
PECLINYTC

SEQ ID NO: 37693 - protein, 9 aa, Artificial Sequence
  Description of Artificial Sequence: Synthetic peptide
PECQSIDSV

SEQ ID NO: 37694 - protein, 9 aa, Artificial Sequence
  Description of Artificial Sequence: Synthetic peptide
PECSNWRNH

SEQ ID NO: 37695 - protein, 9 aa, Artificial Sequence
  Description of Artificial Sequence: Synthetic peptide
PECVIEYED

SEQ ID NO: 37696 - protein, 9 aa, Artificial Sequence
  Description of Artificial Sequence: Synthetic peptide
PECVRYSKC

SEQ ID NO: 37697 - protein, 9 aa, Artificial Sequence
  Description of Artificial Sequence: Synthetic peptide
PEDCCRQDS

SEQ ID NO: 37698 - protein, 9 aa, Artificial Sequence
  Description of Artificial Sequence: Synthetic peptide
PEDMTLDGS

SEQ ID NO: 37699 - protein, 9 aa, Artificial Sequence
  Description of Artificial Sequence: Synthetic peptide
PEDNNIRRN

SEQ ID NO: 37700 - protein, 9 aa, Artificial Sequence
  Description of Artificial Sequence: Synthetic peptide
PEDSGYHWH

SEQ ID NO: 37701 - protein, 9 aa, Artificial Sequence
  Description of Artificial Sequence: Synthetic peptide
PEEANQQVT

SEQ ID NO: 37702 - protein, 9 aa, Artificial Sequence
  Description of Artificial Sequence: Synthetic peptide
PEEAPKQMF

SEQ ID NO: 37703 - protein, 9 aa, Artificial Sequence
  Description of Artificial Sequence: Synthetic peptide
PEEETMYAC

SEQ ID NO: 37704 - protein, 9 aa, Artificial Sequence
  Description of Artificial Sequence: Synthetic peptide
PEEHEVEQT

SEQ ID NO: 37705 - protein, 9 aa, Artificial Sequence
  Description of Artificial Sequence: Synthetic peptide
PEEINDHCY

SEQ ID NO: 37706 - protein, 9 aa, Artificial Sequence
  Description of Artificial Sequence: Synthetic peptide
PEEYEHMNC

SEQ ID NO: 37707 - protein, 9 aa, Artificial Sequence
  Description of Artificial Sequence: Synthetic peptide
PEFFHWPHS

SEQ ID NO: 37708 - protein, 9 aa, Artificial Sequence
  Description of Artificial Sequence: Synthetic peptide
PEFMSKGDS

SEQ ID NO: 37709 - protein, 9 aa, Artificial Sequence
  Description of Artificial Sequence: Synthetic peptide
PEFVQYGSC

SEQ ID NO: 37710 - protein, 9 aa, Artificial Sequence
  Description of Artificial Sequence: Synthetic peptide
PEGCTYPQL

SEQ ID NO: 37711 - protein, 9 aa, Artificial Sequence
  Description of Artificial Sequence: Synthetic peptide
PEGHEEHPS

SEQ ID NO: 37712 - protein, 9 aa, Artificial Sequence
  Description of Artificial Sequence: Synthetic peptide
PEGLVIHMT

SEQ ID NO: 37713 - protein, 9 aa, Artificial Sequence
  Description of Artificial Sequence: Synthetic peptide
PEHGIHDGE

SEQ ID NO: 37714 - protein, 9 aa, Artificial Sequence
  Description of Artificial Sequence: Synthetic peptide
PEHRAANVG

SEQ ID NO: 37715 - protein, 9 aa, Artificial Sequence
  Description of Artificial Sequence: Synthetic peptide
PEHSNLFSY

SEQ ID NO: 37716 - protein, 9 aa, Artificial Sequence
  Description of Artificial Sequence: Synthetic peptide
PEHTVIWES

SEQ ID NO: 37717 - protein, 9 aa, Artificial Sequence
  Description of Artificial Sequence: Synthetic peptide
PEHVETHGQ

SEQ ID NO: 37718 - protein, 9 aa, Artificial Sequence
  Description of Artificial Sequence: Synthetic peptide
PEIFGQMSW

SEQ ID NO: 37719 - protein, 9 aa, Artificial Sequence
  Description of Artificial Sequence: Synthetic peptide
PEIIWQIAT

SEQ ID NO: 37720 - protein, 9 aa, Artificial Sequence
  Description of Artificial Sequence: Synthetic peptide
PEITCKIAD

SEQ ID NO: 37721 - protein, 9 aa, Artificial Sequence
  Description of Artificial Sequence: Synthetic peptide
PEIVNPARF

SEQ ID NO: 37722 - protein, 9 aa, Artificial Sequence
  Description of Artificial Sequence: Synthetic peptide
PEKVLLGMV

SEQ ID NO: 37723 - protein, 9 aa, Artificial Sequence
  Description of Artificial Sequence: Synthetic peptide
PELYTMFFT

SEQ ID NO: 37724 - protein, 9 aa, Artificial Sequence
  Description of Artificial Sequence: Synthetic peptide
PEMALTKGL

SEQ ID NO: 37725 - protein, 9 aa, Artificial Sequence
  Description of Artificial Sequence: Synthetic peptide
PEMCDPADQ

SEQ ID NO: 37726 - protein, 9 aa, Artificial Sequence
  Description of Artificial Sequence: Synthetic peptide
PEMDKFKNM

SEQ ID NO: 37727 - protein, 9 aa, Artificial Sequence
  Description of Artificial Sequence: Synthetic peptide
PEMGEATKV

SEQ ID NO: 37728 - protein, 9 aa, Artificial Sequence
  Description of Artificial Sequence: Synthetic peptide
PEMPRHICR

SEQ ID NO: 37729 - protein, 9 aa, Artificial Sequence
  Description of Artificial Sequence: Synthetic peptide
PEMTYEPMS

SEQ ID NO: 37730 - protein, 9 aa, Artificial Sequence
  Description of Artificial Sequence: Synthetic peptide
PEMVEEMNV

SEQ ID NO: 37731 - protein, 9 aa, Artificial Sequence
  Description of Artificial Sequence: Synthetic peptide
PEMWMILEG

SEQ ID NO: 37732 - protein, 9 aa, Artificial Sequence
  Description of Artificial Sequence: Synthetic peptide
PENHKMGPW

SEQ ID NO: 37733 - protein, 9 aa, Artificial Sequence
  Description of Artificial Sequence: Synthetic peptide
PENTFCSTY

SEQ ID NO: 37734 - protein, 9 aa, Artificial Sequence
  Description of Artificial Sequence: Synthetic peptide
PENVGASGA

SEQ ID NO: 37735 - protein, 9 aa, Artificial Sequence
  Description of Artificial Sequence: Synthetic peptide
PENWRPWVT

SEQ ID NO: 37736 - protein, 9 aa, Artificial Sequence
  Description of Artificial Sequence: Synthetic peptide
PEPKLIGLF

SEQ ID NO: 37737 - protein, 9 aa, Artificial Sequence
  Description of Artificial Sequence: Synthetic peptide
PEPLGQGTW

SEQ ID NO: 37738 - protein, 9 aa, Artificial Sequence
  Description of Artificial Sequence: Synthetic peptide
PEPQTQDDG

SEQ ID NO: 37739 - protein, 9 aa, Artificial Sequence
  Description of Artificial Sequence: Synthetic peptide
PEPRNVMKS

SEQ ID NO: 37740 - protein, 9 aa, Artificial Sequence
  Description of Artificial Sequence: Synthetic peptide
PEQCSERIV

SEQ ID NO: 37741 - protein, 9 aa, Artificial Sequence
  Description of Artificial Sequence: Synthetic peptide
PEQNDVNGM

SEQ ID NO: 37742 - protein, 9 aa, Artificial Sequence
  Description of Artificial Sequence: Synthetic peptide
PEQRRRYDG

SEQ ID NO: 37743 - protein, 9 aa, Artificial Sequence
  Description of Artificial Sequence: Synthetic peptide
PEQWSWGVC

SEQ ID NO: 37744 - protein, 9 aa, Artificial Sequence
  Description of Artificial Sequence: Synthetic peptide
PEQWWRYQA

SEQ ID NO: 37745 - protein, 9 aa, Artificial Sequence
  Description of Artificial Sequence: Synthetic peptide
PEQYKYYQC

SEQ ID NO: 37746 - protein, 9 aa, Artificial Sequence
  Description of Artificial Sequence: Synthetic peptide
PEQYNAQAE

SEQ ID NO: 37747 - protein, 9 aa, Artificial Sequence
  Description of Artificial Sequence: Synthetic peptide
PERINHLGC

SEQ ID NO: 37748 - protein, 9 aa, Artificial Sequence
  Description of Artificial Sequence: Synthetic peptide
PERLFTCFV

SEQ ID NO: 37749 - protein, 9 aa, Artificial Sequence
  Description of Artificial Sequence: Synthetic peptide
PERNKVWVA

SEQ ID NO: 37750 - protein, 9 aa, Artificial Sequence
  Description of Artificial Sequence: Synthetic peptide
PERYNQNQL

SEQ ID NO: 37751 - protein, 9 aa, Artificial Sequence
  Description of Artificial Sequence: Synthetic peptide
PESCGAAAP

SEQ ID NO: 37752 - protein, 9 aa, Artificial Sequence
  Description of Artificial Sequence: Synthetic peptide
PESDRIYRP

SEQ ID NO: 37753 - protein, 9 aa, Artificial Sequence
  Description of Artificial Sequence: Synthetic peptide
PESIKTIQR

SEQ ID NO: 37754 - protein, 9 aa, Artificial Sequence
  Description of Artificial Sequence: Synthetic peptide
PESNKWEDH

SEQ ID NO: 37755 - protein, 9 aa, Artificial Sequence
  Description of Artificial Sequence: Synthetic peptide
PESNWRCPE

SEQ ID NO: 37756 - protein, 9 aa, Artificial Sequence
  Description of Artificial Sequence: Synthetic peptide
PETAAAKAM

SEQ ID NO: 37757 - protein, 9 aa, Artificial Sequence
  Description of Artificial Sequence: Synthetic peptide
PETFDTYPH

SEQ ID NO: 37758 - protein, 9 aa, Artificial Sequence
  Description of Artificial Sequence: Synthetic peptide
PETHSESCN

SEQ ID NO: 37759 - protein, 9 aa, Artificial Sequence
  Description of Artificial Sequence: Synthetic peptide
PETWNDRCH

SEQ ID NO: 37760 - protein, 9 aa, Artificial Sequence
  Description of Artificial Sequence: Synthetic peptide
PETYLGIPD

SEQ ID NO: 37761 - protein, 9 aa, Artificial Sequence
  Description of Artificial Sequence: Synthetic peptide
PEVIQNESM

SEQ ID NO: 37762 - protein, 9 aa, Artificial Sequence
  Description of Artificial Sequence: Synthetic peptide
PEVPSTNHA

SEQ ID NO: 37763 - protein, 9 aa, Artificial Sequence
  Description of Artificial Sequence: Synthetic peptide
PEVTSRDIM

SEQ ID NO: 37764 - protein, 9 aa, Artificial Sequence
  Description of Artificial Sequence: Synthetic peptide
PEVWGGRTQ

SEQ ID NO: 37765 - protein, 9 aa, Artificial Sequence
  Description of Artificial Sequence: Synthetic peptide
PEWGHIGNH

SEQ ID NO: 37766 - protein, 9 aa, Artificial Sequence
  Description of Artificial Sequence: Synthetic peptide
PEWIDGYVM

SEQ ID NO: 37767 - protein, 9 aa, Artificial Sequence
  Description of Artificial Sequence: Synthetic peptide
PEWWGQNIH

SEQ ID NO: 37768 - protein, 9 aa, Artificial Sequence
  Description of Artificial Sequence: Synthetic peptide
PEYHWDHYY

SEQ ID NO: 37769 - protein, 9 aa, Artificial Sequence
  Description of Artificial Sequence: Synthetic peptide
PEYSTSFEQ

SEQ ID NO: 37770 - protein, 9 aa, Artificial Sequence
  Description of Artificial Sequence: Synthetic peptide
PEYTEFEHQ

SEQ ID NO: 37771 - protein, 9 aa, Artificial Sequence
  Description of Artificial Sequence: Synthetic peptide
PFAKPNIEE

SEQ ID NO: 37772 - protein, 9 aa, Artificial Sequence
  Description of Artificial Sequence: Synthetic peptide
PFCCEMHIP

SEQ ID NO: 37773 - protein, 9 aa, Artificial Sequence
  Description of Artificial Sequence: Synthetic peptide
PFCLQDVCH

SEQ ID NO: 37774 - protein, 9 aa, Artificial Sequence
  Description of Artificial Sequence: Synthetic peptide
PFDTCFICT

SEQ ID NO: 37775 - protein, 9 aa, Artificial Sequence
  Description of Artificial Sequence: Synthetic peptide
PFDVDGPIY

SEQ ID NO: 37776 - protein, 9 aa, Artificial Sequence
  Description of Artificial Sequence: Synthetic peptide
PFEAQINFD

SEQ ID NO: 37777 - protein, 9 aa, Artificial Sequence
  Description of Artificial Sequence: Synthetic peptide
PFECHKSSS

SEQ ID NO: 37778 - protein, 9 aa, Artificial Sequence
  Description of Artificial Sequence: Synthetic peptide
PFESHDQYT

SEQ ID NO: 37779 - protein, 9 aa, Artificial Sequence
  Description of Artificial Sequence: Synthetic peptide
PFFCSGVKC

SEQ ID NO: 37780 - protein, 9 aa, Artificial Sequence
  Description of Artificial Sequence: Synthetic peptide
PFFEPDDEM

SEQ ID NO: 37781 - protein, 9 aa, Artificial Sequence
  Description of Artificial Sequence: Synthetic peptide
PFGLVEINT

SEQ ID NO: 37782 - protein, 9 aa, Artificial Sequence
  Description of Artificial Sequence: Synthetic peptide
PFGRMIVDD

SEQ ID NO: 37783 - protein, 9 aa, Artificial Sequence
  Description of Artificial Sequence: Synthetic peptide
PFGWESQQP

SEQ ID NO: 37784 - protein, 9 aa, Artificial Sequence
  Description of Artificial Sequence: Synthetic peptide
PFHEDCPTE

SEQ ID NO: 37785 - protein, 9 aa, Artificial Sequence
  Description of Artificial Sequence: Synthetic peptide
PFHEPWAYA

SEQ ID NO: 37786 - protein, 9 aa, Artificial Sequence
  Description of Artificial Sequence: Synthetic peptide
PFHGVILEN

SEQ ID NO: 37787 - protein, 9 aa, Artificial Sequence
  Description of Artificial Sequence: Synthetic peptide
PFHLPRFPS

SEQ ID NO: 37788 - protein, 9 aa, Artificial Sequence
  Description of Artificial Sequence: Synthetic peptide
PFHVHGEHY

SEQ ID NO: 37789 - protein, 9 aa, Artificial Sequence
  Description of Artificial Sequence: Synthetic peptide
PFHYNKTLC

SEQ ID NO: 37790 - protein, 9 aa, Artificial Sequence
  Description of Artificial Sequence: Synthetic peptide
PFKAHKPSL

SEQ ID NO: 37791 - protein, 9 aa, Artificial Sequence
  Description of Artificial Sequence: Synthetic peptide
PFKHENLRH

SEQ ID NO: 37792 - protein, 9 aa, Artificial Sequence
  Description of Artificial Sequence: Synthetic peptide
PFKPCPIEI

SEQ ID NO: 37793 - protein, 9 aa, Artificial Sequence
  Description of Artificial Sequence: Synthetic peptide
PFKSDFWAI

SEQ ID NO: 37794 - protein, 9 aa, Artificial Sequence
  Description of Artificial Sequence: Synthetic peptide
PFLAGDRPV

SEQ ID NO: 37795 - protein, 9 aa, Artificial Sequence
  Description of Artificial Sequence: Synthetic peptide
PFLMEENYR

SEQ ID NO: 37796 - protein, 9 aa, Artificial Sequence
  Description of Artificial Sequence: Synthetic peptide
PFLYVIDRR

SEQ ID NO: 37797 - protein, 9 aa, Artificial Sequence
  Description of Artificial Sequence: Synthetic peptide
PFMAHGMYQ

SEQ ID NO: 37798 - protein, 9 aa, Artificial Sequence
  Description of Artificial Sequence: Synthetic peptide
PFMISNALQ

SEQ ID NO: 37799 - protein, 9 aa, Artificial Sequence
  Description of Artificial Sequence: Synthetic peptide
PFMQCCYSW

SEQ ID NO: 37800 - protein, 9 aa, Artificial Sequence
  Description of Artificial Sequence: Synthetic peptide
PFNFMGMVQ

SEQ ID NO: 37801 - protein, 9 aa, Artificial Sequence
  Description of Artificial Sequence: Synthetic peptide
PFNPDWGRF

SEQ ID NO: 37802 - protein, 9 aa, Artificial Sequence
  Description of Artificial Sequence: Synthetic peptide
PFNRMTDYY

SEQ ID NO: 37803 - protein, 9 aa, Artificial Sequence
  Description of Artificial Sequence: Synthetic peptide
PFNSDSYIR

SEQ ID NO: 37804 - protein, 9 aa, Artificial Sequence
  Description of Artificial Sequence: Synthetic peptide
PFNYMFLIM

SEQ ID NO: 37805 - protein, 9 aa, Artificial Sequence
  Description of Artificial Sequence: Synthetic peptide
PFPAMKIKL

SEQ ID NO: 37806 - protein, 9 aa, Artificial Sequence
  Description of Artificial Sequence: Synthetic peptide
PFPWEWLRL

SEQ ID NO: 37807 - protein, 9 aa, Artificial Sequence
  Description of Artificial Sequence: Synthetic peptide
PFQQFLERC

SEQ ID NO: 37808 - protein, 9 aa, Artificial Sequence
  Description of Artificial Sequence: Synthetic peptide
PFQWVWREQ

SEQ ID NO: 37809 - protein, 9 aa, Artificial Sequence
  Description of Artificial Sequence: Synthetic peptide
PFRECKNCT

SEQ ID NO: 37810 - protein, 9 aa, Artificial Sequence
  Description of Artificial Sequence: Synthetic peptide
PFSFSQPGS

SEQ ID NO: 37811 - protein, 9 aa, Artificial Sequence
  Description of Artificial Sequence: Synthetic peptide
PFSKGAYLA

SEQ ID NO: 37812 - protein, 9 aa, Artificial Sequence
  Description of Artificial Sequence: Synthetic peptide
PFSQWIHSA

SEQ ID NO: 37813 - protein, 9 aa, Artificial Sequence
  Description of Artificial Sequence: Synthetic peptide
PFTHPICWH

SEQ ID NO: 37814 - protein, 9 aa, Artificial Sequence
  Description of Artificial Sequence: Synthetic peptide
PFTHQPAGM

SEQ ID NO: 37815 - protein, 9 aa, Artificial Sequence
  Description of Artificial Sequence: Synthetic peptide
PFVGLLEHS

SEQ ID NO: 37816 - protein, 9 aa, Artificial Sequence
  Description of Artificial Sequence: Synthetic peptide
PFVKPLDIA

SEQ ID NO: 37817 - protein, 9 aa, Artificial Sequence
  Description of Artificial Sequence: Synthetic peptide
PFVQYKWDR

SEQ ID NO: 37818 - protein, 9 aa, Artificial Sequence
  Description of Artificial Sequence: Synthetic peptide
PFWCEAISY

SEQ ID NO: 37819 - protein, 9 aa, Artificial Sequence
  Description of Artificial Sequence: Synthetic peptide
PFWIHRMIE

SEQ ID NO: 37820 - protein, 9 aa, Artificial Sequence
  Description of Artificial Sequence: Synthetic peptide
PFWLFHAKC

SEQ ID NO: 37821 - protein, 9 aa, Artificial Sequence
  Description of Artificial Sequence: Synthetic peptide
PFWVRITPE

SEQ ID NO: 37822 - protein, 9 aa, Artificial Sequence
  Description of Artificial Sequence: Synthetic peptide
PFYDQKLSF

SEQ ID NO: 37823 - protein, 9 aa, Artificial Sequence
  Description of Artificial Sequence: Synthetic peptide
PFYKKYTAF

SEQ ID NO: 37824 - protein, 9 aa, Artificial Sequence
  Description of Artificial Sequence: Synthetic peptide
PFYPLWENF

SEQ ID NO: 37825 - protein, 9 aa, Artificial Sequence
  Description of Artificial Sequence: Synthetic peptide
PFYQHLSGY

SEQ ID NO: 37826 - protein, 9 aa, Artificial Sequence
  Description of Artificial Sequence: Synthetic peptide
PFYTSDGCP

SEQ ID NO: 37827 - protein, 9 aa, Artificial Sequence
  Description of Artificial Sequence: Synthetic peptide
PFYYFTCCQ

SEQ ID NO: 37828 - protein, 9 aa, Artificial Sequence
  Description of Artificial Sequence: Synthetic peptide
PGADTHGPQ

SEQ ID NO: 37829 - protein, 9 aa, Artificial Sequence
  Description of Artificial Sequence: Synthetic peptide
PGAGLGPPS

SEQ ID NO: 37830 - protein, 9 aa, Artificial Sequence
  Description of Artificial Sequence: Synthetic peptide
PGANYWGCM

SEQ ID NO: 37831 - protein, 9 aa, Artificial Sequence
  Description of Artificial Sequence: Synthetic peptide
PGAYKNQQH

SEQ ID NO: 37832 - protein, 9 aa, Artificial Sequence
  Description of Artificial Sequence: Synthetic peptide
PGCLEIFHM

SEQ ID NO: 37833 - protein, 9 aa, Artificial Sequence
  Description of Artificial Sequence: Synthetic peptide
PGCPNSNPH

SEQ ID NO: 37834 - protein, 9 aa, Artificial Sequence
  Description of Artificial Sequence: Synthetic peptide
PGDCEEAII

SEQ ID NO: 37835 - protein, 9 aa, Artificial Sequence
  Description of Artificial Sequence: Synthetic peptide
PGDCHEAWC

SEQ ID NO: 37836 - protein, 9 aa, Artificial Sequence
  Description of Artificial Sequence: Synthetic peptide
PGDQYREWC

SEQ ID NO: 37837 - protein, 9 aa, Artificial Sequence
  Description of Artificial Sequence: Synthetic peptide
PGDRGPIGR

SEQ ID NO: 37838 - protein, 9 aa, Artificial Sequence
  Description of Artificial Sequence: Synthetic peptide
PGDWQTTPT

SEQ ID NO: 37839 - protein, 9 aa, Artificial Sequence
  Description of Artificial Sequence: Synthetic peptide
PGDYRQTLP

SEQ ID NO: 37840 - protein, 9 aa, Artificial Sequence
  Description of Artificial Sequence: Synthetic peptide
PGEAAFEKQ

SEQ ID NO: 37841 - protein, 9 aa, Artificial Sequence
  Description of Artificial Sequence: Synthetic peptide
PGEAVCHRW

SEQ ID NO: 37842 - protein, 9 aa, Artificial Sequence
  Description of Artificial Sequence: Synthetic peptide
PGEFKGLVS

SEQ ID NO: 37843 - protein, 9 aa, Artificial Sequence
  Description of Artificial Sequence: Synthetic peptide
PGFGMNSIR

SEQ ID NO: 37844 - protein, 9 aa, Artificial Sequence
  Description of Artificial Sequence: Synthetic peptide
PGGAYVWTR

SEQ ID NO: 37845 - protein, 9 aa, Artificial Sequence
  Description of Artificial Sequence: Synthetic peptide
PGGCMWARD

SEQ ID NO: 37846 - protein, 9 aa, Artificial Sequence
  Description of Artificial Sequence: Synthetic peptide
PGGGFCLNG

SEQ ID NO: 37847 - protein, 9 aa, Artificial Sequence
  Description of Artificial Sequence: Synthetic peptide
PGGINNMTV

SEQ ID NO: 37848 - protein, 9 aa, Artificial Sequence
  Description of Artificial Sequence: Synthetic peptide
PGGWLEHPA

SEQ ID NO: 37849 - protein, 9 aa, Artificial Sequence
  Description of Artificial Sequence: Synthetic peptide
PGGWQVNPS

SEQ ID NO: 37850 - protein, 9 aa, Artificial Sequence
  Description of Artificial Sequence: Synthetic peptide
PGHCYRMGW

SEQ ID NO: 37851 - protein, 9 aa, Artificial Sequence
  Description of Artificial Sequence: Synthetic peptide
PGHFWWQHA

SEQ ID NO: 37852 - protein, 9 aa, Artificial Sequence
  Description of Artificial Sequence: Synthetic peptide
PGHKFRSMD

SEQ ID NO: 37853 - protein, 9 aa, Artificial Sequence
  Description of Artificial Sequence: Synthetic peptide
PGHWNLYHQ

SEQ ID NO: 37854 - protein, 9 aa, Artificial Sequence
  Description of Artificial Sequence: Synthetic peptide
PGHYAIMKR

SEQ ID NO: 37855 - protein, 9 aa, Artificial Sequence
  Description of Artificial Sequence: Synthetic peptide
PGIHSVMNQ

SEQ ID NO: 37856 - protein, 9 aa, Artificial Sequence
  Description of Artificial Sequence: Synthetic peptide
PGIRAQCGE

SEQ ID NO: 37857 - protein, 9 aa, Artificial Sequence
  Description of Artificial Sequence: Synthetic peptide
PGKLQTMGP

SEQ ID NO: 37858 - protein, 9 aa, Artificial Sequence
  Description of Artificial Sequence: Synthetic peptide
PGKMINPQM

SEQ ID NO: 37859 - protein, 9 aa, Artificial Sequence
  Description of Artificial Sequence: Synthetic peptide
PGKNLKWTD

SEQ ID NO: 37860 - protein, 9 aa, Artificial Sequence
  Description of Artificial Sequence: Synthetic peptide
PGKVAWSQG

SEQ ID NO: 37861 - protein, 9 aa, Artificial Sequence
  Description of Artificial Sequence: Synthetic peptide
PGLICSIDW

SEQ ID NO: 37862 - protein, 9 aa, Artificial Sequence
  Description of Artificial Sequence: Synthetic peptide
PGLPYRNHH

SEQ ID NO: 37863 - protein, 9 aa, Artificial Sequence
  Description of Artificial Sequence: Synthetic peptide
PGMEKNGDL

SEQ ID NO: 37864 - protein, 9 aa, Artificial Sequence
  Description of Artificial Sequence: Synthetic peptide
PGNCIPAMG

SEQ ID NO: 37865 - protein, 9 aa, Artificial Sequence
  Description of Artificial Sequence: Synthetic peptide
PGNEHMQMT

SEQ ID NO: 37866 - protein, 9 aa, Artificial Sequence
  Description of Artificial Sequence: Synthetic peptide
PGNGRLYWT

SEQ ID NO: 37867 - protein, 9 aa, Artificial Sequence
  Description of Artificial Sequence: Synthetic peptide
PGNRFMTYY

SEQ ID NO: 37868 - protein, 9 aa, Artificial Sequence
  Description of Artificial Sequence: Synthetic peptide
PGNWAKPGG

SEQ ID NO: 37869 - protein, 9 aa, Artificial Sequence
  Description of Artificial Sequence: Synthetic peptide
PGPHDMGSL

SEQ ID NO: 37870 - protein, 9 aa, Artificial Sequence
  Description of Artificial Sequence: Synthetic peptide
PGPSDNTPN

SEQ ID NO: 37871 - protein, 9 aa, Artificial Sequence
  Description of Artificial Sequence: Synthetic peptide
PGQGSDTEE

SEQ ID NO: 37872 - protein, 9 aa, Artificial Sequence
  Description of Artificial Sequence: Synthetic peptide
PGQLTSRHF

SEQ ID NO: 37873 - protein, 9 aa, Artificial Sequence
  Description of Artificial Sequence: Synthetic peptide
PGQSDSDMV

SEQ ID NO: 37874 - protein, 9 aa, Artificial Sequence
  Description of Artificial Sequence: Synthetic peptide
PGQTEERVW

SEQ ID NO: 37875 - protein, 9 aa, Artificial Sequence
  Description of Artificial Sequence: Synthetic peptide
PGRIDFWKP

SEQ ID NO: 37876 - protein, 9 aa, Artificial Sequence
  Description of Artificial Sequence: Synthetic peptide
PGRPMWMTN

SEQ ID NO: 37877 - protein, 9 aa, Artificial Sequence
  Description of Artificial Sequence: Synthetic peptide
PGRYCKTHS

SEQ ID NO: 37878 - protein, 9 aa, Artificial Sequence
  Description of Artificial Sequence: Synthetic peptide
PGSQALQWA

SEQ ID NO: 37879 - protein, 9 aa, Artificial Sequence
  Description of Artificial Sequence: Synthetic peptide
PGSSNKPYA

SEQ ID NO: 37880 - protein, 9 aa, Artificial Sequence
  Description of Artificial Sequence: Synthetic peptide
PGSSSACLC

SEQ ID NO: 37881 - protein, 9 aa, Artificial Sequence
  Description of Artificial Sequence: Synthetic peptide
PGSTYQAML

SEQ ID NO: 37882 - protein, 9 aa, Artificial Sequence
  Description of Artificial Sequence: Synthetic peptide
PGSWYMHLP

SEQ ID NO: 37883 - protein, 9 aa, Artificial Sequence
  Description of Artificial Sequence: Synthetic peptide
PGTFWHEQY

SEQ ID NO: 37884 - protein, 9 aa, Artificial Sequence
  Description of Artificial Sequence: Synthetic peptide
PGTGVADRN

SEQ ID NO: 37885 - protein, 9 aa, Artificial Sequence
  Description of Artificial Sequence: Synthetic peptide
PGTKACMKH

SEQ ID NO: 37886 - protein, 9 aa, Artificial Sequence
  Description of Artificial Sequence: Synthetic peptide
PGTSWIPWM

SEQ ID NO: 37887 - protein, 9 aa, Artificial Sequence
  Description of Artificial Sequence: Synthetic peptide
PGVTNCDVG

SEQ ID NO: 37888 - protein, 9 aa, Artificial Sequence
  Description of Artificial Sequence: Synthetic peptide
PGVTVWGYH

SEQ ID NO: 37889 - protein, 9 aa, Artificial Sequence
  Description of Artificial Sequence: Synthetic peptide
PGVWLSYNC

SEQ ID NO: 37890 - protein, 9 aa, Artificial Sequence
  Description of Artificial Sequence: Synthetic peptide
PGWGKSFLT

SEQ ID NO: 37891 - protein, 9 aa, Artificial Sequence
  Description of Artificial Sequence: Synthetic peptide
PGWHNFTAI

SEQ ID NO: 37892 - protein, 9 aa, Artificial Sequence
  Description of Artificial Sequence: Synthetic peptide
PGWLEAWSP

SEQ ID NO: 37893 - protein, 9 aa, Artificial Sequence
  Description of Artificial Sequence: Synthetic peptide
PGWPAPTGH

SEQ ID NO: 37894 - protein, 9 aa, Artificial Sequence
  Description of Artificial Sequence: Synthetic peptide
PGYKTPWAK

SEQ ID NO: 37895 - protein, 9 aa, Artificial Sequence
  Description of Artificial Sequence: Synthetic peptide
PHAEGLFCT

SEQ ID NO: 37896 - protein, 9 aa, Artificial Sequence
  Description of Artificial Sequence: Synthetic peptide
PHAHPMFMT

SEQ ID NO: 37897 - protein, 9 aa, Artificial Sequence
  Description of Artificial Sequence: Synthetic peptide
PHASSPMQP

SEQ ID NO: 37898 - protein, 9 aa, Artificial Sequence
  Description of Artificial Sequence: Synthetic peptide
PHCFPAYCC

SEQ ID NO: 37899 - protein, 9 aa, Artificial Sequence
  Description of Artificial Sequence: Synthetic peptide
PHCKICRWN

SEQ ID NO: 37900 - protein, 9 aa, Artificial Sequence
  Description of Artificial Sequence: Synthetic peptide
PHCLADYFM

SEQ ID NO: 37901 - protein, 9 aa, Artificial Sequence
  Description of Artificial Sequence: Synthetic peptide
PHCPMIRQD

SEQ ID NO: 37902 - protein, 9 aa, Artificial Sequence
  Description of Artificial Sequence: Synthetic peptide
PHCREGEVQ

SEQ ID NO: 37903 - protein, 9 aa, Artificial Sequence
  Description of Artificial Sequence: Synthetic peptide
PHCWWKWSG

SEQ ID NO: 37904 - protein, 9 aa, Artificial Sequence
  Description of Artificial Sequence: Synthetic peptide
PHDMSMRFY

SEQ ID NO: 37905 - protein, 9 aa, Artificial Sequence
  Description of Artificial Sequence: Synthetic peptide
PHDTNNAKY

SEQ ID NO: 37906 - protein, 9 aa, Artificial Sequence
  Description of Artificial Sequence: Synthetic peptide
PHEEGNKWG

SEQ ID NO: 37907 - protein, 9 aa, Artificial Sequence
  Description of Artificial Sequence: Synthetic peptide
PHEGHDRKQ

SEQ ID NO: 37908 - protein, 9 aa, Artificial Sequence
  Description of Artificial Sequence: Synthetic peptide
PHEHKEGVC

SEQ ID NO: 37909 - protein, 9 aa, Artificial Sequence
  Description of Artificial Sequence: Synthetic peptide
PHENEAIHW

SEQ ID NO: 37910 - protein, 9 aa, Artificial Sequence
  Description of Artificial Sequence: Synthetic peptide
PHEYIVVKS

SEQ ID NO: 37911 - protein, 9 aa, Artificial Sequence
  Description of Artificial Sequence: Synthetic peptide
PHFKHHKTQ

SEQ ID NO: 37912 - protein, 9 aa, Artificial Sequence
  Description of Artificial Sequence: Synthetic peptide
PHFKMEPHD

SEQ ID NO: 37913 - protein, 9 aa, Artificial Sequence
  Description of Artificial Sequence: Synthetic peptide
PHFSRQNGT

SEQ ID NO: 37914 - protein, 9 aa, Artificial Sequence
  Description of Artificial Sequence: Synthetic peptide
PHGGQRISN

SEQ ID NO: 37915 - protein, 9 aa, Artificial Sequence
  Description of Artificial Sequence: Synthetic peptide
PHGLNEAAI

SEQ ID NO: 37916 - protein, 9 aa, Artificial Sequence
  Description of Artificial Sequence: Synthetic peptide
PHHAGTQRS

SEQ ID NO: 37917 - protein, 9 aa, Artificial Sequence
  Description of Artificial Sequence: Synthetic peptide
PHHDVSIPC

SEQ ID NO: 37918 - protein, 9 aa, Artificial Sequence
  Description of Artificial Sequence: Synthetic peptide
PHHFTVYPF

SEQ ID NO: 37919 - protein, 9 aa, Artificial Sequence
  Description of Artificial Sequence: Synthetic peptide
PHHIMWHHP

SEQ ID NO: 37920 - protein, 9 aa, Artificial Sequence
  Description of Artificial Sequence: Synthetic peptide
PHHLMSCIG

SEQ ID NO: 37921 - protein, 9 aa, Artificial Sequence
  Description of Artificial Sequence: Synthetic peptide
PHIEVAIGH

SEQ ID NO: 37922 - protein, 9 aa, Artificial Sequence
  Description of Artificial Sequence: Synthetic peptide
PHIIPLEGL

SEQ ID NO: 37923 - protein, 9 aa, Artificial Sequence
  Description of Artificial Sequence: Synthetic peptide
PHIKDWPRA

SEQ ID NO: 37924 - protein, 9 aa, Artificial Sequence
  Description of Artificial Sequence: Synthetic peptide
PHISCAHAW

SEQ ID NO: 37925 - protein, 9 aa, Artificial Sequence
  Description of Artificial Sequence: Synthetic peptide
PHKFIFMTS

SEQ ID NO: 37926 - protein, 9 aa, Artificial Sequence
  Description of Artificial Sequence: Synthetic peptide
PHKPGTTKD

SEQ ID NO: 37927 - protein, 9 aa, Artificial Sequence
  Description of Artificial Sequence: Synthetic peptide
PHKWIKFAG

SEQ ID NO: 37928 - protein, 9 aa, Artificial Sequence
  Description of Artificial Sequence: Synthetic peptide
PHKWWNVHW

SEQ ID NO: 37929 - protein, 9 aa, Artificial Sequence
  Description of Artificial Sequence: Synthetic peptide
PHMCYLLWR

SEQ ID NO: 37930 - protein, 9 aa, Artificial Sequence
  Description of Artificial Sequence: Synthetic peptide
PHMWRDNHN

SEQ ID NO: 37931 - protein, 9 aa, Artificial Sequence
  Description of Artificial Sequence: Synthetic peptide
PHMYKWTRM

SEQ ID NO: 37932 - protein, 9 aa, Artificial Sequence
  Description of Artificial Sequence: Synthetic peptide
PHNCELNSA

SEQ ID NO: 37933 - protein, 9 aa, Artificial Sequence
  Description of Artificial Sequence: Synthetic peptide
PHNQREHCA

SEQ ID NO: 37934 - protein, 9 aa, Artificial Sequence
  Description of Artificial Sequence: Synthetic peptide
PHNYDWGCS

SEQ ID NO: 37935 - protein, 9 aa, Artificial Sequence
  Description of Artificial Sequence: Synthetic peptide
PHPENMSKQ

SEQ ID NO: 37936 - protein, 9 aa, Artificial Sequence
  Description of Artificial Sequence: Synthetic peptide
PHPFGHREA

SEQ ID NO: 37937 - protein, 9 aa, Artificial Sequence
  Description of Artificial Sequence: Synthetic peptide
PHPHKQHMF

SEQ ID NO: 37938 - protein, 9 aa, Artificial Sequence
  Description of Artificial Sequence: Synthetic peptide
PHPQCTHMM

SEQ ID NO: 37939 - protein, 9 aa, Artificial Sequence
  Description of Artificial Sequence: Synthetic peptide
PHPRMGIQQ

SEQ ID NO: 37940 - protein, 9 aa, Artificial Sequence
  Description of Artificial Sequence: Synthetic peptide
PHQCKQLTS

SEQ ID NO: 37941 - protein, 9 aa, Artificial Sequence
  Description of Artificial Sequence: Synthetic peptide
PHRANSTQY

SEQ ID NO: 37942 - protein, 9 aa, Artificial Sequence
  Description of Artificial Sequence: Synthetic peptide
PHRFPDRKM

SEQ ID NO: 37943 - protein, 9 aa, Artificial Sequence
  Description of Artificial Sequence: Synthetic peptide
PHSCCCMKC

SEQ ID NO: 37944 - protein, 9 aa, Artificial Sequence
  Description of Artificial Sequence: Synthetic peptide
PHSCLFMWA

SEQ ID NO: 37945 - protein, 9 aa, Artificial Sequence
  Description of Artificial Sequence: Synthetic peptide
PHSEQIKCG

SEQ ID NO: 37946 - protein, 9 aa, Artificial Sequence
  Description of Artificial Sequence: Synthetic peptide
PHSFNTIMS

SEQ ID NO: 37947 - protein, 9 aa, Artificial Sequence
  Description of Artificial Sequence: Synthetic peptide
PHSIVATRD

SEQ ID NO: 37948 - protein, 9 aa, Artificial Sequence
  Description of Artificial Sequence: Synthetic peptide
PHSNQAEFN

SEQ ID NO: 37949 - protein, 9 aa, Artificial Sequence
  Description of Artificial Sequence: Synthetic peptide
PHSWAYHTS

SEQ ID NO: 37950 - protein, 9 aa, Artificial Sequence
  Description of Artificial Sequence: Synthetic peptide
PHTMRVCLP

SEQ ID NO: 37951 - protein, 9 aa, Artificial Sequence
  Description of Artificial Sequence: Synthetic peptide
PHTPQGTKA

SEQ ID NO: 37952 - protein, 9 aa, Artificial Sequence
  Description of Artificial Sequence: Synthetic peptide
PHTREGLAQ

SEQ ID NO: 37953 - protein, 9 aa, Artificial Sequence
  Description of Artificial Sequence: Synthetic peptide
PHTWIKQEG

SEQ ID NO: 37954 - protein, 9 aa, Artificial Sequence
  Description of Artificial Sequence: Synthetic peptide
PHVMGGEWC

SEQ ID NO: 37955 - protein, 9 aa, Artificial Sequence
  Description of Artificial Sequence: Synthetic peptide
PHVPHEIGI

SEQ ID NO: 37956 - protein, 9 aa, Artificial Sequence
  Description of Artificial Sequence: Synthetic peptide
PHVRCPMDL

SEQ ID NO: 37957 - protein, 9 aa, Artificial Sequence
  Description of Artificial Sequence: Synthetic peptide
PHWDKGYDL

SEQ ID NO: 37958 - protein, 9 aa, Artificial Sequence
  Description of Artificial Sequence: Synthetic peptide
PHWFFCNMN

SEQ ID NO: 37959 - protein, 9 aa, Artificial Sequence
  Description of Artificial Sequence: Synthetic peptide
PHWMPWNQV

SEQ ID NO: 37960 - protein, 9 aa, Artificial Sequence
  Description of Artificial Sequence: Synthetic peptide
PHWQYETGS

SEQ ID NO: 37961 - protein, 9 aa, Artificial Sequence
  Description of Artificial Sequence: Synthetic peptide
PHWRPPLGF

SEQ ID NO: 37962 - protein, 9 aa, Artificial Sequence
  Description of Artificial Sequence: Synthetic peptide
PHYDSLAHS

SEQ ID NO: 37963 - protein, 9 aa, Artificial Sequence
  Description of Artificial Sequence: Synthetic peptide
PHYLQVCCA

SEQ ID NO: 37964 - protein, 9 aa, Artificial Sequence
  Description of Artificial Sequence: Synthetic peptide
PIAEDFVAV

SEQ ID NO: 37965 - protein, 9 aa, Artificial Sequence
  Description of Artificial Sequence: Synthetic peptide
PIANDMHTY

SEQ ID NO: 37966 - protein, 9 aa, Artificial Sequence
  Description of Artificial Sequence: Synthetic peptide
PIANKHPSI

SEQ ID NO: 37967 - protein, 9 aa, Artificial Sequence
  Description of Artificial Sequence: Synthetic peptide
PIAPSGFVG

SEQ ID NO: 37968 - protein, 9 aa, Artificial Sequence
  Description of Artificial Sequence: Synthetic peptide
PIAWVEQFP

SEQ ID NO: 37969 - protein, 9 aa, Artificial Sequence
  Description of Artificial Sequence: Synthetic peptide
PICFEDCCH

SEQ ID NO: 37970 - protein, 9 aa, Artificial Sequence
  Description of Artificial Sequence: Synthetic peptide
PICMIGRWT

SEQ ID NO: 37971 - protein, 9 aa, Artificial Sequence
  Description of Artificial Sequence: Synthetic peptide
PIDEAINDS

SEQ ID NO: 37972 - protein, 9 aa, Artificial Sequence
  Description of Artificial Sequence: Synthetic peptide
PIDPRQSGE

SEQ ID NO: 37973 - protein, 9 aa, Artificial Sequence
  Description of Artificial Sequence: Synthetic peptide
PIDPVYHLI

SEQ ID NO: 37974 - protein, 9 aa, Artificial Sequence
  Description of Artificial Sequence: Synthetic peptide
PIEMHVACS

SEQ ID NO: 37975 - protein, 9 aa, Artificial Sequence
  Description of Artificial Sequence: Synthetic peptide
PIESPIHHS

SEQ ID NO: 37976 - protein, 9 aa, Artificial Sequence
  Description of Artificial Sequence: Synthetic peptide
PIESTPVLV

SEQ ID NO: 37977 - protein, 9 aa, Artificial Sequence
  Description of Artificial Sequence: Synthetic peptide
PIFMTEQNL

SEQ ID NO: 37978 - protein, 9 aa, Artificial Sequence
  Description of Artificial Sequence: Synthetic peptide
PIGPSSTSC

SEQ ID NO: 37979 - protein, 9 aa, Artificial Sequence
  Description of Artificial Sequence: Synthetic peptide
PIHHKQTYM

SEQ ID NO: 37980 - protein, 9 aa, Artificial Sequence
  Description of Artificial Sequence: Synthetic peptide
PIHRESPRI

SEQ ID NO: 37981 - protein, 9 aa, Artificial Sequence
  Description of Artificial Sequence: Synthetic peptide
PIIPQAQLF

SEQ ID NO: 37982 - protein, 9 aa, Artificial Sequence
  Description of Artificial Sequence: Synthetic peptide
PIITNCAHS

SEQ ID NO: 37983 - protein, 9 aa, Artificial Sequence
  Description of Artificial Sequence: Synthetic peptide
PIIWELGWA

SEQ ID NO: 37984 - protein, 9 aa, Artificial Sequence
  Description of Artificial Sequence: Synthetic peptide
FDAGEEAYF

SEQ ID NO: 37985 - protein, 9 aa, Artificial Sequence
  Description of Artificial Sequence: Synthetic peptide
FDLDQQVHT

SEQ ID NO: 37986 - protein, 9 aa, Artificial Sequence
  Description of Artificial Sequence: Synthetic peptide
FDPQDDWCY

SEQ ID NO: 37987 - protein, 9 aa, Artificial Sequence
  Description of Artificial Sequence: Synthetic peptide
FDRISVLGV

SEQ ID NO: 37988 - protein, 9 aa, Artificial Sequence
  Description of Artificial Sequence: Synthetic peptide
FDTDHRWCW

SEQ ID NO: 37989 - protein, 9 aa, Artificial Sequence
  Description of Artificial Sequence: Synthetic peptide
GDDLYVHGM

SEQ ID NO: 37990 - protein, 9 aa, Artificial Sequence
  Description of Artificial Sequence: Synthetic peptide
GDECFCKLI

SEQ ID NO: 37991 - protein, 9 aa, Artificial Sequence
  Description of Artificial Sequence: Synthetic peptide
GDFCFYKMT

SEQ ID NO: 37992 - protein, 9 aa, Artificial Sequence
  Description of Artificial Sequence: Synthetic peptide
GDFHPDPLC

SEQ ID NO: 37993 - protein, 9 aa, Artificial Sequence
  Description of Artificial Sequence: Synthetic peptide
GDGKSTKVT

SEQ ID NO: 37994 - protein, 9 aa, Artificial Sequence
  Description of Artificial Sequence: Synthetic peptide
GDVHHLHSK

SEQ ID NO: 37995 - protein, 9 aa, Artificial Sequence
  Description of Artificial Sequence: Synthetic peptide
GDVPTWPKC

SEQ ID NO: 37996 - protein, 9 aa, Artificial Sequence
  Description of Artificial Sequence: Synthetic peptide
HDTSQAHNI

SEQ ID NO: 37997 - protein, 9 aa, Artificial Sequence
  Description of Artificial Sequence: Synthetic peptide
IDEDIFFAA

SEQ ID NO: 37998 - protein, 9 aa, Artificial Sequence
  Description of Artificial Sequence: Synthetic peptide
IDIHMSANI

SEQ ID NO: 37999 - protein, 9 aa, Artificial Sequence
  Description of Artificial Sequence: Synthetic peptide
IDKNWKGLW

SEQ ID NO: 38000 - protein, 9 aa, Artificial Sequence
  Description of Artificial Sequence: Synthetic peptide
IDQCAKFHR

SEQ ID NO: 38001 - protein, 9 aa, Artificial Sequence
  Description of Artificial Sequence: Synthetic peptide
IDTFNCDTY

SEQ ID NO: 38002 - protein, 9 aa, Artificial Sequence
  Description of Artificial Sequence: Synthetic peptide
IDWFAGACG

SEQ ID NO: 38003 - protein, 9 aa, Artificial Sequence
  Description of Artificial Sequence: Synthetic peptide
KDAAYVTPD

SEQ ID NO: 38004 - protein, 9 aa, Artificial Sequence
  Description of Artificial Sequence: Synthetic peptide
KDHCYTCID

SEQ ID NO: 38005 - protein, 9 aa, Artificial Sequence
  Description of Artificial Sequence: Synthetic peptide
KDPRITWYV

SEQ ID NO: 38006 - protein, 9 aa, Artificial Sequence
  Description of Artificial Sequence: Synthetic peptide
KDQFWGCLP

SEQ ID NO: 38007 - protein, 9 aa, Artificial Sequence
  Description of Artificial Sequence: Synthetic peptide
LDHPMHMMC

SEQ ID NO: 38008 - protein, 9 aa, Artificial Sequence
  Description of Artificial Sequence: Synthetic peptide
MDAHGRNHG

SEQ ID NO: 38009 - protein, 9 aa, Artificial Sequence
  Description of Artificial Sequence: Synthetic peptide
MDHPRVEMQ

SEQ ID NO: 38010 - protein, 9 aa, Artificial Sequence
  Description of Artificial Sequence: Synthetic peptide
MDLYYTLAN

SEQ ID NO: 38011 - protein, 9 aa, Artificial Sequence
  Description of Artificial Sequence: Synthetic peptide
MDNFDRPAA

SEQ ID NO: 38012 - protein, 9 aa, Artificial Sequence
  Description of Artificial Sequence: Synthetic peptide
MDNRELVVK

SEQ ID NO: 38013 - protein, 9 aa, Artificial Sequence
  Description of Artificial Sequence: Synthetic peptide
MDQCQQHTC

SEQ ID NO: 38014 - protein, 9 aa, Artificial Sequence
  Description of Artificial Sequence: Synthetic peptide
NDEKAAIDI

SEQ ID NO: 38015 - protein, 9 aa, Artificial Sequence
  Description of Artificial Sequence: Synthetic peptide
NDGSSVHMN

SEQ ID NO: 38016 - protein, 9 aa, Artificial Sequence
  Description of Artificial Sequence: Synthetic peptide
NDKHTTMEN

SEQ ID NO: 38017 - protein, 9 aa, Artificial Sequence
  Description of Artificial Sequence: Synthetic peptide
NDPYNKQSQ

SEQ ID NO: 38018 - protein, 9 aa, Artificial Sequence
  Description of Artificial Sequence: Synthetic peptide
QDHTNAWHQ

SEQ ID NO: 38019 - protein, 9 aa, Artificial Sequence
  Description of Artificial Sequence: Synthetic peptide
QDQDLNAWA

SEQ ID NO: 38020 - protein, 9 aa, Artificial Sequence
  Description of Artificial Sequence: Synthetic peptide
QDRDQSYHR

SEQ ID NO: 38021 - protein, 9 aa, Artificial Sequence
  Description of Artificial Sequence: Synthetic peptide
RDAANLEFP

SEQ ID NO: 38022 - protein, 9 aa, Artificial Sequence
  Description of Artificial Sequence: Synthetic peptide
RDDLMVKIV

SEQ ID NO: 38023 - protein, 9 aa, Artificial Sequence
  Description of Artificial Sequence: Synthetic peptide
RDIDHKNDE

SEQ ID NO: 38024 - protein, 9 aa, Artificial Sequence
  Description of Artificial Sequence: Synthetic peptide
SDANDRADW

SEQ ID NO: 38025 - protein, 9 aa, Artificial Sequence
  Description of Artificial Sequence: Synthetic peptide
SDCAMTIHV

SEQ ID NO: 38026 - protein, 9 aa, Artificial Sequence
  Description of Artificial Sequence: Synthetic peptide
SDCSDFTQF

SEQ ID NO: 38027 - protein, 9 aa, Artificial Sequence
  Description of Artificial Sequence: Synthetic peptide
SDDHAMQMN

SEQ ID NO: 38028 - protein, 9 aa, Artificial Sequence
  Description of Artificial Sequence: Synthetic peptide
SDDVKLPGL

SEQ ID NO: 38029 - protein, 9 aa, Artificial Sequence
  Description of Artificial Sequence: Synthetic peptide
SDHTCCWTF

SEQ ID NO: 38030 - protein, 9 aa, Artificial Sequence
  Description of Artificial Sequence: Synthetic peptide
SDMDPCSDK

SEQ ID NO: 38031 - protein, 9 aa, Artificial Sequence
  Description of Artificial Sequence: Synthetic peptide
SDMWMERSC

SEQ ID NO: 38032 - protein, 9 aa, Artificial Sequence
  Description of Artificial Sequence: Synthetic peptide
SDNCMEADN

SEQ ID NO: 38033 - protein, 9 aa, Artificial Sequence
  Description of Artificial Sequence: Synthetic peptide
SDRNALMPN

SEQ ID NO: 38034 - protein, 9 aa, Artificial Sequence
  Description of Artificial Sequence: Synthetic peptide
SDTKWNVCY

SEQ ID NO: 38035 - protein, 9 aa, Artificial Sequence
  Description of Artificial Sequence: Synthetic peptide
TDDFGTPWD

SEQ ID NO: 38036 - protein, 9 aa, Artificial Sequence
  Description of Artificial Sequence: Synthetic peptide
TDEHQGVFQ

SEQ ID NO: 38037 - protein, 9 aa, Artificial Sequence
  Description of Artificial Sequence: Synthetic peptide
TDHDHHQEF

SEQ ID NO: 38038 - protein, 9 aa, Artificial Sequence
  Description of Artificial Sequence: Synthetic peptide
TDKPMMGGH

SEQ ID NO: 38039 - protein, 9 aa, Artificial Sequence
  Description of Artificial Sequence: Synthetic peptide
TDPTRSTVP

SEQ ID NO: 38040 - protein, 9 aa, Artificial Sequence
  Description of Artificial Sequence: Synthetic peptide
TDRVGMPPY

SEQ ID NO: 38041 - protein, 9 aa, Artificial Sequence
  Description of Artificial Sequence: Synthetic peptide
VDGNEEEKP

SEQ ID NO: 38042 - protein, 9 aa, Artificial Sequence
  Description of Artificial Sequence: Synthetic peptide
VDHDVDTMQ

SEQ ID NO: 38043 - protein, 9 aa, Artificial Sequence
  Description of Artificial Sequence: Synthetic peptide
VDNHGFNDW

SEQ ID NO: 38044 - protein, 9 aa, Artificial Sequence
  Description of Artificial Sequence: Synthetic peptide
VDWGVDPWH

SEQ ID NO: 38045 - protein, 9 aa, Artificial Sequence
  Description of Artificial Sequence: Synthetic peptide
VDYCKEFVW

SEQ ID NO: 38046 - protein, 9 aa, Artificial Sequence
  Description of Artificial Sequence: Synthetic peptide
WDKAQDVRM

SEQ ID NO: 38047 - protein, 9 aa, Artificial Sequence
  Description of Artificial Sequence: Synthetic peptide
WDSHCQKIQ

SEQ ID NO: 38048 - protein, 9 aa, Artificial Sequence
  Description of Artificial Sequence: Synthetic peptide
WDSPFNYSF

SEQ ID NO: 38049 - protein, 9 aa, Artificial Sequence
  Description of Artificial Sequence: Synthetic peptide
WDSRYKCPI

SEQ ID NO: 38050 - protein, 9 aa, Artificial Sequence
  Description of Artificial Sequence: Synthetic peptide
YDAEHQQLA

SEQ ID NO: 38051 - protein, 9 aa, Artificial Sequence
  Description of Artificial Sequence: Synthetic peptide
YDDCTTNQG

SEQ ID NO: 38052 - protein, 9 aa, Artificial Sequence
  Description of Artificial Sequence: Synthetic peptide
YDFPIMTCE

SEQ ID NO: 38053 - protein, 9 aa, Artificial Sequence
  Description of Artificial Sequence: Synthetic peptide
YDPDKMKPG

SEQ ID NO: 38054 - protein, 9 aa, Artificial Sequence
  Description of Artificial Sequence: Synthetic peptide
CDWMANVSV

SEQ ID NO: 38055 - protein, 9 aa, Artificial Sequence
  Description of Artificial Sequence: Synthetic peptide
LDTIQINEV

SEQ ID NO: 38056 - protein, 9 aa, Artificial Sequence
  Description of Artificial Sequence: Synthetic peptide
EQPHADQKI

SEQ ID NO: 38057 - protein, 9 aa, Artificial Sequence
  Description of Artificial Sequence: Synthetic peptide
FAPSGKFRD

SEQ ID NO: 38058 - protein, 9 aa, Artificial Sequence
  Description of Artificial Sequence: Synthetic peptide
FVPFHWWSH

SEQ ID NO: 38059 - protein, 9 aa, Artificial Sequence
  Description of Artificial Sequence: Synthetic peptide
GCPPDPWHN

SEQ ID NO: 38060 - protein, 9 aa, Artificial Sequence
  Description of Artificial Sequence: Synthetic peptide
GMPVMAFQT

SEQ ID NO: 38061 - protein, 9 aa, Artificial Sequence
  Description of Artificial Sequence: Synthetic peptide
GPPECHMML

SEQ ID NO: 38062 - protein, 9 aa, Artificial Sequence
  Description of Artificial Sequence: Synthetic peptide
GSPQWLEYT

SEQ ID NO: 38063 - protein, 9 aa, Artificial Sequence
  Description of Artificial Sequence: Synthetic peptide
HSPLEFSSP

SEQ ID NO: 38064 - protein, 9 aa, Artificial Sequence
  Description of Artificial Sequence: Synthetic peptide
IAPLQCPVS

SEQ ID NO: 38065 - protein, 9 aa, Artificial Sequence
  Description of Artificial Sequence: Synthetic peptide
IFPMADCRV

SEQ ID NO: 38066 - protein, 9 aa, Artificial Sequence
  Description of Artificial Sequence: Synthetic peptide
IQPYYWNDT

SEQ ID NO: 38067 - protein, 9 aa, Artificial Sequence
  Description of Artificial Sequence: Synthetic peptide
KTPIKCEQH

SEQ ID NO: 38068 - protein, 9 aa, Artificial Sequence
  Description of Artificial Sequence: Synthetic peptide
KVPPYRTCP

SEQ ID NO: 38069 - protein, 9 aa, Artificial Sequence
  Description of Artificial Sequence: Synthetic peptide
KWPGMMGEV

SEQ ID NO: 38070 - protein, 9 aa, Artificial Sequence
  Description of Artificial Sequence: Synthetic peptide
LEPNLMNTE

SEQ ID NO: 38071 - protein, 9 aa, Artificial Sequence
  Description of Artificial Sequence: Synthetic peptide
LMPHRTWKC

SEQ ID NO: 38072 - protein, 9 aa, Artificial Sequence
  Description of Artificial Sequence: Synthetic peptide
LNPHFVFGR

SEQ ID NO: 38073 - protein, 9 aa, Artificial Sequence
  Description of Artificial Sequence: Synthetic peptide
LPPTCANGT

SEQ ID NO: 38074 - protein, 9 aa, Artificial Sequence
  Description of Artificial Sequence: Synthetic peptide
LVPMAHRAC

SEQ ID NO: 38075 - protein, 9 aa, Artificial Sequence
  Description of Artificial Sequence: Synthetic peptide
MAPQPMSWG

SEQ ID NO: 38076 - protein, 9 aa, Artificial Sequence
  Description of Artificial Sequence: Synthetic peptide
MCPMFFWCE

SEQ ID NO: 38077 - protein, 9 aa, Artificial Sequence
  Description of Artificial Sequence: Synthetic peptide
MLPYVCDPG

SEQ ID NO: 38078 - protein, 9 aa, Artificial Sequence
  Description of Artificial Sequence: Synthetic peptide
MPPPNHLDV

SEQ ID NO: 38079 - protein, 9 aa, Artificial Sequence
  Description of Artificial Sequence: Synthetic peptide
MTPSWIVED

SEQ ID NO: 38080 - protein, 9 aa, Artificial Sequence
  Description of Artificial Sequence: Synthetic peptide
NCPAMPLKI

SEQ ID NO: 38081 - protein, 9 aa, Artificial Sequence
  Description of Artificial Sequence: Synthetic peptide
NRPIRAWKR

SEQ ID NO: 38082 - protein, 9 aa, Artificial Sequence
  Description of Artificial Sequence: Synthetic peptide
NTPERPHRK

SEQ ID NO: 38083 - protein, 9 aa, Artificial Sequence
  Description of Artificial Sequence: Synthetic peptide
NTPITIQPL

SEQ ID NO: 38084 - protein, 9 aa, Artificial Sequence
  Description of Artificial Sequence: Synthetic peptide
NYPSAHQCG

SEQ ID NO: 38085 - protein, 9 aa, Artificial Sequence
  Description of Artificial Sequence: Synthetic peptide
QFPEIHRGE

SEQ ID NO: 38086 - protein, 9 aa, Artificial Sequence
  Description of Artificial Sequence: Synthetic peptide
QMPTTTDRC

SEQ ID NO: 38087 - protein, 9 aa, Artificial Sequence
  Description of Artificial Sequence: Synthetic peptide
QQPMIAEHV

SEQ ID NO: 38088 - protein, 9 aa, Artificial Sequence
  Description of Artificial Sequence: Synthetic peptide
RNPSIQYWS

SEQ ID NO: 38089 - protein, 9 aa, Artificial Sequence
  Description of Artificial Sequence: Synthetic peptide
RVPYVETYD

SEQ ID NO: 38090 - protein, 9 aa, Artificial Sequence
  Description of Artificial Sequence: Synthetic peptide
SCPEMDLHR

SEQ ID NO: 38091 - protein, 9 aa, Artificial Sequence
  Description of Artificial Sequence: Synthetic peptide
SNPIMDSDC

SEQ ID NO: 38092 - protein, 9 aa, Artificial Sequence
  Description of Artificial Sequence: Synthetic peptide
SPPISYPRM

SEQ ID NO: 38093 - protein, 9 aa, Artificial Sequence
  Description of Artificial Sequence: Synthetic peptide
SQPVMELSE

SEQ ID NO: 38094 - protein, 9 aa, Artificial Sequence
  Description of Artificial Sequence: Synthetic peptide
SVPFTNMQS

SEQ ID NO: 38095 - protein, 9 aa, Artificial Sequence
  Description of Artificial Sequence: Synthetic peptide
SVPMWWCAP

SEQ ID NO: 38096 - protein, 9 aa, Artificial Sequence
  Description of Artificial Sequence: Synthetic peptide
TRPCICCDV

SEQ ID NO: 38097 - protein, 9 aa, Artificial Sequence
  Description of Artificial Sequence: Synthetic peptide
TSPQNDHYS

SEQ ID NO: 38098 - protein, 9 aa, Artificial Sequence
  Description of Artificial Sequence: Synthetic peptide
TTPFEKCCA

SEQ ID NO: 38099 - protein, 9 aa, Artificial Sequence
  Description of Artificial Sequence: Synthetic peptide
TVPLQFQDS

SEQ ID NO: 38100 - protein, 9 aa, Artificial Sequence
  Description of Artificial Sequence: Synthetic peptide
TVPRYSRNQ

SEQ ID NO: 38101 - protein, 9 aa, Artificial Sequence
  Description of Artificial Sequence: Synthetic peptide
TYPRMITPA

SEQ ID NO: 38102 - protein, 9 aa, Artificial Sequence
  Description of Artificial Sequence: Synthetic peptide
VGPCVRSDW

SEQ ID NO: 38103 - protein, 9 aa, Artificial Sequence
  Description of Artificial Sequence: Synthetic peptide
VGPPYDTQD

SEQ ID NO: 38104 - protein, 9 aa, Artificial Sequence
  Description of Artificial Sequence: Synthetic peptide
VLPFGAVGT

SEQ ID NO: 38105 - protein, 9 aa, Artificial Sequence
  Description of Artificial Sequence: Synthetic peptide
VMPANWFFS

SEQ ID NO: 38106 - protein, 9 aa, Artificial Sequence
  Description of Artificial Sequence: Synthetic peptide
VQPCMQCWC

SEQ ID NO: 38107 - protein, 9 aa, Artificial Sequence
  Description of Artificial Sequence: Synthetic peptide
VRPMHMNCT

SEQ ID NO: 38108 - protein, 9 aa, Artificial Sequence
  Description of Artificial Sequence: Synthetic peptide
VTPRFQWLT

SEQ ID NO: 38109 - protein, 9 aa, Artificial Sequence
  Description of Artificial Sequence: Synthetic peptide
VYPTHNEVV

SEQ ID NO: 38110 - protein, 9 aa, Artificial Sequence
  Description of Artificial Sequence: Synthetic peptide
WNPVQWTHS

SEQ ID NO: 38111 - protein, 9 aa, Artificial Sequence
  Description of Artificial Sequence: Synthetic peptide
WTPVPSSSN

SEQ ID NO: 38112 - protein, 9 aa, Artificial Sequence
  Description of Artificial Sequence: Synthetic peptide
WWPMRKWVS

SEQ ID NO: 38113 - protein, 9 aa, Artificial Sequence
  Description of Artificial Sequence: Synthetic peptide
YLPYQSICG

SEQ ID NO: 38114 - protein, 9 aa, Artificial Sequence
  Description of Artificial Sequence: Synthetic peptide
YNPQQRSLS

SEQ ID NO: 38115 - protein, 9 aa, Artificial Sequence
  Description of Artificial Sequence: Synthetic peptide
IVPQQKIDE

SEQ ID NO: 38116 - protein, 9 aa, Artificial Sequence
  Description of Artificial Sequence: Synthetic peptide
HGPFCDHAY

SEQ ID NO: 38117 - protein, 9 aa, Artificial Sequence
  Description of Artificial Sequence: Synthetic peptide
KGPIFHSAY

SEQ ID NO: 38118 - protein, 9 aa, Artificial Sequence
  Description of Artificial Sequence: Synthetic peptide
ENKCFASTT

SEQ ID NO: 38119 - protein, 9 aa, Artificial Sequence
  Description of Artificial Sequence: Synthetic peptide
EQLCGKKKQ

SEQ ID NO: 38120 - protein, 9 aa, Artificial Sequence
  Description of Artificial Sequence: Synthetic peptide
ERTCMPSAY

SEQ ID NO: 38121 - protein, 9 aa, Artificial Sequence
  Description of Artificial Sequence: Synthetic peptide
ESDCFMWLG

SEQ ID NO: 38122 - protein, 9 aa, Artificial Sequence
  Description of Artificial Sequence: Synthetic peptide
EYECLDCNI

SEQ ID NO: 38123 - protein, 9 aa, Artificial Sequence
  Description of Artificial Sequence: Synthetic peptide
FCYCSHFPW

SEQ ID NO: 38124 - protein, 9 aa, Artificial Sequence
  Description of Artificial Sequence: Synthetic peptide
FHMCSCTRY

SEQ ID NO: 38125 - protein, 9 aa, Artificial Sequence
  Description of Artificial Sequence: Synthetic peptide
FSSCFNAVE

SEQ ID NO: 38126 - protein, 9 aa, Artificial Sequence
  Description of Artificial Sequence: Synthetic peptide
FWRCDPNKV

SEQ ID NO: 38127 - protein, 9 aa, Artificial Sequence
  Description of Artificial Sequence: Synthetic peptide
FYNCCDNPL

SEQ ID NO: 38128 - protein, 9 aa, Artificial Sequence
  Description of Artificial Sequence: Synthetic peptide
GCMCEGAEF

SEQ ID NO: 38129 - protein, 9 aa, Artificial Sequence
  Description of Artificial Sequence: Synthetic peptide
GGFCPCDQK

SEQ ID NO: 38130 - protein, 9 aa, Artificial Sequence
  Description of Artificial Sequence: Synthetic peptide
GGSCSWDKP

SEQ ID NO: 38131 - protein, 9 aa, Artificial Sequence
  Description of Artificial Sequence: Synthetic peptide
GIICYDATN

SEQ ID NO: 38132 - protein, 9 aa, Artificial Sequence
  Description of Artificial Sequence: Synthetic peptide
HRGCCESGR

SEQ ID NO: 38133 - protein, 9 aa, Artificial Sequence
  Description of Artificial Sequence: Synthetic peptide
HSFCVEGIP

SEQ ID NO: 38134 - protein, 9 aa, Artificial Sequence
  Description of Artificial Sequence: Synthetic peptide
IHFCMCCDF

SEQ ID NO: 38135 - protein, 9 aa, Artificial Sequence
  Description of Artificial Sequence: Synthetic peptide
IHRCIAEAA

SEQ ID NO: 38136 - protein, 9 aa, Artificial Sequence
  Description of Artificial Sequence: Synthetic peptide
IHTCPKNTQ

SEQ ID NO: 38137 - protein, 9 aa, Artificial Sequence
  Description of Artificial Sequence: Synthetic peptide
ILDCHKHYS

SEQ ID NO: 38138 - protein, 9 aa, Artificial Sequence
  Description of Artificial Sequence: Synthetic peptide
ITECHPRKT

SEQ ID NO: 38139 - protein, 9 aa, Artificial Sequence
  Description of Artificial Sequence: Synthetic peptide
ITYCNVVYW

SEQ ID NO: 38140 - protein, 9 aa, Artificial Sequence
  Description of Artificial Sequence: Synthetic peptide
IVVCMHCEQ

SEQ ID NO: 38141 - protein, 9 aa, Artificial Sequence
  Description of Artificial Sequence: Synthetic peptide
KGMCLSQGD

SEQ ID NO: 38142 - protein, 9 aa, Artificial Sequence
  Description of Artificial Sequence: Synthetic peptide
KGVCKGVLP

SEQ ID NO: 38143 - protein, 9 aa, Artificial Sequence
  Description of Artificial Sequence: Synthetic peptide
KYECPFYYV

SEQ ID NO: 38144 - protein, 9 aa, Artificial Sequence
  Description of Artificial Sequence: Synthetic peptide
LHDCQMWGD

SEQ ID NO: 38145 - protein, 9 aa, Artificial Sequence
  Description of Artificial Sequence: Synthetic peptide
LHSCDTPWT

SEQ ID NO: 38146 - protein, 9 aa, Artificial Sequence
  Description of Artificial Sequence: Synthetic peptide
LKECCFEDA

SEQ ID NO: 38147 - protein, 9 aa, Artificial Sequence
  Description of Artificial Sequence: Synthetic peptide
LNECYYNRP

SEQ ID NO: 38148 - protein, 9 aa, Artificial Sequence
  Description of Artificial Sequence: Synthetic peptide
LPDCTDYRK

SEQ ID NO: 38149 - protein, 9 aa, Artificial Sequence
  Description of Artificial Sequence: Synthetic peptide
LPRCCTINY

SEQ ID NO: 38150 - protein, 9 aa, Artificial Sequence
  Description of Artificial Sequence: Synthetic peptide
LVGCSYCQS

SEQ ID NO: 38151 - protein, 9 aa, Artificial Sequence
  Description of Artificial Sequence: Synthetic peptide
MAGCPPHDS

SEQ ID NO: 38152 - protein, 9 aa, Artificial Sequence
  Description of Artificial Sequence: Synthetic peptide
MASCIPQTS

SEQ ID NO: 38153 - protein, 9 aa, Artificial Sequence
  Description of Artificial Sequence: Synthetic peptide
MFACTQFFG

SEQ ID NO: 38154 - protein, 9 aa, Artificial Sequence
  Description of Artificial Sequence: Synthetic peptide
MGDCHRSPD

SEQ ID NO: 38155 - protein, 9 aa, Artificial Sequence
  Description of Artificial Sequence: Synthetic peptide
MMRCNVDFE

SEQ ID NO: 38156 - protein, 9 aa, Artificial Sequence
  Description of Artificial Sequence: Synthetic peptide
MMSCIAAVQ

SEQ ID NO: 38157 - protein, 9 aa, Artificial Sequence
  Description of Artificial Sequence: Synthetic peptide
MVSCRSAAC

SEQ ID NO: 38158 - protein, 9 aa, Artificial Sequence
  Description of Artificial Sequence: Synthetic peptide
NASCHWHFD

SEQ ID NO: 38159 - protein, 9 aa, Artificial Sequence
  Description of Artificial Sequence: Synthetic peptide
NGLCVESTA

SEQ ID NO: 38160 - protein, 9 aa, Artificial Sequence
  Description of Artificial Sequence: Synthetic peptide
NPACNKMPT

SEQ ID NO: 38161 - protein, 9 aa, Artificial Sequence
  Description of Artificial Sequence: Synthetic peptide
NQACNGWHK

SEQ ID NO: 38162 - protein, 9 aa, Artificial Sequence
  Description of Artificial Sequence: Synthetic peptide
NSHCTWRKF

SEQ ID NO: 38163 - protein, 9 aa, Artificial Sequence
  Description of Artificial Sequence: Synthetic peptide
NVECLPMLP

SEQ ID NO: 38164 - protein, 9 aa, Artificial Sequence
  Description of Artificial Sequence: Synthetic peptide
QAMCCSYPR

SEQ ID NO: 38165 - protein, 9 aa, Artificial Sequence
  Description of Artificial Sequence: Synthetic peptide
QAMCVHWHM

SEQ ID NO: 38166 - protein, 9 aa, Artificial Sequence
  Description of Artificial Sequence: Synthetic peptide
QCYCAKYWS

SEQ ID NO: 38167 - protein, 9 aa, Artificial Sequence
  Description of Artificial Sequence: Synthetic peptide
QGDCYEMWE

SEQ ID NO: 38168 - protein, 9 aa, Artificial Sequence
  Description of Artificial Sequence: Synthetic peptide
QMTCPSDLW

SEQ ID NO: 38169 - protein, 9 aa, Artificial Sequence
  Description of Artificial Sequence: Synthetic peptide
QQICPVGEF

SEQ ID NO: 38170 - protein, 9 aa, Artificial Sequence
  Description of Artificial Sequence: Synthetic peptide
QYACHQIGA

SEQ ID NO: 38171 - protein, 9 aa, Artificial Sequence
  Description of Artificial Sequence: Synthetic peptide
RGACDEFET

SEQ ID NO: 38172 - protein, 9 aa, Artificial Sequence
  Description of Artificial Sequence: Synthetic peptide
RLMCYFRTW

SEQ ID NO: 38173 - protein, 9 aa, Artificial Sequence
  Description of Artificial Sequence: Synthetic peptide
RPACTVPGK

SEQ ID NO: 38174 - protein, 9 aa, Artificial Sequence
  Description of Artificial Sequence: Synthetic peptide
SGDCRDWHD

SEQ ID NO: 38175 - protein, 9 aa, Artificial Sequence
  Description of Artificial Sequence: Synthetic peptide
SGTCYHYAL

SEQ ID NO: 38176 - protein, 9 aa, Artificial Sequence
  Description of Artificial Sequence: Synthetic peptide
STGCGLMWG

SEQ ID NO: 38177 - protein, 9 aa, Artificial Sequence
  Description of Artificial Sequence: Synthetic peptide
SVYCEEFYT

SEQ ID NO: 38178 - protein, 9 aa, Artificial Sequence
  Description of Artificial Sequence: Synthetic peptide
TIMCVASLA

SEQ ID NO: 38179 - protein, 9 aa, Artificial Sequence
  Description of Artificial Sequence: Synthetic peptide
TLYCYDDYH

SEQ ID NO: 38180 - protein, 9 aa, Artificial Sequence
  Description of Artificial Sequence: Synthetic peptide
TRICCKNRQ

SEQ ID NO: 38181 - protein, 9 aa, Artificial Sequence
  Description of Artificial Sequence: Synthetic peptide
VKQCTKFDE

SEQ ID NO: 38182 - protein, 9 aa, Artificial Sequence
  Description of Artificial Sequence: Synthetic peptide
VWCCSVNPG

SEQ ID NO: 38183 - protein, 9 aa, Artificial Sequence
  Description of Artificial Sequence: Synthetic peptide
WRNCMQDSK

SEQ ID NO: 38184 - protein, 9 aa, Artificial Sequence
  Description of Artificial Sequence: Synthetic peptide
WSICHKDSY

SEQ ID NO: 38185 - protein, 9 aa, Artificial Sequence
  Description of Artificial Sequence: Synthetic peptide
QNWCGKNLE

SEQ ID NO: 38186 - protein, 9 aa, Artificial Sequence
  Description of Artificial Sequence: Synthetic peptide
SQDCGRPES

SEQ ID NO: 38187 - protein, 9 aa, Artificial Sequence
  Description of Artificial Sequence: Synthetic peptide
KVGCFVDVW

SEQ ID NO: 38188 - protein, 9 aa, Artificial Sequence
  Description of Artificial Sequence: Synthetic peptide
FCKCFMKHC

SEQ ID NO: 38189 - protein, 9 aa, Artificial Sequence
  Description of Artificial Sequence: Synthetic peptide
ESQRDDGWL

SEQ ID NO: 38190 - protein, 9 aa, Artificial Sequence
  Description of Artificial Sequence: Synthetic peptide
ESRADIEVA

SEQ ID NO: 38191 - protein, 9 aa, Artificial Sequence
  Description of Artificial Sequence: Synthetic peptide
ETCIDMQGK

SEQ ID NO: 38192 - protein, 9 aa, Artificial Sequence
  Description of Artificial Sequence: Synthetic peptide
ETHTDYQGP

SEQ ID NO: 38193 - protein, 9 aa, Artificial Sequence
  Description of Artificial Sequence: Synthetic peptide
ETNPDWEGR

SEQ ID NO: 38194 - protein, 9 aa, Artificial Sequence
  Description of Artificial Sequence: Synthetic peptide
FCTSDQKAL

SEQ ID NO: 38195 - protein, 9 aa, Artificial Sequence
  Description of Artificial Sequence: Synthetic peptide
FGDHDNMPE

SEQ ID NO: 38196 - protein, 9 aa, Artificial Sequence
  Description of Artificial Sequence: Synthetic peptide
FRHHDVNNH

SEQ ID NO: 38197 - protein, 9 aa, Artificial Sequence
  Description of Artificial Sequence: Synthetic peptide
GEYYDEVNH

SEQ ID NO: 38198 - protein, 9 aa, Artificial Sequence
  Description of Artificial Sequence: Synthetic peptide
GMEPDTQLY

SEQ ID NO: 38199 - protein, 9 aa, Artificial Sequence
  Description of Artificial Sequence: Synthetic peptide
GMVPDLLPH

SEQ ID NO: 38200 - protein, 9 aa, Artificial Sequence
  Description of Artificial Sequence: Synthetic peptide
GVNMDMEVS

SEQ ID NO: 38201 - protein, 9 aa, Artificial Sequence
  Description of Artificial Sequence: Synthetic peptide
HGELDCASC

SEQ ID NO: 38202 - protein, 9 aa, Artificial Sequence
  Description of Artificial Sequence: Synthetic peptide
HHFTDVDAH

SEQ ID NO: 38203 - protein, 9 aa, Artificial Sequence
  Description of Artificial Sequence: Synthetic peptide
HHHADFHLA

SEQ ID NO: 38204 - protein, 9 aa, Artificial Sequence
  Description of Artificial Sequence: Synthetic peptide
HMHRDMHEE

SEQ ID NO: 38205 - protein, 9 aa, Artificial Sequence
  Description of Artificial Sequence: Synthetic peptide
HPNRDSAHM

SEQ ID NO: 38206 - protein, 9 aa, Artificial Sequence
  Description of Artificial Sequence: Synthetic peptide
HRDGDILIE

SEQ ID NO: 38207 - protein, 9 aa, Artificial Sequence
  Description of Artificial Sequence: Synthetic peptide
HYTSDWFQA

SEQ ID NO: 38208 - protein, 9 aa, Artificial Sequence
  Description of Artificial Sequence: Synthetic peptide
IAKEDICQP

SEQ ID NO: 38209 - protein, 9 aa, Artificial Sequence
  Description of Artificial Sequence: Synthetic peptide
ICVNDNFHN

SEQ ID NO: 38210 - protein, 9 aa, Artificial Sequence
  Description of Artificial Sequence: Synthetic peptide
ISAPDNQLS

SEQ ID NO: 38211 - protein, 9 aa, Artificial Sequence
  Description of Artificial Sequence: Synthetic peptide
IVTADNTME

SEQ ID NO: 38212 - protein, 9 aa, Artificial Sequence
  Description of Artificial Sequence: Synthetic peptide
KANWDVNHS

SEQ ID NO: 38213 - protein, 9 aa, Artificial Sequence
  Description of Artificial Sequence: Synthetic peptide
KENGDSITL

SEQ ID NO: 38214 - protein, 9 aa, Artificial Sequence
  Description of Artificial Sequence: Synthetic peptide
KVDPDCHMF

SEQ ID NO: 38215 - protein, 9 aa, Artificial Sequence
  Description of Artificial Sequence: Synthetic peptide
KVLQDQFTI

SEQ ID NO: 38216 - protein, 9 aa, Artificial Sequence
  Description of Artificial Sequence: Synthetic peptide
KVVTDRKWD

SEQ ID NO: 38217 - protein, 9 aa, Artificial Sequence
  Description of Artificial Sequence: Synthetic peptide
KYEPDGFIP

SEQ ID NO: 38218 - protein, 9 aa, Artificial Sequence
  Description of Artificial Sequence: Synthetic peptide
LVGLDLSCH

SEQ ID NO: 38219 - protein, 9 aa, Artificial Sequence
  Description of Artificial Sequence: Synthetic peptide
MHYSDGFVS

SEQ ID NO: 38220 - protein, 9 aa, Artificial Sequence
  Description of Artificial Sequence: Synthetic peptide
MIEYDVGYK

SEQ ID NO: 38221 - protein, 9 aa, Artificial Sequence
  Description of Artificial Sequence: Synthetic peptide
MLKTDCPLH

SEQ ID NO: 38222 - protein, 9 aa, Artificial Sequence
  Description of Artificial Sequence: Synthetic peptide
MPCMDRRRP

SEQ ID NO: 38223 - protein, 9 aa, Artificial Sequence
  Description of Artificial Sequence: Synthetic peptide
MRCADMLRY

SEQ ID NO: 38224 - protein, 9 aa, Artificial Sequence
  Description of Artificial Sequence: Synthetic peptide
MTESDDRCV

SEQ ID NO: 38225 - protein, 9 aa, Artificial Sequence
  Description of Artificial Sequence: Synthetic peptide
NCGLDITMR

SEQ ID NO: 38226 - protein, 9 aa, Artificial Sequence
  Description of Artificial Sequence: Synthetic peptide
NIQADMSQQ

SEQ ID NO: 38227 - protein, 9 aa, Artificial Sequence
  Description of Artificial Sequence: Synthetic peptide
NTVMDRMNF

SEQ ID NO: 38228 - protein, 9 aa, Artificial Sequence
  Description of Artificial Sequence: Synthetic peptide
QCDSDTQSR

SEQ ID NO: 38229 - protein, 9 aa, Artificial Sequence
  Description of Artificial Sequence: Synthetic peptide
QTRKDGESH

SEQ ID NO: 38230 - protein, 9 aa, Artificial Sequence
  Description of Artificial Sequence: Synthetic peptide
QTRWDLIGL

SEQ ID NO: 38231 - protein, 9 aa, Artificial Sequence
  Description of Artificial Sequence: Synthetic peptide
QVCIDWSGG

SEQ ID NO: 38232 - protein, 9 aa, Artificial Sequence
  Description of Artificial Sequence: Synthetic peptide
QVNEDDAAK

SEQ ID NO: 38233 - protein, 9 aa, Artificial Sequence
  Description of Artificial Sequence: Synthetic peptide
REYMDDEKQ

SEQ ID NO: 38234 - protein, 9 aa, Artificial Sequence
  Description of Artificial Sequence: Synthetic peptide
RHHIDIPTY

SEQ ID NO: 38235 - protein, 9 aa, Artificial Sequence
  Description of Artificial Sequence: Synthetic peptide
RVLTDERMD

SEQ ID NO: 38236 - protein, 9 aa, Artificial Sequence
  Description of Artificial Sequence: Synthetic peptide
SAREDDNPC

SEQ ID NO: 38237 - protein, 9 aa, Artificial Sequence
  Description of Artificial Sequence: Synthetic peptide
SCRIDWTDW

SEQ ID NO: 38238 - protein, 9 aa, Artificial Sequence
  Description of Artificial Sequence: Synthetic peptide
SFNYDMVSR

SEQ ID NO: 38239 - protein, 9 aa, Artificial Sequence
  Description of Artificial Sequence: Synthetic peptide
SGRGDVNGA

SEQ ID NO: 38240 - protein, 9 aa, Artificial Sequence
  Description of Artificial Sequence: Synthetic peptide
SMQVDVLQR

SEQ ID NO: 38241 - protein, 9 aa, Artificial Sequence
  Description of Artificial Sequence: Synthetic peptide
SNQWDWHIF

SEQ ID NO: 38242 - protein, 9 aa, Artificial Sequence
  Description of Artificial Sequence: Synthetic peptide
SVMLDEWIN

SEQ ID NO: 38243 - protein, 9 aa, Artificial Sequence
  Description of Artificial Sequence: Synthetic peptide
SWCIDCEAD

SEQ ID NO: 38244 - protein, 9 aa, Artificial Sequence
  Description of Artificial Sequence: Synthetic peptide
TIAVDGHHS

SEQ ID NO: 38245 - protein, 9 aa, Artificial Sequence
  Description of Artificial Sequence: Synthetic peptide
TILPDSAEF

SEQ ID NO: 38246 - protein, 9 aa, Artificial Sequence
  Description of Artificial Sequence: Synthetic peptide
TIVYDNWSR

SEQ ID NO: 38247 - protein, 9 aa, Artificial Sequence
  Description of Artificial Sequence: Synthetic peptide
TTTADKPAS

SEQ ID NO: 38248 - protein, 9 aa, Artificial Sequence
  Description of Artificial Sequence: Synthetic peptide
TTVLDHGLQ

SEQ ID NO: 38249 - protein, 9 aa, Artificial Sequence
  Description of Artificial Sequence: Synthetic peptide
TWKEDWALL

SEQ ID NO: 38250 - protein, 9 aa, Artificial Sequence
  Description of Artificial Sequence: Synthetic peptide
TYKRDIMKT

SEQ ID NO: 38251 - protein, 9 aa, Artificial Sequence
  Description of Artificial Sequence: Synthetic peptide
VILKDRVNW

SEQ ID NO: 38252 - protein, 9 aa, Artificial Sequence
  Description of Artificial Sequence: Synthetic peptide
VKKSDAKQC

SEQ ID NO: 38253 - protein, 9 aa, Artificial Sequence
  Description of Artificial Sequence: Synthetic peptide
VQDGDYSPS

SEQ ID NO: 38254 - protein, 9 aa, Artificial Sequence
  Description of Artificial Sequence: Synthetic peptide
VSMEDHCKH

SEQ ID NO: 38255 - protein, 9 aa, Artificial Sequence
  Description of Artificial Sequence: Synthetic peptide
WEKFDRPWR

SEQ ID NO: 38256 - protein, 9 aa, Artificial Sequence
  Description of Artificial Sequence: Synthetic peptide
WPSADCDIP

SEQ ID NO: 38257 - protein, 9 aa, Artificial Sequence
  Description of Artificial Sequence: Synthetic peptide
YMSRDQIKS

SEQ ID NO: 38258 - protein, 9 aa, Artificial Sequence
  Description of Artificial Sequence: Synthetic peptide
YPTRDNLFM

SEQ ID NO: 38259 - protein, 9 aa, Artificial Sequence
  Description of Artificial Sequence: Synthetic peptide
YWNFDDYQQ

SEQ ID NO: 38260 - protein, 9 aa, Artificial Sequence
  Description of Artificial Sequence: Synthetic peptide
YYTGDLTYK

SEQ ID NO: 38261 - protein, 9 aa, Artificial Sequence
  Description of Artificial Sequence: Synthetic peptide
SVKQDCVED

SEQ ID NO: 38262 - protein, 9 aa, Artificial Sequence
  Description of Artificial Sequence: Synthetic peptide
TVREDCCIN

SEQ ID NO: 38263 - protein, 9 aa, Artificial Sequence
  Description of Artificial Sequence: Synthetic peptide
YFAADEQWG

SEQ ID NO: 38264 - protein, 9 aa, Artificial Sequence
  Description of Artificial Sequence: Synthetic peptide
NQIKDVAAS

SEQ ID NO: 38265 - protein, 9 aa, Artificial Sequence
  Description of Artificial Sequence: Synthetic peptide
DARFDQWHH

SEQ ID NO: 38266 - protein, 9 aa, Artificial Sequence
  Description of Artificial Sequence: Synthetic peptide
ALTHDDGRT

SEQ ID NO: 38267 - protein, 9 aa, Artificial Sequence
  Description of Artificial Sequence: Synthetic peptide
FAYFQKDLF

SEQ ID NO: 38268 - protein, 9 aa, Artificial Sequence
  Description of Artificial Sequence: Synthetic peptide
FNADHKCPS

SEQ ID NO: 38269 - protein, 9 aa, Artificial Sequence
  Description of Artificial Sequence: Synthetic peptide
GRDALKNGD

SEQ ID NO: 38270 - protein, 9 aa, Artificial Sequence
  Description of Artificial Sequence: Synthetic peptide
GVATLKWEQ

SEQ ID NO: 38271 - protein, 9 aa, Artificial Sequence
  Description of Artificial Sequence: Synthetic peptide
GVCSKKSGA

SEQ ID NO: 38272 - protein, 9 aa, Artificial Sequence
  Description of Artificial Sequence: Synthetic peptide
HFAEIKYET

SEQ ID NO: 38273 - protein, 9 aa, Artificial Sequence
  Description of Artificial Sequence: Synthetic peptide
HMRMCKATW

SEQ ID NO: 38274 - protein, 9 aa, Artificial Sequence
  Description of Artificial Sequence: Synthetic peptide
HPRSTKWCQ

SEQ ID NO: 38275 - protein, 9 aa, Artificial Sequence
  Description of Artificial Sequence: Synthetic peptide
IEEHLKVCY

SEQ ID NO: 38276 - protein, 9 aa, Artificial Sequence
  Description of Artificial Sequence: Synthetic peptide
IVATPKQYG

SEQ ID NO: 38277 - protein, 9 aa, Artificial Sequence
  Description of Artificial Sequence: Synthetic peptide
KLNHVKRTS

SEQ ID NO: 38278 - protein, 9 aa, Artificial Sequence
  Description of Artificial Sequence: Synthetic peptide
MCNYHKLNK

SEQ ID NO: 38279 - protein, 9 aa, Artificial Sequence
  Description of Artificial Sequence: Synthetic peptide
MGGPYKLMC

SEQ ID NO: 38280 - protein, 9 aa, Artificial Sequence
  Description of Artificial Sequence: Synthetic peptide
MGNIVKPAD

SEQ ID NO: 38281 - protein, 9 aa, Artificial Sequence
  Description of Artificial Sequence: Synthetic peptide
MIDRMKESY

SEQ ID NO: 38282 - protein, 9 aa, Artificial Sequence
  Description of Artificial Sequence: Synthetic peptide
MRTNYKLEM

SEQ ID NO: 38283 - protein, 9 aa, Artificial Sequence
  Description of Artificial Sequence: Synthetic peptide
NFWLAKPFK

SEQ ID NO: 38284 - protein, 9 aa, Artificial Sequence
  Description of Artificial Sequence: Synthetic peptide
NLHGTKFGY

SEQ ID NO: 38285 - protein, 9 aa, Artificial Sequence
  Description of Artificial Sequence: Synthetic peptide
QMMQTKLHD

SEQ ID NO: 38286 - protein, 9 aa, Artificial Sequence
  Description of Artificial Sequence: Synthetic peptide
QMTIPKWGY

SEQ ID NO: 38287 - protein, 9 aa, Artificial Sequence
  Description of Artificial Sequence: Synthetic peptide
QSCWTKCEA

SEQ ID NO: 38288 - protein, 9 aa, Artificial Sequence
  Description of Artificial Sequence: Synthetic peptide
SGILSKDWK

SEQ ID NO: 38289 - protein, 9 aa, Artificial Sequence
  Description of Artificial Sequence: Synthetic peptide
SIDEPKFTV

SEQ ID NO: 38290 - protein, 9 aa, Artificial Sequence
  Description of Artificial Sequence: Synthetic peptide
TEHENKCVG

SEQ ID NO: 38291 - protein, 9 aa, Artificial Sequence
  Description of Artificial Sequence: Synthetic peptide
TGLLRKEQS

SEQ ID NO: 38292 - protein, 9 aa, Artificial Sequence
  Description of Artificial Sequence: Synthetic peptide
TKNEFKTND

SEQ ID NO: 38293 - protein, 9 aa, Artificial Sequence
  Description of Artificial Sequence: Synthetic peptide
TMAQCKYPH

SEQ ID NO: 38294 - protein, 9 aa, Artificial Sequence
  Description of Artificial Sequence: Synthetic peptide
TMFSHKPSD

SEQ ID NO: 38295 - protein, 9 aa, Artificial Sequence
  Description of Artificial Sequence: Synthetic peptide
VMCVPKYKD

SEQ ID NO: 38296 - protein, 9 aa, Artificial Sequence
  Description of Artificial Sequence: Synthetic peptide
VNEEMKFQP

SEQ ID NO: 38297 - protein, 9 aa, Artificial Sequence
  Description of Artificial Sequence: Synthetic peptide
WNGHHKDML

SEQ ID NO: 38298 - protein, 9 aa, Artificial Sequence
  Description of Artificial Sequence: Synthetic peptide
YWFLHKGCN

SEQ ID NO: 38299 - protein, 9 aa, Artificial Sequence
  Description of Artificial Sequence: Synthetic peptide
EVARTKFGG

SEQ ID NO: 38300 - protein, 9 aa, Artificial Sequence
  Description of Artificial Sequence: Synthetic peptide
QMSWGKYHQ

SEQ ID NO: 38301 - protein, 9 aa, Artificial Sequence
  Description of Artificial Sequence: Synthetic peptide
SYYQSKNTD

SEQ ID NO: 38302 - protein, 9 aa, Artificial Sequence
  Description of Artificial Sequence: Synthetic peptide
LWFFMKFAK

SEQ ID NO: 38303 - protein, 9 aa, Artificial Sequence
  Description of Artificial Sequence: Synthetic peptide
GACLWKRHL

SEQ ID NO: 38304 - protein, 9 aa, Artificial Sequence
  Description of Artificial Sequence: Synthetic peptide
THARFKMKS

SEQ ID NO: 38305 - protein, 9 aa, Artificial Sequence
  Description of Artificial Sequence: Synthetic peptide
LMMMCKQQY

SEQ ID NO: 38306 - protein, 9 aa, Artificial Sequence
  Description of Artificial Sequence: Synthetic peptide
ESSWLYPHN

SEQ ID NO: 38307 - protein, 9 aa, Artificial Sequence
  Description of Artificial Sequence: Synthetic peptide
FSITEEPFW

SEQ ID NO: 38308 - protein, 9 aa, Artificial Sequence
  Description of Artificial Sequence: Synthetic peptide
GVVDYWPTF

SEQ ID NO: 38309 - protein, 9 aa, Artificial Sequence
  Description of Artificial Sequence: Synthetic peptide
HHTLNYPNE

SEQ ID NO: 38310 - protein, 9 aa, Artificial Sequence
  Description of Artificial Sequence: Synthetic peptide
HWESFIPRV

SEQ ID NO: 38311 - protein, 9 aa, Artificial Sequence
  Description of Artificial Sequence: Synthetic peptide
IGGWIWPGP

SEQ ID NO: 38312 - protein, 9 aa, Artificial Sequence
  Description of Artificial Sequence: Synthetic peptide
IVSELCPSF

SEQ ID NO: 38313 - protein, 9 aa, Artificial Sequence
  Description of Artificial Sequence: Synthetic peptide
KKQMPFPRD

SEQ ID NO: 38314 - protein, 9 aa, Artificial Sequence
  Description of Artificial Sequence: Synthetic peptide
LGRAPCPCW

SEQ ID NO: 38315 - protein, 9 aa, Artificial Sequence
  Description of Artificial Sequence: Synthetic peptide
LSNVPMPAQ

SEQ ID NO: 38316 - protein, 9 aa, Artificial Sequence
  Description of Artificial Sequence: Synthetic peptide
MAAEAYPCI

SEQ ID NO: 38317 - protein, 9 aa, Artificial Sequence
  Description of Artificial Sequence: Synthetic peptide
MHAEFGPLP

SEQ ID NO: 38318 - protein, 9 aa, Artificial Sequence
  Description of Artificial Sequence: Synthetic peptide
MKFQSGPKS

SEQ ID NO: 38319 - protein, 9 aa, Artificial Sequence
  Description of Artificial Sequence: Synthetic peptide
NQFRAEPIS

SEQ ID NO: 38320 - protein, 9 aa, Artificial Sequence
  Description of Artificial Sequence: Synthetic peptide
NVTNFDPHP

SEQ ID NO: 38321 - protein, 9 aa, Artificial Sequence
  Description of Artificial Sequence: Synthetic peptide
QAAPGPPYE

SEQ ID NO: 38322 - protein, 9 aa, Artificial Sequence
  Description of Artificial Sequence: Synthetic peptide
QPNGWAPPC

SEQ ID NO: 38323 - protein, 9 aa, Artificial Sequence
  Description of Artificial Sequence: Synthetic peptide
QQFQTDPQT

SEQ ID NO: 38324 - protein, 9 aa, Artificial Sequence
  Description of Artificial Sequence: Synthetic peptide
QVEIQEPAI

SEQ ID NO: 38325 - protein, 9 aa, Artificial Sequence
  Description of Artificial Sequence: Synthetic peptide
RMLVRVPDG

SEQ ID NO: 38326 - protein, 9 aa, Artificial Sequence
  Description of Artificial Sequence: Synthetic peptide
RPDMLTPYR

SEQ ID NO: 38327 - protein, 9 aa, Artificial Sequence
  Description of Artificial Sequence: Synthetic peptide
SQCTPFPFN

SEQ ID NO: 38328 - protein, 9 aa, Artificial Sequence
  Description of Artificial Sequence: Synthetic peptide
SRDRRQPKK

SEQ ID NO: 38329 - protein, 9 aa, Artificial Sequence
  Description of Artificial Sequence: Synthetic peptide
SSFHEDPCN

SEQ ID NO: 38330 - protein, 9 aa, Artificial Sequence
  Description of Artificial Sequence: Synthetic peptide
THHGLQPND

SEQ ID NO: 38331 - protein, 9 aa, Artificial Sequence
  Description of Artificial Sequence: Synthetic peptide
TKVVIEPNC

SEQ ID NO: 38332 - protein, 9 aa, Artificial Sequence
  Description of Artificial Sequence: Synthetic peptide
TLYGHDPAH

SEQ ID NO: 38333 - protein, 9 aa, Artificial Sequence
  Description of Artificial Sequence: Synthetic peptide
TMFSFQPVE

SEQ ID NO: 38334 - protein, 9 aa, Artificial Sequence
  Description of Artificial Sequence: Synthetic peptide
VINNRVPPT

SEQ ID NO: 38335 - protein, 9 aa, Artificial Sequence
  Description of Artificial Sequence: Synthetic peptide
VQNYADPTG

SEQ ID NO: 38336 - protein, 9 aa, Artificial Sequence
  Description of Artificial Sequence: Synthetic peptide
YGTIPVPIT

SEQ ID NO: 38337 - protein, 9 aa, Artificial Sequence
  Description of Artificial Sequence: Synthetic peptide
YIKAVTPPF

SEQ ID NO: 38338 - protein, 9 aa, Artificial Sequence
  Description of Artificial Sequence: Synthetic peptide
IREPTEPYC

SEQ ID NO: 38339 - protein, 9 aa, Artificial Sequence
  Description of Artificial Sequence: Synthetic peptide
IFQLSRPAW

SEQ ID NO: 38340 - protein, 9 aa, Artificial Sequence
  Description of Artificial Sequence: Synthetic peptide
ISGWRMPCD

SEQ ID NO: 38341 - protein, 9 aa, Artificial Sequence
  Description of Artificial Sequence: Synthetic peptide
QAEVFAPYH

SEQ ID NO: 38342 - protein, 9 aa, Artificial Sequence
  Description of Artificial Sequence: Synthetic peptide
DAMWKFPST

SEQ ID NO: 38343 - protein, 9 aa, Artificial Sequence
  Description of Artificial Sequence: Synthetic peptide
TVNPCIPDN

SEQ ID NO: 38344 - protein, 9 aa, Artificial Sequence
  Description of Artificial Sequence: Synthetic peptide
KCLQMCPNG

SEQ ID NO: 38345 - protein, 9 aa, Artificial Sequence
  Description of Artificial Sequence: Synthetic peptide
FCNTHCGKP

SEQ ID NO: 38346 - protein, 9 aa, Artificial Sequence
  Description of Artificial Sequence: Synthetic peptide
GLDWVSVKA

SEQ ID NO: 38347 - protein, 9 aa, Artificial Sequence
  Description of Artificial Sequence: Synthetic peptide
HGNAETHKD

SEQ ID NO: 38348 - protein, 9 aa, Artificial Sequence
  Description of Artificial Sequence: Synthetic peptide
HITNPTSKP

SEQ ID NO: 38349 - protein, 9 aa, Artificial Sequence
  Description of Artificial Sequence: Synthetic peptide
HPEWKMSKC

SEQ ID NO: 38350 - protein, 9 aa, Artificial Sequence
  Description of Artificial Sequence: Synthetic peptide
IAKQEHVKS

SEQ ID NO: 38351 - protein, 9 aa, Artificial Sequence
  Description of Artificial Sequence: Synthetic peptide
IVDALHHKW

SEQ ID NO: 38352 - protein, 9 aa, Artificial Sequence
  Description of Artificial Sequence: Synthetic peptide
IWTHLCVKH

SEQ ID NO: 38353 - protein, 9 aa, Artificial Sequence
  Description of Artificial Sequence: Synthetic peptide
LFIQYYHKS

SEQ ID NO: 38354 - protein, 9 aa, Artificial Sequence
  Description of Artificial Sequence: Synthetic peptide
LQNDWDAKL

SEQ ID NO: 38355 - protein, 9 aa, Artificial Sequence
  Description of Artificial Sequence: Synthetic peptide
LVIPRDTKK

SEQ ID NO: 38356 - protein, 9 aa, Artificial Sequence
  Description of Artificial Sequence: Synthetic peptide
LYHETHKKC

SEQ ID NO: 38357 - protein, 9 aa, Artificial Sequence
  Description of Artificial Sequence: Synthetic peptide
MAIPTGVKE

SEQ ID NO: 38358 - protein, 9 aa, Artificial Sequence
  Description of Artificial Sequence: Synthetic peptide
MAVEYDRKG

SEQ ID NO: 38359 - protein, 9 aa, Artificial Sequence
  Description of Artificial Sequence: Synthetic peptide
MMNWWMYKA

SEQ ID NO: 38360 - protein, 9 aa, Artificial Sequence
  Description of Artificial Sequence: Synthetic peptide
MVTQTYFKN

SEQ ID NO: 38361 - protein, 9 aa, Artificial Sequence
  Description of Artificial Sequence: Synthetic peptide
NCMAVWAKN

SEQ ID NO: 38362 - protein, 9 aa, Artificial Sequence
  Description of Artificial Sequence: Synthetic peptide
NLDQWNVKV

SEQ ID NO: 38363 - protein, 9 aa, Artificial Sequence
  Description of Artificial Sequence: Synthetic peptide
NTEGCRVKK

SEQ ID NO: 38364 - protein, 9 aa, Artificial Sequence
  Description of Artificial Sequence: Synthetic peptide
QIGTPSQKA

SEQ ID NO: 38365 - protein, 9 aa, Artificial Sequence
  Description of Artificial Sequence: Synthetic peptide
QIQMTDDKQ

SEQ ID NO: 38366 - protein, 9 aa, Artificial Sequence
  Description of Artificial Sequence: Synthetic peptide
QSAQWNVKA

SEQ ID NO: 38367 - protein, 9 aa, Artificial Sequence
  Description of Artificial Sequence: Synthetic peptide
RTFNRATKT

SEQ ID NO: 38368 - protein, 9 aa, Artificial Sequence
  Description of Artificial Sequence: Synthetic peptide
SLVHFHAKT

SEQ ID NO: 38369 - protein, 9 aa, Artificial Sequence
  Description of Artificial Sequence: Synthetic peptide
TFGFFCTKG

SEQ ID NO: 38370 - protein, 9 aa, Artificial Sequence
  Description of Artificial Sequence: Synthetic peptide
TFSTGLSKK

SEQ ID NO: 38371 - protein, 9 aa, Artificial Sequence
  Description of Artificial Sequence: Synthetic peptide
TKGFMQKKE

SEQ ID NO: 38372 - protein, 9 aa, Artificial Sequence
  Description of Artificial Sequence: Synthetic peptide
TMDEHHMKI

SEQ ID NO: 38373 - protein, 9 aa, Artificial Sequence
  Description of Artificial Sequence: Synthetic peptide
TSVDLQMKA

SEQ ID NO: 38374 - protein, 9 aa, Artificial Sequence
  Description of Artificial Sequence: Synthetic peptide
VEMWVWEKK

SEQ ID NO: 38375 - protein, 9 aa, Artificial Sequence
  Description of Artificial Sequence: Synthetic peptide
VKQFNAHKG

SEQ ID NO: 38376 - protein, 9 aa, Artificial Sequence
  Description of Artificial Sequence: Synthetic peptide
VNLTTSVKF

SEQ ID NO: 38377 - protein, 9 aa, Artificial Sequence
  Description of Artificial Sequence: Synthetic peptide
WCYQCILKF

SEQ ID NO: 38378 - protein, 9 aa, Artificial Sequence
  Description of Artificial Sequence: Synthetic peptide
WSMQLSHKM

SEQ ID NO: 38379 - protein, 9 aa, Artificial Sequence
  Description of Artificial Sequence: Synthetic peptide
YAWTTVCKT

SEQ ID NO: 38380 - protein, 9 aa, Artificial Sequence
  Description of Artificial Sequence: Synthetic peptide
NMVWKCRKS

SEQ ID NO: 38381 - protein, 9 aa, Artificial Sequence
  Description of Artificial Sequence: Synthetic peptide
VMWTWESKY

SEQ ID NO: 38382 - protein, 9 aa, Artificial Sequence
  Description of Artificial Sequence: Synthetic peptide
EVLDSMSEV

SEQ ID NO: 38383 - protein, 9 aa, Artificial Sequence
  Description of Artificial Sequence: Synthetic peptide
EVTHPIGAV

SEQ ID NO: 38384 - protein, 9 aa, Artificial Sequence
  Description of Artificial Sequence: Synthetic peptide
FASRCPRTV

SEQ ID NO: 38385 - protein, 9 aa, Artificial Sequence
  Description of Artificial Sequence: Synthetic peptide
FFFTRWMRV

SEQ ID NO: 38386 - protein, 9 aa, Artificial Sequence
  Description of Artificial Sequence: Synthetic peptide
FGVEAWLPV

SEQ ID NO: 38387 - protein, 9 aa, Artificial Sequence
  Description of Artificial Sequence: Synthetic peptide
FHGERHQDV

SEQ ID NO: 38388 - protein, 9 aa, Artificial Sequence
  Description of Artificial Sequence: Synthetic peptide
FVRVQQRAV

SEQ ID NO: 38389 - protein, 9 aa, Artificial Sequence
  Description of Artificial Sequence: Synthetic peptide
HACIHTDEV

SEQ ID NO: 38390 - protein, 9 aa, Artificial Sequence
  Description of Artificial Sequence: Synthetic peptide
HLSEFNMQV

SEQ ID NO: 38391 - protein, 9 aa, Artificial Sequence
  Description of Artificial Sequence: Synthetic peptide
HTFYCTCRV

SEQ ID NO: 38392 - protein, 9 aa, Artificial Sequence
  Description of Artificial Sequence: Synthetic peptide
HVSIATGSV

SEQ ID NO: 38393 - protein, 9 aa, Artificial Sequence
  Description of Artificial Sequence: Synthetic peptide
HYDFQLTQV

SEQ ID NO: 38394 - protein, 9 aa, Artificial Sequence
  Description of Artificial Sequence: Synthetic peptide
ICVNKQQSV

SEQ ID NO: 38395 - protein, 9 aa, Artificial Sequence
  Description of Artificial Sequence: Synthetic peptide
IFHSHATCV

SEQ ID NO: 38396 - protein, 9 aa, Artificial Sequence
  Description of Artificial Sequence: Synthetic peptide
IFSYSQRMV

SEQ ID NO: 38397 - protein, 9 aa, Artificial Sequence
  Description of Artificial Sequence: Synthetic peptide
IRYPYGKMV

SEQ ID NO: 38398 - protein, 9 aa, Artificial Sequence
  Description of Artificial Sequence: Synthetic peptide
KSSEIVKWV

SEQ ID NO: 38399 - protein, 9 aa, Artificial Sequence
  Description of Artificial Sequence: Synthetic peptide
KSYQRTFLV

SEQ ID NO: 38400 - protein, 9 aa, Artificial Sequence
  Description of Artificial Sequence: Synthetic peptide
KYTGGIVVV

SEQ ID NO: 38401 - protein, 9 aa, Artificial Sequence
  Description of Artificial Sequence: Synthetic peptide
LTNWNGMHV

SEQ ID NO: 38402 - protein, 9 aa, Artificial Sequence
  Description of Artificial Sequence: Synthetic peptide
MIETTGQQV

SEQ ID NO: 38403 - protein, 9 aa, Artificial Sequence
  Description of Artificial Sequence: Synthetic peptide
MMGPPQHVV

SEQ ID NO: 38404 - protein, 9 aa, Artificial Sequence
  Description of Artificial Sequence: Synthetic peptide
MPKWGREPV

SEQ ID NO: 38405 - protein, 9 aa, Artificial Sequence
  Description of Artificial Sequence: Synthetic peptide
MVEATDWWV

SEQ ID NO: 38406 - protein, 9 aa, Artificial Sequence
  Description of Artificial Sequence: Synthetic peptide
MWTTETMGV

SEQ ID NO: 38407 - protein, 9 aa, Artificial Sequence
  Description of Artificial Sequence: Synthetic peptide
MWVMGPLCV

SEQ ID NO: 38408 - protein, 9 aa, Artificial Sequence
  Description of Artificial Sequence: Synthetic peptide
NHCMWEGYV

SEQ ID NO: 38409 - protein, 9 aa, Artificial Sequence
  Description of Artificial Sequence: Synthetic peptide
NHHPFMYYV

SEQ ID NO: 38410 - protein, 9 aa, Artificial Sequence
  Description of Artificial Sequence: Synthetic peptide
NIMLGQNSV

SEQ ID NO: 38411 - protein, 9 aa, Artificial Sequence
  Description of Artificial Sequence: Synthetic peptide
NWVHPITRV

SEQ ID NO: 38412 - protein, 9 aa, Artificial Sequence
  Description of Artificial Sequence: Synthetic peptide
QGCHFNMSV

SEQ ID NO: 38413 - protein, 9 aa, Artificial Sequence
  Description of Artificial Sequence: Synthetic peptide
QVVKFEIPV

SEQ ID NO: 38414 - protein, 9 aa, Artificial Sequence
  Description of Artificial Sequence: Synthetic peptide
RRQWQDFMV

SEQ ID NO: 38415 - protein, 9 aa, Artificial Sequence
  Description of Artificial Sequence: Synthetic peptide
SAGYMCYDV

SEQ ID NO: 38416 - protein, 9 aa, Artificial Sequence
  Description of Artificial Sequence: Synthetic peptide
SGDGFHYGV

SEQ ID NO: 38417 - protein, 9 aa, Artificial Sequence
  Description of Artificial Sequence: Synthetic peptide
SIMHLCEHV

SEQ ID NO: 38418 - protein, 9 aa, Artificial Sequence
  Description of Artificial Sequence: Synthetic peptide
SNCSVVKCV

SEQ ID NO: 38419 - protein, 9 aa, Artificial Sequence
  Description of Artificial Sequence: Synthetic peptide
SPVILNADV

SEQ ID NO: 38420 - protein, 9 aa, Artificial Sequence
  Description of Artificial Sequence: Synthetic peptide
STRMCQMLV

SEQ ID NO: 38421 - protein, 9 aa, Artificial Sequence
  Description of Artificial Sequence: Synthetic peptide
SWQQSPYFV

SEQ ID NO: 38422 - protein, 9 aa, Artificial Sequence
  Description of Artificial Sequence: Synthetic peptide
TARYYDGPV

SEQ ID NO: 38423 - protein, 9 aa, Artificial Sequence
  Description of Artificial Sequence: Synthetic peptide
TCGYFTRDV

SEQ ID NO: 38424 - protein, 9 aa, Artificial Sequence
  Description of Artificial Sequence: Synthetic peptide
TWASRRKCV

SEQ ID NO: 38425 - protein, 9 aa, Artificial Sequence
  Description of Artificial Sequence: Synthetic peptide
VKCLGAMNV

SEQ ID NO: 38426 - protein, 9 aa, Artificial Sequence
  Description of Artificial Sequence: Synthetic peptide
VNCKHMNNV

SEQ ID NO: 38427 - protein, 9 aa, Artificial Sequence
  Description of Artificial Sequence: Synthetic peptide
VNYSWNIQV

SEQ ID NO: 38428 - protein, 9 aa, Artificial Sequence
  Description of Artificial Sequence: Synthetic peptide
VVMPFWSAV

SEQ ID NO: 38429 - protein, 9 aa, Artificial Sequence
  Description of Artificial Sequence: Synthetic peptide
WTVELANGV

SEQ ID NO: 38430 - protein, 9 aa, Artificial Sequence
  Description of Artificial Sequence: Synthetic peptide
WVQPRMSIV

SEQ ID NO: 38431 - protein, 9 aa, Artificial Sequence
  Description of Artificial Sequence: Synthetic peptide
YHEHAVESV

SEQ ID NO: 38432 - protein, 9 aa, Artificial Sequence
  Description of Artificial Sequence: Synthetic peptide
YLEANMCHV

SEQ ID NO: 38433 - protein, 9 aa, Artificial Sequence
  Description of Artificial Sequence: Synthetic peptide
YQHWTTMGV

SEQ ID NO: 38434 - protein, 9 aa, Artificial Sequence
  Description of Artificial Sequence: Synthetic peptide
YTTFYRFQV

SEQ ID NO: 38435 - protein, 9 aa, Artificial Sequence
  Description of Artificial Sequence: Synthetic peptide
QAMLHHVWV

SEQ ID NO: 38436 - protein, 9 aa, Artificial Sequence
  Description of Artificial Sequence: Synthetic peptide
QNLMYCSSV

SEQ ID NO: 38437 - protein, 9 aa, Artificial Sequence
  Description of Artificial Sequence: Synthetic peptide
TCGQYVNGV

SEQ ID NO: 38438 - protein, 9 aa, Artificial Sequence
  Description of Artificial Sequence: Synthetic peptide
ADDMCCSPN

SEQ ID NO: 38439 - protein, 9 aa, Artificial Sequence
  Description of Artificial Sequence: Synthetic peptide
ADEDDCDDP

SEQ ID NO: 38440 - protein, 9 aa, Artificial Sequence
  Description of Artificial Sequence: Synthetic peptide
ADEMEEEHG

SEQ ID NO: 38441 - protein, 9 aa, Artificial Sequence
  Description of Artificial Sequence: Synthetic peptide
ADEMWPIRF

SEQ ID NO: 38442 - protein, 9 aa, Artificial Sequence
  Description of Artificial Sequence: Synthetic peptide
ADHCNWSRT

SEQ ID NO: 38443 - protein, 9 aa, Artificial Sequence
  Description of Artificial Sequence: Synthetic peptide
ADHCSWSRT

SEQ ID NO: 38444 - protein, 9 aa, Artificial Sequence
  Description of Artificial Sequence: Synthetic peptide
ADMCECVKG

SEQ ID NO: 38445 - protein, 9 aa, Artificial Sequence
  Description of Artificial Sequence: Synthetic peptide
ADNRTKPLC

SEQ ID NO: 38446 - protein, 9 aa, Artificial Sequence
  Description of Artificial Sequence: Synthetic peptide
ADPDQKAMN

SEQ ID NO: 38447 - protein, 9 aa, Artificial Sequence
  Description of Artificial Sequence: Synthetic peptide
ADQRDCWTT

SEQ ID NO: 38448 - protein, 9 aa, Artificial Sequence
  Description of Artificial Sequence: Synthetic peptide
ADREPWPRN

SEQ ID NO: 38449 - protein, 9 aa, Artificial Sequence
  Description of Artificial Sequence: Synthetic peptide
ADSRVRPKW

SEQ ID NO: 38450 - protein, 9 aa, Artificial Sequence
  Description of Artificial Sequence: Synthetic peptide
AECKCCVKM

SEQ ID NO: 38451 - protein, 9 aa, Artificial Sequence
  Description of Artificial Sequence: Synthetic peptide
AENQDDWQF

SEQ ID NO: 38452 - protein, 9 aa, Artificial Sequence
  Description of Artificial Sequence: Synthetic peptide
AGDMWRHKM

SEQ ID NO: 38453 - protein, 9 aa, Artificial Sequence
  Description of Artificial Sequence: Synthetic peptide
AGDTDMPED

SEQ ID NO: 38454 - protein, 9 aa, Artificial Sequence
  Description of Artificial Sequence: Synthetic peptide
AGWEEAWCM

SEQ ID NO: 38455 - protein, 9 aa, Artificial Sequence
  Description of Artificial Sequence: Synthetic peptide
AHDCDEPAL

SEQ ID NO: 38456 - protein, 9 aa, Artificial Sequence
  Description of Artificial Sequence: Synthetic peptide
AIENNYCPM

SEQ ID NO: 38457 - protein, 9 aa, Artificial Sequence
  Description of Artificial Sequence: Synthetic peptide
AIPHWDDKH

SEQ ID NO: 38458 - protein, 9 aa, Artificial Sequence
  Description of Artificial Sequence: Synthetic peptide
APDFNREKN

SEQ ID NO: 38459 - protein, 9 aa, Artificial Sequence
  Description of Artificial Sequence: Synthetic peptide
APDHWMEKM

SEQ ID NO: 38460 - protein, 9 aa, Artificial Sequence
  Description of Artificial Sequence: Synthetic peptide
ARKCDFPAL

SEQ ID NO: 38461 - protein, 9 aa, Artificial Sequence
  Description of Artificial Sequence: Synthetic peptide
CDAKRTPGM

SEQ ID NO: 38462 - protein, 9 aa, Artificial Sequence
  Description of Artificial Sequence: Synthetic peptide
CDAWGELRG

SEQ ID NO: 38463 - protein, 9 aa, Artificial Sequence
  Description of Artificial Sequence: Synthetic peptide
CDCKEQEED

SEQ ID NO: 38464 - protein, 9 aa, Artificial Sequence
  Description of Artificial Sequence: Synthetic peptide
CDCKGRIPH

SEQ ID NO: 38465 - protein, 9 aa, Artificial Sequence
  Description of Artificial Sequence: Synthetic peptide
CDDFCMCHC

SEQ ID NO: 38466 - protein, 9 aa, Artificial Sequence
  Description of Artificial Sequence: Synthetic peptide
CDDHNHPRA

SEQ ID NO: 38467 - protein, 9 aa, Artificial Sequence
  Description of Artificial Sequence: Synthetic peptide
CDDKQSHKE

SEQ ID NO: 38468 - protein, 9 aa, Artificial Sequence
  Description of Artificial Sequence: Synthetic peptide
CDDKRFSKK

SEQ ID NO: 38469 - protein, 9 aa, Artificial Sequence
  Description of Artificial Sequence: Synthetic peptide
CDDRERQQN

SEQ ID NO: 38470 - protein, 9 aa, Artificial Sequence
  Description of Artificial Sequence: Synthetic peptide
CDDWGWDQM

SEQ ID NO: 38471 - protein, 9 aa, Artificial Sequence
  Description of Artificial Sequence: Synthetic peptide
CDEIEMQGT

SEQ ID NO: 38472 - protein, 9 aa, Artificial Sequence
  Description of Artificial Sequence: Synthetic peptide
CDELPMAGH

SEQ ID NO: 38473 - protein, 9 aa, Artificial Sequence
  Description of Artificial Sequence: Synthetic peptide
CDEPHFWRC

SEQ ID NO: 38474 - protein, 9 aa, Artificial Sequence
  Description of Artificial Sequence: Synthetic peptide
CDERRWDRP

SEQ ID NO: 38475 - protein, 9 aa, Artificial Sequence
  Description of Artificial Sequence: Synthetic peptide
CDIRCENMG

SEQ ID NO: 38476 - protein, 9 aa, Artificial Sequence
  Description of Artificial Sequence: Synthetic peptide
CDMCREWKW

SEQ ID NO: 38477 - protein, 9 aa, Artificial Sequence
  Description of Artificial Sequence: Synthetic peptide
CDNKCWPHD

SEQ ID NO: 38478 - protein, 9 aa, Artificial Sequence
  Description of Artificial Sequence: Synthetic peptide
CDNKPKNLS

SEQ ID NO: 38479 - protein, 9 aa, Artificial Sequence
  Description of Artificial Sequence: Synthetic peptide
CDNRRNWWE

SEQ ID NO: 38480 - protein, 9 aa, Artificial Sequence
  Description of Artificial Sequence: Synthetic peptide
CDPCNEFNK

SEQ ID NO: 38481 - protein, 9 aa, Artificial Sequence
  Description of Artificial Sequence: Synthetic peptide
CDPMDACQE

SEQ ID NO: 38482 - protein, 9 aa, Artificial Sequence
  Description of Artificial Sequence: Synthetic peptide
CDPNDMREH

SEQ ID NO: 38483 - protein, 9 aa, Artificial Sequence
  Description of Artificial Sequence: Synthetic peptide
CDPRFVEAM

SEQ ID NO: 38484 - protein, 9 aa, Artificial Sequence
  Description of Artificial Sequence: Synthetic peptide
CDPRTLPFY

SEQ ID NO: 38485 - protein, 9 aa, Artificial Sequence
  Description of Artificial Sequence: Synthetic peptide
CDPWDWDIE

SEQ ID NO: 38486 - protein, 9 aa, Artificial Sequence
  Description of Artificial Sequence: Synthetic peptide
CDPWDWEIE

SEQ ID NO: 38487 - protein, 9 aa, Artificial Sequence
  Description of Artificial Sequence: Synthetic peptide
CDQFCEWRQ

SEQ ID NO: 38488 - protein, 9 aa, Artificial Sequence
  Description of Artificial Sequence: Synthetic peptide
CDQFHWDKK

SEQ ID NO: 38489 - protein, 9 aa, Artificial Sequence
  Description of Artificial Sequence: Synthetic peptide
CDRRCFDKH

SEQ ID NO: 38490 - protein, 9 aa, Artificial Sequence
  Description of Artificial Sequence: Synthetic peptide
CDSCCGMHV

SEQ ID NO: 38491 - protein, 9 aa, Artificial Sequence
  Description of Artificial Sequence: Synthetic peptide
CDTWPWSKK

SEQ ID NO: 38492 - protein, 9 aa, Artificial Sequence
  Description of Artificial Sequence: Synthetic peptide
CDWCDQFRH

SEQ ID NO: 38493 - protein, 9 aa, Artificial Sequence
  Description of Artificial Sequence: Synthetic peptide
CDYCDPRKF

SEQ ID NO: 38494 - protein, 9 aa, Artificial Sequence
  Description of Artificial Sequence: Synthetic peptide
CDYRCLWYC

SEQ ID NO: 38495 - protein, 9 aa, Artificial Sequence
  Description of Artificial Sequence: Synthetic peptide
CECYEPFEG

SEQ ID NO: 38496 - protein, 9 aa, Artificial Sequence
  Description of Artificial Sequence: Synthetic peptide
CEDMDQWPW

SEQ ID NO: 38497 - protein, 9 aa, Artificial Sequence
  Description of Artificial Sequence: Synthetic peptide
CELPDRCPQ

SEQ ID NO: 38498 - protein, 9 aa, Artificial Sequence
  Description of Artificial Sequence: Synthetic peptide
CERVPVFSF

SEQ ID NO: 38499 - protein, 9 aa, Artificial Sequence
  Description of Artificial Sequence: Synthetic peptide
CFDHRPLPC

SEQ ID NO: 38500 - protein, 9 aa, Artificial Sequence
  Description of Artificial Sequence: Synthetic peptide
CFPCCWAKF

SEQ ID NO: 38501 - protein, 9 aa, Artificial Sequence
  Description of Artificial Sequence: Synthetic peptide
CGAWWWNHM

SEQ ID NO: 38502 - protein, 9 aa, Artificial Sequence
  Description of Artificial Sequence: Synthetic peptide
CGDEWAPRL

SEQ ID NO: 38503 - protein, 9 aa, Artificial Sequence
  Description of Artificial Sequence: Synthetic peptide
CGDIDHPKS

SEQ ID NO: 38504 - protein, 9 aa, Artificial Sequence
  Description of Artificial Sequence: Synthetic peptide
CGDWAWDRC

SEQ ID NO: 38505 - protein, 9 aa, Artificial Sequence
  Description of Artificial Sequence: Synthetic peptide
CGEKCWHDI

SEQ ID NO: 38506 - protein, 9 aa, Artificial Sequence
  Description of Artificial Sequence: Synthetic peptide
CGHDSKPRC

SEQ ID NO: 38507 - protein, 9 aa, Artificial Sequence
  Description of Artificial Sequence: Synthetic peptide
CGHWCCSDY

SEQ ID NO: 38508 - protein, 9 aa, Artificial Sequence
  Description of Artificial Sequence: Synthetic peptide
CGIEDKPEN

SEQ ID NO: 38509 - protein, 9 aa, Artificial Sequence
  Description of Artificial Sequence: Synthetic peptide
CGLCRYYDM

SEQ ID NO: 38510 - protein, 9 aa, Artificial Sequence
  Description of Artificial Sequence: Synthetic peptide
CGPCCLWGM

SEQ ID NO: 38511 - protein, 9 aa, Artificial Sequence
  Description of Artificial Sequence: Synthetic peptide
CGPEPCVRQ

SEQ ID NO: 38512 - protein, 9 aa, Artificial Sequence
  Description of Artificial Sequence: Synthetic peptide
CGPWNEPEY

SEQ ID NO: 38513 - protein, 9 aa, Artificial Sequence
  Description of Artificial Sequence: Synthetic peptide
CGTHCPLRQ

SEQ ID NO: 38514 - protein, 9 aa, Artificial Sequence
  Description of Artificial Sequence: Synthetic peptide
CGYDCQPRF

SEQ ID NO: 38515 - protein, 9 aa, Artificial Sequence
  Description of Artificial Sequence: Synthetic peptide
CHKFDRELW

SEQ ID NO: 38516 - protein, 9 aa, Artificial Sequence
  Description of Artificial Sequence: Synthetic peptide
CHNHPMPPL

SEQ ID NO: 38517 - protein, 9 aa, Artificial Sequence
  Description of Artificial Sequence: Synthetic peptide
CKDEFWPLM

SEQ ID NO: 38518 - protein, 9 aa, Artificial Sequence
  Description of Artificial Sequence: Synthetic peptide
CKDFRMSPL

SEQ ID NO: 38519 - protein, 9 aa, Artificial Sequence
  Description of Artificial Sequence: Synthetic peptide
CKDYCRDEL

SEQ ID NO: 38520 - protein, 9 aa, Artificial Sequence
  Description of Artificial Sequence: Synthetic peptide
CKPYEWWVM

SEQ ID NO: 38521 - protein, 9 aa, Artificial Sequence
  Description of Artificial Sequence: Synthetic peptide
CKYTDDEEQ

SEQ ID NO: 38522 - protein, 9 aa, Artificial Sequence
  Description of Artificial Sequence: Synthetic peptide
CMTDWSGMM

SEQ ID NO: 38523 - protein, 9 aa, Artificial Sequence
  Description of Artificial Sequence: Synthetic peptide
CNCKDYVEV

SEQ ID NO: 38524 - protein, 9 aa, Artificial Sequence
  Description of Artificial Sequence: Synthetic peptide
CNDQHMEKD

SEQ ID NO: 38525 - protein, 9 aa, Artificial Sequence
  Description of Artificial Sequence: Synthetic peptide
CNPPEEPVR

SEQ ID NO: 38526 - protein, 9 aa, Artificial Sequence
  Description of Artificial Sequence: Synthetic peptide
CNTQPSPKD

SEQ ID NO: 38527 - protein, 9 aa, Artificial Sequence
  Description of Artificial Sequence: Synthetic peptide
CPEYRMARF

SEQ ID NO: 38528 - protein, 9 aa, Artificial Sequence
  Description of Artificial Sequence: Synthetic peptide
CPPPCSYLL

SEQ ID NO: 38529 - protein, 9 aa, Artificial Sequence
  Description of Artificial Sequence: Synthetic peptide
CPQWCEYYE

SEQ ID NO: 38530 - protein, 9 aa, Artificial Sequence
  Description of Artificial Sequence: Synthetic peptide
CQCDDNWEI

SEQ ID NO: 38531 - protein, 9 aa, Artificial Sequence
  Description of Artificial Sequence: Synthetic peptide
CQERERGKW

SEQ ID NO: 38532 - protein, 9 aa, Artificial Sequence
  Description of Artificial Sequence: Synthetic peptide
CQSECAKRG

SEQ ID NO: 38533 - protein, 9 aa, Artificial Sequence
  Description of Artificial Sequence: Synthetic peptide
CRDCRDGEN

SEQ ID NO: 38534 - protein, 9 aa, Artificial Sequence
  Description of Artificial Sequence: Synthetic peptide
CRDEGLEYE

SEQ ID NO: 38535 - protein, 9 aa, Artificial Sequence
  Description of Artificial Sequence: Synthetic peptide
CRDGDEPRG

SEQ ID NO: 38536 - protein, 9 aa, Artificial Sequence
  Description of Artificial Sequence: Synthetic peptide
CRDWGWICA

SEQ ID NO: 38537 - protein, 9 aa, Artificial Sequence
  Description of Artificial Sequence: Synthetic peptide
CRNDNIERK

SEQ ID NO: 38538 - protein, 9 aa, Artificial Sequence
  Description of Artificial Sequence: Synthetic peptide
CRPLDWKPD

SEQ ID NO: 38539 - protein, 9 aa, Artificial Sequence
  Description of Artificial Sequence: Synthetic peptide
CRYWCSYKD

SEQ ID NO: 38540 - protein, 9 aa, Artificial Sequence
  Description of Artificial Sequence: Synthetic peptide
CWDGCHRRL

SEQ ID NO: 38541 - protein, 9 aa, Artificial Sequence
  Description of Artificial Sequence: Synthetic peptide
CWDHGAPEL

SEQ ID NO: 38542 - protein, 9 aa, Artificial Sequence
  Description of Artificial Sequence: Synthetic peptide
CWEDCQYHE

SEQ ID NO: 38543 - protein, 9 aa, Artificial Sequence
  Description of Artificial Sequence: Synthetic peptide
CYDDWQDRI

SEQ ID NO: 38544 - protein, 9 aa, Artificial Sequence
  Description of Artificial Sequence: Synthetic peptide
DCDMFCMFN

SEQ ID NO: 38545 - protein, 9 aa, Artificial Sequence
  Description of Artificial Sequence: Synthetic peptide
DDARRCHRK

SEQ ID NO: 38546 - protein, 9 aa, Artificial Sequence
  Description of Artificial Sequence: Synthetic peptide
DDCFQRCRN

SEQ ID NO: 38547 - protein, 9 aa, Artificial Sequence
  Description of Artificial Sequence: Synthetic peptide
DDDCNYTRN

SEQ ID NO: 38548 - protein, 9 aa, Artificial Sequence
  Description of Artificial Sequence: Synthetic peptide
DDDEDLNYD

SEQ ID NO: 38549 - protein, 9 aa, Artificial Sequence
  Description of Artificial Sequence: Synthetic peptide
DDDHPRPRS

SEQ ID NO: 38550 - protein, 9 aa, Artificial Sequence
  Description of Artificial Sequence: Synthetic peptide
DDDNWHHKN

SEQ ID NO: 38551 - protein, 9 aa, Artificial Sequence
  Description of Artificial Sequence: Synthetic peptide
DDDPGDAYW

SEQ ID NO: 38552 - protein, 9 aa, Artificial Sequence
  Description of Artificial Sequence: Synthetic peptide
DDECEMYYN

SEQ ID NO: 38553 - protein, 9 aa, Artificial Sequence
  Description of Artificial Sequence: Synthetic peptide
DDEDGGHYM

SEQ ID NO: 38554 - protein, 9 aa, Artificial Sequence
  Description of Artificial Sequence: Synthetic peptide
DDEPKGIRM

SEQ ID NO: 38555 - protein, 9 aa, Artificial Sequence
  Description of Artificial Sequence: Synthetic peptide
DDEVDGDHP

SEQ ID NO: 38556 - protein, 9 aa, Artificial Sequence
  Description of Artificial Sequence: Synthetic peptide
DDGCNYTRN

SEQ ID NO: 38557 - protein, 9 aa, Artificial Sequence
  Description of Artificial Sequence: Synthetic peptide
DDGPDTNRK

SEQ ID NO: 38558 - protein, 9 aa, Artificial Sequence
  Description of Artificial Sequence: Synthetic peptide
DDGPDTYRR

SEQ ID NO: 38559 - protein, 9 aa, Artificial Sequence
  Description of Artificial Sequence: Synthetic peptide
DDGPETYRK

SEQ ID NO: 38560 - protein, 9 aa, Artificial Sequence
  Description of Artificial Sequence: Synthetic peptide
DDGVMDSVD

SEQ ID NO: 38561 - protein, 9 aa, Artificial Sequence
  Description of Artificial Sequence: Synthetic peptide
DDHEEGFKA

SEQ ID NO: 38562 - protein, 9 aa, Artificial Sequence
  Description of Artificial Sequence: Synthetic peptide
DDHQENTKT

SEQ ID NO: 38563 - protein, 9 aa, Artificial Sequence
  Description of Artificial Sequence: Synthetic peptide
DDKGPRNSM

SEQ ID NO: 38564 - protein, 9 aa, Artificial Sequence
  Description of Artificial Sequence: Synthetic peptide
DDKHDRIHH

SEQ ID NO: 38565 - protein, 9 aa, Artificial Sequence
  Description of Artificial Sequence: Synthetic peptide
DDLKCWNNY

SEQ ID NO: 38566 - protein, 9 aa, Artificial Sequence
  Description of Artificial Sequence: Synthetic peptide
DDMHDNMVH

SEQ ID NO: 38567 - protein, 9 aa, Artificial Sequence
  Description of Artificial Sequence: Synthetic peptide
DDNCNYTRN

SEQ ID NO: 38568 - protein, 9 aa, Artificial Sequence
  Description of Artificial Sequence: Synthetic peptide
DDNHPTPTL

SEQ ID NO: 38569 - protein, 9 aa, Artificial Sequence
  Description of Artificial Sequence: Synthetic peptide
DDNREPQDT

SEQ ID NO: 38570 - protein, 9 aa, Artificial Sequence
  Description of Artificial Sequence: Synthetic peptide
DDNWDVFRD

SEQ ID NO: 38571 - protein, 9 aa, Artificial Sequence
  Description of Artificial Sequence: Synthetic peptide
DDPCVEFET

SEQ ID NO: 38572 - protein, 9 aa, Artificial Sequence
  Description of Artificial Sequence: Synthetic peptide
DDPFDVTLQ

SEQ ID NO: 38573 - protein, 9 aa, Artificial Sequence
  Description of Artificial Sequence: Synthetic peptide
DDPFWCQRL

SEQ ID NO: 38574 - protein, 9 aa, Artificial Sequence
  Description of Artificial Sequence: Synthetic peptide
DDPQEVHGF

SEQ ID NO: 38575 - protein, 9 aa, Artificial Sequence
  Description of Artificial Sequence: Synthetic peptide
DDPQRKGYC

SEQ ID NO: 38576 - protein, 9 aa, Artificial Sequence
  Description of Artificial Sequence: Synthetic peptide
DDPWGDRHT

SEQ ID NO: 38577 - protein, 9 aa, Artificial Sequence
  Description of Artificial Sequence: Synthetic peptide
DDQLEGWID

SEQ ID NO: 38578 - protein, 9 aa, Artificial Sequence
  Description of Artificial Sequence: Synthetic peptide
DDQPDNNIY

SEQ ID NO: 38579 - protein, 9 aa, Artificial Sequence
  Description of Artificial Sequence: Synthetic peptide
DDQRLLDDI

SEQ ID NO: 38580 - protein, 9 aa, Artificial Sequence
  Description of Artificial Sequence: Synthetic peptide
DDQTDYPPT

SEQ ID NO: 38581 - protein, 9 aa, Artificial Sequence
  Description of Artificial Sequence: Synthetic peptide
DDQYRIEQH

SEQ ID NO: 38582 - protein, 9 aa, Artificial Sequence
  Description of Artificial Sequence: Synthetic peptide
DDRANVPKH

SEQ ID NO: 38583 - protein, 9 aa, Artificial Sequence
  Description of Artificial Sequence: Synthetic peptide
DDSGPKSQI

SEQ ID NO: 38584 - protein, 9 aa, Artificial Sequence
  Description of Artificial Sequence: Synthetic peptide
DDSIEHFKG

SEQ ID NO: 38585 - protein, 9 aa, Artificial Sequence
  Description of Artificial Sequence: Synthetic peptide
DDSWPIPLG

SEQ ID NO: 38586 - protein, 9 aa, Artificial Sequence
  Description of Artificial Sequence: Synthetic peptide
DDTEPMMNK

SEQ ID NO: 38587 - protein, 9 aa, Artificial Sequence
  Description of Artificial Sequence: Synthetic peptide
DDTEPMPVR

SEQ ID NO: 38588 - protein, 9 aa, Artificial Sequence
  Description of Artificial Sequence: Synthetic peptide
DDTNEIEEY

SEQ ID NO: 38589 - protein, 9 aa, Artificial Sequence
  Description of Artificial Sequence: Synthetic peptide
DDWKGWLRF

SEQ ID NO: 38590 - protein, 9 aa, Artificial Sequence
  Description of Artificial Sequence: Synthetic peptide
DDWKPCEFA

SEQ ID NO: 38591 - protein, 9 aa, Artificial Sequence
  Description of Artificial Sequence: Synthetic peptide
DDWMRPKRC

SEQ ID NO: 38592 - protein, 9 aa, Artificial Sequence
  Description of Artificial Sequence: Synthetic peptide
DDYGHDDKN

SEQ ID NO: 38593 - protein, 9 aa, Artificial Sequence
  Description of Artificial Sequence: Synthetic peptide
DECSESMRN

SEQ ID NO: 38594 - protein, 9 aa, Artificial Sequence
  Description of Artificial Sequence: Synthetic peptide
DEGEEEPKL

SEQ ID NO: 38595 - protein, 9 aa, Artificial Sequence
  Description of Artificial Sequence: Synthetic peptide
DEHKDPDEA

SEQ ID NO: 38596 - protein, 9 aa, Artificial Sequence
  Description of Artificial Sequence: Synthetic peptide
DENKDEFWM

SEQ ID NO: 38597 - protein, 9 aa, Artificial Sequence
  Description of Artificial Sequence: Synthetic peptide
DEQCRTHRK

SEQ ID NO: 38598 - protein, 9 aa, Artificial Sequence
  Description of Artificial Sequence: Synthetic peptide
DEQHGGEMD

SEQ ID NO: 38599 - protein, 9 aa, Artificial Sequence
  Description of Artificial Sequence: Synthetic peptide
DESCEWMNQ

SEQ ID NO: 38600 - protein, 9 aa, Artificial Sequence
  Description of Artificial Sequence: Synthetic peptide
DESEERIQD

SEQ ID NO: 38601 - protein, 9 aa, Artificial Sequence
  Description of Artificial Sequence: Synthetic peptide
DESSDDDEE

SEQ ID NO: 38602 - protein, 9 aa, Artificial Sequence
  Description of Artificial Sequence: Synthetic peptide
DGCFDAQIN

SEQ ID NO: 38603 - protein, 9 aa, Artificial Sequence
  Description of Artificial Sequence: Synthetic peptide
DGDHDARIH

SEQ ID NO: 38604 - protein, 9 aa, Artificial Sequence
  Description of Artificial Sequence: Synthetic peptide
DGETDELRM

SEQ ID NO: 38605 - protein, 9 aa, Artificial Sequence
  Description of Artificial Sequence: Synthetic peptide
DGFLDGEWW

SEQ ID NO: 38606 - protein, 9 aa, Artificial Sequence
  Description of Artificial Sequence: Synthetic peptide
DGFMDGEWC

SEQ ID NO: 38607 - protein, 9 aa, Artificial Sequence
  Description of Artificial Sequence: Synthetic peptide
DGKTSREVC

SEQ ID NO: 38608 - protein, 9 aa, Artificial Sequence
  Description of Artificial Sequence: Synthetic peptide
DGPKDRIFN

SEQ ID NO: 38609 - protein, 9 aa, Artificial Sequence
  Description of Artificial Sequence: Synthetic peptide
DGPVPWMMC

SEQ ID NO: 38610 - protein, 9 aa, Artificial Sequence
  Description of Artificial Sequence: Synthetic peptide
DGSDGMSTN

SEQ ID NO: 38611 - protein, 9 aa, Artificial Sequence
  Description of Artificial Sequence: Synthetic peptide
DGVFPRCGN

SEQ ID NO: 38612 - protein, 9 aa, Artificial Sequence
  Description of Artificial Sequence: Synthetic peptide
DHCKWWLDV

SEQ ID NO: 38613 - protein, 9 aa, Artificial Sequence
  Description of Artificial Sequence: Synthetic peptide
DHDCKCEEA

SEQ ID NO: 38614 - protein, 9 aa, Artificial Sequence
  Description of Artificial Sequence: Synthetic peptide
DHDGDVPVF

SEQ ID NO: 38615 - protein, 9 aa, Artificial Sequence
  Description of Artificial Sequence: Synthetic peptide
DHHCDRPQG

SEQ ID NO: 38616 - protein, 9 aa, Artificial Sequence
  Description of Artificial Sequence: Synthetic peptide
DHQCEFPMV

SEQ ID NO: 38617 - protein, 9 aa, Artificial Sequence
  Description of Artificial Sequence: Synthetic peptide
DHTCNWPPN

SEQ ID NO: 38618 - protein, 9 aa, Artificial Sequence
  Description of Artificial Sequence: Synthetic peptide
DICFRVSMM

SEQ ID NO: 38619 - protein, 9 aa, Artificial Sequence
  Description of Artificial Sequence: Synthetic peptide
DIEDTQMSW

SEQ ID NO: 38620 - protein, 9 aa, Artificial Sequence
  Description of Artificial Sequence: Synthetic peptide
DIEQWIAAM

SEQ ID NO: 38621 - protein, 9 aa, Artificial Sequence
  Description of Artificial Sequence: Synthetic peptide
DKDFWSAPN

SEQ ID NO: 38622 - protein, 9 aa, Artificial Sequence
  Description of Artificial Sequence: Synthetic peptide
DKHLEWPNH

SEQ ID NO: 38623 - protein, 9 aa, Artificial Sequence
  Description of Artificial Sequence: Synthetic peptide
DKKNECNWH

SEQ ID NO: 38624 - protein, 9 aa, Artificial Sequence
  Description of Artificial Sequence: Synthetic peptide
DKTCDCEMT

SEQ ID NO: 38625 - protein, 9 aa, Artificial Sequence
  Description of Artificial Sequence: Synthetic peptide
DLSDQYPEL

SEQ ID NO: 38626 - protein, 9 aa, Artificial Sequence
  Description of Artificial Sequence: Synthetic peptide
DLWCMDAEW

SEQ ID NO: 38627 - protein, 9 aa, Artificial Sequence
  Description of Artificial Sequence: Synthetic peptide
DLWTHWNPC

SEQ ID NO: 38628 - protein, 9 aa, Artificial Sequence
  Description of Artificial Sequence: Synthetic peptide
DMDEGSSSN

SEQ ID NO: 38629 - protein, 9 aa, Artificial Sequence
  Description of Artificial Sequence: Synthetic peptide
DMDKDGPRE

SEQ ID NO: 38630 - protein, 9 aa, Artificial Sequence
  Description of Artificial Sequence: Synthetic peptide
DMWDWTYRM

SEQ ID NO: 38631 - protein, 9 aa, Artificial Sequence
  Description of Artificial Sequence: Synthetic peptide
DNDTWQPRI

SEQ ID NO: 38632 - protein, 9 aa, Artificial Sequence
  Description of Artificial Sequence: Synthetic peptide
DNEWDCAGN

SEQ ID NO: 38633 - protein, 9 aa, Artificial Sequence
  Description of Artificial Sequence: Synthetic peptide
DNHREAWQD

SEQ ID NO: 38634 - protein, 9 aa, Artificial Sequence
  Description of Artificial Sequence: Synthetic peptide
DNKRRVPEC

SEQ ID NO: 38635 - protein, 9 aa, Artificial Sequence
  Description of Artificial Sequence: Synthetic peptide
DNQCEDPKP

SEQ ID NO: 38636 - protein, 9 aa, Artificial Sequence
  Description of Artificial Sequence: Synthetic peptide
DPEMEYMGM

SEQ ID NO: 38637 - protein, 9 aa, Artificial Sequence
  Description of Artificial Sequence: Synthetic peptide
DPKPRHDND

SEQ ID NO: 38638 - protein, 9 aa, Artificial Sequence
  Description of Artificial Sequence: Synthetic peptide
DQDICGWVW

SEQ ID NO: 38639 - protein, 9 aa, Artificial Sequence
  Description of Artificial Sequence: Synthetic peptide
DQDRRCDQP

SEQ ID NO: 38640 - protein, 9 aa, Artificial Sequence
  Description of Artificial Sequence: Synthetic peptide
DQECDDHGI

SEQ ID NO: 38641 - protein, 9 aa, Artificial Sequence
  Description of Artificial Sequence: Synthetic peptide
DQHGWRRPG

SEQ ID NO: 38642 - protein, 9 aa, Artificial Sequence
  Description of Artificial Sequence: Synthetic peptide
DQKCERGRI

SEQ ID NO: 38643 - protein, 9 aa, Artificial Sequence
  Description of Artificial Sequence: Synthetic peptide
DQNHRVDRH

SEQ ID NO: 38644 - protein, 9 aa, Artificial Sequence
  Description of Artificial Sequence: Synthetic peptide
DQRHDHRQM

SEQ ID NO: 38645 - protein, 9 aa, Artificial Sequence
  Description of Artificial Sequence: Synthetic peptide
DQSSGWPRD

SEQ ID NO: 38646 - protein, 9 aa, Artificial Sequence
  Description of Artificial Sequence: Synthetic peptide
DQWNDECFF

SEQ ID NO: 38647 - protein, 9 aa, Artificial Sequence
  Description of Artificial Sequence: Synthetic peptide
DRERWWPET

SEQ ID NO: 38648 - protein, 9 aa, Artificial Sequence
  Description of Artificial Sequence: Synthetic peptide
DRKFERQTM

SEQ ID NO: 38649 - protein, 9 aa, Artificial Sequence
  Description of Artificial Sequence: Synthetic peptide
DRKKPVPEW

SEQ ID NO: 38650 - protein, 9 aa, Artificial Sequence
  Description of Artificial Sequence: Synthetic peptide
DRNQWLPRH

SEQ ID NO: 38651 - protein, 9 aa, Artificial Sequence
  Description of Artificial Sequence: Synthetic peptide
DRPRPYCRN

SEQ ID NO: 38652 - protein, 9 aa, Artificial Sequence
  Description of Artificial Sequence: Synthetic peptide
DRQYPPPNH

SEQ ID NO: 38653 - protein, 9 aa, Artificial Sequence
  Description of Artificial Sequence: Synthetic peptide
DRSPWCPQF

SEQ ID NO: 38654 - protein, 9 aa, Artificial Sequence
  Description of Artificial Sequence: Synthetic peptide
DRSQRCNRG

SEQ ID NO: 38655 - protein, 9 aa, Artificial Sequence
  Description of Artificial Sequence: Synthetic peptide
DRTGRCMPP

SEQ ID NO: 38656 - protein, 9 aa, Artificial Sequence
  Description of Artificial Sequence: Synthetic peptide
DRYLGWQFC

SEQ ID NO: 38657 - protein, 9 aa, Artificial Sequence
  Description of Artificial Sequence: Synthetic peptide
DVDCCCVYN

SEQ ID NO: 38658 - protein, 9 aa, Artificial Sequence
  Description of Artificial Sequence: Synthetic peptide
DWDCKTSRN

SEQ ID NO: 38659 - protein, 9 aa, Artificial Sequence
  Description of Artificial Sequence: Synthetic peptide
DWKPADNKC

SEQ ID NO: 38660 - protein, 9 aa, Artificial Sequence
  Description of Artificial Sequence: Synthetic peptide
DWNSDWPEY

SEQ ID NO: 38661 - protein, 9 aa, Artificial Sequence
  Description of Artificial Sequence: Synthetic peptide
DWQRHPPKC

SEQ ID NO: 38662 - protein, 9 aa, Artificial Sequence
  Description of Artificial Sequence: Synthetic peptide
DWRPPCFRF

SEQ ID NO: 38663 - protein, 9 aa, Artificial Sequence
  Description of Artificial Sequence: Synthetic peptide
DWSKEIMGM

SEQ ID NO: 38664 - protein, 9 aa, Artificial Sequence
  Description of Artificial Sequence: Synthetic peptide
DWTCNGHRH

SEQ ID NO: 38665 - protein, 9 aa, Artificial Sequence
  Description of Artificial Sequence: Synthetic peptide
DYDWSDMKC

SEQ ID NO: 38666 - protein, 9 aa, Artificial Sequence
  Description of Artificial Sequence: Synthetic peptide
DYENDEDGV

SEQ ID NO: 38667 - protein, 9 aa, Artificial Sequence
  Description of Artificial Sequence: Synthetic peptide
DYKCCRPEY

SEQ ID NO: 38668 - protein, 9 aa, Artificial Sequence
  Description of Artificial Sequence: Synthetic peptide
EDDFKPARD

SEQ ID NO: 38669 - protein, 9 aa, Artificial Sequence
  Description of Artificial Sequence: Synthetic peptide
EDEGDLWFY

SEQ ID NO: 38670 - protein, 9 aa, Artificial Sequence
  Description of Artificial Sequence: Synthetic peptide
EDEPDGKMG

SEQ ID NO: 38671 - protein, 9 aa, Artificial Sequence
  Description of Artificial Sequence: Synthetic peptide
EDEQSGERE

SEQ ID NO: 38672 - protein, 9 aa, Artificial Sequence
  Description of Artificial Sequence: Synthetic peptide
EDGHKVGFM

SEQ ID NO: 38673 - protein, 9 aa, Artificial Sequence
  Description of Artificial Sequence: Synthetic peptide
EDHDIPRRN

SEQ ID NO: 38674 - protein, 9 aa, Artificial Sequence
  Description of Artificial Sequence: Synthetic peptide
EDNRWIPPL

SEQ ID NO: 38675 - protein, 9 aa, Artificial Sequence
  Description of Artificial Sequence: Synthetic peptide
EDPGDPDMM

SEQ ID NO: 38676 - protein, 9 aa, Artificial Sequence
  Description of Artificial Sequence: Synthetic peptide
EDPHEEFDR

SEQ ID NO: 38677 - protein, 9 aa, Artificial Sequence
  Description of Artificial Sequence: Synthetic peptide
EDQCCFELP

SEQ ID NO: 38678 - protein, 9 aa, Artificial Sequence
  Description of Artificial Sequence: Synthetic peptide
EDTQPLFRH

SEQ ID NO: 38679 - protein, 9 aa, Artificial Sequence
  Description of Artificial Sequence: Synthetic peptide
EEAHRGERC

SEQ ID NO: 38680 - protein, 9 aa, Artificial Sequence
  Description of Artificial Sequence: Synthetic peptide
EEDHEQMCN

SEQ ID NO: 38681 - protein, 9 aa, Artificial Sequence
  Description of Artificial Sequence: Synthetic peptide
EFDHWTMRM

SEQ ID NO: 38682 - protein, 9 aa, Artificial Sequence
  Description of Artificial Sequence: Synthetic peptide
EFEHELDIW

SEQ ID NO: 38683 - protein, 9 aa, Artificial Sequence
  Description of Artificial Sequence: Synthetic peptide
EFPVPLDFW

SEQ ID NO: 38684 - protein, 9 aa, Artificial Sequence
  Description of Artificial Sequence: Synthetic peptide
EGAEGWTQD

SEQ ID NO: 38685 - protein, 9 aa, Artificial Sequence
  Description of Artificial Sequence: Synthetic peptide
EGDPPMPVF

SEQ ID NO: 38686 - protein, 9 aa, Artificial Sequence
  Description of Artificial Sequence: Synthetic peptide
EHDCQDDVN

SEQ ID NO: 38687 - protein, 9 aa, Artificial Sequence
  Description of Artificial Sequence: Synthetic peptide
EHEWDAPSW

SEQ ID NO: 38688 - protein, 9 aa, Artificial Sequence
  Description of Artificial Sequence: Synthetic peptide
EHKYRDMKH

SEQ ID NO: 38689 - protein, 9 aa, Artificial Sequence
  Description of Artificial Sequence: Synthetic peptide
EHPMELEFC

SEQ ID NO: 38690 - protein, 9 aa, Artificial Sequence
  Description of Artificial Sequence: Synthetic peptide
EIDFGTPET

SEQ ID NO: 38691 - protein, 9 aa, Artificial Sequence
  Description of Artificial Sequence: Synthetic peptide
EIDYWWCPH

SEQ ID NO: 38692 - protein, 9 aa, Artificial Sequence
  Description of Artificial Sequence: Synthetic peptide
EMDLCHYSN

SEQ ID NO: 38693 - protein, 9 aa, Artificial Sequence
  Description of Artificial Sequence: Synthetic peptide
EMHPCFWIF

SEQ ID NO: 38694 - protein, 9 aa, Artificial Sequence
  Description of Artificial Sequence: Synthetic peptide
EPSRCRPHV

SEQ ID NO: 38695 - protein, 9 aa, Artificial Sequence
  Description of Artificial Sequence: Synthetic peptide
EQKQEPEFW

SEQ ID NO: 38696 - protein, 9 aa, Artificial Sequence
  Description of Artificial Sequence: Synthetic peptide
ERCEGIQFC

SEQ ID NO: 38697 - protein, 9 aa, Artificial Sequence
  Description of Artificial Sequence: Synthetic peptide
ERDAGDTIN

SEQ ID NO: 38698 - protein, 9 aa, Artificial Sequence
  Description of Artificial Sequence: Synthetic peptide
ERHGEEIRD

SEQ ID NO: 38699 - protein, 9 aa, Artificial Sequence
  Description of Artificial Sequence: Synthetic peptide
ERHYDIMLY

SEQ ID NO: 38700 - protein, 9 aa, Artificial Sequence
  Description of Artificial Sequence: Synthetic peptide
ERKFYENRM

SEQ ID NO: 38701 - protein, 9 aa, Artificial Sequence
  Description of Artificial Sequence: Synthetic peptide
ERQKDRLPD

SEQ ID NO: 38702 - protein, 9 aa, Artificial Sequence
  Description of Artificial Sequence: Synthetic peptide
ESRYCMWGM

SEQ ID NO: 38703 - protein, 9 aa, Artificial Sequence
  Description of Artificial Sequence: Synthetic peptide
ETRELITMM

SEQ ID NO: 38704 - protein, 9 aa, Artificial Sequence
  Description of Artificial Sequence: Synthetic peptide
EVDEDPAFW

SEQ ID NO: 38705 - protein, 9 aa, Artificial Sequence
  Description of Artificial Sequence: Synthetic peptide
EVDFCSAIM

SEQ ID NO: 38706 - protein, 9 aa, Artificial Sequence
  Description of Artificial Sequence: Synthetic peptide
EVEHDVAVW

SEQ ID NO: 38707 - protein, 9 aa, Artificial Sequence
  Description of Artificial Sequence: Synthetic peptide
EVTMGCMIN

SEQ ID NO: 38708 - protein, 9 aa, Artificial Sequence
  Description of Artificial Sequence: Synthetic peptide
FDCDDVIER

SEQ ID NO: 38709 - protein, 9 aa, Artificial Sequence
  Description of Artificial Sequence: Synthetic peptide
FDDCDAGRG

SEQ ID NO: 38710 - protein, 9 aa, Artificial Sequence
  Description of Artificial Sequence: Synthetic peptide
FDDDDKAKC

SEQ ID NO: 38711 - protein, 9 aa, Artificial Sequence
  Description of Artificial Sequence: Synthetic peptide
FDDYDLTVE

SEQ ID NO: 38712 - protein, 9 aa, Artificial Sequence
  Description of Artificial Sequence: Synthetic peptide
FDETDFEAM

SEQ ID NO: 38713 - protein, 9 aa, Artificial Sequence
  Description of Artificial Sequence: Synthetic peptide
FDFPDCHGW

SEQ ID NO: 38714 - protein, 9 aa, Artificial Sequence
  Description of Artificial Sequence: Synthetic peptide
FDHDDEHKC

SEQ ID NO: 38715 - protein, 9 aa, Artificial Sequence
  Description of Artificial Sequence: Synthetic peptide
FDHHEKWNN

SEQ ID NO: 38716 - protein, 9 aa, Artificial Sequence
  Description of Artificial Sequence: Synthetic peptide
FDHRPNCHD

SEQ ID NO: 38717 - protein, 9 aa, Artificial Sequence
  Description of Artificial Sequence: Synthetic peptide
FDNPDQRNA

SEQ ID NO: 38718 - protein, 9 aa, Artificial Sequence
  Description of Artificial Sequence: Synthetic peptide
FDNRDSDKG

SEQ ID NO: 38719 - protein, 9 aa, Artificial Sequence
  Description of Artificial Sequence: Synthetic peptide
FDNRRHWWE

SEQ ID NO: 38720 - protein, 9 aa, Artificial Sequence
  Description of Artificial Sequence: Synthetic peptide
FDPFQFCVG

SEQ ID NO: 38721 - protein, 9 aa, Artificial Sequence
  Description of Artificial Sequence: Synthetic peptide
FDPHHAKQQ

SEQ ID NO: 38722 - protein, 9 aa, Artificial Sequence
  Description of Artificial Sequence: Synthetic peptide
FDPIYEMVE

SEQ ID NO: 38723 - protein, 9 aa, Artificial Sequence
  Description of Artificial Sequence: Synthetic peptide
FDSFDEHHN

SEQ ID NO: 38724 - protein, 9 aa, Artificial Sequence
  Description of Artificial Sequence: Synthetic peptide
FDWISKCSW

SEQ ID NO: 38725 - protein, 9 aa, Artificial Sequence
  Description of Artificial Sequence: Synthetic peptide
FDWQWEDKC

SEQ ID NO: 38726 - protein, 9 aa, Artificial Sequence
  Description of Artificial Sequence: Synthetic peptide
FDYKWMNAY

SEQ ID NO: 38727 - protein, 9 aa, Artificial Sequence
  Description of Artificial Sequence: Synthetic peptide
FEDWGWPKG

SEQ ID NO: 38728 - protein, 9 aa, Artificial Sequence
  Description of Artificial Sequence: Synthetic peptide
FEHRDNWKM

SEQ ID NO: 38729 - protein, 9 aa, Artificial Sequence
  Description of Artificial Sequence: Synthetic peptide
FERWDRKEH

SEQ ID NO: 38730 - protein, 9 aa, Artificial Sequence
  Description of Artificial Sequence: Synthetic peptide
FERYDKPYM

SEQ ID NO: 38731 - protein, 9 aa, Artificial Sequence
  Description of Artificial Sequence: Synthetic peptide
FGEMDGGCY

SEQ ID NO: 38732 - protein, 9 aa, Artificial Sequence
  Description of Artificial Sequence: Synthetic peptide
FGGCDGTPW

SEQ ID NO: 38733 - protein, 9 aa, Artificial Sequence
  Description of Artificial Sequence: Synthetic peptide
FGWLDCCNQ

SEQ ID NO: 38734 - protein, 9 aa, Artificial Sequence
  Description of Artificial Sequence: Synthetic peptide
FGWPDEQQW

SEQ ID NO: 38735 - protein, 9 aa, Artificial Sequence
  Description of Artificial Sequence: Synthetic peptide
FHETQTPKT

SEQ ID NO: 38736 - protein, 9 aa, Artificial Sequence
  Description of Artificial Sequence: Synthetic peptide
FKACDSECD

SEQ ID NO: 38737 - protein, 9 aa, Artificial Sequence
  Description of Artificial Sequence: Synthetic peptide
FKCGNWGII

SEQ ID NO: 38738 - protein, 9 aa, Artificial Sequence
  Description of Artificial Sequence: Synthetic peptide
FKDYRCGWC

SEQ ID NO: 38739 - protein, 9 aa, Artificial Sequence
  Description of Artificial Sequence: Synthetic peptide
FKEGDAKKD

SEQ ID NO: 38740 - protein, 9 aa, Artificial Sequence
  Description of Artificial Sequence: Synthetic peptide
FKGCSGELV

SEQ ID NO: 38741 - protein, 9 aa, Artificial Sequence
  Description of Artificial Sequence: Synthetic peptide
FKMCPCVKG

SEQ ID NO: 38742 - protein, 9 aa, Artificial Sequence
  Description of Artificial Sequence: Synthetic peptide
FKMSDILPH

SEQ ID NO: 38743 - protein, 9 aa, Artificial Sequence
  Description of Artificial Sequence: Synthetic peptide
FKPCMCDPM

SEQ ID NO: 38744 - protein, 9 aa, Artificial Sequence
  Description of Artificial Sequence: Synthetic peptide
FKPDPCFDD

SEQ ID NO: 38745 - protein, 9 aa, Artificial Sequence
  Description of Artificial Sequence: Synthetic peptide
FKPTNIEKG

SEQ ID NO: 38746 - protein, 9 aa, Artificial Sequence
  Description of Artificial Sequence: Synthetic peptide
FKWWDTMNQ

SEQ ID NO: 38747 - protein, 9 aa, Artificial Sequence
  Description of Artificial Sequence: Synthetic peptide
FKYTDHGIQ

SEQ ID NO: 38748 - protein, 9 aa, Artificial Sequence
  Description of Artificial Sequence: Synthetic peptide
FLNDWSNWF

SEQ ID NO: 38749 - protein, 9 aa, Artificial Sequence
  Description of Artificial Sequence: Synthetic peptide
FNPFDCDIG

SEQ ID NO: 38750 - protein, 9 aa, Artificial Sequence
  Description of Artificial Sequence: Synthetic peptide
FNTFDCEIG

SEQ ID NO: 38751 - protein, 9 aa, Artificial Sequence
  Description of Artificial Sequence: Synthetic peptide
FRCNERRWN

SEQ ID NO: 38752 - protein, 9 aa, Artificial Sequence
  Description of Artificial Sequence: Synthetic peptide
FRCYPNQRD

SEQ ID NO: 38753 - protein, 9 aa, Artificial Sequence
  Description of Artificial Sequence: Synthetic peptide
FRDRDGNRM

SEQ ID NO: 38754 - protein, 9 aa, Artificial Sequence
  Description of Artificial Sequence: Synthetic peptide
FRGGEMAKN

SEQ ID NO: 38755 - protein, 9 aa, Artificial Sequence
  Description of Artificial Sequence: Synthetic peptide
FRNENEFEP

SEQ ID NO: 38756 - protein, 9 aa, Artificial Sequence
  Description of Artificial Sequence: Synthetic peptide
FRPKCGPIH

SEQ ID NO: 38757 - protein, 9 aa, Artificial Sequence
  Description of Artificial Sequence: Synthetic peptide
FRPKECALQ

SEQ ID NO: 38758 - protein, 9 aa, Artificial Sequence
  Description of Artificial Sequence: Synthetic peptide
FRQCGEEYH

SEQ ID NO: 38759 - protein, 9 aa, Artificial Sequence
  Description of Artificial Sequence: Synthetic peptide
FRQLDRERQ

SEQ ID NO: 38760 - protein, 9 aa, Artificial Sequence
  Description of Artificial Sequence: Synthetic peptide
FRQWQTMET

SEQ ID NO: 38761 - protein, 9 aa, Artificial Sequence
  Description of Artificial Sequence: Synthetic peptide
FRSEEKAEN

SEQ ID NO: 38762 - protein, 9 aa, Artificial Sequence
  Description of Artificial Sequence: Synthetic peptide
FRSRNPPKH

SEQ ID NO: 38763 - protein, 9 aa, Artificial Sequence
  Description of Artificial Sequence: Synthetic peptide
FRSYGIRLI

SEQ ID NO: 38764 - protein, 9 aa, Artificial Sequence
  Description of Artificial Sequence: Synthetic peptide
FRTWPDDET

SEQ ID NO: 38765 - protein, 9 aa, Artificial Sequence
  Description of Artificial Sequence: Synthetic peptide
FWEHADEEG

SEQ ID NO: 38766 - protein, 9 aa, Artificial Sequence
  Description of Artificial Sequence: Synthetic peptide
FYDGPREMW

SEQ ID NO: 38767 - protein, 9 aa, Artificial Sequence
  Description of Artificial Sequence: Synthetic peptide
FYVGPAMPM

SEQ ID NO: 38768 - protein, 9 aa, Artificial Sequence
  Description of Artificial Sequence: Synthetic peptide
GADWDEPKE

SEQ ID NO: 38769 - protein, 9 aa, Artificial Sequence
  Description of Artificial Sequence: Synthetic peptide
GDCIDGKPH

SEQ ID NO: 38770 - protein, 9 aa, Artificial Sequence
  Description of Artificial Sequence: Synthetic peptide
GDDHDIEFM

SEQ ID NO: 38771 - protein, 9 aa, Artificial Sequence
  Description of Artificial Sequence: Synthetic peptide
GDDHKSHRK

SEQ ID NO: 38772 - protein, 9 aa, Artificial Sequence
  Description of Artificial Sequence: Synthetic peptide
GDDLDCWKN

SEQ ID NO: 38773 - protein, 9 aa, Artificial Sequence
  Description of Artificial Sequence: Synthetic peptide
GDEDHGSKM

SEQ ID NO: 38774 - protein, 9 aa, Artificial Sequence
  Description of Artificial Sequence: Synthetic peptide
GDELHFLRM

SEQ ID NO: 38775 - protein, 9 aa, Artificial Sequence
  Description of Artificial Sequence: Synthetic peptide
GDERPGRRN

SEQ ID NO: 38776 - protein, 9 aa, Artificial Sequence
  Description of Artificial Sequence: Synthetic peptide
GDLCRYWRD

SEQ ID NO: 38777 - protein, 9 aa, Artificial Sequence
  Description of Artificial Sequence: Synthetic peptide
GDPDDDEIW

SEQ ID NO: 38778 - protein, 9 aa, Artificial Sequence
  Description of Artificial Sequence: Synthetic peptide
GEAIDNEKW

SEQ ID NO: 38779 - protein, 9 aa, Artificial Sequence
  Description of Artificial Sequence: Synthetic peptide
GEEEDRMIH

SEQ ID NO: 38780 - protein, 9 aa, Artificial Sequence
  Description of Artificial Sequence: Synthetic peptide
GESCDEKSD

SEQ ID NO: 38781 - protein, 9 aa, Artificial Sequence
  Description of Artificial Sequence: Synthetic peptide
GIPCWQDEW

SEQ ID NO: 38782 - protein, 9 aa, Artificial Sequence
  Description of Artificial Sequence: Synthetic peptide
GKPEDGFDD

SEQ ID NO: 38783 - protein, 9 aa, Artificial Sequence
  Description of Artificial Sequence: Synthetic peptide
GPMRRRINI

SEQ ID NO: 38784 - protein, 9 aa, Artificial Sequence
  Description of Artificial Sequence: Synthetic peptide
GRCQPWYFH

SEQ ID NO: 38785 - protein, 9 aa, Artificial Sequence
  Description of Artificial Sequence: Synthetic peptide
GRDCDEAPD

SEQ ID NO: 38786 - protein, 9 aa, Artificial Sequence
  Description of Artificial Sequence: Synthetic peptide
GRDFYWKIE

SEQ ID NO: 38787 - protein, 9 aa, Artificial Sequence
  Description of Artificial Sequence: Synthetic peptide
GRECSAQRM

SEQ ID NO: 38788 - protein, 9 aa, Artificial Sequence
  Description of Artificial Sequence: Synthetic peptide
GRHGDDLEV

SEQ ID NO: 38789 - protein, 9 aa, Artificial Sequence
  Description of Artificial Sequence: Synthetic peptide
GRPQCWYKH

SEQ ID NO: 38790 - protein, 9 aa, Artificial Sequence
  Description of Artificial Sequence: Synthetic peptide
GRTCDYHDM

SEQ ID NO: 38791 - protein, 9 aa, Artificial Sequence
  Description of Artificial Sequence: Synthetic peptide
HDATPTPRY

SEQ ID NO: 38792 - protein, 9 aa, Artificial Sequence
  Description of Artificial Sequence: Synthetic peptide
HDCCEWWRA

SEQ ID NO: 38793 - protein, 9 aa, Artificial Sequence
  Description of Artificial Sequence: Synthetic peptide
HDCWAEWIA

SEQ ID NO: 38794 - protein, 9 aa, Artificial Sequence
  Description of Artificial Sequence: Synthetic peptide
HDDGDGFQF

SEQ ID NO: 38795 - protein, 9 aa, Artificial Sequence
  Description of Artificial Sequence: Synthetic peptide
HDDIEAIRQ

SEQ ID NO: 38796 - protein, 9 aa, Artificial Sequence
  Description of Artificial Sequence: Synthetic peptide
HDEGPEFKD

SEQ ID NO: 38797 - protein, 9 aa, Artificial Sequence
  Description of Artificial Sequence: Synthetic peptide
HDELWVDRM

SEQ ID NO: 38798 - protein, 9 aa, Artificial Sequence
  Description of Artificial Sequence: Synthetic peptide
HDESGEWLE

SEQ ID NO: 38799 - protein, 9 aa, Artificial Sequence
  Description of Artificial Sequence: Synthetic peptide
HDHKWKPPE

SEQ ID NO: 38800 - protein, 9 aa, Artificial Sequence
  Description of Artificial Sequence: Synthetic peptide
HDKWENPGQ

SEQ ID NO: 38801 - protein, 9 aa, Artificial Sequence
  Description of Artificial Sequence: Synthetic peptide
HDLQPGMNN

SEQ ID NO: 38802 - protein, 9 aa, Artificial Sequence
  Description of Artificial Sequence: Synthetic peptide
HDPCTQIKP

SEQ ID NO: 38803 - protein, 9 aa, Artificial Sequence
  Description of Artificial Sequence: Synthetic peptide
HDPWNVLDW

SEQ ID NO: 38804 - protein, 9 aa, Artificial Sequence
  Description of Artificial Sequence: Synthetic peptide
HDYEPKCMG

SEQ ID NO: 38805 - protein, 9 aa, Artificial Sequence
  Description of Artificial Sequence: Synthetic peptide
HEFKDDMPH

SEQ ID NO: 38806 - protein, 9 aa, Artificial Sequence
  Description of Artificial Sequence: Synthetic peptide
HENKEEQKD

SEQ ID NO: 38807 - protein, 9 aa, Artificial Sequence
  Description of Artificial Sequence: Synthetic peptide
HEQWDNIPC

SEQ ID NO: 38808 - protein, 9 aa, Artificial Sequence
  Description of Artificial Sequence: Synthetic peptide
HFECRTMPN

SEQ ID NO: 38809 - protein, 9 aa, Artificial Sequence
  Description of Artificial Sequence: Synthetic peptide
HFEFWNGGM

SEQ ID NO: 38810 - protein, 9 aa, Artificial Sequence
  Description of Artificial Sequence: Synthetic peptide
HGDHRGNRE

SEQ ID NO: 38811 - protein, 9 aa, Artificial Sequence
  Description of Artificial Sequence: Synthetic peptide
HGSMDSVYW

SEQ ID NO: 38812 - protein, 9 aa, Artificial Sequence
  Description of Artificial Sequence: Synthetic peptide
HHQHNEIEL

SEQ ID NO: 38813 - protein, 9 aa, Artificial Sequence
  Description of Artificial Sequence: Synthetic peptide
HKECPRQRH

SEQ ID NO: 38814 - protein, 9 aa, Artificial Sequence
  Description of Artificial Sequence: Synthetic peptide
HKGFEPERQ

SEQ ID NO: 38815 - protein, 9 aa, Artificial Sequence
  Description of Artificial Sequence: Synthetic peptide
HKPCHGTEF

SEQ ID NO: 38816 - protein, 9 aa, Artificial Sequence
  Description of Artificial Sequence: Synthetic peptide
HMEDWMLEM

SEQ ID NO: 38817 - protein, 9 aa, Artificial Sequence
  Description of Artificial Sequence: Synthetic peptide
HNDTWQPRL

SEQ ID NO: 38818 - protein, 9 aa, Artificial Sequence
  Description of Artificial Sequence: Synthetic peptide
HNEGERWPN

SEQ ID NO: 38819 - protein, 9 aa, Artificial Sequence
  Description of Artificial Sequence: Synthetic peptide
HQCMWDWLT

SEQ ID NO: 38820 - protein, 9 aa, Artificial Sequence
  Description of Artificial Sequence: Synthetic peptide
HRCCETTIN

SEQ ID NO: 38821 - protein, 9 aa, Artificial Sequence
  Description of Artificial Sequence: Synthetic peptide
HRCPIDSRI

SEQ ID NO: 38822 - protein, 9 aa, Artificial Sequence
  Description of Artificial Sequence: Synthetic peptide
HRECGVWDF

SEQ ID NO: 38823 - protein, 9 aa, Artificial Sequence
  Description of Artificial Sequence: Synthetic peptide
HRSDDDQRF

SEQ ID NO: 38824 - protein, 9 aa, Artificial Sequence
  Description of Artificial Sequence: Synthetic peptide
HRSDPPQKM

SEQ ID NO: 38825 - protein, 9 aa, Artificial Sequence
  Description of Artificial Sequence: Synthetic peptide
HTCRLDVNM

SEQ ID NO: 38826 - protein, 9 aa, Artificial Sequence
  Description of Artificial Sequence: Synthetic peptide
HVEEWAEKM

SEQ ID NO: 38827 - protein, 9 aa, Artificial Sequence
  Description of Artificial Sequence: Synthetic peptide
HWSIDAPRK

SEQ ID NO: 38828 - protein, 9 aa, Artificial Sequence
  Description of Artificial Sequence: Synthetic peptide
IDAKPYGRE

SEQ ID NO: 38829 - protein, 9 aa, Artificial Sequence
  Description of Artificial Sequence: Synthetic peptide
IDAWEEHYE

SEQ ID NO: 38830 - protein, 9 aa, Artificial Sequence
  Description of Artificial Sequence: Synthetic peptide
IDCCSFSPT

SEQ ID NO: 38831 - protein, 9 aa, Artificial Sequence
  Description of Artificial Sequence: Synthetic peptide
IDCQRWCQQ

SEQ ID NO: 38832 - protein, 9 aa, Artificial Sequence
  Description of Artificial Sequence: Synthetic peptide
IDCTPWIQT

SEQ ID NO: 38833 - protein, 9 aa, Artificial Sequence
  Description of Artificial Sequence: Synthetic peptide
IDDDPEPTR

SEQ ID NO: 38834 - protein, 9 aa, Artificial Sequence
  Description of Artificial Sequence: Synthetic peptide
IDDKKWIHA

SEQ ID NO: 38835 - protein, 9 aa, Artificial Sequence
  Description of Artificial Sequence: Synthetic peptide
IDDRIWNCD

SEQ ID NO: 38836 - protein, 9 aa, Artificial Sequence
  Description of Artificial Sequence: Synthetic peptide
IDDWLMDKP

SEQ ID NO: 38837 - protein, 9 aa, Artificial Sequence
  Description of Artificial Sequence: Synthetic peptide
IDEWDCIDS

SEQ ID NO: 38838 - protein, 9 aa, Artificial Sequence
  Description of Artificial Sequence: Synthetic peptide
IDFHDCFTK

SEQ ID NO: 38839 - protein, 9 aa, Artificial Sequence
  Description of Artificial Sequence: Synthetic peptide
IDFNDWIPW

SEQ ID NO: 38840 - protein, 9 aa, Artificial Sequence
  Description of Artificial Sequence: Synthetic peptide
IDGDDEHRA

SEQ ID NO: 38841 - protein, 9 aa, Artificial Sequence
  Description of Artificial Sequence: Synthetic peptide
IDHKEAFFE

SEQ ID NO: 38842 - protein, 9 aa, Artificial Sequence
  Description of Artificial Sequence: Synthetic peptide
IDIHEREHF

SEQ ID NO: 38843 - protein, 9 aa, Artificial Sequence
  Description of Artificial Sequence: Synthetic peptide
IDKWEWNRD

SEQ ID NO: 38844 - protein, 9 aa, Artificial Sequence
  Description of Artificial Sequence: Synthetic peptide
IDLQDCNPW

SEQ ID NO: 38845 - protein, 9 aa, Artificial Sequence
  Description of Artificial Sequence: Synthetic peptide
IDMTDMVLW

SEQ ID NO: 38846 - protein, 9 aa, Artificial Sequence
  Description of Artificial Sequence: Synthetic peptide
IDPEGESIS

SEQ ID NO: 38847 - protein, 9 aa, Artificial Sequence
  Description of Artificial Sequence: Synthetic peptide
IDPFDWEGM

SEQ ID NO: 38848 - protein, 9 aa, Artificial Sequence
  Description of Artificial Sequence: Synthetic peptide
IDPFWTFKF

SEQ ID NO: 38849 - protein, 9 aa, Artificial Sequence
  Description of Artificial Sequence: Synthetic peptide
IDPPEQDIM

SEQ ID NO: 38850 - protein, 9 aa, Artificial Sequence
  Description of Artificial Sequence: Synthetic peptide
IDPYDCDPT

SEQ ID NO: 38851 - protein, 9 aa, Artificial Sequence
  Description of Artificial Sequence: Synthetic peptide
IECNDDCPE

SEQ ID NO: 38852 - protein, 9 aa, Artificial Sequence
  Description of Artificial Sequence: Synthetic peptide
IEKFDDPPA

SEQ ID NO: 38853 - protein, 9 aa, Artificial Sequence
  Description of Artificial Sequence: Synthetic peptide
IEPWEHMSN

SEQ ID NO: 38854 - protein, 9 aa, Artificial Sequence
  Description of Artificial Sequence: Synthetic peptide
IEQKGWRRD

SEQ ID NO: 38855 - protein, 9 aa, Artificial Sequence
  Description of Artificial Sequence: Synthetic peptide
IESDPCVAG

SEQ ID NO: 38856 - protein, 9 aa, Artificial Sequence
  Description of Artificial Sequence: Synthetic peptide
IEWDPWIHL

SEQ ID NO: 38857 - protein, 9 aa, Artificial Sequence
  Description of Artificial Sequence: Synthetic peptide
IEWFRWMMW

SEQ ID NO: 38858 - protein, 9 aa, Artificial Sequence
  Description of Artificial Sequence: Synthetic peptide
IFDPRVKAW

SEQ ID NO: 38859 - protein, 9 aa, Artificial Sequence
  Description of Artificial Sequence: Synthetic peptide
IGENMWIWH

SEQ ID NO: 38860 - protein, 9 aa, Artificial Sequence
  Description of Artificial Sequence: Synthetic peptide
IHPMRIGPW

SEQ ID NO: 38861 - protein, 9 aa, Artificial Sequence
  Description of Artificial Sequence: Synthetic peptide
IHTVPDWVM

SEQ ID NO: 38862 - protein, 9 aa, Artificial Sequence
  Description of Artificial Sequence: Synthetic peptide
IIVEVEICH

SEQ ID NO: 38863 - protein, 9 aa, Artificial Sequence
  Description of Artificial Sequence: Synthetic peptide
IKDGPEIDP

SEQ ID NO: 38864 - protein, 9 aa, Artificial Sequence
  Description of Artificial Sequence: Synthetic peptide
IKFWDGLRD

SEQ ID NO: 38865 - protein, 9 aa, Artificial Sequence
  Description of Artificial Sequence: Synthetic peptide
IKPCDEPVD

SEQ ID NO: 38866 - protein, 9 aa, Artificial Sequence
  Description of Artificial Sequence: Synthetic peptide
IKPIGFWVN

SEQ ID NO: 38867 - protein, 9 aa, Artificial Sequence
  Description of Artificial Sequence: Synthetic peptide
IKVKPDNIM

SEQ ID NO: 38868 - protein, 9 aa, Artificial Sequence
  Description of Artificial Sequence: Synthetic peptide
IKWPDEHIW

SEQ ID NO: 38869 - protein, 9 aa, Artificial Sequence
  Description of Artificial Sequence: Synthetic peptide
INPYGTPLN

SEQ ID NO: 38870 - protein, 9 aa, Artificial Sequence
  Description of Artificial Sequence: Synthetic peptide
IPWCDYFFA

SEQ ID NO: 38871 - protein, 9 aa, Artificial Sequence
  Description of Artificial Sequence: Synthetic peptide
IQDCNSIRY

SEQ ID NO: 38872 - protein, 9 aa, Artificial Sequence
  Description of Artificial Sequence: Synthetic peptide
IQERMSIED

SEQ ID NO: 38873 - protein, 9 aa, Artificial Sequence
  Description of Artificial Sequence: Synthetic peptide
IQLGEFWKE

SEQ ID NO: 38874 - protein, 9 aa, Artificial Sequence
  Description of Artificial Sequence: Synthetic peptide
IQWMDMDPW

SEQ ID NO: 38875 - protein, 9 aa, Artificial Sequence
  Description of Artificial Sequence: Synthetic peptide
IRDFGERRI

SEQ ID NO: 38876 - protein, 9 aa, Artificial Sequence
  Description of Artificial Sequence: Synthetic peptide
IRDIDYLPW

SEQ ID NO: 38877 - protein, 9 aa, Artificial Sequence
  Description of Artificial Sequence: Synthetic peptide
IRDMSCLPS

SEQ ID NO: 38878 - protein, 9 aa, Artificial Sequence
  Description of Artificial Sequence: Synthetic peptide
IRGDEEDRN

SEQ ID NO: 38879 - protein, 9 aa, Artificial Sequence
  Description of Artificial Sequence: Synthetic peptide
IRGDEMLED

SEQ ID NO: 38880 - protein, 9 aa, Artificial Sequence
  Description of Artificial Sequence: Synthetic peptide
IRGREDMLQ

SEQ ID NO: 38881 - protein, 9 aa, Artificial Sequence
  Description of Artificial Sequence: Synthetic peptide
IRHCDGDCE

SEQ ID NO: 38882 - protein, 9 aa, Artificial Sequence
  Description of Artificial Sequence: Synthetic peptide
IRHEDGCTY

SEQ ID NO: 38883 - protein, 9 aa, Artificial Sequence
  Description of Artificial Sequence: Synthetic peptide
IRPCAPARR

SEQ ID NO: 38884 - protein, 9 aa, Artificial Sequence
  Description of Artificial Sequence: Synthetic peptide
IRPDGEEIQ

SEQ ID NO: 38885 - protein, 9 aa, Artificial Sequence
  Description of Artificial Sequence: Synthetic peptide
IRPNSSLEL

SEQ ID NO: 38886 - protein, 9 aa, Artificial Sequence
  Description of Artificial Sequence: Synthetic peptide
IRPTGTTPN

SEQ ID NO: 38887 - protein, 9 aa, Artificial Sequence
  Description of Artificial Sequence: Synthetic peptide
IRSCPMKCP

SEQ ID NO: 38888 - protein, 9 aa, Artificial Sequence
  Description of Artificial Sequence: Synthetic peptide
ITCDWYYQM

SEQ ID NO: 38889 - protein, 9 aa, Artificial Sequence
  Description of Artificial Sequence: Synthetic peptide
IVSPADIVP

SEQ ID NO: 38890 - protein, 9 aa, Artificial Sequence
  Description of Artificial Sequence: Synthetic peptide
IWERDPDGE

SEQ ID NO: 38891 - protein, 9 aa, Artificial Sequence
  Description of Artificial Sequence: Synthetic peptide
IYCMPYIRA

SEQ ID NO: 38892 - protein, 9 aa, Artificial Sequence
  Description of Artificial Sequence: Synthetic peptide
KDCNHRAEN

SEQ ID NO: 38893 - protein, 9 aa, Artificial Sequence
  Description of Artificial Sequence: Synthetic peptide
KDDCAAWNC

SEQ ID NO: 38894 - protein, 9 aa, Artificial Sequence
  Description of Artificial Sequence: Synthetic peptide
KDEDDIWID

SEQ ID NO: 38895 - protein, 9 aa, Artificial Sequence
  Description of Artificial Sequence: Synthetic peptide
KDHGHQLPP

SEQ ID NO: 38896 - protein, 9 aa, Artificial Sequence
  Description of Artificial Sequence: Synthetic peptide
KDHLGGKRN

SEQ ID NO: 38897 - protein, 9 aa, Artificial Sequence
  Description of Artificial Sequence: Synthetic peptide
KDHMGCPPH

SEQ ID NO: 38898 - protein, 9 aa, Artificial Sequence
  Description of Artificial Sequence: Synthetic peptide
KDHWHPPKY

SEQ ID NO: 38899 - protein, 9 aa, Artificial Sequence
  Description of Artificial Sequence: Synthetic peptide
KDKMKWLKE

SEQ ID NO: 38900 - protein, 9 aa, Artificial Sequence
  Description of Artificial Sequence: Synthetic peptide
KDMCYLSKK

SEQ ID NO: 38901 - protein, 9 aa, Artificial Sequence
  Description of Artificial Sequence: Synthetic peptide
KDNFWMYKT

SEQ ID NO: 38902 - protein, 9 aa, Artificial Sequence
  Description of Artificial Sequence: Synthetic peptide
KDNGNKMDE

SEQ ID NO: 38903 - protein, 9 aa, Artificial Sequence
  Description of Artificial Sequence: Synthetic peptide
KDRTQIWKQ

SEQ ID NO: 38904 - protein, 9 aa, Artificial Sequence
  Description of Artificial Sequence: Synthetic peptide
KDSPWFERT

SEQ ID NO: 38905 - protein, 9 aa, Artificial Sequence
  Description of Artificial Sequence: Synthetic peptide
KDSQRHDKE

SEQ ID NO: 38906 - protein, 9 aa, Artificial Sequence
  Description of Artificial Sequence: Synthetic peptide
KDVFWENKF

SEQ ID NO: 38907 - protein, 9 aa, Artificial Sequence
  Description of Artificial Sequence: Synthetic peptide
KDWSELYEY

SEQ ID NO: 38908 - protein, 9 aa, Artificial Sequence
  Description of Artificial Sequence: Synthetic peptide
KDYIPQLRG

SEQ ID NO: 38909 - protein, 9 aa, Artificial Sequence
  Description of Artificial Sequence: Synthetic peptide
KDYNDQEEN

SEQ ID NO: 38910 - protein, 9 aa, Artificial Sequence
  Description of Artificial Sequence: Synthetic peptide
KEKIQDYPE

SEQ ID NO: 38911 - protein, 9 aa, Artificial Sequence
  Description of Artificial Sequence: Synthetic peptide
KEWFDWCIT

SEQ ID NO: 38912 - protein, 9 aa, Artificial Sequence
  Description of Artificial Sequence: Synthetic peptide
KPLKCWEPQ

SEQ ID NO: 38913 - protein, 9 aa, Artificial Sequence
  Description of Artificial Sequence: Synthetic peptide
KRDYWCWPM

SEQ ID NO: 38914 - protein, 9 aa, Artificial Sequence
  Description of Artificial Sequence: Synthetic peptide
LCSFDDSII

SEQ ID NO: 38915 - protein, 9 aa, Artificial Sequence
  Description of Artificial Sequence: Synthetic peptide
LCSFGDSIS

SEQ ID NO: 38916 - protein, 9 aa, Artificial Sequence
  Description of Artificial Sequence: Synthetic peptide
LDCMRWGFN

SEQ ID NO: 38917 - protein, 9 aa, Artificial Sequence
  Description of Artificial Sequence: Synthetic peptide
LDCPPAPKM

SEQ ID NO: 38918 - protein, 9 aa, Artificial Sequence
  Description of Artificial Sequence: Synthetic peptide
LDCRPEHPD

SEQ ID NO: 38919 - protein, 9 aa, Artificial Sequence
  Description of Artificial Sequence: Synthetic peptide
LDDEESLVF

SEQ ID NO: 38920 - protein, 9 aa, Artificial Sequence
  Description of Artificial Sequence: Synthetic peptide
LDDWDFKPW

SEQ ID NO: 38921 - protein, 9 aa, Artificial Sequence
  Description of Artificial Sequence: Synthetic peptide
LDECEIECN

SEQ ID NO: 38922 - protein, 9 aa, Artificial Sequence
  Description of Artificial Sequence: Synthetic peptide
LDEFKMEPQ

SEQ ID NO: 38923 - protein, 9 aa, Artificial Sequence
  Description of Artificial Sequence: Synthetic peptide
LDGFDTNLE

SEQ ID NO: 38924 - protein, 9 aa, Artificial Sequence
  Description of Artificial Sequence: Synthetic peptide
LDGTDAVRL

SEQ ID NO: 38925 - protein, 9 aa, Artificial Sequence
  Description of Artificial Sequence: Synthetic peptide
LDHKWPDYI

SEQ ID NO: 38926 - protein, 9 aa, Artificial Sequence
  Description of Artificial Sequence: Synthetic peptide
LDIRWYEHV

SEQ ID NO: 38927 - protein, 9 aa, Artificial Sequence
  Description of Artificial Sequence: Synthetic peptide
LDLWRNWKI

SEQ ID NO: 38928 - protein, 9 aa, Artificial Sequence
  Description of Artificial Sequence: Synthetic peptide
LDPCAWVKV

SEQ ID NO: 38929 - protein, 9 aa, Artificial Sequence
  Description of Artificial Sequence: Synthetic peptide
LDPFAQPFS

SEQ ID NO: 38930 - protein, 9 aa, Artificial Sequence
  Description of Artificial Sequence: Synthetic peptide
LDPTDPGRW

SEQ ID NO: 38931 - protein, 9 aa, Artificial Sequence
  Description of Artificial Sequence: Synthetic peptide
LDRLEAPTG

SEQ ID NO: 38932 - protein, 9 aa, Artificial Sequence
  Description of Artificial Sequence: Synthetic peptide
LDRNRVHRQ

SEQ ID NO: 38933 - protein, 9 aa, Artificial Sequence
  Description of Artificial Sequence: Synthetic peptide
LDSCDPRLK

SEQ ID NO: 38934 - protein, 9 aa, Artificial Sequence
  Description of Artificial Sequence: Synthetic peptide
LDTCEMLKQ

SEQ ID NO: 38935 - protein, 9 aa, Artificial Sequence
  Description of Artificial Sequence: Synthetic peptide
LDTGEMLKQ

SEQ ID NO: 38936 - protein, 9 aa, Artificial Sequence
  Description of Artificial Sequence: Synthetic peptide
LDTKRWPKY

SEQ ID NO: 38937 - protein, 9 aa, Artificial Sequence
  Description of Artificial Sequence: Synthetic peptide
LDWKDKERG

SEQ ID NO: 38938 - protein, 9 aa, Artificial Sequence
  Description of Artificial Sequence: Synthetic peptide
LDYRDIARD

SEQ ID NO: 38939 - protein, 9 aa, Artificial Sequence
  Description of Artificial Sequence: Synthetic peptide
LEAGEKWNF

SEQ ID NO: 38940 - protein, 9 aa, Artificial Sequence
  Description of Artificial Sequence: Synthetic peptide
LEAHEGEKF

SEQ ID NO: 38941 - protein, 9 aa, Artificial Sequence
  Description of Artificial Sequence: Synthetic peptide
LEDLRLPRM

SEQ ID NO: 38942 - protein, 9 aa, Artificial Sequence
  Description of Artificial Sequence: Synthetic peptide
LENKWCYKM

SEQ ID NO: 38943 - protein, 9 aa, Artificial Sequence
  Description of Artificial Sequence: Synthetic peptide
LENRPELND

SEQ ID NO: 38944 - protein, 9 aa, Artificial Sequence
  Description of Artificial Sequence: Synthetic peptide
LESCSPIVS

SEQ ID NO: 38945 - protein, 9 aa, Artificial Sequence
  Description of Artificial Sequence: Synthetic peptide
LEWIHDWYH

SEQ ID NO: 38946 - protein, 9 aa, Artificial Sequence
  Description of Artificial Sequence: Synthetic peptide
LEWYECVVT

SEQ ID NO: 38947 - protein, 9 aa, Artificial Sequence
  Description of Artificial Sequence: Synthetic peptide
LGDCPGEPH

SEQ ID NO: 38948 - protein, 9 aa, Artificial Sequence
  Description of Artificial Sequence: Synthetic peptide
LGLCDREMQ

SEQ ID NO: 38949 - protein, 9 aa, Artificial Sequence
  Description of Artificial Sequence: Synthetic peptide
LGSFDDSIS

SEQ ID NO: 38950 - protein, 9 aa, Artificial Sequence
  Description of Artificial Sequence: Synthetic peptide
LHDWWMREM

SEQ ID NO: 38951 - protein, 9 aa, Artificial Sequence
  Description of Artificial Sequence: Synthetic peptide
LHQRDRIEF

SEQ ID NO: 38952 - protein, 9 aa, Artificial Sequence
  Description of Artificial Sequence: Synthetic peptide
LKCGSLIDV

SEQ ID NO: 38953 - protein, 9 aa, Artificial Sequence
  Description of Artificial Sequence: Synthetic peptide
LKLADWWTT

SEQ ID NO: 38954 - protein, 9 aa, Artificial Sequence
  Description of Artificial Sequence: Synthetic peptide
LKLRDEVNE

SEQ ID NO: 38955 - protein, 9 aa, Artificial Sequence
  Description of Artificial Sequence: Synthetic peptide
LKMERCMIA

SEQ ID NO: 38956 - protein, 9 aa, Artificial Sequence
  Description of Artificial Sequence: Synthetic peptide
LKPFEDLLN

SEQ ID NO: 38957 - protein, 9 aa, Artificial Sequence
  Description of Artificial Sequence: Synthetic peptide
LKQWDPWLC

SEQ ID NO: 38958 - protein, 9 aa, Artificial Sequence
  Description of Artificial Sequence: Synthetic peptide
LLDCRGPEV

SEQ ID NO: 38959 - protein, 9 aa, Artificial Sequence
  Description of Artificial Sequence: Synthetic peptide
LNDHEMPGM

SEQ ID NO: 38960 - protein, 9 aa, Artificial Sequence
  Description of Artificial Sequence: Synthetic peptide
LNRCDAPKL

SEQ ID NO: 38961 - protein, 9 aa, Artificial Sequence
  Description of Artificial Sequence: Synthetic peptide
LNWPDYHCM

SEQ ID NO: 38962 - protein, 9 aa, Artificial Sequence
  Description of Artificial Sequence: Synthetic peptide
LQCREGLPM

SEQ ID NO: 38963 - protein, 9 aa, Artificial Sequence
  Description of Artificial Sequence: Synthetic peptide
LQDEPEPPH

SEQ ID NO: 38964 - protein, 9 aa, Artificial Sequence
  Description of Artificial Sequence: Synthetic peptide
LQDFRFCKQ

SEQ ID NO: 38965 - protein, 9 aa, Artificial Sequence
  Description of Artificial Sequence: Synthetic peptide
LQDPACDPS

SEQ ID NO: 38966 - protein, 9 aa, Artificial Sequence
  Description of Artificial Sequence: Synthetic peptide
LQHRDSVES

SEQ ID NO: 38967 - protein, 9 aa, Artificial Sequence
  Description of Artificial Sequence: Synthetic peptide
LRCKWWRTV

SEQ ID NO: 38968 - protein, 9 aa, Artificial Sequence
  Description of Artificial Sequence: Synthetic peptide
LRDFWECRL

SEQ ID NO: 38969 - protein, 9 aa, Artificial Sequence
  Description of Artificial Sequence: Synthetic peptide
LRDWDGNRM

SEQ ID NO: 38970 - protein, 9 aa, Artificial Sequence
  Description of Artificial Sequence: Synthetic peptide
LREVDYPSM

SEQ ID NO: 38971 - protein, 9 aa, Artificial Sequence
  Description of Artificial Sequence: Synthetic peptide
LREWKWCPD

SEQ ID NO: 38972 - protein, 9 aa, Artificial Sequence
  Description of Artificial Sequence: Synthetic peptide
LRPCEGGQD

SEQ ID NO: 38973 - protein, 9 aa, Artificial Sequence
  Description of Artificial Sequence: Synthetic peptide
LRPDIAWEC

SEQ ID NO: 38974 - protein, 9 aa, Artificial Sequence
  Description of Artificial Sequence: Synthetic peptide
LRPGGGLKK

SEQ ID NO: 38975 - protein, 9 aa, Artificial Sequence
  Description of Artificial Sequence: Synthetic peptide
LRTIWSPRM

SEQ ID NO: 38976 - protein, 9 aa, Artificial Sequence
  Description of Artificial Sequence: Synthetic peptide
LRTNDCNFH

SEQ ID NO: 38977 - protein, 9 aa, Artificial Sequence
  Description of Artificial Sequence: Synthetic peptide
LRVMDPLEG

SEQ ID NO: 38978 - protein, 9 aa, Artificial Sequence
  Description of Artificial Sequence: Synthetic peptide
LRYNDLKIH

SEQ ID NO: 38979 - protein, 9 aa, Artificial Sequence
  Description of Artificial Sequence: Synthetic peptide
LTGCSDEVQ

SEQ ID NO: 38980 - protein, 9 aa, Artificial Sequence
  Description of Artificial Sequence: Synthetic peptide
LWADGWELK

SEQ ID NO: 38981 - protein, 9 aa, Artificial Sequence
  Description of Artificial Sequence: Synthetic peptide
LYQCTDPEK

SEQ ID NO: 38982 - protein, 9 aa, Artificial Sequence
  Description of Artificial Sequence: Synthetic peptide
LYQPGEPKS

SEQ ID NO: 38983 - protein, 9 aa, Artificial Sequence
  Description of Artificial Sequence: Synthetic peptide
MDACEGQNN

SEQ ID NO: 38984 - protein, 9 aa, Artificial Sequence
  Description of Artificial Sequence: Synthetic peptide
MDARDECYQ

SEQ ID NO: 38985 - protein, 9 aa, Artificial Sequence
  Description of Artificial Sequence: Synthetic peptide
MDCRREHRH

SEQ ID NO: 38986 - protein, 9 aa, Artificial Sequence
  Description of Artificial Sequence: Synthetic peptide
MDDFEAIRW

SEQ ID NO: 38987 - protein, 9 aa, Artificial Sequence
  Description of Artificial Sequence: Synthetic peptide
MDDSEVLKY

SEQ ID NO: 38988 - protein, 9 aa, Artificial Sequence
  Description of Artificial Sequence: Synthetic peptide
MDEEFWPFN

SEQ ID NO: 38989 - protein, 9 aa, Artificial Sequence
  Description of Artificial Sequence: Synthetic peptide
MDERDAHEE

SEQ ID NO: 38990 - protein, 9 aa, Artificial Sequence
  Description of Artificial Sequence: Synthetic peptide
MDERWWIKI

SEQ ID NO: 38991 - protein, 9 aa, Artificial Sequence
  Description of Artificial Sequence: Synthetic peptide
MDFEEMWVW

SEQ ID NO: 38992 - protein, 9 aa, Artificial Sequence
  Description of Artificial Sequence: Synthetic peptide
MDHKDGYRQ

SEQ ID NO: 38993 - protein, 9 aa, Artificial Sequence
  Description of Artificial Sequence: Synthetic peptide
MDHLHKPKT

SEQ ID NO: 38994 - protein, 9 aa, Artificial Sequence
  Description of Artificial Sequence: Synthetic peptide
MDNHKKPRA

SEQ ID NO: 38995 - protein, 9 aa, Artificial Sequence
  Description of Artificial Sequence: Synthetic peptide
MDPDPKCGM

SEQ ID NO: 38996 - protein, 9 aa, Artificial Sequence
  Description of Artificial Sequence: Synthetic peptide
MDPSHGKIN

SEQ ID NO: 38997 - protein, 9 aa, Artificial Sequence
  Description of Artificial Sequence: Synthetic peptide
MEGFDGWRM

SEQ ID NO: 38998 - protein, 9 aa, Artificial Sequence
  Description of Artificial Sequence: Synthetic peptide
MEMYRWCRH

SEQ ID NO: 38999 - protein, 9 aa, Artificial Sequence
  Description of Artificial Sequence: Synthetic peptide
MFDCRFPRY

SEQ ID NO: 39000 - protein, 9 aa, Artificial Sequence
  Description of Artificial Sequence: Synthetic peptide
MFDFWNLTM

SEQ ID NO: 39001 - protein, 9 aa, Artificial Sequence
  Description of Artificial Sequence: Synthetic peptide
MGECDWPMH

SEQ ID NO: 39002 - protein, 9 aa, Artificial Sequence
  Description of Artificial Sequence: Synthetic peptide
MGMEDDWKH

SEQ ID NO: 39003 - protein, 9 aa, Artificial Sequence
  Description of Artificial Sequence: Synthetic peptide
MHPWDALDM

SEQ ID NO: 39004 - protein, 9 aa, Artificial Sequence
  Description of Artificial Sequence: Synthetic peptide
MHYFRYCKN

SEQ ID NO: 39005 - protein, 9 aa, Artificial Sequence
  Description of Artificial Sequence: Synthetic peptide
MKDFWTEKW

SEQ ID NO: 39006 - protein, 9 aa, Artificial Sequence
  Description of Artificial Sequence: Synthetic peptide
MMNHHDTRP

SEQ ID NO: 39007 - protein, 9 aa, Artificial Sequence
  Description of Artificial Sequence: Synthetic peptide
MNPMAYTRN

SEQ ID NO: 39008 - protein, 9 aa, Artificial Sequence
  Description of Artificial Sequence: Synthetic peptide
MQPFQMHRG

SEQ ID NO: 39009 - protein, 9 aa, Artificial Sequence
  Description of Artificial Sequence: Synthetic peptide
MRCDGWIQF

SEQ ID NO: 39010 - protein, 9 aa, Artificial Sequence
  Description of Artificial Sequence: Synthetic peptide
MRCDLKKKE

SEQ ID NO: 39011 - protein, 9 aa, Artificial Sequence
  Description of Artificial Sequence: Synthetic peptide
MRDWEASKM

SEQ ID NO: 39012 - protein, 9 aa, Artificial Sequence
  Description of Artificial Sequence: Synthetic peptide
MRQFGCPTE

SEQ ID NO: 39013 - protein, 9 aa, Artificial Sequence
  Description of Artificial Sequence: Synthetic peptide
NDCMHNDRW

SEQ ID NO: 39014 - protein, 9 aa, Artificial Sequence
  Description of Artificial Sequence: Synthetic peptide
NDDEPGWKQ

SEQ ID NO: 39015 - protein, 9 aa, Artificial Sequence
  Description of Artificial Sequence: Synthetic peptide
NDDEPPSRL

SEQ ID NO: 39016 - protein, 9 aa, Artificial Sequence
  Description of Artificial Sequence: Synthetic peptide
NDDFDCQEA

SEQ ID NO: 39017 - protein, 9 aa, Artificial Sequence
  Description of Artificial Sequence: Synthetic peptide
NDDLDCCVK

SEQ ID NO: 39018 - protein, 9 aa, Artificial Sequence
  Description of Artificial Sequence: Synthetic peptide
NDDRCFIRA

SEQ ID NO: 39019 - protein, 9 aa, Artificial Sequence
  Description of Artificial Sequence: Synthetic peptide
NDEIDAQYH

SEQ ID NO: 39020 - protein, 9 aa, Artificial Sequence
  Description of Artificial Sequence: Synthetic peptide
NDEIECIGH

SEQ ID NO: 39021 - protein, 9 aa, Artificial Sequence
  Description of Artificial Sequence: Synthetic peptide
NDMFPSFDC

SEQ ID NO: 39022 - protein, 9 aa, Artificial Sequence
  Description of Artificial Sequence: Synthetic peptide
NDPGNRPRE

SEQ ID NO: 39023 - protein, 9 aa, Artificial Sequence
  Description of Artificial Sequence: Synthetic peptide
NDPRRPDSN

SEQ ID NO: 39024 - protein, 9 aa, Artificial Sequence
  Description of Artificial Sequence: Synthetic peptide
NDRCEKPDI

SEQ ID NO: 39025 - protein, 9 aa, Artificial Sequence
  Description of Artificial Sequence: Synthetic peptide
NDRPEADEH

SEQ ID NO: 39026 - protein, 9 aa, Artificial Sequence
  Description of Artificial Sequence: Synthetic peptide
NDSMGEPKS

SEQ ID NO: 39027 - protein, 9 aa, Artificial Sequence
  Description of Artificial Sequence: Synthetic peptide
NDSYGQPKV

SEQ ID NO: 39028 - protein, 9 aa, Artificial Sequence
  Description of Artificial Sequence: Synthetic peptide
NDTGPHGRH

SEQ ID NO: 39029 - protein, 9 aa, Artificial Sequence
  Description of Artificial Sequence: Synthetic peptide
NDTNRALKM

SEQ ID NO: 39030 - protein, 9 aa, Artificial Sequence
  Description of Artificial Sequence: Synthetic peptide
NDYIDEFPY

SEQ ID NO: 39031 - protein, 9 aa, Artificial Sequence
  Description of Artificial Sequence: Synthetic peptide
NDYVEEHPM

SEQ ID NO: 39032 - protein, 9 aa, Artificial Sequence
  Description of Artificial Sequence: Synthetic peptide
NECCDRHPM

SEQ ID NO: 39033 - protein, 9 aa, Artificial Sequence
  Description of Artificial Sequence: Synthetic peptide
NEDHENPSN

SEQ ID NO: 39034 - protein, 9 aa, Artificial Sequence
  Description of Artificial Sequence: Synthetic peptide
NEDQEEDPC

SEQ ID NO: 39035 - protein, 9 aa, Artificial Sequence
  Description of Artificial Sequence: Synthetic peptide
NEYRPPPQV

SEQ ID NO: 39036 - protein, 9 aa, Artificial Sequence
  Description of Artificial Sequence: Synthetic peptide
NGYFDAMRH

SEQ ID NO: 39037 - protein, 9 aa, Artificial Sequence
  Description of Artificial Sequence: Synthetic peptide
NHCDENWYW

SEQ ID NO: 39038 - protein, 9 aa, Artificial Sequence
  Description of Artificial Sequence: Synthetic peptide
NHCKDWEEH

SEQ ID NO: 39039 - protein, 9 aa, Artificial Sequence
  Description of Artificial Sequence: Synthetic peptide
NKPIWYVEM

SEQ ID NO: 39040 - protein, 9 aa, Artificial Sequence
  Description of Artificial Sequence: Synthetic peptide
NPENHKCRF

SEQ ID NO: 39041 - protein, 9 aa, Artificial Sequence
  Description of Artificial Sequence: Synthetic peptide
NQEKTEPKC

SEQ ID NO: 39042 - protein, 9 aa, Artificial Sequence
  Description of Artificial Sequence: Synthetic peptide
NQEMEYHPS

SEQ ID NO: 39043 - protein, 9 aa, Artificial Sequence
  Description of Artificial Sequence: Synthetic peptide
NQTCDQEEM

SEQ ID NO: 39044 - protein, 9 aa, Artificial Sequence
  Description of Artificial Sequence: Synthetic peptide
NRDWFEWKM

SEQ ID NO: 39045 - protein, 9 aa, Artificial Sequence
  Description of Artificial Sequence: Synthetic peptide
NRDWRFFRI

SEQ ID NO: 39046 - protein, 9 aa, Artificial Sequence
  Description of Artificial Sequence: Synthetic peptide
NREQDELKW

SEQ ID NO: 39047 - protein, 9 aa, Artificial Sequence
  Description of Artificial Sequence: Synthetic peptide
NREWPDYRD

SEQ ID NO: 39048 - protein, 9 aa, Artificial Sequence
  Description of Artificial Sequence: Synthetic peptide
NRGVDRLKW

SEQ ID NO: 39049 - protein, 9 aa, Artificial Sequence
  Description of Artificial Sequence: Synthetic peptide
NRPEGRGEC

SEQ ID NO: 39050 - protein, 9 aa, Artificial Sequence
  Description of Artificial Sequence: Synthetic peptide
NRVLEIERK

SEQ ID NO: 39051 - protein, 9 aa, Artificial Sequence
  Description of Artificial Sequence: Synthetic peptide
NRYFDAMRH

SEQ ID NO: 39052 - protein, 9 aa, Artificial Sequence
  Description of Artificial Sequence: Synthetic peptide
NTDFECVGN

SEQ ID NO: 39053 - protein, 9 aa, Artificial Sequence
  Description of Artificial Sequence: Synthetic peptide
NVCEQDIYE

SEQ ID NO: 39054 - protein, 9 aa, Artificial Sequence
  Description of Artificial Sequence: Synthetic peptide
PDALDPCDP

SEQ ID NO: 39055 - protein, 9 aa, Artificial Sequence
  Description of Artificial Sequence: Synthetic peptide
PDAYDDRNH

SEQ ID NO: 39056 - protein, 9 aa, Artificial Sequence
  Description of Artificial Sequence: Synthetic peptide
PDCEPGNVE

SEQ ID NO: 39057 - protein, 9 aa, Artificial Sequence
  Description of Artificial Sequence: Synthetic peptide
PDDCPWPNN

SEQ ID NO: 39058 - protein, 9 aa, Artificial Sequence
  Description of Artificial Sequence: Synthetic peptide
PDDFDKFMW

SEQ ID NO: 39059 - protein, 9 aa, Artificial Sequence
  Description of Artificial Sequence: Synthetic peptide
PDDFEGGPL

SEQ ID NO: 39060 - protein, 9 aa, Artificial Sequence
  Description of Artificial Sequence: Synthetic peptide
PDDHESPRD

SEQ ID NO: 39061 - protein, 9 aa, Artificial Sequence
  Description of Artificial Sequence: Synthetic peptide
PDDHETPTN

SEQ ID NO: 39062 - protein, 9 aa, Artificial Sequence
  Description of Artificial Sequence: Synthetic peptide
PDDIHRFPK

SEQ ID NO: 39063 - protein, 9 aa, Artificial Sequence
  Description of Artificial Sequence: Synthetic peptide
PDEQSLPFD

SEQ ID NO: 39064 - protein, 9 aa, Artificial Sequence
  Description of Artificial Sequence: Synthetic peptide
PDEVPRCRA

SEQ ID NO: 39065 - protein, 9 aa, Artificial Sequence
  Description of Artificial Sequence: Synthetic peptide
PDKLDRFVG

SEQ ID NO: 39066 - protein, 9 aa, Artificial Sequence
  Description of Artificial Sequence: Synthetic peptide
PDLFEKCRI

SEQ ID NO: 39067 - protein, 9 aa, Artificial Sequence
  Description of Artificial Sequence: Synthetic peptide
PDLRDHWQM

SEQ ID NO: 39068 - protein, 9 aa, Artificial Sequence
  Description of Artificial Sequence: Synthetic peptide
PDNAQGPQC

SEQ ID NO: 39069 - protein, 9 aa, Artificial Sequence
  Description of Artificial Sequence: Synthetic peptide
PDNEDARPK

SEQ ID NO: 39070 - protein, 9 aa, Artificial Sequence
  Description of Artificial Sequence: Synthetic peptide
PDPADKCTY

SEQ ID NO: 39071 - protein, 9 aa, Artificial Sequence
  Description of Artificial Sequence: Synthetic peptide
PDPEGEDEP

SEQ ID NO: 39072 - protein, 9 aa, Artificial Sequence
  Description of Artificial Sequence: Synthetic peptide
PDPGIRWPM

SEQ ID NO: 39073 - protein, 9 aa, Artificial Sequence
  Description of Artificial Sequence: Synthetic peptide
PDPHEDGNP

SEQ ID NO: 39074 - protein, 9 aa, Artificial Sequence
  Description of Artificial Sequence: Synthetic peptide
PDPLGWLAH

SEQ ID NO: 39075 - protein, 9 aa, Artificial Sequence
  Description of Artificial Sequence: Synthetic peptide
PDPPKKYED

SEQ ID NO: 39076 - protein, 9 aa, Artificial Sequence
  Description of Artificial Sequence: Synthetic peptide
PDPPKQYED

SEQ ID NO: 39077 - protein, 9 aa, Artificial Sequence
  Description of Artificial Sequence: Synthetic peptide
PDPQQMSRR

SEQ ID NO: 39078 - protein, 9 aa, Artificial Sequence
  Description of Artificial Sequence: Synthetic peptide
PDPRYWIMN

SEQ ID NO: 39079 - protein, 9 aa, Artificial Sequence
  Description of Artificial Sequence: Synthetic peptide
PDPSDKGTY

SEQ ID NO: 39080 - protein, 9 aa, Artificial Sequence
  Description of Artificial Sequence: Synthetic peptide
PDPSPAKGV

SEQ ID NO: 39081 - protein, 9 aa, Artificial Sequence
  Description of Artificial Sequence: Synthetic peptide
PDPSPYCKS

SEQ ID NO: 39082 - protein, 9 aa, Artificial Sequence
  Description of Artificial Sequence: Synthetic peptide
PDPWPWMDD

SEQ ID NO: 39083 - protein, 9 aa, Artificial Sequence
  Description of Artificial Sequence: Synthetic peptide
PDQDDMMHG

SEQ ID NO: 39084 - protein, 9 aa, Artificial Sequence
  Description of Artificial Sequence: Synthetic peptide
PDQFENSFK

SEQ ID NO: 39085 - protein, 9 aa, Artificial Sequence
  Description of Artificial Sequence: Synthetic peptide
PDQFIRWPM

SEQ ID NO: 39086 - protein, 9 aa, Artificial Sequence
  Description of Artificial Sequence: Synthetic peptide
PDQHDPSNL

SEQ ID NO: 39087 - protein, 9 aa, Artificial Sequence
  Description of Artificial Sequence: Synthetic peptide
PDQSHIDLM

SEQ ID NO: 39088 - protein, 9 aa, Artificial Sequence
  Description of Artificial Sequence: Synthetic peptide
PDRCDLTDF

SEQ ID NO: 39089 - protein, 9 aa, Artificial Sequence
  Description of Artificial Sequence: Synthetic peptide
PDRCNYVRH

SEQ ID NO: 39090 - protein, 9 aa, Artificial Sequence
  Description of Artificial Sequence: Synthetic peptide
PDSGEQPVA

SEQ ID NO: 39091 - protein, 9 aa, Artificial Sequence
  Description of Artificial Sequence: Synthetic peptide
PDSPGVCRC

SEQ ID NO: 39092 - protein, 9 aa, Artificial Sequence
  Description of Artificial Sequence: Synthetic peptide
PDTMWREHG

SEQ ID NO: 39093 - protein, 9 aa, Artificial Sequence
  Description of Artificial Sequence: Synthetic peptide
PDTYHYCEW

SEQ ID NO: 39094 - protein, 9 aa, Artificial Sequence
  Description of Artificial Sequence: Synthetic peptide
PDVNQGPWL

SEQ ID NO: 39095 - protein, 9 aa, Artificial Sequence
  Description of Artificial Sequence: Synthetic peptide
PDVSERMMD

SEQ ID NO: 39096 - protein, 9 aa, Artificial Sequence
  Description of Artificial Sequence: Synthetic peptide
PECGDRGDR

SEQ ID NO: 39097 - protein, 9 aa, Artificial Sequence
  Description of Artificial Sequence: Synthetic peptide
PEDCPDGKA

SEQ ID NO: 39098 - protein, 9 aa, Artificial Sequence
  Description of Artificial Sequence: Synthetic peptide
PEDEWGFEY

SEQ ID NO: 39099 - protein, 9 aa, Artificial Sequence
  Description of Artificial Sequence: Synthetic peptide
PEEDEHDVC

SEQ ID NO: 39100 - protein, 9 aa, Artificial Sequence
  Description of Artificial Sequence: Synthetic peptide
PEEDSPWIM

SEQ ID NO: 39101 - protein, 9 aa, Artificial Sequence
  Description of Artificial Sequence: Synthetic peptide
PEFGWWIAM

SEQ ID NO: 39102 - protein, 9 aa, Artificial Sequence
  Description of Artificial Sequence: Synthetic peptide
PEHHFRWPH

SEQ ID NO: 39103 - protein, 9 aa, Artificial Sequence
  Description of Artificial Sequence: Synthetic peptide
PEHKDHFET

SEQ ID NO: 39104 - protein, 9 aa, Artificial Sequence
  Description of Artificial Sequence: Synthetic peptide
PEKLDLINY

SEQ ID NO: 39105 - protein, 9 aa, Artificial Sequence
  Description of Artificial Sequence: Synthetic peptide
PEKYDIWPV

SEQ ID NO: 39106 - protein, 9 aa, Artificial Sequence
  Description of Artificial Sequence: Synthetic peptide
PEMEDASLG

SEQ ID NO: 39107 - protein, 9 aa, Artificial Sequence
  Description of Artificial Sequence: Synthetic peptide
PENDHGMEA

SEQ ID NO: 39108 - protein, 9 aa, Artificial Sequence
  Description of Artificial Sequence: Synthetic peptide
PESFPAERC

SEQ ID NO: 39109 - protein, 9 aa, Artificial Sequence
  Description of Artificial Sequence: Synthetic peptide
PESNDKRES

SEQ ID NO: 39110 - protein, 9 aa, Artificial Sequence
  Description of Artificial Sequence: Synthetic peptide
PETGKAPHI

SEQ ID NO: 39111 - protein, 9 aa, Artificial Sequence
  Description of Artificial Sequence: Synthetic peptide
PETIRGGKC

SEQ ID NO: 39112 - protein, 9 aa, Artificial Sequence
  Description of Artificial Sequence: Synthetic peptide
PEVNEGIHL

SEQ ID NO: 39113 - protein, 9 aa, Artificial Sequence
  Description of Artificial Sequence: Synthetic peptide
PEYPKKGKC

SEQ ID NO: 39114 - protein, 9 aa, Artificial Sequence
  Description of Artificial Sequence: Synthetic peptide
PEYYDDDHS

SEQ ID NO: 39115 - protein, 9 aa, Artificial Sequence
  Description of Artificial Sequence: Synthetic peptide
PFPRDWHDA

SEQ ID NO: 39116 - protein, 9 aa, Artificial Sequence
  Description of Artificial Sequence: Synthetic peptide
PGAIDWQIM

SEQ ID NO: 39117 - protein, 9 aa, Artificial Sequence
  Description of Artificial Sequence: Synthetic peptide
PGCCDRLVE

SEQ ID NO: 39118 - protein, 9 aa, Artificial Sequence
  Description of Artificial Sequence: Synthetic peptide
PGDFGTAED

SEQ ID NO: 39119 - protein, 9 aa, Artificial Sequence
  Description of Artificial Sequence: Synthetic peptide
PGGMCWWER

SEQ ID NO: 39120 - protein, 9 aa, Artificial Sequence
  Description of Artificial Sequence: Synthetic peptide
PGGNDCLLF

SEQ ID NO: 39121 - protein, 9 aa, Artificial Sequence
  Description of Artificial Sequence: Synthetic peptide
PGPKPWKEI

SEQ ID NO: 39122 - protein, 9 aa, Artificial Sequence
  Description of Artificial Sequence: Synthetic peptide
PGPNDVNHC

SEQ ID NO: 39123 - protein, 9 aa, Artificial Sequence
  Description of Artificial Sequence: Synthetic peptide
PGSHGPPVC

SEQ ID NO: 39124 - protein, 9 aa, Artificial Sequence
  Description of Artificial Sequence: Synthetic peptide
PGTMDPPVN

SEQ ID NO: 39125 - protein, 9 aa, Artificial Sequence
  Description of Artificial Sequence: Synthetic peptide
PGYNRLEPS

SEQ ID NO: 39126 - protein, 9 aa, Artificial Sequence
  Description of Artificial Sequence: Synthetic peptide
PHCEEGPED

SEQ ID NO: 39127 - protein, 9 aa, Artificial Sequence
  Description of Artificial Sequence: Synthetic peptide
PHDFWVIED

SEQ ID NO: 39128 - protein, 9 aa, Artificial Sequence
  Description of Artificial Sequence: Synthetic peptide
PHDNDAYFW

SEQ ID NO: 39129 - protein, 9 aa, Artificial Sequence
  Description of Artificial Sequence: Synthetic peptide
PHDRRKNDN

SEQ ID NO: 39130 - protein, 9 aa, Artificial Sequence
  Description of Artificial Sequence: Synthetic peptide
PHEIEYYMN

SEQ ID NO: 39131 - protein, 9 aa, Artificial Sequence
  Description of Artificial Sequence: Synthetic peptide
PHEWDMCAE

SEQ ID NO: 39132 - protein, 9 aa, Artificial Sequence
  Description of Artificial Sequence: Synthetic peptide
PHNNHWIEP

SEQ ID NO: 39133 - protein, 9 aa, Artificial Sequence
  Description of Artificial Sequence: Synthetic peptide
PHNQWMPKS

SEQ ID NO: 39134 - protein, 9 aa, Artificial Sequence
  Description of Artificial Sequence: Synthetic peptide
PHRHGYRKD

SEQ ID NO: 39135 - protein, 9 aa, Artificial Sequence
  Description of Artificial Sequence: Synthetic peptide
PHRQDRMIW

SEQ ID NO: 39136 - protein, 9 aa, Artificial Sequence
  Description of Artificial Sequence: Synthetic peptide
PHTCCGPEE

SEQ ID NO: 39137 - protein, 9 aa, Artificial Sequence
  Description of Artificial Sequence: Synthetic peptide
PHTDRLDIN

SEQ ID NO: 39138 - protein, 9 aa, Artificial Sequence
  Description of Artificial Sequence: Synthetic peptide
PHWFNWPMC

SEQ ID NO: 39139 - protein, 9 aa, Artificial Sequence
  Description of Artificial Sequence: Synthetic peptide
PHYNTVPEN

SEQ ID NO: 39140 - protein, 9 aa, Artificial Sequence
  Description of Artificial Sequence: Synthetic peptide
PKCSNWLNM

SEQ ID NO: 39141 - protein, 9 aa, Artificial Sequence
  Description of Artificial Sequence: Synthetic peptide
PKCTDWNGV

SEQ ID NO: 39142 - protein, 9 aa, Artificial Sequence
  Description of Artificial Sequence: Synthetic peptide
PKDNPIEPK

SEQ ID NO: 39143 - protein, 9 aa, Artificial Sequence
  Description of Artificial Sequence: Synthetic peptide
PKDTKGPET

SEQ ID NO: 39144 - protein, 9 aa, Artificial Sequence
  Description of Artificial Sequence: Synthetic peptide
PKEQPCAEY

SEQ ID NO: 39145 - protein, 9 aa, Artificial Sequence
  Description of Artificial Sequence: Synthetic peptide
PKEWDKPPH

SEQ ID NO: 39146 - protein, 9 aa, Artificial Sequence
  Description of Artificial Sequence: Synthetic peptide
PKHEDCCPE

SEQ ID NO: 39147 - protein, 9 aa, Artificial Sequence
  Description of Artificial Sequence: Synthetic peptide
PKKYDRDVM

SEQ ID NO: 39148 - protein, 9 aa, Artificial Sequence
  Description of Artificial Sequence: Synthetic peptide
PKPWETSRC

SEQ ID NO: 39149 - protein, 9 aa, Artificial Sequence
  Description of Artificial Sequence: Synthetic peptide
PKQGPAIFN

SEQ ID NO: 39150 - protein, 9 aa, Artificial Sequence
  Description of Artificial Sequence: Synthetic peptide
PKSCGDGND

SEQ ID NO: 39151 - protein, 9 aa, Artificial Sequence
  Description of Artificial Sequence: Synthetic peptide
PKTCNCKVT

SEQ ID NO: 39152 - protein, 9 aa, Artificial Sequence
  Description of Artificial Sequence: Synthetic peptide
PKYHESAKS

SEQ ID NO: 39153 - protein, 9 aa, Artificial Sequence
  Description of Artificial Sequence: Synthetic peptide
PLQDGCEMH

SEQ ID NO: 39154 - protein, 9 aa, Artificial Sequence
  Description of Artificial Sequence: Synthetic peptide
PMHYWKSEM

SEQ ID NO: 39155 - protein, 9 aa, Artificial Sequence
  Description of Artificial Sequence: Synthetic peptide
PMPLCCWSL

SEQ ID NO: 39156 - protein, 9 aa, Artificial Sequence
  Description of Artificial Sequence: Synthetic peptide
PNALDMCVE

SEQ ID NO: 39157 - protein, 9 aa, Artificial Sequence
  Description of Artificial Sequence: Synthetic peptide
PNEPWCPVV

SEQ ID NO: 39158 - protein, 9 aa, Artificial Sequence
  Description of Artificial Sequence: Synthetic peptide
PNESNEIEH

SEQ ID NO: 39159 - protein, 9 aa, Artificial Sequence
  Description of Artificial Sequence: Synthetic peptide
PNNAWIDKQ

SEQ ID NO: 39160 - protein, 9 aa, Artificial Sequence
  Description of Artificial Sequence: Synthetic peptide
PNNEENDAM

SEQ ID NO: 39161 - protein, 9 aa, Artificial Sequence
  Description of Artificial Sequence: Synthetic peptide
PNNNDQDKT

SEQ ID NO: 39162 - protein, 9 aa, Artificial Sequence
  Description of Artificial Sequence: Synthetic peptide
PNPHDRPRW

SEQ ID NO: 39163 - protein, 9 aa, Artificial Sequence
  Description of Artificial Sequence: Synthetic peptide
PNQLDKPAM

SEQ ID NO: 39164 - protein, 9 aa, Artificial Sequence
  Description of Artificial Sequence: Synthetic peptide
PNQRNEIEH

SEQ ID NO: 39165 - protein, 9 aa, Artificial Sequence
  Description of Artificial Sequence: Synthetic peptide
PNWGIEPGF

SEQ ID NO: 39166 - protein, 9 aa, Artificial Sequence
  Description of Artificial Sequence: Synthetic peptide
PQCKPLVPM

SEQ ID NO: 39167 - protein, 9 aa, Artificial Sequence
  Description of Artificial Sequence: Synthetic peptide
PQGCDKYLW

SEQ ID NO: 39168 - protein, 9 aa, Artificial Sequence
  Description of Artificial Sequence: Synthetic peptide
PQHYDKWEI

SEQ ID NO: 39169 - protein, 9 aa, Artificial Sequence
  Description of Artificial Sequence: Synthetic peptide
PQLPELEKW

SEQ ID NO: 39170 - protein, 9 aa, Artificial Sequence
  Description of Artificial Sequence: Synthetic peptide
PQNGHICKG

SEQ ID NO: 39171 - protein, 9 aa, Artificial Sequence
  Description of Artificial Sequence: Synthetic peptide
PQNYDQDKV

SEQ ID NO: 39172 - protein, 9 aa, Artificial Sequence
  Description of Artificial Sequence: Synthetic peptide
PQPNRTSPH

SEQ ID NO: 39173 - protein, 9 aa, Artificial Sequence
  Description of Artificial Sequence: Synthetic peptide
PQSEPAPYD

SEQ ID NO: 39174 - protein, 9 aa, Artificial Sequence
  Description of Artificial Sequence: Synthetic peptide
PQSFWGSEM

SEQ ID NO: 39175 - protein, 9 aa, Artificial Sequence
  Description of Artificial Sequence: Synthetic peptide
PRCDPCMGV

SEQ ID NO: 39176 - protein, 9 aa, Artificial Sequence
  Description of Artificial Sequence: Synthetic peptide
PREGDWEGM

SEQ ID NO: 39177 - protein, 9 aa, Artificial Sequence
  Description of Artificial Sequence: Synthetic peptide
PREMWECQC

SEQ ID NO: 39178 - protein, 9 aa, Artificial Sequence
  Description of Artificial Sequence: Synthetic peptide
PREQRPSKS

SEQ ID NO: 39179 - protein, 9 aa, Artificial Sequence
  Description of Artificial Sequence: Synthetic peptide
PRGLPTPMN

SEQ ID NO: 39180 - protein, 9 aa, Artificial Sequence
  Description of Artificial Sequence: Synthetic peptide
PRNCPEDWS

SEQ ID NO: 39181 - protein, 9 aa, Artificial Sequence
  Description of Artificial Sequence: Synthetic peptide
PRNYEAAEC

SEQ ID NO: 39182 - protein, 9 aa, Artificial Sequence
  Description of Artificial Sequence: Synthetic peptide
PRRMPLVPH

SEQ ID NO: 39183 - protein, 9 aa, Artificial Sequence
  Description of Artificial Sequence: Synthetic peptide
PRSDDDQRF

SEQ ID NO: 39184 - protein, 9 aa, Artificial Sequence
  Description of Artificial Sequence: Synthetic peptide
PRSGDDQRF

SEQ ID NO: 39185 - protein, 9 aa, Artificial Sequence
  Description of Artificial Sequence: Synthetic peptide
PRTDGCPWA

SEQ ID NO: 39186 - protein, 9 aa, Artificial Sequence
  Description of Artificial Sequence: Synthetic peptide
PRYQDRCMW

SEQ ID NO: 39187 - protein, 9 aa, Artificial Sequence
  Description of Artificial Sequence: Synthetic peptide
PTPDGSDKN

SEQ ID NO: 39188 - protein, 9 aa, Artificial Sequence
  Description of Artificial Sequence: Synthetic peptide
PTVPQCPRH

SEQ ID NO: 39189 - protein, 9 aa, Artificial Sequence
  Description of Artificial Sequence: Synthetic peptide
PVPHSCERR

SEQ ID NO: 39190 - protein, 9 aa, Artificial Sequence
  Description of Artificial Sequence: Synthetic peptide
PWFHKRYKN

SEQ ID NO: 39191 - protein, 9 aa, Artificial Sequence
  Description of Artificial Sequence: Synthetic peptide
PWNISCPKE

SEQ ID NO: 39192 - protein, 9 aa, Artificial Sequence
  Description of Artificial Sequence: Synthetic peptide
PWPKWCWPA

SEQ ID NO: 39193 - protein, 9 aa, Artificial Sequence
  Description of Artificial Sequence: Synthetic peptide
PWQFGHAKQ

SEQ ID NO: 39194 - protein, 9 aa, Artificial Sequence
  Description of Artificial Sequence: Synthetic peptide
PWTYRGEDF

SEQ ID NO: 39195 - protein, 9 aa, Artificial Sequence
  Description of Artificial Sequence: Synthetic peptide
PYDQRTDDA

SEQ ID NO: 39196 - protein, 9 aa, Artificial Sequence
  Description of Artificial Sequence: Synthetic peptide
PYGPMCTMG

SEQ ID NO: 39197 - protein, 9 aa, Artificial Sequence
  Description of Artificial Sequence: Synthetic peptide
PYKMNHPRE

SEQ ID NO: 39198 - protein, 9 aa, Artificial Sequence
  Description of Artificial Sequence: Synthetic peptide
PYNCRRCPD

SEQ ID NO: 39199 - protein, 9 aa, Artificial Sequence
  Description of Artificial Sequence: Synthetic peptide
PYNPNVDPH

SEQ ID NO: 39200 - protein, 9 aa, Artificial Sequence
  Description of Artificial Sequence: Synthetic peptide
QDAMDPWRI

SEQ ID NO: 39201 - protein, 9 aa, Artificial Sequence
  Description of Artificial Sequence: Synthetic peptide
QDCVERIKS

SEQ ID NO: 39202 - protein, 9 aa, Artificial Sequence
  Description of Artificial Sequence: Synthetic peptide
QDEIDPSEH

SEQ ID NO: 39203 - protein, 9 aa, Artificial Sequence
  Description of Artificial Sequence: Synthetic peptide
QDEIRMPFN

SEQ ID NO: 39204 - protein, 9 aa, Artificial Sequence
  Description of Artificial Sequence: Synthetic peptide
QDEMDGYDQ

SEQ ID NO: 39205 - protein, 9 aa, Artificial Sequence
  Description of Artificial Sequence: Synthetic peptide
QDFLPVLKW

SEQ ID NO: 39206 - protein, 9 aa, Artificial Sequence
  Description of Artificial Sequence: Synthetic peptide
QDHCEPFEP

SEQ ID NO: 39207 - protein, 9 aa, Artificial Sequence
  Description of Artificial Sequence: Synthetic peptide
QDHKDECNE

SEQ ID NO: 39208 - protein, 9 aa, Artificial Sequence
  Description of Artificial Sequence: Synthetic peptide
QDHLADWRN

SEQ ID NO: 39209 - protein, 9 aa, Artificial Sequence
  Description of Artificial Sequence: Synthetic peptide
QDKHEPGKW

SEQ ID NO: 39210 - protein, 9 aa, Artificial Sequence
  Description of Artificial Sequence: Synthetic peptide
QDKMPCWQF

SEQ ID NO: 39211 - protein, 9 aa, Artificial Sequence
  Description of Artificial Sequence: Synthetic peptide
QDMGEKLTH

SEQ ID NO: 39212 - protein, 9 aa, Artificial Sequence
  Description of Artificial Sequence: Synthetic peptide
QDMHDKEPA

SEQ ID NO: 39213 - protein, 9 aa, Artificial Sequence
  Description of Artificial Sequence: Synthetic peptide
QDPCSWLKN

SEQ ID NO: 39214 - protein, 9 aa, Artificial Sequence
  Description of Artificial Sequence: Synthetic peptide
QDPHHNHRH

SEQ ID NO: 39215 - protein, 9 aa, Artificial Sequence
  Description of Artificial Sequence: Synthetic peptide
QDPQWWMRC

SEQ ID NO: 39216 - protein, 9 aa, Artificial Sequence
  Description of Artificial Sequence: Synthetic peptide
QDRYGVPEN

SEQ ID NO: 39217 - protein, 9 aa, Artificial Sequence
  Description of Artificial Sequence: Synthetic peptide
QDTDEGDQC

SEQ ID NO: 39218 - protein, 9 aa, Artificial Sequence
  Description of Artificial Sequence: Synthetic peptide
QENTPGYEG

SEQ ID NO: 39219 - protein, 9 aa, Artificial Sequence
  Description of Artificial Sequence: Synthetic peptide
QEPTEITPM

SEQ ID NO: 39220 - protein, 9 aa, Artificial Sequence
  Description of Artificial Sequence: Synthetic peptide
QKPSDEKRC

SEQ ID NO: 39221 - protein, 9 aa, Artificial Sequence
  Description of Artificial Sequence: Synthetic peptide
QKQCDRTAW

SEQ ID NO: 39222 - protein, 9 aa, Artificial Sequence
  Description of Artificial Sequence: Synthetic peptide
QMFMPYCPF

SEQ ID NO: 39223 - protein, 9 aa, Artificial Sequence
  Description of Artificial Sequence: Synthetic peptide
QQPWCWWEK

SEQ ID NO: 39224 - protein, 9 aa, Artificial Sequence
  Description of Artificial Sequence: Synthetic peptide
QRCDDWIHS

SEQ ID NO: 39225 - protein, 9 aa, Artificial Sequence
  Description of Artificial Sequence: Synthetic peptide
QRCKPRCPM

SEQ ID NO: 39226 - protein, 9 aa, Artificial Sequence
  Description of Artificial Sequence: Synthetic peptide
QRDPEDFET

SEQ ID NO: 39227 - protein, 9 aa, Artificial Sequence
  Description of Artificial Sequence: Synthetic peptide
QRMHDCCDL

SEQ ID NO: 39228 - protein, 9 aa, Artificial Sequence
  Description of Artificial Sequence: Synthetic peptide
QVECSWDKY

SEQ ID NO: 39229 - protein, 9 aa, Artificial Sequence
  Description of Artificial Sequence: Synthetic peptide
RDAKDGGRP

SEQ ID NO: 39230 - protein, 9 aa, Artificial Sequence
  Description of Artificial Sequence: Synthetic peptide
RDAYWAEDN

SEQ ID NO: 39231 - protein, 9 aa, Artificial Sequence
  Description of Artificial Sequence: Synthetic peptide
RDCFWCIGE

SEQ ID NO: 39232 - protein, 9 aa, Artificial Sequence
  Description of Artificial Sequence: Synthetic peptide
RDCHKGIKN

SEQ ID NO: 39233 - protein, 9 aa, Artificial Sequence
  Description of Artificial Sequence: Synthetic peptide
RDDCWPFNP

SEQ ID NO: 39234 - protein, 9 aa, Artificial Sequence
  Description of Artificial Sequence: Synthetic peptide
RDDLRLWPF

SEQ ID NO: 39235 - protein, 9 aa, Artificial Sequence
  Description of Artificial Sequence: Synthetic peptide
RDDLWLWPF

SEQ ID NO: 39236 - protein, 9 aa, Artificial Sequence
  Description of Artificial Sequence: Synthetic peptide
RDHNEKINY

SEQ ID NO: 39237 - protein, 9 aa, Artificial Sequence
  Description of Artificial Sequence: Synthetic peptide
RDHNEQINC

SEQ ID NO: 39238 - protein, 9 aa, Artificial Sequence
  Description of Artificial Sequence: Synthetic peptide
RDIKPWFEM

SEQ ID NO: 39239 - protein, 9 aa, Artificial Sequence
  Description of Artificial Sequence: Synthetic peptide
RDLEKGDEG

SEQ ID NO: 39240 - protein, 9 aa, Artificial Sequence
  Description of Artificial Sequence: Synthetic peptide
RDPAWIWDY

SEQ ID NO: 39241 - protein, 9 aa, Artificial Sequence
  Description of Artificial Sequence: Synthetic peptide
RDTMFEWKF

SEQ ID NO: 39242 - protein, 9 aa, Artificial Sequence
  Description of Artificial Sequence: Synthetic peptide
REEFPLCNQ

SEQ ID NO: 39243 - protein, 9 aa, Artificial Sequence
  Description of Artificial Sequence: Synthetic peptide
REEKDWFKH

SEQ ID NO: 39244 - protein, 9 aa, Artificial Sequence
  Description of Artificial Sequence: Synthetic peptide
RELDCMWEN

SEQ ID NO: 39245 - protein, 9 aa, Artificial Sequence
  Description of Artificial Sequence: Synthetic peptide
REPHDAKNN

SEQ ID NO: 39246 - protein, 9 aa, Artificial Sequence
  Description of Artificial Sequence: Synthetic peptide
REPYWCLGY

SEQ ID NO: 39247 - protein, 9 aa, Artificial Sequence
  Description of Artificial Sequence: Synthetic peptide
REQLWVHPG

SEQ ID NO: 39248 - protein, 9 aa, Artificial Sequence
  Description of Artificial Sequence: Synthetic peptide
REYPKAHRE

SEQ ID NO: 39249 - protein, 9 aa, Artificial Sequence
  Description of Artificial Sequence: Synthetic peptide
RHDTWHDEG

SEQ ID NO: 39250 - protein, 9 aa, Artificial Sequence
  Description of Artificial Sequence: Synthetic peptide
RKDYWSDDG

SEQ ID NO: 39251 - protein, 9 aa, Artificial Sequence
  Description of Artificial Sequence: Synthetic peptide
RLEWWIHPM

SEQ ID NO: 39252 - protein, 9 aa, Artificial Sequence
  Description of Artificial Sequence: Synthetic peptide
RNDFWPAGN

SEQ ID NO: 39253 - protein, 9 aa, Artificial Sequence
  Description of Artificial Sequence: Synthetic peptide
RNQDWGDRQ

SEQ ID NO: 39254 - protein, 9 aa, Artificial Sequence
  Description of Artificial Sequence: Synthetic peptide
RPEMRCFRN

SEQ ID NO: 39255 - protein, 9 aa, Artificial Sequence
  Description of Artificial Sequence: Synthetic peptide
RPKCNLIEM

SEQ ID NO: 39256 - protein, 9 aa, Artificial Sequence
  Description of Artificial Sequence: Synthetic peptide
RPNCYKAEH

SEQ ID NO: 39257 - protein, 9 aa, Artificial Sequence
  Description of Artificial Sequence: Synthetic peptide
RPWEWWIRK

SEQ ID NO: 39258 - protein, 9 aa, Artificial Sequence
  Description of Artificial Sequence: Synthetic peptide
RRPEWLKNY

SEQ ID NO: 39259 - protein, 9 aa, Artificial Sequence
  Description of Artificial Sequence: Synthetic peptide
SDCHENDPH

SEQ ID NO: 39260 - protein, 9 aa, Artificial Sequence
  Description of Artificial Sequence: Synthetic peptide
SDDWRDFDN

SEQ ID NO: 39261 - protein, 9 aa, Artificial Sequence
  Description of Artificial Sequence: Synthetic peptide
SDENDVDDC

SEQ ID NO: 39262 - protein, 9 aa, Artificial Sequence
  Description of Artificial Sequence: Synthetic peptide
SDENEMEPH

SEQ ID NO: 39263 - protein, 9 aa, Artificial Sequence
  Description of Artificial Sequence: Synthetic peptide
SDEWPYYRQ

SEQ ID NO: 39264 - protein, 9 aa, Artificial Sequence
  Description of Artificial Sequence: Synthetic peptide
SDNREWMRY

SEQ ID NO: 39265 - protein, 9 aa, Artificial Sequence
  Description of Artificial Sequence: Synthetic peptide
SDPCKVLRH

SEQ ID NO: 39266 - protein, 9 aa, Artificial Sequence
  Description of Artificial Sequence: Synthetic peptide
SDSADDPKF

SEQ ID NO: 39267 - protein, 9 aa, Artificial Sequence
  Description of Artificial Sequence: Synthetic peptide
SDSKGRERV

SEQ ID NO: 39268 - protein, 9 aa, Artificial Sequence
  Description of Artificial Sequence: Synthetic peptide
SDWDPSWDT

SEQ ID NO: 39269 - protein, 9 aa, Artificial Sequence
  Description of Artificial Sequence: Synthetic peptide
SDYSELPQH

SEQ ID NO: 39270 - protein, 9 aa, Artificial Sequence
  Description of Artificial Sequence: Synthetic peptide
SEHEPDITN

SEQ ID NO: 39271 - protein, 9 aa, Artificial Sequence
  Description of Artificial Sequence: Synthetic peptide
SEKFGIPRD

SEQ ID NO: 39272 - protein, 9 aa, Artificial Sequence
  Description of Artificial Sequence: Synthetic peptide
SEPPDWNTK

SEQ ID NO: 39273 - protein, 9 aa, Artificial Sequence
  Description of Artificial Sequence: Synthetic peptide
SGPRTWIKK

SEQ ID NO: 39274 - protein, 9 aa, Artificial Sequence
  Description of Artificial Sequence: Synthetic peptide
SHDIPVPIM

SEQ ID NO: 39275 - protein, 9 aa, Artificial Sequence
  Description of Artificial Sequence: Synthetic peptide
SHHNPGPRT

SEQ ID NO: 39276 - protein, 9 aa, Artificial Sequence
  Description of Artificial Sequence: Synthetic peptide
SHYPNRPKG

SEQ ID NO: 39277 - protein, 9 aa, Artificial Sequence
  Description of Artificial Sequence: Synthetic peptide
SKDWPPFKA

SEQ ID NO: 39278 - protein, 9 aa, Artificial Sequence
  Description of Artificial Sequence: Synthetic peptide
SKQYDPPKP

SEQ ID NO: 39279 - protein, 9 aa, Artificial Sequence
  Description of Artificial Sequence: Synthetic peptide
SMPLWQDSN

SEQ ID NO: 39280 - protein, 9 aa, Artificial Sequence
  Description of Artificial Sequence: Synthetic peptide
SMPMWWPKH

SEQ ID NO: 39281 - protein, 9 aa, Artificial Sequence
  Description of Artificial Sequence: Synthetic peptide
SNERACEEV

SEQ ID NO: 39282 - protein, 9 aa, Artificial Sequence
  Description of Artificial Sequence: Synthetic peptide
SQPTGWEEN

SEQ ID NO: 39283 - protein, 9 aa, Artificial Sequence
  Description of Artificial Sequence: Synthetic peptide
SRDGDEPNH

SEQ ID NO: 39284 - protein, 9 aa, Artificial Sequence
  Description of Artificial Sequence: Synthetic peptide
SREFWWDGT

SEQ ID NO: 39285 - protein, 9 aa, Artificial Sequence
  Description of Artificial Sequence: Synthetic peptide
SREWDCGSH

SEQ ID NO: 39286 - protein, 9 aa, Artificial Sequence
  Description of Artificial Sequence: Synthetic peptide
SRPPDWPRT

SEQ ID NO: 39287 - protein, 9 aa, Artificial Sequence
  Description of Artificial Sequence: Synthetic peptide
TDDCYGPKG

SEQ ID NO: 39288 - protein, 9 aa, Artificial Sequence
  Description of Artificial Sequence: Synthetic peptide
TDDHERGDC

SEQ ID NO: 39289 - protein, 9 aa, Artificial Sequence
  Description of Artificial Sequence: Synthetic peptide
TDDNGEIRP

SEQ ID NO: 39290 - protein, 9 aa, Artificial Sequence
  Description of Artificial Sequence: Synthetic peptide
TDDWYGPKC

SEQ ID NO: 39291 - protein, 9 aa, Artificial Sequence
  Description of Artificial Sequence: Synthetic peptide
TDEIPEMRY

SEQ ID NO: 39292 - protein, 9 aa, Artificial Sequence
  Description of Artificial Sequence: Synthetic peptide
TDFSDRLKW

SEQ ID NO: 39293 - protein, 9 aa, Artificial Sequence
  Description of Artificial Sequence: Synthetic peptide
TDHCNWSRT

SEQ ID NO: 39294 - protein, 9 aa, Artificial Sequence
  Description of Artificial Sequence: Synthetic peptide
TDHKDGFRI

SEQ ID NO: 39295 - protein, 9 aa, Artificial Sequence
  Description of Artificial Sequence: Synthetic peptide
TDHNGEIRT

SEQ ID NO: 39296 - protein, 9 aa, Artificial Sequence
  Description of Artificial Sequence: Synthetic peptide
TDNRWMDKW

SEQ ID NO: 39297 - protein, 9 aa, Artificial Sequence
  Description of Artificial Sequence: Synthetic peptide
TDPPDGFDM

SEQ ID NO: 39298 - protein, 9 aa, Artificial Sequence
  Description of Artificial Sequence: Synthetic peptide
TDSCEDCKI

SEQ ID NO: 39299 - protein, 9 aa, Artificial Sequence
  Description of Artificial Sequence: Synthetic peptide
TEFECFWNT

SEQ ID NO: 39300 - protein, 9 aa, Artificial Sequence
  Description of Artificial Sequence: Synthetic peptide
TESLEKGPM

SEQ ID NO: 39301 - protein, 9 aa, Artificial Sequence
  Description of Artificial Sequence: Synthetic peptide
TREGPQLKC

SEQ ID NO: 39302 - protein, 9 aa, Artificial Sequence
  Description of Artificial Sequence: Synthetic peptide
TRLKELLIW

SEQ ID NO: 39303 - protein, 9 aa, Artificial Sequence
  Description of Artificial Sequence: Synthetic peptide
TWDRECEYD

SEQ ID NO: 39304 - protein, 9 aa, Artificial Sequence
  Description of Artificial Sequence: Synthetic peptide
VDEFNVWKH

SEQ ID NO: 39305 - protein, 9 aa, Artificial Sequence
  Description of Artificial Sequence: Synthetic peptide
VDFFDWLDH

SEQ ID NO: 39306 - protein, 9 aa, Artificial Sequence
  Description of Artificial Sequence: Synthetic peptide
VDHITKWKF

SEQ ID NO: 39307 - protein, 9 aa, Artificial Sequence
  Description of Artificial Sequence: Synthetic peptide
VDPCDDGNA

SEQ ID NO: 39308 - protein, 9 aa, Artificial Sequence
  Description of Artificial Sequence: Synthetic peptide
VDQHERARN

SEQ ID NO: 39309 - protein, 9 aa, Artificial Sequence
  Description of Artificial Sequence: Synthetic peptide
VDQRDMATD

SEQ ID NO: 39310 - protein, 9 aa, Artificial Sequence
  Description of Artificial Sequence: Synthetic peptide
VDWFARWDS

SEQ ID NO: 39311 - protein, 9 aa, Artificial Sequence
  Description of Artificial Sequence: Synthetic peptide
VEFLDEIRH

SEQ ID NO: 39312 - protein, 9 aa, Artificial Sequence
  Description of Artificial Sequence: Synthetic peptide
VEKMREWPF

SEQ ID NO: 39313 - protein, 9 aa, Artificial Sequence
  Description of Artificial Sequence: Synthetic peptide
VEPYEGVRM

SEQ ID NO: 39314 - protein, 9 aa, Artificial Sequence
  Description of Artificial Sequence: Synthetic peptide
VLDCDNPVD

SEQ ID NO: 39315 - protein, 9 aa, Artificial Sequence
  Description of Artificial Sequence: Synthetic peptide
VNPMAYTRN

SEQ ID NO: 39316 - protein, 9 aa, Artificial Sequence
  Description of Artificial Sequence: Synthetic peptide
VRDCRWCIV

SEQ ID NO: 39317 - protein, 9 aa, Artificial Sequence
  Description of Artificial Sequence: Synthetic peptide
VREFEEDKN

SEQ ID NO: 39318 - protein, 9 aa, Artificial Sequence
  Description of Artificial Sequence: Synthetic peptide
VRPYADSRN

SEQ ID NO: 39319 - protein, 9 aa, Artificial Sequence
  Description of Artificial Sequence: Synthetic peptide
VRRDDPPRP

SEQ ID NO: 39320 - protein, 9 aa, Artificial Sequence
  Description of Artificial Sequence: Synthetic peptide
VRSCGGHDI

SEQ ID NO: 39321 - protein, 9 aa, Artificial Sequence
  Description of Artificial Sequence: Synthetic peptide
VRSWDTDFE

SEQ ID NO: 39322 - protein, 9 aa, Artificial Sequence
  Description of Artificial Sequence: Synthetic peptide
VYWREEIRI

SEQ ID NO: 39323 - protein, 9 aa, Artificial Sequence
  Description of Artificial Sequence: Synthetic peptide
WDCEDGWQQ

SEQ ID NO: 39324 - protein, 9 aa, Artificial Sequence
  Description of Artificial Sequence: Synthetic peptide
WDDHERGQV

SEQ ID NO: 39325 - protein, 9 aa, Artificial Sequence
  Description of Artificial Sequence: Synthetic peptide
WDDRPALKG

SEQ ID NO: 39326 - protein, 9 aa, Artificial Sequence
  Description of Artificial Sequence: Synthetic peptide
WDDRQCEQH

SEQ ID NO: 39327 - protein, 9 aa, Artificial Sequence
  Description of Artificial Sequence: Synthetic peptide
WDEKPAGQV

SEQ ID NO: 39328 - protein, 9 aa, Artificial Sequence
  Description of Artificial Sequence: Synthetic peptide
WDFCKCADI

SEQ ID NO: 39329 - protein, 9 aa, Artificial Sequence
  Description of Artificial Sequence: Synthetic peptide
WDFNDGITP

SEQ ID NO: 39330 - protein, 9 aa, Artificial Sequence
  Description of Artificial Sequence: Synthetic peptide
WDNFNPPKQ

SEQ ID NO: 39331 - protein, 9 aa, Artificial Sequence
  Description of Artificial Sequence: Synthetic peptide
WDNWDDREP

SEQ ID NO: 39332 - protein, 9 aa, Artificial Sequence
  Description of Artificial Sequence: Synthetic peptide
WDPGEGNNF

SEQ ID NO: 39333 - protein, 9 aa, Artificial Sequence
  Description of Artificial Sequence: Synthetic peptide
WDPLEHRLH

SEQ ID NO: 39334 - protein, 9 aa, Artificial Sequence
  Description of Artificial Sequence: Synthetic peptide
WDPSKVNIM

SEQ ID NO: 39335 - protein, 9 aa, Artificial Sequence
  Description of Artificial Sequence: Synthetic peptide
WDQCGWHRQ

SEQ ID NO: 39336 - protein, 9 aa, Artificial Sequence
  Description of Artificial Sequence: Synthetic peptide
WDRASWLEQ

SEQ ID NO: 39337 - protein, 9 aa, Artificial Sequence
  Description of Artificial Sequence: Synthetic peptide
WDRCDCEIP

SEQ ID NO: 39338 - protein, 9 aa, Artificial Sequence
  Description of Artificial Sequence: Synthetic peptide
WDRCPMPRN

SEQ ID NO: 39339 - protein, 9 aa, Artificial Sequence
  Description of Artificial Sequence: Synthetic peptide
WDSCEGREP

SEQ ID NO: 39340 - protein, 9 aa, Artificial Sequence
  Description of Artificial Sequence: Synthetic peptide
WDSHDFEIH

SEQ ID NO: 39341 - protein, 9 aa, Artificial Sequence
  Description of Artificial Sequence: Synthetic peptide
WDSKRLNPP

SEQ ID NO: 39342 - protein, 9 aa, Artificial Sequence
  Description of Artificial Sequence: Synthetic peptide
WDWIEVYRC

SEQ ID NO: 39343 - protein, 9 aa, Artificial Sequence
  Description of Artificial Sequence: Synthetic peptide
WDYRNLNRQ

SEQ ID NO: 39344 - protein, 9 aa, Artificial Sequence
  Description of Artificial Sequence: Synthetic peptide
WECQSRDED

SEQ ID NO: 39345 - protein, 9 aa, Artificial Sequence
  Description of Artificial Sequence: Synthetic peptide
WEDEPPWKI

SEQ ID NO: 39346 - protein, 9 aa, Artificial Sequence
  Description of Artificial Sequence: Synthetic peptide
WEEQRIPSE

SEQ ID NO: 39347 - protein, 9 aa, Artificial Sequence
  Description of Artificial Sequence: Synthetic peptide
WEEWDMMRC

SEQ ID NO: 39348 - protein, 9 aa, Artificial Sequence
  Description of Artificial Sequence: Synthetic peptide
WELPCEWTY

SEQ ID NO: 39349 - protein, 9 aa, Artificial Sequence
  Description of Artificial Sequence: Synthetic peptide
WEPHPYQTN

SEQ ID NO: 39350 - protein, 9 aa, Artificial Sequence
  Description of Artificial Sequence: Synthetic peptide
WFDSRKEEW

SEQ ID NO: 39351 - protein, 9 aa, Artificial Sequence
  Description of Artificial Sequence: Synthetic peptide
WFECWTYPM

SEQ ID NO: 39352 - protein, 9 aa, Artificial Sequence
  Description of Artificial Sequence: Synthetic peptide
WGCKENWNM

SEQ ID NO: 39353 - protein, 9 aa, Artificial Sequence
  Description of Artificial Sequence: Synthetic peptide
WGDCDPRVG

SEQ ID NO: 39354 - protein, 9 aa, Artificial Sequence
  Description of Artificial Sequence: Synthetic peptide
WGDCDYCEK

SEQ ID NO: 39355 - protein, 9 aa, Artificial Sequence
  Description of Artificial Sequence: Synthetic peptide
WGHKPCKGY

SEQ ID NO: 39356 - protein, 9 aa, Artificial Sequence
  Description of Artificial Sequence: Synthetic peptide
WGPCAFGQE

SEQ ID NO: 39357 - protein, 9 aa, Artificial Sequence
  Description of Artificial Sequence: Synthetic peptide
WGPKPCRGY

SEQ ID NO: 39358 - protein, 9 aa, Artificial Sequence
  Description of Artificial Sequence: Synthetic peptide
WGSCECHKC

SEQ ID NO: 39359 - protein, 9 aa, Artificial Sequence
  Description of Artificial Sequence: Synthetic peptide
WGTKPCKGY

SEQ ID NO: 39360 - protein, 9 aa, Artificial Sequence
  Description of Artificial Sequence: Synthetic peptide
WHANEVLKK

SEQ ID NO: 39361 - protein, 9 aa, Artificial Sequence
  Description of Artificial Sequence: Synthetic peptide
WHDTNLEPH

SEQ ID NO: 39362 - protein, 9 aa, Artificial Sequence
  Description of Artificial Sequence: Synthetic peptide
WHSWWTNIM

SEQ ID NO: 39363 - protein, 9 aa, Artificial Sequence
  Description of Artificial Sequence: Synthetic peptide
WKACPLRET

SEQ ID NO: 39364 - protein, 9 aa, Artificial Sequence
  Description of Artificial Sequence: Synthetic peptide
WKAYPWQPT

SEQ ID NO: 39365 - protein, 9 aa, Artificial Sequence
  Description of Artificial Sequence: Synthetic peptide
WKCAEFRTC

SEQ ID NO: 39366 - protein, 9 aa, Artificial Sequence
  Description of Artificial Sequence: Synthetic peptide
WKCPDKLDN

SEQ ID NO: 39367 - protein, 9 aa, Artificial Sequence
  Description of Artificial Sequence: Synthetic peptide
WKDAEKKDD

SEQ ID NO: 39368 - protein, 9 aa, Artificial Sequence
  Description of Artificial Sequence: Synthetic peptide
WKDHTVPDH

SEQ ID NO: 39369 - protein, 9 aa, Artificial Sequence
  Description of Artificial Sequence: Synthetic peptide
WKDNESSEF

SEQ ID NO: 39370 - protein, 9 aa, Artificial Sequence
  Description of Artificial Sequence: Synthetic peptide
WKDRDQCLH

SEQ ID NO: 39371 - protein, 9 aa, Artificial Sequence
  Description of Artificial Sequence: Synthetic peptide
WKLVDLGIG

SEQ ID NO: 39372 - protein, 9 aa, Artificial Sequence
  Description of Artificial Sequence: Synthetic peptide
WKSCGMDSL

SEQ ID NO: 39373 - protein, 9 aa, Artificial Sequence
  Description of Artificial Sequence: Synthetic peptide
WKTTEAPRD

SEQ ID NO: 39374 - protein, 9 aa, Artificial Sequence
  Description of Artificial Sequence: Synthetic peptide
WLDDRLEFF

SEQ ID NO: 39375 - protein, 9 aa, Artificial Sequence
  Description of Artificial Sequence: Synthetic peptide
WNDYDEGEC

SEQ ID NO: 39376 - protein, 9 aa, Artificial Sequence
  Description of Artificial Sequence: Synthetic peptide
WNPADGKQN

SEQ ID NO: 39377 - protein, 9 aa, Artificial Sequence
  Description of Artificial Sequence: Synthetic peptide
WNPWDQLEF

SEQ ID NO: 39378 - protein, 9 aa, Artificial Sequence
  Description of Artificial Sequence: Synthetic peptide
WPCPWFDHM

SEQ ID NO: 39379 - protein, 9 aa, Artificial Sequence
  Description of Artificial Sequence: Synthetic peptide
WPPEPWCCC

SEQ ID NO: 39380 - protein, 9 aa, Artificial Sequence
  Description of Artificial Sequence: Synthetic peptide
WPPWEWYED

SEQ ID NO: 39381 - protein, 9 aa, Artificial Sequence
  Description of Artificial Sequence: Synthetic peptide
WPSCGCTVE

SEQ ID NO: 39382 - protein, 9 aa, Artificial Sequence
  Description of Artificial Sequence: Synthetic peptide
WPVDSWIEN

SEQ ID NO: 39383 - protein, 9 aa, Artificial Sequence
  Description of Artificial Sequence: Synthetic peptide
WQANHWDRT

SEQ ID NO: 39384 - protein, 9 aa, Artificial Sequence
  Description of Artificial Sequence: Synthetic peptide
WQEDQVGRQ

SEQ ID NO: 39385 - protein, 9 aa, Artificial Sequence
  Description of Artificial Sequence: Synthetic peptide
WQPWRHERH

SEQ ID NO: 39386 - protein, 9 aa, Artificial Sequence
  Description of Artificial Sequence: Synthetic peptide
WQQFWWNEC

SEQ ID NO: 39387 - protein, 9 aa, Artificial Sequence
  Description of Artificial Sequence: Synthetic peptide
WQYYPCIDK

SEQ ID NO: 39388 - protein, 9 aa, Artificial Sequence
  Description of Artificial Sequence: Synthetic peptide
WRAPGPLEN

SEQ ID NO: 39389 - protein, 9 aa, Artificial Sequence
  Description of Artificial Sequence: Synthetic peptide
WRCATIPIA

SEQ ID NO: 39390 - protein, 9 aa, Artificial Sequence
  Description of Artificial Sequence: Synthetic peptide
WRCCQFWII

SEQ ID NO: 39391 - protein, 9 aa, Artificial Sequence
  Description of Artificial Sequence: Synthetic peptide
WRCDDRDNC

SEQ ID NO: 39392 - protein, 9 aa, Artificial Sequence
  Description of Artificial Sequence: Synthetic peptide
WRCPRLIDW

SEQ ID NO: 39393 - protein, 9 aa, Artificial Sequence
  Description of Artificial Sequence: Synthetic peptide
WRDHPEDIQ

SEQ ID NO: 39394 - protein, 9 aa, Artificial Sequence
  Description of Artificial Sequence: Synthetic peptide
WRDMDFYIN

SEQ ID NO: 39395 - protein, 9 aa, Artificial Sequence
  Description of Artificial Sequence: Synthetic peptide
WRDQGFSTN

SEQ ID NO: 39396 - protein, 9 aa, Artificial Sequence
  Description of Artificial Sequence: Synthetic peptide
WREMPMSEL

SEQ ID NO: 39397 - protein, 9 aa, Artificial Sequence
  Description of Artificial Sequence: Synthetic peptide
WRHWDGLNL

SEQ ID NO: 39398 - protein, 9 aa, Artificial Sequence
  Description of Artificial Sequence: Synthetic peptide
WRNQGDLVP

SEQ ID NO: 39399 - protein, 9 aa, Artificial Sequence
  Description of Artificial Sequence: Synthetic peptide
WRNRPCLNE

SEQ ID NO: 39400 - protein, 9 aa, Artificial Sequence
  Description of Artificial Sequence: Synthetic peptide
WRQCEFGVE

SEQ ID NO: 39401 - protein, 9 aa, Artificial Sequence
  Description of Artificial Sequence: Synthetic peptide
WRSDGPIER

SEQ ID NO: 39402 - protein, 9 aa, Artificial Sequence
  Description of Artificial Sequence: Synthetic peptide
WRSEEVEHC

SEQ ID NO: 39403 - protein, 9 aa, Artificial Sequence
  Description of Artificial Sequence: Synthetic peptide
WRSRDHDHP

SEQ ID NO: 39404 - protein, 9 aa, Artificial Sequence
  Description of Artificial Sequence: Synthetic peptide
WRTCDMPYF

SEQ ID NO: 39405 - protein, 9 aa, Artificial Sequence
  Description of Artificial Sequence: Synthetic peptide
WRYAEWWNQ

SEQ ID NO: 39406 - protein, 9 aa, Artificial Sequence
  Description of Artificial Sequence: Synthetic peptide
WRYTERIVH

SEQ ID NO: 39407 - protein, 9 aa, Artificial Sequence
  Description of Artificial Sequence: Synthetic peptide
WWDCEPDTT

SEQ ID NO: 39408 - protein, 9 aa, Artificial Sequence
  Description of Artificial Sequence: Synthetic peptide
WWDTDGNFG

SEQ ID NO: 39409 - protein, 9 aa, Artificial Sequence
  Description of Artificial Sequence: Synthetic peptide
WYDNAGNKN

SEQ ID NO: 39410 - protein, 9 aa, Artificial Sequence
  Description of Artificial Sequence: Synthetic peptide
WYPDEADHA

SEQ ID NO: 39411 - protein, 9 aa, Artificial Sequence
  Description of Artificial Sequence: Synthetic peptide
WYQDWHPRM

SEQ ID NO: 39412 - protein, 9 aa, Artificial Sequence
  Description of Artificial Sequence: Synthetic peptide
YDCCCGWKD

SEQ ID NO: 39413 - protein, 9 aa, Artificial Sequence
  Description of Artificial Sequence: Synthetic peptide
YDCIPRCKP

SEQ ID NO: 39414 - protein, 9 aa, Artificial Sequence
  Description of Artificial Sequence: Synthetic peptide
YDDAEMRGH

SEQ ID NO: 39415 - protein, 9 aa, Artificial Sequence
  Description of Artificial Sequence: Synthetic peptide
YDEMYYCVG

SEQ ID NO: 39416 - protein, 9 aa, Artificial Sequence
  Description of Artificial Sequence: Synthetic peptide
YDHRCYVRG

SEQ ID NO: 39417 - protein, 9 aa, Artificial Sequence
  Description of Artificial Sequence: Synthetic peptide
YDNKPLPKH

SEQ ID NO: 39418 - protein, 9 aa, Artificial Sequence
  Description of Artificial Sequence: Synthetic peptide
YDSCDCSRF

SEQ ID NO: 39419 - protein, 9 aa, Artificial Sequence
  Description of Artificial Sequence: Synthetic peptide
YDTRWQPRC

SEQ ID NO: 39420 - protein, 9 aa, Artificial Sequence
  Description of Artificial Sequence: Synthetic peptide
YDWKAADGW

SEQ ID NO: 39421 - protein, 9 aa, Artificial Sequence
  Description of Artificial Sequence: Synthetic peptide
YDYRSYPVA

SEQ ID NO: 39422 - protein, 9 aa, Artificial Sequence
  Description of Artificial Sequence: Synthetic peptide
YEAKETERP

SEQ ID NO: 39423 - protein, 9 aa, Artificial Sequence
  Description of Artificial Sequence: Synthetic peptide
YEVDEEIKI

SEQ ID NO: 39424 - protein, 9 aa, Artificial Sequence
  Description of Artificial Sequence: Synthetic peptide
YEVKEEPVS

SEQ ID NO: 39425 - protein, 9 aa, Artificial Sequence
  Description of Artificial Sequence: Synthetic peptide
YGCFDRCMR

SEQ ID NO: 39426 - protein, 9 aa, Artificial Sequence
  Description of Artificial Sequence: Synthetic peptide
YGDFEWCKR

SEQ ID NO: 39427 - protein, 9 aa, Artificial Sequence
  Description of Artificial Sequence: Synthetic peptide
YGPEDLHKW

SEQ ID NO: 39428 - protein, 9 aa, Artificial Sequence
  Description of Artificial Sequence: Synthetic peptide
YHDCRLHRP

SEQ ID NO: 39429 - protein, 9 aa, Artificial Sequence
  Description of Artificial Sequence: Synthetic peptide
YKDARWPLW

SEQ ID NO: 39430 - protein, 9 aa, Artificial Sequence
  Description of Artificial Sequence: Synthetic peptide
YKECHWHKE

SEQ ID NO: 39431 - protein, 9 aa, Artificial Sequence
  Description of Artificial Sequence: Synthetic peptide
YKTVDVGPH

SEQ ID NO: 39432 - protein, 9 aa, Artificial Sequence
  Description of Artificial Sequence: Synthetic peptide
YPNKDGERN

SEQ ID NO: 39433 - protein, 9 aa, Artificial Sequence
  Description of Artificial Sequence: Synthetic peptide
YPWFDGWQW

SEQ ID NO: 39434 - protein, 9 aa, Artificial Sequence
  Description of Artificial Sequence: Synthetic peptide
YQYFELPKW

SEQ ID NO: 39435 - protein, 9 aa, Artificial Sequence
  Description of Artificial Sequence: Synthetic peptide
YRHEEYWHN

SEQ ID NO: 39436 - protein, 9 aa, Artificial Sequence
  Description of Artificial Sequence: Synthetic peptide
YRHEPEDEG

SEQ ID NO: 39437 - protein, 9 aa, Artificial Sequence
  Description of Artificial Sequence: Synthetic peptide
YRPGPTIRT

SEQ ID NO: 39438 - protein, 9 aa, Artificial Sequence
  Description of Artificial Sequence: Synthetic peptide
CTTYYCWQE

SEQ ID NO: 39439 - protein, 9 aa, Artificial Sequence
  Description of Artificial Sequence: Synthetic peptide
TMMYYESGQ

SEQ ID NO: 39440 - protein, 9 aa, Artificial Sequence
  Description of Artificial Sequence: Synthetic peptide
YNMVHGDEP

SEQ ID NO: 39441 - protein, 9 aa, Artificial Sequence
  Description of Artificial Sequence: Synthetic peptide
WGSLEWDRA

SEQ ID NO: 39442 - protein, 9 aa, Artificial Sequence
  Description of Artificial Sequence: Synthetic peptide
DSGTKKRMH

SEQ ID NO: 39443 - protein, 9 aa, Artificial Sequence
  Description of Artificial Sequence: Synthetic peptide
QHELEGNRF

SEQ ID NO: 39444 - protein, 9 aa, Artificial Sequence
  Description of Artificial Sequence: Synthetic peptide
TEESLVRTY

SEQ ID NO: 39445 - protein, 9 aa, Artificial Sequence
  Description of Artificial Sequence: Synthetic peptide
DDYYQLHES

SEQ ID NO: 39446 - protein, 9 aa, Artificial Sequence
  Description of Artificial Sequence: Synthetic peptide
LLEHPEKDL

SEQ ID NO: 39447 - protein, 9 aa, Artificial Sequence
  Description of Artificial Sequence: Synthetic peptide
LWQHTCIHG

SEQ ID NO: 39448 - protein, 9 aa, Artificial Sequence
  Description of Artificial Sequence: Synthetic peptide
SDFTLGYHH

SEQ ID NO: 39449 - protein, 9 aa, Artificial Sequence
  Description of Artificial Sequence: Synthetic peptide
MIEQWDACS

SEQ ID NO: 39450 - protein, 9 aa, Artificial Sequence
  Description of Artificial Sequence: Synthetic peptide
PQYDCWKGS

SEQ ID NO: 39451 - protein, 9 aa, Artificial Sequence
  Description of Artificial Sequence: Synthetic peptide
NHYPDQEAE

SEQ ID NO: 39452 - protein, 9 aa, Artificial Sequence
  Description of Artificial Sequence: Synthetic peptide
EQPHCKWTA

SEQ ID NO: 39453 - protein, 9 aa, Artificial Sequence
  Description of Artificial Sequence: Synthetic peptide
SHNNNPSGE

SEQ ID NO: 39454 - protein, 9 aa, Artificial Sequence
  Description of Artificial Sequence: Synthetic peptide
EVADIVSLA

SEQ ID NO: 39455 - protein, 9 aa, Artificial Sequence
  Description of Artificial Sequence: Synthetic peptide
LVELSIKQQ

SEQ ID NO: 39456 - protein, 9 aa, Artificial Sequence
  Description of Artificial Sequence: Synthetic peptide
LWEHTFDCD

SEQ ID NO: 39457 - protein, 9 aa, Artificial Sequence
  Description of Artificial Sequence: Synthetic peptide
VQSFENQAC

SEQ ID NO: 39458 - protein, 9 aa, Artificial Sequence
  Description of Artificial Sequence: Synthetic peptide
VFRVKCAAD

SEQ ID NO: 39459 - protein, 9 aa, Artificial Sequence
  Description of Artificial Sequence: Synthetic peptide
QSDWISIPC

SEQ ID NO: 39460 - protein, 9 aa, Artificial Sequence
  Description of Artificial Sequence: Synthetic peptide
RANTWTRRH

SEQ ID NO: 39461 - protein, 9 aa, Artificial Sequence
  Description of Artificial Sequence: Synthetic peptide
KVPSQLVFE

SEQ ID NO: 39462 - protein, 9 aa, Artificial Sequence
  Description of Artificial Sequence: Synthetic peptide
ENCMSRMKP

SEQ ID NO: 39463 - protein, 9 aa, Artificial Sequence
  Description of Artificial Sequence: Synthetic peptide
RLTEDMPDM

SEQ ID NO: 39464 - protein, 9 aa, Artificial Sequence
  Description of Artificial Sequence: Synthetic peptide
NNGVHIFCE

SEQ ID NO: 39465 - protein, 9 aa, Artificial Sequence
  Description of Artificial Sequence: Synthetic peptide
SHMSYGQVQ

SEQ ID NO: 39466 - protein, 9 aa, Artificial Sequence
  Description of Artificial Sequence: Synthetic peptide
DVCDDHKPN

SEQ ID NO: 39467 - protein, 9 aa, Artificial Sequence
  Description of Artificial Sequence: Synthetic peptide
GDNMVQWVS

SEQ ID NO: 39468 - protein, 9 aa, Artificial Sequence
  Description of Artificial Sequence: Synthetic peptide
GYASIVKRD

SEQ ID NO: 39469 - protein, 9 aa, Artificial Sequence
  Description of Artificial Sequence: Synthetic peptide
DNYMQLNCV

SEQ ID NO: 39470 - protein, 9 aa, Artificial Sequence
  Description of Artificial Sequence: Synthetic peptide
DVAPMHQVE

SEQ ID NO: 39471 - protein, 9 aa, Artificial Sequence
  Description of Artificial Sequence: Synthetic peptide
QLRCEYQHT

SEQ ID NO: 39472 - protein, 9 aa, Artificial Sequence
  Description of Artificial Sequence: Synthetic peptide
EASIQASWN

SEQ ID NO: 39473 - protein, 9 aa, Artificial Sequence
  Description of Artificial Sequence: Synthetic peptide
PCAMHNWGC

SEQ ID NO: 39474 - protein, 9 aa, Artificial Sequence
  Description of Artificial Sequence: Synthetic peptide
MNANETHGA

SEQ ID NO: 39475 - protein, 9 aa, Artificial Sequence
  Description of Artificial Sequence: Synthetic peptide
CECHWAYPS

SEQ ID NO: 39476 - protein, 9 aa, Artificial Sequence
  Description of Artificial Sequence: Synthetic peptide
GFQRTHVDQ

SEQ ID NO: 39477 - protein, 9 aa, Artificial Sequence
  Description of Artificial Sequence: Synthetic peptide
MEPHYWEWP

SEQ ID NO: 39478 - protein, 9 aa, Artificial Sequence
  Description of Artificial Sequence: Synthetic peptide
RYMNAAKFF

SEQ ID NO: 39479 - protein, 9 aa, Artificial Sequence
  Description of Artificial Sequence: Synthetic peptide
MNEYIMSMH

SEQ ID NO: 39480 - protein, 9 aa, Artificial Sequence
  Description of Artificial Sequence: Synthetic peptide
IYMSTGNTP

SEQ ID NO: 39481 - protein, 9 aa, Artificial Sequence
  Description of Artificial Sequence: Synthetic peptide
QQTKNNSTD

SEQ ID NO: 39482 - protein, 9 aa, Artificial Sequence
  Description of Artificial Sequence: Synthetic peptide
EIYSQLTDL

SEQ ID NO: 39483 - protein, 9 aa, Artificial Sequence
  Description of Artificial Sequence: Synthetic peptide
VTKLAENVY

SEQ ID NO: 39484 - protein, 9 aa, Artificial Sequence
  Description of Artificial Sequence: Synthetic peptide
WDYSMTKKH

SEQ ID NO: 39485 - protein, 9 aa, Artificial Sequence
  Description of Artificial Sequence: Synthetic peptide
FKHSLREWT

SEQ ID NO: 39486 - protein, 9 aa, Artificial Sequence
  Description of Artificial Sequence: Synthetic peptide
ALAKFQCWS

SEQ ID NO: 39487 - protein, 9 aa, Artificial Sequence
  Description of Artificial Sequence: Synthetic peptide
FCDLAHHYE

SEQ ID NO: 39488 - protein, 9 aa, Artificial Sequence
  Description of Artificial Sequence: Synthetic peptide
PWTTPENYT

SEQ ID NO: 39489 - protein, 9 aa, Artificial Sequence
  Description of Artificial Sequence: Synthetic peptide
NLAPMIQVC

SEQ ID NO: 39490 - protein, 9 aa, Artificial Sequence
  Description of Artificial Sequence: Synthetic peptide
EAELENVNM

SEQ ID NO: 39491 - protein, 9 aa, Artificial Sequence
  Description of Artificial Sequence: Synthetic peptide
YMALDLIPY

SEQ ID NO: 39492 - protein, 9 aa, Artificial Sequence
  Description of Artificial Sequence: Synthetic peptide
TTKNAISFE

SEQ ID NO: 39493 - protein, 9 aa, Artificial Sequence
  Description of Artificial Sequence: Synthetic peptide
STLMPDEMA

SEQ ID NO: 39494 - protein, 9 aa, Artificial Sequence
  Description of Artificial Sequence: Synthetic peptide
LSAQRLVCD

SEQ ID NO: 39495 - protein, 9 aa, Artificial Sequence
  Description of Artificial Sequence: Synthetic peptide
EPMPMPVWN

SEQ ID NO: 39496 - protein, 9 aa, Artificial Sequence
  Description of Artificial Sequence: Synthetic peptide
HYVFGMSST

SEQ ID NO: 39497 - protein, 9 aa, Artificial Sequence
  Description of Artificial Sequence: Synthetic peptide
GHNVTAMAI

SEQ ID NO: 39498 - protein, 9 aa, Artificial Sequence
  Description of Artificial Sequence: Synthetic peptide
LWSRFISMD

SEQ ID NO: 39499 - protein, 9 aa, Artificial Sequence
  Description of Artificial Sequence: Synthetic peptide
VPTPWMGIS

SEQ ID NO: 39500 - protein, 9 aa, Artificial Sequence
  Description of Artificial Sequence: Synthetic peptide
IAYHYDQQN

SEQ ID NO: 39501 - protein, 9 aa, Artificial Sequence
  Description of Artificial Sequence: Synthetic peptide
IEHCSNRYA

SEQ ID NO: 39502 - protein, 9 aa, Artificial Sequence
  Description of Artificial Sequence: Synthetic peptide
FAQQIINAS

SEQ ID NO: 39503 - protein, 9 aa, Artificial Sequence
  Description of Artificial Sequence: Synthetic peptide
YVLYSWRTS

SEQ ID NO: 39504 - protein, 9 aa, Artificial Sequence
  Description of Artificial Sequence: Synthetic peptide
VTNWLSLQS

SEQ ID NO: 39505 - protein, 9 aa, Artificial Sequence
  Description of Artificial Sequence: Synthetic peptide
QMVTQLNWE

SEQ ID NO: 39506 - protein, 9 aa, Artificial Sequence
  Description of Artificial Sequence: Synthetic peptide
IQNPAMWGT

SEQ ID NO: 39507 - protein, 9 aa, Artificial Sequence
  Description of Artificial Sequence: Synthetic peptide
EFAHEWYVN

SEQ ID NO: 39508 - protein, 9 aa, Artificial Sequence
  Description of Artificial Sequence: Synthetic peptide
PYGQCMRTF

SEQ ID NO: 39509 - protein, 9 aa, Artificial Sequence
  Description of Artificial Sequence: Synthetic peptide
INYISFVDR

SEQ ID NO: 39510 - protein, 9 aa, Artificial Sequence
  Description of Artificial Sequence: Synthetic peptide
GVNDLQNIC

SEQ ID NO: 39511 - protein, 9 aa, Artificial Sequence
  Description of Artificial Sequence: Synthetic peptide
CSKATWGAE

SEQ ID NO: 39512 - protein, 9 aa, Artificial Sequence
  Description of Artificial Sequence: Synthetic peptide
DYVDQCQVS

SEQ ID NO: 39513 - protein, 9 aa, Artificial Sequence
  Description of Artificial Sequence: Synthetic peptide
MCGCGWAKG

SEQ ID NO: 39514 - protein, 9 aa, Artificial Sequence
  Description of Artificial Sequence: Synthetic peptide
NAELQQADI

SEQ ID NO: 39515 - protein, 9 aa, Artificial Sequence
  Description of Artificial Sequence: Synthetic peptide
ESSQEIKTC

SEQ ID NO: 39516 - protein, 9 aa, Artificial Sequence
  Description of Artificial Sequence: Synthetic peptide
AIRQFMMHL

SEQ ID NO: 39517 - protein, 9 aa, Artificial Sequence
  Description of Artificial Sequence: Synthetic peptide
QTQICHSWM

SEQ ID NO: 39518 - protein, 9 aa, Artificial Sequence
  Description of Artificial Sequence: Synthetic peptide
WFDRSWHIL

SEQ ID NO: 39519 - protein, 9 aa, Artificial Sequence
  Description of Artificial Sequence: Synthetic peptide
FRAVYYYHS

SEQ ID NO: 39520 - protein, 9 aa, Artificial Sequence
  Description of Artificial Sequence: Synthetic peptide
TFHQSDYWE

SEQ ID NO: 39521 - protein, 9 aa, Artificial Sequence
  Description of Artificial Sequence: Synthetic peptide
CGCQVKCHT

SEQ ID NO: 39522 - protein, 9 aa, Artificial Sequence
  Description of Artificial Sequence: Synthetic peptide
WNWLKVMHE

SEQ ID NO: 39523 - protein, 9 aa, Artificial Sequence
  Description of Artificial Sequence: Synthetic peptide
MASQGGQVR

SEQ ID NO: 39524 - protein, 9 aa, Artificial Sequence
  Description of Artificial Sequence: Synthetic peptide
DVEFCMKQY

SEQ ID NO: 39525 - protein, 9 aa, Artificial Sequence
  Description of Artificial Sequence: Synthetic peptide
INMPVSKDQ

SEQ ID NO: 39526 - protein, 9 aa, Artificial Sequence
  Description of Artificial Sequence: Synthetic peptide
QMCVWMTRQ

SEQ ID NO: 39527 - protein, 9 aa, Artificial Sequence
  Description of Artificial Sequence: Synthetic peptide
SSEYSQFAI

SEQ ID NO: 39528 - protein, 9 aa, Artificial Sequence
  Description of Artificial Sequence: Synthetic peptide
DSIIKDQSD

SEQ ID NO: 39529 - protein, 9 aa, Artificial Sequence
  Description of Artificial Sequence: Synthetic peptide
EHPEWKCMY

SEQ ID NO: 39530 - protein, 9 aa, Artificial Sequence
  Description of Artificial Sequence: Synthetic peptide
WKATPGGQC

SEQ ID NO: 39531 - protein, 9 aa, Artificial Sequence
  Description of Artificial Sequence: Synthetic peptide
STARHNMQL

SEQ ID NO: 39532 - protein, 9 aa, Artificial Sequence
  Description of Artificial Sequence: Synthetic peptide
RYQSHCWLH

SEQ ID NO: 39533 - protein, 9 aa, Artificial Sequence
  Description of Artificial Sequence: Synthetic peptide
TFAKSDWLA

SEQ ID NO: 39534 - protein, 9 aa, Artificial Sequence
  Description of Artificial Sequence: Synthetic peptide
NSQLSMTFG

SEQ ID NO: 39535 - protein, 9 aa, Artificial Sequence
  Description of Artificial Sequence: Synthetic peptide
RFDQFWDTY

SEQ ID NO: 39536 - protein, 9 aa, Artificial Sequence
  Description of Artificial Sequence: Synthetic peptide
QTSHQDQDC

SEQ ID NO: 39537 - protein, 9 aa, Artificial Sequence
  Description of Artificial Sequence: Synthetic peptide
DHELTRSEA

SEQ ID NO: 39538 - protein, 9 aa, Artificial Sequence
  Description of Artificial Sequence: Synthetic peptide
MITNNCNIS

SEQ ID NO: 39539 - protein, 9 aa, Artificial Sequence
  Description of Artificial Sequence: Synthetic peptide
FNESGWPTW

SEQ ID NO: 39540 - protein, 9 aa, Artificial Sequence
  Description of Artificial Sequence: Synthetic peptide
MWGCKLFVC

SEQ ID NO: 39541 - protein, 9 aa, Artificial Sequence
  Description of Artificial Sequence: Synthetic peptide
SKGWADLCP

SEQ ID NO: 39542 - protein, 9 aa, Artificial Sequence
  Description of Artificial Sequence: Synthetic peptide
HIHDTMSDY

SEQ ID NO: 39543 - protein, 9 aa, Artificial Sequence
  Description of Artificial Sequence: Synthetic peptide
WHTIMTYES

SEQ ID NO: 39544 - protein, 9 aa, Artificial Sequence
  Description of Artificial Sequence: Synthetic peptide
SFVHMFQGH

SEQ ID NO: 39545 - protein, 9 aa, Artificial Sequence
  Description of Artificial Sequence: Synthetic peptide
WVHPYSYCA

SEQ ID NO: 39546 - protein, 9 aa, Artificial Sequence
  Description of Artificial Sequence: Synthetic peptide
QVSFNARYA

SEQ ID NO: 39547 - protein, 9 aa, Artificial Sequence
  Description of Artificial Sequence: Synthetic peptide
FSTSYCHED

SEQ ID NO: 39548 - protein, 9 aa, Artificial Sequence
  Description of Artificial Sequence: Synthetic peptide
WLIGMWNTG

SEQ ID NO: 39549 - protein, 9 aa, Artificial Sequence
  Description of Artificial Sequence: Synthetic peptide
NSTMEHSRW

SEQ ID NO: 39550 - protein, 9 aa, Artificial Sequence
  Description of Artificial Sequence: Synthetic peptide
KYEFLLKYI

SEQ ID NO: 39551 - protein, 9 aa, Artificial Sequence
  Description of Artificial Sequence: Synthetic peptide
HCDSPAATP

SEQ ID NO: 39552 - protein, 9 aa, Artificial Sequence
  Description of Artificial Sequence: Synthetic peptide
DIEFLDCEN

SEQ ID NO: 39553 - protein, 9 aa, Artificial Sequence
  Description of Artificial Sequence: Synthetic peptide
YSDPKNMSI

SEQ ID NO: 39554 - protein, 9 aa, Artificial Sequence
  Description of Artificial Sequence: Synthetic peptide
ACIPQMHSA

SEQ ID NO: 39555 - protein, 9 aa, Artificial Sequence
  Description of Artificial Sequence: Synthetic peptide
NCMHLQGCQ

SEQ ID NO: 39556 - protein, 9 aa, Artificial Sequence
  Description of Artificial Sequence: Synthetic peptide
SRVMIHVYV

SEQ ID NO: 39557 - protein, 9 aa, Artificial Sequence
  Description of Artificial Sequence: Synthetic peptide
SMFTHQLAQ

SEQ ID NO: 39558 - protein, 9 aa, Artificial Sequence
  Description of Artificial Sequence: Synthetic peptide
DVTPTSWIE

SEQ ID NO: 39559 - protein, 9 aa, Artificial Sequence
  Description of Artificial Sequence: Synthetic peptide
WCEAVGDYA

SEQ ID NO: 39560 - protein, 9 aa, Artificial Sequence
  Description of Artificial Sequence: Synthetic peptide
GDMYYWKLQ

SEQ ID NO: 39561 - protein, 9 aa, Artificial Sequence
  Description of Artificial Sequence: Synthetic peptide
GWDMLSVAK

SEQ ID NO: 39562 - protein, 9 aa, Artificial Sequence
  Description of Artificial Sequence: Synthetic peptide
NMEPLKLQA

SEQ ID NO: 39563 - protein, 9 aa, Artificial Sequence
  Description of Artificial Sequence: Synthetic peptide
CWECCTDSG

SEQ ID NO: 39564 - protein, 9 aa, Artificial Sequence
  Description of Artificial Sequence: Synthetic peptide
GNECFHNVE

SEQ ID NO: 39565 - protein, 9 aa, Artificial Sequence
  Description of Artificial Sequence: Synthetic peptide
LSTMFPEQT

SEQ ID NO: 39566 - protein, 9 aa, Artificial Sequence
  Description of Artificial Sequence: Synthetic peptide
TAFQSLQQM

SEQ ID NO: 39567 - protein, 9 aa, Artificial Sequence
  Description of Artificial Sequence: Synthetic peptide
NGVGRSGDN

SEQ ID NO: 39568 - protein, 9 aa, Artificial Sequence
  Description of Artificial Sequence: Synthetic peptide
QAWPKTEYI

SEQ ID NO: 39569 - protein, 9 aa, Artificial Sequence
  Description of Artificial Sequence: Synthetic peptide
YNNDMKQRR

SEQ ID NO: 39570 - protein, 9 aa, Artificial Sequence
  Description of Artificial Sequence: Synthetic peptide
MLHTSECVQ

SEQ ID NO: 39571 - protein, 9 aa, Artificial Sequence
  Description of Artificial Sequence: Synthetic peptide
GSHWYDCNQ

SEQ ID NO: 39572 - protein, 9 aa, Artificial Sequence
  Description of Artificial Sequence: Synthetic peptide
PTNYGWMWR

SEQ ID NO: 39573 - protein, 9 aa, Artificial Sequence
  Description of Artificial Sequence: Synthetic peptide
AHEDPNTWC

SEQ ID NO: 39574 - protein, 9 aa, Artificial Sequence
  Description of Artificial Sequence: Synthetic peptide
QSMVACYTI

SEQ ID NO: 39575 - protein, 9 aa, Artificial Sequence
  Description of Artificial Sequence: Synthetic peptide
PWRWHKSAC

SEQ ID NO: 39576 - protein, 9 aa, Artificial Sequence
  Description of Artificial Sequence: Synthetic peptide
WINEANCLM

SEQ ID NO: 39577 - protein, 9 aa, Artificial Sequence
  Description of Artificial Sequence: Synthetic peptide
LSPWPQTDQ

SEQ ID NO: 39578 - protein, 9 aa, Artificial Sequence
  Description of Artificial Sequence: Synthetic peptide
LETMMRHGE

SEQ ID NO: 39579 - protein, 9 aa, Artificial Sequence
  Description of Artificial Sequence: Synthetic peptide
LGSPFYECG

SEQ ID NO: 39580 - protein, 9 aa, Artificial Sequence
  Description of Artificial Sequence: Synthetic peptide
ACQFYISRP

SEQ ID NO: 39581 - protein, 9 aa, Artificial Sequence
  Description of Artificial Sequence: Synthetic peptide
VFKPLDKRY

SEQ ID NO: 39582 - protein, 9 aa, Artificial Sequence
  Description of Artificial Sequence: Synthetic peptide
TFVRKPSLM

SEQ ID NO: 39583 - protein, 9 aa, Artificial Sequence
  Description of Artificial Sequence: Synthetic peptide
NDMQMNWVH

SEQ ID NO: 39584 - protein, 9 aa, Artificial Sequence
  Description of Artificial Sequence: Synthetic peptide
HAKQANGMV

SEQ ID NO: 39585 - protein, 9 aa, Artificial Sequence
  Description of Artificial Sequence: Synthetic peptide
VKFRITTEC

SEQ ID NO: 39586 - protein, 9 aa, Artificial Sequence
  Description of Artificial Sequence: Synthetic peptide
CVEQYVEQG

SEQ ID NO: 39587 - protein, 9 aa, Artificial Sequence
  Description of Artificial Sequence: Synthetic peptide
MQPMESATW

SEQ ID NO: 39588 - protein, 9 aa, Artificial Sequence
  Description of Artificial Sequence: Synthetic peptide
VEDRVFACC

SEQ ID NO: 39589 - protein, 9 aa, Artificial Sequence
  Description of Artificial Sequence: Synthetic peptide
EVRIQCKID

SEQ ID NO: 39590 - protein, 9 aa, Artificial Sequence
  Description of Artificial Sequence: Synthetic peptide
KQKTQNRNA

SEQ ID NO: 39591 - protein, 9 aa, Artificial Sequence
  Description of Artificial Sequence: Synthetic peptide
KVAEGQNML

SEQ ID NO: 39592 - protein, 9 aa, Artificial Sequence
  Description of Artificial Sequence: Synthetic peptide
YPTMTFPEE

SEQ ID NO: 39593 - protein, 9 aa, Artificial Sequence
  Description of Artificial Sequence: Synthetic peptide
ASKQGTHDY

SEQ ID NO: 39594 - protein, 9 aa, Artificial Sequence
  Description of Artificial Sequence: Synthetic peptide
YVIGQKDEM

SEQ ID NO: 39595 - protein, 9 aa, Artificial Sequence
  Description of Artificial Sequence: Synthetic peptide
PHASGYTCI

SEQ ID NO: 39596 - protein, 9 aa, Artificial Sequence
  Description of Artificial Sequence: Synthetic peptide
EKRLEGWVY

SEQ ID NO: 39597 - protein, 9 aa, Artificial Sequence
  Description of Artificial Sequence: Synthetic peptide
NLSNLVSCR

SEQ ID NO: 39598 - protein, 9 aa, Artificial Sequence
  Description of Artificial Sequence: Synthetic peptide
YTELMKKAC

SEQ ID NO: 39599 - protein, 9 aa, Artificial Sequence
  Description of Artificial Sequence: Synthetic peptide
QCTAHNTCM

SEQ ID NO: 39600 - protein, 9 aa, Artificial Sequence
  Description of Artificial Sequence: Synthetic peptide
TWAPWCCYF

SEQ ID NO: 39601 - protein, 9 aa, Artificial Sequence
  Description of Artificial Sequence: Synthetic peptide
ICHIRTRGN

SEQ ID NO: 39602 - protein, 9 aa, Artificial Sequence
  Description of Artificial Sequence: Synthetic peptide
CIQPTWDSY

SEQ ID NO: 39603 - protein, 9 aa, Artificial Sequence
  Description of Artificial Sequence: Synthetic peptide
EQELKNSTQ

SEQ ID NO: 39604 - protein, 9 aa, Artificial Sequence
  Description of Artificial Sequence: Synthetic peptide
NGYLVHACQ

SEQ ID NO: 39605 - protein, 9 aa, Artificial Sequence
  Description of Artificial Sequence: Synthetic peptide
NADMSFRNR

SEQ ID NO: 39606 - protein, 9 aa, Artificial Sequence
  Description of Artificial Sequence: Synthetic peptide
DQRHGNVSP

SEQ ID NO: 39607 - protein, 9 aa, Artificial Sequence
  Description of Artificial Sequence: Synthetic peptide
TWYMNWMWH

SEQ ID NO: 39608 - protein, 9 aa, Artificial Sequence
  Description of Artificial Sequence: Synthetic peptide
KGNPLDGDT

SEQ ID NO: 39609 - protein, 9 aa, Artificial Sequence
  Description of Artificial Sequence: Synthetic peptide
VTMIHNAFH

SEQ ID NO: 39610 - protein, 9 aa, Artificial Sequence
  Description of Artificial Sequence: Synthetic peptide
SFKSVSQYN

SEQ ID NO: 39611 - protein, 9 aa, Artificial Sequence
  Description of Artificial Sequence: Synthetic peptide
AFGLTTGHT

SEQ ID NO: 39612 - protein, 9 aa, Artificial Sequence
  Description of Artificial Sequence: Synthetic peptide
CVLSRSTMR

SEQ ID NO: 39613 - protein, 9 aa, Artificial Sequence
  Description of Artificial Sequence: Synthetic peptide
LCKFANGAA

SEQ ID NO: 39614 - protein, 9 aa, Artificial Sequence
  Description of Artificial Sequence: Synthetic peptide
QSYPTMYQC

SEQ ID NO: 39615 - protein, 9 aa, Artificial Sequence
  Description of Artificial Sequence: Synthetic peptide
QPYWVAVDP

SEQ ID NO: 39616 - protein, 9 aa, Artificial Sequence
  Description of Artificial Sequence: Synthetic peptide
CKYKTKSIR

SEQ ID NO: 39617 - protein, 9 aa, Artificial Sequence
  Description of Artificial Sequence: Synthetic peptide
QCTLEISYV

SEQ ID NO: 39618 - protein, 9 aa, Artificial Sequence
  Description of Artificial Sequence: Synthetic peptide
EICMRSGFI

SEQ ID NO: 39619 - protein, 9 aa, Artificial Sequence
  Description of Artificial Sequence: Synthetic peptide
WVDQNVAQD

SEQ ID NO: 39620 - protein, 9 aa, Artificial Sequence
  Description of Artificial Sequence: Synthetic peptide
YYNHKIVEP

SEQ ID NO: 39621 - protein, 9 aa, Artificial Sequence
  Description of Artificial Sequence: Synthetic peptide
QHEQSNHIW

SEQ ID NO: 39622 - protein, 9 aa, Artificial Sequence
  Description of Artificial Sequence: Synthetic peptide
YVDHWTLGD

SEQ ID NO: 39623 - protein, 9 aa, Artificial Sequence
  Description of Artificial Sequence: Synthetic peptide
NIQLLHSYC

SEQ ID NO: 39624 - protein, 9 aa, Artificial Sequence
  Description of Artificial Sequence: Synthetic peptide
IMNPTAQNN

SEQ ID NO: 39625 - protein, 9 aa, Artificial Sequence
  Description of Artificial Sequence: Synthetic peptide
ATMNLSWGL

SEQ ID NO: 39626 - protein, 9 aa, Artificial Sequence
  Description of Artificial Sequence: Synthetic peptide
HTNYTVGYE

SEQ ID NO: 39627 - protein, 9 aa, Artificial Sequence
  Description of Artificial Sequence: Synthetic peptide
PWMHTMLNP

SEQ ID NO: 39628 - protein, 9 aa, Artificial Sequence
  Description of Artificial Sequence: Synthetic peptide
EAGPRKRDV

SEQ ID NO: 39629 - protein, 9 aa, Artificial Sequence
  Description of Artificial Sequence: Synthetic peptide
LEIGGKTRT

SEQ ID NO: 39630 - protein, 9 aa, Artificial Sequence
  Description of Artificial Sequence: Synthetic peptide
ARWFSTVEQ

SEQ ID NO: 39631 - protein, 9 aa, Artificial Sequence
  Description of Artificial Sequence: Synthetic peptide
KSDAQRNVA

SEQ ID NO: 39632 - protein, 9 aa, Artificial Sequence
  Description of Artificial Sequence: Synthetic peptide
WERCLELNQ

SEQ ID NO: 39633 - protein, 9 aa, Artificial Sequence
  Description of Artificial Sequence: Synthetic peptide
RCADNPYFR

SEQ ID NO: 39634 - protein, 9 aa, Artificial Sequence
  Description of Artificial Sequence: Synthetic peptide
QTDILRDVQ

SEQ ID NO: 39635 - protein, 9 aa, Artificial Sequence
  Description of Artificial Sequence: Synthetic peptide
MDGRDEIIH

SEQ ID NO: 39636 - protein, 9 aa, Artificial Sequence
  Description of Artificial Sequence: Synthetic peptide
ASDMQFWST

SEQ ID NO: 39637 - protein, 9 aa, Artificial Sequence
  Description of Artificial Sequence: Synthetic peptide
CSIQINNCR

SEQ ID NO: 39638 - protein, 9 aa, Artificial Sequence
  Description of Artificial Sequence: Synthetic peptide
PIWQGYWPW

SEQ ID NO: 39639 - protein, 9 aa, Artificial Sequence
  Description of Artificial Sequence: Synthetic peptide
GAANRIQSW

SEQ ID NO: 39640 - protein, 9 aa, Artificial Sequence
  Description of Artificial Sequence: Synthetic peptide
SGDWDFGEW

SEQ ID NO: 39641 - protein, 9 aa, Artificial Sequence
  Description of Artificial Sequence: Synthetic peptide
TQCKQLTVM

SEQ ID NO: 39642 - protein, 9 aa, Artificial Sequence
  Description of Artificial Sequence: Synthetic peptide
MHGIARMQQ

SEQ ID NO: 39643 - protein, 9 aa, Artificial Sequence
  Description of Artificial Sequence: Synthetic peptide
LMKTSPSYW

SEQ ID NO: 39644 - protein, 9 aa, Artificial Sequence
  Description of Artificial Sequence: Synthetic peptide
KMHGNERCF

SEQ ID NO: 39645 - protein, 9 aa, Artificial Sequence
  Description of Artificial Sequence: Synthetic peptide
RYPCCQSPF

SEQ ID NO: 39646 - protein, 9 aa, Artificial Sequence
  Description of Artificial Sequence: Synthetic peptide
AVYLDHVFS

SEQ ID NO: 39647 - protein, 9 aa, Artificial Sequence
  Description of Artificial Sequence: Synthetic peptide
ITAARNQYN

SEQ ID NO: 39648 - protein, 9 aa, Artificial Sequence
  Description of Artificial Sequence: Synthetic peptide
VGNVMIKMC

SEQ ID NO: 39649 - protein, 9 aa, Artificial Sequence
  Description of Artificial Sequence: Synthetic peptide
HHFHVNLDI

SEQ ID NO: 39650 - protein, 9 aa, Artificial Sequence
  Description of Artificial Sequence: Synthetic peptide
NRIQMTDFQ

SEQ ID NO: 39651 - protein, 9 aa, Artificial Sequence
  Description of Artificial Sequence: Synthetic peptide
QISKPSVQC

SEQ ID NO: 39652 - protein, 9 aa, Artificial Sequence
  Description of Artificial Sequence: Synthetic peptide
DVMQYQNHM

SEQ ID NO: 39653 - protein, 9 aa, Artificial Sequence
  Description of Artificial Sequence: Synthetic peptide
MQHTDWTSG

SEQ ID NO: 39654 - protein, 9 aa, Artificial Sequence
  Description of Artificial Sequence: Synthetic peptide
CWILHHRCS

SEQ ID NO: 39655 - protein, 9 aa, Artificial Sequence
  Description of Artificial Sequence: Synthetic peptide
FSWPIHEPD

SEQ ID NO: 39656 - protein, 9 aa, Artificial Sequence
  Description of Artificial Sequence: Synthetic peptide
RDQCRMESG

SEQ ID NO: 39657 - protein, 9 aa, Artificial Sequence
  Description of Artificial Sequence: Synthetic peptide
QIKTHSNVF

SEQ ID NO: 39658 - protein, 9 aa, Artificial Sequence
  Description of Artificial Sequence: Synthetic peptide
DSAKQWHHQ

SEQ ID NO: 39659 - protein, 9 aa, Artificial Sequence
  Description of Artificial Sequence: Synthetic peptide
SVLHVQALA

SEQ ID NO: 39660 - protein, 9 aa, Artificial Sequence
  Description of Artificial Sequence: Synthetic peptide
ETNDNMILH

SEQ ID NO: 39661 - protein, 9 aa, Artificial Sequence
  Description of Artificial Sequence: Synthetic peptide
FQWRTEMNN

SEQ ID NO: 39662 - protein, 9 aa, Artificial Sequence
  Description of Artificial Sequence: Synthetic peptide
FQTCDFWAT

SEQ ID NO: 39663 - protein, 9 aa, Artificial Sequence
  Description of Artificial Sequence: Synthetic peptide
TVNWYSGFG

SEQ ID NO: 39664 - protein, 9 aa, Artificial Sequence
  Description of Artificial Sequence: Synthetic peptide
YNFDYMKDG

SEQ ID NO: 39665 - protein, 9 aa, Artificial Sequence
  Description of Artificial Sequence: Synthetic peptide
KCADLIIRS

SEQ ID NO: 39666 - protein, 9 aa, Artificial Sequence
  Description of Artificial Sequence: Synthetic peptide
CCLWSYWAF

SEQ ID NO: 39667 - protein, 9 aa, Artificial Sequence
  Description of Artificial Sequence: Synthetic peptide
FQTLILSGL

SEQ ID NO: 39668 - protein, 9 aa, Artificial Sequence
  Description of Artificial Sequence: Synthetic peptide
ILINDREWG

SEQ ID NO: 39669 - protein, 9 aa, Artificial Sequence
  Description of Artificial Sequence: Synthetic peptide
EPEGELDKT

SEQ ID NO: 39670 - protein, 9 aa, Artificial Sequence
  Description of Artificial Sequence: Synthetic peptide
MYAGWLNHG

SEQ ID NO: 39671 - protein, 9 aa, Artificial Sequence
  Description of Artificial Sequence: Synthetic peptide
FLTCDQFEW

SEQ ID NO: 39672 - protein, 9 aa, Artificial Sequence
  Description of Artificial Sequence: Synthetic peptide
NMFQLKPQN

SEQ ID NO: 39673 - protein, 9 aa, Artificial Sequence
  Description of Artificial Sequence: Synthetic peptide
PYGPIEYDE

SEQ ID NO: 39674 - protein, 9 aa, Artificial Sequence
  Description of Artificial Sequence: Synthetic peptide
GGDGRVHNK

SEQ ID NO: 39675 - protein, 9 aa, Artificial Sequence
  Description of Artificial Sequence: Synthetic peptide
VDRLFRMEY

SEQ ID NO: 39676 - protein, 9 aa, Artificial Sequence
  Description of Artificial Sequence: Synthetic peptide
QWFTKGVGE

SEQ ID NO: 39677 - protein, 9 aa, Artificial Sequence
  Description of Artificial Sequence: Synthetic peptide
QSRCVDNTV

SEQ ID NO: 39678 - protein, 9 aa, Artificial Sequence
  Description of Artificial Sequence: Synthetic peptide
QIIYRCRST

SEQ ID NO: 39679 - protein, 9 aa, Artificial Sequence
  Description of Artificial Sequence: Synthetic peptide
KDGRNPHCL

SEQ ID NO: 39680 - protein, 9 aa, Artificial Sequence
  Description of Artificial Sequence: Synthetic peptide
AIGPALCLT

SEQ ID NO: 39681 - protein, 9 aa, Artificial Sequence
  Description of Artificial Sequence: Synthetic peptide
TQPEDHWLA

SEQ ID NO: 39682 - protein, 9 aa, Artificial Sequence
  Description of Artificial Sequence: Synthetic peptide
TGMTFNSFR

SEQ ID NO: 39683 - protein, 9 aa, Artificial Sequence
  Description of Artificial Sequence: Synthetic peptide
NAIPYFVQA

SEQ ID NO: 39684 - protein, 9 aa, Artificial Sequence
  Description of Artificial Sequence: Synthetic peptide
DVKSWAVCD

SEQ ID NO: 39685 - protein, 9 aa, Artificial Sequence
  Description of Artificial Sequence: Synthetic peptide
VLPMGPVDP

SEQ ID NO: 39686 - protein, 9 aa, Artificial Sequence
  Description of Artificial Sequence: Synthetic peptide
CDHVTKHPT

SEQ ID NO: 39687 - protein, 9 aa, Artificial Sequence
  Description of Artificial Sequence: Synthetic peptide
SNVACIQAF

SEQ ID NO: 39688 - protein, 9 aa, Artificial Sequence
  Description of Artificial Sequence: Synthetic peptide
THVKRFDYE

SEQ ID NO: 39689 - protein, 9 aa, Artificial Sequence
  Description of Artificial Sequence: Synthetic peptide
VFNLMLQDK

SEQ ID NO: 39690 - protein, 9 aa, Artificial Sequence
  Description of Artificial Sequence: Synthetic peptide
ECGCMYWGY

SEQ ID NO: 39691 - protein, 9 aa, Artificial Sequence
  Description of Artificial Sequence: Synthetic peptide
MYTGMRCWR

SEQ ID NO: 39692 - protein, 9 aa, Artificial Sequence
  Description of Artificial Sequence: Synthetic peptide
MDNCPPMWN

SEQ ID NO: 39693 - protein, 9 aa, Artificial Sequence
  Description of Artificial Sequence: Synthetic peptide
ATMWMQWWD

SEQ ID NO: 39694 - protein, 9 aa, Artificial Sequence
  Description of Artificial Sequence: Synthetic peptide
TNSCECVDR

SEQ ID NO: 39695 - protein, 9 aa, Artificial Sequence
  Description of Artificial Sequence: Synthetic peptide
GHLFNNNEW

SEQ ID NO: 39696 - protein, 9 aa, Artificial Sequence
  Description of Artificial Sequence: Synthetic peptide
ASMHEETCL

SEQ ID NO: 39697 - protein, 9 aa, Artificial Sequence
  Description of Artificial Sequence: Synthetic peptide
VCDGHTAFP

SEQ ID NO: 39698 - protein, 9 aa, Artificial Sequence
  Description of Artificial Sequence: Synthetic peptide
TISQIPWVR

SEQ ID NO: 39699 - protein, 9 aa, Artificial Sequence
  Description of Artificial Sequence: Synthetic peptide
KNCIMLASN

SEQ ID NO: 39700 - protein, 9 aa, Artificial Sequence
  Description of Artificial Sequence: Synthetic peptide
QGKQLYHMC

SEQ ID NO: 39701 - protein, 9 aa, Artificial Sequence
  Description of Artificial Sequence: Synthetic peptide
YFPSIQCYE

SEQ ID NO: 39702 - protein, 9 aa, Artificial Sequence
  Description of Artificial Sequence: Synthetic peptide
KMAGIGCWY

SEQ ID NO: 39703 - protein, 9 aa, Artificial Sequence
  Description of Artificial Sequence: Synthetic peptide
GGALARSSI

SEQ ID NO: 39704 - protein, 9 aa, Artificial Sequence
  Description of Artificial Sequence: Synthetic peptide
PDLWYEKSS

SEQ ID NO: 39705 - protein, 9 aa, Artificial Sequence
  Description of Artificial Sequence: Synthetic peptide
NVWTNIAEM

SEQ ID NO: 39706 - protein, 9 aa, Artificial Sequence
  Description of Artificial Sequence: Synthetic peptide
HIKVEHEEV

SEQ ID NO: 39707 - protein, 9 aa, Artificial Sequence
  Description of Artificial Sequence: Synthetic peptide
EHVQCSADM

SEQ ID NO: 39708 - protein, 9 aa, Artificial Sequence
  Description of Artificial Sequence: Synthetic peptide
LYMMALLPT

SEQ ID NO: 39709 - protein, 9 aa, Artificial Sequence
  Description of Artificial Sequence: Synthetic peptide
ASIATMDRI

SEQ ID NO: 39710 - protein, 9 aa, Artificial Sequence
  Description of Artificial Sequence: Synthetic peptide
YKGMEKNPV

SEQ ID NO: 39711 - protein, 9 aa, Artificial Sequence
  Description of Artificial Sequence: Synthetic peptide
QMKGATEFC

SEQ ID NO: 39712 - protein, 9 aa, Artificial Sequence
  Description of Artificial Sequence: Synthetic peptide
AADIFAIND

SEQ ID NO: 39713 - protein, 9 aa, Artificial Sequence
  Description of Artificial Sequence: Synthetic peptide
NSGVLIGME

SEQ ID NO: 39714 - protein, 9 aa, Artificial Sequence
  Description of Artificial Sequence: Synthetic peptide
TSNHNMALE

SEQ ID NO: 39715 - protein, 9 aa, Artificial Sequence
  Description of Artificial Sequence: Synthetic peptide
LIEKQRWML

SEQ ID NO: 39716 - protein, 9 aa, Artificial Sequence
  Description of Artificial Sequence: Synthetic peptide
SGFFVHTSN

SEQ ID NO: 39717 - protein, 9 aa, Artificial Sequence
  Description of Artificial Sequence: Synthetic peptide
QSSHCKQMV

SEQ ID NO: 39718 - protein, 9 aa, Artificial Sequence
  Description of Artificial Sequence: Synthetic peptide
RDYIERREP

SEQ ID NO: 39719 - protein, 9 aa, Artificial Sequence
  Description of Artificial Sequence: Synthetic peptide
RQAWPKDGM

SEQ ID NO: 39720 - protein, 9 aa, Artificial Sequence
  Description of Artificial Sequence: Synthetic peptide
QHHWKWSTE

SEQ ID NO: 39721 - protein, 9 aa, Artificial Sequence
  Description of Artificial Sequence: Synthetic peptide
YCECGHWPN

SEQ ID NO: 39722 - protein, 9 aa, Artificial Sequence
  Description of Artificial Sequence: Synthetic peptide
HMGIAYNDH

SEQ ID NO: 39723 - protein, 9 aa, Artificial Sequence
  Description of Artificial Sequence: Synthetic peptide
LCAVCGDCD

SEQ ID NO: 39724 - protein, 9 aa, Artificial Sequence
  Description of Artificial Sequence: Synthetic peptide
TPLMMCQAS

SEQ ID NO: 39725 - protein, 9 aa, Artificial Sequence
  Description of Artificial Sequence: Synthetic peptide
TYESLQNSW

SEQ ID NO: 39726 - protein, 9 aa, Artificial Sequence
  Description of Artificial Sequence: Synthetic peptide
GRALGKKQG

SEQ ID NO: 39727 - protein, 9 aa, Artificial Sequence
  Description of Artificial Sequence: Synthetic peptide
YTKYNWKAA

SEQ ID NO: 39728 - protein, 9 aa, Artificial Sequence
  Description of Artificial Sequence: Synthetic peptide
TATCGIEVE

SEQ ID NO: 39729 - protein, 9 aa, Artificial Sequence
  Description of Artificial Sequence: Synthetic peptide
MPWLDKPPC

SEQ ID NO: 39730 - protein, 9 aa, Artificial Sequence
  Description of Artificial Sequence: Synthetic peptide
TRQWMCVHC

SEQ ID NO: 39731 - protein, 9 aa, Artificial Sequence
  Description of Artificial Sequence: Synthetic peptide
DQEAQVVTG

SEQ ID NO: 39732 - protein, 9 aa, Artificial Sequence
  Description of Artificial Sequence: Synthetic peptide
MVENGLRLQ

SEQ ID NO: 39733 - protein, 9 aa, Artificial Sequence
  Description of Artificial Sequence: Synthetic peptide
EAGCKMWPT

SEQ ID NO: 39734 - protein, 9 aa, Artificial Sequence
  Description of Artificial Sequence: Synthetic peptide
AIGCFQNGG

SEQ ID NO: 39735 - protein, 9 aa, Artificial Sequence
  Description of Artificial Sequence: Synthetic peptide
GLFEGSPGA

SEQ ID NO: 39736 - protein, 9 aa, Artificial Sequence
  Description of Artificial Sequence: Synthetic peptide
YLNKNPHQM

SEQ ID NO: 39737 - protein, 9 aa, Artificial Sequence
  Description of Artificial Sequence: Synthetic peptide
CQMLCRPPV

SEQ ID NO: 39738 - protein, 9 aa, Artificial Sequence
  Description of Artificial Sequence: Synthetic peptide
VNLPYGYAK

SEQ ID NO: 39739 - protein, 9 aa, Artificial Sequence
  Description of Artificial Sequence: Synthetic peptide
LMTPQVKQA

SEQ ID NO: 39740 - protein, 9 aa, Artificial Sequence
  Description of Artificial Sequence: Synthetic peptide
SQERMDYDG

SEQ ID NO: 39741 - protein, 9 aa, Artificial Sequence
  Description of Artificial Sequence: Synthetic peptide
NTHTGNDRL

SEQ ID NO: 39742 - protein, 9 aa, Artificial Sequence
  Description of Artificial Sequence: Synthetic peptide
QGHKTMHVF

SEQ ID NO: 39743 - protein, 9 aa, Artificial Sequence
  Description of Artificial Sequence: Synthetic peptide
FGGMTPYGV

SEQ ID NO: 39744 - protein, 9 aa, Artificial Sequence
  Description of Artificial Sequence: Synthetic peptide
SECEVLCSL

SEQ ID NO: 39745 - protein, 9 aa, Artificial Sequence
  Description of Artificial Sequence: Synthetic peptide
EIHMFGQSE

SEQ ID NO: 39746 - protein, 9 aa, Artificial Sequence
  Description of Artificial Sequence: Synthetic peptide
QAKMILDGT

SEQ ID NO: 39747 - protein, 9 aa, Artificial Sequence
  Description of Artificial Sequence: Synthetic peptide
VSDECYFDM

SEQ ID NO: 39748 - protein, 9 aa, Artificial Sequence
  Description of Artificial Sequence: Synthetic peptide
REWMFTLMA

SEQ ID NO: 39749 - protein, 9 aa, Artificial Sequence
  Description of Artificial Sequence: Synthetic peptide
CNGYWMCMS

SEQ ID NO: 39750 - protein, 9 aa, Artificial Sequence
  Description of Artificial Sequence: Synthetic peptide
QIRSLITHD

SEQ ID NO: 39751 - protein, 9 aa, Artificial Sequence
  Description of Artificial Sequence: Synthetic peptide
QFAQLWCAK

SEQ ID NO: 39752 - protein, 9 aa, Artificial Sequence
  Description of Artificial Sequence: Synthetic peptide
RYNNCPNLW

SEQ ID NO: 39753 - protein, 9 aa, Artificial Sequence
  Description of Artificial Sequence: Synthetic peptide
EVAFTTSSD

SEQ ID NO: 39754 - protein, 9 aa, Artificial Sequence
  Description of Artificial Sequence: Synthetic peptide
YVKMCSMRN

SEQ ID NO: 39755 - protein, 9 aa, Artificial Sequence
  Description of Artificial Sequence: Synthetic peptide
HTVMEWSPT

SEQ ID NO: 39756 - protein, 9 aa, Artificial Sequence
  Description of Artificial Sequence: Synthetic peptide
TFMFNSEWS

SEQ ID NO: 39757 - protein, 9 aa, Artificial Sequence
  Description of Artificial Sequence: Synthetic peptide
AGMYKCQED

SEQ ID NO: 39758 - protein, 9 aa, Artificial Sequence
  Description of Artificial Sequence: Synthetic peptide
FCILASDMA

SEQ ID NO: 39759 - protein, 9 aa, Artificial Sequence
  Description of Artificial Sequence: Synthetic peptide
DLIVATEWF

SEQ ID NO: 39760 - protein, 9 aa, Artificial Sequence
  Description of Artificial Sequence: Synthetic peptide
QGFSTDVKP

SEQ ID NO: 39761 - protein, 9 aa, Artificial Sequence
  Description of Artificial Sequence: Synthetic peptide
FMIMAKTQA

SEQ ID NO: 39762 - protein, 9 aa, Artificial Sequence
  Description of Artificial Sequence: Synthetic peptide
QSAHPEPMC

SEQ ID NO: 39763 - protein, 9 aa, Artificial Sequence
  Description of Artificial Sequence: Synthetic peptide
YDYWMQAPT

SEQ ID NO: 39764 - protein, 9 aa, Artificial Sequence
  Description of Artificial Sequence: Synthetic peptide
VVCRMWHQP

SEQ ID NO: 39765 - protein, 9 aa, Artificial Sequence
  Description of Artificial Sequence: Synthetic peptide
GSKIIMHTE

SEQ ID NO: 39766 - protein, 9 aa, Artificial Sequence
  Description of Artificial Sequence: Synthetic peptide
NHSLCWDSK

SEQ ID NO: 39767 - protein, 9 aa, Artificial Sequence
  Description of Artificial Sequence: Synthetic peptide
TSSKHLVFD

SEQ ID NO: 39768 - protein, 9 aa, Artificial Sequence
  Description of Artificial Sequence: Synthetic peptide
TKMIIFDSW

SEQ ID NO: 39769 - protein, 9 aa, Artificial Sequence
  Description of Artificial Sequence: Synthetic peptide
ENTMWQSSQ

SEQ ID NO: 39770 - protein, 9 aa, Artificial Sequence
  Description of Artificial Sequence: Synthetic peptide
PVICVWHDN

SEQ ID NO: 39771 - protein, 9 aa, Artificial Sequence
  Description of Artificial Sequence: Synthetic peptide
NWTGNMQWA

SEQ ID NO: 39772 - protein, 9 aa, Artificial Sequence
  Description of Artificial Sequence: Synthetic peptide
MNLQIGSKG

SEQ ID NO: 39773 - protein, 9 aa, Artificial Sequence
  Description of Artificial Sequence: Synthetic peptide
DRKQADQIY

SEQ ID NO: 39774 - protein, 9 aa, Artificial Sequence
  Description of Artificial Sequence: Synthetic peptide
GGNAGRDTT

SEQ ID NO: 39775 - protein, 9 aa, Artificial Sequence
  Description of Artificial Sequence: Synthetic peptide
WGGMPNNQG

SEQ ID NO: 39776 - protein, 9 aa, Artificial Sequence
  Description of Artificial Sequence: Synthetic peptide
HSMMPGWPS

SEQ ID NO: 39777 - protein, 9 aa, Artificial Sequence
  Description of Artificial Sequence: Synthetic peptide
DSDTWAMHE

SEQ ID NO: 39778 - protein, 9 aa, Artificial Sequence
  Description of Artificial Sequence: Synthetic peptide
EGIMNHAPT

SEQ ID NO: 39779 - protein, 9 aa, Artificial Sequence
  Description of Artificial Sequence: Synthetic peptide
FQVMDHANP

SEQ ID NO: 39780 - protein, 9 aa, Artificial Sequence
  Description of Artificial Sequence: Synthetic peptide
NSNSMNCVS

SEQ ID NO: 39781 - protein, 9 aa, Artificial Sequence
  Description of Artificial Sequence: Synthetic peptide
QQVLGLAGN

SEQ ID NO: 39782 - protein, 9 aa, Artificial Sequence
  Description of Artificial Sequence: Synthetic peptide
QSSPDQRAL

SEQ ID NO: 39783 - protein, 9 aa, Artificial Sequence
  Description of Artificial Sequence: Synthetic peptide
AAPIAHSMR

SEQ ID NO: 39784 - protein, 9 aa, Artificial Sequence
  Description of Artificial Sequence: Synthetic peptide
ADPTTETPH

SEQ ID NO: 39785 - protein, 9 aa, Artificial Sequence
  Description of Artificial Sequence: Synthetic peptide
AFNEMEQGD

SEQ ID NO: 39786 - protein, 9 aa, Artificial Sequence
  Description of Artificial Sequence: Synthetic peptide
AHAPWCWAV

SEQ ID NO: 39787 - protein, 9 aa, Artificial Sequence
  Description of Artificial Sequence: Synthetic peptide
AMTFSVSCS

SEQ ID NO: 39788 - protein, 9 aa, Artificial Sequence
  Description of Artificial Sequence: Synthetic peptide
ANYALHYDR

SEQ ID NO: 39789 - protein, 9 aa, Artificial Sequence
  Description of Artificial Sequence: Synthetic peptide
AREFWHCRD

SEQ ID NO: 39790 - protein, 9 aa, Artificial Sequence
  Description of Artificial Sequence: Synthetic peptide
ATNIKESVN

SEQ ID NO: 39791 - protein, 9 aa, Artificial Sequence
  Description of Artificial Sequence: Synthetic peptide
AVHAFPWSF

SEQ ID NO: 39792 - protein, 9 aa, Artificial Sequence
  Description of Artificial Sequence: Synthetic peptide
AVKDMKKWD

SEQ ID NO: 39793 - protein, 9 aa, Artificial Sequence
  Description of Artificial Sequence: Synthetic peptide
CDEDLYVTP

SEQ ID NO: 39794 - protein, 9 aa, Artificial Sequence
  Description of Artificial Sequence: Synthetic peptide
CHIQVDHHF

SEQ ID NO: 39795 - protein, 9 aa, Artificial Sequence
  Description of Artificial Sequence: Synthetic peptide
CMDGQLKWF

SEQ ID NO: 39796 - protein, 9 aa, Artificial Sequence
  Description of Artificial Sequence: Synthetic peptide
CPWNSQVTL

SEQ ID NO: 39797 - protein, 9 aa, Artificial Sequence
  Description of Artificial Sequence: Synthetic peptide
CQQYAAWAV

SEQ ID NO: 39798 - protein, 9 aa, Artificial Sequence
  Description of Artificial Sequence: Synthetic peptide
CRIASFKAI

SEQ ID NO: 39799 - protein, 9 aa, Artificial Sequence
  Description of Artificial Sequence: Synthetic peptide
CSAYCHACE

SEQ ID NO: 39800 - protein, 9 aa, Artificial Sequence
  Description of Artificial Sequence: Synthetic peptide
CSSDRDGLP

SEQ ID NO: 39801 - protein, 9 aa, Artificial Sequence
  Description of Artificial Sequence: Synthetic peptide
DDGHHVPIM

SEQ ID NO: 39802 - protein, 9 aa, Artificial Sequence
  Description of Artificial Sequence: Synthetic peptide
DDMFAQYFS

SEQ ID NO: 39803 - protein, 9 aa, Artificial Sequence
  Description of Artificial Sequence: Synthetic peptide
DHSMWTWAE

SEQ ID NO: 39804 - protein, 9 aa, Artificial Sequence
  Description of Artificial Sequence: Synthetic peptide
DICNATCWV

SEQ ID NO: 39805 - protein, 9 aa, Artificial Sequence
  Description of Artificial Sequence: Synthetic peptide
DITQTDMWG

SEQ ID NO: 39806 - protein, 9 aa, Artificial Sequence
  Description of Artificial Sequence: Synthetic peptide
DIWTAKENV

SEQ ID NO: 39807 - protein, 9 aa, Artificial Sequence
  Description of Artificial Sequence: Synthetic peptide
DLAMTMVNP

SEQ ID NO: 39808 - protein, 9 aa, Artificial Sequence
  Description of Artificial Sequence: Synthetic peptide
DSGPQTQMV

SEQ ID NO: 39809 - protein, 9 aa, Artificial Sequence
  Description of Artificial Sequence: Synthetic peptide
DTAINQCWI

SEQ ID NO: 39810 - protein, 9 aa, Artificial Sequence
  Description of Artificial Sequence: Synthetic peptide
DVEPSECSW

SEQ ID NO: 39811 - protein, 9 aa, Artificial Sequence
  Description of Artificial Sequence: Synthetic peptide
DVQNANQMF

SEQ ID NO: 39812 - protein, 9 aa, Artificial Sequence
  Description of Artificial Sequence: Synthetic peptide
DVRYELPYR

SEQ ID NO: 39813 - protein, 9 aa, Artificial Sequence
  Description of Artificial Sequence: Synthetic peptide
EAVGMPLCN

SEQ ID NO: 39814 - protein, 9 aa, Artificial Sequence
  Description of Artificial Sequence: Synthetic peptide
EDWYWMNLC

SEQ ID NO: 39815 - protein, 9 aa, Artificial Sequence
  Description of Artificial Sequence: Synthetic peptide
EFKVYQNCH

SEQ ID NO: 39816 - protein, 9 aa, Artificial Sequence
  Description of Artificial Sequence: Synthetic peptide
EKYTFCIFL

SEQ ID NO: 39817 - protein, 9 aa, Artificial Sequence
  Description of Artificial Sequence: Synthetic peptide
ELLYTLMFH

SEQ ID NO: 39818 - protein, 9 aa, Artificial Sequence
  Description of Artificial Sequence: Synthetic peptide
EMEAQLLGE

SEQ ID NO: 39819 - protein, 9 aa, Artificial Sequence
  Description of Artificial Sequence: Synthetic peptide
EPCLVNISH

SEQ ID NO: 39820 - protein, 9 aa, Artificial Sequence
  Description of Artificial Sequence: Synthetic peptide
EQNASMTMH

SEQ ID NO: 39821 - protein, 9 aa, Artificial Sequence
  Description of Artificial Sequence: Synthetic peptide
ERDHIPCYA

SEQ ID NO: 39822 - protein, 9 aa, Artificial Sequence
  Description of Artificial Sequence: Synthetic peptide
ESSNTQPWH

SEQ ID NO: 39823 - protein, 9 aa, Artificial Sequence
  Description of Artificial Sequence: Synthetic peptide
ETASDPQTI

SEQ ID NO: 39824 - protein, 9 aa, Artificial Sequence
  Description of Artificial Sequence: Synthetic peptide
ETKYSYEVG

SEQ ID NO: 39825 - protein, 9 aa, Artificial Sequence
  Description of Artificial Sequence: Synthetic peptide
ETTDGYGQV

SEQ ID NO: 39826 - protein, 9 aa, Artificial Sequence
  Description of Artificial Sequence: Synthetic peptide
ETVWNDEQS

SEQ ID NO: 39827 - protein, 9 aa, Artificial Sequence
  Description of Artificial Sequence: Synthetic peptide
EVALQMFSQ

SEQ ID NO: 39828 - protein, 9 aa, Artificial Sequence
  Description of Artificial Sequence: Synthetic peptide
EVCQNINEA

SEQ ID NO: 39829 - protein, 9 aa, Artificial Sequence
  Description of Artificial Sequence: Synthetic peptide
EVMPITGYG

SEQ ID NO: 39830 - protein, 9 aa, Artificial Sequence
  Description of Artificial Sequence: Synthetic peptide
FHELRHVDT

SEQ ID NO: 39831 - protein, 9 aa, Artificial Sequence
  Description of Artificial Sequence: Synthetic peptide
FKDWNTVGM

SEQ ID NO: 39832 - protein, 9 aa, Artificial Sequence
  Description of Artificial Sequence: Synthetic peptide
FKTRETTEI

SEQ ID NO: 39833 - protein, 9 aa, Artificial Sequence
  Description of Artificial Sequence: Synthetic peptide
FMHHTVRSF

SEQ ID NO: 39834 - protein, 9 aa, Artificial Sequence
  Description of Artificial Sequence: Synthetic peptide
FMPAKSVAD

SEQ ID NO: 39835 - protein, 9 aa, Artificial Sequence
  Description of Artificial Sequence: Synthetic peptide
FMRSVQWNA

SEQ ID NO: 39836 - protein, 9 aa, Artificial Sequence
  Description of Artificial Sequence: Synthetic peptide
FSGMETRPP

SEQ ID NO: 39837 - protein, 9 aa, Artificial Sequence
  Description of Artificial Sequence: Synthetic peptide
FTLVATNIH

SEQ ID NO: 39838 - protein, 9 aa, Artificial Sequence
  Description of Artificial Sequence: Synthetic peptide
FVSSVTQVA

SEQ ID NO: 39839 - protein, 9 aa, Artificial Sequence
  Description of Artificial Sequence: Synthetic peptide
GAGDMPMLD

SEQ ID NO: 39840 - protein, 9 aa, Artificial Sequence
  Description of Artificial Sequence: Synthetic peptide
GDQGPRQQL

SEQ ID NO: 39841 - protein, 9 aa, Artificial Sequence
  Description of Artificial Sequence: Synthetic peptide
GFHPIPWFP

SEQ ID NO: 39842 - protein, 9 aa, Artificial Sequence
  Description of Artificial Sequence: Synthetic peptide
GIEMDLCNG

SEQ ID NO: 39843 - protein, 9 aa, Artificial Sequence
  Description of Artificial Sequence: Synthetic peptide
GIGPQLNWA

SEQ ID NO: 39844 - protein, 9 aa, Artificial Sequence
  Description of Artificial Sequence: Synthetic peptide
GIRFFEKGI

SEQ ID NO: 39845 - protein, 9 aa, Artificial Sequence
  Description of Artificial Sequence: Synthetic peptide
GMHMPCDKN

SEQ ID NO: 39846 - protein, 9 aa, Artificial Sequence
  Description of Artificial Sequence: Synthetic peptide
GQAKYWMGT

SEQ ID NO: 39847 - protein, 9 aa, Artificial Sequence
  Description of Artificial Sequence: Synthetic peptide
GYKPDRLHD

SEQ ID NO: 39848 - protein, 9 aa, Artificial Sequence
  Description of Artificial Sequence: Synthetic peptide
HMVINQMDM

SEQ ID NO: 39849 - protein, 9 aa, Artificial Sequence
  Description of Artificial Sequence: Synthetic peptide
HPRQGWMHS

SEQ ID NO: 39850 - protein, 9 aa, Artificial Sequence
  Description of Artificial Sequence: Synthetic peptide
IAGYRHNTD

SEQ ID NO: 39851 - protein, 9 aa, Artificial Sequence
  Description of Artificial Sequence: Synthetic peptide
IFHNYDLTG

SEQ ID NO: 39852 - protein, 9 aa, Artificial Sequence
  Description of Artificial Sequence: Synthetic peptide
INDARQHFG

SEQ ID NO: 39853 - protein, 9 aa, Artificial Sequence
  Description of Artificial Sequence: Synthetic peptide
INVAMQKEG

SEQ ID NO: 39854 - protein, 9 aa, Artificial Sequence
  Description of Artificial Sequence: Synthetic peptide
IRGDEMLED

SEQ ID NO: 39855 - protein, 9 aa, Artificial Sequence
  Description of Artificial Sequence: Synthetic peptide
ISNYVGFHG

SEQ ID NO: 39856 - protein, 9 aa, Artificial Sequence
  Description of Artificial Sequence: Synthetic peptide
IVLHMSEGY

SEQ ID NO: 39857 - protein, 9 aa, Artificial Sequence
  Description of Artificial Sequence: Synthetic peptide
KAMPEQLWP

SEQ ID NO: 39858 - protein, 9 aa, Artificial Sequence
  Description of Artificial Sequence: Synthetic peptide
KAVSYQNPF

SEQ ID NO: 39859 - protein, 9 aa, Artificial Sequence
  Description of Artificial Sequence: Synthetic peptide
KMHRRIWGA

SEQ ID NO: 39860 - protein, 9 aa, Artificial Sequence
  Description of Artificial Sequence: Synthetic peptide
KNTETMYSE

SEQ ID NO: 39861 - protein, 9 aa, Artificial Sequence
  Description of Artificial Sequence: Synthetic peptide
KNWPMDKHL

SEQ ID NO: 39862 - protein, 9 aa, Artificial Sequence
  Description of Artificial Sequence: Synthetic peptide
KVNEMVAEV

SEQ ID NO: 39863 - protein, 9 aa, Artificial Sequence
  Description of Artificial Sequence: Synthetic peptide
KVTEYCDCG

SEQ ID NO: 39864 - protein, 9 aa, Artificial Sequence
  Description of Artificial Sequence: Synthetic peptide
LIICTWKAG

SEQ ID NO: 39865 - protein, 9 aa, Artificial Sequence
  Description of Artificial Sequence: Synthetic peptide
LIMEAMLFS

SEQ ID NO: 39866 - protein, 9 aa, Artificial Sequence
  Description of Artificial Sequence: Synthetic peptide
LLRRNDELK

SEQ ID NO: 39867 - protein, 9 aa, Artificial Sequence
  Description of Artificial Sequence: Synthetic peptide
LMDCHSVIP

SEQ ID NO: 39868 - protein, 9 aa, Artificial Sequence
  Description of Artificial Sequence: Synthetic peptide
LMQMDKPNG

SEQ ID NO: 39869 - protein, 9 aa, Artificial Sequence
  Description of Artificial Sequence: Synthetic peptide
LPHMCKCKG

SEQ ID NO: 39870 - protein, 9 aa, Artificial Sequence
  Description of Artificial Sequence: Synthetic peptide
LTMADGLMR

SEQ ID NO: 39871 - protein, 9 aa, Artificial Sequence
  Description of Artificial Sequence: Synthetic peptide
LTNEVREEN

SEQ ID NO: 39872 - protein, 9 aa, Artificial Sequence
  Description of Artificial Sequence: Synthetic peptide
LTWISHGVN

SEQ ID NO: 39873 - protein, 9 aa, Artificial Sequence
  Description of Artificial Sequence: Synthetic peptide
MAMEYIEMY

SEQ ID NO: 39874 - protein, 9 aa, Artificial Sequence
  Description of Artificial Sequence: Synthetic peptide
MARIYPGTC

SEQ ID NO: 39875 - protein, 9 aa, Artificial Sequence
  Description of Artificial Sequence: Synthetic peptide
MAYMEHHVG

SEQ ID NO: 39876 - protein, 9 aa, Artificial Sequence
  Description of Artificial Sequence: Synthetic peptide
MEMEYEEFM

SEQ ID NO: 39877 - protein, 9 aa, Artificial Sequence
  Description of Artificial Sequence: Synthetic peptide
MKQDSTQGM

SEQ ID NO: 39878 - protein, 9 aa, Artificial Sequence
  Description of Artificial Sequence: Synthetic peptide
MPLCGYNVR

SEQ ID NO: 39879 - protein, 9 aa, Artificial Sequence
  Description of Artificial Sequence: Synthetic peptide
MTDQPPSKV

SEQ ID NO: 39880 - protein, 9 aa, Artificial Sequence
  Description of Artificial Sequence: Synthetic peptide
MVWNVAMMD

SEQ ID NO: 39881 - protein, 9 aa, Artificial Sequence
  Description of Artificial Sequence: Synthetic peptide
NDELCVYCW

SEQ ID NO: 39882 - protein, 9 aa, Artificial Sequence
  Description of Artificial Sequence: Synthetic peptide
NGVEQIKHE

SEQ ID NO: 39883 - protein, 9 aa, Artificial Sequence
  Description of Artificial Sequence: Synthetic peptide
NMVMFVMDN

SEQ ID NO: 39884 - protein, 9 aa, Artificial Sequence
  Description of Artificial Sequence: Synthetic peptide
NQICHQYDA

SEQ ID NO: 39885 - protein, 9 aa, Artificial Sequence
  Description of Artificial Sequence: Synthetic peptide
NSTVHWQQN

SEQ ID NO: 39886 - protein, 9 aa, Artificial Sequence
  Description of Artificial Sequence: Synthetic peptide
NTQWYMMNA

SEQ ID NO: 39887 - protein, 9 aa, Artificial Sequence
  Description of Artificial Sequence: Synthetic peptide
NVEDNRKVF

SEQ ID NO: 39888 - protein, 9 aa, Artificial Sequence
  Description of Artificial Sequence: Synthetic peptide
NYRNQKNCH

SEQ ID NO: 39889 - protein, 9 aa, Artificial Sequence
  Description of Artificial Sequence: Synthetic peptide
QRATTKRHA

SEQ ID NO: 39890 - protein, 9 aa, Artificial Sequence
  Description of Artificial Sequence: Synthetic peptide
QVHPVNHWG

SEQ ID NO: 39891 - protein, 9 aa, Artificial Sequence
  Description of Artificial Sequence: Synthetic peptide
QVQVVDEWS

SEQ ID NO: 39892 - protein, 9 aa, Artificial Sequence
  Description of Artificial Sequence: Synthetic peptide
QYQHERGWL

SEQ ID NO: 39893 - protein, 9 aa, Artificial Sequence
  Description of Artificial Sequence: Synthetic peptide
RGGYIVAGI

SEQ ID NO: 39894 - protein, 9 aa, Artificial Sequence
  Description of Artificial Sequence: Synthetic peptide
RGYWDVREG

SEQ ID NO: 39895 - protein, 9 aa, Artificial Sequence
  Description of Artificial Sequence: Synthetic peptide
SAECMTVSS

SEQ ID NO: 39896 - protein, 9 aa, Artificial Sequence
  Description of Artificial Sequence: Synthetic peptide
SIWHYQHMQ

SEQ ID NO: 39897 - protein, 9 aa, Artificial Sequence
  Description of Artificial Sequence: Synthetic peptide
SIYKYTALN

SEQ ID NO: 39898 - protein, 9 aa, Artificial Sequence
  Description of Artificial Sequence: Synthetic peptide
SMLLSNQNQ

SEQ ID NO: 39899 - protein, 9 aa, Artificial Sequence
  Description of Artificial Sequence: Synthetic peptide
SNQCLPYDC

SEQ ID NO: 39900 - protein, 9 aa, Artificial Sequence
  Description of Artificial Sequence: Synthetic peptide
SSAVIMKFP

SEQ ID NO: 39901 - protein, 9 aa, Artificial Sequence
  Description of Artificial Sequence: Synthetic peptide
STHTVSWDM

SEQ ID NO: 39902 - protein, 9 aa, Artificial Sequence
  Description of Artificial Sequence: Synthetic peptide
STQPSAKQV

SEQ ID NO: 39903 - protein, 9 aa, Artificial Sequence
  Description of Artificial Sequence: Synthetic peptide
SVDYVEGYC

SEQ ID NO: 39904 - protein, 9 aa, Artificial Sequence
  Description of Artificial Sequence: Synthetic peptide
TAMAYTSCE

SEQ ID NO: 39905 - protein, 9 aa, Artificial Sequence
  Description of Artificial Sequence: Synthetic peptide
TCQHAPSPM

SEQ ID NO: 39906 - protein, 9 aa, Artificial Sequence
  Description of Artificial Sequence: Synthetic peptide
TFEQIPCWT

SEQ ID NO: 39907 - protein, 9 aa, Artificial Sequence
  Description of Artificial Sequence: Synthetic peptide
TFHVCQTMG

SEQ ID NO: 39908 - protein, 9 aa, Artificial Sequence
  Description of Artificial Sequence: Synthetic peptide
TMQVMEVIS

SEQ ID NO: 39909 - protein, 9 aa, Artificial Sequence
  Description of Artificial Sequence: Synthetic peptide
TNLRPMTER

SEQ ID NO: 39910 - protein, 9 aa, Artificial Sequence
  Description of Artificial Sequence: Synthetic peptide
TNNTMRHEF

SEQ ID NO: 39911 - protein, 9 aa, Artificial Sequence
  Description of Artificial Sequence: Synthetic peptide
TRFSSQGKM

SEQ ID NO: 39912 - protein, 9 aa, Artificial Sequence
  Description of Artificial Sequence: Synthetic peptide
TSHAQTQMD

SEQ ID NO: 39913 - protein, 9 aa, Artificial Sequence
  Description of Artificial Sequence: Synthetic peptide
TSRTRNCTH

SEQ ID NO: 39914 - protein, 9 aa, Artificial Sequence
  Description of Artificial Sequence: Synthetic peptide
TYALDMVST

SEQ ID NO: 39915 - protein, 9 aa, Artificial Sequence
  Description of Artificial Sequence: Synthetic peptide
TYGLYDDSY

SEQ ID NO: 39916 - protein, 9 aa, Artificial Sequence
  Description of Artificial Sequence: Synthetic peptide
VAMYYESEM

SEQ ID NO: 39917 - protein, 9 aa, Artificial Sequence
  Description of Artificial Sequence: Synthetic peptide
VDNKFMEHK

SEQ ID NO: 39918 - protein, 9 aa, Artificial Sequence
  Description of Artificial Sequence: Synthetic peptide
VDPCANEGH

SEQ ID NO: 39919 - protein, 9 aa, Artificial Sequence
  Description of Artificial Sequence: Synthetic peptide
VIEEMTMVC

SEQ ID NO: 39920 - protein, 9 aa, Artificial Sequence
  Description of Artificial Sequence: Synthetic peptide
VIMPMQPRC

SEQ ID NO: 39921 - protein, 9 aa, Artificial Sequence
  Description of Artificial Sequence: Synthetic peptide
VMLHLIHYP

SEQ ID NO: 39922 - protein, 9 aa, Artificial Sequence
  Description of Artificial Sequence: Synthetic peptide
VPCIWVLKD

SEQ ID NO: 39923 - protein, 9 aa, Artificial Sequence
  Description of Artificial Sequence: Synthetic peptide
VSTCCQANG

SEQ ID NO: 39924 - protein, 9 aa, Artificial Sequence
  Description of Artificial Sequence: Synthetic peptide
VVECSGRAN

SEQ ID NO: 39925 - protein, 9 aa, Artificial Sequence
  Description of Artificial Sequence: Synthetic peptide
VWVVRNHAD

SEQ ID NO: 39926 - protein, 9 aa, Artificial Sequence
  Description of Artificial Sequence: Synthetic peptide
WCAGATMQW

SEQ ID NO: 39927 - protein, 9 aa, Artificial Sequence
  Description of Artificial Sequence: Synthetic peptide
WEKLSQRNR

SEQ ID NO: 39928 - protein, 9 aa, Artificial Sequence
  Description of Artificial Sequence: Synthetic peptide
WEMNDMQDY

SEQ ID NO: 39929 - protein, 9 aa, Artificial Sequence
  Description of Artificial Sequence: Synthetic peptide
WINIPCHCI

SEQ ID NO: 39930 - protein, 9 aa, Artificial Sequence
  Description of Artificial Sequence: Synthetic peptide
WKCIVPGQD

SEQ ID NO: 39931 - protein, 9 aa, Artificial Sequence
  Description of Artificial Sequence: Synthetic peptide
YMVWSMMMI

SEQ ID NO: 39932 - protein, 9 aa, Artificial Sequence
  Description of Artificial Sequence: Synthetic peptide
AAAMCGYQV

SEQ ID NO: 39933 - protein, 9 aa, Artificial Sequence
  Description of Artificial Sequence: Synthetic peptide
AAAPSDDEP

SEQ ID NO: 39934 - protein, 9 aa, Artificial Sequence
  Description of Artificial Sequence: Synthetic peptide
AADREKSWM

SEQ ID NO: 39935 - protein, 9 aa, Artificial Sequence
  Description of Artificial Sequence: Synthetic peptide
AADTQSYIR

SEQ ID NO: 39936 - protein, 9 aa, Artificial Sequence
  Description of Artificial Sequence: Synthetic peptide
AADTYVNHM

SEQ ID NO: 39937 - protein, 9 aa, Artificial Sequence
  Description of Artificial Sequence: Synthetic peptide
AADYDDQQW

SEQ ID NO: 39938 - protein, 9 aa, Artificial Sequence
  Description of Artificial Sequence: Synthetic peptide
AAEEGHTWS

SEQ ID NO: 39939 - protein, 9 aa, Artificial Sequence
  Description of Artificial Sequence: Synthetic peptide
AAFQPDVNF

SEQ ID NO: 39940 - protein, 9 aa, Artificial Sequence
  Description of Artificial Sequence: Synthetic peptide
AAHEKQCAA

SEQ ID NO: 39941 - protein, 9 aa, Artificial Sequence
  Description of Artificial Sequence: Synthetic peptide
AAHTWHVAW

SEQ ID NO: 39942 - protein, 9 aa, Artificial Sequence
  Description of Artificial Sequence: Synthetic peptide
AAHYNDGCT

SEQ ID NO: 39943 - protein, 9 aa, Artificial Sequence
  Description of Artificial Sequence: Synthetic peptide
AAISMLWVE

SEQ ID NO: 39944 - protein, 9 aa, Artificial Sequence
  Description of Artificial Sequence: Synthetic peptide
AAKEATSEG

SEQ ID NO: 39945 - protein, 9 aa, Artificial Sequence
  Description of Artificial Sequence: Synthetic peptide
AAKWKAKCA

SEQ ID NO: 39946 - protein, 9 aa, Artificial Sequence
  Description of Artificial Sequence: Synthetic peptide
AANPIESVD

SEQ ID NO: 39947 - protein, 9 aa, Artificial Sequence
  Description of Artificial Sequence: Synthetic peptide
AAPLKRGLP

SEQ ID NO: 39948 - protein, 9 aa, Artificial Sequence
  Description of Artificial Sequence: Synthetic peptide
AASHTEGFL

SEQ ID NO: 39949 - protein, 9 aa, Artificial Sequence
  Description of Artificial Sequence: Synthetic peptide
AASPCNDFW

SEQ ID NO: 39950 - protein, 9 aa, Artificial Sequence
  Description of Artificial Sequence: Synthetic peptide
AASQCFCMP

SEQ ID NO: 39951 - protein, 9 aa, Artificial Sequence
  Description of Artificial Sequence: Synthetic peptide
AATFKSRHA

SEQ ID NO: 39952 - protein, 9 aa, Artificial Sequence
  Description of Artificial Sequence: Synthetic peptide
AAWHANLSR

SEQ ID NO: 39953 - protein, 9 aa, Artificial Sequence
  Description of Artificial Sequence: Synthetic peptide
ACDVKKHFG

SEQ ID NO: 39954 - protein, 9 aa, Artificial Sequence
  Description of Artificial Sequence: Synthetic peptide
ACHAYPSAW

SEQ ID NO: 39955 - protein, 9 aa, Artificial Sequence
  Description of Artificial Sequence: Synthetic peptide
ACMEAIMTT

SEQ ID NO: 39956 - protein, 9 aa, Artificial Sequence
  Description of Artificial Sequence: Synthetic peptide
ACTDFMSAC

SEQ ID NO: 39957 - protein, 9 aa, Artificial Sequence
  Description of Artificial Sequence: Synthetic peptide
ACVEYIDSA

SEQ ID NO: 39958 - protein, 9 aa, Artificial Sequence
  Description of Artificial Sequence: Synthetic peptide
ADAVQLMCP

SEQ ID NO: 39959 - protein, 9 aa, Artificial Sequence
  Description of Artificial Sequence: Synthetic peptide
ADCDYGRKF

SEQ ID NO: 39960 - protein, 9 aa, Artificial Sequence
  Description of Artificial Sequence: Synthetic peptide
ADCIFESDG

SEQ ID NO: 39961 - protein, 9 aa, Artificial Sequence
  Description of Artificial Sequence: Synthetic peptide
ADMYANENE

SEQ ID NO: 39962 - protein, 9 aa, Artificial Sequence
  Description of Artificial Sequence: Synthetic peptide
ADPKYVPTT

SEQ ID NO: 39963 - protein, 9 aa, Artificial Sequence
  Description of Artificial Sequence: Synthetic peptide
ADQCNPLCA

SEQ ID NO: 39964 - protein, 9 aa, Artificial Sequence
  Description of Artificial Sequence: Synthetic peptide
ADQCTMLRF

SEQ ID NO: 39965 - protein, 9 aa, Artificial Sequence
  Description of Artificial Sequence: Synthetic peptide
AEMCKTLIT

SEQ ID NO: 39966 - protein, 9 aa, Artificial Sequence
  Description of Artificial Sequence: Synthetic peptide
AEPCKLKHF

SEQ ID NO: 39967 - protein, 9 aa, Artificial Sequence
  Description of Artificial Sequence: Synthetic peptide
AEPRHDKAC

SEQ ID NO: 39968 - protein, 9 aa, Artificial Sequence
  Description of Artificial Sequence: Synthetic peptide
AFKGHYMAA

SEQ ID NO: 39969 - protein, 9 aa, Artificial Sequence
  Description of Artificial Sequence: Synthetic peptide
AFNSGMAKI

SEQ ID NO: 39970 - protein, 9 aa, Artificial Sequence
  Description of Artificial Sequence: Synthetic peptide
AFVENMWNF

SEQ ID NO: 39971 - protein, 9 aa, Artificial Sequence
  Description of Artificial Sequence: Synthetic peptide
AGALPQAWA

SEQ ID NO: 39972 - protein, 9 aa, Artificial Sequence
  Description of Artificial Sequence: Synthetic peptide
AGCFFTGIK

SEQ ID NO: 39973 - protein, 9 aa, Artificial Sequence
  Description of Artificial Sequence: Synthetic peptide
AGDHFLLVG

SEQ ID NO: 39974 - protein, 9 aa, Artificial Sequence
  Description of Artificial Sequence: Synthetic peptide
AGRMRFAKM

SEQ ID NO: 39975 - protein, 9 aa, Artificial Sequence
  Description of Artificial Sequence: Synthetic peptide
AGSYYGVIN

SEQ ID NO: 39976 - protein, 9 aa, Artificial Sequence
  Description of Artificial Sequence: Synthetic peptide
AHCVPWSWT

SEQ ID NO: 39977 - protein, 9 aa, Artificial Sequence
  Description of Artificial Sequence: Synthetic peptide
AHEATSCMV

SEQ ID NO: 39978 - protein, 9 aa, Artificial Sequence
  Description of Artificial Sequence: Synthetic peptide
AHGCGFAWP

SEQ ID NO: 39979 - protein, 9 aa, Artificial Sequence
  Description of Artificial Sequence: Synthetic peptide
AHKQMDWHT

SEQ ID NO: 39980 - protein, 9 aa, Artificial Sequence
  Description of Artificial Sequence: Synthetic peptide
AHLPLMLGT

SEQ ID NO: 39981 - protein, 9 aa, Artificial Sequence
  Description of Artificial Sequence: Synthetic peptide
AHQGVAGTY

SEQ ID NO: 39982 - protein, 9 aa, Artificial Sequence
  Description of Artificial Sequence: Synthetic peptide
AHVDNNLLF

SEQ ID NO: 39983 - protein, 9 aa, Artificial Sequence
  Description of Artificial Sequence: Synthetic peptide
AIAAENDCT

SEQ ID NO: 39984 - protein, 9 aa, Artificial Sequence
  Description of Artificial Sequence: Synthetic peptide
AIAEHWEGR

SEQ ID NO: 39985 - protein, 9 aa, Artificial Sequence
  Description of Artificial Sequence: Synthetic peptide
AIAEYAQQG

SEQ ID NO: 39986 - protein, 9 aa, Artificial Sequence
  Description of Artificial Sequence: Synthetic peptide
AIAWYMGEA

SEQ ID NO: 39987 - protein, 9 aa, Artificial Sequence
  Description of Artificial Sequence: Synthetic peptide
AIECSWGWI

SEQ ID NO: 39988 - protein, 9 aa, Artificial Sequence
  Description of Artificial Sequence: Synthetic peptide
AIKMDGDFQ

SEQ ID NO: 39989 - protein, 9 aa, Artificial Sequence
  Description of Artificial Sequence: Synthetic peptide
AILPMLMQS

SEQ ID NO: 39990 - protein, 9 aa, Artificial Sequence
  Description of Artificial Sequence: Synthetic peptide
AINIMDQEA

SEQ ID NO: 39991 - protein, 9 aa, Artificial Sequence
  Description of Artificial Sequence: Synthetic peptide
AIPDYQIYE

SEQ ID NO: 39992 - protein, 9 aa, Artificial Sequence
  Description of Artificial Sequence: Synthetic peptide
AISHNMKTP

SEQ ID NO: 39993 - protein, 9 aa, Artificial Sequence
  Description of Artificial Sequence: Synthetic peptide
AISSCARQI

SEQ ID NO: 39994 - protein, 9 aa, Artificial Sequence
  Description of Artificial Sequence: Synthetic peptide
AITMSMPTW

SEQ ID NO: 39995 - protein, 9 aa, Artificial Sequence
  Description of Artificial Sequence: Synthetic peptide
AITVGCGWA

SEQ ID NO: 39996 - protein, 9 aa, Artificial Sequence
  Description of Artificial Sequence: Synthetic peptide
AIVEYWSSC

SEQ ID NO: 39997 - protein, 9 aa, Artificial Sequence
  Description of Artificial Sequence: Synthetic peptide
AIYYCLSDW

SEQ ID NO: 39998 - protein, 9 aa, Artificial Sequence
  Description of Artificial Sequence: Synthetic peptide
AKCTWRSYH

SEQ ID NO: 39999 - protein, 9 aa, Artificial Sequence
  Description of Artificial Sequence: Synthetic peptide
AKEDQHQFQ

SEQ ID NO: 40000 - protein, 9 aa, Artificial Sequence
  Description of Artificial Sequence: Synthetic peptide
AKEYMMLSY

SEQ ID NO: 40001 - protein, 9 aa, Artificial Sequence
  Description of Artificial Sequence: Synthetic peptide
AKLKQAWSG

SEQ ID NO: 40002 - protein, 9 aa, Artificial Sequence
  Description of Artificial Sequence: Synthetic peptide
AKMDWKLPM

SEQ ID NO: 40003 - protein, 9 aa, Artificial Sequence
  Description of Artificial Sequence: Synthetic peptide
AKQQPEKQY

SEQ ID NO: 40004 - protein, 9 aa, Artificial Sequence
  Description of Artificial Sequence: Synthetic peptide
AKSCWPSVW

SEQ ID NO: 40005 - protein, 9 aa, Artificial Sequence
  Description of Artificial Sequence: Synthetic peptide
AKTHNPNTD

SEQ ID NO: 40006 - protein, 9 aa, Artificial Sequence
  Description of Artificial Sequence: Synthetic peptide
ALCSRDSSN

SEQ ID NO: 40007 - protein, 9 aa, Artificial Sequence
  Description of Artificial Sequence: Synthetic peptide
ALLAMQLAT

SEQ ID NO: 40008 - protein, 9 aa, Artificial Sequence
  Description of Artificial Sequence: Synthetic peptide
AMLHTMGHW

SEQ ID NO: 40009 - protein, 9 aa, Artificial Sequence
  Description of Artificial Sequence: Synthetic peptide
AMMNWQMMN

SEQ ID NO: 40010 - protein, 9 aa, Artificial Sequence
  Description of Artificial Sequence: Synthetic peptide
AMMTVEYFN

SEQ ID NO: 40011 - protein, 9 aa, Artificial Sequence
  Description of Artificial Sequence: Synthetic peptide
AMREWRVFP

SEQ ID NO: 40012 - protein, 9 aa, Artificial Sequence
  Description of Artificial Sequence: Synthetic peptide
AMTSMIQSG

SEQ ID NO: 40013 - protein, 9 aa, Artificial Sequence
  Description of Artificial Sequence: Synthetic peptide
AMYGKAAGD

SEQ ID NO: 40014 - protein, 9 aa, Artificial Sequence
  Description of Artificial Sequence: Synthetic peptide
AMYNPYTQK

SEQ ID NO: 40015 - protein, 9 aa, Artificial Sequence
  Description of Artificial Sequence: Synthetic peptide
ANCQPSRVC

SEQ ID NO: 40016 - protein, 9 aa, Artificial Sequence
  Description of Artificial Sequence: Synthetic peptide
ANHTKLKMY

SEQ ID NO: 40017 - protein, 9 aa, Artificial Sequence
  Description of Artificial Sequence: Synthetic peptide
ANMENWVQS

SEQ ID NO: 40018 - protein, 9 aa, Artificial Sequence
  Description of Artificial Sequence: Synthetic peptide
ANMSATYYE

SEQ ID NO: 40019 - protein, 9 aa, Artificial Sequence
  Description of Artificial Sequence: Synthetic peptide
APAPNVRYS

SEQ ID NO: 40020 - protein, 9 aa, Artificial Sequence
  Description of Artificial Sequence: Synthetic peptide
APNMMNWIA

SEQ ID NO: 40021 - protein, 9 aa, Artificial Sequence
  Description of Artificial Sequence: Synthetic peptide
APVIGWGAY

SEQ ID NO: 40022 - protein, 9 aa, Artificial Sequence
  Description of Artificial Sequence: Synthetic peptide
AQDNNNCAA

SEQ ID NO: 40023 - protein, 9 aa, Artificial Sequence
  Description of Artificial Sequence: Synthetic peptide
AQEPVQGNY

SEQ ID NO: 40024 - protein, 9 aa, Artificial Sequence
  Description of Artificial Sequence: Synthetic peptide
AQHVAIFNL

SEQ ID NO: 40025 - protein, 9 aa, Artificial Sequence
  Description of Artificial Sequence: Synthetic peptide
AQMYRWVMT

SEQ ID NO: 40026 - protein, 9 aa, Artificial Sequence
  Description of Artificial Sequence: Synthetic peptide
AQPLEHHYN

SEQ ID NO: 40027 - protein, 9 aa, Artificial Sequence
  Description of Artificial Sequence: Synthetic peptide
AQQEVKCGY

SEQ ID NO: 40028 - protein, 9 aa, Artificial Sequence
  Description of Artificial Sequence: Synthetic peptide
AQSHGTEMF

SEQ ID NO: 40029 - protein, 9 aa, Artificial Sequence
  Description of Artificial Sequence: Synthetic peptide
AQTWGGAGS

SEQ ID NO: 40030 - protein, 9 aa, Artificial Sequence
  Description of Artificial Sequence: Synthetic peptide
ARDHGKWNW

SEQ ID NO: 40031 - protein, 9 aa, Artificial Sequence
  Description of Artificial Sequence: Synthetic peptide
ARDLYHRSE

SEQ ID NO: 40032 - protein, 9 aa, Artificial Sequence
  Description of Artificial Sequence: Synthetic peptide
ARITWNVCT

SEQ ID NO: 40033 - protein, 9 aa, Artificial Sequence
  Description of Artificial Sequence: Synthetic peptide
ARKQIVGMD

SEQ ID NO: 40034 - protein, 9 aa, Artificial Sequence
  Description of Artificial Sequence: Synthetic peptide
ARQHMRRQP

SEQ ID NO: 40035 - protein, 9 aa, Artificial Sequence
  Description of Artificial Sequence: Synthetic peptide
ASADVHYAQ

SEQ ID NO: 40036 - protein, 9 aa, Artificial Sequence
  Description of Artificial Sequence: Synthetic peptide
ASANRKQMD

SEQ ID NO: 40037 - protein, 9 aa, Artificial Sequence
  Description of Artificial Sequence: Synthetic peptide
ASAWQMMMP

SEQ ID NO: 40038 - protein, 9 aa, Artificial Sequence
  Description of Artificial Sequence: Synthetic peptide
ASCEMTQTN

SEQ ID NO: 40039 - protein, 9 aa, Artificial Sequence
  Description of Artificial Sequence: Synthetic peptide
ASDQFMADE

SEQ ID NO: 40040 - protein, 9 aa, Artificial Sequence
  Description of Artificial Sequence: Synthetic peptide
ASHKDGWAT

SEQ ID NO: 40041 - protein, 9 aa, Artificial Sequence
  Description of Artificial Sequence: Synthetic peptide
ASHNFSDEG

SEQ ID NO: 40042 - protein, 9 aa, Artificial Sequence
  Description of Artificial Sequence: Synthetic peptide
ASNMHANAH

SEQ ID NO: 40043 - protein, 9 aa, Artificial Sequence
  Description of Artificial Sequence: Synthetic peptide
ASRDYDLAP

SEQ ID NO: 40044 - protein, 9 aa, Artificial Sequence
  Description of Artificial Sequence: Synthetic peptide
ASSSCNGGH

SEQ ID NO: 40045 - protein, 9 aa, Artificial Sequence
  Description of Artificial Sequence: Synthetic peptide
ASTLGCDCC

SEQ ID NO: 40046 - protein, 9 aa, Artificial Sequence
  Description of Artificial Sequence: Synthetic peptide
ASVTRVAVL

SEQ ID NO: 40047 - protein, 9 aa, Artificial Sequence
  Description of Artificial Sequence: Synthetic peptide
ASVVSDECN

SEQ ID NO: 40048 - protein, 9 aa, Artificial Sequence
  Description of Artificial Sequence: Synthetic peptide
ATAFGGEYY

SEQ ID NO: 40049 - protein, 9 aa, Artificial Sequence
  Description of Artificial Sequence: Synthetic peptide
ATCYLMKLD

SEQ ID NO: 40050 - protein, 9 aa, Artificial Sequence
  Description of Artificial Sequence: Synthetic peptide
ATDDECCVG

SEQ ID NO: 40051 - protein, 9 aa, Artificial Sequence
  Description of Artificial Sequence: Synthetic peptide
ATDDVRCLW

SEQ ID NO: 40052 - protein, 9 aa, Artificial Sequence
  Description of Artificial Sequence: Synthetic peptide
ATDGYSKWD

SEQ ID NO: 40053 - protein, 9 aa, Artificial Sequence
  Description of Artificial Sequence: Synthetic peptide
ATDPERSQW

SEQ ID NO: 40054 - protein, 9 aa, Artificial Sequence
  Description of Artificial Sequence: Synthetic peptide
ATDTWDRAS

SEQ ID NO: 40055 - protein, 9 aa, Artificial Sequence
  Description of Artificial Sequence: Synthetic peptide
ATEYQPNTW

SEQ ID NO: 40056 - protein, 9 aa, Artificial Sequence
  Description of Artificial Sequence: Synthetic peptide
ATFSCDPWN

SEQ ID NO: 40057 - protein, 9 aa, Artificial Sequence
  Description of Artificial Sequence: Synthetic peptide
ATGEEDVNW

SEQ ID NO: 40058 - protein, 9 aa, Artificial Sequence
  Description of Artificial Sequence: Synthetic peptide
ATGFGTEDS

SEQ ID NO: 40059 - protein, 9 aa, Artificial Sequence
  Description of Artificial Sequence: Synthetic peptide
ATHEMKGMN

SEQ ID NO: 40060 - protein, 9 aa, Artificial Sequence
  Description of Artificial Sequence: Synthetic peptide
ATIQHEAGM

SEQ ID NO: 40061 - protein, 9 aa, Artificial Sequence
  Description of Artificial Sequence: Synthetic peptide
ATKFFRMET

SEQ ID NO: 40062 - protein, 9 aa, Artificial Sequence
  Description of Artificial Sequence: Synthetic peptide
ATLTWNYSQ

SEQ ID NO: 40063 - protein, 9 aa, Artificial Sequence
  Description of Artificial Sequence: Synthetic peptide
ATNFDVGHE

SEQ ID NO: 40064 - protein, 9 aa, Artificial Sequence
  Description of Artificial Sequence: Synthetic peptide
ATNSNYEHR

SEQ ID NO: 40065 - protein, 9 aa, Artificial Sequence
  Description of Artificial Sequence: Synthetic peptide
ATNWMRDQT

SEQ ID NO: 40066 - protein, 9 aa, Artificial Sequence
  Description of Artificial Sequence: Synthetic peptide
ATSEQRIVV

SEQ ID NO: 40067 - protein, 9 aa, Artificial Sequence
  Description of Artificial Sequence: Synthetic peptide
ATSLAHCVC

SEQ ID NO: 40068 - protein, 9 aa, Artificial Sequence
  Description of Artificial Sequence: Synthetic peptide
ATTDNYHDR

SEQ ID NO: 40069 - protein, 9 aa, Artificial Sequence
  Description of Artificial Sequence: Synthetic peptide
ATTHETVLY

SEQ ID NO: 40070 - protein, 9 aa, Artificial Sequence
  Description of Artificial Sequence: Synthetic peptide
ATTNSSGSH

SEQ ID NO: 40071 - protein, 9 aa, Artificial Sequence
  Description of Artificial Sequence: Synthetic peptide
AVAMLVDVW

SEQ ID NO: 40072 - protein, 9 aa, Artificial Sequence
  Description of Artificial Sequence: Synthetic peptide
AVAWKPRMP

SEQ ID NO: 40073 - protein, 9 aa, Artificial Sequence
  Description of Artificial Sequence: Synthetic peptide
AVCNDDHSA

SEQ ID NO: 40074 - protein, 9 aa, Artificial Sequence
  Description of Artificial Sequence: Synthetic peptide
AVCRPSTSY

SEQ ID NO: 40075 - protein, 9 aa, Artificial Sequence
  Description of Artificial Sequence: Synthetic peptide
AVDCYGLFS

SEQ ID NO: 40076 - protein, 9 aa, Artificial Sequence
  Description of Artificial Sequence: Synthetic peptide
AVELETQWW

SEQ ID NO: 40077 - protein, 9 aa, Artificial Sequence
  Description of Artificial Sequence: Synthetic peptide
AVFYPYITD

SEQ ID NO: 40078 - protein, 9 aa, Artificial Sequence
  Description of Artificial Sequence: Synthetic peptide
AVGHNGSHR

SEQ ID NO: 40079 - protein, 9 aa, Artificial Sequence
  Description of Artificial Sequence: Synthetic peptide
AVLNSWPAC

SEQ ID NO: 40080 - protein, 9 aa, Artificial Sequence
  Description of Artificial Sequence: Synthetic peptide
AVMPYCELE

SEQ ID NO: 40081 - protein, 9 aa, Artificial Sequence
  Description of Artificial Sequence: Synthetic peptide
AVQDKVCTC

SEQ ID NO: 40082 - protein, 9 aa, Artificial Sequence
  Description of Artificial Sequence: Synthetic peptide
AVVLTDWNE

SEQ ID NO: 40083 - protein, 9 aa, Artificial Sequence
  Description of Artificial Sequence: Synthetic peptide
AWAFHHAVP

SEQ ID NO: 40084 - protein, 9 aa, Artificial Sequence
  Description of Artificial Sequence: Synthetic peptide
AWANYIRHE

SEQ ID NO: 40085 - protein, 9 aa, Artificial Sequence
  Description of Artificial Sequence: Synthetic peptide
AWEFVNYPP

SEQ ID NO: 40086 - protein, 9 aa, Artificial Sequence
  Description of Artificial Sequence: Synthetic peptide
AWEVNGHYH

SEQ ID NO: 40087 - protein, 9 aa, Artificial Sequence
  Description of Artificial Sequence: Synthetic peptide
AWWFEAPMV

SEQ ID NO: 40088 - protein, 9 aa, Artificial Sequence
  Description of Artificial Sequence: Synthetic peptide
AYAPEPMCP

SEQ ID NO: 40089 - protein, 9 aa, Artificial Sequence
  Description of Artificial Sequence: Synthetic peptide
AYLNFYDGP

SEQ ID NO: 40090 - protein, 9 aa, Artificial Sequence
  Description of Artificial Sequence: Synthetic peptide
AYLQFQIQG

SEQ ID NO: 40091 - protein, 9 aa, Artificial Sequence
  Description of Artificial Sequence: Synthetic peptide
AYMTSNSFG

SEQ ID NO: 40092 - protein, 9 aa, Artificial Sequence
  Description of Artificial Sequence: Synthetic peptide
AYSRATTHI

SEQ ID NO: 40093 - protein, 9 aa, Artificial Sequence
  Description of Artificial Sequence: Synthetic peptide
AYVAKKNMN

SEQ ID NO: 40094 - protein, 9 aa, Artificial Sequence
  Description of Artificial Sequence: Synthetic peptide
CANEHNHTA

SEQ ID NO: 40095 - protein, 9 aa, Artificial Sequence
  Description of Artificial Sequence: Synthetic peptide
CAPVSTRKA

SEQ ID NO: 40096 - protein, 9 aa, Artificial Sequence
  Description of Artificial Sequence: Synthetic peptide
CAQSIPEAW

SEQ ID NO: 40097 - protein, 9 aa, Artificial Sequence
  Description of Artificial Sequence: Synthetic peptide
CATCHTLHM

SEQ ID NO: 40098 - protein, 9 aa, Artificial Sequence
  Description of Artificial Sequence: Synthetic peptide
CCCEENYRR

SEQ ID NO: 40099 - protein, 9 aa, Artificial Sequence
  Description of Artificial Sequence: Synthetic peptide
CCEQFELGS

SEQ ID NO: 40100 - protein, 9 aa, Artificial Sequence
  Description of Artificial Sequence: Synthetic peptide
CCLPGWGSL

SEQ ID NO: 40101 - protein, 9 aa, Artificial Sequence
  Description of Artificial Sequence: Synthetic peptide
CCNLSDEHH

SEQ ID NO: 40102 - protein, 9 aa, Artificial Sequence
  Description of Artificial Sequence: Synthetic peptide
CCRSGDCMP

SEQ ID NO: 40103 - protein, 9 aa, Artificial Sequence
  Description of Artificial Sequence: Synthetic peptide
CCTVTQAPE

SEQ ID NO: 40104 - protein, 9 aa, Artificial Sequence
  Description of Artificial Sequence: Synthetic peptide
CCYHTQLLH

SEQ ID NO: 40105 - protein, 9 aa, Artificial Sequence
  Description of Artificial Sequence: Synthetic peptide
CDMALVGGD

SEQ ID NO: 40106 - protein, 9 aa, Artificial Sequence
  Description of Artificial Sequence: Synthetic peptide
CDNNWPIKQ

SEQ ID NO: 40107 - protein, 9 aa, Artificial Sequence
  Description of Artificial Sequence: Synthetic peptide
CDWSNIYDV

SEQ ID NO: 40108 - protein, 9 aa, Artificial Sequence
  Description of Artificial Sequence: Synthetic peptide
CDYLLAQCC

SEQ ID NO: 40109 - protein, 9 aa, Artificial Sequence
  Description of Artificial Sequence: Synthetic peptide
CEDFCMVNR

SEQ ID NO: 40110 - protein, 9 aa, Artificial Sequence
  Description of Artificial Sequence: Synthetic peptide
CEFRPVVDH

SEQ ID NO: 40111 - protein, 9 aa, Artificial Sequence
  Description of Artificial Sequence: Synthetic peptide
CEHTGSFQS

SEQ ID NO: 40112 - protein, 9 aa, Artificial Sequence
  Description of Artificial Sequence: Synthetic peptide
CFDRSIGYE

SEQ ID NO: 40113 - protein, 9 aa, Artificial Sequence
  Description of Artificial Sequence: Synthetic peptide
CFHYLMNTW

SEQ ID NO: 40114 - protein, 9 aa, Artificial Sequence
  Description of Artificial Sequence: Synthetic peptide
CFMDGWPFV

SEQ ID NO: 40115 - protein, 9 aa, Artificial Sequence
  Description of Artificial Sequence: Synthetic peptide
CGAICDAVV

SEQ ID NO: 40116 - protein, 9 aa, Artificial Sequence
  Description of Artificial Sequence: Synthetic peptide
CGEPPHIQD

SEQ ID NO: 40117 - protein, 9 aa, Artificial Sequence
  Description of Artificial Sequence: Synthetic peptide
CGRHWDPWF

SEQ ID NO: 40118 - protein, 9 aa, Artificial Sequence
  Description of Artificial Sequence: Synthetic peptide
CGTGMNGAF

SEQ ID NO: 40119 - protein, 9 aa, Artificial Sequence
  Description of Artificial Sequence: Synthetic peptide
CHTLKSGEH

SEQ ID NO: 40120 - protein, 9 aa, Artificial Sequence
  Description of Artificial Sequence: Synthetic peptide
CHYPYCVPL

SEQ ID NO: 40121 - protein, 9 aa, Artificial Sequence
  Description of Artificial Sequence: Synthetic peptide
CIGFAMESG

SEQ ID NO: 40122 - protein, 9 aa, Artificial Sequence
  Description of Artificial Sequence: Synthetic peptide
CIQRYTTEQ

SEQ ID NO: 40123 - protein, 9 aa, Artificial Sequence
  Description of Artificial Sequence: Synthetic peptide
CIRVQEFGG

SEQ ID NO: 40124 - protein, 9 aa, Artificial Sequence
  Description of Artificial Sequence: Synthetic peptide
CIVEEMAHW

SEQ ID NO: 40125 - protein, 9 aa, Artificial Sequence
  Description of Artificial Sequence: Synthetic peptide
CIYEQERKM

SEQ ID NO: 40126 - protein, 9 aa, Artificial Sequence
  Description of Artificial Sequence: Synthetic peptide
CKNGPAYVP

SEQ ID NO: 40127 - protein, 9 aa, Artificial Sequence
  Description of Artificial Sequence: Synthetic peptide
CLFYDEAMG

SEQ ID NO: 40128 - protein, 9 aa, Artificial Sequence
  Description of Artificial Sequence: Synthetic peptide
CLHVPHNSL

SEQ ID NO: 40129 - protein, 9 aa, Artificial Sequence
  Description of Artificial Sequence: Synthetic peptide
CLLVAECLQ

SEQ ID NO: 40130 - protein, 9 aa, Artificial Sequence
  Description of Artificial Sequence: Synthetic peptide
CLQFKCRLS

SEQ ID NO: 40131 - protein, 9 aa, Artificial Sequence
  Description of Artificial Sequence: Synthetic peptide
CLQHTSMKC

SEQ ID NO: 40132 - protein, 9 aa, Artificial Sequence
  Description of Artificial Sequence: Synthetic peptide
CLSDNYHNQ

SEQ ID NO: 40133 - protein, 9 aa, Artificial Sequence
  Description of Artificial Sequence: Synthetic peptide
CLVSIKDCH

SEQ ID NO: 40134 - protein, 9 aa, Artificial Sequence
  Description of Artificial Sequence: Synthetic peptide
CMACTDIYM

SEQ ID NO: 40135 - protein, 9 aa, Artificial Sequence
  Description of Artificial Sequence: Synthetic peptide
CMGNEDMST

SEQ ID NO: 40136 - protein, 9 aa, Artificial Sequence
  Description of Artificial Sequence: Synthetic peptide
CMIEKNMDY

SEQ ID NO: 40137 - protein, 9 aa, Artificial Sequence
  Description of Artificial Sequence: Synthetic peptide
CMPLSMGTR

SEQ ID NO: 40138 - protein, 9 aa, Artificial Sequence
  Description of Artificial Sequence: Synthetic peptide
CMQNSIKEC

SEQ ID NO: 40139 - protein, 9 aa, Artificial Sequence
  Description of Artificial Sequence: Synthetic peptide
CMRDCNHYG

SEQ ID NO: 40140 - protein, 9 aa, Artificial Sequence
  Description of Artificial Sequence: Synthetic peptide
CNASKFWQD

SEQ ID NO: 40141 - protein, 9 aa, Artificial Sequence
  Description of Artificial Sequence: Synthetic peptide
CNQQIQFFG

SEQ ID NO: 40142 - protein, 9 aa, Artificial Sequence
  Description of Artificial Sequence: Synthetic peptide
CNRQGCMHE

SEQ ID NO: 40143 - protein, 9 aa, Artificial Sequence
  Description of Artificial Sequence: Synthetic peptide
CNVYRFHEA

SEQ ID NO: 40144 - protein, 9 aa, Artificial Sequence
  Description of Artificial Sequence: Synthetic peptide
CPCHEIHPQ

SEQ ID NO: 40145 - protein, 9 aa, Artificial Sequence
  Description of Artificial Sequence: Synthetic peptide
CPFFHNKLA

SEQ ID NO: 40146 - protein, 9 aa, Artificial Sequence
  Description of Artificial Sequence: Synthetic peptide
CPQCLPVTE

SEQ ID NO: 40147 - protein, 9 aa, Artificial Sequence
  Description of Artificial Sequence: Synthetic peptide
CPYCARQHE

SEQ ID NO: 40148 - protein, 9 aa, Artificial Sequence
  Description of Artificial Sequence: Synthetic peptide
CPYQDVFQH

SEQ ID NO: 40149 - protein, 9 aa, Artificial Sequence
  Description of Artificial Sequence: Synthetic peptide
CQFEYQIFQ

SEQ ID NO: 40150 - protein, 9 aa, Artificial Sequence
  Description of Artificial Sequence: Synthetic peptide
CQHLVRQGL

SEQ ID NO: 40151 - protein, 9 aa, Artificial Sequence
  Description of Artificial Sequence: Synthetic peptide
CQLSDSFLF

SEQ ID NO: 40152 - protein, 9 aa, Artificial Sequence
  Description of Artificial Sequence: Synthetic peptide
CQMGFCCHS

SEQ ID NO: 40153 - protein, 9 aa, Artificial Sequence
  Description of Artificial Sequence: Synthetic peptide
CQQFYERVD

SEQ ID NO: 40154 - protein, 9 aa, Artificial Sequence
  Description of Artificial Sequence: Synthetic peptide
CQQGSPNDW

SEQ ID NO: 40155 - protein, 9 aa, Artificial Sequence
  Description of Artificial Sequence: Synthetic peptide
CQVESIGPH

SEQ ID NO: 40156 - protein, 9 aa, Artificial Sequence
  Description of Artificial Sequence: Synthetic peptide
CRCWSQGHQ

SEQ ID NO: 40157 - protein, 9 aa, Artificial Sequence
  Description of Artificial Sequence: Synthetic peptide
CREDKLEAR

SEQ ID NO: 40158 - protein, 9 aa, Artificial Sequence
  Description of Artificial Sequence: Synthetic peptide
CRIPMPARC

SEQ ID NO: 40159 - protein, 9 aa, Artificial Sequence
  Description of Artificial Sequence: Synthetic peptide
CRVWEPLRM

SEQ ID NO: 40160 - protein, 9 aa, Artificial Sequence
  Description of Artificial Sequence: Synthetic peptide
CSEMMQIHC

SEQ ID NO: 40161 - protein, 9 aa, Artificial Sequence
  Description of Artificial Sequence: Synthetic peptide
CSESGLWCS

SEQ ID NO: 40162 - protein, 9 aa, Artificial Sequence
  Description of Artificial Sequence: Synthetic peptide
CSKGDCQPH

SEQ ID NO: 40163 - protein, 9 aa, Artificial Sequence
  Description of Artificial Sequence: Synthetic peptide
CSLLFVSCV

SEQ ID NO: 40164 - protein, 9 aa, Artificial Sequence
  Description of Artificial Sequence: Synthetic peptide
CSMYWDWLF

SEQ ID NO: 40165 - protein, 9 aa, Artificial Sequence
  Description of Artificial Sequence: Synthetic peptide
CSTHIAQSE

SEQ ID NO: 40166 - protein, 9 aa, Artificial Sequence
  Description of Artificial Sequence: Synthetic peptide
CSTSFSQRG

SEQ ID NO: 40167 - protein, 9 aa, Artificial Sequence
  Description of Artificial Sequence: Synthetic peptide
CSYNDMDRC

SEQ ID NO: 40168 - protein, 9 aa, Artificial Sequence
  Description of Artificial Sequence: Synthetic peptide
CTCMTKCVD

SEQ ID NO: 40169 - protein, 9 aa, Artificial Sequence
  Description of Artificial Sequence: Synthetic peptide
CTELVQFIG

SEQ ID NO: 40170 - protein, 9 aa, Artificial Sequence
  Description of Artificial Sequence: Synthetic peptide
CTFSIACDH

SEQ ID NO: 40171 - protein, 9 aa, Artificial Sequence
  Description of Artificial Sequence: Synthetic peptide
CTGIPKCVK

SEQ ID NO: 40172 - protein, 9 aa, Artificial Sequence
  Description of Artificial Sequence: Synthetic peptide
CTNQHKLSS

SEQ ID NO: 40173 - protein, 9 aa, Artificial Sequence
  Description of Artificial Sequence: Synthetic peptide
CVCQYHQTN

SEQ ID NO: 40174 - protein, 9 aa, Artificial Sequence
  Description of Artificial Sequence: Synthetic peptide
CVDPGVSWP

SEQ ID NO: 40175 - protein, 9 aa, Artificial Sequence
  Description of Artificial Sequence: Synthetic peptide
CVIHMKTKI

SEQ ID NO: 40176 - protein, 9 aa, Artificial Sequence
  Description of Artificial Sequence: Synthetic peptide
CVKQYMFAQ

SEQ ID NO: 40177 - protein, 9 aa, Artificial Sequence
  Description of Artificial Sequence: Synthetic peptide
CVMDAMAIP

SEQ ID NO: 40178 - protein, 9 aa, Artificial Sequence
  Description of Artificial Sequence: Synthetic peptide
CVMTEDFQF

SEQ ID NO: 40179 - protein, 9 aa, Artificial Sequence
  Description of Artificial Sequence: Synthetic peptide
CVSESNIWH

SEQ ID NO: 40180 - protein, 9 aa, Artificial Sequence
  Description of Artificial Sequence: Synthetic peptide
CVYRHQREY

SEQ ID NO: 40181 - protein, 9 aa, Artificial Sequence
  Description of Artificial Sequence: Synthetic peptide
CWDSTLYGY

SEQ ID NO: 40182 - protein, 9 aa, Artificial Sequence
  Description of Artificial Sequence: Synthetic peptide
CYEPYHRHV

SEQ ID NO: 40183 - protein, 9 aa, Artificial Sequence
  Description of Artificial Sequence: Synthetic peptide
CYFFARNEM

SEQ ID NO: 40184 - protein, 9 aa, Artificial Sequence
  Description of Artificial Sequence: Synthetic peptide
CYGHRQIKD

SEQ ID NO: 40185 - protein, 9 aa, Artificial Sequence
  Description of Artificial Sequence: Synthetic peptide
CYKLSNYIV

SEQ ID NO: 40186 - protein, 9 aa, Artificial Sequence
  Description of Artificial Sequence: Synthetic peptide
CYQWHHDGT

SEQ ID NO: 40187 - protein, 9 aa, Artificial Sequence
  Description of Artificial Sequence: Synthetic peptide
DACKTINQF

SEQ ID NO: 40188 - protein, 9 aa, Artificial Sequence
  Description of Artificial Sequence: Synthetic peptide
DACLYWAPW

SEQ ID NO: 40189 - protein, 9 aa, Artificial Sequence
  Description of Artificial Sequence: Synthetic peptide
DADAWQMVT

SEQ ID NO: 40190 - protein, 9 aa, Artificial Sequence
  Description of Artificial Sequence: Synthetic peptide
DAGMPWFMN

SEQ ID NO: 40191 - protein, 9 aa, Artificial Sequence
  Description of Artificial Sequence: Synthetic peptide
DAGPSVVVQ

SEQ ID NO: 40192 - protein, 9 aa, Artificial Sequence
  Description of Artificial Sequence: Synthetic peptide
DAKCGRMVA

SEQ ID NO: 40193 - protein, 9 aa, Artificial Sequence
  Description of Artificial Sequence: Synthetic peptide
DAMPSCEFS

SEQ ID NO: 40194 - protein, 9 aa, Artificial Sequence
  Description of Artificial Sequence: Synthetic peptide
DAQLLVMRM

SEQ ID NO: 40195 - protein, 9 aa, Artificial Sequence
  Description of Artificial Sequence: Synthetic peptide
DAQWPLQRD

SEQ ID NO: 40196 - protein, 9 aa, Artificial Sequence
  Description of Artificial Sequence: Synthetic peptide
DARFTFVES

SEQ ID NO: 40197 - protein, 9 aa, Artificial Sequence
  Description of Artificial Sequence: Synthetic peptide
DCAEWLVRD

SEQ ID NO: 40198 - protein, 9 aa, Artificial Sequence
  Description of Artificial Sequence: Synthetic peptide
DCGRAQMMA

SEQ ID NO: 40199 - protein, 9 aa, Artificial Sequence
  Description of Artificial Sequence: Synthetic peptide
DCHGAFDRE

SEQ ID NO: 40200 - protein, 9 aa, Artificial Sequence
  Description of Artificial Sequence: Synthetic peptide
DCSLMGSDP

SEQ ID NO: 40201 - protein, 9 aa, Artificial Sequence
  Description of Artificial Sequence: Synthetic peptide
DCSRHHMAQ

SEQ ID NO: 40202 - protein, 9 aa, Artificial Sequence
  Description of Artificial Sequence: Synthetic peptide
DCSTQRTIW

SEQ ID NO: 40203 - protein, 9 aa, Artificial Sequence
  Description of Artificial Sequence: Synthetic peptide
DCWSEQQPM

SEQ ID NO: 40204 - protein, 9 aa, Artificial Sequence
  Description of Artificial Sequence: Synthetic peptide
DCYHIDMGC

SEQ ID NO: 40205 - protein, 9 aa, Artificial Sequence
  Description of Artificial Sequence: Synthetic peptide
DDAPLKITA

SEQ ID NO: 40206 - protein, 9 aa, Artificial Sequence
  Description of Artificial Sequence: Synthetic peptide
DDDKKHACR

SEQ ID NO: 40207 - protein, 9 aa, Artificial Sequence
  Description of Artificial Sequence: Synthetic peptide
DDGQCDRKG

SEQ ID NO: 40208 - protein, 9 aa, Artificial Sequence
  Description of Artificial Sequence: Synthetic peptide
DEHCDSPAI

SEQ ID NO: 40209 - protein, 9 aa, Artificial Sequence
  Description of Artificial Sequence: Synthetic peptide
DEMKWLNCS

SEQ ID NO: 40210 - protein, 9 aa, Artificial Sequence
  Description of Artificial Sequence: Synthetic peptide
DFCKQCNGL

SEQ ID NO: 40211 - protein, 9 aa, Artificial Sequence
  Description of Artificial Sequence: Synthetic peptide
DFDWEVNPT

SEQ ID NO: 40212 - protein, 9 aa, Artificial Sequence
  Description of Artificial Sequence: Synthetic peptide
DFEPNEEHY

SEQ ID NO: 40213 - protein, 9 aa, Artificial Sequence
  Description of Artificial Sequence: Synthetic peptide
DFLVFSVQG

SEQ ID NO: 40214 - protein, 9 aa, Artificial Sequence
  Description of Artificial Sequence: Synthetic peptide
DFSENGHTF

SEQ ID NO: 40215 - protein, 9 aa, Artificial Sequence
  Description of Artificial Sequence: Synthetic peptide
DFSERRIVV

SEQ ID NO: 40216 - protein, 9 aa, Artificial Sequence
  Description of Artificial Sequence: Synthetic peptide
DFSQFNQGH

SEQ ID NO: 40217 - protein, 9 aa, Artificial Sequence
  Description of Artificial Sequence: Synthetic peptide
DFTLSFDAH

SEQ ID NO: 40218 - protein, 9 aa, Artificial Sequence
  Description of Artificial Sequence: Synthetic peptide
DGPLTCEQA

SEQ ID NO: 40219 - protein, 9 aa, Artificial Sequence
  Description of Artificial Sequence: Synthetic peptide
DGPMSKQEL

SEQ ID NO: 40220 - protein, 9 aa, Artificial Sequence
  Description of Artificial Sequence: Synthetic peptide
DGQCPNAWV

SEQ ID NO: 40221 - protein, 9 aa, Artificial Sequence
  Description of Artificial Sequence: Synthetic peptide
DGTHNHLQG

SEQ ID NO: 40222 - protein, 9 aa, Artificial Sequence
  Description of Artificial Sequence: Synthetic peptide
DGTYLMFHA

SEQ ID NO: 40223 - protein, 9 aa, Artificial Sequence
  Description of Artificial Sequence: Synthetic peptide
DGVDKEWYE

SEQ ID NO: 40224 - protein, 9 aa, Artificial Sequence
  Description of Artificial Sequence: Synthetic peptide
DHQANRTCC

SEQ ID NO: 40225 - protein, 9 aa, Artificial Sequence
  Description of Artificial Sequence: Synthetic peptide
DHTWQHEGH

SEQ ID NO: 40226 - protein, 9 aa, Artificial Sequence
  Description of Artificial Sequence: Synthetic peptide
DICAQSPGA

SEQ ID NO: 40227 - protein, 9 aa, Artificial Sequence
  Description of Artificial Sequence: Synthetic peptide
DIDSVQEVP

SEQ ID NO: 40228 - protein, 9 aa, Artificial Sequence
  Description of Artificial Sequence: Synthetic peptide
DIDVGHSFT

SEQ ID NO: 40229 - protein, 9 aa, Artificial Sequence
  Description of Artificial Sequence: Synthetic peptide
DIFLNKCTY

SEQ ID NO: 40230 - protein, 9 aa, Artificial Sequence
  Description of Artificial Sequence: Synthetic peptide
DIGTRVCWH

SEQ ID NO: 40231 - protein, 9 aa, Artificial Sequence
  Description of Artificial Sequence: Synthetic peptide
DIHNDIQHG

SEQ ID NO: 40232 - protein, 9 aa, Artificial Sequence
  Description of Artificial Sequence: Synthetic peptide
DILPVQAPG

SEQ ID NO: 40233 - protein, 9 aa, Artificial Sequence
  Description of Artificial Sequence: Synthetic peptide
DIMPYASQG

SEQ ID NO: 40234 - protein, 9 aa, Artificial Sequence
  Description of Artificial Sequence: Synthetic peptide
DIQIQTYQS

SEQ ID NO: 40235 - protein, 9 aa, Artificial Sequence
  Description of Artificial Sequence: Synthetic peptide
DIQLYNNAF

SEQ ID NO: 40236 - protein, 9 aa, Artificial Sequence
  Description of Artificial Sequence: Synthetic peptide
DISAMAGWY

SEQ ID NO: 40237 - protein, 9 aa, Artificial Sequence
  Description of Artificial Sequence: Synthetic peptide
DIWQASTRA

SEQ ID NO: 40238 - protein, 9 aa, Artificial Sequence
  Description of Artificial Sequence: Synthetic peptide
DKESWCEVT

SEQ ID NO: 40239 - protein, 9 aa, Artificial Sequence
  Description of Artificial Sequence: Synthetic peptide
DKHTYEHGM

SEQ ID NO: 40240 - protein, 9 aa, Artificial Sequence
  Description of Artificial Sequence: Synthetic peptide
DKRCFQQSN

SEQ ID NO: 40241 - protein, 9 aa, Artificial Sequence
  Description of Artificial Sequence: Synthetic peptide
DKSSTARGM

SEQ ID NO: 40242 - protein, 9 aa, Artificial Sequence
  Description of Artificial Sequence: Synthetic peptide
DKYDTDWAF

SEQ ID NO: 40243 - protein, 9 aa, Artificial Sequence
  Description of Artificial Sequence: Synthetic peptide
DKYSNKCLR

SEQ ID NO: 40244 - protein, 9 aa, Artificial Sequence
  Description of Artificial Sequence: Synthetic peptide
DLEGTEQSL

SEQ ID NO: 40245 - protein, 9 aa, Artificial Sequence
  Description of Artificial Sequence: Synthetic peptide
DLEYIWRQD

SEQ ID NO: 40246 - protein, 9 aa, Artificial Sequence
  Description of Artificial Sequence: Synthetic peptide
DLIMGRKKQ

SEQ ID NO: 40247 - protein, 9 aa, Artificial Sequence
  Description of Artificial Sequence: Synthetic peptide
DLMLNFHLD

SEQ ID NO: 40248 - protein, 9 aa, Artificial Sequence
  Description of Artificial Sequence: Synthetic peptide
DLQHFMSYP

SEQ ID NO: 40249 - protein, 9 aa, Artificial Sequence
  Description of Artificial Sequence: Synthetic peptide
DLTQRISMS

SEQ ID NO: 40250 - protein, 9 aa, Artificial Sequence
  Description of Artificial Sequence: Synthetic peptide
DLVNCNNAN

SEQ ID NO: 40251 - protein, 9 aa, Artificial Sequence
  Description of Artificial Sequence: Synthetic peptide
DMAFMHSIC

SEQ ID NO: 40252 - protein, 9 aa, Artificial Sequence
  Description of Artificial Sequence: Synthetic peptide
DMCKKMLSW

SEQ ID NO: 40253 - protein, 9 aa, Artificial Sequence
  Description of Artificial Sequence: Synthetic peptide
DMIGSQAEL

SEQ ID NO: 40254 - protein, 9 aa, Artificial Sequence
  Description of Artificial Sequence: Synthetic peptide
DMVYLAGNA

SEQ ID NO: 40255 - protein, 9 aa, Artificial Sequence
  Description of Artificial Sequence: Synthetic peptide
DNEDVLHMG

SEQ ID NO: 40256 - protein, 9 aa, Artificial Sequence
  Description of Artificial Sequence: Synthetic peptide
DNGWFENMA

SEQ ID NO: 40257 - protein, 9 aa, Artificial Sequence
  Description of Artificial Sequence: Synthetic peptide
DNQCNEITL

SEQ ID NO: 40258 - protein, 9 aa, Artificial Sequence
  Description of Artificial Sequence: Synthetic peptide
DNRDQHWRT

SEQ ID NO: 40259 - protein, 9 aa, Artificial Sequence
  Description of Artificial Sequence: Synthetic peptide
DNRNERRQS

SEQ ID NO: 40260 - protein, 9 aa, Artificial Sequence
  Description of Artificial Sequence: Synthetic peptide
DNTVNTIIW

SEQ ID NO: 40261 - protein, 9 aa, Artificial Sequence
  Description of Artificial Sequence: Synthetic peptide
DNVGRVNSV

SEQ ID NO: 40262 - protein, 9 aa, Artificial Sequence
  Description of Artificial Sequence: Synthetic peptide
DNWKPTRIG

SEQ ID NO: 40263 - protein, 9 aa, Artificial Sequence
  Description of Artificial Sequence: Synthetic peptide
DPEQAYTKH

SEQ ID NO: 40264 - protein, 9 aa, Artificial Sequence
  Description of Artificial Sequence: Synthetic peptide
DPLLKSEWG

SEQ ID NO: 40265 - protein, 9 aa, Artificial Sequence
  Description of Artificial Sequence: Synthetic peptide
DPNNYKGYY

SEQ ID NO: 40266 - protein, 9 aa, Artificial Sequence
  Description of Artificial Sequence: Synthetic peptide
DPPLHWVTM

SEQ ID NO: 40267 - protein, 9 aa, Artificial Sequence
  Description of Artificial Sequence: Synthetic peptide
DQAFEWFIY

SEQ ID NO: 40268 - protein, 9 aa, Artificial Sequence
  Description of Artificial Sequence: Synthetic peptide
DQCKTLFYT

SEQ ID NO: 40269 - protein, 9 aa, Artificial Sequence
  Description of Artificial Sequence: Synthetic peptide
DQGQVGCFV

SEQ ID NO: 40270 - protein, 9 aa, Artificial Sequence
  Description of Artificial Sequence: Synthetic peptide
DQGYMPTKT

SEQ ID NO: 40271 - protein, 9 aa, Artificial Sequence
  Description of Artificial Sequence: Synthetic peptide
DQLNQQAMS

SEQ ID NO: 40272 - protein, 9 aa, Artificial Sequence
  Description of Artificial Sequence: Synthetic peptide
DQPFMNRQH

SEQ ID NO: 40273 - protein, 9 aa, Artificial Sequence
  Description of Artificial Sequence: Synthetic peptide
DQRICGEKC

SEQ ID NO: 40274 - protein, 9 aa, Artificial Sequence
  Description of Artificial Sequence: Synthetic peptide
DQWLMQCKN

SEQ ID NO: 40275 - protein, 9 aa, Artificial Sequence
  Description of Artificial Sequence: Synthetic peptide
DRCNKIWPD

SEQ ID NO: 40276 - protein, 9 aa, Artificial Sequence
  Description of Artificial Sequence: Synthetic peptide
DRGWQNWTY

SEQ ID NO: 40277 - protein, 9 aa, Artificial Sequence
  Description of Artificial Sequence: Synthetic peptide
DRKQAQRNG

SEQ ID NO: 40278 - protein, 9 aa, Artificial Sequence
  Description of Artificial Sequence: Synthetic peptide
DRNTIRKMA

SEQ ID NO: 40279 - protein, 9 aa, Artificial Sequence
  Description of Artificial Sequence: Synthetic peptide
DRPHGQMMT

SEQ ID NO: 40280 - protein, 9 aa, Artificial Sequence
  Description of Artificial Sequence: Synthetic peptide
DSKLLCCSC

SEQ ID NO: 40281 - protein, 9 aa, Artificial Sequence
  Description of Artificial Sequence: Synthetic peptide
DSKMAGQAN

SEQ ID NO: 40282 - protein, 9 aa, Artificial Sequence
  Description of Artificial Sequence: Synthetic peptide
DSKQAFVMT

SEQ ID NO: 40283 - protein, 9 aa, Artificial Sequence
  Description of Artificial Sequence: Synthetic peptide
DSKTIQVYW

SEQ ID NO: 40284 - protein, 9 aa, Artificial Sequence
  Description of Artificial Sequence: Synthetic peptide
DSLIQDFLH

SEQ ID NO: 40285 - protein, 9 aa, Artificial Sequence
  Description of Artificial Sequence: Synthetic peptide
DSLLANQDG

SEQ ID NO: 40286 - protein, 9 aa, Artificial Sequence
  Description of Artificial Sequence: Synthetic peptide
DSQYQAIQF

SEQ ID NO: 40287 - protein, 9 aa, Artificial Sequence
  Description of Artificial Sequence: Synthetic peptide
DSRHLACYT

SEQ ID NO: 40288 - protein, 9 aa, Artificial Sequence
  Description of Artificial Sequence: Synthetic peptide
DSRILQAGD

SEQ ID NO: 40289 - protein, 9 aa, Artificial Sequence
  Description of Artificial Sequence: Synthetic peptide
DSRMCPPYN

SEQ ID NO: 40290 - protein, 9 aa, Artificial Sequence
  Description of Artificial Sequence: Synthetic peptide
DSRQPNAGL

SEQ ID NO: 40291 - protein, 9 aa, Artificial Sequence
  Description of Artificial Sequence: Synthetic peptide
DSRVDSDDY

SEQ ID NO: 40292 - protein, 9 aa, Artificial Sequence
  Description of Artificial Sequence: Synthetic peptide
DSVNSCAFP

SEQ ID NO: 40293 - protein, 9 aa, Artificial Sequence
  Description of Artificial Sequence: Synthetic peptide
DTDWIDCMG

SEQ ID NO: 40294 - protein, 9 aa, Artificial Sequence
  Description of Artificial Sequence: Synthetic peptide
DTEFRVMDW

SEQ ID NO: 40295 - protein, 9 aa, Artificial Sequence
  Description of Artificial Sequence: Synthetic peptide
DTISEQMRT

SEQ ID NO: 40296 - protein, 9 aa, Artificial Sequence
  Description of Artificial Sequence: Synthetic peptide
DTMLKFVST

SEQ ID NO: 40297 - protein, 9 aa, Artificial Sequence
  Description of Artificial Sequence: Synthetic peptide
DTNIDLKPP

SEQ ID NO: 40298 - protein, 9 aa, Artificial Sequence
  Description of Artificial Sequence: Synthetic peptide
DTRIDSVYE

SEQ ID NO: 40299 - protein, 9 aa, Artificial Sequence
  Description of Artificial Sequence: Synthetic peptide
DTRQWDDGL

SEQ ID NO: 40300 - protein, 9 aa, Artificial Sequence
  Description of Artificial Sequence: Synthetic peptide
DTSQYGNHV

SEQ ID NO: 40301 - protein, 9 aa, Artificial Sequence
  Description of Artificial Sequence: Synthetic peptide
DTVQLMGSQ

SEQ ID NO: 40302 - protein, 9 aa, Artificial Sequence
  Description of Artificial Sequence: Synthetic peptide
DTYELESQL

SEQ ID NO: 40303 - protein, 9 aa, Artificial Sequence
  Description of Artificial Sequence: Synthetic peptide
DVAQWFEAS

SEQ ID NO: 40304 - protein, 9 aa, Artificial Sequence
  Description of Artificial Sequence: Synthetic peptide
DVARCMDCQ

SEQ ID NO: 40305 - protein, 9 aa, Artificial Sequence
  Description of Artificial Sequence: Synthetic peptide
DVASKDDWP

SEQ ID NO: 40306 - protein, 9 aa, Artificial Sequence
  Description of Artificial Sequence: Synthetic peptide
DVCKYQHNP

SEQ ID NO: 40307 - protein, 9 aa, Artificial Sequence
  Description of Artificial Sequence: Synthetic peptide
DVCYAGLTE

SEQ ID NO: 40308 - protein, 9 aa, Artificial Sequence
  Description of Artificial Sequence: Synthetic peptide
DVDDRMEMC

SEQ ID NO: 40309 - protein, 9 aa, Artificial Sequence
  Description of Artificial Sequence: Synthetic peptide
DVFNAGPPF

SEQ ID NO: 40310 - protein, 9 aa, Artificial Sequence
  Description of Artificial Sequence: Synthetic peptide
DVHVPCVIG

SEQ ID NO: 40311 - protein, 9 aa, Artificial Sequence
  Description of Artificial Sequence: Synthetic peptide
DVIMCNCPK

SEQ ID NO: 40312 - protein, 9 aa, Artificial Sequence
  Description of Artificial Sequence: Synthetic peptide
DVMSMFTDV

SEQ ID NO: 40313 - protein, 9 aa, Artificial Sequence
  Description of Artificial Sequence: Synthetic peptide
DVRSGNFYP

SEQ ID NO: 40314 - protein, 9 aa, Artificial Sequence
  Description of Artificial Sequence: Synthetic peptide
DVSICVTCT

SEQ ID NO: 40315 - protein, 9 aa, Artificial Sequence
  Description of Artificial Sequence: Synthetic peptide
DVSWHYAQG

SEQ ID NO: 40316 - protein, 9 aa, Artificial Sequence
  Description of Artificial Sequence: Synthetic peptide
DVTDNGTCC

SEQ ID NO: 40317 - protein, 9 aa, Artificial Sequence
  Description of Artificial Sequence: Synthetic peptide
DVVNEDTGP

SEQ ID NO: 40318 - protein, 9 aa, Artificial Sequence
  Description of Artificial Sequence: Synthetic peptide
DVWEHSHPS

SEQ ID NO: 40319 - protein, 9 aa, Artificial Sequence
  Description of Artificial Sequence: Synthetic peptide
DVWTPWNAS

SEQ ID NO: 40320 - protein, 9 aa, Artificial Sequence
  Description of Artificial Sequence: Synthetic peptide
DWAKYWHFP

SEQ ID NO: 40321 - protein, 9 aa, Artificial Sequence
  Description of Artificial Sequence: Synthetic peptide
DWESDYYQN

SEQ ID NO: 40322 - protein, 9 aa, Artificial Sequence
  Description of Artificial Sequence: Synthetic peptide
DWFQCHCAA

SEQ ID NO: 40323 - protein, 9 aa, Artificial Sequence
  Description of Artificial Sequence: Synthetic peptide
DWILELMST

SEQ ID NO: 40324 - protein, 9 aa, Artificial Sequence
  Description of Artificial Sequence: Synthetic peptide
DWKLFNAWK

SEQ ID NO: 40325 - protein, 9 aa, Artificial Sequence
  Description of Artificial Sequence: Synthetic peptide
DWMEGSENG

SEQ ID NO: 40326 - protein, 9 aa, Artificial Sequence
  Description of Artificial Sequence: Synthetic peptide
DYELTPSWY

SEQ ID NO: 40327 - protein, 9 aa, Artificial Sequence
  Description of Artificial Sequence: Synthetic peptide
DYGESKLEP

SEQ ID NO: 40328 - protein, 9 aa, Artificial Sequence
  Description of Artificial Sequence: Synthetic peptide
DYGMPECVD

SEQ ID NO: 40329 - protein, 9 aa, Artificial Sequence
  Description of Artificial Sequence: Synthetic peptide
DYILLTTWE

SEQ ID NO: 40330 - protein, 9 aa, Artificial Sequence
  Description of Artificial Sequence: Synthetic peptide
DYRWIKGLA

SEQ ID NO: 40331 - protein, 9 aa, Artificial Sequence
  Description of Artificial Sequence: Synthetic peptide
DYSQFGGGQ

SEQ ID NO: 40332 - protein, 9 aa, Artificial Sequence
  Description of Artificial Sequence: Synthetic peptide
EAAFIDAHC

SEQ ID NO: 40333 - protein, 9 aa, Artificial Sequence
  Description of Artificial Sequence: Synthetic peptide
EADWDSCWM

SEQ ID NO: 40334 - protein, 9 aa, Artificial Sequence
  Description of Artificial Sequence: Synthetic peptide
EAEWVLCCK

SEQ ID NO: 40335 - protein, 9 aa, Artificial Sequence
  Description of Artificial Sequence: Synthetic peptide
EAGPLKDCC

SEQ ID NO: 40336 - protein, 9 aa, Artificial Sequence
  Description of Artificial Sequence: Synthetic peptide
EAHMRRYSK

SEQ ID NO: 40337 - protein, 9 aa, Artificial Sequence
  Description of Artificial Sequence: Synthetic peptide
EAHSVRYLM

SEQ ID NO: 40338 - protein, 9 aa, Artificial Sequence
  Description of Artificial Sequence: Synthetic peptide
EALACQDPG

SEQ ID NO: 40339 - protein, 9 aa, Artificial Sequence
  Description of Artificial Sequence: Synthetic peptide
EAMRRSNLH

SEQ ID NO: 40340 - protein, 9 aa, Artificial Sequence
  Description of Artificial Sequence: Synthetic peptide
EAMRRYRSP

SEQ ID NO: 40341 - protein, 9 aa, Artificial Sequence
  Description of Artificial Sequence: Synthetic peptide
EANDYNQNC

SEQ ID NO: 40342 - protein, 9 aa, Artificial Sequence
  Description of Artificial Sequence: Synthetic peptide
EANRIDAVS

SEQ ID NO: 40343 - protein, 9 aa, Artificial Sequence
  Description of Artificial Sequence: Synthetic peptide
EANRVLCMN

SEQ ID NO: 40344 - protein, 9 aa, Artificial Sequence
  Description of Artificial Sequence: Synthetic peptide
EAPLPKWQC

SEQ ID NO: 40345 - protein, 9 aa, Artificial Sequence
  Description of Artificial Sequence: Synthetic peptide
EASCYWEGR

SEQ ID NO: 40346 - protein, 9 aa, Artificial Sequence
  Description of Artificial Sequence: Synthetic peptide
EASMGRNGH

SEQ ID NO: 40347 - protein, 9 aa, Artificial Sequence
  Description of Artificial Sequence: Synthetic peptide
EAYPQKECA

SEQ ID NO: 40348 - protein, 9 aa, Artificial Sequence
  Description of Artificial Sequence: Synthetic peptide
EAYTVSGYA

SEQ ID NO: 40349 - protein, 9 aa, Artificial Sequence
  Description of Artificial Sequence: Synthetic peptide
ECANHEKTY

SEQ ID NO: 40350 - protein, 9 aa, Artificial Sequence
  Description of Artificial Sequence: Synthetic peptide
ECDFRMIWD

SEQ ID NO: 40351 - protein, 9 aa, Artificial Sequence
  Description of Artificial Sequence: Synthetic peptide
ECEFPDVYA

SEQ ID NO: 40352 - protein, 9 aa, Artificial Sequence
  Description of Artificial Sequence: Synthetic peptide
ECGEFTCML

SEQ ID NO: 40353 - protein, 9 aa, Artificial Sequence
  Description of Artificial Sequence: Synthetic peptide
ECKVYSGGK

SEQ ID NO: 40354 - protein, 9 aa, Artificial Sequence
  Description of Artificial Sequence: Synthetic peptide
ECQRPHPIQ

SEQ ID NO: 40355 - protein, 9 aa, Artificial Sequence
  Description of Artificial Sequence: Synthetic peptide
ECRMIWNHK

SEQ ID NO: 40356 - protein, 9 aa, Artificial Sequence
  Description of Artificial Sequence: Synthetic peptide
ECRPWVWPG

SEQ ID NO: 40357 - protein, 9 aa, Artificial Sequence
  Description of Artificial Sequence: Synthetic peptide
ECSAFHWQP

SEQ ID NO: 40358 - protein, 9 aa, Artificial Sequence
  Description of Artificial Sequence: Synthetic peptide
ECSCEEIPC

SEQ ID NO: 40359 - protein, 9 aa, Artificial Sequence
  Description of Artificial Sequence: Synthetic peptide
ECSQMISSE

SEQ ID NO: 40360 - protein, 9 aa, Artificial Sequence
  Description of Artificial Sequence: Synthetic peptide
ECTMTNASN

SEQ ID NO: 40361 - protein, 9 aa, Artificial Sequence
  Description of Artificial Sequence: Synthetic peptide
ECWNWESFI

SEQ ID NO: 40362 - protein, 9 aa, Artificial Sequence
  Description of Artificial Sequence: Synthetic peptide
ECWNYLMSW

SEQ ID NO: 40363 - protein, 9 aa, Artificial Sequence
  Description of Artificial Sequence: Synthetic peptide
EDCLFPACF

SEQ ID NO: 40364 - protein, 9 aa, Artificial Sequence
  Description of Artificial Sequence: Synthetic peptide
EDDPVSVAD

SEQ ID NO: 40365 - protein, 9 aa, Artificial Sequence
  Description of Artificial Sequence: Synthetic peptide
EDFHCFPLS

SEQ ID NO: 40366 - protein, 9 aa, Artificial Sequence
  Description of Artificial Sequence: Synthetic peptide
EDIAPAHGT

SEQ ID NO: 40367 - protein, 9 aa, Artificial Sequence
  Description of Artificial Sequence: Synthetic peptide
EDIKQQMVC

SEQ ID NO: 40368 - protein, 9 aa, Artificial Sequence
  Description of Artificial Sequence: Synthetic peptide
EDKRDAWAR

SEQ ID NO: 40369 - protein, 9 aa, Artificial Sequence
  Description of Artificial Sequence: Synthetic peptide
EDMTVNWSS

SEQ ID NO: 40370 - protein, 9 aa, Artificial Sequence
  Description of Artificial Sequence: Synthetic peptide
EDQLCHRTH

SEQ ID NO: 40371 - protein, 9 aa, Artificial Sequence
  Description of Artificial Sequence: Synthetic peptide
EDQWVQMCA

SEQ ID NO: 40372 - protein, 9 aa, Artificial Sequence
  Description of Artificial Sequence: Synthetic peptide
EDWHTFYWK

SEQ ID NO: 40373 - protein, 9 aa, Artificial Sequence
  Description of Artificial Sequence: Synthetic peptide
EECVTGLHA

SEQ ID NO: 40374 - protein, 9 aa, Artificial Sequence
  Description of Artificial Sequence: Synthetic peptide
EEEPLYVDN

SEQ ID NO: 40375 - protein, 9 aa, Artificial Sequence
  Description of Artificial Sequence: Synthetic peptide
EFDQIGLFN

SEQ ID NO: 40376 - protein, 9 aa, Artificial Sequence
  Description of Artificial Sequence: Synthetic peptide
EFLLHHCAP

SEQ ID NO: 40377 - protein, 9 aa, Artificial Sequence
  Description of Artificial Sequence: Synthetic peptide
EFLPKSDQH

SEQ ID NO: 40378 - protein, 9 aa, Artificial Sequence
  Description of Artificial Sequence: Synthetic peptide
EFMSHSTGA

SEQ ID NO: 40379 - protein, 9 aa, Artificial Sequence
  Description of Artificial Sequence: Synthetic peptide
EFNPAMWIV

SEQ ID NO: 40380 - protein, 9 aa, Artificial Sequence
  Description of Artificial Sequence: Synthetic peptide
EFPGKHWVW

SEQ ID NO: 40381 - protein, 9 aa, Artificial Sequence
  Description of Artificial Sequence: Synthetic peptide
EFRQMGACG

SEQ ID NO: 40382 - protein, 9 aa, Artificial Sequence
  Description of Artificial Sequence: Synthetic peptide
EFVVLPEAI

SEQ ID NO: 40383 - protein, 9 aa, Artificial Sequence
  Description of Artificial Sequence: Synthetic peptide
EFYQQAYQH

SEQ ID NO: 40384 - protein, 9 aa, Artificial Sequence
  Description of Artificial Sequence: Synthetic peptide
EGEQPSMAI

SEQ ID NO: 40385 - protein, 9 aa, Artificial Sequence
  Description of Artificial Sequence: Synthetic peptide
EGHGCDPWF

SEQ ID NO: 40386 - protein, 9 aa, Artificial Sequence
  Description of Artificial Sequence: Synthetic peptide
EGIKKEGMP

SEQ ID NO: 40387 - protein, 9 aa, Artificial Sequence
  Description of Artificial Sequence: Synthetic peptide
EGLNDDSRA

SEQ ID NO: 40388 - protein, 9 aa, Artificial Sequence
  Description of Artificial Sequence: Synthetic peptide
EGLSMNEYW

SEQ ID NO: 40389 - protein, 9 aa, Artificial Sequence
  Description of Artificial Sequence: Synthetic peptide
EGQTSSECF

SEQ ID NO: 40390 - protein, 9 aa, Artificial Sequence
  Description of Artificial Sequence: Synthetic peptide
EGRLTMKHH

SEQ ID NO: 40391 - protein, 9 aa, Artificial Sequence
  Description of Artificial Sequence: Synthetic peptide
EGYQHPNEF

SEQ ID NO: 40392 - protein, 9 aa, Artificial Sequence
  Description of Artificial Sequence: Synthetic peptide
EHDPYMKVF

SEQ ID NO: 40393 - protein, 9 aa, Artificial Sequence
  Description of Artificial Sequence: Synthetic peptide
EHDWPADRI

SEQ ID NO: 40394 - protein, 9 aa, Artificial Sequence
  Description of Artificial Sequence: Synthetic peptide
EHEQDCEQI

SEQ ID NO: 40395 - protein, 9 aa, Artificial Sequence
  Description of Artificial Sequence: Synthetic peptide
EHPIDWRKE

SEQ ID NO: 40396 - protein, 9 aa, Artificial Sequence
  Description of Artificial Sequence: Synthetic peptide
EHQLAHESA

SEQ ID NO: 40397 - protein, 9 aa, Artificial Sequence
  Description of Artificial Sequence: Synthetic peptide
EHQLPQVDF

SEQ ID NO: 40398 - protein, 9 aa, Artificial Sequence
  Description of Artificial Sequence: Synthetic peptide
EHRFRVKLA

SEQ ID NO: 40399 - protein, 9 aa, Artificial Sequence
  Description of Artificial Sequence: Synthetic peptide
EHRQEQTRL

SEQ ID NO: 40400 - protein, 9 aa, Artificial Sequence
  Description of Artificial Sequence: Synthetic peptide
EIASGSMYW

SEQ ID NO: 40401 - protein, 9 aa, Artificial Sequence
  Description of Artificial Sequence: Synthetic peptide
EIATNYYSQ

SEQ ID NO: 40402 - protein, 9 aa, Artificial Sequence
  Description of Artificial Sequence: Synthetic peptide
EICQINHSG

SEQ ID NO: 40403 - protein, 9 aa, Artificial Sequence
  Description of Artificial Sequence: Synthetic peptide
EIEMDGAHW

SEQ ID NO: 40404 - protein, 9 aa, Artificial Sequence
  Description of Artificial Sequence: Synthetic peptide
EIEVFWKMH

SEQ ID NO: 40405 - protein, 9 aa, Artificial Sequence
  Description of Artificial Sequence: Synthetic peptide
EIGIRLGQD

SEQ ID NO: 40406 - protein, 9 aa, Artificial Sequence
  Description of Artificial Sequence: Synthetic peptide
EIGWHMNYV

SEQ ID NO: 40407 - protein, 9 aa, Artificial Sequence
  Description of Artificial Sequence: Synthetic peptide
EIGYRSMMT

SEQ ID NO: 40408 - protein, 9 aa, Artificial Sequence
  Description of Artificial Sequence: Synthetic peptide
EIHEGQLAQ

SEQ ID NO: 40409 - protein, 9 aa, Artificial Sequence
  Description of Artificial Sequence: Synthetic peptide
EILKPGAHM

SEQ ID NO: 40410 - protein, 9 aa, Artificial Sequence
  Description of Artificial Sequence: Synthetic peptide
EIMISIGHT

SEQ ID NO: 40411 - protein, 9 aa, Artificial Sequence
  Description of Artificial Sequence: Synthetic peptide
EIMTRYGGH

SEQ ID NO: 40412 - protein, 9 aa, Artificial Sequence
  Description of Artificial Sequence: Synthetic peptide
EISCKKWNQ

SEQ ID NO: 40413 - protein, 9 aa, Artificial Sequence
  Description of Artificial Sequence: Synthetic peptide
EIVYSVFGL

SEQ ID NO: 40414 - protein, 9 aa, Artificial Sequence
  Description of Artificial Sequence: Synthetic peptide
EIWASQQVN

SEQ ID NO: 40415 - protein, 9 aa, Artificial Sequence
  Description of Artificial Sequence: Synthetic peptide
EKEFVHSCD

SEQ ID NO: 40416 - protein, 9 aa, Artificial Sequence
  Description of Artificial Sequence: Synthetic peptide
EKEPLHCDG

SEQ ID NO: 40417 - protein, 9 aa, Artificial Sequence
  Description of Artificial Sequence: Synthetic peptide
EKFMLWFWG

SEQ ID NO: 40418 - protein, 9 aa, Artificial Sequence
  Description of Artificial Sequence: Synthetic peptide
EKGCVGPVS

SEQ ID NO: 40419 - protein, 9 aa, Artificial Sequence
  Description of Artificial Sequence: Synthetic peptide
EKHTMTWHN

SEQ ID NO: 40420 - protein, 9 aa, Artificial Sequence
  Description of Artificial Sequence: Synthetic peptide
EKKFRTADA

SEQ ID NO: 40421 - protein, 9 aa, Artificial Sequence
  Description of Artificial Sequence: Synthetic peptide
EKMCEWLTD

SEQ ID NO: 40422 - protein, 9 aa, Artificial Sequence
  Description of Artificial Sequence: Synthetic peptide
EKMFTLSDS

SEQ ID NO: 40423 - protein, 9 aa, Artificial Sequence
  Description of Artificial Sequence: Synthetic peptide
EKYGTQREN

SEQ ID NO: 40424 - protein, 9 aa, Artificial Sequence
  Description of Artificial Sequence: Synthetic peptide
EKYHVDHHA

SEQ ID NO: 40425 - protein, 9 aa, Artificial Sequence
  Description of Artificial Sequence: Synthetic peptide
EKYTYNMGT

SEQ ID NO: 40426 - protein, 9 aa, Artificial Sequence
  Description of Artificial Sequence: Synthetic peptide
ELCKGNCFL

SEQ ID NO: 40427 - protein, 9 aa, Artificial Sequence
  Description of Artificial Sequence: Synthetic peptide
ELFSFGHRE

SEQ ID NO: 40428 - protein, 9 aa, Artificial Sequence
  Description of Artificial Sequence: Synthetic peptide
ELTLRMNWG

SEQ ID NO: 40429 - protein, 9 aa, Artificial Sequence
  Description of Artificial Sequence: Synthetic peptide
EMAIRWDYT

SEQ ID NO: 40430 - protein, 9 aa, Artificial Sequence
  Description of Artificial Sequence: Synthetic peptide
EMAMNGRTG

SEQ ID NO: 40431 - protein, 9 aa, Artificial Sequence
  Description of Artificial Sequence: Synthetic peptide
EMCGSSKVY

SEQ ID NO: 40432 - protein, 9 aa, Artificial Sequence
  Description of Artificial Sequence: Synthetic peptide
EMESWDYCQ

SEQ ID NO: 40433 - protein, 9 aa, Artificial Sequence
  Description of Artificial Sequence: Synthetic peptide
EMGEHHSTL

SEQ ID NO: 40434 - protein, 9 aa, Artificial Sequence
  Description of Artificial Sequence: Synthetic peptide
EMHMIKKHY

SEQ ID NO: 40435 - protein, 9 aa, Artificial Sequence
  Description of Artificial Sequence: Synthetic peptide
EMIKTAWAS

SEQ ID NO: 40436 - protein, 9 aa, Artificial Sequence
  Description of Artificial Sequence: Synthetic peptide
EMTNAETFT

SEQ ID NO: 40437 - protein, 9 aa, Artificial Sequence
  Description of Artificial Sequence: Synthetic peptide
ENESCMHIE

SEQ ID NO: 40438 - protein, 9 aa, Artificial Sequence
  Description of Artificial Sequence: Synthetic peptide
KAEDSQPDC

SEQ ID NO: 40439 - protein, 9 aa, Artificial Sequence
  Description of Artificial Sequence: Synthetic peptide
KAMQVLENC

SEQ ID NO: 40440 - protein, 9 aa, Artificial Sequence
  Description of Artificial Sequence: Synthetic peptide
KASWIPSNK

SEQ ID NO: 40441 - protein, 9 aa, Artificial Sequence
  Description of Artificial Sequence: Synthetic peptide
KCEDNTFAS

SEQ ID NO: 40442 - protein, 9 aa, Artificial Sequence
  Description of Artificial Sequence: Synthetic peptide
KCTDLGEYF

SEQ ID NO: 40443 - protein, 9 aa, Artificial Sequence
  Description of Artificial Sequence: Synthetic peptide
KDHEEHGPK

SEQ ID NO: 40444 - protein, 9 aa, Artificial Sequence
  Description of Artificial Sequence: Synthetic peptide
KERTAWSRE

SEQ ID NO: 40445 - protein, 9 aa, Artificial Sequence
  Description of Artificial Sequence: Synthetic peptide
KFMQDPCNS

SEQ ID NO: 40446 - protein, 9 aa, Artificial Sequence
  Description of Artificial Sequence: Synthetic peptide
KGELMCLDV

SEQ ID NO: 40447 - protein, 9 aa, Artificial Sequence
  Description of Artificial Sequence: Synthetic peptide
KGPKECAAT

SEQ ID NO: 40448 - protein, 9 aa, Artificial Sequence
  Description of Artificial Sequence: Synthetic peptide
KHILWGSLA

SEQ ID NO: 40449 - protein, 9 aa, Artificial Sequence
  Description of Artificial Sequence: Synthetic peptide
KIGISEQDF

SEQ ID NO: 40450 - protein, 9 aa, Artificial Sequence
  Description of Artificial Sequence: Synthetic peptide
KKYTDQDYG

SEQ ID NO: 40451 - protein, 9 aa, Artificial Sequence
  Description of Artificial Sequence: Synthetic peptide
KMTPVEADA

SEQ ID NO: 40452 - protein, 9 aa, Artificial Sequence
  Description of Artificial Sequence: Synthetic peptide
KNPTVFWKM

SEQ ID NO: 40453 - protein, 9 aa, Artificial Sequence
  Description of Artificial Sequence: Synthetic peptide
KQAIYLDLD

SEQ ID NO: 40454 - protein, 9 aa, Artificial Sequence
  Description of Artificial Sequence: Synthetic peptide
KSAMQEGVA

SEQ ID NO: 40455 - protein, 9 aa, Artificial Sequence
  Description of Artificial Sequence: Synthetic peptide
KSFGSEVFF

SEQ ID NO: 40456 - protein, 9 aa, Artificial Sequence
  Description of Artificial Sequence: Synthetic peptide
KSKWGHYWD

SEQ ID NO: 40457 - protein, 9 aa, Artificial Sequence
  Description of Artificial Sequence: Synthetic peptide
KSMDLGQFM

SEQ ID NO: 40458 - protein, 9 aa, Artificial Sequence
  Description of Artificial Sequence: Synthetic peptide
KSNQTYCAA

SEQ ID NO: 40459 - protein, 9 aa, Artificial Sequence
  Description of Artificial Sequence: Synthetic peptide
KSYCLHMKQ

SEQ ID NO: 40460 - protein, 9 aa, Artificial Sequence
  Description of Artificial Sequence: Synthetic peptide
KTGMACDIN

SEQ ID NO: 40461 - protein, 9 aa, Artificial Sequence
  Description of Artificial Sequence: Synthetic peptide
KTLVKQMDY

SEQ ID NO: 40462 - protein, 9 aa, Artificial Sequence
  Description of Artificial Sequence: Synthetic peptide
KTVWVYRVH

SEQ ID NO: 40463 - protein, 9 aa, Artificial Sequence
  Description of Artificial Sequence: Synthetic peptide
KTYPHCFPV

SEQ ID NO: 40464 - protein, 9 aa, Artificial Sequence
  Description of Artificial Sequence: Synthetic peptide
KVEDGLQWH

SEQ ID NO: 40465 - protein, 9 aa, Artificial Sequence
  Description of Artificial Sequence: Synthetic peptide
KVEGMVTQS

SEQ ID NO: 40466 - protein, 9 aa, Artificial Sequence
  Description of Artificial Sequence: Synthetic peptide
KVIEFCGEE

SEQ ID NO: 40467 - protein, 9 aa, Artificial Sequence
  Description of Artificial Sequence: Synthetic peptide
KWLEANMTG

SEQ ID NO: 40468 - protein, 9 aa, Artificial Sequence
  Description of Artificial Sequence: Synthetic peptide
KYAFRYEAS

SEQ ID NO: 40469 - protein, 9 aa, Artificial Sequence
  Description of Artificial Sequence: Synthetic peptide
KCLQMCPNG

SEQ ID NO: 40470 - protein, 9 aa, Artificial Sequence
  Description of Artificial Sequence: Synthetic peptide
KAIGWFHFD

SEQ ID NO: 40471 - protein, 9 aa, Artificial Sequence
  Description of Artificial Sequence: Synthetic peptide
KAYTVEMDP

SEQ ID NO: 40472 - protein, 9 aa, Artificial Sequence
  Description of Artificial Sequence: Synthetic peptide
KCCLPWQNI

SEQ ID NO: 40473 - protein, 9 aa, Artificial Sequence
  Description of Artificial Sequence: Synthetic peptide
KCEQWQKVC

SEQ ID NO: 40474 - protein, 9 aa, Artificial Sequence
  Description of Artificial Sequence: Synthetic peptide
KCHVGGNVY

SEQ ID NO: 40475 - protein, 9 aa, Artificial Sequence
  Description of Artificial Sequence: Synthetic peptide
KCNPWSEPT

SEQ ID NO: 40476 - protein, 9 aa, Artificial Sequence
  Description of Artificial Sequence: Synthetic peptide
KDDGDDNIP

SEQ ID NO: 40477 - protein, 9 aa, Artificial Sequence
  Description of Artificial Sequence: Synthetic peptide
KDRDQVHWM

SEQ ID NO: 40478 - protein, 9 aa, Artificial Sequence
  Description of Artificial Sequence: Synthetic peptide
KEGNMDACS

SEQ ID NO: 40479 - protein, 9 aa, Artificial Sequence
  Description of Artificial Sequence: Synthetic peptide
KEYDPQHWW

SEQ ID NO: 40480 - protein, 9 aa, Artificial Sequence
  Description of Artificial Sequence: Synthetic peptide
KFIYGQREV

SEQ ID NO: 40481 - protein, 9 aa, Artificial Sequence
  Description of Artificial Sequence: Synthetic peptide
KFKQEDAQM

SEQ ID NO: 40482 - protein, 9 aa, Artificial Sequence
  Description of Artificial Sequence: Synthetic peptide
KGIWQDHSC

SEQ ID NO: 40483 - protein, 9 aa, Artificial Sequence
  Description of Artificial Sequence: Synthetic peptide
KHCENCEYF

SEQ ID NO: 40484 - protein, 9 aa, Artificial Sequence
  Description of Artificial Sequence: Synthetic peptide
KIAPVAASP

SEQ ID NO: 40485 - protein, 9 aa, Artificial Sequence
  Description of Artificial Sequence: Synthetic peptide
KIEMLCCQG

SEQ ID NO: 40486 - protein, 9 aa, Artificial Sequence
  Description of Artificial Sequence: Synthetic peptide
KILNPNDSY

SEQ ID NO: 40487 - protein, 9 aa, Artificial Sequence
  Description of Artificial Sequence: Synthetic peptide
KKRRDTQIY

SEQ ID NO: 40488 - protein, 9 aa, Artificial Sequence
  Description of Artificial Sequence: Synthetic peptide
KLHIWNVPC

SEQ ID NO: 40489 - protein, 9 aa, Artificial Sequence
  Description of Artificial Sequence: Synthetic peptide
KMQPNGEWP

SEQ ID NO: 40490 - protein, 9 aa, Artificial Sequence
  Description of Artificial Sequence: Synthetic peptide
KNDQTTYPE

SEQ ID NO: 40491 - protein, 9 aa, Artificial Sequence
  Description of Artificial Sequence: Synthetic peptide
KNEPDNLCE

SEQ ID NO: 40492 - protein, 9 aa, Artificial Sequence
  Description of Artificial Sequence: Synthetic peptide
KPCTFAPFM

SEQ ID NO: 40493 - protein, 9 aa, Artificial Sequence
  Description of Artificial Sequence: Synthetic peptide
KPEWAMMYD

SEQ ID NO: 40494 - protein, 9 aa, Artificial Sequence
  Description of Artificial Sequence: Synthetic peptide
KPYQDIARM

SEQ ID NO: 40495 - protein, 9 aa, Artificial Sequence
  Description of Artificial Sequence: Synthetic peptide
KQEIQGVCR

SEQ ID NO: 40496 - protein, 9 aa, Artificial Sequence
  Description of Artificial Sequence: Synthetic peptide
KQETRTTDH

SEQ ID NO: 40497 - protein, 9 aa, Artificial Sequence
  Description of Artificial Sequence: Synthetic peptide
KQFWMKVEV

SEQ ID NO: 40498 - protein, 9 aa, Artificial Sequence
  Description of Artificial Sequence: Synthetic peptide
KQMLQQCFG

SEQ ID NO: 40499 - protein, 9 aa, Artificial Sequence
  Description of Artificial Sequence: Synthetic peptide
KQWELYQID

SEQ ID NO: 40500 - protein, 9 aa, Artificial Sequence
  Description of Artificial Sequence: Synthetic peptide
KRVVKFTST

SEQ ID NO: 40501 - protein, 9 aa, Artificial Sequence
  Description of Artificial Sequence: Synthetic peptide
KRYTHGKNW

SEQ ID NO: 40502 - protein, 9 aa, Artificial Sequence
  Description of Artificial Sequence: Synthetic peptide
KSADMPTTL

SEQ ID NO: 40503 - protein, 9 aa, Artificial Sequence
  Description of Artificial Sequence: Synthetic peptide
KSFLHPAAH

SEQ ID NO: 40504 - protein, 9 aa, Artificial Sequence
  Description of Artificial Sequence: Synthetic peptide
KSFYMCRCG

SEQ ID NO: 40505 - protein, 9 aa, Artificial Sequence
  Description of Artificial Sequence: Synthetic peptide
KSYVGSYES

SEQ ID NO: 40506 - protein, 9 aa, Artificial Sequence
  Description of Artificial Sequence: Synthetic peptide
KTCELTAMR

SEQ ID NO: 40507 - protein, 9 aa, Artificial Sequence
  Description of Artificial Sequence: Synthetic peptide
KTEMSDMHW

SEQ ID NO: 40508 - protein, 9 aa, Artificial Sequence
  Description of Artificial Sequence: Synthetic peptide
KTLVCVNWF

SEQ ID NO: 40509 - protein, 9 aa, Artificial Sequence
  Description of Artificial Sequence: Synthetic peptide
KTYLWEHES

SEQ ID NO: 40510 - protein, 9 aa, Artificial Sequence
  Description of Artificial Sequence: Synthetic peptide
KVSEAHYDL

SEQ ID NO: 40511 - protein, 9 aa, Artificial Sequence
  Description of Artificial Sequence: Synthetic peptide
KVTTETGVP

SEQ ID NO: 40512 - protein, 9 aa, Artificial Sequence
  Description of Artificial Sequence: Synthetic peptide
KVVAVNQSL

SEQ ID NO: 40513 - protein, 9 aa, Artificial Sequence
  Description of Artificial Sequence: Synthetic peptide
KWQQAEYDE

SEQ ID NO: 40514 - protein, 9 aa, Artificial Sequence
  Description of Artificial Sequence: Synthetic peptide
KYCHWWYKL

SEQ ID NO: 40515 - protein, 9 aa, Artificial Sequence
  Description of Artificial Sequence: Synthetic peptide
KYQNAKPVA

SEQ ID NO: 40516 - protein, 9 aa, Artificial Sequence
  Description of Artificial Sequence: Synthetic peptide
KKNSMDCQV

SEQ ID NO: 40517 - protein, 9 aa, Artificial Sequence
  Description of Artificial Sequence: Synthetic peptide
KPYFKDCPR

SEQ ID NO: 40518 - protein, 9 aa, Artificial Sequence
  Description of Artificial Sequence: Synthetic peptide
KSIFQATLQ

SEQ ID NO: 40519 - protein, 9 aa, Artificial Sequence
  Description of Artificial Sequence: Synthetic peptide
KTAHDKDID

SEQ ID NO: 40520 - protein, 9 aa, Artificial Sequence
  Description of Artificial Sequence: Synthetic peptide
KHSSWCCYT

SEQ ID NO: 40521 - protein, 9 aa, Artificial Sequence
  Description of Artificial Sequence: Synthetic peptide
KSEHHWINA

SEQ ID NO: 40522 - protein, 9 aa, Artificial Sequence
  Description of Artificial Sequence: Synthetic peptide
KVGMDQTAV

SEQ ID NO: 40523 - protein, 9 aa, Artificial Sequence
  Description of Artificial Sequence: Synthetic peptide
KFFYTELMH

SEQ ID NO: 40524 - protein, 9 aa, Artificial Sequence
  Description of Artificial Sequence: Synthetic peptide
KDFNFEAQG

SEQ ID NO: 40525 - protein, 9 aa, Artificial Sequence
  Description of Artificial Sequence: Synthetic peptide
KDQQAERHV

SEQ ID NO: 40526 - protein, 9 aa, Artificial Sequence
  Description of Artificial Sequence: Synthetic peptide
KDYANFGMN

SEQ ID NO: 40527 - protein, 9 aa, Artificial Sequence
  Description of Artificial Sequence: Synthetic peptide
KHIHCTIQC

SEQ ID NO: 40528 - protein, 9 aa, Artificial Sequence
  Description of Artificial Sequence: Synthetic peptide
KNPCLVWQK

SEQ ID NO: 40529 - protein, 9 aa, Artificial Sequence
  Description of Artificial Sequence: Synthetic peptide
KSYEMVNQW

SEQ ID NO: 40530 - protein, 9 aa, Artificial Sequence
  Description of Artificial Sequence: Synthetic peptide
KTGWDSHWS

SEQ ID NO: 40531 - protein, 9 aa, Artificial Sequence
  Description of Artificial Sequence: Synthetic peptide
KVAYMWYNW

SEQ ID NO: 40532 - protein, 9 aa, Artificial Sequence
  Description of Artificial Sequence: Synthetic peptide
KHGVLPMPA

SEQ ID NO: 40533 - protein, 9 aa, Artificial Sequence
  Description of Artificial Sequence: Synthetic peptide
KTLHMLESK

SEQ ID NO: 40534 - protein, 9 aa, Artificial Sequence
  Description of Artificial Sequence: Synthetic peptide
KCGLTPGVE

SEQ ID NO: 40535 - protein, 9 aa, Artificial Sequence
  Description of Artificial Sequence: Synthetic peptide
KVDTVRNPK

SEQ ID NO: 40536 - protein, 9 aa, Artificial Sequence
  Description of Artificial Sequence: Synthetic peptide
KAHDITWNL

SEQ ID NO: 40537 - protein, 9 aa, Artificial Sequence
  Description of Artificial Sequence: Synthetic peptide
KAEMKMGCN

SEQ ID NO: 40538 - protein, 9 aa, Artificial Sequence
  Description of Artificial Sequence: Synthetic peptide
KTTIVPAWN

SEQ ID NO: 40539 - protein, 9 aa, Artificial Sequence
  Description of Artificial Sequence: Synthetic peptide
KAIPQGSSC

SEQ ID NO: 40540 - protein, 9 aa, Artificial Sequence
  Description of Artificial Sequence: Synthetic peptide
KMTNSNENS

SEQ ID NO: 40541 - protein, 9 aa, Artificial Sequence
  Description of Artificial Sequence: Synthetic peptide
KWYQFGMVA

SEQ ID NO: 40542 - protein, 9 aa, Artificial Sequence
  Description of Artificial Sequence: Synthetic peptide
KFDVIRQAM

SEQ ID NO: 40543 - protein, 9 aa, Artificial Sequence
  Description of Artificial Sequence: Synthetic peptide
KQLTFPMLA

SEQ ID NO: 40544 - protein, 9 aa, Artificial Sequence
  Description of Artificial Sequence: Synthetic peptide
KQEWHVHTE

SEQ ID NO: 40545 - protein, 9 aa, Artificial Sequence
  Description of Artificial Sequence: Synthetic peptide
KIDQTQWQR

SEQ ID NO: 40546 - protein, 9 aa, Artificial Sequence
  Description of Artificial Sequence: Synthetic peptide
KRFVDMPEM

SEQ ID NO: 40547 - protein, 9 aa, Artificial Sequence
  Description of Artificial Sequence: Synthetic peptide
KLYGLNHSC

SEQ ID NO: 40548 - protein, 9 aa, Artificial Sequence
  Description of Artificial Sequence: Synthetic peptide
KIQPMMVKA

SEQ ID NO: 40549 - protein, 9 aa, Artificial Sequence
  Description of Artificial Sequence: Synthetic peptide
KMLHKVWID

SEQ ID NO: 40550 - protein, 9 aa, Artificial Sequence
  Description of Artificial Sequence: Synthetic peptide
KGPIFHSAY

SEQ ID NO: 40551 - protein, 9 aa, Artificial Sequence
  Description of Artificial Sequence: Synthetic peptide
KGMQMWNCE

SEQ ID NO: 40552 - protein, 9 aa, Artificial Sequence
  Description of Artificial Sequence: Synthetic peptide
IWKFKNAHL

SEQ ID NO: 40553 - protein, 9 aa, Artificial Sequence
  Description of Artificial Sequence: Synthetic peptide
IWNDQWDCP

SEQ ID NO: 40554 - protein, 9 aa, Artificial Sequence
  Description of Artificial Sequence: Synthetic peptide
IWNWMTEDC

SEQ ID NO: 40555 - protein, 9 aa, Artificial Sequence
  Description of Artificial Sequence: Synthetic peptide
IWTLNWAQL

SEQ ID NO: 40556 - protein, 9 aa, Artificial Sequence
  Description of Artificial Sequence: Synthetic peptide
LWEQWSTLS

SEQ ID NO: 40557 - protein, 9 aa, Artificial Sequence
  Description of Artificial Sequence: Synthetic peptide
LWQFCSICE

SEQ ID NO: 40558 - protein, 9 aa, Artificial Sequence
  Description of Artificial Sequence: Synthetic peptide
LWVECHCNQ

SEQ ID NO: 40559 - protein, 9 aa, Artificial Sequence
  Description of Artificial Sequence: Synthetic peptide
MWVELPSDD

SEQ ID NO: 40560 - protein, 9 aa, Artificial Sequence
  Description of Artificial Sequence: Synthetic peptide
NWIHWNACF

SEQ ID NO: 40561 - protein, 9 aa, Artificial Sequence
  Description of Artificial Sequence: Synthetic peptide
NWMERDHNH

SEQ ID NO: 40562 - protein, 9 aa, Artificial Sequence
  Description of Artificial Sequence: Synthetic peptide
NWSYCNVSA

SEQ ID NO: 40563 - protein, 9 aa, Artificial Sequence
  Description of Artificial Sequence: Synthetic peptide
NWTHQDMFD

SEQ ID NO: 40564 - protein, 9 aa, Artificial Sequence
  Description of Artificial Sequence: Synthetic peptide
NWYFMSQTD

SEQ ID NO: 40565 - protein, 9 aa, Artificial Sequence
  Description of Artificial Sequence: Synthetic peptide
QWAKWDWSS

SEQ ID NO: 40566 - protein, 9 aa, Artificial Sequence
  Description of Artificial Sequence: Synthetic peptide
QWHQFNRMH

SEQ ID NO: 40567 - protein, 9 aa, Artificial Sequence
  Description of Artificial Sequence: Synthetic peptide
QWTTITKEE

SEQ ID NO: 40568 - protein, 9 aa, Artificial Sequence
  Description of Artificial Sequence: Synthetic peptide
RWKSQEEIQ

SEQ ID NO: 40569 - protein, 9 aa, Artificial Sequence
  Description of Artificial Sequence: Synthetic peptide
SWAFANHTH

SEQ ID NO: 40570 - protein, 9 aa, Artificial Sequence
  Description of Artificial Sequence: Synthetic peptide
SWEQNVVST

SEQ ID NO: 40571 - protein, 9 aa, Artificial Sequence
  Description of Artificial Sequence: Synthetic peptide
TWTAMEIYG

SEQ ID NO: 40572 - protein, 9 aa, Artificial Sequence
  Description of Artificial Sequence: Synthetic peptide
SWSPTGVAN

SEQ ID NO: 40573 - protein, 9 aa, Artificial Sequence
  Description of Artificial Sequence: Synthetic peptide
AWDHTMPYG

SEQ ID NO: 40574 - protein, 9 aa, Artificial Sequence
  Description of Artificial Sequence: Synthetic peptide
AWGNRYHYC

SEQ ID NO: 40575 - protein, 9 aa, Artificial Sequence
  Description of Artificial Sequence: Synthetic peptide
AWHDYFRDN

SEQ ID NO: 40576 - protein, 9 aa, Artificial Sequence
  Description of Artificial Sequence: Synthetic peptide
AWMDCSIMC

SEQ ID NO: 40577 - protein, 9 aa, Artificial Sequence
  Description of Artificial Sequence: Synthetic peptide
CWQAALHSA

SEQ ID NO: 40578 - protein, 9 aa, Artificial Sequence
  Description of Artificial Sequence: Synthetic peptide
CWWCALLST

SEQ ID NO: 40579 - protein, 9 aa, Artificial Sequence
  Description of Artificial Sequence: Synthetic peptide
DWIMDTPKP

SEQ ID NO: 40580 - protein, 9 aa, Artificial Sequence
  Description of Artificial Sequence: Synthetic peptide
DWIVDTPKP

SEQ ID NO: 40581 - protein, 9 aa, Artificial Sequence
  Description of Artificial Sequence: Synthetic peptide
DWNYYACYT

SEQ ID NO: 40582 - protein, 9 aa, Artificial Sequence
  Description of Artificial Sequence: Synthetic peptide
EWICVQSHN

SEQ ID NO: 40583 - protein, 9 aa, Artificial Sequence
  Description of Artificial Sequence: Synthetic peptide
GWMIAMDGK

SEQ ID NO: 40584 - protein, 9 aa, Artificial Sequence
  Description of Artificial Sequence: Synthetic peptide
GWNTFIWGQ

SEQ ID NO: 40585 - protein, 9 aa, Artificial Sequence
  Description of Artificial Sequence: Synthetic peptide
GWTLNPSEG

SEQ ID NO: 40586 - protein, 9 aa, Artificial Sequence
  Description of Artificial Sequence: Synthetic peptide
HWIPQWARS

SEQ ID NO: 40587 - protein, 9 aa, Artificial Sequence
  Description of Artificial Sequence: Synthetic peptide
HWISFERHQ

SEQ ID NO: 40588 - protein, 9 aa, Artificial Sequence
  Description of Artificial Sequence: Synthetic peptide
IWDFKCTQC

SEQ ID NO: 40589 - protein, 9 aa, Artificial Sequence
  Description of Artificial Sequence: Synthetic peptide
IWKDYLHVG

SEQ ID NO: 40590 - protein, 9 aa, Artificial Sequence
  Description of Artificial Sequence: Synthetic peptide
LWCNENAMD

SEQ ID NO: 40591 - protein, 9 aa, Artificial Sequence
  Description of Artificial Sequence: Synthetic peptide
LWQQIPWGK

SEQ ID NO: 40592 - protein, 9 aa, Artificial Sequence
  Description of Artificial Sequence: Synthetic peptide
MWAAMPVGH

SEQ ID NO: 40593 - protein, 9 aa, Artificial Sequence
  Description of Artificial Sequence: Synthetic peptide
MWEQEPNRN

SEQ ID NO: 40594 - protein, 9 aa, Artificial Sequence
  Description of Artificial Sequence: Synthetic peptide
MWFAENNGL

SEQ ID NO: 40595 - protein, 9 aa, Artificial Sequence
  Description of Artificial Sequence: Synthetic peptide
MWGINGVAY

SEQ ID NO: 40596 - protein, 9 aa, Artificial Sequence
  Description of Artificial Sequence: Synthetic peptide
MWRPARYKS

SEQ ID NO: 40597 - protein, 9 aa, Artificial Sequence
  Description of Artificial Sequence: Synthetic peptide
NWEDSPWCY

SEQ ID NO: 40598 - protein, 9 aa, Artificial Sequence
  Description of Artificial Sequence: Synthetic peptide
NWEPCWWAH

SEQ ID NO: 40599 - protein, 9 aa, Artificial Sequence
  Description of Artificial Sequence: Synthetic peptide
NWGPQQSER

SEQ ID NO: 40600 - protein, 9 aa, Artificial Sequence
  Description of Artificial Sequence: Synthetic peptide
NWNKTRFTC

SEQ ID NO: 40601 - protein, 9 aa, Artificial Sequence
  Description of Artificial Sequence: Synthetic peptide
NWVSHDKEA

SEQ ID NO: 40602 - protein, 9 aa, Artificial Sequence
  Description of Artificial Sequence: Synthetic peptide
PWAETEKPN

SEQ ID NO: 40603 - protein, 9 aa, Artificial Sequence
  Description of Artificial Sequence: Synthetic peptide
PWIPNQIKQ

SEQ ID NO: 40604 - protein, 9 aa, Artificial Sequence
  Description of Artificial Sequence: Synthetic peptide
PWTCNENQW

SEQ ID NO: 40605 - protein, 9 aa, Artificial Sequence
  Description of Artificial Sequence: Synthetic peptide
QWPEMTCCD

SEQ ID NO: 40606 - protein, 9 aa, Artificial Sequence
  Description of Artificial Sequence: Synthetic peptide
QWTRTGSSF

SEQ ID NO: 40607 - protein, 9 aa, Artificial Sequence
  Description of Artificial Sequence: Synthetic peptide
RWHNGENCS

SEQ ID NO: 40608 - protein, 9 aa, Artificial Sequence
  Description of Artificial Sequence: Synthetic peptide
RWNARWELG

SEQ ID NO: 40609 - protein, 9 aa, Artificial Sequence
  Description of Artificial Sequence: Synthetic peptide
RWRCRMQGN

SEQ ID NO: 40610 - protein, 9 aa, Artificial Sequence
  Description of Artificial Sequence: Synthetic peptide
SWIDMAMMQ

SEQ ID NO: 40611 - protein, 9 aa, Artificial Sequence
  Description of Artificial Sequence: Synthetic peptide
SWTALGSVP

SEQ ID NO: 40612 - protein, 9 aa, Artificial Sequence
  Description of Artificial Sequence: Synthetic peptide
SWTLRMWAS

SEQ ID NO: 40613 - protein, 9 aa, Artificial Sequence
  Description of Artificial Sequence: Synthetic peptide
TWLPVGAAH

SEQ ID NO: 40614 - protein, 9 aa, Artificial Sequence
  Description of Artificial Sequence: Synthetic peptide
TWVNFPTHC

SEQ ID NO: 40615 - protein, 9 aa, Artificial Sequence
  Description of Artificial Sequence: Synthetic peptide
VWWFAPMEA

SEQ ID NO: 40616 - protein, 9 aa, Artificial Sequence
  Description of Artificial Sequence: Synthetic peptide
WWAQPWHAL

SEQ ID NO: 40617 - protein, 9 aa, Artificial Sequence
  Description of Artificial Sequence: Synthetic peptide
WWTDMSSWT

SEQ ID NO: 40618 - protein, 9 aa, Artificial Sequence
  Description of Artificial Sequence: Synthetic peptide
YWWLDHANF

SEQ ID NO: 40619 - protein, 9 aa, Artificial Sequence
  Description of Artificial Sequence: Synthetic peptide
GWTTNLHYH

SEQ ID NO: 40620 - protein, 9 aa, Artificial Sequence
  Description of Artificial Sequence: Synthetic peptide
NWVVWPMEN

SEQ ID NO: 40621 - protein, 9 aa, Artificial Sequence
  Description of Artificial Sequence: Synthetic peptide
RWVCANAQD

SEQ ID NO: 40622 - protein, 9 aa, Artificial Sequence
  Description of Artificial Sequence: Synthetic peptide
CWECYQFKR

SEQ ID NO: 40623 - protein, 9 aa, Artificial Sequence
  Description of Artificial Sequence: Synthetic peptide
CWSAIMTGC

SEQ ID NO: 40624 - protein, 9 aa, Artificial Sequence
  Description of Artificial Sequence: Synthetic peptide
DWMQGGIYN

SEQ ID NO: 40625 - protein, 9 aa, Artificial Sequence
  Description of Artificial Sequence: Synthetic peptide
EWFEDEVLW

SEQ ID NO: 40626 - protein, 9 aa, Artificial Sequence
  Description of Artificial Sequence: Synthetic peptide
EWGMHTSNR

SEQ ID NO: 40627 - protein, 9 aa, Artificial Sequence
  Description of Artificial Sequence: Synthetic peptide
FWSGYNAEK

SEQ ID NO: 40628 - protein, 9 aa, Artificial Sequence
  Description of Artificial Sequence: Synthetic peptide
GWTHFHWQE

SEQ ID NO: 40629 - protein, 9 aa, Artificial Sequence
  Description of Artificial Sequence: Synthetic peptide
LWKTILEGV

SEQ ID NO: 40630 - protein, 9 aa, Artificial Sequence
  Description of Artificial Sequence: Synthetic peptide
RWGMYDSYY

SEQ ID NO: 40631 - protein, 9 aa, Artificial Sequence
  Description of Artificial Sequence: Synthetic peptide
RWTDTNFRG

SEQ ID NO: 40632 - protein, 9 aa, Artificial Sequence
  Description of Artificial Sequence: Synthetic peptide
TWAMMGQWW

SEQ ID NO: 40633 - protein, 9 aa, Artificial Sequence
  Description of Artificial Sequence: Synthetic peptide
LWKLGNKVF

SEQ ID NO: 40634 - protein, 9 aa, Artificial Sequence
  Description of Artificial Sequence: Synthetic peptide
TWTSRCELL

SEQ ID NO: 40635 - protein, 9 aa, Artificial Sequence
  Description of Artificial Sequence: Synthetic peptide
VWNPDLKMN

SEQ ID NO: 40636 - protein, 9 aa, Artificial Sequence
  Description of Artificial Sequence: Synthetic peptide
EWTKKTADH

SEQ ID NO: 40637 - protein, 9 aa, Artificial Sequence
  Description of Artificial Sequence: Synthetic peptide
IWNYCVPKH

SEQ ID NO: 40638 - protein, 9 aa, Artificial Sequence
  Description of Artificial Sequence: Synthetic peptide
YWAFPCCGF

SEQ ID NO: 40639 - protein, 9 aa, Artificial Sequence
  Description of Artificial Sequence: Synthetic peptide
CWGPIMHPF

SEQ ID NO: 40640 - protein, 9 aa, Artificial Sequence
  Description of Artificial Sequence: Synthetic peptide
TWKSPRGYM

SEQ ID NO: 40641 - protein, 9 aa, Artificial Sequence
  Description of Artificial Sequence: Synthetic peptide
AWMCCARHD

SEQ ID NO: 40642 - protein, 9 aa, Artificial Sequence
  Description of Artificial Sequence: Synthetic peptide
CWWNFGKDC

SEQ ID NO: 40643 - protein, 9 aa, Artificial Sequence
  Description of Artificial Sequence: Synthetic peptide
SWCAMIYEM

SEQ ID NO: 40644 - protein, 9 aa, Artificial Sequence
  Description of Artificial Sequence: Synthetic peptide
IVRFYFKSW

SEQ ID NO: 40645 - protein, 9 aa, Artificial Sequence
  Description of Artificial Sequence: Synthetic peptide
LIRQGDCFI

SEQ ID NO: 40646 - protein, 9 aa, Artificial Sequence
  Description of Artificial Sequence: Synthetic peptide
LTRDRFTEW

SEQ ID NO: 40647 - protein, 9 aa, Artificial Sequence
  Description of Artificial Sequence: Synthetic peptide
LYRTSIALV

SEQ ID NO: 40648 - protein, 9 aa, Artificial Sequence
  Description of Artificial Sequence: Synthetic peptide
MERYGHCHP

SEQ ID NO: 40649 - protein, 9 aa, Artificial Sequence
  Description of Artificial Sequence: Synthetic peptide
MLRAESGLT

SEQ ID NO: 40650 - protein, 9 aa, Artificial Sequence
  Description of Artificial Sequence: Synthetic peptide
NNRTYDWWN

SEQ ID NO: 40651 - protein, 9 aa, Artificial Sequence
  Description of Artificial Sequence: Synthetic peptide
PVRMFTESG

SEQ ID NO: 40652 - protein, 9 aa, Artificial Sequence
  Description of Artificial Sequence: Synthetic peptide
QGRQILKAI

SEQ ID NO: 40653 - protein, 9 aa, Artificial Sequence
  Description of Artificial Sequence: Synthetic peptide
QHRYYTCQS

SEQ ID NO: 40654 - protein, 9 aa, Artificial Sequence
  Description of Artificial Sequence: Synthetic peptide
QLRKHYTLL

SEQ ID NO: 40655 - protein, 9 aa, Artificial Sequence
  Description of Artificial Sequence: Synthetic peptide
QYRPTWVHV

SEQ ID NO: 40656 - protein, 9 aa, Artificial Sequence
  Description of Artificial Sequence: Synthetic peptide
RFRWVHFHW

SEQ ID NO: 40657 - protein, 9 aa, Artificial Sequence
  Description of Artificial Sequence: Synthetic peptide
SGRCNALNT

SEQ ID NO: 40658 - protein, 9 aa, Artificial Sequence
  Description of Artificial Sequence: Synthetic peptide
TIRDSVFGC

SEQ ID NO: 40659 - protein, 9 aa, Artificial Sequence
  Description of Artificial Sequence: Synthetic peptide
VAREDEWQN

SEQ ID NO: 40660 - protein, 9 aa, Artificial Sequence
  Description of Artificial Sequence: Synthetic peptide
VCRTQESSA

SEQ ID NO: 40661 - protein, 9 aa, Artificial Sequence
  Description of Artificial Sequence: Synthetic peptide
VHRHRAHKF

SEQ ID NO: 40662 - protein, 9 aa, Artificial Sequence
  Description of Artificial Sequence: Synthetic peptide
VPRWVERAH

SEQ ID NO: 40663 - protein, 9 aa, Artificial Sequence
  Description of Artificial Sequence: Synthetic peptide
VVRSYNFGE

SEQ ID NO: 40664 - protein, 9 aa, Artificial Sequence
  Description of Artificial Sequence: Synthetic peptide
NDRHVPCWD

SEQ ID NO: 40665 - protein, 9 aa, Artificial Sequence
  Description of Artificial Sequence: Synthetic peptide
AFRNKEFYV

SEQ ID NO: 40666 - protein, 9 aa, Artificial Sequence
  Description of Artificial Sequence: Synthetic peptide
AHRDYACTN

SEQ ID NO: 40667 - protein, 9 aa, Artificial Sequence
  Description of Artificial Sequence: Synthetic peptide
CMRGDKRNR

SEQ ID NO: 40668 - protein, 9 aa, Artificial Sequence
  Description of Artificial Sequence: Synthetic peptide
CMRMDGNDR

SEQ ID NO: 40669 - protein, 9 aa, Artificial Sequence
  Description of Artificial Sequence: Synthetic peptide
CNRPKCPPM

SEQ ID NO: 40670 - protein, 9 aa, Artificial Sequence
  Description of Artificial Sequence: Synthetic peptide
DARFGLNFG

SEQ ID NO: 40671 - protein, 9 aa, Artificial Sequence
  Description of Artificial Sequence: Synthetic peptide
DARFYITEG

SEQ ID NO: 40672 - protein, 9 aa, Artificial Sequence
  Description of Artificial Sequence: Synthetic peptide
DHRETDAEE

SEQ ID NO: 40673 - protein, 9 aa, Artificial Sequence
  Description of Artificial Sequence: Synthetic peptide
DYRNYFIWP

SEQ ID NO: 40674 - protein, 9 aa, Artificial Sequence
  Description of Artificial Sequence: Synthetic peptide
EARCTDMCY

SEQ ID NO: 40675 - protein, 9 aa, Artificial Sequence
  Description of Artificial Sequence: Synthetic peptide
EFRPVLECC

SEQ ID NO: 40676 - protein, 9 aa, Artificial Sequence
  Description of Artificial Sequence: Synthetic peptide
EIRYYYPES

SEQ ID NO: 40677 - protein, 9 aa, Artificial Sequence
  Description of Artificial Sequence: Synthetic peptide
ELRWDARPH

SEQ ID NO: 40678 - protein, 9 aa, Artificial Sequence
  Description of Artificial Sequence: Synthetic peptide
EMRITNARC

SEQ ID NO: 40679 - protein, 9 aa, Artificial Sequence
  Description of Artificial Sequence: Synthetic peptide
ERRMEQAQT

SEQ ID NO: 40680 - protein, 9 aa, Artificial Sequence
  Description of Artificial Sequence: Synthetic peptide
ESRAGYMHY

SEQ ID NO: 40681 - protein, 9 aa, Artificial Sequence
  Description of Artificial Sequence: Synthetic peptide
EYRCVYRKC

SEQ ID NO: 40682 - protein, 9 aa, Artificial Sequence
  Description of Artificial Sequence: Synthetic peptide
EYRLCPQTS

SEQ ID NO: 40683 - protein, 9 aa, Artificial Sequence
  Description of Artificial Sequence: Synthetic peptide
FHREQAAHQ

SEQ ID NO: 40684 - protein, 9 aa, Artificial Sequence
  Description of Artificial Sequence: Synthetic peptide
HSRQSEETI

SEQ ID NO: 40685 - protein, 9 aa, Artificial Sequence
  Description of Artificial Sequence: Synthetic peptide
IAREPLMAN

SEQ ID NO: 40686 - protein, 9 aa, Artificial Sequence
  Description of Artificial Sequence: Synthetic peptide
IDRKDRRES

SEQ ID NO: 40687 - protein, 9 aa, Artificial Sequence
  Description of Artificial Sequence: Synthetic peptide
IIRNRCAEP

SEQ ID NO: 40688 - protein, 9 aa, Artificial Sequence
  Description of Artificial Sequence: Synthetic peptide
IYRLMHWDN

SEQ ID NO: 40689 - protein, 9 aa, Artificial Sequence
  Description of Artificial Sequence: Synthetic peptide
LMRSTVKNG

SEQ ID NO: 40690 - protein, 9 aa, Artificial Sequence
  Description of Artificial Sequence: Synthetic peptide
LPRCVIAAC

SEQ ID NO: 40691 - protein, 9 aa, Artificial Sequence
  Description of Artificial Sequence: Synthetic peptide
LTREDFTQM

SEQ ID NO: 40692 - protein, 9 aa, Artificial Sequence
  Description of Artificial Sequence: Synthetic peptide
MLRAMDIDA

SEQ ID NO: 40693 - protein, 9 aa, Artificial Sequence
  Description of Artificial Sequence: Synthetic peptide
MVRDKNNDH

SEQ ID NO: 40694 - protein, 9 aa, Artificial Sequence
  Description of Artificial Sequence: Synthetic peptide
NRRMVVAQS

SEQ ID NO: 40695 - protein, 9 aa, Artificial Sequence
  Description of Artificial Sequence: Synthetic peptide
NTREYPEYI

SEQ ID NO: 40696 - protein, 9 aa, Artificial Sequence
  Description of Artificial Sequence: Synthetic peptide
PMRMAIEFD

SEQ ID NO: 40697 - protein, 9 aa, Artificial Sequence
  Description of Artificial Sequence: Synthetic peptide
PSRPCTYHS

SEQ ID NO: 40698 - protein, 9 aa, Artificial Sequence
  Description of Artificial Sequence: Synthetic peptide
QGRWMYHWW

SEQ ID NO: 40699 - protein, 9 aa, Artificial Sequence
  Description of Artificial Sequence: Synthetic peptide
QLREIQMIQ

SEQ ID NO: 40700 - protein, 9 aa, Artificial Sequence
  Description of Artificial Sequence: Synthetic peptide
SNRCLTYEF

SEQ ID NO: 40701 - protein, 9 aa, Artificial Sequence
  Description of Artificial Sequence: Synthetic peptide
SQRDEMFAL

SEQ ID NO: 40702 - protein, 9 aa, Artificial Sequence
  Description of Artificial Sequence: Synthetic peptide
SQRHIECIG

SEQ ID NO: 40703 - protein, 9 aa, Artificial Sequence
  Description of Artificial Sequence: Synthetic peptide
STRDWMSCM

SEQ ID NO: 40704 - protein, 9 aa, Artificial Sequence
  Description of Artificial Sequence: Synthetic peptide
TDRMLAGQR

SEQ ID NO: 40705 - protein, 9 aa, Artificial Sequence
  Description of Artificial Sequence: Synthetic peptide
TFRMSVTGV

SEQ ID NO: 40706 - protein, 9 aa, Artificial Sequence
  Description of Artificial Sequence: Synthetic peptide
TIRSFNLEA

SEQ ID NO: 40707 - protein, 9 aa, Artificial Sequence
  Description of Artificial Sequence: Synthetic peptide
TMRTHSSWW

SEQ ID NO: 40708 - protein, 9 aa, Artificial Sequence
  Description of Artificial Sequence: Synthetic peptide
TYRVFMVHD

SEQ ID NO: 40709 - protein, 9 aa, Artificial Sequence
  Description of Artificial Sequence: Synthetic peptide
VFRMVMEQY

SEQ ID NO: 40710 - protein, 9 aa, Artificial Sequence
  Description of Artificial Sequence: Synthetic peptide
VYRLREKQE

SEQ ID NO: 40711 - protein, 9 aa, Artificial Sequence
  Description of Artificial Sequence: Synthetic peptide
IGRHQMTDK

SEQ ID NO: 40712 - protein, 9 aa, Artificial Sequence
  Description of Artificial Sequence: Synthetic peptide
ANRADWQHL

SEQ ID NO: 40713 - protein, 9 aa, Artificial Sequence
  Description of Artificial Sequence: Synthetic peptide
QCRHTDQVK

SEQ ID NO: 40714 - protein, 9 aa, Artificial Sequence
  Description of Artificial Sequence: Synthetic peptide
ETRGFVKCH

SEQ ID NO: 40715 - protein, 9 aa, Artificial Sequence
  Description of Artificial Sequence: Synthetic peptide
ETRVREDAV

SEQ ID NO: 40716 - protein, 9 aa, Artificial Sequence
  Description of Artificial Sequence: Synthetic peptide
QDRRPENRF

SEQ ID NO: 40717 - protein, 9 aa, Artificial Sequence
  Description of Artificial Sequence: Synthetic peptide
CERSKCPKS

SEQ ID NO: 40718 - protein, 9 aa, Artificial Sequence
  Description of Artificial Sequence: Synthetic peptide
DIRSYKGFQ

SEQ ID NO: 40719 - protein, 9 aa, Artificial Sequence
  Description of Artificial Sequence: Synthetic peptide
QVRDIANMC

SEQ ID NO: 40720 - protein, 9 aa, Artificial Sequence
  Description of Artificial Sequence: Synthetic peptide
VKRLENEWH

SEQ ID NO: 40721 - protein, 9 aa, Artificial Sequence
  Description of Artificial Sequence: Synthetic peptide
YGRLREAMH

SEQ ID NO: 40722 - protein, 9 aa, Artificial Sequence
  Description of Artificial Sequence: Synthetic peptide
DDRVKMFHY

SEQ ID NO: 40723 - protein, 9 aa, Artificial Sequence
  Description of Artificial Sequence: Synthetic peptide
ANRMIWYPY

SEQ ID NO: 40724 - protein, 9 aa, Artificial Sequence
  Description of Artificial Sequence: Synthetic peptide
GHRPKLCDQ

SEQ ID NO: 40725 - protein, 9 aa, Artificial Sequence
  Description of Artificial Sequence: Synthetic peptide
VNRGDLSLF

SEQ ID NO: 40726 - protein, 9 aa, Artificial Sequence
  Description of Artificial Sequence: Synthetic peptide
QSRCDPVSP

SEQ ID NO: 40727 - protein, 9 aa, Artificial Sequence
  Description of Artificial Sequence: Synthetic peptide
EHRDNTTRP

SEQ ID NO: 40728 - protein, 9 aa, Artificial Sequence
  Description of Artificial Sequence: Synthetic peptide
GVRNALNLS

SEQ ID NO: 40729 - protein, 9 aa, Artificial Sequence
  Description of Artificial Sequence: Synthetic peptide
GIRCISKAG

SEQ ID NO: 40730 - protein, 9 aa, Artificial Sequence
  Description of Artificial Sequence: Synthetic peptide
LTRSGPIGQ

SEQ ID NO: 40731 - protein, 9 aa, Artificial Sequence
  Description of Artificial Sequence: Synthetic peptide
MTRVSMTWR

SEQ ID NO: 40732 - protein, 9 aa, Artificial Sequence
  Description of Artificial Sequence: Synthetic peptide
CCRQIWVQY

SEQ ID NO: 40733 - protein, 9 aa, Artificial Sequence
  Description of Artificial Sequence: Synthetic peptide
STRPIACHS

SEQ ID NO: 40734 - protein, 9 aa, Artificial Sequence
  Description of Artificial Sequence: Synthetic peptide
NNRALMSVE

SEQ ID NO: 40735 - protein, 9 aa, Artificial Sequence
  Description of Artificial Sequence: Synthetic peptide
TVRHQMDAY

SEQ ID NO: 40736 - protein, 9 aa, Artificial Sequence
  Description of Artificial Sequence: Synthetic peptide
NNRRQFGYV

SEQ ID NO: 40737 - protein, 9 aa, Artificial Sequence
  Description of Artificial Sequence: Synthetic peptide
SSRMQMQGP

SEQ ID NO: 40738 - protein, 9 aa, Artificial Sequence
  Description of Artificial Sequence: Synthetic peptide
MFEAIVTGL

SEQ ID NO: 40739 - protein, 9 aa, Artificial Sequence
  Description of Artificial Sequence: Synthetic peptide
MHGAFVDTQ

SEQ ID NO: 40740 - protein, 9 aa, Artificial Sequence
  Description of Artificial Sequence: Synthetic peptide
MNVAYHGFS

SEQ ID NO: 40741 - protein, 9 aa, Artificial Sequence
  Description of Artificial Sequence: Synthetic peptide
MTQADPCIG

SEQ ID NO: 40742 - protein, 9 aa, Artificial Sequence
  Description of Artificial Sequence: Synthetic peptide
NAYAAGNIG

SEQ ID NO: 40743 - protein, 9 aa, Artificial Sequence
  Description of Artificial Sequence: Synthetic peptide
NHSANPHGY

SEQ ID NO: 40744 - protein, 9 aa, Artificial Sequence
  Description of Artificial Sequence: Synthetic peptide
NIMAIHHDS

SEQ ID NO: 40745 - protein, 9 aa, Artificial Sequence
  Description of Artificial Sequence: Synthetic peptide
NMVAMNEPR

SEQ ID NO: 40746 - protein, 9 aa, Artificial Sequence
  Description of Artificial Sequence: Synthetic peptide
NVWAWKEVE

SEQ ID NO: 40747 - protein, 9 aa, Artificial Sequence
  Description of Artificial Sequence: Synthetic peptide
QLIAIHDIN

SEQ ID NO: 40748 - protein, 9 aa, Artificial Sequence
  Description of Artificial Sequence: Synthetic peptide
QTVAHENCD

SEQ ID NO: 40749 - protein, 9 aa, Artificial Sequence
  Description of Artificial Sequence: Synthetic peptide
QTVAPGGHC

SEQ ID NO: 40750 - protein, 9 aa, Artificial Sequence
  Description of Artificial Sequence: Synthetic peptide
RADATGVPN

SEQ ID NO: 40751 - protein, 9 aa, Artificial Sequence
  Description of Artificial Sequence: Synthetic peptide
REDAYLAGH

SEQ ID NO: 40752 - protein, 9 aa, Artificial Sequence
  Description of Artificial Sequence: Synthetic peptide
RSEAGIRQI

SEQ ID NO: 40753 - protein, 9 aa, Artificial Sequence
  Description of Artificial Sequence: Synthetic peptide
SGLAFDEDD

SEQ ID NO: 40754 - protein, 9 aa, Artificial Sequence
  Description of Artificial Sequence: Synthetic peptide
SHVAYKLLD

SEQ ID NO: 40755 - protein, 9 aa, Artificial Sequence
  Description of Artificial Sequence: Synthetic peptide
TMVAFSSCL

SEQ ID NO: 40756 - protein, 9 aa, Artificial Sequence
  Description of Artificial Sequence: Synthetic peptide
TSYAMWSDV

SEQ ID NO: 40757 - protein, 9 aa, Artificial Sequence
  Description of Artificial Sequence: Synthetic peptide
VASAMRHHT

SEQ ID NO: 40758 - protein, 9 aa, Artificial Sequence
  Description of Artificial Sequence: Synthetic peptide
VTEAFPTSV

SEQ ID NO: 40759 - protein, 9 aa, Artificial Sequence
  Description of Artificial Sequence: Synthetic peptide
VVDAIAQAD

SEQ ID NO: 40760 - protein, 9 aa, Artificial Sequence
  Description of Artificial Sequence: Synthetic peptide
WGLANNCHE

SEQ ID NO: 40761 - protein, 9 aa, Artificial Sequence
  Description of Artificial Sequence: Synthetic peptide
GIWAYGCTS

SEQ ID NO: 40762 - protein, 9 aa, Artificial Sequence
  Description of Artificial Sequence: Synthetic peptide
AACAIWKGE

SEQ ID NO: 40763 - protein, 9 aa, Artificial Sequence
  Description of Artificial Sequence: Synthetic peptide
CGDAYDEHC

SEQ ID NO: 40764 - protein, 9 aa, Artificial Sequence
  Description of Artificial Sequence: Synthetic peptide
DDSAQYWQV

SEQ ID NO: 40765 - protein, 9 aa, Artificial Sequence
  Description of Artificial Sequence: Synthetic peptide
DHTACKKLC

SEQ ID NO: 40766 - protein, 9 aa, Artificial Sequence
  Description of Artificial Sequence: Synthetic peptide
DSKADHCVN

SEQ ID NO: 40767 - protein, 9 aa, Artificial Sequence
  Description of Artificial Sequence: Synthetic peptide
DSMADDQHL

SEQ ID NO: 40768 - protein, 9 aa, Artificial Sequence
  Description of Artificial Sequence: Synthetic peptide
EASAFPHDQ

SEQ ID NO: 40769 - protein, 9 aa, Artificial Sequence
  Description of Artificial Sequence: Synthetic peptide
ECHAIDQSD

SEQ ID NO: 40770 - protein, 9 aa, Artificial Sequence
  Description of Artificial Sequence: Synthetic peptide
ECKARNSCG

SEQ ID NO: 40771 - protein, 9 aa, Artificial Sequence
  Description of Artificial Sequence: Synthetic peptide
ECTAHGVHC

SEQ ID NO: 40772 - protein, 9 aa, Artificial Sequence
  Description of Artificial Sequence: Synthetic peptide
EFDARVAHE

SEQ ID NO: 40773 - protein, 9 aa, Artificial Sequence
  Description of Artificial Sequence: Synthetic peptide
EFFALDSQS

SEQ ID NO: 40774 - protein, 9 aa, Artificial Sequence
  Description of Artificial Sequence: Synthetic peptide
EHGAVHNAN

SEQ ID NO: 40775 - protein, 9 aa, Artificial Sequence
  Description of Artificial Sequence: Synthetic peptide
EVAASSAIH

SEQ ID NO: 40776 - protein, 9 aa, Artificial Sequence
  Description of Artificial Sequence: Synthetic peptide
EVIAGHVGA

SEQ ID NO: 40777 - protein, 9 aa, Artificial Sequence
  Description of Artificial Sequence: Synthetic peptide
FPSAPTEPG

SEQ ID NO: 40778 - protein, 9 aa, Artificial Sequence
  Description of Artificial Sequence: Synthetic peptide
GKEAAYAVW

SEQ ID NO: 40779 - protein, 9 aa, Artificial Sequence
  Description of Artificial Sequence: Synthetic peptide
GMWAQWCSN

SEQ ID NO: 40780 - protein, 9 aa, Artificial Sequence
  Description of Artificial Sequence: Synthetic peptide
GVEAYKFPH

SEQ ID NO: 40781 - protein, 9 aa, Artificial Sequence
  Description of Artificial Sequence: Synthetic peptide
HEQAVQKHI

SEQ ID NO: 40782 - protein, 9 aa, Artificial Sequence
  Description of Artificial Sequence: Synthetic peptide
HNCAGWDDG

SEQ ID NO: 40783 - protein, 9 aa, Artificial Sequence
  Description of Artificial Sequence: Synthetic peptide
HQVATQLIK

SEQ ID NO: 40784 - protein, 9 aa, Artificial Sequence
  Description of Artificial Sequence: Synthetic peptide
HTKAYNHCV

SEQ ID NO: 40785 - protein, 9 aa, Artificial Sequence
  Description of Artificial Sequence: Synthetic peptide
HVHAVPNFA

SEQ ID NO: 40786 - protein, 9 aa, Artificial Sequence
  Description of Artificial Sequence: Synthetic peptide
IADAQTMQP

SEQ ID NO: 40787 - protein, 9 aa, Artificial Sequence
  Description of Artificial Sequence: Synthetic peptide
IFVAPMPGM

SEQ ID NO: 40788 - protein, 9 aa, Artificial Sequence
  Description of Artificial Sequence: Synthetic peptide
IHVALDQSL

SEQ ID NO: 40789 - protein, 9 aa, Artificial Sequence
  Description of Artificial Sequence: Synthetic peptide
IRVAKKGAR

SEQ ID NO: 40790 - protein, 9 aa, Artificial Sequence
  Description of Artificial Sequence: Synthetic peptide
ITGAMMYMG

SEQ ID NO: 40791 - protein, 9 aa, Artificial Sequence
  Description of Artificial Sequence: Synthetic peptide
ITLACVYHD

SEQ ID NO: 40792 - protein, 9 aa, Artificial Sequence
  Description of Artificial Sequence: Synthetic peptide
IVMADVYGN

SEQ ID NO: 40793 - protein, 9 aa, Artificial Sequence
  Description of Artificial Sequence: Synthetic peptide
IVNACMVEK

SEQ ID NO: 40794 - protein, 9 aa, Artificial Sequence
  Description of Artificial Sequence: Synthetic peptide
LEIALHACW

SEQ ID NO: 40795 - protein, 9 aa, Artificial Sequence
  Description of Artificial Sequence: Synthetic peptide
LFTAFRQFT

SEQ ID NO: 40796 - protein, 9 aa, Artificial Sequence
  Description of Artificial Sequence: Synthetic peptide
LTSAVGAGM

SEQ ID NO: 40797 - protein, 9 aa, Artificial Sequence
  Description of Artificial Sequence: Synthetic peptide
MISAFTGSH

SEQ ID NO: 40798 - protein, 9 aa, Artificial Sequence
  Description of Artificial Sequence: Synthetic peptide
MISAPPDTW

SEQ ID NO: 40799 - protein, 9 aa, Artificial Sequence
  Description of Artificial Sequence: Synthetic peptide
MTFAHDTTN

SEQ ID NO: 40800 - protein, 9 aa, Artificial Sequence
  Description of Artificial Sequence: Synthetic peptide
NEFAIQNAE

SEQ ID NO: 40801 - protein, 9 aa, Artificial Sequence
  Description of Artificial Sequence: Synthetic peptide
NKEARGALD

SEQ ID NO: 40802 - protein, 9 aa, Artificial Sequence
  Description of Artificial Sequence: Synthetic peptide
NTTASTDVP

SEQ ID NO: 40803 - protein, 9 aa, Artificial Sequence
  Description of Artificial Sequence: Synthetic peptide
PCKAKEKAV

SEQ ID NO: 40804 - protein, 9 aa, Artificial Sequence
  Description of Artificial Sequence: Synthetic peptide
QQDAMEQYF

SEQ ID NO: 40805 - protein, 9 aa, Artificial Sequence
  Description of Artificial Sequence: Synthetic peptide
RAAAQGPPQ

SEQ ID NO: 40806 - protein, 9 aa, Artificial Sequence
  Description of Artificial Sequence: Synthetic peptide
RFFAAELQW

SEQ ID NO: 40807 - protein, 9 aa, Artificial Sequence
  Description of Artificial Sequence: Synthetic peptide
RLEAMYNWG

SEQ ID NO: 40808 - protein, 9 aa, Artificial Sequence
  Description of Artificial Sequence: Synthetic peptide
SAIATHQYI

SEQ ID NO: 40809 - protein, 9 aa, Artificial Sequence
  Description of Artificial Sequence: Synthetic peptide
SEYAAMRDS

SEQ ID NO: 40810 - protein, 9 aa, Artificial Sequence
  Description of Artificial Sequence: Synthetic peptide
SGCAMLNMG

SEQ ID NO: 40811 - protein, 9 aa, Artificial Sequence
  Description of Artificial Sequence: Synthetic peptide
SKCAHSFEH

SEQ ID NO: 40812 - protein, 9 aa, Artificial Sequence
  Description of Artificial Sequence: Synthetic peptide
SNWARSSAE

SEQ ID NO: 40813 - protein, 9 aa, Artificial Sequence
  Description of Artificial Sequence: Synthetic peptide
SRFASWEGM

SEQ ID NO: 40814 - protein, 9 aa, Artificial Sequence
  Description of Artificial Sequence: Synthetic peptide
SRMAIDVIG

SEQ ID NO: 40815 - protein, 9 aa, Artificial Sequence
  Description of Artificial Sequence: Synthetic peptide
STSADPHCG

SEQ ID NO: 40816 - protein, 9 aa, Artificial Sequence
  Description of Artificial Sequence: Synthetic peptide
TQMAHMIAH

SEQ ID NO: 40817 - protein, 9 aa, Artificial Sequence
  Description of Artificial Sequence: Synthetic peptide
TTCAHSKMG

SEQ ID NO: 40818 - protein, 9 aa, Artificial Sequence
  Description of Artificial Sequence: Synthetic peptide
TTEADDPTT

SEQ ID NO: 40819 - protein, 9 aa, Artificial Sequence
  Description of Artificial Sequence: Synthetic peptide
VGEAPGHWQ

SEQ ID NO: 40820 - protein, 9 aa, Artificial Sequence
  Description of Artificial Sequence: Synthetic peptide
VVGADRCQA

SEQ ID NO: 40821 - protein, 9 aa, Artificial Sequence
  Description of Artificial Sequence: Synthetic peptide
WEEACKLDT

SEQ ID NO: 40822 - protein, 9 aa, Artificial Sequence
  Description of Artificial Sequence: Synthetic peptide
WHSAVQHLL

SEQ ID NO: 40823 - protein, 9 aa, Artificial Sequence
  Description of Artificial Sequence: Synthetic peptide
WVDAFCCQC

SEQ ID NO: 40824 - protein, 9 aa, Artificial Sequence
  Description of Artificial Sequence: Synthetic peptide
YEQAMEYET

SEQ ID NO: 40825 - protein, 9 aa, Artificial Sequence
  Description of Artificial Sequence: Synthetic peptide
YNNADCHYH

SEQ ID NO: 40826 - protein, 9 aa, Artificial Sequence
  Description of Artificial Sequence: Synthetic peptide
YTQAMCITA

SEQ ID NO: 40827 - protein, 9 aa, Artificial Sequence
  Description of Artificial Sequence: Synthetic peptide
TQHALSWWS

SEQ ID NO: 40828 - protein, 9 aa, Artificial Sequence
  Description of Artificial Sequence: Synthetic peptide
NVLARCDDI

SEQ ID NO: 40829 - protein, 9 aa, Artificial Sequence
  Description of Artificial Sequence: Synthetic peptide
VRAAQRSEP

SEQ ID NO: 40830 - protein, 9 aa, Artificial Sequence
  Description of Artificial Sequence: Synthetic peptide
TQNACKVRT

SEQ ID NO: 40831 - protein, 9 aa, Artificial Sequence
  Description of Artificial Sequence: Synthetic peptide
AAKALMSCH

SEQ ID NO: 40832 - protein, 9 aa, Artificial Sequence
  Description of Artificial Sequence: Synthetic peptide
DFHACYKCS

SEQ ID NO: 40833 - protein, 9 aa, Artificial Sequence
  Description of Artificial Sequence: Synthetic peptide
ICAAPNSAK

SEQ ID NO: 40834 - protein, 9 aa, Artificial Sequence
  Description of Artificial Sequence: Synthetic peptide
LSMAMQVGC

SEQ ID NO: 40835 - protein, 9 aa, Artificial Sequence
  Description of Artificial Sequence: Synthetic peptide
MNKAMTTWA

SEQ ID NO: 40836 - protein, 9 aa, Artificial Sequence
  Description of Artificial Sequence: Synthetic peptide
QCNALNSFV

SEQ ID NO: 40837 - protein, 9 aa, Artificial Sequence
  Description of Artificial Sequence: Synthetic peptide
RTCAYESGT

SEQ ID NO: 40838 - protein, 9 aa, Artificial Sequence
  Description of Artificial Sequence: Synthetic peptide
TKNAMEIQE

SEQ ID NO: 40839 - protein, 9 aa, Artificial Sequence
  Description of Artificial Sequence: Synthetic peptide
TPNAFVFAS

SEQ ID NO: 40840 - protein, 9 aa, Artificial Sequence
  Description of Artificial Sequence: Synthetic peptide
TQEACHHDP

SEQ ID NO: 40841 - protein, 9 aa, Artificial Sequence
  Description of Artificial Sequence: Synthetic peptide
CMEAQGECY

SEQ ID NO: 40842 - protein, 9 aa, Artificial Sequence
  Description of Artificial Sequence: Synthetic peptide
QMQAWYCQE

SEQ ID NO: 40843 - protein, 9 aa, Artificial Sequence
  Description of Artificial Sequence: Synthetic peptide
GTNAYMAHK

SEQ ID NO: 40844 - protein, 9 aa, Artificial Sequence
  Description of Artificial Sequence: Synthetic peptide
AVKAPSQMS

SEQ ID NO: 40845 - protein, 9 aa, Artificial Sequence
  Description of Artificial Sequence: Synthetic peptide
QSDAVHEPA

SEQ ID NO: 40846 - protein, 9 aa, Artificial Sequence
  Description of Artificial Sequence: Synthetic peptide
QGVACLDQL

SEQ ID NO: 40847 - protein, 9 aa, Artificial Sequence
  Description of Artificial Sequence: Synthetic peptide
NVYATPVVC

SEQ ID NO: 40848 - protein, 9 aa, Artificial Sequence
  Description of Artificial Sequence: Synthetic peptide
TNAAYEMWF

SEQ ID NO: 40849 - protein, 9 aa, Artificial Sequence
  Description of Artificial Sequence: Synthetic peptide
DQLALTFED

SEQ ID NO: 40850 - protein, 9 aa, Artificial Sequence
  Description of Artificial Sequence: Synthetic peptide
RTEAHLPAP

SEQ ID NO: 40851 - protein, 9 aa, Artificial Sequence
  Description of Artificial Sequence: Synthetic peptide
LDGYMNHDC

SEQ ID NO: 40852 - protein, 9 aa, Artificial Sequence
  Description of Artificial Sequence: Synthetic peptide
LILPMGVNN

SEQ ID NO: 40853 - protein, 9 aa, Artificial Sequence
  Description of Artificial Sequence: Synthetic peptide
LMSVMFAAH

SEQ ID NO: 40854 - protein, 9 aa, Artificial Sequence
  Description of Artificial Sequence: Synthetic peptide
LQDHMCHNG

SEQ ID NO: 40855 - protein, 9 aa, Artificial Sequence
  Description of Artificial Sequence: Synthetic peptide
LQEDMSPYA

SEQ ID NO: 40856 - protein, 9 aa, Artificial Sequence
  Description of Artificial Sequence: Synthetic peptide
LVIKMHQLW

SEQ ID NO: 40857 - protein, 9 aa, Artificial Sequence
  Description of Artificial Sequence: Synthetic peptide
LYHEMTHAF

SEQ ID NO: 40858 - protein, 9 aa, Artificial Sequence
  Description of Artificial Sequence: Synthetic peptide
MCAVMDIFG

SEQ ID NO: 40859 - protein, 9 aa, Artificial Sequence
  Description of Artificial Sequence: Synthetic peptide
MMQRMVYQC

SEQ ID NO: 40860 - protein, 9 aa, Artificial Sequence
  Description of Artificial Sequence: Synthetic peptide
MNSLMQVAW

SEQ ID NO: 40861 - protein, 9 aa, Artificial Sequence
  Description of Artificial Sequence: Synthetic peptide
MVQRMVYQC

SEQ ID NO: 40862 - protein, 9 aa, Artificial Sequence
  Description of Artificial Sequence: Synthetic peptide
MVTTMGSTE

SEQ ID NO: 40863 - protein, 9 aa, Artificial Sequence
  Description of Artificial Sequence: Synthetic peptide
NCCNMQLTF

SEQ ID NO: 40864 - protein, 9 aa, Artificial Sequence
  Description of Artificial Sequence: Synthetic peptide
NCHVMSINL

SEQ ID NO: 40865 - protein, 9 aa, Artificial Sequence
  Description of Artificial Sequence: Synthetic peptide
NGCGMVWQR

SEQ ID NO: 40866 - protein, 9 aa, Artificial Sequence
  Description of Artificial Sequence: Synthetic peptide
NLAGMLPKN

SEQ ID NO: 40867 - protein, 9 aa, Artificial Sequence
  Description of Artificial Sequence: Synthetic peptide
NMTGMPNGT

SEQ ID NO: 40868 - protein, 9 aa, Artificial Sequence
  Description of Artificial Sequence: Synthetic peptide
QALKMENDQ

SEQ ID NO: 40869 - protein, 9 aa, Artificial Sequence
  Description of Artificial Sequence: Synthetic peptide
QFYMMPFSL

SEQ ID NO: 40870 - protein, 9 aa, Artificial Sequence
  Description of Artificial Sequence: Synthetic peptide
QGFFMMALM

SEQ ID NO: 40871 - protein, 9 aa, Artificial Sequence
  Description of Artificial Sequence: Synthetic peptide
QKNHMYHQM

SEQ ID NO: 40872 - protein, 9 aa, Artificial Sequence
  Description of Artificial Sequence: Synthetic peptide
QSDMMCHCM

SEQ ID NO: 40873 - protein, 9 aa, Artificial Sequence
  Description of Artificial Sequence: Synthetic peptide
QTCSMLKDR

SEQ ID NO: 40874 - protein, 9 aa, Artificial Sequence
  Description of Artificial Sequence: Synthetic peptide
RATEMAWSW

SEQ ID NO: 40875 - protein, 9 aa, Artificial Sequence
  Description of Artificial Sequence: Synthetic peptide
SAGFMQEAA

SEQ ID NO: 40876 - protein, 9 aa, Artificial Sequence
  Description of Artificial Sequence: Synthetic peptide
SHTRMGAFS

SEQ ID NO: 40877 - protein, 9 aa, Artificial Sequence
  Description of Artificial Sequence: Synthetic peptide
SIAWMHLTQ

SEQ ID NO: 40878 - protein, 9 aa, Artificial Sequence
  Description of Artificial Sequence: Synthetic peptide
SNMGMKHYE

SEQ ID NO: 40879 - protein, 9 aa, Artificial Sequence
  Description of Artificial Sequence: Synthetic peptide
STDFMIHHF

SEQ ID NO: 40880 - protein, 9 aa, Artificial Sequence
  Description of Artificial Sequence: Synthetic peptide
THDSMFFAC

SEQ ID NO: 40881 - protein, 9 aa, Artificial Sequence
  Description of Artificial Sequence: Synthetic peptide
VAGNMDDHA

SEQ ID NO: 40882 - protein, 9 aa, Artificial Sequence
  Description of Artificial Sequence: Synthetic peptide
VPYWMNTQQ

SEQ ID NO: 40883 - protein, 9 aa, Artificial Sequence
  Description of Artificial Sequence: Synthetic peptide
VSVDMNCAS

SEQ ID NO: 40884 - protein, 9 aa, Artificial Sequence
  Description of Artificial Sequence: Synthetic peptide
VTSLMQMGC

SEQ ID NO: 40885 - protein, 9 aa, Artificial Sequence
  Description of Artificial Sequence: Synthetic peptide
YDTRMQTLG

SEQ ID NO: 40886 - protein, 9 aa, Artificial Sequence
  Description of Artificial Sequence: Synthetic peptide
YRGWMNMED

SEQ ID NO: 40887 - protein, 9 aa, Artificial Sequence
  Description of Artificial Sequence: Synthetic peptide
MSLWMATMQ

SEQ ID NO: 40888 - protein, 9 aa, Artificial Sequence
  Description of Artificial Sequence: Synthetic peptide
AFHHMMNTS

SEQ ID NO: 40889 - protein, 9 aa, Artificial Sequence
  Description of Artificial Sequence: Synthetic peptide
AHTIMMRDF

SEQ ID NO: 40890 - protein, 9 aa, Artificial Sequence
  Description of Artificial Sequence: Synthetic peptide
AMDLMGDCE

SEQ ID NO: 40891 - protein, 9 aa, Artificial Sequence
  Description of Artificial Sequence: Synthetic peptide
AMMQMMKAN

SEQ ID NO: 40892 - protein, 9 aa, Artificial Sequence
  Description of Artificial Sequence: Synthetic peptide
ATAPMCFYQ

SEQ ID NO: 40893 - protein, 9 aa, Artificial Sequence
  Description of Artificial Sequence: Synthetic peptide
CCCPMILFN

SEQ ID NO: 40894 - protein, 9 aa, Artificial Sequence
  Description of Artificial Sequence: Synthetic peptide
CGEDMKICQ

SEQ ID NO: 40895 - protein, 9 aa, Artificial Sequence
  Description of Artificial Sequence: Synthetic peptide
CMFGMVNYT

SEQ ID NO: 40896 - protein, 9 aa, Artificial Sequence
  Description of Artificial Sequence: Synthetic peptide
CVATMHCHQ

SEQ ID NO: 40897 - protein, 9 aa, Artificial Sequence
  Description of Artificial Sequence: Synthetic peptide
DELKMGHNI

SEQ ID NO: 40898 - protein, 9 aa, Artificial Sequence
  Description of Artificial Sequence: Synthetic peptide
DGTPMHEYE

SEQ ID NO: 40899 - protein, 9 aa, Artificial Sequence
  Description of Artificial Sequence: Synthetic peptide
DKMVMVFKR

SEQ ID NO: 40900 - protein, 9 aa, Artificial Sequence
  Description of Artificial Sequence: Synthetic peptide
DKWTMQHWE

SEQ ID NO: 40901 - protein, 9 aa, Artificial Sequence
  Description of Artificial Sequence: Synthetic peptide
DMVKMADCY

SEQ ID NO: 40902 - protein, 9 aa, Artificial Sequence
  Description of Artificial Sequence: Synthetic peptide
DYEDMDQYY

SEQ ID NO: 40903 - protein, 9 aa, Artificial Sequence
  Description of Artificial Sequence: Synthetic peptide
EGNIMMTQH

SEQ ID NO: 40904 - protein, 9 aa, Artificial Sequence
  Description of Artificial Sequence: Synthetic peptide
ETSPMMTKP

SEQ ID NO: 40905 - protein, 9 aa, Artificial Sequence
  Description of Artificial Sequence: Synthetic peptide
FQSQMPKMA

SEQ ID NO: 40906 - protein, 9 aa, Artificial Sequence
  Description of Artificial Sequence: Synthetic peptide
FSQTMIFGA

SEQ ID NO: 40907 - protein, 9 aa, Artificial Sequence
  Description of Artificial Sequence: Synthetic peptide
GMIGMARLA

SEQ ID NO: 40908 - protein, 9 aa, Artificial Sequence
  Description of Artificial Sequence: Synthetic peptide
GVDPMVTHQ

SEQ ID NO: 40909 - protein, 9 aa, Artificial Sequence
  Description of Artificial Sequence: Synthetic peptide
HKDTMHSFS

SEQ ID NO: 40910 - protein, 9 aa, Artificial Sequence
  Description of Artificial Sequence: Synthetic peptide
HKFWMPNQH

SEQ ID NO: 40911 - protein, 9 aa, Artificial Sequence
  Description of Artificial Sequence: Synthetic peptide
HMCWMATDK

SEQ ID NO: 40912 - protein, 9 aa, Artificial Sequence
  Description of Artificial Sequence: Synthetic peptide
HMYGMQKHE

SEQ ID NO: 40913 - protein, 9 aa, Artificial Sequence
  Description of Artificial Sequence: Synthetic peptide
INPKMHYAS

SEQ ID NO: 40914 - protein, 9 aa, Artificial Sequence
  Description of Artificial Sequence: Synthetic peptide
LATTMQAFN

SEQ ID NO: 40915 - protein, 9 aa, Artificial Sequence
  Description of Artificial Sequence: Synthetic peptide
LCEVMGCDA

SEQ ID NO: 40916 - protein, 9 aa, Artificial Sequence
  Description of Artificial Sequence: Synthetic peptide
LENTMWKCA

SEQ ID NO: 40917 - protein, 9 aa, Artificial Sequence
  Description of Artificial Sequence: Synthetic peptide
LGAVMTCHY

SEQ ID NO: 40918 - protein, 9 aa, Artificial Sequence
  Description of Artificial Sequence: Synthetic peptide
LHQTMACQL

SEQ ID NO: 40919 - protein, 9 aa, Artificial Sequence
  Description of Artificial Sequence: Synthetic peptide
LNGTMLAMS

SEQ ID NO: 40920 - protein, 9 aa, Artificial Sequence
  Description of Artificial Sequence: Synthetic peptide
NANDMSSDR

SEQ ID NO: 40921 - protein, 9 aa, Artificial Sequence
  Description of Artificial Sequence: Synthetic peptide
NCEPMNEWP

SEQ ID NO: 40922 - protein, 9 aa, Artificial Sequence
  Description of Artificial Sequence: Synthetic peptide
NEPPMGLKY

SEQ ID NO: 40923 - protein, 9 aa, Artificial Sequence
  Description of Artificial Sequence: Synthetic peptide
NESPMNDTC

SEQ ID NO: 40924 - protein, 9 aa, Artificial Sequence
  Description of Artificial Sequence: Synthetic peptide
NITEMGAYP

SEQ ID NO: 40925 - protein, 9 aa, Artificial Sequence
  Description of Artificial Sequence: Synthetic peptide
NTGEMAEYV

SEQ ID NO: 40926 - protein, 9 aa, Artificial Sequence
  Description of Artificial Sequence: Synthetic peptide
PNILMMFEP

SEQ ID NO: 40927 - protein, 9 aa, Artificial Sequence
  Description of Artificial Sequence: Synthetic peptide
PVGWMVQWP

SEQ ID NO: 40928 - protein, 9 aa, Artificial Sequence
  Description of Artificial Sequence: Synthetic peptide
QCNHMDHVA

SEQ ID NO: 40929 - protein, 9 aa, Artificial Sequence
  Description of Artificial Sequence: Synthetic peptide
QDNMMVRDY

SEQ ID NO: 40930 - protein, 9 aa, Artificial Sequence
  Description of Artificial Sequence: Synthetic peptide
QISTMLARC

SEQ ID NO: 40931 - protein, 9 aa, Artificial Sequence
  Description of Artificial Sequence: Synthetic peptide
QMATMFTCR

SEQ ID NO: 40932 - protein, 9 aa, Artificial Sequence
  Description of Artificial Sequence: Synthetic peptide
QPISMQGQM

SEQ ID NO: 40933 - protein, 9 aa, Artificial Sequence
  Description of Artificial Sequence: Synthetic peptide
QQVRMDRLD

SEQ ID NO: 40934 - protein, 9 aa, Artificial Sequence
  Description of Artificial Sequence: Synthetic peptide
RDEDMHIAE

SEQ ID NO: 40935 - protein, 9 aa, Artificial Sequence
  Description of Artificial Sequence: Synthetic peptide
RHQHMKYLD

SEQ ID NO: 40936 - protein, 9 aa, Artificial Sequence
  Description of Artificial Sequence: Synthetic peptide
RTVDMNLKG

SEQ ID NO: 40937 - protein, 9 aa, Artificial Sequence
  Description of Artificial Sequence: Synthetic peptide
SGLGMPNWT

SEQ ID NO: 40938 - protein, 9 aa, Artificial Sequence
  Description of Artificial Sequence: Synthetic peptide
SGSCMWGYA

SEQ ID NO: 40939 - protein, 9 aa, Artificial Sequence
  Description of Artificial Sequence: Synthetic peptide
SMIPMDSMP

SEQ ID NO: 40940 - protein, 9 aa, Artificial Sequence
  Description of Artificial Sequence: Synthetic peptide
TPNNMWWME

SEQ ID NO: 40941 - protein, 9 aa, Artificial Sequence
  Description of Artificial Sequence: Synthetic peptide
TQVLMHATW

SEQ ID NO: 40942 - protein, 9 aa, Artificial Sequence
  Description of Artificial Sequence: Synthetic peptide
VAQTMHYHH

SEQ ID NO: 40943 - protein, 9 aa, Artificial Sequence
  Description of Artificial Sequence: Synthetic peptide
VKDEMHYMR

SEQ ID NO: 40944 - protein, 9 aa, Artificial Sequence
  Description of Artificial Sequence: Synthetic peptide
VLDQMHAPP

SEQ ID NO: 40945 - protein, 9 aa, Artificial Sequence
  Description of Artificial Sequence: Synthetic peptide
VVNSMWLMH

SEQ ID NO: 40946 - protein, 9 aa, Artificial Sequence
  Description of Artificial Sequence: Synthetic peptide
WFHNMLATN

SEQ ID NO: 40947 - protein, 9 aa, Artificial Sequence
  Description of Artificial Sequence: Synthetic peptide
WGMCMQRPI

SEQ ID NO: 40948 - protein, 9 aa, Artificial Sequence
  Description of Artificial Sequence: Synthetic peptide
YRTEMNEAH

SEQ ID NO: 40949 - protein, 9 aa, Artificial Sequence
  Description of Artificial Sequence: Synthetic peptide
YVSQMWMQC

SEQ ID NO: 40950 - protein, 9 aa, Artificial Sequence
  Description of Artificial Sequence: Synthetic peptide
YHAPMLMCN

SEQ ID NO: 40951 - protein, 9 aa, Artificial Sequence
  Description of Artificial Sequence: Synthetic peptide
DPVEMCSYA

SEQ ID NO: 40952 - protein, 9 aa, Artificial Sequence
  Description of Artificial Sequence: Synthetic peptide
DRTTMVGWY

SEQ ID NO: 40953 - protein, 9 aa, Artificial Sequence
  Description of Artificial Sequence: Synthetic peptide
LPWHMMCMP

SEQ ID NO: 40954 - protein, 9 aa, Artificial Sequence
  Description of Artificial Sequence: Synthetic peptide
AFCRMKFGG

SEQ ID NO: 40955 - protein, 9 aa, Artificial Sequence
  Description of Artificial Sequence: Synthetic peptide
GTEMMGDHA

SEQ ID NO: 40956 - protein, 9 aa, Artificial Sequence
  Description of Artificial Sequence: Synthetic peptide
PCWPMMIPG

SEQ ID NO: 40957 - protein, 9 aa, Artificial Sequence
  Description of Artificial Sequence: Synthetic peptide
GTIRMPEHR

SEQ ID NO: 40958 - protein, 9 aa, Artificial Sequence
  Description of Artificial Sequence: Synthetic peptide
FCSPMFKQE

SEQ ID NO: 40959 - protein, 9 aa, Artificial Sequence
  Description of Artificial Sequence: Synthetic peptide
AKAGMSYSG

SEQ ID NO: 40960 - protein, 9 aa, Artificial Sequence
  Description of Artificial Sequence: Synthetic peptide
ACAIMKMWY

SEQ ID NO: 40961 - protein, 9 aa, Artificial Sequence
  Description of Artificial Sequence: Synthetic peptide
AHFQMNMSP

SEQ ID NO: 40962 - protein, 9 aa, Artificial Sequence
  Description of Artificial Sequence: Synthetic peptide
CESKMCQEP

SEQ ID NO: 40963 - protein, 9 aa, Artificial Sequence
  Description of Artificial Sequence: Synthetic peptide
CLYNMWQCE

SEQ ID NO: 40964 - protein, 9 aa, Artificial Sequence
  Description of Artificial Sequence: Synthetic peptide
DTLPMAMDP

SEQ ID NO: 40965 - protein, 9 aa, Artificial Sequence
  Description of Artificial Sequence: Synthetic peptide
DYGSMAASW

SEQ ID NO: 40966 - protein, 9 aa, Artificial Sequence
  Description of Artificial Sequence: Synthetic peptide
EDFSMPFNH

SEQ ID NO: 40967 - protein, 9 aa, Artificial Sequence
  Description of Artificial Sequence: Synthetic peptide
ESSSMNEEK

SEQ ID NO: 40968 - protein, 9 aa, Artificial Sequence
  Description of Artificial Sequence: Synthetic peptide
IEVGMTFPE

SEQ ID NO: 40969 - protein, 9 aa, Artificial Sequence
  Description of Artificial Sequence: Synthetic peptide
IHQYMTAHG

SEQ ID NO: 40970 - protein, 9 aa, Artificial Sequence
  Description of Artificial Sequence: Synthetic peptide
LDKQMWQFT

SEQ ID NO: 40971 - protein, 9 aa, Artificial Sequence
  Description of Artificial Sequence: Synthetic peptide
MEAMMKHME

SEQ ID NO: 40972 - protein, 9 aa, Artificial Sequence
  Description of Artificial Sequence: Synthetic peptide
PQGIMWWTL

SEQ ID NO: 40973 - protein, 9 aa, Artificial Sequence
  Description of Artificial Sequence: Synthetic peptide
TMWMMHSSP

SEQ ID NO: 40974 - protein, 9 aa, Artificial Sequence
  Description of Artificial Sequence: Synthetic peptide
VGLSMHSMD

SEQ ID NO: 40975 - protein, 9 aa, Artificial Sequence
  Description of Artificial Sequence: Synthetic peptide
VKGRMCNNF

SEQ ID NO: 40976 - protein, 9 aa, Artificial Sequence
  Description of Artificial Sequence: Synthetic peptide
GSTHMNQEG

SEQ ID NO: 40977 - protein, 9 aa, Artificial Sequence
  Description of Artificial Sequence: Synthetic peptide
YDYWMQAPT

SEQ ID NO: 40978 - protein, 9 aa, Artificial Sequence
  Description of Artificial Sequence: Synthetic peptide
HNIHMWCNI

SEQ ID NO: 40979 - protein, 9 aa, Artificial Sequence
  Description of Artificial Sequence: Synthetic peptide
MCLNMAKQG

SEQ ID NO: 40980 - protein, 9 aa, Artificial Sequence
  Description of Artificial Sequence: Synthetic peptide
QTNTMQMLS

SEQ ID NO: 40981 - protein, 9 aa, Artificial Sequence
  Description of Artificial Sequence: Synthetic peptide
NNCNMNVMK

SEQ ID NO: 40982 - protein, 9 aa, Artificial Sequence
  Description of Artificial Sequence: Synthetic peptide
VLTTMWKNN

SEQ ID NO: 40983 - protein, 9 aa, Artificial Sequence
  Description of Artificial Sequence: Synthetic peptide
FHDRMAWAR

SEQ ID NO: 40984 - protein, 9 aa, Artificial Sequence
  Description of Artificial Sequence: Synthetic peptide
AQWYMWCWD

SEQ ID NO: 40985 - protein, 9 aa, Artificial Sequence
  Description of Artificial Sequence: Synthetic peptide
YTELMKKAC

SEQ ID NO: 40986 - protein, 9 aa, Artificial Sequence
  Description of Artificial Sequence: Synthetic peptide
CISPMRVHQ

SEQ ID NO: 40987 - protein, 9 aa, Artificial Sequence
  Description of Artificial Sequence: Synthetic peptide
YASTMHSIP

SEQ ID NO: 40988 - protein, 9 aa, Artificial Sequence
  Description of Artificial Sequence: Synthetic peptide
CEFPMGPSD

SEQ ID NO: 40989 - protein, 9 aa, Artificial Sequence
  Description of Artificial Sequence: Synthetic peptide
LLPIMHTHW

SEQ ID NO: 40990 - protein, 9 aa, Artificial Sequence
  Description of Artificial Sequence: Synthetic peptide
FQHRMEEDA

SEQ ID NO: 40991 - protein, 9 aa, Artificial Sequence
  Description of Artificial Sequence: Synthetic peptide
STALMDANM

SEQ ID NO: 40992 - protein, 9 aa, Artificial Sequence
  Description of Artificial Sequence: Synthetic peptide
EFGEMLGVD

SEQ ID NO: 40993 - protein, 9 aa, Artificial Sequence
  Description of Artificial Sequence: Synthetic peptide
VTSHMATAC

SEQ ID NO: 40994 - protein, 9 aa, Artificial Sequence
  Description of Artificial Sequence: Synthetic peptide
PAYRMECCE

SEQ ID NO: 40995 - protein, 9 aa, Artificial Sequence
  Description of Artificial Sequence: Synthetic peptide
GAQSMQFSC

SEQ ID NO: 40996 - protein, 9 aa, Artificial Sequence
  Description of Artificial Sequence: Synthetic peptide
YVIPMVPSS

SEQ ID NO: 40997 - protein, 9 aa, Artificial Sequence
  Description of Artificial Sequence: Synthetic peptide
AAFVMNGDG

SEQ ID NO: 40998 - protein, 9 aa, Artificial Sequence
  Description of Artificial Sequence: Synthetic peptide
FTEPMCMQG

SEQ ID NO: 40999 - protein, 9 aa, Artificial Sequence
  Description of Artificial Sequence: Synthetic peptide
LHDSRNKSP

SEQ ID NO: 41000 - protein, 9 aa, Artificial Sequence
  Description of Artificial Sequence: Synthetic peptide
LRDFENLIL

SEQ ID NO: 41001 - protein, 9 aa, Artificial Sequence
  Description of Artificial Sequence: Synthetic peptide
LTEDGNWWS

SEQ ID NO: 41002 - protein, 9 aa, Artificial Sequence
  Description of Artificial Sequence: Synthetic peptide
LVITFNQGC

SEQ ID NO: 41003 - protein, 9 aa, Artificial Sequence
  Description of Artificial Sequence: Synthetic peptide
MGLSFNHTR

SEQ ID NO: 41004 - protein, 9 aa, Artificial Sequence
  Description of Artificial Sequence: Synthetic peptide
MSTERNRAC

SEQ ID NO: 41005 - protein, 9 aa, Artificial Sequence
  Description of Artificial Sequence: Synthetic peptide
PQQHTNFSK

SEQ ID NO: 41006 - protein, 9 aa, Artificial Sequence
  Description of Artificial Sequence: Synthetic peptide
QCTVQNQFG

SEQ ID NO: 41007 - protein, 9 aa, Artificial Sequence
  Description of Artificial Sequence: Synthetic peptide
QMELSNQWN

SEQ ID NO: 41008 - protein, 9 aa, Artificial Sequence
  Description of Artificial Sequence: Synthetic peptide
QTVDHNITL

SEQ ID NO: 41009 - protein, 9 aa, Artificial Sequence
  Description of Artificial Sequence: Synthetic peptide
SAKYDNVQI

SEQ ID NO: 41010 - protein, 9 aa, Artificial Sequence
  Description of Artificial Sequence: Synthetic peptide
SAYSTNGDA

SEQ ID NO: 41011 - protein, 9 aa, Artificial Sequence
  Description of Artificial Sequence: Synthetic peptide
SCQDVNNYH

SEQ ID NO: 41012 - protein, 9 aa, Artificial Sequence
  Description of Artificial Sequence: Synthetic peptide
SHGYGNRFA

SEQ ID NO: 41013 - protein, 9 aa, Artificial Sequence
  Description of Artificial Sequence: Synthetic peptide
SHYQDNIGF

SEQ ID NO: 41014 - protein, 9 aa, Artificial Sequence
  Description of Artificial Sequence: Synthetic peptide
SSKPSNEMW

SEQ ID NO: 41015 - protein, 9 aa, Artificial Sequence
  Description of Artificial Sequence: Synthetic peptide
TKKEINDCC

SEQ ID NO: 41016 - protein, 9 aa, Artificial Sequence
  Description of Artificial Sequence: Synthetic peptide
TMVMNNWVA

SEQ ID NO: 41017 - protein, 9 aa, Artificial Sequence
  Description of Artificial Sequence: Synthetic peptide
TQHSNNQAT

SEQ ID NO: 41018 - protein, 9 aa, Artificial Sequence
  Description of Artificial Sequence: Synthetic peptide
WHKLHNRHV

SEQ ID NO: 41019 - protein, 9 aa, Artificial Sequence
  Description of Artificial Sequence: Synthetic peptide
AHAFNNVVD

SEQ ID NO: 41020 - protein, 9 aa, Artificial Sequence
  Description of Artificial Sequence: Synthetic peptide
AKHWFNESG

SEQ ID NO: 41021 - protein, 9 aa, Artificial Sequence
  Description of Artificial Sequence: Synthetic peptide
AVVQANQVL

SEQ ID NO: 41022 - protein, 9 aa, Artificial Sequence
  Description of Artificial Sequence: Synthetic peptide
AYPHRNVGL

SEQ ID NO: 41023 - protein, 9 aa, Artificial Sequence
  Description of Artificial Sequence: Synthetic peptide
CKQQFNGQN

SEQ ID NO: 41024 - protein, 9 aa, Artificial Sequence
  Description of Artificial Sequence: Synthetic peptide
CMNEWNKLG

SEQ ID NO: 41025 - protein, 9 aa, Artificial Sequence
  Description of Artificial Sequence: Synthetic peptide
CMVDANHLW

SEQ ID NO: 41026 - protein, 9 aa, Artificial Sequence
  Description of Artificial Sequence: Synthetic peptide
CNFNNNDHA

SEQ ID NO: 41027 - protein, 9 aa, Artificial Sequence
  Description of Artificial Sequence: Synthetic peptide
CTLFSNFQY

SEQ ID NO: 41028 - protein, 9 aa, Artificial Sequence
  Description of Artificial Sequence: Synthetic peptide
DSCKANTQS

SEQ ID NO: 41029 - protein, 9 aa, Artificial Sequence
  Description of Artificial Sequence: Synthetic peptide
EAWMHNFNW

SEQ ID NO: 41030 - protein, 9 aa, Artificial Sequence
  Description of Artificial Sequence: Synthetic peptide
EIYITNCTS

SEQ ID NO: 41031 - protein, 9 aa, Artificial Sequence
  Description of Artificial Sequence: Synthetic peptide
ERHGFNHCN

SEQ ID NO: 41032 - protein, 9 aa, Artificial Sequence
  Description of Artificial Sequence: Synthetic peptide
ESDPRNLGP

SEQ ID NO: 41033 - protein, 9 aa, Artificial Sequence
  Description of Artificial Sequence: Synthetic peptide
ETEERNGFG

SEQ ID NO: 41034 - protein, 9 aa, Artificial Sequence
  Description of Artificial Sequence: Synthetic peptide
GFGHSNGFL

SEQ ID NO: 41035 - protein, 9 aa, Artificial Sequence
  Description of Artificial Sequence: Synthetic peptide
GISTFNLWK

SEQ ID NO: 41036 - protein, 9 aa, Artificial Sequence
  Description of Artificial Sequence: Synthetic peptide
HMTEKNMGE

SEQ ID NO: 41037 - protein, 9 aa, Artificial Sequence
  Description of Artificial Sequence: Synthetic peptide
HYMMNNYLV

SEQ ID NO: 41038 - protein, 9 aa, Artificial Sequence
  Description of Artificial Sequence: Synthetic peptide
ICAIVNTCN

SEQ ID NO: 41039 - protein, 9 aa, Artificial Sequence
  Description of Artificial Sequence: Synthetic peptide
ICSGVNADN

SEQ ID NO: 41040 - protein, 9 aa, Artificial Sequence
  Description of Artificial Sequence: Synthetic peptide
IQVRWNAEL

SEQ ID NO: 41041 - protein, 9 aa, Artificial Sequence
  Description of Artificial Sequence: Synthetic peptide
IRYILNPEF

SEQ ID NO: 41042 - protein, 9 aa, Artificial Sequence
  Description of Artificial Sequence: Synthetic peptide
ISDCFNCAD

SEQ ID NO: 41043 - protein, 9 aa, Artificial Sequence
  Description of Artificial Sequence: Synthetic peptide
LCAHYNPHN

SEQ ID NO: 41044 - protein, 9 aa, Artificial Sequence
  Description of Artificial Sequence: Synthetic peptide
LHGNYNYSV

SEQ ID NO: 41045 - protein, 9 aa, Artificial Sequence
  Description of Artificial Sequence: Synthetic peptide
LNSHINGHM

SEQ ID NO: 41046 - protein, 9 aa, Artificial Sequence
  Description of Artificial Sequence: Synthetic peptide
LSCCTNVFC

SEQ ID NO: 41047 - protein, 9 aa, Artificial Sequence
  Description of Artificial Sequence: Synthetic peptide
LSCMRNMSL

SEQ ID NO: 41048 - protein, 9 aa, Artificial Sequence
  Description of Artificial Sequence: Synthetic peptide
LSDYVNDEG

SEQ ID NO: 41049 - protein, 9 aa, Artificial Sequence
  Description of Artificial Sequence: Synthetic peptide
LVMPYNSAQ

SEQ ID NO: 41050 - protein, 9 aa, Artificial Sequence
  Description of Artificial Sequence: Synthetic peptide
LYEERNAQM

SEQ ID NO: 41051 - protein, 9 aa, Artificial Sequence
  Description of Artificial Sequence: Synthetic peptide
MCNGYNVSF

SEQ ID NO: 41052 - protein, 9 aa, Artificial Sequence
  Description of Artificial Sequence: Synthetic peptide
MHVFSNVCG

SEQ ID NO: 41053 - protein, 9 aa, Artificial Sequence
  Description of Artificial Sequence: Synthetic peptide
MQYTINYQD

SEQ ID NO: 41054 - protein, 9 aa, Artificial Sequence
  Description of Artificial Sequence: Synthetic peptide
NETSLNQHM

SEQ ID NO: 41055 - protein, 9 aa, Artificial Sequence
  Description of Artificial Sequence: Synthetic peptide
NFVYWNYLP

SEQ ID NO: 41056 - protein, 9 aa, Artificial Sequence
  Description of Artificial Sequence: Synthetic peptide
NGVNINQCF

SEQ ID NO: 41057 - protein, 9 aa, Artificial Sequence
  Description of Artificial Sequence: Synthetic peptide
NHVNANLRA

SEQ ID NO: 41058 - protein, 9 aa, Artificial Sequence
  Description of Artificial Sequence: Synthetic peptide
NKQYFNQKD

SEQ ID NO: 41059 - protein, 9 aa, Artificial Sequence
  Description of Artificial Sequence: Synthetic peptide
NSHDYNCFH

SEQ ID NO: 41060 - protein, 9 aa, Artificial Sequence
  Description of Artificial Sequence: Synthetic peptide
NSLHNNEDP

SEQ ID NO: 41061 - protein, 9 aa, Artificial Sequence
  Description of Artificial Sequence: Synthetic peptide
NTGMDNGQG

SEQ ID NO: 41062 - protein, 9 aa, Artificial Sequence
  Description of Artificial Sequence: Synthetic peptide
NVLPFNCNF

SEQ ID NO: 41063 - protein, 9 aa, Artificial Sequence
  Description of Artificial Sequence: Synthetic peptide
QHEYLNQKS

SEQ ID NO: 41064 - protein, 9 aa, Artificial Sequence
  Description of Artificial Sequence: Synthetic peptide
QSQRLNGQI

SEQ ID NO: 41065 - protein, 9 aa, Artificial Sequence
  Description of Artificial Sequence: Synthetic peptide
RTEYANHMH

SEQ ID NO: 41066 - protein, 9 aa, Artificial Sequence
  Description of Artificial Sequence: Synthetic peptide
SFYSTNFQL

SEQ ID NO: 41067 - protein, 9 aa, Artificial Sequence
  Description of Artificial Sequence: Synthetic peptide
SSGWLNSEN

SEQ ID NO: 41068 - protein, 9 aa, Artificial Sequence
  Description of Artificial Sequence: Synthetic peptide
STCIDNGRT

SEQ ID NO: 41069 - protein, 9 aa, Artificial Sequence
  Description of Artificial Sequence: Synthetic peptide
SVWWGNSAA

SEQ ID NO: 41070 - protein, 9 aa, Artificial Sequence
  Description of Artificial Sequence: Synthetic peptide
TPMWVNMVC

SEQ ID NO: 41071 - protein, 9 aa, Artificial Sequence
  Description of Artificial Sequence: Synthetic peptide
TVGVINLVR

SEQ ID NO: 41072 - protein, 9 aa, Artificial Sequence
  Description of Artificial Sequence: Synthetic peptide
TYELLNPGT

SEQ ID NO: 41073 - protein, 9 aa, Artificial Sequence
  Description of Artificial Sequence: Synthetic peptide
TYHCQNHDH

SEQ ID NO: 41074 - protein, 9 aa, Artificial Sequence
  Description of Artificial Sequence: Synthetic peptide
VHQWTNMQF

SEQ ID NO: 41075 - protein, 9 aa, Artificial Sequence
  Description of Artificial Sequence: Synthetic peptide
VPQTYNVEA

SEQ ID NO: 41076 - protein, 9 aa, Artificial Sequence
  Description of Artificial Sequence: Synthetic peptide
VQDLFNQFC

SEQ ID NO: 41077 - protein, 9 aa, Artificial Sequence
  Description of Artificial Sequence: Synthetic peptide
VVHCNNTSW

SEQ ID NO: 41078 - protein, 9 aa, Artificial Sequence
  Description of Artificial Sequence: Synthetic peptide
WDCLLNKWR

SEQ ID NO: 41079 - protein, 9 aa, Artificial Sequence
  Description of Artificial Sequence: Synthetic peptide
YGMYENFHC

SEQ ID NO: 41080 - protein, 9 aa, Artificial Sequence
  Description of Artificial Sequence: Synthetic peptide
YRCHNNEKT

SEQ ID NO: 41081 - protein, 9 aa, Artificial Sequence
  Description of Artificial Sequence: Synthetic peptide
IEEGKNALY

SEQ ID NO: 41082 - protein, 9 aa, Artificial Sequence
  Description of Artificial Sequence: Synthetic peptide
GSATPNETP

SEQ ID NO: 41083 - protein, 9 aa, Artificial Sequence
  Description of Artificial Sequence: Synthetic peptide
YVSLCNDGN

SEQ ID NO: 41084 - protein, 9 aa, Artificial Sequence
  Description of Artificial Sequence: Synthetic peptide
ADHLHNVWI

SEQ ID NO: 41085 - protein, 9 aa, Artificial Sequence
  Description of Artificial Sequence: Synthetic peptide
CHCHYNPFC

SEQ ID NO: 41086 - protein, 9 aa, Artificial Sequence
  Description of Artificial Sequence: Synthetic peptide
CVMPSNCQD

SEQ ID NO: 41087 - protein, 9 aa, Artificial Sequence
  Description of Artificial Sequence: Synthetic peptide
CYDMWNMTT

SEQ ID NO: 41088 - protein, 9 aa, Artificial Sequence
  Description of Artificial Sequence: Synthetic peptide
DIQYKNHMN

SEQ ID NO: 41089 - protein, 9 aa, Artificial Sequence
  Description of Artificial Sequence: Synthetic peptide
DKLLSNSWR

SEQ ID NO: 41090 - protein, 9 aa, Artificial Sequence
  Description of Artificial Sequence: Synthetic peptide
DTESHNETP

SEQ ID NO: 41091 - protein, 9 aa, Artificial Sequence
  Description of Artificial Sequence: Synthetic peptide
FKMDTNFAP

SEQ ID NO: 41092 - protein, 9 aa, Artificial Sequence
  Description of Artificial Sequence: Synthetic peptide
ITYEGNISP

SEQ ID NO: 41093 - protein, 9 aa, Artificial Sequence
  Description of Artificial Sequence: Synthetic peptide
LHLWRNSGE

SEQ ID NO: 41094 - protein, 9 aa, Artificial Sequence
  Description of Artificial Sequence: Synthetic peptide
MTTHSNCGP

SEQ ID NO: 41095 - protein, 9 aa, Artificial Sequence
  Description of Artificial Sequence: Synthetic peptide
PTKYHNDMG

SEQ ID NO: 41096 - protein, 9 aa, Artificial Sequence
  Description of Artificial Sequence: Synthetic peptide
QLSKVNVYE

SEQ ID NO: 41097 - protein, 9 aa, Artificial Sequence
  Description of Artificial Sequence: Synthetic peptide
RHSDHNYIG

SEQ ID NO: 41098 - protein, 9 aa, Artificial Sequence
  Description of Artificial Sequence: Synthetic peptide
SNQHNNQSM

SEQ ID NO: 41099 - protein, 9 aa, Artificial Sequence
  Description of Artificial Sequence: Synthetic peptide
SPGTENRGG

SEQ ID NO: 41100 - protein, 9 aa, Artificial Sequence
  Description of Artificial Sequence: Synthetic peptide
SQMQVNPLH

SEQ ID NO: 41101 - protein, 9 aa, Artificial Sequence
  Description of Artificial Sequence: Synthetic peptide
TLTEVNRLA

SEQ ID NO: 41102 - protein, 9 aa, Artificial Sequence
  Description of Artificial Sequence: Synthetic peptide
TQEHINIWN

SEQ ID NO: 41103 - protein, 9 aa, Artificial Sequence
  Description of Artificial Sequence: Synthetic peptide
TSHFKNCIM

SEQ ID NO: 41104 - protein, 9 aa, Artificial Sequence
  Description of Artificial Sequence: Synthetic peptide
TTWEQNVMD

SEQ ID NO: 41105 - protein, 9 aa, Artificial Sequence
  Description of Artificial Sequence: Synthetic peptide
TVCFENLGG

SEQ ID NO: 41106 - protein, 9 aa, Artificial Sequence
  Description of Artificial Sequence: Synthetic peptide
YALLHNAMW

SEQ ID NO: 41107 - protein, 9 aa, Artificial Sequence
  Description of Artificial Sequence: Synthetic peptide
MSARINTPD

SEQ ID NO: 41108 - protein, 9 aa, Artificial Sequence
  Description of Artificial Sequence: Synthetic peptide
ERNMFNICH

SEQ ID NO: 41109 - protein, 9 aa, Artificial Sequence
  Description of Artificial Sequence: Synthetic peptide
GRQSINEIA

SEQ ID NO: 41110 - protein, 9 aa, Artificial Sequence
  Description of Artificial Sequence: Synthetic peptide
STGCYNWPQ

SEQ ID NO: 41111 - protein, 9 aa, Artificial Sequence
  Description of Artificial Sequence: Synthetic peptide
WGQSYNYWP

SEQ ID NO: 41112 - protein, 9 aa, Artificial Sequence
  Description of Artificial Sequence: Synthetic peptide
AVKSCNTCK

SEQ ID NO: 41113 - protein, 9 aa, Artificial Sequence
  Description of Artificial Sequence: Synthetic peptide
QESMCNYWQ

SEQ ID NO: 41114 - protein, 9 aa, Artificial Sequence
  Description of Artificial Sequence: Synthetic peptide
DKCLNNKFY

SEQ ID NO: 41115 - protein, 9 aa, Artificial Sequence
  Description of Artificial Sequence: Synthetic peptide
HMAYCNKVC

SEQ ID NO: 41116 - protein, 9 aa, Artificial Sequence
  Description of Artificial Sequence: Synthetic peptide
GAMLNNNAS

SEQ ID NO: 41117 - protein, 9 aa, Artificial Sequence
  Description of Artificial Sequence: Synthetic peptide
GKTQYNHHN

SEQ ID NO: 41118 - protein, 9 aa, Artificial Sequence
  Description of Artificial Sequence: Synthetic peptide
TYDTRNHCL

SEQ ID NO: 41119 - protein, 9 aa, Artificial Sequence
  Description of Artificial Sequence: Synthetic peptide
NGNHYNAMR

SEQ ID NO: 41120 - protein, 9 aa, Artificial Sequence
  Description of Artificial Sequence: Synthetic peptide
DYSQVNCEK

SEQ ID NO: 41121 - protein, 9 aa, Artificial Sequence
  Description of Artificial Sequence: Synthetic peptide
GTMKHNGRA

SEQ ID NO: 41122 - protein, 9 aa, Artificial Sequence
  Description of Artificial Sequence: Synthetic peptide
EKIRQNAAP

SEQ ID NO: 41123 - protein, 9 aa, Artificial Sequence
  Description of Artificial Sequence: Synthetic peptide
NLERCNTMM

SEQ ID NO: 41124 - protein, 9 aa, Artificial Sequence
  Description of Artificial Sequence: Synthetic peptide
SRYVNNGTV

SEQ ID NO: 41125 - protein, 9 aa, Artificial Sequence
  Description of Artificial Sequence: Synthetic peptide
LRHEGYHSE

SEQ ID NO: 41126 - protein, 9 aa, Artificial Sequence
  Description of Artificial Sequence: Synthetic peptide
MEYWPIHCQ

SEQ ID NO: 41127 - protein, 9 aa, Artificial Sequence
  Description of Artificial Sequence: Synthetic peptide
MFLPTDHQF

SEQ ID NO: 41128 - protein, 9 aa, Artificial Sequence
  Description of Artificial Sequence: Synthetic peptide
MQHEETHDY

SEQ ID NO: 41129 - protein, 9 aa, Artificial Sequence
  Description of Artificial Sequence: Synthetic peptide
MREQKSHGY

SEQ ID NO: 41130 - protein, 9 aa, Artificial Sequence
  Description of Artificial Sequence: Synthetic peptide
MTHGHSHSF

SEQ ID NO: 41131 - protein, 9 aa, Artificial Sequence
  Description of Artificial Sequence: Synthetic peptide
NLDMVTHAE

SEQ ID NO: 41132 - protein, 9 aa, Artificial Sequence
  Description of Artificial Sequence: Synthetic peptide
NTQGTVHIQ

SEQ ID NO: 41133 - protein, 9 aa, Artificial Sequence
  Description of Artificial Sequence: Synthetic peptide
NVDNHDHFE

SEQ ID NO: 41134 - protein, 9 aa, Artificial Sequence
  Description of Artificial Sequence: Synthetic peptide
PQPSEYHWN

SEQ ID NO: 41135 - protein, 9 aa, Artificial Sequence
  Description of Artificial Sequence: Synthetic peptide
QEHQYEHQS

SEQ ID NO: 41136 - protein, 9 aa, Artificial Sequence
  Description of Artificial Sequence: Synthetic peptide
QGPECTHNP

SEQ ID NO: 41137 - protein, 9 aa, Artificial Sequence
  Description of Artificial Sequence: Synthetic peptide
QSKWQDHDY

SEQ ID NO: 41138 - protein, 9 aa, Artificial Sequence
  Description of Artificial Sequence: Synthetic peptide
QSVWLEHTL

SEQ ID NO: 41139 - protein, 9 aa, Artificial Sequence
  Description of Artificial Sequence: Synthetic peptide
QSVYDMHTP

SEQ ID NO: 41140 - protein, 9 aa, Artificial Sequence
  Description of Artificial Sequence: Synthetic peptide
QVDGQCHTT

SEQ ID NO: 41141 - protein, 9 aa, Artificial Sequence
  Description of Artificial Sequence: Synthetic peptide
RDSRPGHQY

SEQ ID NO: 41142 - protein, 9 aa, Artificial Sequence
  Description of Artificial Sequence: Synthetic peptide
RQFKQTHFQ

SEQ ID NO: 41143 - protein, 9 aa, Artificial Sequence
  Description of Artificial Sequence: Synthetic peptide
RSPHVHHQL

SEQ ID NO: 41144 - protein, 9 aa, Artificial Sequence
  Description of Artificial Sequence: Synthetic peptide
SAHTDRHNS

SEQ ID NO: 41145 - protein, 9 aa, Artificial Sequence
  Description of Artificial Sequence: Synthetic peptide
TSPCDMHFS

SEQ ID NO: 41146 - protein, 9 aa, Artificial Sequence
  Description of Artificial Sequence: Synthetic peptide
TYNPWQHFE

SEQ ID NO: 41147 - protein, 9 aa, Artificial Sequence
  Description of Artificial Sequence: Synthetic peptide
VHCQTDHDG

SEQ ID NO: 41148 - protein, 9 aa, Artificial Sequence
  Description of Artificial Sequence: Synthetic peptide
WAHYKAHYP

SEQ ID NO: 41149 - protein, 9 aa, Artificial Sequence
  Description of Artificial Sequence: Synthetic peptide
WQDFYIHYA

SEQ ID NO: 41150 - protein, 9 aa, Artificial Sequence
  Description of Artificial Sequence: Synthetic peptide
WRYMWPHRQ

SEQ ID NO: 41151 - protein, 9 aa, Artificial Sequence
  Description of Artificial Sequence: Synthetic peptide
YAVMYQHHA

SEQ ID NO: 41152 - protein, 9 aa, Artificial Sequence
  Description of Artificial Sequence: Synthetic peptide
YCLQYAHKG

SEQ ID NO: 41153 - protein, 9 aa, Artificial Sequence
  Description of Artificial Sequence: Synthetic peptide
AFWNPTHFD

SEQ ID NO: 41154 - protein, 9 aa, Artificial Sequence
  Description of Artificial Sequence: Synthetic peptide
AMIPNLHME

SEQ ID NO: 41155 - protein, 9 aa, Artificial Sequence
  Description of Artificial Sequence: Synthetic peptide
AMLGYQHQP

SEQ ID NO: 41156 - protein, 9 aa, Artificial Sequence
  Description of Artificial Sequence: Synthetic peptide
AQDIYEHMQ

SEQ ID NO: 41157 - protein, 9 aa, Artificial Sequence
  Description of Artificial Sequence: Synthetic peptide
ASYHWTHAG

SEQ ID NO: 41158 - protein, 9 aa, Artificial Sequence
  Description of Artificial Sequence: Synthetic peptide
AVVIEKHDG

SEQ ID NO: 41159 - protein, 9 aa, Artificial Sequence
  Description of Artificial Sequence: Synthetic peptide
CMKSYDHGS

SEQ ID NO: 41160 - protein, 9 aa, Artificial Sequence
  Description of Artificial Sequence: Synthetic peptide
CNVWPCHQE

SEQ ID NO: 41161 - protein, 9 aa, Artificial Sequence
  Description of Artificial Sequence: Synthetic peptide
DADLAAHWP

SEQ ID NO: 41162 - protein, 9 aa, Artificial Sequence
  Description of Artificial Sequence: Synthetic peptide
DAQLGMHFI

SEQ ID NO: 41163 - protein, 9 aa, Artificial Sequence
  Description of Artificial Sequence: Synthetic peptide
DKANCYHWL

SEQ ID NO: 41164 - protein, 9 aa, Artificial Sequence
  Description of Artificial Sequence: Synthetic peptide
DKIPIDHFA

SEQ ID NO: 41165 - protein, 9 aa, Artificial Sequence
  Description of Artificial Sequence: Synthetic peptide
DKIPIDHFV

SEQ ID NO: 41166 - protein, 9 aa, Artificial Sequence
  Description of Artificial Sequence: Synthetic peptide
DVHHLTHSP

SEQ ID NO: 41167 - protein, 9 aa, Artificial Sequence
  Description of Artificial Sequence: Synthetic peptide
EANKAFHLA

SEQ ID NO: 41168 - protein, 9 aa, Artificial Sequence
  Description of Artificial Sequence: Synthetic peptide
EHGDEMHPP

SEQ ID NO: 41169 - protein, 9 aa, Artificial Sequence
  Description of Artificial Sequence: Synthetic peptide
EHMNCMHCE

SEQ ID NO: 41170 - protein, 9 aa, Artificial Sequence
  Description of Artificial Sequence: Synthetic peptide
GAGMRMHDT

SEQ ID NO: 41171 - protein, 9 aa, Artificial Sequence
  Description of Artificial Sequence: Synthetic peptide
HKASWCHDQ

SEQ ID NO: 41172 - protein, 9 aa, Artificial Sequence
  Description of Artificial Sequence: Synthetic peptide
HMMLRDHNN

SEQ ID NO: 41173 - protein, 9 aa, Artificial Sequence
  Description of Artificial Sequence: Synthetic peptide
ICSIYGHHQ

SEQ ID NO: 41174 - protein, 9 aa, Artificial Sequence
  Description of Artificial Sequence: Synthetic peptide
IDSQIYHML

SEQ ID NO: 41175 - protein, 9 aa, Artificial Sequence
  Description of Artificial Sequence: Synthetic peptide
LCAEFPHGR

SEQ ID NO: 41176 - protein, 9 aa, Artificial Sequence
  Description of Artificial Sequence: Synthetic peptide
LITQPVHQQ

SEQ ID NO: 41177 - protein, 9 aa, Artificial Sequence
  Description of Artificial Sequence: Synthetic peptide
LQAGGEHNW

SEQ ID NO: 41178 - protein, 9 aa, Artificial Sequence
  Description of Artificial Sequence: Synthetic peptide
LTLESPHPA

SEQ ID NO: 41179 - protein, 9 aa, Artificial Sequence
  Description of Artificial Sequence: Synthetic peptide
LYKWIVHNS

SEQ ID NO: 41180 - protein, 9 aa, Artificial Sequence
  Description of Artificial Sequence: Synthetic peptide
LYYITEHST

SEQ ID NO: 41181 - protein, 9 aa, Artificial Sequence
  Description of Artificial Sequence: Synthetic peptide
MAVSQSHQF

SEQ ID NO: 41182 - protein, 9 aa, Artificial Sequence
  Description of Artificial Sequence: Synthetic peptide
MAVWVKHQH

SEQ ID NO: 41183 - protein, 9 aa, Artificial Sequence
  Description of Artificial Sequence: Synthetic peptide
MSSMLEHSW

SEQ ID NO: 41184 - protein, 9 aa, Artificial Sequence
  Description of Artificial Sequence: Synthetic peptide
MYGFYGHDM

SEQ ID NO: 41185 - protein, 9 aa, Artificial Sequence
  Description of Artificial Sequence: Synthetic peptide
NAYQNSHYP

SEQ ID NO: 41186 - protein, 9 aa, Artificial Sequence
  Description of Artificial Sequence: Synthetic peptide
QLYGRRHWH

SEQ ID NO: 41187 - protein, 9 aa, Artificial Sequence
  Description of Artificial Sequence: Synthetic peptide
QMMDFQHPA

SEQ ID NO: 41188 - protein, 9 aa, Artificial Sequence
  Description of Artificial Sequence: Synthetic peptide
QNYWGRHPA

SEQ ID NO: 41189 - protein, 9 aa, Artificial Sequence
  Description of Artificial Sequence: Synthetic peptide
QSHYRMHSA

SEQ ID NO: 41190 - protein, 9 aa, Artificial Sequence
  Description of Artificial Sequence: Synthetic peptide
QVNHVRHWS

SEQ ID NO: 41191 - protein, 9 aa, Artificial Sequence
  Description of Artificial Sequence: Synthetic peptide
RHICFQHCK

SEQ ID NO: 41192 - protein, 9 aa, Artificial Sequence
  Description of Artificial Sequence: Synthetic peptide
RIEIGQHYV

SEQ ID NO: 41193 - protein, 9 aa, Artificial Sequence
  Description of Artificial Sequence: Synthetic peptide
RSEVSSHLD

SEQ ID NO: 41194 - protein, 9 aa, Artificial Sequence
  Description of Artificial Sequence: Synthetic peptide
SANWFTHDK

SEQ ID NO: 41195 - protein, 9 aa, Artificial Sequence
  Description of Artificial Sequence: Synthetic peptide
SVSLKVHHE

SEQ ID NO: 41196 - protein, 9 aa, Artificial Sequence
  Description of Artificial Sequence: Synthetic peptide
SYVTTQHST

SEQ ID NO: 41197 - protein, 9 aa, Artificial Sequence
  Description of Artificial Sequence: Synthetic peptide
TASGIDHPK

SEQ ID NO: 41198 - protein, 9 aa, Artificial Sequence
  Description of Artificial Sequence: Synthetic peptide
TQAEYSHKS

SEQ ID NO: 41199 - protein, 9 aa, Artificial Sequence
  Description of Artificial Sequence: Synthetic peptide
TTWGTGHMA

SEQ ID NO: 41200 - protein, 9 aa, Artificial Sequence
  Description of Artificial Sequence: Synthetic peptide
VFNLYSHSH

SEQ ID NO: 41201 - protein, 9 aa, Artificial Sequence
  Description of Artificial Sequence: Synthetic peptide
VIKPFAHHG

SEQ ID NO: 41202 - protein, 9 aa, Artificial Sequence
  Description of Artificial Sequence: Synthetic peptide
YASYKCHGD

SEQ ID NO: 41203 - protein, 9 aa, Artificial Sequence
  Description of Artificial Sequence: Synthetic peptide
YVQSAQHQQ

SEQ ID NO: 41204 - protein, 9 aa, Artificial Sequence
  Description of Artificial Sequence: Synthetic peptide
YYASLDHYL

SEQ ID NO: 41205 - protein, 9 aa, Artificial Sequence
  Description of Artificial Sequence: Synthetic peptide
NFWNQVHCV

SEQ ID NO: 41206 - protein, 9 aa, Artificial Sequence
  Description of Artificial Sequence: Synthetic peptide
MATNKYHIQ

SEQ ID NO: 41207 - protein, 9 aa, Artificial Sequence
  Description of Artificial Sequence: Synthetic peptide
QYYNYCHMN

SEQ ID NO: 41208 - protein, 9 aa, Artificial Sequence
  Description of Artificial Sequence: Synthetic peptide
GCMCIRHAY

SEQ ID NO: 41209 - protein, 9 aa, Artificial Sequence
  Description of Artificial Sequence: Synthetic peptide
YIYFALHTH

SEQ ID NO: 41210 - protein, 9 aa, Artificial Sequence
  Description of Artificial Sequence: Synthetic peptide
WFDRSWHIL

SEQ ID NO: 41211 - protein, 9 aa, Artificial Sequence
  Description of Artificial Sequence: Synthetic peptide
NIAMPAHIP

SEQ ID NO: 41212 - protein, 9 aa, Artificial Sequence
  Description of Artificial Sequence: Synthetic peptide
HDPLAGHWP

SEQ ID NO: 41213 - protein, 9 aa, Artificial Sequence
  Description of Artificial Sequence: Synthetic peptide
QRQGQLHYW

SEQ ID NO: 41214 - protein, 9 aa, Artificial Sequence
  Description of Artificial Sequence: Synthetic peptide
IACISMHNH

SEQ ID NO: 41215 - protein, 9 aa, Artificial Sequence
  Description of Artificial Sequence: Synthetic peptide
AQEHLDHCL

SEQ ID NO: 41216 - protein, 9 aa, Artificial Sequence
  Description of Artificial Sequence: Synthetic peptide
ECTMRMHSH

SEQ ID NO: 41217 - protein, 9 aa, Artificial Sequence
  Description of Artificial Sequence: Synthetic peptide
EDSFSFHTI

SEQ ID NO: 41218 - protein, 9 aa, Artificial Sequence
  Description of Artificial Sequence: Synthetic peptide
EYCETMHTN

SEQ ID NO: 41219 - protein, 9 aa, Artificial Sequence
  Description of Artificial Sequence: Synthetic peptide
FMPYCVHSG

SEQ ID NO: 41220 - protein, 9 aa, Artificial Sequence
  Description of Artificial Sequence: Synthetic peptide
HSKNTVHKR

SEQ ID NO: 41221 - protein, 9 aa, Artificial Sequence
  Description of Artificial Sequence: Synthetic peptide
IMGIHLHPA

SEQ ID NO: 41222 - protein, 9 aa, Artificial Sequence
  Description of Artificial Sequence: Synthetic peptide
IRNIAKHAL

SEQ ID NO: 41223 - protein, 9 aa, Artificial Sequence
  Description of Artificial Sequence: Synthetic peptide
LDKRQDHNF

SEQ ID NO: 41224 - protein, 9 aa, Artificial Sequence
  Description of Artificial Sequence: Synthetic peptide
MQAEACHRW

SEQ ID NO: 41225 - protein, 9 aa, Artificial Sequence
  Description of Artificial Sequence: Synthetic peptide
NTHLFHHYL

SEQ ID NO: 41226 - protein, 9 aa, Artificial Sequence
  Description of Artificial Sequence: Synthetic peptide
QHTSAFHTM

SEQ ID NO: 41227 - protein, 9 aa, Artificial Sequence
  Description of Artificial Sequence: Synthetic peptide
WHKCLSHQD

SEQ ID NO: 41228 - protein, 9 aa, Artificial Sequence
  Description of Artificial Sequence: Synthetic peptide
WRKCLSHQD

SEQ ID NO: 41229 - protein, 9 aa, Artificial Sequence
  Description of Artificial Sequence: Synthetic peptide
NAYYDSHCE

SEQ ID NO: 41230 - protein, 9 aa, Artificial Sequence
  Description of Artificial Sequence: Synthetic peptide
HDPPPMHWL

SEQ ID NO: 41231 - protein, 9 aa, Artificial Sequence
  Description of Artificial Sequence: Synthetic peptide
RCQLFDHDE

SEQ ID NO: 41232 - protein, 9 aa, Artificial Sequence
  Description of Artificial Sequence: Synthetic peptide
LGKVQTHIR

SEQ ID NO: 41233 - protein, 9 aa, Artificial Sequence
  Description of Artificial Sequence: Synthetic peptide
DVIHTTHSG

SEQ ID NO: 41234 - protein, 9 aa, Artificial Sequence
  Description of Artificial Sequence: Synthetic peptide
TKGRNDHME

SEQ ID NO: 41235 - protein, 9 aa, Artificial Sequence
  Description of Artificial Sequence: Synthetic peptide
NSTRWYHTG

SEQ ID NO: 41236 - protein, 9 aa, Artificial Sequence
  Description of Artificial Sequence: Synthetic peptide
DTDNKPHFA

SEQ ID NO: 41237 - protein, 9 aa, Artificial Sequence
  Description of Artificial Sequence: Synthetic peptide
QGYSHLHAL

SEQ ID NO: 41238 - protein, 9 aa, Artificial Sequence
  Description of Artificial Sequence: Synthetic peptide
CQAGTDHFP

SEQ ID NO: 41239 - protein, 9 aa, Artificial Sequence
  Description of Artificial Sequence: Synthetic peptide
CASSKSHYL

SEQ ID NO: 41240 - protein, 9 aa, Artificial Sequence
  Description of Artificial Sequence: Synthetic peptide
ALGNRHHQC

SEQ ID NO: 41241 - protein, 9 aa, Artificial Sequence
  Description of Artificial Sequence: Synthetic peptide
VQYYYGHMQ

SEQ ID NO: 41242 - protein, 9 aa, Artificial Sequence
  Description of Artificial Sequence: Synthetic peptide
GVFYVGHWQ

SEQ ID NO: 41243 - protein, 9 aa, Artificial Sequence
  Description of Artificial Sequence: Synthetic peptide
LVQQDWRFW

SEQ ID NO: 41244 - protein, 9 aa, Artificial Sequence
  Description of Artificial Sequence: Synthetic peptide
MCAYLHMFH

SEQ ID NO: 41245 - protein, 9 aa, Artificial Sequence
  Description of Artificial Sequence: Synthetic peptide
MEKVKCSFA

SEQ ID NO: 41246 - protein, 9 aa, Artificial Sequence
  Description of Artificial Sequence: Synthetic peptide
PKNWAPMFT

SEQ ID NO: 41247 - protein, 9 aa, Artificial Sequence
  Description of Artificial Sequence: Synthetic peptide
QQDIYIDFF

SEQ ID NO: 41248 - protein, 9 aa, Artificial Sequence
  Description of Artificial Sequence: Synthetic peptide
QTEHLWMFH

SEQ ID NO: 41249 - protein, 9 aa, Artificial Sequence
  Description of Artificial Sequence: Synthetic peptide
SGHWNDYFH

SEQ ID NO: 41250 - protein, 9 aa, Artificial Sequence
  Description of Artificial Sequence: Synthetic peptide
STIPIWNFL

SEQ ID NO: 41251 - protein, 9 aa, Artificial Sequence
  Description of Artificial Sequence: Synthetic peptide
TEQFSRLFA

SEQ ID NO: 41252 - protein, 9 aa, Artificial Sequence
  Description of Artificial Sequence: Synthetic peptide
TQDSKMGFG

SEQ ID NO: 41253 - protein, 9 aa, Artificial Sequence
  Description of Artificial Sequence: Synthetic peptide
TVAWATAFE

SEQ ID NO: 41254 - protein, 9 aa, Artificial Sequence
  Description of Artificial Sequence: Synthetic peptide
VKKLAKYFH

SEQ ID NO: 41255 - protein, 9 aa, Artificial Sequence
  Description of Artificial Sequence: Synthetic peptide
VKVDKSQFD

SEQ ID NO: 41256 - protein, 9 aa, Artificial Sequence
  Description of Artificial Sequence: Synthetic peptide
VVNIRGSFQ

SEQ ID NO: 41257 - protein, 9 aa, Artificial Sequence
  Description of Artificial Sequence: Synthetic peptide
AFEVSESFE

SEQ ID NO: 41258 - protein, 9 aa, Artificial Sequence
  Description of Artificial Sequence: Synthetic peptide
AGEMDEAFG

SEQ ID NO: 41259 - protein, 9 aa, Artificial Sequence
  Description of Artificial Sequence: Synthetic peptide
AMELADDFA

SEQ ID NO: 41260 - protein, 9 aa, Artificial Sequence
  Description of Artificial Sequence: Synthetic peptide
AVDHCFKFE

SEQ ID NO: 41261 - protein, 9 aa, Artificial Sequence
  Description of Artificial Sequence: Synthetic peptide
DFKKPSLFR

SEQ ID NO: 41262 - protein, 9 aa, Artificial Sequence
  Description of Artificial Sequence: Synthetic peptide
DMQTICRFP

SEQ ID NO: 41263 - protein, 9 aa, Artificial Sequence
  Description of Artificial Sequence: Synthetic peptide
GMGWQVSFN

SEQ ID NO: 41264 - protein, 9 aa, Artificial Sequence
  Description of Artificial Sequence: Synthetic peptide
GPIPSEVFP

SEQ ID NO: 41265 - protein, 9 aa, Artificial Sequence
  Description of Artificial Sequence: Synthetic peptide
HCYIKEGFQ

SEQ ID NO: 41266 - protein, 9 aa, Artificial Sequence
  Description of Artificial Sequence: Synthetic peptide
HNMPSGQFT

SEQ ID NO: 41267 - protein, 9 aa, Artificial Sequence
  Description of Artificial Sequence: Synthetic peptide
HYESRLDFY

SEQ ID NO: 41268 - protein, 9 aa, Artificial Sequence
  Description of Artificial Sequence: Synthetic peptide
ICKSDPVFD

SEQ ID NO: 41269 - protein, 9 aa, Artificial Sequence
  Description of Artificial Sequence: Synthetic peptide
LEPCTDEFG

SEQ ID NO: 41270 - protein, 9 aa, Artificial Sequence
  Description of Artificial Sequence: Synthetic peptide
LIMRISPFD

SEQ ID NO: 41271 - protein, 9 aa, Artificial Sequence
  Description of Artificial Sequence: Synthetic peptide
LSGSIMEFN

SEQ ID NO: 41272 - protein, 9 aa, Artificial Sequence
  Description of Artificial Sequence: Synthetic peptide
MVSENSTFW

SEQ ID NO: 41273 - protein, 9 aa, Artificial Sequence
  Description of Artificial Sequence: Synthetic peptide
MYSRTIPFH

SEQ ID NO: 41274 - protein, 9 aa, Artificial Sequence
  Description of Artificial Sequence: Synthetic peptide
NKHEVGCFG

SEQ ID NO: 41275 - protein, 9 aa, Artificial Sequence
  Description of Artificial Sequence: Synthetic peptide
NKYEVGCFG

SEQ ID NO: 41276 - protein, 9 aa, Artificial Sequence
  Description of Artificial Sequence: Synthetic peptide
NMHWRYQFE

SEQ ID NO: 41277 - protein, 9 aa, Artificial Sequence
  Description of Artificial Sequence: Synthetic peptide
PYPTHSMFS

SEQ ID NO: 41278 - protein, 9 aa, Artificial Sequence
  Description of Artificial Sequence: Synthetic peptide
QDSHVHSFF

SEQ ID NO: 41279 - protein, 9 aa, Artificial Sequence
  Description of Artificial Sequence: Synthetic peptide
QGQYWHYFK

SEQ ID NO: 41280 - protein, 9 aa, Artificial Sequence
  Description of Artificial Sequence: Synthetic peptide
SCGHQTRFG

SEQ ID NO: 41281 - protein, 9 aa, Artificial Sequence
  Description of Artificial Sequence: Synthetic peptide
SCGHQTWFG

SEQ ID NO: 41282 - protein, 9 aa, Artificial Sequence
  Description of Artificial Sequence: Synthetic peptide
SDHYCGTFY

SEQ ID NO: 41283 - protein, 9 aa, Artificial Sequence
  Description of Artificial Sequence: Synthetic peptide
SHMMSHAFW

SEQ ID NO: 41284 - protein, 9 aa, Artificial Sequence
  Description of Artificial Sequence: Synthetic peptide
SNSLYRAFL

SEQ ID NO: 41285 - protein, 9 aa, Artificial Sequence
  Description of Artificial Sequence: Synthetic peptide
SSVCTQIFT

SEQ ID NO: 41286 - protein, 9 aa, Artificial Sequence
  Description of Artificial Sequence: Synthetic peptide
TGEMDEAFG

SEQ ID NO: 41287 - protein, 9 aa, Artificial Sequence
  Description of Artificial Sequence: Synthetic peptide
TNDIWWQFS

SEQ ID NO: 41288 - protein, 9 aa, Artificial Sequence
  Description of Artificial Sequence: Synthetic peptide
TRTELANFF

SEQ ID NO: 41289 - protein, 9 aa, Artificial Sequence
  Description of Artificial Sequence: Synthetic peptide
VCWLWFYFG

SEQ ID NO: 41290 - protein, 9 aa, Artificial Sequence
  Description of Artificial Sequence: Synthetic peptide
VGICHPEFW

SEQ ID NO: 41291 - protein, 9 aa, Artificial Sequence
  Description of Artificial Sequence: Synthetic peptide
WVTNQSDFA

SEQ ID NO: 41292 - protein, 9 aa, Artificial Sequence
  Description of Artificial Sequence: Synthetic peptide
YPQCAQWFW

SEQ ID NO: 41293 - protein, 9 aa, Artificial Sequence
  Description of Artificial Sequence: Synthetic peptide
HQKMTYAFT

SEQ ID NO: 41294 - protein, 9 aa, Artificial Sequence
  Description of Artificial Sequence: Synthetic peptide
VRWGHTCFY

SEQ ID NO: 41295 - protein, 9 aa, Artificial Sequence
  Description of Artificial Sequence: Synthetic peptide
NSAECREFQ

SEQ ID NO: 41296 - protein, 9 aa, Artificial Sequence
  Description of Artificial Sequence: Synthetic peptide
WKNNQKWFK

SEQ ID NO: 41297 - protein, 9 aa, Artificial Sequence
  Description of Artificial Sequence: Synthetic peptide
DIGSYKGFQ

SEQ ID NO: 41298 - protein, 9 aa, Artificial Sequence
  Description of Artificial Sequence: Synthetic peptide
DSAHYCTFT

SEQ ID NO: 41299 - protein, 9 aa, Artificial Sequence
  Description of Artificial Sequence: Synthetic peptide
EKSTILPFA

SEQ ID NO: 41300 - protein, 9 aa, Artificial Sequence
  Description of Artificial Sequence: Synthetic peptide
EKSTILPFT

SEQ ID NO: 41301 - protein, 9 aa, Artificial Sequence
  Description of Artificial Sequence: Synthetic peptide
EVEYGCWFE

SEQ ID NO: 41302 - protein, 9 aa, Artificial Sequence
  Description of Artificial Sequence: Synthetic peptide
GNMRQSRFP

SEQ ID NO: 41303 - protein, 9 aa, Artificial Sequence
  Description of Artificial Sequence: Synthetic peptide
HGLHEDSFY

SEQ ID NO: 41304 - protein, 9 aa, Artificial Sequence
  Description of Artificial Sequence: Synthetic peptide
TNNYPMPFD

SEQ ID NO: 41305 - protein, 9 aa, Artificial Sequence
  Description of Artificial Sequence: Synthetic peptide
DMPPLHSFC

SEQ ID NO: 41306 - protein, 9 aa, Artificial Sequence
  Description of Artificial Sequence: Synthetic peptide
ASTMKSIFE

SEQ ID NO: 41307 - protein, 9 aa, Artificial Sequence
  Description of Artificial Sequence: Synthetic peptide
SLASEVQFQ

SEQ ID NO: 41308 - protein, 9 aa, Artificial Sequence
  Description of Artificial Sequence: Synthetic peptide
DLTTDTIFQ

SEQ ID NO: 41309 - protein, 9 aa, Artificial Sequence
  Description of Artificial Sequence: Synthetic peptide
SADRTAMFH

SEQ ID NO: 41310 - protein, 9 aa, Artificial Sequence
  Description of Artificial Sequence: Synthetic peptide
PTYPYEWFQ

SEQ ID NO: 41311 - protein, 9 aa, Artificial Sequence
  Description of Artificial Sequence: Synthetic peptide
NMKPKDVFR

SEQ ID NO: 41312 - protein, 9 aa, Artificial Sequence
  Description of Artificial Sequence: Synthetic peptide
SATIRFYFN

SEQ ID NO: 41313 - protein, 9 aa, Artificial Sequence
  Description of Artificial Sequence: Synthetic peptide
FVPWCHSFG

SEQ ID NO: 41314 - protein, 9 aa, Artificial Sequence
  Description of Artificial Sequence: Synthetic peptide
ITEQYDAFA

SEQ ID NO: 41315 - protein, 9 aa, Artificial Sequence
  Description of Artificial Sequence: Synthetic peptide
NTMCQLNFC

SEQ ID NO: 41316 - protein, 9 aa, Artificial Sequence
  Description of Artificial Sequence: Synthetic peptide
LYQKDQRFS

SEQ ID NO: 41317 - protein, 9 aa, Artificial Sequence
  Description of Artificial Sequence: Synthetic peptide
LFGTHPGQA

SEQ ID NO: 41318 - protein, 9 aa, Artificial Sequence
  Description of Artificial Sequence: Synthetic peptide
LQELSSQYA

SEQ ID NO: 41319 - protein, 9 aa, Artificial Sequence
  Description of Artificial Sequence: Synthetic peptide
LTVNLMKIA

SEQ ID NO: 41320 - protein, 9 aa, Artificial Sequence
  Description of Artificial Sequence: Synthetic peptide
NAIDCMSGA

SEQ ID NO: 41321 - protein, 9 aa, Artificial Sequence
  Description of Artificial Sequence: Synthetic peptide
NAWIDWSLA

SEQ ID NO: 41322 - protein, 9 aa, Artificial Sequence
  Description of Artificial Sequence: Synthetic peptide
NQGTSAWGA

SEQ ID NO: 41323 - protein, 9 aa, Artificial Sequence
  Description of Artificial Sequence: Synthetic peptide
NSLPFGMVA

SEQ ID NO: 41324 - protein, 9 aa, Artificial Sequence
  Description of Artificial Sequence: Synthetic peptide
PFNKSKGLA

SEQ ID NO: 41325 - protein, 9 aa, Artificial Sequence
  Description of Artificial Sequence: Synthetic peptide
PNQVGTQGA

SEQ ID NO: 41326 - protein, 9 aa, Artificial Sequence
  Description of Artificial Sequence: Synthetic peptide
QDQQVHEGA

SEQ ID NO: 41327 - protein, 9 aa, Artificial Sequence
  Description of Artificial Sequence: Synthetic peptide
QLMIQGSYA

SEQ ID NO: 41328 - protein, 9 aa, Artificial Sequence
  Description of Artificial Sequence: Synthetic peptide
QSAYLIMVA

SEQ ID NO: 41329 - protein, 9 aa, Artificial Sequence
  Description of Artificial Sequence: Synthetic peptide
QTTFAERHA

SEQ ID NO: 41330 - protein, 9 aa, Artificial Sequence
  Description of Artificial Sequence: Synthetic peptide
SDHGRIMTA

SEQ ID NO: 41331 - protein, 9 aa, Artificial Sequence
  Description of Artificial Sequence: Synthetic peptide
SLAHWDGRA

SEQ ID NO: 41332 - protein, 9 aa, Artificial Sequence
  Description of Artificial Sequence: Synthetic peptide
SSGWTQQMA

SEQ ID NO: 41333 - protein, 9 aa, Artificial Sequence
  Description of Artificial Sequence: Synthetic peptide
TFIMLGADA

SEQ ID NO: 41334 - protein, 9 aa, Artificial Sequence
  Description of Artificial Sequence: Synthetic peptide
VDYYSPYLA

SEQ ID NO: 41335 - protein, 9 aa, Artificial Sequence
  Description of Artificial Sequence: Synthetic peptide
VGCIAQAAA

SEQ ID NO: 41336 - protein, 9 aa, Artificial Sequence
  Description of Artificial Sequence: Synthetic peptide
VNDCNWCEA

SEQ ID NO: 41337 - protein, 9 aa, Artificial Sequence
  Description of Artificial Sequence: Synthetic peptide
VRTPWQTVA

SEQ ID NO: 41338 - protein, 9 aa, Artificial Sequence
  Description of Artificial Sequence: Synthetic peptide
WFNVKKTAA

SEQ ID NO: 41339 - protein, 9 aa, Artificial Sequence
  Description of Artificial Sequence: Synthetic peptide
YAPQQHMWA

SEQ ID NO: 41340 - protein, 9 aa, Artificial Sequence
  Description of Artificial Sequence: Synthetic peptide
YSQKQCPTA

SEQ ID NO: 41341 - protein, 9 aa, Artificial Sequence
  Description of Artificial Sequence: Synthetic peptide
ACYQQCVSA

SEQ ID NO: 41342 - protein, 9 aa, Artificial Sequence
  Description of Artificial Sequence: Synthetic peptide
AKSSIEYSA

SEQ ID NO: 41343 - protein, 9 aa, Artificial Sequence
  Description of Artificial Sequence: Synthetic peptide
ALWDKFEAA

SEQ ID NO: 41344 - protein, 9 aa, Artificial Sequence
  Description of Artificial Sequence: Synthetic peptide
CDYHTLSPA

SEQ ID NO: 41345 - protein, 9 aa, Artificial Sequence
  Description of Artificial Sequence: Synthetic peptide
CFENLQVMA

SEQ ID NO: 41346 - protein, 9 aa, Artificial Sequence
  Description of Artificial Sequence: Synthetic peptide
CRDWDGFNA

SEQ ID NO: 41347 - protein, 9 aa, Artificial Sequence
  Description of Artificial Sequence: Synthetic peptide
CTTDTPQNA

SEQ ID NO: 41348 - protein, 9 aa, Artificial Sequence
  Description of Artificial Sequence: Synthetic peptide
CYHECQGCA

SEQ ID NO: 41349 - protein, 9 aa, Artificial Sequence
  Description of Artificial Sequence: Synthetic peptide
DIFFKCEWA

SEQ ID NO: 41350 - protein, 9 aa, Artificial Sequence
  Description of Artificial Sequence: Synthetic peptide
DVGGRAVQA

SEQ ID NO: 41351 - protein, 9 aa, Artificial Sequence
  Description of Artificial Sequence: Synthetic peptide
EATDLCLNA

SEQ ID NO: 41352 - protein, 9 aa, Artificial Sequence
  Description of Artificial Sequence: Synthetic peptide
EATDLCPNA

SEQ ID NO: 41353 - protein, 9 aa, Artificial Sequence
  Description of Artificial Sequence: Synthetic peptide
EDNHYQMIA

SEQ ID NO: 41354 - protein, 9 aa, Artificial Sequence
  Description of Artificial Sequence: Synthetic peptide
EFYNYEIMA

SEQ ID NO: 41355 - protein, 9 aa, Artificial Sequence
  Description of Artificial Sequence: Synthetic peptide
EGGSNMMNA

SEQ ID NO: 41356 - protein, 9 aa, Artificial Sequence
  Description of Artificial Sequence: Synthetic peptide
EKAMLLNGA

SEQ ID NO: 41357 - protein, 9 aa, Artificial Sequence
  Description of Artificial Sequence: Synthetic peptide
EKTCVTREA

SEQ ID NO: 41358 - protein, 9 aa, Artificial Sequence
  Description of Artificial Sequence: Synthetic peptide
EQAMWMYPA

SEQ ID NO: 41359 - protein, 9 aa, Artificial Sequence
  Description of Artificial Sequence: Synthetic peptide
EQGHCEVAA

SEQ ID NO: 41360 - protein, 9 aa, Artificial Sequence
  Description of Artificial Sequence: Synthetic peptide
ESKWYYVMA

SEQ ID NO: 41361 - protein, 9 aa, Artificial Sequence
  Description of Artificial Sequence: Synthetic peptide
EVERDKVGA

SEQ ID NO: 41362 - protein, 9 aa, Artificial Sequence
  Description of Artificial Sequence: Synthetic peptide
FDEKRSESA

SEQ ID NO: 41363 - protein, 9 aa, Artificial Sequence
  Description of Artificial Sequence: Synthetic peptide
FPANYHSNA

SEQ ID NO: 41364 - protein, 9 aa, Artificial Sequence
  Description of Artificial Sequence: Synthetic peptide
FVSTQMPIA

SEQ ID NO: 41365 - protein, 9 aa, Artificial Sequence
  Description of Artificial Sequence: Synthetic peptide
GPNDWMFDA

SEQ ID NO: 41366 - protein, 9 aa, Artificial Sequence
  Description of Artificial Sequence: Synthetic peptide
GYWLWMYVA

SEQ ID NO: 41367 - protein, 9 aa, Artificial Sequence
  Description of Artificial Sequence: Synthetic peptide
HCDDVLWCA

SEQ ID NO: 41368 - protein, 9 aa, Artificial Sequence
  Description of Artificial Sequence: Synthetic peptide
HSAYFGVGA

SEQ ID NO: 41369 - protein, 9 aa, Artificial Sequence
  Description of Artificial Sequence: Synthetic peptide
IEELGKPRA

SEQ ID NO: 41370 - protein, 9 aa, Artificial Sequence
  Description of Artificial Sequence: Synthetic peptide
INGMKSAMA

SEQ ID NO: 41371 - protein, 9 aa, Artificial Sequence
  Description of Artificial Sequence: Synthetic peptide
INVPDLLGA

SEQ ID NO: 41372 - protein, 9 aa, Artificial Sequence
  Description of Artificial Sequence: Synthetic peptide
ITSIRMYQA

SEQ ID NO: 41373 - protein, 9 aa, Artificial Sequence
  Description of Artificial Sequence: Synthetic peptide
IVQPYHVEA

SEQ ID NO: 41374 - protein, 9 aa, Artificial Sequence
  Description of Artificial Sequence: Synthetic peptide
LHQPRMDCA

SEQ ID NO: 41375 - protein, 9 aa, Artificial Sequence
  Description of Artificial Sequence: Synthetic peptide
LIYHTPVMA

SEQ ID NO: 41376 - protein, 9 aa, Artificial Sequence
  Description of Artificial Sequence: Synthetic peptide
LSSCRGLIA

SEQ ID NO: 41377 - protein, 9 aa, Artificial Sequence
  Description of Artificial Sequence: Synthetic peptide
LTIRDYGEA

SEQ ID NO: 41378 - protein, 9 aa, Artificial Sequence
  Description of Artificial Sequence: Synthetic peptide
LVNVRYMHA

SEQ ID NO: 41379 - protein, 9 aa, Artificial Sequence
  Description of Artificial Sequence: Synthetic peptide
MHEPILKYA

SEQ ID NO: 41380 - protein, 9 aa, Artificial Sequence
  Description of Artificial Sequence: Synthetic peptide
MICWWKQPA

SEQ ID NO: 41381 - protein, 9 aa, Artificial Sequence
  Description of Artificial Sequence: Synthetic peptide
MMNHSQLYA

SEQ ID NO: 41382 - protein, 9 aa, Artificial Sequence
  Description of Artificial Sequence: Synthetic peptide
MQHPYMQMA

SEQ ID NO: 41383 - protein, 9 aa, Artificial Sequence
  Description of Artificial Sequence: Synthetic peptide
MSTVSGSYA

SEQ ID NO: 41384 - protein, 9 aa, Artificial Sequence
  Description of Artificial Sequence: Synthetic peptide
NGFMAAVMA

SEQ ID NO: 41385 - protein, 9 aa, Artificial Sequence
  Description of Artificial Sequence: Synthetic peptide
NHADYMRNA

SEQ ID NO: 41386 - protein, 9 aa, Artificial Sequence
  Description of Artificial Sequence: Synthetic peptide
NMWPTFRAA

SEQ ID NO: 41387 - protein, 9 aa, Artificial Sequence
  Description of Artificial Sequence: Synthetic peptide
NTDEESGMA

SEQ ID NO: 41388 - protein, 9 aa, Artificial Sequence
  Description of Artificial Sequence: Synthetic peptide
NTMMLQSAA

SEQ ID NO: 41389 - protein, 9 aa, Artificial Sequence
  Description of Artificial Sequence: Synthetic peptide
QAPLKRAAA

SEQ ID NO: 41390 - protein, 9 aa, Artificial Sequence
  Description of Artificial Sequence: Synthetic peptide
QCNRCDQYA

SEQ ID NO: 41391 - protein, 9 aa, Artificial Sequence
  Description of Artificial Sequence: Synthetic peptide
QFIQYGTCA

SEQ ID NO: 41392 - protein, 9 aa, Artificial Sequence
  Description of Artificial Sequence: Synthetic peptide
QIGLKMTPA

SEQ ID NO: 41393 - protein, 9 aa, Artificial Sequence
  Description of Artificial Sequence: Synthetic peptide
QLNPWFYYA

SEQ ID NO: 41394 - protein, 9 aa, Artificial Sequence
  Description of Artificial Sequence: Synthetic peptide
REISVEAVA

SEQ ID NO: 41395 - protein, 9 aa, Artificial Sequence
  Description of Artificial Sequence: Synthetic peptide
SAKITWASA

SEQ ID NO: 41396 - protein, 9 aa, Artificial Sequence
  Description of Artificial Sequence: Synthetic peptide
SIVEFESAA

SEQ ID NO: 41397 - protein, 9 aa, Artificial Sequence
  Description of Artificial Sequence: Synthetic peptide
STHMATQLA

SEQ ID NO: 41398 - protein, 9 aa, Artificial Sequence
  Description of Artificial Sequence: Synthetic peptide
TKSSIEYSA

SEQ ID NO: 41399 - protein, 9 aa, Artificial Sequence
  Description of Artificial Sequence: Synthetic peptide
TNLRQHTNA

SEQ ID NO: 41400 - protein, 9 aa, Artificial Sequence
  Description of Artificial Sequence: Synthetic peptide
TVSDGDWIA

SEQ ID NO: 41401 - protein, 9 aa, Artificial Sequence
  Description of Artificial Sequence: Synthetic peptide
TVVLTLKEA

SEQ ID NO: 41402 - protein, 9 aa, Artificial Sequence
  Description of Artificial Sequence: Synthetic peptide
VTSWFHEIA

SEQ ID NO: 41403 - protein, 9 aa, Artificial Sequence
  Description of Artificial Sequence: Synthetic peptide
VTTVSGGCA

SEQ ID NO: 41404 - protein, 9 aa, Artificial Sequence
  Description of Artificial Sequence: Synthetic peptide
VVMCKSRDA

SEQ ID NO: 41405 - protein, 9 aa, Artificial Sequence
  Description of Artificial Sequence: Synthetic peptide
WVMHYYQYA

SEQ ID NO: 41406 - protein, 9 aa, Artificial Sequence
  Description of Artificial Sequence: Synthetic peptide
YSSPDLRPA

SEQ ID NO: 41407 - protein, 9 aa, Artificial Sequence
  Description of Artificial Sequence: Synthetic peptide
TVLVPVQAA

SEQ ID NO: 41408 - protein, 9 aa, Artificial Sequence
  Description of Artificial Sequence: Synthetic peptide
EVGIKYRAA

SEQ ID NO: 41409 - protein, 9 aa, Artificial Sequence
  Description of Artificial Sequence: Synthetic peptide
EVNWQCQYA

SEQ ID NO: 41410 - protein, 9 aa, Artificial Sequence
  Description of Artificial Sequence: Synthetic peptide
GSMFNPGAA

SEQ ID NO: 41411 - protein, 9 aa, Artificial Sequence
  Description of Artificial Sequence: Synthetic peptide
MTNWFPACA

SEQ ID NO: 41412 - protein, 9 aa, Artificial Sequence
  Description of Artificial Sequence: Synthetic peptide
MVKTSCKPA

SEQ ID NO: 41413 - protein, 9 aa, Artificial Sequence
  Description of Artificial Sequence: Synthetic peptide
MVKTVYPDA

SEQ ID NO: 41414 - protein, 9 aa, Artificial Sequence
  Description of Artificial Sequence: Synthetic peptide
PPEEQCGMA

SEQ ID NO: 41415 - protein, 9 aa, Artificial Sequence
  Description of Artificial Sequence: Synthetic peptide
QFTETWPCA

SEQ ID NO: 41416 - protein, 9 aa, Artificial Sequence
  Description of Artificial Sequence: Synthetic peptide
RIIWPDVVA

SEQ ID NO: 41417 - protein, 9 aa, Artificial Sequence
  Description of Artificial Sequence: Synthetic peptide
SSDTPANQA

SEQ ID NO: 41418 - protein, 9 aa, Artificial Sequence
  Description of Artificial Sequence: Synthetic peptide
TFVECIQYA

SEQ ID NO: 41419 - protein, 9 aa, Artificial Sequence
  Description of Artificial Sequence: Synthetic peptide
TGHFFTTAA

SEQ ID NO: 41420 - protein, 9 aa, Artificial Sequence
  Description of Artificial Sequence: Synthetic peptide
VGYGCKGYA

SEQ ID NO: 41421 - protein, 9 aa, Artificial Sequence
  Description of Artificial Sequence: Synthetic peptide
VSWSRMEQA

SEQ ID NO: 41422 - protein, 9 aa, Artificial Sequence
  Description of Artificial Sequence: Synthetic peptide
YRLHCCNRA

SEQ ID NO: 41423 - protein, 9 aa, Artificial Sequence
  Description of Artificial Sequence: Synthetic peptide
MRVQVFSDA

SEQ ID NO: 41424 - protein, 9 aa, Artificial Sequence
  Description of Artificial Sequence: Synthetic peptide
RTESWSSLA

SEQ ID NO: 41425 - protein, 9 aa, Artificial Sequence
  Description of Artificial Sequence: Synthetic peptide
QKWMQMDGA

SEQ ID NO: 41426 - protein, 9 aa, Artificial Sequence
  Description of Artificial Sequence: Synthetic peptide
TAAGYIVDA

SEQ ID NO: 41427 - protein, 9 aa, Artificial Sequence
  Description of Artificial Sequence: Synthetic peptide
TQQTADRWA

SEQ ID NO: 41428 - protein, 9 aa, Artificial Sequence
  Description of Artificial Sequence: Synthetic peptide
FQIRQDNLA

SEQ ID NO: 41429 - protein, 9 aa, Artificial Sequence
  Description of Artificial Sequence: Synthetic peptide
NTGMEGQMA

SEQ ID NO: 41430 - protein, 9 aa, Artificial Sequence
  Description of Artificial Sequence: Synthetic peptide
IMTMQMDTA

SEQ ID NO: 41431 - protein, 9 aa, Artificial Sequence
  Description of Artificial Sequence: Synthetic peptide
EYSSQHPYA

SEQ ID NO: 41432 - protein, 9 aa, Artificial Sequence
  Description of Artificial Sequence: Synthetic peptide
QPFCFSIGA

SEQ ID NO: 41433 - protein, 9 aa, Artificial Sequence
  Description of Artificial Sequence: Synthetic peptide
MGVPPLMQA

SEQ ID NO: 41434 - protein, 9 aa, Artificial Sequence
  Description of Artificial Sequence: Synthetic peptide
VFGSTRSAA

SEQ ID NO: 41435 - protein, 9 aa, Artificial Sequence
  Description of Artificial Sequence: Synthetic peptide
ATNYTMEPA

SEQ ID NO: 41436 - protein, 9 aa, Artificial Sequence
  Description of Artificial Sequence: Synthetic peptide
HIHMSDRGA

SEQ ID NO: 41437 - protein, 9 aa, Artificial Sequence
  Description of Artificial Sequence: Synthetic peptide
GSHDYYQSA

SEQ ID NO: 41438 - protein, 9 aa, Artificial Sequence
  Description of Artificial Sequence: Synthetic peptide
AACAVWKGE

SEQ ID NO: 41439 - protein, 9 aa, Artificial Sequence
  Description of Artificial Sequence: Synthetic peptide
AANWFTHDK

SEQ ID NO: 41440 - protein, 9 aa, Artificial Sequence
  Description of Artificial Sequence: Synthetic peptide
ACWLWFYFG

SEQ ID NO: 41441 - protein, 9 aa, Artificial Sequence
  Description of Artificial Sequence: Synthetic peptide
ADSADRVYN

SEQ ID NO: 41442 - protein, 9 aa, Artificial Sequence
  Description of Artificial Sequence: Synthetic peptide
AFHHMMNTP

SEQ ID NO: 41443 - protein, 9 aa, Artificial Sequence
  Description of Artificial Sequence: Synthetic peptide
AFKKPSLFR

SEQ ID NO: 41444 - protein, 9 aa, Artificial Sequence
  Description of Artificial Sequence: Synthetic peptide
AFYNYEIMA

SEQ ID NO: 41445 - protein, 9 aa, Artificial Sequence
  Description of Artificial Sequence: Synthetic peptide
AHAIMMRDF

SEQ ID NO: 41446 - protein, 9 aa, Artificial Sequence
  Description of Artificial Sequence: Synthetic peptide
AHHALSFWR

SEQ ID NO: 41447 - protein, 9 aa, Artificial Sequence
  Description of Artificial Sequence: Synthetic peptide
AHHEVSFWR

SEQ ID NO: 41448 - protein, 9 aa, Artificial Sequence
  Description of Artificial Sequence: Synthetic peptide
AHNIMMRDF

SEQ ID NO: 41449 - protein, 9 aa, Artificial Sequence
  Description of Artificial Sequence: Synthetic peptide
AHTIMMRDV

SEQ ID NO: 41450 - protein, 9 aa, Artificial Sequence
  Description of Artificial Sequence: Synthetic peptide
AHTIMMRHF

SEQ ID NO: 41451 - protein, 9 aa, Artificial Sequence
  Description of Artificial Sequence: Synthetic peptide
AHTIMMRYF

SEQ ID NO: 41452 - protein, 9 aa, Artificial Sequence
  Description of Artificial Sequence: Synthetic peptide
AIHEPAENR

SEQ ID NO: 41453 - protein, 9 aa, Artificial Sequence
  Description of Artificial Sequence: Synthetic peptide
AIHEPAGDR

SEQ ID NO: 41454 - protein, 9 aa, Artificial Sequence
  Description of Artificial Sequence: Synthetic peptide
AIHKPAEDR

SEQ ID NO: 41455 - protein, 9 aa, Artificial Sequence
  Description of Artificial Sequence: Synthetic peptide
AIHVPAEDR

SEQ ID NO: 41456 - protein, 9 aa, Artificial Sequence
  Description of Artificial Sequence: Synthetic peptide
AKIPIDHFA

SEQ ID NO: 41457 - protein, 9 aa, Artificial Sequence
  Description of Artificial Sequence: Synthetic peptide
AKSSIEFSA

SEQ ID NO: 41458 - protein, 9 aa, Artificial Sequence
  Description of Artificial Sequence: Synthetic peptide
AKSSIEHSA

SEQ ID NO: 41459 - protein, 9 aa, Artificial Sequence
  Description of Artificial Sequence: Synthetic peptide
AKSSIEYSG

SEQ ID NO: 41460 - protein, 9 aa, Artificial Sequence
  Description of Artificial Sequence: Synthetic peptide
AMHEPAEDR

SEQ ID NO: 41461 - protein, 9 aa, Artificial Sequence
  Description of Artificial Sequence: Synthetic peptide
AMMKMMKAN

SEQ ID NO: 41462 - protein, 9 aa, Artificial Sequence
  Description of Artificial Sequence: Synthetic peptide
AMMLMMKAN

SEQ ID NO: 41463 - protein, 9 aa, Artificial Sequence
  Description of Artificial Sequence: Synthetic peptide
AMMQMMKTN

SEQ ID NO: 41464 - protein, 9 aa, Artificial Sequence
  Description of Artificial Sequence: Synthetic peptide
AMMQMMRAN

SEQ ID NO: 41465 - protein, 9 aa, Artificial Sequence
  Description of Artificial Sequence: Synthetic peptide
ANERHWTSF

SEQ ID NO: 41466 - protein, 9 aa, Artificial Sequence
  Description of Artificial Sequence: Synthetic peptide
ANVRHWTYF

SEQ ID NO: 41467 - protein, 9 aa, Artificial Sequence
  Description of Artificial Sequence: Synthetic peptide
ARAMYVESF

SEQ ID NO: 41468 - protein, 9 aa, Artificial Sequence
  Description of Artificial Sequence: Synthetic peptide
ARSSIEYSA

SEQ ID NO: 41469 - protein, 9 aa, Artificial Sequence
  Description of Artificial Sequence: Synthetic peptide
ARTMYGESF

SEQ ID NO: 41470 - protein, 9 aa, Artificial Sequence
  Description of Artificial Sequence: Synthetic peptide
ASDTMNCGS

SEQ ID NO: 41471 - protein, 9 aa, Artificial Sequence
  Description of Artificial Sequence: Synthetic peptide
ASYHWTHAS

SEQ ID NO: 41472 - protein, 9 aa, Artificial Sequence
  Description of Artificial Sequence: Synthetic peptide
ASYHWTHVG

SEQ ID NO: 41473 - protein, 9 aa, Artificial Sequence
  Description of Artificial Sequence: Synthetic peptide
ATERHWTYF

SEQ ID NO: 41474 - protein, 9 aa, Artificial Sequence
  Description of Artificial Sequence: Synthetic peptide
ATRDWMSCM

SEQ ID NO: 41475 - protein, 9 aa, Artificial Sequence
  Description of Artificial Sequence: Synthetic peptide
AVDEVGSSN

SEQ ID NO: 41476 - protein, 9 aa, Artificial Sequence
  Description of Artificial Sequence: Synthetic peptide
AVHEPAEDR

SEQ ID NO: 41477 - protein, 9 aa, Artificial Sequence
  Description of Artificial Sequence: Synthetic peptide
AVILSSMYS

SEQ ID NO: 41478 - protein, 9 aa, Artificial Sequence
  Description of Artificial Sequence: Synthetic peptide
AVTVDGNNR

SEQ ID NO: 41479 - protein, 9 aa, Artificial Sequence
  Description of Artificial Sequence: Synthetic peptide
AWMDCPIMC

SEQ ID NO: 41480 - protein, 9 aa, Artificial Sequence
  Description of Artificial Sequence: Synthetic peptide
AYDEKKNQM

SEQ ID NO: 41481 - protein, 9 aa, Artificial Sequence
  Description of Artificial Sequence: Synthetic peptide
AYDKKKNQM

SEQ ID NO: 41482 - protein, 9 aa, Artificial Sequence
  Description of Artificial Sequence: Synthetic peptide
AYDQRKNQM

SEQ ID NO: 41483 - protein, 9 aa, Artificial Sequence
  Description of Artificial Sequence: Synthetic peptide
AYLINMLWM

SEQ ID NO: 41484 - protein, 9 aa, Artificial Sequence
  Description of Artificial Sequence: Synthetic peptide
AYNQKKNQM

SEQ ID NO: 41485 - protein, 9 aa, Artificial Sequence
  Description of Artificial Sequence: Synthetic peptide
CFENLQIMA

SEQ ID NO: 41486 - protein, 9 aa, Artificial Sequence
  Description of Artificial Sequence: Synthetic peptide
CGGQFWQGI

SEQ ID NO: 41487 - protein, 9 aa, Artificial Sequence
  Description of Artificial Sequence: Synthetic peptide
CKDEFIVGN

SEQ ID NO: 41488 - protein, 9 aa, Artificial Sequence
  Description of Artificial Sequence: Synthetic peptide
CKIPIDHFA

SEQ ID NO: 41489 - protein, 9 aa, Artificial Sequence
  Description of Artificial Sequence: Synthetic peptide
CKQKFNGQN

SEQ ID NO: 41490 - protein, 9 aa, Artificial Sequence
  Description of Artificial Sequence: Synthetic peptide
CKQQFIGQN

SEQ ID NO: 41491 - protein, 9 aa, Artificial Sequence
  Description of Artificial Sequence: Synthetic peptide
CKQQFTGQN

SEQ ID NO: 41492 - protein, 9 aa, Artificial Sequence
  Description of Artificial Sequence: Synthetic peptide
CKQRFNGQN

SEQ ID NO: 41493 - protein, 9 aa, Artificial Sequence
  Description of Artificial Sequence: Synthetic peptide
CMESYDHGS

SEQ ID NO: 41494 - protein, 9 aa, Artificial Sequence
  Description of Artificial Sequence: Synthetic peptide
CMFGMVNYP

SEQ ID NO: 41495 - protein, 9 aa, Artificial Sequence
  Description of Artificial Sequence: Synthetic peptide
CMFGTVNYT

SEQ ID NO: 41496 - protein, 9 aa, Artificial Sequence
  Description of Artificial Sequence: Synthetic peptide
CMKSFDHGS

SEQ ID NO: 41497 - protein, 9 aa, Artificial Sequence
  Description of Artificial Sequence: Synthetic peptide
CMQKDGNDR

SEQ ID NO: 41498 - protein, 9 aa, Artificial Sequence
  Description of Artificial Sequence: Synthetic peptide
CMRGDKRKR

SEQ ID NO: 41499 - protein, 9 aa, Artificial Sequence
  Description of Artificial Sequence: Synthetic peptide
CMRGDQRNR

SEQ ID NO: 41500 - protein, 9 aa, Artificial Sequence
  Description of Artificial Sequence: Synthetic peptide
CMRGDTRNR

SEQ ID NO: 41501 - protein, 9 aa, Artificial Sequence
  Description of Artificial Sequence: Synthetic peptide
CMRKDGNDR

SEQ ID NO: 41502 - protein, 9 aa, Artificial Sequence
  Description of Artificial Sequence: Synthetic peptide
CMRMDCNDR

SEQ ID NO: 41503 - protein, 9 aa, Artificial Sequence
  Description of Artificial Sequence: Synthetic peptide
CMRMDGNNR

SEQ ID NO: 41504 - protein, 9 aa, Artificial Sequence
  Description of Artificial Sequence: Synthetic peptide
CMRMVGNDR

SEQ ID NO: 41505 - protein, 9 aa, Artificial Sequence
  Description of Artificial Sequence: Synthetic peptide
CMRSDKRNR

SEQ ID NO: 41506 - protein, 9 aa, Artificial Sequence
  Description of Artificial Sequence: Synthetic peptide
CMRVDGNDR

SEQ ID NO: 41507 - protein, 9 aa, Artificial Sequence
  Description of Artificial Sequence: Synthetic peptide
CMVDANHVW

SEQ ID NO: 41508 - protein, 9 aa, Artificial Sequence
  Description of Artificial Sequence: Synthetic peptide
CNFNNNDHV

SEQ ID NO: 41509 - protein, 9 aa, Artificial Sequence
  Description of Artificial Sequence: Synthetic peptide
CTLFTNFQY

SEQ ID NO: 41510 - protein, 9 aa, Artificial Sequence
  Description of Artificial Sequence: Synthetic peptide
CTLISNFQY

SEQ ID NO: 41511 - protein, 9 aa, Artificial Sequence
  Description of Artificial Sequence: Synthetic peptide
CVGQFWEGI

SEQ ID NO: 41512 - protein, 9 aa, Artificial Sequence
  Description of Artificial Sequence: Synthetic peptide
CVGQFWKGI

SEQ ID NO: 41513 - protein, 9 aa, Artificial Sequence
  Description of Artificial Sequence: Synthetic peptide
CVGQFWRGI

SEQ ID NO: 41514 - protein, 9 aa, Artificial Sequence
  Description of Artificial Sequence: Synthetic peptide
CVVQFWQGI

SEQ ID NO: 41515 - protein, 9 aa, Artificial Sequence
  Description of Artificial Sequence: Synthetic peptide
DANDMSSDR

SEQ ID NO: 41516 - protein, 9 aa, Artificial Sequence
  Description of Artificial Sequence: Synthetic peptide
DARFGINFG

SEQ ID NO: 41517 - protein, 9 aa, Artificial Sequence
  Description of Artificial Sequence: Synthetic peptide
DARFGLNFA

SEQ ID NO: 41518 - protein, 9 aa, Artificial Sequence
  Description of Artificial Sequence: Synthetic peptide
DARFYIAEG

SEQ ID NO: 41519 - protein, 9 aa, Artificial Sequence
  Description of Artificial Sequence: Synthetic peptide
DARFYISEG

SEQ ID NO: 41520 - protein, 9 aa, Artificial Sequence
  Description of Artificial Sequence: Synthetic peptide
DCVIDWCQM

SEQ ID NO: 41521 - protein, 9 aa, Artificial Sequence
  Description of Artificial Sequence: Synthetic peptide
DDSARYWQV

SEQ ID NO: 41522 - protein, 9 aa, Artificial Sequence
  Description of Artificial Sequence: Synthetic peptide
DDSSWDNLF

SEQ ID NO: 41523 - protein, 9 aa, Artificial Sequence
  Description of Artificial Sequence: Synthetic peptide
DELKMGHNS

SEQ ID NO: 41524 - protein, 9 aa, Artificial Sequence
  Description of Artificial Sequence: Synthetic peptide
DFEYTCNQH

SEQ ID NO: 41525 - protein, 9 aa, Artificial Sequence
  Description of Artificial Sequence: Synthetic peptide
DFEYTCNQS

SEQ ID NO: 41526 - protein, 9 aa, Artificial Sequence
  Description of Artificial Sequence: Synthetic peptide
DFQKPSLFR

SEQ ID NO: 41527 - protein, 9 aa, Artificial Sequence
  Description of Artificial Sequence: Synthetic peptide
DGAHFRSCF

SEQ ID NO: 41528 - protein, 9 aa, Artificial Sequence
  Description of Artificial Sequence: Synthetic peptide
DGIIDWCQM

SEQ ID NO: 41529 - protein, 9 aa, Artificial Sequence
  Description of Artificial Sequence: Synthetic peptide
DGSQAGPDK

SEQ ID NO: 41530 - protein, 9 aa, Artificial Sequence
  Description of Artificial Sequence: Synthetic peptide
DGVIDWCKM

SEQ ID NO: 41531 - protein, 9 aa, Artificial Sequence
  Description of Artificial Sequence: Synthetic peptide
DGVIDWRQM

SEQ ID NO: 41532 - protein, 9 aa, Artificial Sequence
  Description of Artificial Sequence: Synthetic peptide
DGVVDWCQM

SEQ ID NO: 41533 - protein, 9 aa, Artificial Sequence
  Description of Artificial Sequence: Synthetic peptide
DHIACKKLC

SEQ ID NO: 41534 - protein, 9 aa, Artificial Sequence
  Description of Artificial Sequence: Synthetic peptide
DHTACKKVC

SEQ ID NO: 41535 - protein, 9 aa, Artificial Sequence
  Description of Artificial Sequence: Synthetic peptide
DHTACKRLC

SEQ ID NO: 41536 - protein, 9 aa, Artificial Sequence
  Description of Artificial Sequence: Synthetic peptide
DHTGCKKLC

SEQ ID NO: 41537 - protein, 9 aa, Artificial Sequence
  Description of Artificial Sequence: Synthetic peptide
DIFFKCEWV

SEQ ID NO: 41538 - protein, 9 aa, Artificial Sequence
  Description of Artificial Sequence: Synthetic peptide
DIFFKCVWA

SEQ ID NO: 41539 - protein, 9 aa, Artificial Sequence
  Description of Artificial Sequence: Synthetic peptide
DIHHLCNIF

SEQ ID NO: 41540 - protein, 9 aa, Artificial Sequence
  Description of Artificial Sequence: Synthetic peptide
DIHHWCNIC

SEQ ID NO: 41541 - protein, 9 aa, Artificial Sequence
  Description of Artificial Sequence: Synthetic peptide
DIHPWCNIF

SEQ ID NO: 41542 - protein, 9 aa, Artificial Sequence
  Description of Artificial Sequence: Synthetic peptide
DINAKKNIC

SEQ ID NO: 41543 - protein, 9 aa, Artificial Sequence
  Description of Artificial Sequence: Synthetic peptide
DINGKKNIR

SEQ ID NO: 41544 - protein, 9 aa, Artificial Sequence
  Description of Artificial Sequence: Synthetic peptide
DINGKKNIW

SEQ ID NO: 41545 - protein, 9 aa, Artificial Sequence
  Description of Artificial Sequence: Synthetic peptide
DINGKKNVC

SEQ ID NO: 41546 - protein, 9 aa, Artificial Sequence
  Description of Artificial Sequence: Synthetic peptide
DINGRKNIC

SEQ ID NO: 41547 - protein, 9 aa, Artificial Sequence
  Description of Artificial Sequence: Synthetic peptide
DIQHWCNIF

SEQ ID NO: 41548 - protein, 9 aa, Artificial Sequence
  Description of Artificial Sequence: Synthetic peptide
DIYHFNHKS

SEQ ID NO: 41549 - protein, 9 aa, Artificial Sequence
  Description of Artificial Sequence: Synthetic peptide
DIYHWCNIF

SEQ ID NO: 41550 - protein, 9 aa, Artificial Sequence
  Description of Artificial Sequence: Synthetic peptide
DKEDDHRRA

SEQ ID NO: 41551 - protein, 9 aa, Artificial Sequence
  Description of Artificial Sequence: Synthetic peptide
DKIAIDHFA

SEQ ID NO: 41552 - protein, 9 aa, Artificial Sequence
  Description of Artificial Sequence: Synthetic peptide
DKIPIAHFA

SEQ ID NO: 41553 - protein, 9 aa, Artificial Sequence
  Description of Artificial Sequence: Synthetic peptide
DKIPIDHFT

SEQ ID NO: 41554 - protein, 9 aa, Artificial Sequence
  Description of Artificial Sequence: Synthetic peptide
DKIPMDHFA

SEQ ID NO: 41555 - protein, 9 aa, Artificial Sequence
  Description of Artificial Sequence: Synthetic peptide
DKIPVDHFA

SEQ ID NO: 41556 - protein, 9 aa, Artificial Sequence
  Description of Artificial Sequence: Synthetic peptide
DKISIDHFA

SEQ ID NO: 41557 - protein, 9 aa, Artificial Sequence
  Description of Artificial Sequence: Synthetic peptide
DKLPIDHFA

SEQ ID NO: 41558 - protein, 9 aa, Artificial Sequence
  Description of Artificial Sequence: Synthetic peptide
DKMLMVFKR

SEQ ID NO: 41559 - protein, 9 aa, Artificial Sequence
  Description of Artificial Sequence: Synthetic peptide
DKMPIDHFA

SEQ ID NO: 41560 - protein, 9 aa, Artificial Sequence
  Description of Artificial Sequence: Synthetic peptide
DKVPIDHFA

SEQ ID NO: 41561 - protein, 9 aa, Artificial Sequence
  Description of Artificial Sequence: Synthetic peptide
DLHHWCNIF

SEQ ID NO: 41562 - protein, 9 aa, Artificial Sequence
  Description of Artificial Sequence: Synthetic peptide
DLNGKKNIC

SEQ ID NO: 41563 - protein, 9 aa, Artificial Sequence
  Description of Artificial Sequence: Synthetic peptide
DQLKMGHNI

SEQ ID NO: 41564 - protein, 9 aa, Artificial Sequence
  Description of Artificial Sequence: Synthetic peptide
DRCFRDDFE

SEQ ID NO: 41565 - protein, 9 aa, Artificial Sequence
  Description of Artificial Sequence: Synthetic peptide
DRCFRDDMV

SEQ ID NO: 41566 - protein, 9 aa, Artificial Sequence
  Description of Artificial Sequence: Synthetic peptide
DRWTMQHWE

SEQ ID NO: 41567 - protein, 9 aa, Artificial Sequence
  Description of Artificial Sequence: Synthetic peptide
DSGKANTQS

SEQ ID NO: 41568 - protein, 9 aa, Artificial Sequence
  Description of Artificial Sequence: Synthetic peptide
DSKADHFVN

SEQ ID NO: 41569 - protein, 9 aa, Artificial Sequence
  Description of Artificial Sequence: Synthetic peptide
DSKADHGVN

SEQ ID NO: 41570 - protein, 9 aa, Artificial Sequence
  Description of Artificial Sequence: Synthetic peptide
DSKADNCVN

SEQ ID NO: 41571 - protein, 9 aa, Artificial Sequence
  Description of Artificial Sequence: Synthetic peptide
DSKADPCVN

SEQ ID NO: 41572 - protein, 9 aa, Artificial Sequence
  Description of Artificial Sequence: Synthetic peptide
DSKADRCVN

SEQ ID NO: 41573 - protein, 9 aa, Artificial Sequence
  Description of Artificial Sequence: Synthetic peptide
DSKADYCVN

SEQ ID NO: 41574 - protein, 9 aa, Artificial Sequence
  Description of Artificial Sequence: Synthetic peptide
DSMADDPHL

SEQ ID NO: 41575 - protein, 9 aa, Artificial Sequence
  Description of Artificial Sequence: Synthetic peptide
DSMGDDQHL

SEQ ID NO: 41576 - protein, 9 aa, Artificial Sequence
  Description of Artificial Sequence: Synthetic peptide
DSRFNESLG

SEQ ID NO: 41577 - protein, 9 aa, Artificial Sequence
  Description of Artificial Sequence: Synthetic peptide
DTVPSHLGC

SEQ ID NO: 41578 - protein, 9 aa, Artificial Sequence
  Description of Artificial Sequence: Synthetic peptide
DVLKMGHNI

SEQ ID NO: 41579 - protein, 9 aa, Artificial Sequence
  Description of Artificial Sequence: Synthetic peptide
DVVIDWCQM

SEQ ID NO: 41580 - protein, 9 aa, Artificial Sequence
  Description of Artificial Sequence: Synthetic peptide
DWIVDPPKP

SEQ ID NO: 41581 - protein, 9 aa, Artificial Sequence
  Description of Artificial Sequence: Synthetic peptide
DWIVDTAKP

SEQ ID NO: 41582 - protein, 9 aa, Artificial Sequence
  Description of Artificial Sequence: Synthetic peptide
DWIVDTPKA

SEQ ID NO: 41583 - protein, 9 aa, Artificial Sequence
  Description of Artificial Sequence: Synthetic peptide
DWIVDTPKL

SEQ ID NO: 41584 - protein, 9 aa, Artificial Sequence
  Description of Artificial Sequence: Synthetic peptide
DWIVDTPQP

SEQ ID NO: 41585 - protein, 9 aa, Artificial Sequence
  Description of Artificial Sequence: Synthetic peptide
DWMDCSIMC

SEQ ID NO: 41586 - protein, 9 aa, Artificial Sequence
  Description of Artificial Sequence: Synthetic peptide
ECERAKGEW

SEQ ID NO: 41587 - protein, 9 aa, Artificial Sequence
  Description of Artificial Sequence: Synthetic peptide
ECERPKGEW

SEQ ID NO: 41588 - protein, 9 aa, Artificial Sequence
  Description of Artificial Sequence: Synthetic peptide
ECERTKGGW

SEQ ID NO: 41589 - protein, 9 aa, Artificial Sequence
  Description of Artificial Sequence: Synthetic peptide
ECERTKGKW

SEQ ID NO: 41590 - protein, 9 aa, Artificial Sequence
  Description of Artificial Sequence: Synthetic peptide
ECERTKGQW

SEQ ID NO: 41591 - protein, 9 aa, Artificial Sequence
  Description of Artificial Sequence: Synthetic peptide
ECERTRGEW

SEQ ID NO: 41592 - protein, 9 aa, Artificial Sequence
  Description of Artificial Sequence: Synthetic peptide
ECKRTKGEW

SEQ ID NO: 41593 - protein, 9 aa, Artificial Sequence
  Description of Artificial Sequence: Synthetic peptide
EDDGDDNIP

SEQ ID NO: 41594 - protein, 9 aa, Artificial Sequence
  Description of Artificial Sequence: Synthetic peptide
EEIAGHVGA

SEQ ID NO: 41595 - protein, 9 aa, Artificial Sequence
  Description of Artificial Sequence: Synthetic peptide
EFHQDMFEC

SEQ ID NO: 41596 - protein, 9 aa, Artificial Sequence
  Description of Artificial Sequence: Synthetic peptide
EFSGYTNQE

SEQ ID NO: 41597 - protein, 9 aa, Artificial Sequence
  Description of Artificial Sequence: Synthetic peptide
EFYDYEIMA

SEQ ID NO: 41598 - protein, 9 aa, Artificial Sequence
  Description of Artificial Sequence: Synthetic peptide
EFYNYEIMT

SEQ ID NO: 41599 - protein, 9 aa, Artificial Sequence
  Description of Artificial Sequence: Synthetic peptide
EFYNYGIMA

SEQ ID NO: 41600 - protein, 9 aa, Artificial Sequence
  Description of Artificial Sequence: Synthetic peptide
EFYNYQIMA

SEQ ID NO: 41601 - protein, 9 aa, Artificial Sequence
  Description of Artificial Sequence: Synthetic peptide
EHGAVHNAS

SEQ ID NO: 41602 - protein, 9 aa, Artificial Sequence
  Description of Artificial Sequence: Synthetic peptide
EHGAVLNAN

SEQ ID NO: 41603 - protein, 9 aa, Artificial Sequence
  Description of Artificial Sequence: Synthetic peptide
EHHGFNHCN

SEQ ID NO: 41604 - protein, 9 aa, Artificial Sequence
  Description of Artificial Sequence: Synthetic peptide
EHMTCMHCE

SEQ ID NO: 41605 - protein, 9 aa, Artificial Sequence
  Description of Artificial Sequence: Synthetic peptide
EIHQDMFEF

SEQ ID NO: 41606 - protein, 9 aa, Artificial Sequence
  Description of Artificial Sequence: Synthetic peptide
EKAMLLNGT

SEQ ID NO: 41607 - protein, 9 aa, Artificial Sequence
  Description of Artificial Sequence: Synthetic peptide
EKAMLMNGA

SEQ ID NO: 41608 - protein, 9 aa, Artificial Sequence
  Description of Artificial Sequence: Synthetic peptide
EKAMVLNGA

SEQ ID NO: 41609 - protein, 9 aa, Artificial Sequence
  Description of Artificial Sequence: Synthetic peptide
EKEDDHRRP

SEQ ID NO: 41610 - protein, 9 aa, Artificial Sequence
  Description of Artificial Sequence: Synthetic peptide
EKFMVMNSC

SEQ ID NO: 41611 - protein, 9 aa, Artificial Sequence
  Description of Artificial Sequence: Synthetic peptide
ELMWWQWDR

SEQ ID NO: 41612 - protein, 9 aa, Artificial Sequence
  Description of Artificial Sequence: Synthetic peptide
EMSSEMEKL

SEQ ID NO: 41613 - protein, 9 aa, Artificial Sequence
  Description of Artificial Sequence: Synthetic peptide
ERFMVMNSF

SEQ ID NO: 41614 - protein, 9 aa, Artificial Sequence
  Description of Artificial Sequence: Synthetic peptide
ERFMVMNSW

SEQ ID NO: 41615 - protein, 9 aa, Artificial Sequence
  Description of Artificial Sequence: Synthetic peptide
ERFMVMSSC

SEQ ID NO: 41616 - protein, 9 aa, Artificial Sequence
  Description of Artificial Sequence: Synthetic peptide
ERGAVHNAN

SEQ ID NO: 41617 - protein, 9 aa, Artificial Sequence
  Description of Artificial Sequence: Synthetic peptide
ERHAFNHCN

SEQ ID NO: 41618 - protein, 9 aa, Artificial Sequence
  Description of Artificial Sequence: Synthetic peptide
ERHGFNHCK

SEQ ID NO: 41619 - protein, 9 aa, Artificial Sequence
  Description of Artificial Sequence: Synthetic peptide
ERHGFNHCS

SEQ ID NO: 41620 - protein, 9 aa, Artificial Sequence
  Description of Artificial Sequence: Synthetic peptide
ERHGFNHWN

SEQ ID NO: 41621 - protein, 9 aa, Artificial Sequence
  Description of Artificial Sequence: Synthetic peptide
ERHGINHCN

SEQ ID NO: 41622 - protein, 9 aa, Artificial Sequence
  Description of Artificial Sequence: Synthetic peptide
ERHGVNHCN

SEQ ID NO: 41623 - protein, 9 aa, Artificial Sequence
  Description of Artificial Sequence: Synthetic peptide
ERQTLAMDR

SEQ ID NO: 41624 - protein, 9 aa, Artificial Sequence
  Description of Artificial Sequence: Synthetic peptide
ESMWYYVMA

SEQ ID NO: 41625 - protein, 9 aa, Artificial Sequence
  Description of Artificial Sequence: Synthetic peptide
ESSWPLQWN

SEQ ID NO: 41626 - protein, 9 aa, Artificial Sequence
  Description of Artificial Sequence: Synthetic peptide
ESTISPNHK

SEQ ID NO: 41627 - protein, 9 aa, Artificial Sequence
  Description of Artificial Sequence: Synthetic peptide
ESVDHWGDW

SEQ ID NO: 41628 - protein, 9 aa, Artificial Sequence
  Description of Artificial Sequence: Synthetic peptide
ETAMGTNLY

SEQ ID NO: 41629 - protein, 9 aa, Artificial Sequence
  Description of Artificial Sequence: Synthetic peptide
ETAMLLNGA

SEQ ID NO: 41630 - protein, 9 aa, Artificial Sequence
  Description of Artificial Sequence: Synthetic peptide
ETAYRENPC

SEQ ID NO: 41631 - protein, 9 aa, Artificial Sequence
  Description of Artificial Sequence: Synthetic peptide
ETGPSMFSF

SEQ ID NO: 41632 - protein, 9 aa, Artificial Sequence
  Description of Artificial Sequence: Synthetic peptide
ETGYGENPC

SEQ ID NO: 41633 - protein, 9 aa, Artificial Sequence
  Description of Artificial Sequence: Synthetic peptide
ETGYQENPC

SEQ ID NO: 41634 - protein, 9 aa, Artificial Sequence
  Description of Artificial Sequence: Synthetic peptide
ETGYRENSC

SEQ ID NO: 41635 - protein, 9 aa, Artificial Sequence
  Description of Artificial Sequence: Synthetic peptide
EVSKFWRHT

SEQ ID NO: 41636 - protein, 9 aa, Artificial Sequence
  Description of Artificial Sequence: Synthetic peptide
EVTVDGNNR

SEQ ID NO: 41637 - protein, 9 aa, Artificial Sequence
  Description of Artificial Sequence: Synthetic peptide
EVVAGHVGA

SEQ ID NO: 41638 - protein, 9 aa, Artificial Sequence
  Description of Artificial Sequence: Synthetic peptide
EYCHWWYKL

SEQ ID NO: 41639 - protein, 9 aa, Artificial Sequence
  Description of Artificial Sequence: Synthetic peptide
EYERLGDSW

SEQ ID NO: 41640 - protein, 9 aa, Artificial Sequence
  Description of Artificial Sequence: Synthetic peptide
EYMNCMHCE

SEQ ID NO: 41641 - protein, 9 aa, Artificial Sequence
  Description of Artificial Sequence: Synthetic peptide
FAEPCMAIW

SEQ ID NO: 41642 - protein, 9 aa, Artificial Sequence
  Description of Artificial Sequence: Synthetic peptide
FCERNMMAQ

SEQ ID NO: 41643 - protein, 9 aa, Artificial Sequence
  Description of Artificial Sequence: Synthetic peptide
FCNRNVNRP

SEQ ID NO: 41644 - protein, 9 aa, Artificial Sequence
  Description of Artificial Sequence: Synthetic peptide
FKFWTDNAD

SEQ ID NO: 41645 - protein, 9 aa, Artificial Sequence
  Description of Artificial Sequence: Synthetic peptide
FKFWTDNTE

SEQ ID NO: 41646 - protein, 9 aa, Artificial Sequence
  Description of Artificial Sequence: Synthetic peptide
FKFWTDNTN

SEQ ID NO: 41647 - protein, 9 aa, Artificial Sequence
  Description of Artificial Sequence: Synthetic peptide
FKSIQCSWG

SEQ ID NO: 41648 - protein, 9 aa, Artificial Sequence
  Description of Artificial Sequence: Synthetic peptide
FKSVQCSWA

SEQ ID NO: 41649 - protein, 9 aa, Artificial Sequence
  Description of Artificial Sequence: Synthetic peptide
FMVEFAYMD

SEQ ID NO: 41650 - protein, 9 aa, Artificial Sequence
  Description of Artificial Sequence: Synthetic peptide
FNQTMIFGA

SEQ ID NO: 41651 - protein, 9 aa, Artificial Sequence
  Description of Artificial Sequence: Synthetic peptide
FNVPDLLGA

SEQ ID NO: 41652 - protein, 9 aa, Artificial Sequence
  Description of Artificial Sequence: Synthetic peptide
FPANYYSNA

SEQ ID NO: 41653 - protein, 9 aa, Artificial Sequence
  Description of Artificial Sequence: Synthetic peptide
FPGNYHSNA

SEQ ID NO: 41654 - protein, 9 aa, Artificial Sequence
  Description of Artificial Sequence: Synthetic peptide
FPKFCKCIS

SEQ ID NO: 41655 - protein, 9 aa, Artificial Sequence
  Description of Artificial Sequence: Synthetic peptide
FSDTMNCGS

SEQ ID NO: 41656 - protein, 9 aa, Artificial Sequence
  Description of Artificial Sequence: Synthetic peptide
FSQTMIFCA

SEQ ID NO: 41657 - protein, 9 aa, Artificial Sequence
  Description of Artificial Sequence: Synthetic peptide
FTRDWMSCM

SEQ ID NO: 41658 - protein, 9 aa, Artificial Sequence
  Description of Artificial Sequence: Synthetic peptide
FVEPCMAIL

SEQ ID NO: 41659 - protein, 9 aa, Artificial Sequence
  Description of Artificial Sequence: Synthetic peptide
FVEPCMAIS

SEQ ID NO: 41660 - protein, 9 aa, Artificial Sequence
  Description of Artificial Sequence: Synthetic peptide
FVEPCMTIW

SEQ ID NO: 41661 - protein, 9 aa, Artificial Sequence
  Description of Artificial Sequence: Synthetic peptide
FVERCMAIW

SEQ ID NO: 41662 - protein, 9 aa, Artificial Sequence
  Description of Artificial Sequence: Synthetic peptide
FVQPCMAIW

SEQ ID NO: 41663 - protein, 9 aa, Artificial Sequence
  Description of Artificial Sequence: Synthetic peptide
GAYFFDKYK

SEQ ID NO: 41664 - protein, 9 aa, Artificial Sequence
  Description of Artificial Sequence: Synthetic peptide
GAYFFDKYS

SEQ ID NO: 41665 - protein, 9 aa, Artificial Sequence
  Description of Artificial Sequence: Synthetic peptide
GAYFFHKYN

SEQ ID NO: 41666 - protein, 9 aa, Artificial Sequence
  Description of Artificial Sequence: Synthetic peptide
GCQGFFNMK

SEQ ID NO: 41667 - protein, 9 aa, Artificial Sequence
  Description of Artificial Sequence: Synthetic peptide
GCQGFFNMP

SEQ ID NO: 41668 - protein, 9 aa, Artificial Sequence
  Description of Artificial Sequence: Synthetic peptide
GDAALYNWF

SEQ ID NO: 41669 - protein, 9 aa, Artificial Sequence
  Description of Artificial Sequence: Synthetic peptide
GDGSWDNLF

SEQ ID NO: 41670 - protein, 9 aa, Artificial Sequence
  Description of Artificial Sequence: Synthetic peptide
GDSSLDNLF

SEQ ID NO: 41671 - protein, 9 aa, Artificial Sequence
  Description of Artificial Sequence: Synthetic peptide
GDSSWDNVF

SEQ ID NO: 41672 - protein, 9 aa, Artificial Sequence
  Description of Artificial Sequence: Synthetic peptide
GDSVLYNWF

SEQ ID NO: 41673 - protein, 9 aa, Artificial Sequence
  Description of Artificial Sequence: Synthetic peptide
GDTSWDNLF

SEQ ID NO: 41674 - protein, 9 aa, Artificial Sequence
  Description of Artificial Sequence: Synthetic peptide
GELKMGHNI

SEQ ID NO: 41675 - protein, 9 aa, Artificial Sequence
  Description of Artificial Sequence: Synthetic peptide
GFTVDGNNR

SEQ ID NO: 41676 - protein, 9 aa, Artificial Sequence
  Description of Artificial Sequence: Synthetic peptide
GGPKAANDW

SEQ ID NO: 41677 - protein, 9 aa, Artificial Sequence
  Description of Artificial Sequence: Synthetic peptide
GIHHWCNIF

SEQ ID NO: 41678 - protein, 9 aa, Artificial Sequence
  Description of Artificial Sequence: Synthetic peptide
GKMVMVFKR

SEQ ID NO: 41679 - protein, 9 aa, Artificial Sequence
  Description of Artificial Sequence: Synthetic peptide
GMRGDKRNR

SEQ ID NO: 41680 - protein, 9 aa, Artificial Sequence
  Description of Artificial Sequence: Synthetic peptide
GRFMVMNSC

SEQ ID NO: 41681 - protein, 9 aa, Artificial Sequence
  Description of Artificial Sequence: Synthetic peptide
GSSWPLLWN

SEQ ID NO: 41682 - protein, 9 aa, Artificial Sequence
  Description of Artificial Sequence: Synthetic peptide
GSYHWTHAG

SEQ ID NO: 41683 - protein, 9 aa, Artificial Sequence
  Description of Artificial Sequence: Synthetic peptide
GTADCRNSS

SEQ ID NO: 41684 - protein, 9 aa, Artificial Sequence
  Description of Artificial Sequence: Synthetic peptide
GTGEWMHMA

SEQ ID NO: 41685 - protein, 9 aa, Artificial Sequence
  Description of Artificial Sequence: Synthetic peptide
GVAKAANDW

SEQ ID NO: 41686 - protein, 9 aa, Artificial Sequence
  Description of Artificial Sequence: Synthetic peptide
GVNVDGNNR

SEQ ID NO: 41687 - protein, 9 aa, Artificial Sequence
  Description of Artificial Sequence: Synthetic peptide
GVPKAANDL

SEQ ID NO: 41688 - protein, 9 aa, Artificial Sequence
  Description of Artificial Sequence: Synthetic peptide
GVPRAANDW

SEQ ID NO: 41689 - protein, 9 aa, Artificial Sequence
  Description of Artificial Sequence: Synthetic peptide
GVPVDGNNR

SEQ ID NO: 41690 - protein, 9 aa, Artificial Sequence
  Description of Artificial Sequence: Synthetic peptide
GVSVDGNNR

SEQ ID NO: 41691 - protein, 9 aa, Artificial Sequence
  Description of Artificial Sequence: Synthetic peptide
GVTGDGNNR

SEQ ID NO: 41692 - protein, 9 aa, Artificial Sequence
  Description of Artificial Sequence: Synthetic peptide
GVTIDGNNR

SEQ ID NO: 41693 - protein, 9 aa, Artificial Sequence
  Description of Artificial Sequence: Synthetic peptide
GVTLDGNNR

SEQ ID NO: 41694 - protein, 9 aa, Artificial Sequence
  Description of Artificial Sequence: Synthetic peptide
GVTVDANNR

SEQ ID NO: 41695 - protein, 9 aa, Artificial Sequence
  Description of Artificial Sequence: Synthetic peptide
GVTVDGNDR

SEQ ID NO: 41696 - protein, 9 aa, Artificial Sequence
  Description of Artificial Sequence: Synthetic peptide
GWMDCSIMC

SEQ ID NO: 41697 - protein, 9 aa, Artificial Sequence
  Description of Artificial Sequence: Synthetic peptide
GYLINMLLM

SEQ ID NO: 41698 - protein, 9 aa, Artificial Sequence
  Description of Artificial Sequence: Synthetic peptide
GYLISMLWM

SEQ ID NO: 41699 - protein, 9 aa, Artificial Sequence
  Description of Artificial Sequence: Synthetic peptide
GYLIYMLWM

SEQ ID NO: 41700 - protein, 9 aa, Artificial Sequence
  Description of Artificial Sequence: Synthetic peptide
GYLTNMLWM

SEQ ID NO: 41701 - protein, 9 aa, Artificial Sequence
  Description of Artificial Sequence: Synthetic peptide
GYRINMLWM

SEQ ID NO: 41702 - protein, 9 aa, Artificial Sequence
  Description of Artificial Sequence: Synthetic peptide
HAGSGSNVL

SEQ ID NO: 41703 - protein, 9 aa, Artificial Sequence
  Description of Artificial Sequence: Synthetic peptide
HAGTGSNVL

SEQ ID NO: 41704 - protein, 9 aa, Artificial Sequence
  Description of Artificial Sequence: Synthetic peptide
HHICFQHCK

SEQ ID NO: 41705 - protein, 9 aa, Artificial Sequence
  Description of Artificial Sequence: Synthetic peptide
HIHHWCNIF

SEQ ID NO: 41706 - protein, 9 aa, Artificial Sequence
  Description of Artificial Sequence: Synthetic peptide
HKISLFKVN

SEQ ID NO: 41707 - protein, 9 aa, Artificial Sequence
  Description of Artificial Sequence: Synthetic peptide
HNLMGWYGP

SEQ ID NO: 41708 - protein, 9 aa, Artificial Sequence
  Description of Artificial Sequence: Synthetic peptide
HQTLDMERF

SEQ ID NO: 41709 - protein, 9 aa, Artificial Sequence
  Description of Artificial Sequence: Synthetic peptide
HQTLDMKKF

SEQ ID NO: 41710 - protein, 9 aa, Artificial Sequence
  Description of Artificial Sequence: Synthetic peptide
HQTLDMKRV

SEQ ID NO: 41711 - protein, 9 aa, Artificial Sequence
  Description of Artificial Sequence: Synthetic peptide
HRCFRDDME

SEQ ID NO: 41712 - protein, 9 aa, Artificial Sequence
  Description of Artificial Sequence: Synthetic peptide
HSAYFRVGA

SEQ ID NO: 41713 - protein, 9 aa, Artificial Sequence
  Description of Artificial Sequence: Synthetic peptide
HTGPGSNVL

SEQ ID NO: 41714 - protein, 9 aa, Artificial Sequence
  Description of Artificial Sequence: Synthetic peptide
HVEYVIWPG

SEQ ID NO: 41715 - protein, 9 aa, Artificial Sequence
  Description of Artificial Sequence: Synthetic peptide
HVEYVIWPV

SEQ ID NO: 41716 - protein, 9 aa, Artificial Sequence
  Description of Artificial Sequence: Synthetic peptide
HVKYVIWPD

SEQ ID NO: 41717 - protein, 9 aa, Artificial Sequence
  Description of Artificial Sequence: Synthetic peptide
HWISFERHP

SEQ ID NO: 41718 - protein, 9 aa, Artificial Sequence
  Description of Artificial Sequence: Synthetic peptide
HYEICHISK

SEQ ID NO: 41719 - protein, 9 aa, Artificial Sequence
  Description of Artificial Sequence: Synthetic peptide
IADIVWQGQ

SEQ ID NO: 41720 - protein, 9 aa, Artificial Sequence
  Description of Artificial Sequence: Synthetic peptide
IAHPFKCGG

SEQ ID NO: 41721 - protein, 9 aa, Artificial Sequence
  Description of Artificial Sequence: Synthetic peptide
ICAIANTCN

SEQ ID NO: 41722 - protein, 9 aa, Artificial Sequence
  Description of Artificial Sequence: Synthetic peptide
IDDDNWEQP

SEQ ID NO: 41723 - protein, 9 aa, Artificial Sequence
  Description of Artificial Sequence: Synthetic peptide
IDDGDDNIP

SEQ ID NO: 41724 - protein, 9 aa, Artificial Sequence
  Description of Artificial Sequence: Synthetic peptide
IEIALHACW

SEQ ID NO: 41725 - protein, 9 aa, Artificial Sequence
  Description of Artificial Sequence: Synthetic peptide
IFAAPMPGM

SEQ ID NO: 41726 - protein, 9 aa, Artificial Sequence
  Description of Artificial Sequence: Synthetic peptide
IFHSNPVVR

SEQ ID NO: 41727 - protein, 9 aa, Artificial Sequence
  Description of Artificial Sequence: Synthetic peptide
IFHSTPIVR

SEQ ID NO: 41728 - protein, 9 aa, Artificial Sequence
  Description of Artificial Sequence: Synthetic peptide
IFVAPMPGR

SEQ ID NO: 41729 - protein, 9 aa, Artificial Sequence
  Description of Artificial Sequence: Synthetic peptide
IFVASMPGM

SEQ ID NO: 41730 - protein, 9 aa, Artificial Sequence
  Description of Artificial Sequence: Synthetic peptide
IFWMKCGWR

SEQ ID NO: 41731 - protein, 9 aa, Artificial Sequence
  Description of Artificial Sequence: Synthetic peptide
IGNRNVNRP

SEQ ID NO: 41732 - protein, 9 aa, Artificial Sequence
  Description of Artificial Sequence: Synthetic peptide
IINWLYNEP

SEQ ID NO: 41733 - protein, 9 aa, Artificial Sequence
  Description of Artificial Sequence: Synthetic peptide
IISIRMYQA

SEQ ID NO: 41734 - protein, 9 aa, Artificial Sequence
  Description of Artificial Sequence: Synthetic peptide
IKFWTDNTD

SEQ ID NO: 41735 - protein, 9 aa, Artificial Sequence
  Description of Artificial Sequence: Synthetic peptide
IMIEFAYMD

SEQ ID NO: 41736 - protein, 9 aa, Artificial Sequence
  Description of Artificial Sequence: Synthetic peptide
IMLEFAYMD

SEQ ID NO: 41737 - protein, 9 aa, Artificial Sequence
  Description of Artificial Sequence: Synthetic peptide
IMVEFADMD

SEQ ID NO: 41738 - protein, 9 aa, Artificial Sequence
  Description of Artificial Sequence: Synthetic peptide
IMVEFSYMD

SEQ ID NO: 41739 - protein, 9 aa, Artificial Sequence
  Description of Artificial Sequence: Synthetic peptide
IMVEFTYMD

SEQ ID NO: 41740 - protein, 9 aa, Artificial Sequence
  Description of Artificial Sequence: Synthetic peptide
INDCCTMPD

SEQ ID NO: 41741 - protein, 9 aa, Artificial Sequence
  Description of Artificial Sequence: Synthetic peptide
INDCCTMSD

SEQ ID NO: 41742 - protein, 9 aa, Artificial Sequence
  Description of Artificial Sequence: Synthetic peptide
INVPDILGA

SEQ ID NO: 41743 - protein, 9 aa, Artificial Sequence
  Description of Artificial Sequence: Synthetic peptide
INVPDLLGG

SEQ ID NO: 41744 - protein, 9 aa, Artificial Sequence
  Description of Artificial Sequence: Synthetic peptide
INVPDLLGS

SEQ ID NO: 41745 - protein, 9 aa, Artificial Sequence
  Description of Artificial Sequence: Synthetic peptide
IPKFCKCSS

SEQ ID NO: 41746 - protein, 9 aa, Artificial Sequence
  Description of Artificial Sequence: Synthetic peptide
IPKVCKCIS

SEQ ID NO: 41747 - protein, 9 aa, Artificial Sequence
  Description of Artificial Sequence: Synthetic peptide
IPQFCKCIS

SEQ ID NO: 41748 - protein, 9 aa, Artificial Sequence
  Description of Artificial Sequence: Synthetic peptide
IPWEYAMND

SEQ ID NO: 41749 - protein, 9 aa, Artificial Sequence
  Description of Artificial Sequence: Synthetic peptide
IPWPYAMND

SEQ ID NO: 41750 - protein, 9 aa, Artificial Sequence
  Description of Artificial Sequence: Synthetic peptide
ISDCFTCAD

SEQ ID NO: 41751 - protein, 9 aa, Artificial Sequence
  Description of Artificial Sequence: Synthetic peptide
ISGMKSAMA

SEQ ID NO: 41752 - protein, 9 aa, Artificial Sequence
  Description of Artificial Sequence: Synthetic peptide
ITETPGNTH

SEQ ID NO: 41753 - protein, 9 aa, Artificial Sequence
  Description of Artificial Sequence: Synthetic peptide
ITGAKMYMG

SEQ ID NO: 41754 - protein, 9 aa, Artificial Sequence
  Description of Artificial Sequence: Synthetic peptide
ITGAMMHMG

SEQ ID NO: 41755 - protein, 9 aa, Artificial Sequence
  Description of Artificial Sequence: Synthetic peptide
ITGATMYMG

SEQ ID NO: 41756 - protein, 9 aa, Artificial Sequence
  Description of Artificial Sequence: Synthetic peptide
ITGIRMYQA

SEQ ID NO: 41757 - protein, 9 aa, Artificial Sequence
  Description of Artificial Sequence: Synthetic peptide
ITSIGMYQA

SEQ ID NO: 41758 - protein, 9 aa, Artificial Sequence
  Description of Artificial Sequence: Synthetic peptide
ITSIRMDQA

SEQ ID NO: 41759 - protein, 9 aa, Artificial Sequence
  Description of Artificial Sequence: Synthetic peptide
ITSIRMFQA

SEQ ID NO: 41760 - protein, 9 aa, Artificial Sequence
  Description of Artificial Sequence: Synthetic peptide
ITSIRMYKA

SEQ ID NO: 41761 - protein, 9 aa, Artificial Sequence
  Description of Artificial Sequence: Synthetic peptide
ITSIRMYRA

SEQ ID NO: 41762 - protein, 9 aa, Artificial Sequence
  Description of Artificial Sequence: Synthetic peptide
ITSIWMYQA

SEQ ID NO: 41763 - protein, 9 aa, Artificial Sequence
  Description of Artificial Sequence: Synthetic peptide
ITSLRMYQA

SEQ ID NO: 41764 - protein, 9 aa, Artificial Sequence
  Description of Artificial Sequence: Synthetic peptide
ITSNRMYQA

SEQ ID NO: 41765 - protein, 9 aa, Artificial Sequence
  Description of Artificial Sequence: Synthetic peptide
IVGADRCQA

SEQ ID NO: 41766 - protein, 9 aa, Artificial Sequence
  Description of Artificial Sequence: Synthetic peptide
IVNACMAEK

SEQ ID NO: 41767 - protein, 9 aa, Artificial Sequence
  Description of Artificial Sequence: Synthetic peptide
IVQSFWNIP

SEQ ID NO: 41768 - protein, 9 aa, Artificial Sequence
  Description of Artificial Sequence: Synthetic peptide
IVVAVNQSL

SEQ ID NO: 41769 - protein, 9 aa, Artificial Sequence
  Description of Artificial Sequence: Synthetic peptide
IWDFKCNQC

SEQ ID NO: 41770 - protein, 9 aa, Artificial Sequence
  Description of Artificial Sequence: Synthetic peptide
IWEDYLHVG

SEQ ID NO: 41771 - protein, 9 aa, Artificial Sequence
  Description of Artificial Sequence: Synthetic peptide
IWKDYLHMG

SEQ ID NO: 41772 - protein, 9 aa, Artificial Sequence
  Description of Artificial Sequence: Synthetic peptide
IWKDYLHVA

SEQ ID NO: 41773 - protein, 9 aa, Artificial Sequence
  Description of Artificial Sequence: Synthetic peptide
IWKDYLYVG

SEQ ID NO: 41774 - protein, 9 aa, Artificial Sequence
  Description of Artificial Sequence: Synthetic peptide
IYEERNAQM

SEQ ID NO: 41775 - protein, 9 aa, Artificial Sequence
  Description of Artificial Sequence: Synthetic peptide
IYICGPMIN

SEQ ID NO: 41776 - protein, 9 aa, Artificial Sequence
  Description of Artificial Sequence: Synthetic peptide
IYIREPMIN

SEQ ID NO: 41777 - protein, 9 aa, Artificial Sequence
  Description of Artificial Sequence: Synthetic peptide
IYIRGPMLN

SEQ ID NO: 41778 - protein, 9 aa, Artificial Sequence
  Description of Artificial Sequence: Synthetic peptide
IYIRVPMIN

SEQ ID NO: 41779 - protein, 9 aa, Artificial Sequence
  Description of Artificial Sequence: Synthetic peptide
IYLRGPMIN

SEQ ID NO: 41780 - protein, 9 aa, Artificial Sequence
  Description of Artificial Sequence: Synthetic peptide
IYRLREKQE

SEQ ID NO: 41781 - protein, 9 aa, Artificial Sequence
  Description of Artificial Sequence: Synthetic peptide
IYTRGPMIN

SEQ ID NO: 41782 - protein, 9 aa, Artificial Sequence
  Description of Artificial Sequence: Synthetic peptide
IYVRGPMIN

SEQ ID NO: 41783 - protein, 9 aa, Artificial Sequence
  Description of Artificial Sequence: Synthetic peptide
KAFGWFHFD

SEQ ID NO: 41784 - protein, 9 aa, Artificial Sequence
  Description of Artificial Sequence: Synthetic peptide
KAIGWFHFH

SEQ ID NO: 41785 - protein, 9 aa, Artificial Sequence
  Description of Artificial Sequence: Synthetic peptide
KAIGWFHFN

SEQ ID NO: 41786 - protein, 9 aa, Artificial Sequence
  Description of Artificial Sequence: Synthetic peptide
KAIGWFYFD

SEQ ID NO: 41787 - protein, 9 aa, Artificial Sequence
  Description of Artificial Sequence: Synthetic peptide
KALGWFHFD

SEQ ID NO: 41788 - protein, 9 aa, Artificial Sequence
  Description of Artificial Sequence: Synthetic peptide
KAMGWFHFD

SEQ ID NO: 41789 - protein, 9 aa, Artificial Sequence
  Description of Artificial Sequence: Synthetic peptide
KAVAVNQSL

SEQ ID NO: 41790 - protein, 9 aa, Artificial Sequence
  Description of Artificial Sequence: Synthetic peptide
KDAGDDNIP

SEQ ID NO: 41791 - protein, 9 aa, Artificial Sequence
  Description of Artificial Sequence: Synthetic peptide
KDDADDNIP

SEQ ID NO: 41792 - protein, 9 aa, Artificial Sequence
  Description of Artificial Sequence: Synthetic peptide
KDDGDDNIL

SEQ ID NO: 41793 - protein, 9 aa, Artificial Sequence
  Description of Artificial Sequence: Synthetic peptide
KDDGDDNIQ

SEQ ID NO: 41794 - protein, 9 aa, Artificial Sequence
  Description of Artificial Sequence: Synthetic peptide
KDDGDNNIP

SEQ ID NO: 41795 - protein, 9 aa, Artificial Sequence
  Description of Artificial Sequence: Synthetic peptide
KDDGGDNIP

SEQ ID NO: 41796 - protein, 9 aa, Artificial Sequence
  Description of Artificial Sequence: Synthetic peptide
KDGGDDNIP

SEQ ID NO: 41797 - protein, 9 aa, Artificial Sequence
  Description of Artificial Sequence: Synthetic peptide
KDNGDDNIP

SEQ ID NO: 41798 - protein, 9 aa, Artificial Sequence
  Description of Artificial Sequence: Synthetic peptide
KDRMLAGQR

SEQ ID NO: 41799 - protein, 9 aa, Artificial Sequence
  Description of Artificial Sequence: Synthetic peptide
KDSHVHSFF

SEQ ID NO: 41800 - protein, 9 aa, Artificial Sequence
  Description of Artificial Sequence: Synthetic peptide
KDYGDDNIP

SEQ ID NO: 41801 - protein, 9 aa, Artificial Sequence
  Description of Artificial Sequence: Synthetic peptide
KECDPQHWW

SEQ ID NO: 41802 - protein, 9 aa, Artificial Sequence
  Description of Artificial Sequence: Synthetic peptide
KEMRKQGMW

SEQ ID NO: 41803 - protein, 9 aa, Artificial Sequence
  Description of Artificial Sequence: Synthetic peptide
KEYAPQHWW

SEQ ID NO: 41804 - protein, 9 aa, Artificial Sequence
  Description of Artificial Sequence: Synthetic peptide
KEYDLQHWW

SEQ ID NO: 41805 - protein, 9 aa, Artificial Sequence
  Description of Artificial Sequence: Synthetic peptide
KEYDPEHWW

SEQ ID NO: 41806 - protein, 9 aa, Artificial Sequence
  Description of Artificial Sequence: Synthetic peptide
KEYDPQNWW

SEQ ID NO: 41807 - protein, 9 aa, Artificial Sequence
  Description of Artificial Sequence: Synthetic peptide
KEYDPQYWW

SEQ ID NO: 41808 - protein, 9 aa, Artificial Sequence
  Description of Artificial Sequence: Synthetic peptide
KEYDPRHWW

SEQ ID NO: 41809 - protein, 9 aa, Artificial Sequence
  Description of Artificial Sequence: Synthetic peptide
KFSGYTNQE

SEQ ID NO: 41810 - protein, 9 aa, Artificial Sequence
  Description of Artificial Sequence: Synthetic peptide
KFYNYEIMA

SEQ ID NO: 41811 - protein, 9 aa, Artificial Sequence
  Description of Artificial Sequence: Synthetic peptide
KGRWMYHWW

SEQ ID NO: 41812 - protein, 9 aa, Artificial Sequence
  Description of Artificial Sequence: Synthetic peptide
KHCHWWYKL

SEQ ID NO: 41813 - protein, 9 aa, Artificial Sequence
  Description of Artificial Sequence: Synthetic peptide
KIEMLCCPG

SEQ ID NO: 41814 - protein, 9 aa, Artificial Sequence
  Description of Artificial Sequence: Synthetic peptide
KIEMLCCQR

SEQ ID NO: 41815 - protein, 9 aa, Artificial Sequence
  Description of Artificial Sequence: Synthetic peptide
KIEMLCCQV

SEQ ID NO: 41816 - protein, 9 aa, Artificial Sequence
  Description of Artificial Sequence: Synthetic peptide
KIHQDMFEC

SEQ ID NO: 41817 - protein, 9 aa, Artificial Sequence
  Description of Artificial Sequence: Synthetic peptide
KIKMLCCQG

SEQ ID NO: 41818 - protein, 9 aa, Artificial Sequence
  Description of Artificial Sequence: Synthetic peptide
KIMWWQWDR

SEQ ID NO: 41819 - protein, 9 aa, Artificial Sequence
  Description of Artificial Sequence: Synthetic peptide
KKRRDTHIY

SEQ ID NO: 41820 - protein, 9 aa, Artificial Sequence
  Description of Artificial Sequence: Synthetic peptide
KLEMLCCQG

SEQ ID NO: 41821 - protein, 9 aa, Artificial Sequence
  Description of Artificial Sequence: Synthetic peptide
KLYGRRHWH

SEQ ID NO: 41822 - protein, 9 aa, Artificial Sequence
  Description of Artificial Sequence: Synthetic peptide
KMQNENRQM

SEQ ID NO: 41823 - protein, 9 aa, Artificial Sequence
  Description of Artificial Sequence: Synthetic peptide
KNDGDDNIP

SEQ ID NO: 41824 - protein, 9 aa, Artificial Sequence
  Description of Artificial Sequence: Synthetic peptide
KPEWTMMYD

SEQ ID NO: 41825 - protein, 9 aa, Artificial Sequence
  Description of Artificial Sequence: Synthetic peptide
KPQWAMMYD

SEQ ID NO: 41826 - protein, 9 aa, Artificial Sequence
  Description of Artificial Sequence: Synthetic peptide
KPYEDIARM

SEQ ID NO: 41827 - protein, 9 aa, Artificial Sequence
  Description of Artificial Sequence: Synthetic peptide
KQEMQGVCR

SEQ ID NO: 41828 - protein, 9 aa, Artificial Sequence
  Description of Artificial Sequence: Synthetic peptide
KQYDPQHWW

SEQ ID NO: 41829 - protein, 9 aa, Artificial Sequence
  Description of Artificial Sequence: Synthetic peptide
KRETLAMDR

SEQ ID NO: 41830 - protein, 9 aa, Artificial Sequence
  Description of Artificial Sequence: Synthetic peptide
KRFMVMNSC

SEQ ID NO: 41831 - protein, 9 aa, Artificial Sequence
  Description of Artificial Sequence: Synthetic peptide
KRHGFNHCN

SEQ ID NO: 41832 - protein, 9 aa, Artificial Sequence
  Description of Artificial Sequence: Synthetic peptide
KSFYMCQCG

SEQ ID NO: 41833 - protein, 9 aa, Artificial Sequence
  Description of Artificial Sequence: Synthetic peptide
KSFYMCRCA

SEQ ID NO: 41834 - protein, 9 aa, Artificial Sequence
  Description of Artificial Sequence: Synthetic peptide
KSFYMFRCG

SEQ ID NO: 41835 - protein, 9 aa, Artificial Sequence
  Description of Artificial Sequence: Synthetic peptide
KSSMLEHSW

SEQ ID NO: 41836 - protein, 9 aa, Artificial Sequence
  Description of Artificial Sequence: Synthetic peptide
KSTMCDNDA

SEQ ID NO: 41837 - protein, 9 aa, Artificial Sequence
  Description of Artificial Sequence: Synthetic peptide
KTEMSDMNW

SEQ ID NO: 41838 - protein, 9 aa, Artificial Sequence
  Description of Artificial Sequence: Synthetic peptide
KTEMSDMYW

SEQ ID NO: 41839 - protein, 9 aa, Artificial Sequence
  Description of Artificial Sequence: Synthetic peptide
KTYVWEHES

SEQ ID NO: 41840 - protein, 9 aa, Artificial Sequence
  Description of Artificial Sequence: Synthetic peptide
KVLICQNGQ

SEQ ID NO: 41841 - protein, 9 aa, Artificial Sequence
  Description of Artificial Sequence: Synthetic peptide
KVVAVDQSL

SEQ ID NO: 41842 - protein, 9 aa, Artificial Sequence
  Description of Artificial Sequence: Synthetic peptide
KVVAVNRSL

SEQ ID NO: 41843 - protein, 9 aa, Artificial Sequence
  Description of Artificial Sequence: Synthetic peptide
KWEQEPNRN

SEQ ID NO: 41844 - protein, 9 aa, Artificial Sequence
  Description of Artificial Sequence: Synthetic peptide
KWRQAEYDE

SEQ ID NO: 41845 - protein, 9 aa, Artificial Sequence
  Description of Artificial Sequence: Synthetic peptide
KWTRTGSSF

SEQ ID NO: 41846 - protein, 9 aa, Artificial Sequence
  Description of Artificial Sequence: Synthetic peptide
KYCHWWYRL

SEQ ID NO: 41847 - protein, 9 aa, Artificial Sequence
  Description of Artificial Sequence: Synthetic peptide
KYCLWWYKL

SEQ ID NO: 41848 - protein, 9 aa, Artificial Sequence
  Description of Artificial Sequence: Synthetic peptide
KYCNWWYKL

SEQ ID NO: 41849 - protein, 9 aa, Artificial Sequence
  Description of Artificial Sequence: Synthetic peptide
KYRHWWYKL

SEQ ID NO: 41850 - protein, 9 aa, Artificial Sequence
  Description of Artificial Sequence: Synthetic peptide
KYWHWWYKL

SEQ ID NO: 41851 - protein, 9 aa, Artificial Sequence
  Description of Artificial Sequence: Synthetic peptide
LAETPGNTH

SEQ ID NO: 41852 - protein, 9 aa, Artificial Sequence
  Description of Artificial Sequence: Synthetic peptide
LAIALHACW

SEQ ID NO: 41853 - protein, 9 aa, Artificial Sequence
  Description of Artificial Sequence: Synthetic peptide
LAIPQPVNG

SEQ ID NO: 41854 - protein, 9 aa, Artificial Sequence
  Description of Artificial Sequence: Synthetic peptide
LATTMQGFN

SEQ ID NO: 41855 - protein, 9 aa, Artificial Sequence
  Description of Artificial Sequence: Synthetic peptide
LATTMQPFN

SEQ ID NO: 41856 - protein, 9 aa, Artificial Sequence
  Description of Artificial Sequence: Synthetic peptide
LATTMRAFN

SEQ ID NO: 41857 - protein, 9 aa, Artificial Sequence
  Description of Artificial Sequence: Synthetic peptide
LCAEFPHCR

SEQ ID NO: 41858 - protein, 9 aa, Artificial Sequence
  Description of Artificial Sequence: Synthetic peptide
LCAEYPHGR

SEQ ID NO: 41859 - protein, 9 aa, Artificial Sequence
  Description of Artificial Sequence: Synthetic peptide
LCTEFPHGR

SEQ ID NO: 41860 - protein, 9 aa, Artificial Sequence
  Description of Artificial Sequence: Synthetic peptide
LDALPMTQA

SEQ ID NO: 41861 - protein, 9 aa, Artificial Sequence
  Description of Artificial Sequence: Synthetic peptide
LEIAMHACW

SEQ ID NO: 41862 - protein, 9 aa, Artificial Sequence
  Description of Artificial Sequence: Synthetic peptide
LEINWWYPG

SEQ ID NO: 41863 - protein, 9 aa, Artificial Sequence
  Description of Artificial Sequence: Synthetic peptide
LELALHACW

SEQ ID NO: 41864 - protein, 9 aa, Artificial Sequence
  Description of Artificial Sequence: Synthetic peptide
LELNWWYPG

SEQ ID NO: 41865 - protein, 9 aa, Artificial Sequence
  Description of Artificial Sequence: Synthetic peptide
LEVNWWFPG

SEQ ID NO: 41866 - protein, 9 aa, Artificial Sequence
  Description of Artificial Sequence: Synthetic peptide
LEVNWWYAG

SEQ ID NO: 41867 - protein, 9 aa, Artificial Sequence
  Description of Artificial Sequence: Synthetic peptide
LEVNWWYPA

SEQ ID NO: 41868 - protein, 9 aa, Artificial Sequence
  Description of Artificial Sequence: Synthetic peptide
LEVNWWYPV

SEQ ID NO: 41869 - protein, 9 aa, Artificial Sequence
  Description of Artificial Sequence: Synthetic peptide
LEVNWWYQG

SEQ ID NO: 41870 - protein, 9 aa, Artificial Sequence
  Description of Artificial Sequence: Synthetic peptide
LFAEFPHGR

SEQ ID NO: 41871 - protein, 9 aa, Artificial Sequence
  Description of Artificial Sequence: Synthetic peptide
LFTAFRKFT

SEQ ID NO: 41872 - protein, 9 aa, Artificial Sequence
  Description of Artificial Sequence: Synthetic peptide
LFTAFRQFA

SEQ ID NO: 41873 - protein, 9 aa, Artificial Sequence
  Description of Artificial Sequence: Synthetic peptide
LFTAFRQFN

SEQ ID NO: 41874 - protein, 9 aa, Artificial Sequence
  Description of Artificial Sequence: Synthetic peptide
LFWMKCGWR

SEQ ID NO: 41875 - protein, 9 aa, Artificial Sequence
  Description of Artificial Sequence: Synthetic peptide
LGDYVNDEG

SEQ ID NO: 41876 - protein, 9 aa, Artificial Sequence
  Description of Artificial Sequence: Synthetic peptide
LGERTMDRI

SEQ ID NO: 41877 - protein, 9 aa, Artificial Sequence
  Description of Artificial Sequence: Synthetic peptide
LHTIDANRR

SEQ ID NO: 41878 - protein, 9 aa, Artificial Sequence
  Description of Artificial Sequence: Synthetic peptide
LIMRIPPFD

SEQ ID NO: 41879 - protein, 9 aa, Artificial Sequence
  Description of Artificial Sequence: Synthetic peptide
LIMRISSFD

SEQ ID NO: 41880 - protein, 9 aa, Artificial Sequence
  Description of Artificial Sequence: Synthetic peptide
LIMRLSPFD

SEQ ID NO: 41881 - protein, 9 aa, Artificial Sequence
  Description of Artificial Sequence: Synthetic peptide
LIVRISPFD

SEQ ID NO: 41882 - protein, 9 aa, Artificial Sequence
  Description of Artificial Sequence: Synthetic peptide
LKNTMWKCA

SEQ ID NO: 41883 - protein, 9 aa, Artificial Sequence
  Description of Artificial Sequence: Synthetic peptide
LKSCIQFSC

SEQ ID NO: 41884 - protein, 9 aa, Artificial Sequence
  Description of Artificial Sequence: Synthetic peptide
LKVNWWYPG

SEQ ID NO: 41885 - protein, 9 aa, Artificial Sequence
  Description of Artificial Sequence: Synthetic peptide
LLKFIHLNE

SEQ ID NO: 41886 - protein, 9 aa, Artificial Sequence
  Description of Artificial Sequence: Synthetic peptide
LLKIYESNQ

SEQ ID NO: 41887 - protein, 9 aa, Artificial Sequence
  Description of Artificial Sequence: Synthetic peptide
LMEFTEDCN

SEQ ID NO: 41888 - protein, 9 aa, Artificial Sequence
  Description of Artificial Sequence: Synthetic peptide
LMEFTEDGD

SEQ ID NO: 41889 - protein, 9 aa, Artificial Sequence
  Description of Artificial Sequence: Synthetic peptide
LMEFTEDGS

SEQ ID NO: 41890 - protein, 9 aa, Artificial Sequence
  Description of Artificial Sequence: Synthetic peptide
LMEFTEEGN

SEQ ID NO: 41891 - protein, 9 aa, Artificial Sequence
  Description of Artificial Sequence: Synthetic peptide
LMEITEDGN

SEQ ID NO: 41892 - protein, 9 aa, Artificial Sequence
  Description of Artificial Sequence: Synthetic peptide
LMEPYGNCD

SEQ ID NO: 41893 - protein, 9 aa, Artificial Sequence
  Description of Artificial Sequence: Synthetic peptide
LMRGTVKNG

SEQ ID NO: 41894 - protein, 9 aa, Artificial Sequence
  Description of Artificial Sequence: Synthetic peptide
LMRSTVRNG

SEQ ID NO: 41895 - protein, 9 aa, Artificial Sequence
  Description of Artificial Sequence: Synthetic peptide
LMSCIKFSC

SEQ ID NO: 41896 - protein, 9 aa, Artificial Sequence
  Description of Artificial Sequence: Synthetic peptide
LMSCIPFSC

SEQ ID NO: 41897 - protein, 9 aa, Artificial Sequence
  Description of Artificial Sequence: Synthetic peptide
LMSCIQISC

SEQ ID NO: 41898 - protein, 9 aa, Artificial Sequence
  Description of Artificial Sequence: Synthetic peptide
LMSCLQFSC

SEQ ID NO: 41899 - protein, 9 aa, Artificial Sequence
  Description of Artificial Sequence: Synthetic peptide
LNGMKSAMA

SEQ ID NO: 41900 - protein, 9 aa, Artificial Sequence
  Description of Artificial Sequence: Synthetic peptide
LNVPDLLGA

SEQ ID NO: 41901 - protein, 9 aa, Artificial Sequence
  Description of Artificial Sequence: Synthetic peptide
LPKFCKCIS

SEQ ID NO: 41902 - protein, 9 aa, Artificial Sequence
  Description of Artificial Sequence: Synthetic peptide
LPRCFIAAC

SEQ ID NO: 41903 - protein, 9 aa, Artificial Sequence
  Description of Artificial Sequence: Synthetic peptide
LPRCVIAAY

SEQ ID NO: 41904 - protein, 9 aa, Artificial Sequence
  Description of Artificial Sequence: Synthetic peptide
LPRYVIAAC

SEQ ID NO: 41905 - protein, 9 aa, Artificial Sequence
  Description of Artificial Sequence: Synthetic peptide
LSCCANVFC

SEQ ID NO: 41906 - protein, 9 aa, Artificial Sequence
  Description of Artificial Sequence: Synthetic peptide
LSCCNNVFC

SEQ ID NO: 41907 - protein, 9 aa, Artificial Sequence
  Description of Artificial Sequence: Synthetic peptide
LSCCTNGFC

SEQ ID NO: 41908 - protein, 9 aa, Artificial Sequence
  Description of Artificial Sequence: Synthetic peptide
LSCCTNIFC

SEQ ID NO: 41909 - protein, 9 aa, Artificial Sequence
  Description of Artificial Sequence: Synthetic peptide
LSDFVNDEG

SEQ ID NO: 41910 - protein, 9 aa, Artificial Sequence
  Description of Artificial Sequence: Synthetic peptide
LSDHSQAAV

SEQ ID NO: 41911 - protein, 9 aa, Artificial Sequence
  Description of Artificial Sequence: Synthetic peptide
LSDYVNEEG

SEQ ID NO: 41912 - protein, 9 aa, Artificial Sequence
  Description of Artificial Sequence: Synthetic peptide
LSDYVNNEG

SEQ ID NO: 41913 - protein, 9 aa, Artificial Sequence
  Description of Artificial Sequence: Synthetic peptide
LSDYVTDEG

SEQ ID NO: 41914 - protein, 9 aa, Artificial Sequence
  Description of Artificial Sequence: Synthetic peptide
LSLSGITQL

SEQ ID NO: 41915 - protein, 9 aa, Artificial Sequence
  Description of Artificial Sequence: Synthetic peptide
LSSCRGMIA

SEQ ID NO: 41916 - protein, 9 aa, Artificial Sequence
  Description of Artificial Sequence: Synthetic peptide
LSYHTPVMA

SEQ ID NO: 41917 - protein, 9 aa, Artificial Sequence
  Description of Artificial Sequence: Synthetic peptide
LTAREKKCG

SEQ ID NO: 41918 - protein, 9 aa, Artificial Sequence
  Description of Artificial Sequence: Synthetic peptide
LTDYVNDEG

SEQ ID NO: 41919 - protein, 9 aa, Artificial Sequence
  Description of Artificial Sequence: Synthetic peptide
LTEIPGNTH

SEQ ID NO: 41920 - protein, 9 aa, Artificial Sequence
  Description of Artificial Sequence: Synthetic peptide
LTEKPGNTH

SEQ ID NO: 41921 - protein, 9 aa, Artificial Sequence
  Description of Artificial Sequence: Synthetic peptide
LTEPPGNTH

SEQ ID NO: 41922 - protein, 9 aa, Artificial Sequence
  Description of Artificial Sequence: Synthetic peptide
LTERPGNTH

SEQ ID NO: 41923 - protein, 9 aa, Artificial Sequence
  Description of Artificial Sequence: Synthetic peptide
LTETPGNTQ

SEQ ID NO: 41924 - protein, 9 aa, Artificial Sequence
  Description of Artificial Sequence: Synthetic peptide
LTQEDFTQM

SEQ ID NO: 41925 - protein, 9 aa, Artificial Sequence
  Description of Artificial Sequence: Synthetic peptide
LTQTPGNTH

SEQ ID NO: 41926 - protein, 9 aa, Artificial Sequence
  Description of Artificial Sequence: Synthetic peptide
LTRADFTQM

SEQ ID NO: 41927 - protein, 9 aa, Artificial Sequence
  Description of Artificial Sequence: Synthetic peptide
LTREDFAQM

SEQ ID NO: 41928 - protein, 9 aa, Artificial Sequence
  Description of Artificial Sequence: Synthetic peptide
LTREDFNQM

SEQ ID NO: 41929 - protein, 9 aa, Artificial Sequence
  Description of Artificial Sequence: Synthetic peptide
LTREDFSQM

SEQ ID NO: 41930 - protein, 9 aa, Artificial Sequence
  Description of Artificial Sequence: Synthetic peptide
LTREDITQM

SEQ ID NO: 41931 - protein, 9 aa, Artificial Sequence
  Description of Artificial Sequence: Synthetic peptide
LTRQDFTQM

SEQ ID NO: 41932 - protein, 9 aa, Artificial Sequence
  Description of Artificial Sequence: Synthetic peptide
LTRVDFTQM

SEQ ID NO: 41933 - protein, 9 aa, Artificial Sequence
  Description of Artificial Sequence: Synthetic peptide
LTSIRMYQA

SEQ ID NO: 41934 - protein, 9 aa, Artificial Sequence
  Description of Artificial Sequence: Synthetic peptide
LVGADRCQA

SEQ ID NO: 41935 - protein, 9 aa, Artificial Sequence
  Description of Artificial Sequence: Synthetic peptide
LWCNENAMA

SEQ ID NO: 41936 - protein, 9 aa, Artificial Sequence
  Description of Artificial Sequence: Synthetic peptide
LWCNENAME

SEQ ID NO: 41937 - protein, 9 aa, Artificial Sequence
  Description of Artificial Sequence: Synthetic peptide
LWCNENAMG

SEQ ID NO: 41938 - protein, 9 aa, Artificial Sequence
  Description of Artificial Sequence: Synthetic peptide
LWCNENAMN

SEQ ID NO: 41939 - protein, 9 aa, Artificial Sequence
  Description of Artificial Sequence: Synthetic peptide
LWCNENPMD

SEQ ID NO: 41940 - protein, 9 aa, Artificial Sequence
  Description of Artificial Sequence: Synthetic peptide
LWCTENAMD

SEQ ID NO: 41941 - protein, 9 aa, Artificial Sequence
  Description of Artificial Sequence: Synthetic peptide
LWDFKCTQC

SEQ ID NO: 41942 - protein, 9 aa, Artificial Sequence
  Description of Artificial Sequence: Synthetic peptide
LWGNENAMD

SEQ ID NO: 41943 - protein, 9 aa, Artificial Sequence
  Description of Artificial Sequence: Synthetic peptide
LYAERNAQM

SEQ ID NO: 41944 - protein, 9 aa, Artificial Sequence
  Description of Artificial Sequence: Synthetic peptide
LYEERHAQM

SEQ ID NO: 41945 - protein, 9 aa, Artificial Sequence
  Description of Artificial Sequence: Synthetic peptide
LYEERNSQM

SEQ ID NO: 41946 - protein, 9 aa, Artificial Sequence
  Description of Artificial Sequence: Synthetic peptide
LYEQRNAQM

SEQ ID NO: 41947 - protein, 9 aa, Artificial Sequence
  Description of Artificial Sequence: Synthetic peptide
LYHHDILQT

SEQ ID NO: 41948 - protein, 9 aa, Artificial Sequence
  Description of Artificial Sequence: Synthetic peptide
LYKERNAQM

SEQ ID NO: 41949 - protein, 9 aa, Artificial Sequence
  Description of Artificial Sequence: Synthetic peptide
LYQERNAQM

SEQ ID NO: 41950 - protein, 9 aa, Artificial Sequence
  Description of Artificial Sequence: Synthetic peptide
LYRWIVHNS

SEQ ID NO: 41951 - protein, 9 aa, Artificial Sequence
  Description of Artificial Sequence: Synthetic peptide
LYTEYITKH

SEQ ID NO: 41952 - protein, 9 aa, Artificial Sequence
  Description of Artificial Sequence: Synthetic peptide
LYYIAEHST

SEQ ID NO: 41953 - protein, 9 aa, Artificial Sequence
  Description of Artificial Sequence: Synthetic peptide
LYYIPEHST

SEQ ID NO: 41954 - protein, 9 aa, Artificial Sequence
  Description of Artificial Sequence: Synthetic peptide
MAGYLEKPF

SEQ ID NO: 41955 - protein, 9 aa, Artificial Sequence
  Description of Artificial Sequence: Synthetic peptide
MAVTQSHQF

SEQ ID NO: 41956 - protein, 9 aa, Artificial Sequence
  Description of Artificial Sequence: Synthetic peptide
MFVAPMPGM

SEQ ID NO: 41957 - protein, 9 aa, Artificial Sequence
  Description of Artificial Sequence: Synthetic peptide
MGAYIMWDC

SEQ ID NO: 41958 - protein, 9 aa, Artificial Sequence
  Description of Artificial Sequence: Synthetic peptide
MHVFSNVFG

SEQ ID NO: 41959 - protein, 9 aa, Artificial Sequence
  Description of Artificial Sequence: Synthetic peptide
MIANYEGEM

SEQ ID NO: 41960 - protein, 9 aa, Artificial Sequence
  Description of Artificial Sequence: Synthetic peptide
MIGNYEGEM

SEQ ID NO: 41961 - protein, 9 aa, Artificial Sequence
  Description of Artificial Sequence: Synthetic peptide
MIHLPFGKR

SEQ ID NO: 41962 - protein, 9 aa, Artificial Sequence
  Description of Artificial Sequence: Synthetic peptide
MIHLPFGQR

SEQ ID NO: 41963 - protein, 9 aa, Artificial Sequence
  Description of Artificial Sequence: Synthetic peptide
MIHMPFGER

SEQ ID NO: 41964 - protein, 9 aa, Artificial Sequence
  Description of Artificial Sequence: Synthetic peptide
MIVIYEGEM

SEQ ID NO: 41965 - protein, 9 aa, Artificial Sequence
  Description of Artificial Sequence: Synthetic peptide
MIVNYEGEV

SEQ ID NO: 41966 - protein, 9 aa, Artificial Sequence
  Description of Artificial Sequence: Synthetic peptide
MIVNYEGKM

SEQ ID NO: 41967 - protein, 9 aa, Artificial Sequence
  Description of Artificial Sequence: Synthetic peptide
MIVRCSNTW

SEQ ID NO: 41968 - protein, 9 aa, Artificial Sequence
  Description of Artificial Sequence: Synthetic peptide
MIVSYEGEM

SEQ ID NO: 41969 - protein, 9 aa, Artificial Sequence
  Description of Artificial Sequence: Synthetic peptide
MLEQEPNRN

SEQ ID NO: 41970 - protein, 9 aa, Artificial Sequence
  Description of Artificial Sequence: Synthetic peptide
MLFAENNGL

SEQ ID NO: 41971 - protein, 9 aa, Artificial Sequence
  Description of Artificial Sequence: Synthetic peptide
MSSMLEHAW

SEQ ID NO: 41972 - protein, 9 aa, Artificial Sequence
  Description of Artificial Sequence: Synthetic peptide
MSSMLERSW

SEQ ID NO: 41973 - protein, 9 aa, Artificial Sequence
  Description of Artificial Sequence: Synthetic peptide
MTARRESAY

SEQ ID NO: 41974 - protein, 9 aa, Artificial Sequence
  Description of Artificial Sequence: Synthetic peptide
MTARRESSY

SEQ ID NO: 41975 - protein, 9 aa, Artificial Sequence
  Description of Artificial Sequence: Synthetic peptide
MTARRESTS

SEQ ID NO: 41976 - protein, 9 aa, Artificial Sequence
  Description of Artificial Sequence: Synthetic peptide
MTARRGSTY

SEQ ID NO: 41977 - protein, 9 aa, Artificial Sequence
  Description of Artificial Sequence: Synthetic peptide
MWEKEPNRN

SEQ ID NO: 41978 - protein, 9 aa, Artificial Sequence
  Description of Artificial Sequence: Synthetic peptide
MWEQEANRN

SEQ ID NO: 41979 - protein, 9 aa, Artificial Sequence
  Description of Artificial Sequence: Synthetic peptide
MWEQEPNQN

SEQ ID NO: 41980 - protein, 9 aa, Artificial Sequence
  Description of Artificial Sequence: Synthetic peptide
MWFAANNGL

SEQ ID NO: 41981 - protein, 9 aa, Artificial Sequence
  Description of Artificial Sequence: Synthetic peptide
MWGWPGDSF

SEQ ID NO: 41982 - protein, 9 aa, Artificial Sequence
  Description of Artificial Sequence: Synthetic peptide
NAALYGGWI

SEQ ID NO: 41983 - protein, 9 aa, Artificial Sequence
  Description of Artificial Sequence: Synthetic peptide
NACTGTWWR

SEQ ID NO: 41984 - protein, 9 aa, Artificial Sequence
  Description of Artificial Sequence: Synthetic peptide
NAELFGGWI

SEQ ID NO: 41985 - protein, 9 aa, Artificial Sequence
  Description of Artificial Sequence: Synthetic peptide
NAELSGGWI

SEQ ID NO: 41986 - protein, 9 aa, Artificial Sequence
  Description of Artificial Sequence: Synthetic peptide
NAELYGGWV

SEQ ID NO: 41987 - protein, 9 aa, Artificial Sequence
  Description of Artificial Sequence: Synthetic peptide
NAEQYGGWI

SEQ ID NO: 41988 - protein, 9 aa, Artificial Sequence
  Description of Artificial Sequence: Synthetic peptide
NAEVYGGWI

SEQ ID NO: 41989 - protein, 9 aa, Artificial Sequence
  Description of Artificial Sequence: Synthetic peptide
NAGLYGGWI

SEQ ID NO: 41990 - protein, 9 aa, Artificial Sequence
  Description of Artificial Sequence: Synthetic peptide
NALVLQNVR

SEQ ID NO: 41991 - protein, 9 aa, Artificial Sequence
  Description of Artificial Sequence: Synthetic peptide
NANDMGSDR

SEQ ID NO: 41992 - protein, 9 aa, Artificial Sequence
  Description of Artificial Sequence: Synthetic peptide
NANDMSGDR

SEQ ID NO: 41993 - protein, 9 aa, Artificial Sequence
  Description of Artificial Sequence: Synthetic peptide
NANDMSSDH

SEQ ID NO: 41994 - protein, 9 aa, Artificial Sequence
  Description of Artificial Sequence: Synthetic peptide
NANDMSSNR

SEQ ID NO: 41995 - protein, 9 aa, Artificial Sequence
  Description of Artificial Sequence: Synthetic peptide
NANDMSSYR

SEQ ID NO: 41996 - protein, 9 aa, Artificial Sequence
  Description of Artificial Sequence: Synthetic peptide
NANVLSSDR

SEQ ID NO: 41997 - protein, 9 aa, Artificial Sequence
  Description of Artificial Sequence: Synthetic peptide
NANVMSSDR

SEQ ID NO: 41998 - protein, 9 aa, Artificial Sequence
  Description of Artificial Sequence: Synthetic peptide
NAQHAWENG

SEQ ID NO: 41999 - protein, 9 aa, Artificial Sequence
  Description of Artificial Sequence: Synthetic peptide
NAVLYGGWI

SEQ ID NO: 42000 - protein, 9 aa, Artificial Sequence
  Description of Artificial Sequence: Synthetic peptide
NAYENSHYP

SEQ ID NO: 42001 - protein, 9 aa, Artificial Sequence
  Description of Artificial Sequence: Synthetic peptide
NAYLVHIPR

SEQ ID NO: 42002 - protein, 9 aa, Artificial Sequence
  Description of Artificial Sequence: Synthetic peptide
NAYQCSHYP

SEQ ID NO: 42003 - protein, 9 aa, Artificial Sequence
  Description of Artificial Sequence: Synthetic peptide
NAYQNSNYP

SEQ ID NO: 42004 - protein, 9 aa, Artificial Sequence
  Description of Artificial Sequence: Synthetic peptide
NAYQTSHYP

SEQ ID NO: 42005 - protein, 9 aa, Artificial Sequence
  Description of Artificial Sequence: Synthetic peptide
NCALERMPS

SEQ ID NO: 42006 - protein, 9 aa, Artificial Sequence
  Description of Artificial Sequence: Synthetic peptide
NCAPARMPS

SEQ ID NO: 42007 - protein, 9 aa, Artificial Sequence
  Description of Artificial Sequence: Synthetic peptide
NCAQERMPS

SEQ ID NO: 42008 - protein, 9 aa, Artificial Sequence
  Description of Artificial Sequence: Synthetic peptide
NCLVNLCTY

SEQ ID NO: 42009 - protein, 9 aa, Artificial Sequence
  Description of Artificial Sequence: Synthetic peptide
NCPPERMPS

SEQ ID NO: 42010 - protein, 9 aa, Artificial Sequence
  Description of Artificial Sequence: Synthetic peptide
NCVVHLCTY

SEQ ID NO: 42011 - protein, 9 aa, Artificial Sequence
  Description of Artificial Sequence: Synthetic peptide
NCVVNLCKY

SEQ ID NO: 42012 - protein, 9 aa, Artificial Sequence
  Description of Artificial Sequence: Synthetic peptide
NCVVNPCTY

SEQ ID NO: 42013 - protein, 9 aa, Artificial Sequence
  Description of Artificial Sequence: Synthetic peptide
NEAPMGLKY

SEQ ID NO: 42014 - protein, 9 aa, Artificial Sequence
  Description of Artificial Sequence: Synthetic peptide
NEHPMGLKY

SEQ ID NO: 42015 - protein, 9 aa, Artificial Sequence
  Description of Artificial Sequence: Synthetic peptide
NERPMGLKY

SEQ ID NO: 42016 - protein, 9 aa, Artificial Sequence
  Description of Artificial Sequence: Synthetic peptide
NESPMGLKY

SEQ ID NO: 42017 - protein, 9 aa, Artificial Sequence
  Description of Artificial Sequence: Synthetic peptide
NFWDQVHCV

SEQ ID NO: 42018 - protein, 9 aa, Artificial Sequence
  Description of Artificial Sequence: Synthetic peptide
NFWNQVHCG

SEQ ID NO: 42019 - protein, 9 aa, Artificial Sequence
  Description of Artificial Sequence: Synthetic peptide
NFWNQVHFV

SEQ ID NO: 42020 - protein, 9 aa, Artificial Sequence
  Description of Artificial Sequence: Synthetic peptide
NFWSQVHCV

SEQ ID NO: 42021 - protein, 9 aa, Artificial Sequence
  Description of Artificial Sequence: Synthetic peptide
NGAPERMPS

SEQ ID NO: 42022 - protein, 9 aa, Artificial Sequence
  Description of Artificial Sequence: Synthetic peptide
NGCFVYWWL

SEQ ID NO: 42023 - protein, 9 aa, Artificial Sequence
  Description of Artificial Sequence: Synthetic peptide
NGFMPAVMA

SEQ ID NO: 42024 - protein, 9 aa, Artificial Sequence
  Description of Artificial Sequence: Synthetic peptide
NGRLLWQRY

SEQ ID NO: 42025 - protein, 9 aa, Artificial Sequence
  Description of Artificial Sequence: Synthetic peptide
NGRLWWERY

SEQ ID NO: 42026 - protein, 9 aa, Artificial Sequence
  Description of Artificial Sequence: Synthetic peptide
NGRLWWKRY

SEQ ID NO: 42027 - protein, 9 aa, Artificial Sequence
  Description of Artificial Sequence: Synthetic peptide
NGRLWWQRC

SEQ ID NO: 42028 - protein, 9 aa, Artificial Sequence
  Description of Artificial Sequence: Synthetic peptide
NGRLWWQRF

SEQ ID NO: 42029 - protein, 9 aa, Artificial Sequence
  Description of Artificial Sequence: Synthetic peptide
NGVIINQCF

SEQ ID NO: 42030 - protein, 9 aa, Artificial Sequence
  Description of Artificial Sequence: Synthetic peptide
NGVINDCEF

SEQ ID NO: 42031 - protein, 9 aa, Artificial Sequence
  Description of Artificial Sequence: Synthetic peptide
NGVNMNQCF

SEQ ID NO: 42032 - protein, 9 aa, Artificial Sequence
  Description of Artificial Sequence: Synthetic peptide
NGVSINQCF

SEQ ID NO: 42033 - protein, 9 aa, Artificial Sequence
  Description of Artificial Sequence: Synthetic peptide
NGWLWWQRY

SEQ ID NO: 42034 - protein, 9 aa, Artificial Sequence
  Description of Artificial Sequence: Synthetic peptide
NGYLVDIPR

SEQ ID NO: 42035 - protein, 9 aa, Artificial Sequence
  Description of Artificial Sequence: Synthetic peptide
NGYLVNIPR

SEQ ID NO: 42036 - protein, 9 aa, Artificial Sequence
  Description of Artificial Sequence: Synthetic peptide
NGYLVYIPR

SEQ ID NO: 42037 - protein, 9 aa, Artificial Sequence
  Description of Artificial Sequence: Synthetic peptide
NHADYMRDA

SEQ ID NO: 42038 - protein, 9 aa, Artificial Sequence
  Description of Artificial Sequence: Synthetic peptide
NHADYMRHA

SEQ ID NO: 42039 - protein, 9 aa, Artificial Sequence
  Description of Artificial Sequence: Synthetic peptide
NHADYMRKA

SEQ ID NO: 42040 - protein, 9 aa, Artificial Sequence
  Description of Artificial Sequence: Synthetic peptide
NHADYMRNV

SEQ ID NO: 42041 - protein, 9 aa, Artificial Sequence
  Description of Artificial Sequence: Synthetic peptide
NHTACKKLC

SEQ ID NO: 42042 - protein, 9 aa, Artificial Sequence
  Description of Artificial Sequence: Synthetic peptide
NHVDANLRA

SEQ ID NO: 42043 - protein, 9 aa, Artificial Sequence
  Description of Artificial Sequence: Synthetic peptide
NHVNANRRA

SEQ ID NO: 42044 - protein, 9 aa, Artificial Sequence
  Description of Artificial Sequence: Synthetic peptide
NHVNDNLRA

SEQ ID NO: 42045 - protein, 9 aa, Artificial Sequence
  Description of Artificial Sequence: Synthetic peptide
NHVNTNLRA

SEQ ID NO: 42046 - protein, 9 aa, Artificial Sequence
  Description of Artificial Sequence: Synthetic peptide
NIMSYSSWN

SEQ ID NO: 42047 - protein, 9 aa, Artificial Sequence
  Description of Artificial Sequence: Synthetic peptide
NKMVMVFKR

SEQ ID NO: 42048 - protein, 9 aa, Artificial Sequence
  Description of Artificial Sequence: Synthetic peptide
NLKWDWQNH

SEQ ID NO: 42049 - protein, 9 aa, Artificial Sequence
  Description of Artificial Sequence: Synthetic peptide
NLKWREHHP

SEQ ID NO: 42050 - protein, 9 aa, Artificial Sequence
  Description of Artificial Sequence: Synthetic peptide
NLKWRETHP

SEQ ID NO: 42051 - protein, 9 aa, Artificial Sequence
  Description of Artificial Sequence: Synthetic peptide
NMCEYANVQ

SEQ ID NO: 42052 - protein, 9 aa, Artificial Sequence
  Description of Artificial Sequence: Synthetic peptide
NMCKCANVQ

SEQ ID NO: 42053 - protein, 9 aa, Artificial Sequence
  Description of Artificial Sequence: Synthetic peptide
NMCKFANVQ

SEQ ID NO: 42054 - protein, 9 aa, Artificial Sequence
  Description of Artificial Sequence: Synthetic peptide
NMCKYANVP

SEQ ID NO: 42055 - protein, 9 aa, Artificial Sequence
  Description of Artificial Sequence: Synthetic peptide
NMCKYANVR

SEQ ID NO: 42056 - protein, 9 aa, Artificial Sequence
  Description of Artificial Sequence: Synthetic peptide
NMCKYPNVQ

SEQ ID NO: 42057 - protein, 9 aa, Artificial Sequence
  Description of Artificial Sequence: Synthetic peptide
NMCKYSNVQ

SEQ ID NO: 42058 - protein, 9 aa, Artificial Sequence
  Description of Artificial Sequence: Synthetic peptide
NMCRYANVQ

SEQ ID NO: 42059 - protein, 9 aa, Artificial Sequence
  Description of Artificial Sequence: Synthetic peptide
NMHWQYQFE

SEQ ID NO: 42060 - protein, 9 aa, Artificial Sequence
  Description of Artificial Sequence: Synthetic peptide
NMHWRYKFE

SEQ ID NO: 42061 - protein, 9 aa, Artificial Sequence
  Description of Artificial Sequence: Synthetic peptide
NMIPMDSMP

SEQ ID NO: 42062 - protein, 9 aa, Artificial Sequence
  Description of Artificial Sequence: Synthetic peptide
NMLPFNCNF

SEQ ID NO: 42063 - protein, 9 aa, Artificial Sequence
  Description of Artificial Sequence: Synthetic peptide
NMPWRYQFE

SEQ ID NO: 42064 - protein, 9 aa, Artificial Sequence
  Description of Artificial Sequence: Synthetic peptide
NMYWRYQFE

SEQ ID NO: 42065 - protein, 9 aa, Artificial Sequence
  Description of Artificial Sequence: Synthetic peptide
NNCNMNVMR

SEQ ID NO: 42066 - protein, 9 aa, Artificial Sequence
  Description of Artificial Sequence: Synthetic peptide
NNMHSDWCV

SEQ ID NO: 42067 - protein, 9 aa, Artificial Sequence
  Description of Artificial Sequence: Synthetic peptide
NNMWCQKCP

SEQ ID NO: 42068 - protein, 9 aa, Artificial Sequence
  Description of Artificial Sequence: Synthetic peptide
NNVNANLRA

SEQ ID NO: 42069 - protein, 9 aa, Artificial Sequence
  Description of Artificial Sequence: Synthetic peptide
NPSQMDMDT

SEQ ID NO: 42070 - protein, 9 aa, Artificial Sequence
  Description of Artificial Sequence: Synthetic peptide
NQAHCILNC

SEQ ID NO: 42071 - protein, 9 aa, Artificial Sequence
  Description of Artificial Sequence: Synthetic peptide
NQLQMWYRV

SEQ ID NO: 42072 - protein, 9 aa, Artificial Sequence
  Description of Artificial Sequence: Synthetic peptide
NQTHCIINC

SEQ ID NO: 42073 - protein, 9 aa, Artificial Sequence
  Description of Artificial Sequence: Synthetic peptide
NRFASWEGM

SEQ ID NO: 42074 - protein, 9 aa, Artificial Sequence
  Description of Artificial Sequence: Synthetic peptide
NSDEESGME

SEQ ID NO: 42075 - protein, 9 aa, Artificial Sequence
  Description of Artificial Sequence: Synthetic peptide
NSLHNNEDA

SEQ ID NO: 42076 - protein, 9 aa, Artificial Sequence
  Description of Artificial Sequence: Synthetic peptide
NSLHNNEHP

SEQ ID NO: 42077 - protein, 9 aa, Artificial Sequence
  Description of Artificial Sequence: Synthetic peptide
NSLWCQKCP

SEQ ID NO: 42078 - protein, 9 aa, Artificial Sequence
  Description of Artificial Sequence: Synthetic peptide
NSMWCEKCP

SEQ ID NO: 42079 - protein, 9 aa, Artificial Sequence
  Description of Artificial Sequence: Synthetic peptide
NSMWCQECP

SEQ ID NO: 42080 - protein, 9 aa, Artificial Sequence
  Description of Artificial Sequence: Synthetic peptide
NSMWCQKCL

SEQ ID NO: 42081 - protein, 9 aa, Artificial Sequence
  Description of Artificial Sequence: Synthetic peptide
NSMWCQKCR

SEQ ID NO: 42082 - protein, 9 aa, Artificial Sequence
  Description of Artificial Sequence: Synthetic peptide
NSMWCQKCT

SEQ ID NO: 42083 - protein, 9 aa, Artificial Sequence
  Description of Artificial Sequence: Synthetic peptide
NSMWCQQCP

SEQ ID NO: 42084 - protein, 9 aa, Artificial Sequence
  Description of Artificial Sequence: Synthetic peptide
NSMWCRKCP

SEQ ID NO: 42085 - protein, 9 aa, Artificial Sequence
  Description of Artificial Sequence: Synthetic peptide
NSRHNNEDP

SEQ ID NO: 42086 - protein, 9 aa, Artificial Sequence
  Description of Artificial Sequence: Synthetic peptide
NSSCIQECW

SEQ ID NO: 42087 - protein, 9 aa, Artificial Sequence
  Description of Artificial Sequence: Synthetic peptide
NSSLIQECW

SEQ ID NO: 42088 - protein, 9 aa, Artificial Sequence
  Description of Artificial Sequence: Synthetic peptide
NSSWIEECW

SEQ ID NO: 42089 - protein, 9 aa, Artificial Sequence
  Description of Artificial Sequence: Synthetic peptide
NSSWIQECL

SEQ ID NO: 42090 - protein, 9 aa, Artificial Sequence
  Description of Artificial Sequence: Synthetic peptide
NSSWIQQCW

SEQ ID NO: 42091 - protein, 9 aa, Artificial Sequence
  Description of Artificial Sequence: Synthetic peptide
NSSWLQECW

SEQ ID NO: 42092 - protein, 9 aa, Artificial Sequence
  Description of Artificial Sequence: Synthetic peptide
NSVHNNEDP

SEQ ID NO: 42093 - protein, 9 aa, Artificial Sequence
  Description of Artificial Sequence: Synthetic peptide
NTADCRNSS

SEQ ID NO: 42094 - protein, 9 aa, Artificial Sequence
  Description of Artificial Sequence: Synthetic peptide
NTDEESGMP

SEQ ID NO: 42095 - protein, 9 aa, Artificial Sequence
  Description of Artificial Sequence: Synthetic peptide
NTKYAERSG

SEQ ID NO: 42096 - protein, 9 aa, Artificial Sequence
  Description of Artificial Sequence: Synthetic peptide
NTQFAERSG

SEQ ID NO: 42097 - protein, 9 aa, Artificial Sequence
  Description of Artificial Sequence: Synthetic peptide
NTQYADRSG

SEQ ID NO: 42098 - protein, 9 aa, Artificial Sequence
  Description of Artificial Sequence: Synthetic peptide
NTQYAERCG

SEQ ID NO: 42099 - protein, 9 aa, Artificial Sequence
  Description of Artificial Sequence: Synthetic peptide
NTQYAERPG

SEQ ID NO: 42100 - protein, 9 aa, Artificial Sequence
  Description of Artificial Sequence: Synthetic peptide
NTQYAERSA

SEQ ID NO: 42101 - protein, 9 aa, Artificial Sequence
  Description of Artificial Sequence: Synthetic peptide
NTQYSERSG

SEQ ID NO: 42102 - protein, 9 aa, Artificial Sequence
  Description of Artificial Sequence: Synthetic peptide
NTRFADQTE

SEQ ID NO: 42103 - protein, 9 aa, Artificial Sequence
  Description of Artificial Sequence: Synthetic peptide
NTRFPDQAE

SEQ ID NO: 42104 - protein, 9 aa, Artificial Sequence
  Description of Artificial Sequence: Synthetic peptide
NTRFPDQTA

SEQ ID NO: 42105 - protein, 9 aa, Artificial Sequence
  Description of Artificial Sequence: Synthetic peptide
NTRFSDQTE

SEQ ID NO: 42106 - protein, 9 aa, Artificial Sequence
  Description of Artificial Sequence: Synthetic peptide
NTSWIQECW

SEQ ID NO: 42107 - protein, 9 aa, Artificial Sequence
  Description of Artificial Sequence: Synthetic peptide
NTYQNSHYP

SEQ ID NO: 42108 - protein, 9 aa, Artificial Sequence
  Description of Artificial Sequence: Synthetic peptide
NVFVAYCKY

SEQ ID NO: 42109 - protein, 9 aa, Artificial Sequence
  Description of Artificial Sequence: Synthetic peptide
NVIVAYCKS

SEQ ID NO: 42110 - protein, 9 aa, Artificial Sequence
  Description of Artificial Sequence: Synthetic peptide
NVLAFNCNF

SEQ ID NO: 42111 - protein, 9 aa, Artificial Sequence
  Description of Artificial Sequence: Synthetic peptide
NVLPFNCHF

SEQ ID NO: 42112 - protein, 9 aa, Artificial Sequence
  Description of Artificial Sequence: Synthetic peptide
NVLPFNGNF

SEQ ID NO: 42113 - protein, 9 aa, Artificial Sequence
  Description of Artificial Sequence: Synthetic peptide
NVLPVNCNF

SEQ ID NO: 42114 - protein, 9 aa, Artificial Sequence
  Description of Artificial Sequence: Synthetic peptide
NVLSHTMME

SEQ ID NO: 42115 - protein, 9 aa, Artificial Sequence
  Description of Artificial Sequence: Synthetic peptide
NVLVHTMME

SEQ ID NO: 42116 - protein, 9 aa, Artificial Sequence
  Description of Artificial Sequence: Synthetic peptide
NVMGHTMME

SEQ ID NO: 42117 - protein, 9 aa, Artificial Sequence
  Description of Artificial Sequence: Synthetic peptide
NVNDMSSDR

SEQ ID NO: 42118 - protein, 9 aa, Artificial Sequence
  Description of Artificial Sequence: Synthetic peptide
NVQCNRANG

SEQ ID NO: 42119 - protein, 9 aa, Artificial Sequence
  Description of Artificial Sequence: Synthetic peptide
NVQCTRADG

SEQ ID NO: 42120 - protein, 9 aa, Artificial Sequence
  Description of Artificial Sequence: Synthetic peptide
NVQCTRSNG

SEQ ID NO: 42121 - protein, 9 aa, Artificial Sequence
  Description of Artificial Sequence: Synthetic peptide
NVYVAYCKS

SEQ ID NO: 42122 - protein, 9 aa, Artificial Sequence
  Description of Artificial Sequence: Synthetic peptide
NWADSPWCY

SEQ ID NO: 42123 - protein, 9 aa, Artificial Sequence
  Description of Artificial Sequence: Synthetic peptide
NWEHCWWAH

SEQ ID NO: 42124 - protein, 9 aa, Artificial Sequence
  Description of Artificial Sequence: Synthetic peptide
NWENSPWCY

SEQ ID NO: 42125 - protein, 9 aa, Artificial Sequence
  Description of Artificial Sequence: Synthetic peptide
NWEPCWWAY

SEQ ID NO: 42126 - protein, 9 aa, Artificial Sequence
  Description of Artificial Sequence: Synthetic peptide
NWEPCWWDH

SEQ ID NO: 42127 - protein, 9 aa, Artificial Sequence
  Description of Artificial Sequence: Synthetic peptide
NWEPCWWSH

SEQ ID NO: 42128 - protein, 9 aa, Artificial Sequence
  Description of Artificial Sequence: Synthetic peptide
NWEPCWWTH

SEQ ID NO: 42129 - protein, 9 aa, Artificial Sequence
  Description of Artificial Sequence: Synthetic peptide
NWERCWWAH

SEQ ID NO: 42130 - protein, 9 aa, Artificial Sequence
  Description of Artificial Sequence: Synthetic peptide
NWVDSPWCY

SEQ ID NO: 42131 - protein, 9 aa, Artificial Sequence
  Description of Artificial Sequence: Synthetic peptide
PDRMLAGQR

SEQ ID NO: 42132 - protein, 9 aa, Artificial Sequence
  Description of Artificial Sequence: Synthetic peptide
PHICFQHCK

SEQ ID NO: 42133 - protein, 9 aa, Artificial Sequence
  Description of Artificial Sequence: Synthetic peptide
PHTIMMRDF

SEQ ID NO: 42134 - protein, 9 aa, Artificial Sequence
  Description of Artificial Sequence: Synthetic peptide
PIAKFANMS

SEQ ID NO: 42135 - protein, 9 aa, Artificial Sequence
  Description of Artificial Sequence: Synthetic peptide
PLDWKLNNR

SEQ ID NO: 42136 - protein, 9 aa, Artificial Sequence
  Description of Artificial Sequence: Synthetic peptide
PLDWPLNNR

SEQ ID NO: 42137 - protein, 9 aa, Artificial Sequence
  Description of Artificial Sequence: Synthetic peptide
PLYGRRHWH

SEQ ID NO: 42138 - protein, 9 aa, Artificial Sequence
  Description of Artificial Sequence: Synthetic peptide
PNILMMFEA

SEQ ID NO: 42139 - protein, 9 aa, Artificial Sequence
  Description of Artificial Sequence: Synthetic peptide
PNIVMMFEP

SEQ ID NO: 42140 - protein, 9 aa, Artificial Sequence
  Description of Artificial Sequence: Synthetic peptide
PNMLMMFEP

SEQ ID NO: 42141 - protein, 9 aa, Artificial Sequence
  Description of Artificial Sequence: Synthetic peptide
PSPHEWMAF

SEQ ID NO: 42142 - protein, 9 aa, Artificial Sequence
  Description of Artificial Sequence: Synthetic peptide
PSRPCTYHT

SEQ ID NO: 42143 - protein, 9 aa, Artificial Sequence
  Description of Artificial Sequence: Synthetic peptide
PWAQTEKPN

SEQ ID NO: 42144 - protein, 9 aa, Artificial Sequence
  Description of Artificial Sequence: Synthetic peptide
PWGETEKPN

SEQ ID NO: 42145 - protein, 9 aa, Artificial Sequence
  Description of Artificial Sequence: Synthetic peptide
PWIPNQIKR

SEQ ID NO: 42146 - protein, 9 aa, Artificial Sequence
  Description of Artificial Sequence: Synthetic peptide
PWTETEKPN

SEQ ID NO: 42147 - protein, 9 aa, Artificial Sequence
  Description of Artificial Sequence: Synthetic peptide
QAWWKIFWH

SEQ ID NO: 42148 - protein, 9 aa, Artificial Sequence
  Description of Artificial Sequence: Synthetic peptide
QEMRKKGMW

SEQ ID NO: 42149 - protein, 9 aa, Artificial Sequence
  Description of Artificial Sequence: Synthetic peptide
QEMRKRGMW

SEQ ID NO: 42150 - protein, 9 aa, Artificial Sequence
  Description of Artificial Sequence: Synthetic peptide
QEMRQQGMW

SEQ ID NO: 42151 - protein, 9 aa, Artificial Sequence
  Description of Artificial Sequence: Synthetic peptide
QFSGYTNQV

SEQ ID NO: 42152 - protein, 9 aa, Artificial Sequence
  Description of Artificial Sequence: Synthetic peptide
QFYNYEIMA

SEQ ID NO: 42153 - protein, 9 aa, Artificial Sequence
  Description of Artificial Sequence: Synthetic peptide
QGQWMYHWW

SEQ ID NO: 42154 - protein, 9 aa, Artificial Sequence
  Description of Artificial Sequence: Synthetic peptide
QGRWMYNWW

SEQ ID NO: 42155 - protein, 9 aa, Artificial Sequence
  Description of Artificial Sequence: Synthetic peptide
QGRWMYYWW

SEQ ID NO: 42156 - protein, 9 aa, Artificial Sequence
  Description of Artificial Sequence: Synthetic peptide
QGRWVYHWW

SEQ ID NO: 42157 - protein, 9 aa, Artificial Sequence
  Description of Artificial Sequence: Synthetic peptide
QIHQDMFEC

SEQ ID NO: 42158 - protein, 9 aa, Artificial Sequence
  Description of Artificial Sequence: Synthetic peptide
QIMRISPFD

SEQ ID NO: 42159 - protein, 9 aa, Artificial Sequence
  Description of Artificial Sequence: Synthetic peptide
QIYGRRHWH

SEQ ID NO: 42160 - protein, 9 aa, Artificial Sequence
  Description of Artificial Sequence: Synthetic peptide
QKAMLLNGA

SEQ ID NO: 42161 - protein, 9 aa, Artificial Sequence
  Description of Artificial Sequence: Synthetic peptide
QLYGRRHLH

SEQ ID NO: 42162 - protein, 9 aa, Artificial Sequence
  Description of Artificial Sequence: Synthetic peptide
QMSSEMEQL

SEQ ID NO: 42163 - protein, 9 aa, Artificial Sequence
  Description of Artificial Sequence: Synthetic peptide
QNSNVMGCM

SEQ ID NO: 42164 - protein, 9 aa, Artificial Sequence
  Description of Artificial Sequence: Synthetic peptide
QRHGFNHCN

SEQ ID NO: 42165 - protein, 9 aa, Artificial Sequence
  Description of Artificial Sequence: Synthetic peptide
QSKWYYVMA

SEQ ID NO: 42166 - protein, 9 aa, Artificial Sequence
  Description of Artificial Sequence: Synthetic peptide
QSRAGYMHY

SEQ ID NO: 42167 - protein, 9 aa, Artificial Sequence
  Description of Artificial Sequence: Synthetic peptide
QSVDHWGDL

SEQ ID NO: 42168 - protein, 9 aa, Artificial Sequence
  Description of Artificial Sequence: Synthetic peptide
QVHEWVFPR

SEQ ID NO: 42169 - protein, 9 aa, Artificial Sequence
  Description of Artificial Sequence: Synthetic peptide
QVLICKNGQ

SEQ ID NO: 42170 - protein, 9 aa, Artificial Sequence
  Description of Artificial Sequence: Synthetic peptide
QVLICQNAQ

SEQ ID NO: 42171 - protein, 9 aa, Artificial Sequence
  Description of Artificial Sequence: Synthetic peptide
QVLICQNGL

SEQ ID NO: 42172 - protein, 9 aa, Artificial Sequence
  Description of Artificial Sequence: Synthetic peptide
QVLICRNGQ

SEQ ID NO: 42173 - protein, 9 aa, Artificial Sequence
  Description of Artificial Sequence: Synthetic peptide
QVLVCQNGQ

SEQ ID NO: 42174 - protein, 9 aa, Artificial Sequence
  Description of Artificial Sequence: Synthetic peptide
QVVICQNGQ

SEQ ID NO: 42175 - protein, 9 aa, Artificial Sequence
  Description of Artificial Sequence: Synthetic peptide
QVVIDHPKY

SEQ ID NO: 42176 - protein, 9 aa, Artificial Sequence
  Description of Artificial Sequence: Synthetic peptide
QWIRTGSSF

SEQ ID NO: 42177 - protein, 9 aa, Artificial Sequence
  Description of Artificial Sequence: Synthetic peptide
QWTRAGSSF

SEQ ID NO: 42178 - protein, 9 aa, Artificial Sequence
  Description of Artificial Sequence: Synthetic peptide
QYCHWWYKL

SEQ ID NO: 42179 - protein, 9 aa, Artificial Sequence
  Description of Artificial Sequence: Synthetic peptide
RAIGWFHFD

SEQ ID NO: 42180 - protein, 9 aa, Artificial Sequence
  Description of Artificial Sequence: Synthetic peptide
REISVKAVA

SEQ ID NO: 42181 - protein, 9 aa, Artificial Sequence
  Description of Artificial Sequence: Synthetic peptide
REISVQAVA

SEQ ID NO: 42182 - protein, 9 aa, Artificial Sequence
  Description of Artificial Sequence: Synthetic peptide
REMRKQGMW

SEQ ID NO: 42183 - protein, 9 aa, Artificial Sequence
  Description of Artificial Sequence: Synthetic peptide
RFFAAELQL

SEQ ID NO: 42184 - protein, 9 aa, Artificial Sequence
  Description of Artificial Sequence: Synthetic peptide
RFFAAEPQW

SEQ ID NO: 42185 - protein, 9 aa, Artificial Sequence
  Description of Artificial Sequence: Synthetic peptide
RFFAAQLQW

SEQ ID NO: 42186 - protein, 9 aa, Artificial Sequence
  Description of Artificial Sequence: Synthetic peptide
RFFADELQW

SEQ ID NO: 42187 - protein, 9 aa, Artificial Sequence
  Description of Artificial Sequence: Synthetic peptide
RFFAVELQW

SEQ ID NO: 42188 - protein, 9 aa, Artificial Sequence
  Description of Artificial Sequence: Synthetic peptide
RHICFKHCK

SEQ ID NO: 42189 - protein, 9 aa, Artificial Sequence
  Description of Artificial Sequence: Synthetic peptide
RHMCFQHCK

SEQ ID NO: 42190 - protein, 9 aa, Artificial Sequence
  Description of Artificial Sequence: Synthetic peptide
RMATMFTCR

SEQ ID NO: 42191 - protein, 9 aa, Artificial Sequence
  Description of Artificial Sequence: Synthetic peptide
RMHDACFDN

SEQ ID NO: 42192 - protein, 9 aa, Artificial Sequence
  Description of Artificial Sequence: Synthetic peptide
RMHDACYDT

SEQ ID NO: 42193 - protein, 9 aa, Artificial Sequence
  Description of Artificial Sequence: Synthetic peptide
RMHDGCYDN

SEQ ID NO: 42194 - protein, 9 aa, Artificial Sequence
  Description of Artificial Sequence: Synthetic peptide
RMHDTCYDN

SEQ ID NO: 42195 - protein, 9 aa, Artificial Sequence
  Description of Artificial Sequence: Synthetic peptide
RMNDACYDN

SEQ ID NO: 42196 - protein, 9 aa, Artificial Sequence
  Description of Artificial Sequence: Synthetic peptide
RMRDACYDN

SEQ ID NO: 42197 - protein, 9 aa, Artificial Sequence
  Description of Artificial Sequence: Synthetic peptide
RMYDACYDN

SEQ ID NO: 42198 - protein, 9 aa, Artificial Sequence
  Description of Artificial Sequence: Synthetic peptide
RPEYANHMH

SEQ ID NO: 42199 - protein, 9 aa, Artificial Sequence
  Description of Artificial Sequence: Synthetic peptide
RQTLDMKRF

SEQ ID NO: 42200 - protein, 9 aa, Artificial Sequence
  Description of Artificial Sequence: Synthetic peptide
RSFYMCRCG

SEQ ID NO: 42201 - protein, 9 aa, Artificial Sequence
  Description of Artificial Sequence: Synthetic peptide
RTEYADHMH

SEQ ID NO: 42202 - protein, 9 aa, Artificial Sequence
  Description of Artificial Sequence: Synthetic peptide
RTKYANHMH

SEQ ID NO: 42203 - protein, 9 aa, Artificial Sequence
  Description of Artificial Sequence: Synthetic peptide
RTYLWEHES

SEQ ID NO: 42204 - protein, 9 aa, Artificial Sequence
  Description of Artificial Sequence: Synthetic peptide
RWFAENNGL

SEQ ID NO: 42205 - protein, 9 aa, Artificial Sequence
  Description of Artificial Sequence: Synthetic peptide
RWRCRMRGN

SEQ ID NO: 42206 - protein, 9 aa, Artificial Sequence
  Description of Artificial Sequence: Synthetic peptide
RYFAAELQW

SEQ ID NO: 42207 - protein, 9 aa, Artificial Sequence
  Description of Artificial Sequence: Synthetic peptide
SANDMSSDR

SEQ ID NO: 42208 - protein, 9 aa, Artificial Sequence
  Description of Artificial Sequence: Synthetic peptide
SANWCTHDK

SEQ ID NO: 42209 - protein, 9 aa, Artificial Sequence
  Description of Artificial Sequence: Synthetic peptide
SANWFAHDK

SEQ ID NO: 42210 - protein, 9 aa, Artificial Sequence
  Description of Artificial Sequence: Synthetic peptide
SASWFTHDK

SEQ ID NO: 42211 - protein, 9 aa, Artificial Sequence
  Description of Artificial Sequence: Synthetic peptide
SATWFTHDK

SEQ ID NO: 42212 - protein, 9 aa, Artificial Sequence
  Description of Artificial Sequence: Synthetic peptide
SCNIVEQVH

SEQ ID NO: 42213 - protein, 9 aa, Artificial Sequence
  Description of Artificial Sequence: Synthetic peptide
SDAVLYNWF

SEQ ID NO: 42214 - protein, 9 aa, Artificial Sequence
  Description of Artificial Sequence: Synthetic peptide
SEDIDYVHL

SEQ ID NO: 42215 - protein, 9 aa, Artificial Sequence
  Description of Artificial Sequence: Synthetic peptide
SEYAAMRDP

SEQ ID NO: 42216 - protein, 9 aa, Artificial Sequence
  Description of Artificial Sequence: Synthetic peptide
SEYAAMRDT

SEQ ID NO: 42217 - protein, 9 aa, Artificial Sequence
  Description of Artificial Sequence: Synthetic peptide
SEYAAMRDY

SEQ ID NO: 42218 - protein, 9 aa, Artificial Sequence
  Description of Artificial Sequence: Synthetic peptide
SEYAGMRDS

SEQ ID NO: 42219 - protein, 9 aa, Artificial Sequence
  Description of Artificial Sequence: Synthetic peptide
SFTLLVGDY

SEQ ID NO: 42220 - protein, 9 aa, Artificial Sequence
  Description of Artificial Sequence: Synthetic peptide
SGCAMHNMG

SEQ ID NO: 42221 - protein, 9 aa, Artificial Sequence
  Description of Artificial Sequence: Synthetic peptide
SGCAMLDMG

SEQ ID NO: 42222 - protein, 9 aa, Artificial Sequence
  Description of Artificial Sequence: Synthetic peptide
SGCAMLHMG

SEQ ID NO: 42223 - protein, 9 aa, Artificial Sequence
  Description of Artificial Sequence: Synthetic peptide
SGCAMLNFG

SEQ ID NO: 42224 - protein, 9 aa, Artificial Sequence
  Description of Artificial Sequence: Synthetic peptide
SGCAMLNMA

SEQ ID NO: 42225 - protein, 9 aa, Artificial Sequence
  Description of Artificial Sequence: Synthetic peptide
SGCAMLNME

SEQ ID NO: 42226 - protein, 9 aa, Artificial Sequence
  Description of Artificial Sequence: Synthetic peptide
SGCAMLNMV

SEQ ID NO: 42227 - protein, 9 aa, Artificial Sequence
  Description of Artificial Sequence: Synthetic peptide
SGCAMLNVG

SEQ ID NO: 42228 - protein, 9 aa, Artificial Sequence
  Description of Artificial Sequence: Synthetic peptide
SGCAMLYMG

SEQ ID NO: 42229 - protein, 9 aa, Artificial Sequence
  Description of Artificial Sequence: Synthetic peptide
SGCAMPNMG

SEQ ID NO: 42230 - protein, 9 aa, Artificial Sequence
  Description of Artificial Sequence: Synthetic peptide
SGCAMVNMG

SEQ ID NO: 42231 - protein, 9 aa, Artificial Sequence
  Description of Artificial Sequence: Synthetic peptide
SGCGMLNMG

SEQ ID NO: 42232 - protein, 9 aa, Artificial Sequence
  Description of Artificial Sequence: Synthetic peptide
SGCVMLNMG

SEQ ID NO: 42233 - protein, 9 aa, Artificial Sequence
  Description of Artificial Sequence: Synthetic peptide
SGDYYDGMP

SEQ ID NO: 42234 - protein, 9 aa, Artificial Sequence
  Description of Artificial Sequence: Synthetic peptide
SGFASWEGM

SEQ ID NO: 42235 - protein, 9 aa, Artificial Sequence
  Description of Artificial Sequence: Synthetic peptide
SGLGMPNWP

SEQ ID NO: 42236 - protein, 9 aa, Artificial Sequence
  Description of Artificial Sequence: Synthetic peptide
SGWAMLNMG

SEQ ID NO: 42237 - protein, 9 aa, Artificial Sequence
  Description of Artificial Sequence: Synthetic peptide
SHMMNHAFW

SEQ ID NO: 42238 - protein, 9 aa, Artificial Sequence
  Description of Artificial Sequence: Synthetic peptide
SHMMSNAFW

SEQ ID NO: 42239 - protein, 9 aa, Artificial Sequence
  Description of Artificial Sequence: Synthetic peptide
SIKMCQSTV

SEQ ID NO: 42240 - protein, 9 aa, Artificial Sequence
  Description of Artificial Sequence: Synthetic peptide
SIKVCESTV

SEQ ID NO: 42241 - protein, 9 aa, Artificial Sequence
  Description of Artificial Sequence: Synthetic peptide
SIKVCQSNV

SEQ ID NO: 42242 - protein, 9 aa, Artificial Sequence
  Description of Artificial Sequence: Synthetic peptide
SIKVCRSTV

SEQ ID NO: 42243 - protein, 9 aa, Artificial Sequence
  Description of Artificial Sequence: Synthetic peptide
SIPSIGSEE

SEQ ID NO: 42244 - protein, 9 aa, Artificial Sequence
  Description of Artificial Sequence: Synthetic peptide
SIVDFESAA

SEQ ID NO: 42245 - protein, 9 aa, Artificial Sequence
  Description of Artificial Sequence: Synthetic peptide
SKSSIEYSA

SEQ ID NO: 42246 - protein, 9 aa, Artificial Sequence
  Description of Artificial Sequence: Synthetic peptide
SLHSIGSEE

SEQ ID NO: 42247 - protein, 9 aa, Artificial Sequence
  Description of Artificial Sequence: Synthetic peptide
SLPSIGNEE

SEQ ID NO: 42248 - protein, 9 aa, Artificial Sequence
  Description of Artificial Sequence: Synthetic peptide
SLPSLGSEE

SEQ ID NO: 42249 - protein, 9 aa, Artificial Sequence
  Description of Artificial Sequence: Synthetic peptide
SLPSVGSEE

SEQ ID NO: 42250 - protein, 9 aa, Artificial Sequence
  Description of Artificial Sequence: Synthetic peptide
SMCKYANVQ

SEQ ID NO: 42251 - protein, 9 aa, Artificial Sequence
  Description of Artificial Sequence: Synthetic peptide
SMIPMDSMT

SEQ ID NO: 42252 - protein, 9 aa, Artificial Sequence
  Description of Artificial Sequence: Synthetic peptide
SMIPMDSVP

SEQ ID NO: 42253 - protein, 9 aa, Artificial Sequence
  Description of Artificial Sequence: Synthetic peptide
SMSPMDSMP

SEQ ID NO: 42254 - protein, 9 aa, Artificial Sequence
  Description of Artificial Sequence: Synthetic peptide
SMVPMDSMP

SEQ ID NO: 42255 - protein, 9 aa, Artificial Sequence
  Description of Artificial Sequence: Synthetic peptide
SNERHWTYF

SEQ ID NO: 42256 - protein, 9 aa, Artificial Sequence
  Description of Artificial Sequence: Synthetic peptide
SNMMSHAFW

SEQ ID NO: 42257 - protein, 9 aa, Artificial Sequence
  Description of Artificial Sequence: Synthetic peptide
SNWWFMFEA

SEQ ID NO: 42258 - protein, 9 aa, Artificial Sequence
  Description of Artificial Sequence: Synthetic peptide
SPQHCIGMP

SEQ ID NO: 42259 - protein, 9 aa, Artificial Sequence
  Description of Artificial Sequence: Synthetic peptide
SRFASWDGM

SEQ ID NO: 42260 - protein, 9 aa, Artificial Sequence
  Description of Artificial Sequence: Synthetic peptide
SRFASWEGV

SEQ ID NO: 42261 - protein, 9 aa, Artificial Sequence
  Description of Artificial Sequence: Synthetic peptide
SSAYYDGMP

SEQ ID NO: 42262 - protein, 9 aa, Artificial Sequence
  Description of Artificial Sequence: Synthetic peptide
SSDFYDGMP

SEQ ID NO: 42263 - protein, 9 aa, Artificial Sequence
  Description of Artificial Sequence: Synthetic peptide
SSDYYAGMP

SEQ ID NO: 42264 - protein, 9 aa, Artificial Sequence
  Description of Artificial Sequence: Synthetic peptide
SSDYYDGMT

SEQ ID NO: 42265 - protein, 9 aa, Artificial Sequence
  Description of Artificial Sequence: Synthetic peptide
STAACRNSS

SEQ ID NO: 42266 - protein, 9 aa, Artificial Sequence
  Description of Artificial Sequence: Synthetic peptide
STADCRNNS

SEQ ID NO: 42267 - protein, 9 aa, Artificial Sequence
  Description of Artificial Sequence: Synthetic peptide
STADCRSSS

SEQ ID NO: 42268 - protein, 9 aa, Artificial Sequence
  Description of Artificial Sequence: Synthetic peptide
STADGRNSS

SEQ ID NO: 42269 - protein, 9 aa, Artificial Sequence
  Description of Artificial Sequence: Synthetic peptide
STADYRNSS

SEQ ID NO: 42270 - protein, 9 aa, Artificial Sequence
  Description of Artificial Sequence: Synthetic peptide
STAGCRNSS

SEQ ID NO: 42271 - protein, 9 aa, Artificial Sequence
  Description of Artificial Sequence: Synthetic peptide
STGDCRNSS

SEQ ID NO: 42272 - protein, 9 aa, Artificial Sequence
  Description of Artificial Sequence: Synthetic peptide
STPDCRNSS

SEQ ID NO: 42273 - protein, 9 aa, Artificial Sequence
  Description of Artificial Sequence: Synthetic peptide
STSADPNCG

SEQ ID NO: 42274 - protein, 9 aa, Artificial Sequence
  Description of Artificial Sequence: Synthetic peptide
STSADPYCG

SEQ ID NO: 42275 - protein, 9 aa, Artificial Sequence
  Description of Artificial Sequence: Synthetic peptide
STSGDPHCG

SEQ ID NO: 42276 - protein, 9 aa, Artificial Sequence
  Description of Artificial Sequence: Synthetic peptide
STTDCRNSS

SEQ ID NO: 42277 - protein, 9 aa, Artificial Sequence
  Description of Artificial Sequence: Synthetic peptide
STTFASSWE

SEQ ID NO: 42278 - protein, 9 aa, Artificial Sequence
  Description of Artificial Sequence: Synthetic peptide
STWDWMSCM

SEQ ID NO: 42279 - protein, 9 aa, Artificial Sequence
  Description of Artificial Sequence: Synthetic peptide
SVIQNEMRI

SEQ ID NO: 42280 - protein, 9 aa, Artificial Sequence
  Description of Artificial Sequence: Synthetic peptide
SVLGHTMME

SEQ ID NO: 42281 - protein, 9 aa, Artificial Sequence
  Description of Artificial Sequence: Synthetic peptide
SVLQNEMRI

SEQ ID NO: 42282 - protein, 9 aa, Artificial Sequence
  Description of Artificial Sequence: Synthetic peptide
SVNMRFAKH

SEQ ID NO: 42283 - protein, 9 aa, Artificial Sequence
  Description of Artificial Sequence: Synthetic peptide
SVNMRFTEH

SEQ ID NO: 42284 - protein, 9 aa, Artificial Sequence
  Description of Artificial Sequence: Synthetic peptide
SVNWFTHDK

SEQ ID NO: 42285 - protein, 9 aa, Artificial Sequence
  Description of Artificial Sequence: Synthetic peptide
SVVQNEMPI

SEQ ID NO: 42286 - protein, 9 aa, Artificial Sequence
  Description of Artificial Sequence: Synthetic peptide
SVVQTEMRI

SEQ ID NO: 42287 - protein, 9 aa, Artificial Sequence
  Description of Artificial Sequence: Synthetic peptide
SWIDMPMMQ

SEQ ID NO: 42288 - protein, 9 aa, Artificial Sequence
  Description of Artificial Sequence: Synthetic peptide
SWTALGSVT

SEQ ID NO: 42289 - protein, 9 aa, Artificial Sequence
  Description of Artificial Sequence: Synthetic peptide
SWTALSSVP

SEQ ID NO: 42290 - protein, 9 aa, Artificial Sequence
  Description of Artificial Sequence: Synthetic peptide
SWTAVGSVP

SEQ ID NO: 42291 - protein, 9 aa, Artificial Sequence
  Description of Artificial Sequence: Synthetic peptide
SWTIVEQVH

SEQ ID NO: 42292 - protein, 9 aa, Artificial Sequence
  Description of Artificial Sequence: Synthetic peptide
SYLINMLWM

SEQ ID NO: 42293 - protein, 9 aa, Artificial Sequence
  Description of Artificial Sequence: Synthetic peptide
SYMMSHAFW

SEQ ID NO: 42294 - protein, 9 aa, Artificial Sequence
  Description of Artificial Sequence: Synthetic peptide
TACAGTWWR

SEQ ID NO: 42295 - protein, 9 aa, Artificial Sequence
  Description of Artificial Sequence: Synthetic peptide
TASAIDHPK

SEQ ID NO: 42296 - protein, 9 aa, Artificial Sequence
  Description of Artificial Sequence: Synthetic peptide
TASGIDHPQ

SEQ ID NO: 42297 - protein, 9 aa, Artificial Sequence
  Description of Artificial Sequence: Synthetic peptide
TASGIDHPT

SEQ ID NO: 42298 - protein, 9 aa, Artificial Sequence
  Description of Artificial Sequence: Synthetic peptide
TASGMDHPK

SEQ ID NO: 42299 - protein, 9 aa, Artificial Sequence
  Description of Artificial Sequence: Synthetic peptide
TAVINDCEF

SEQ ID NO: 42300 - protein, 9 aa, Artificial Sequence
  Description of Artificial Sequence: Synthetic peptide
TAWIYWNEF

SEQ ID NO: 42301 - protein, 9 aa, Artificial Sequence
  Description of Artificial Sequence: Synthetic peptide
TDDGDDNIP

SEQ ID NO: 42302 - protein, 9 aa, Artificial Sequence
  Description of Artificial Sequence: Synthetic peptide
TDRMMAGQR

SEQ ID NO: 42303 - protein, 9 aa, Artificial Sequence
  Description of Artificial Sequence: Synthetic peptide
TFVAPMPGM

SEQ ID NO: 42304 - protein, 9 aa, Artificial Sequence
  Description of Artificial Sequence: Synthetic peptide
TGVINNCEF

SEQ ID NO: 42305 - protein, 9 aa, Artificial Sequence
  Description of Artificial Sequence: Synthetic peptide
TGVLNDCEF

SEQ ID NO: 42306 - protein, 9 aa, Artificial Sequence
  Description of Artificial Sequence: Synthetic peptide
TGVMNDCEF

SEQ ID NO: 42307 - protein, 9 aa, Artificial Sequence
  Description of Artificial Sequence: Synthetic peptide
TGVTNDCEF

SEQ ID NO: 42308 - protein, 9 aa, Artificial Sequence
  Description of Artificial Sequence: Synthetic peptide
TGWVYWNEF

SEQ ID NO: 42309 - protein, 9 aa, Artificial Sequence
  Description of Artificial Sequence: Synthetic peptide
THHELSFWR

SEQ ID NO: 42310 - protein, 9 aa, Artificial Sequence
  Description of Artificial Sequence: Synthetic peptide
TIHEPAEDR

SEQ ID NO: 42311 - protein, 9 aa, Artificial Sequence
  Description of Artificial Sequence: Synthetic peptide
TKVNHIMRP

SEQ ID NO: 42312 - protein, 9 aa, Artificial Sequence
  Description of Artificial Sequence: Synthetic peptide
TNDIWLQFS

SEQ ID NO: 42313 - protein, 9 aa, Artificial Sequence
  Description of Artificial Sequence: Synthetic peptide
TNDIWWQFA

SEQ ID NO: 42314 - protein, 9 aa, Artificial Sequence
  Description of Artificial Sequence: Synthetic peptide
TNDIWWQFC

SEQ ID NO: 42315 - protein, 9 aa, Artificial Sequence
  Description of Artificial Sequence: Synthetic peptide
TNDIWWQFF

SEQ ID NO: 42316 - protein, 9 aa, Artificial Sequence
  Description of Artificial Sequence: Synthetic peptide
TNDIWWQVS

SEQ ID NO: 42317 - protein, 9 aa, Artificial Sequence
  Description of Artificial Sequence: Synthetic peptide
TNDIWWQYS

SEQ ID NO: 42318 - protein, 9 aa, Artificial Sequence
  Description of Artificial Sequence: Synthetic peptide
TNKMLACSS

SEQ ID NO: 42319 - protein, 9 aa, Artificial Sequence
  Description of Artificial Sequence: Synthetic peptide
TQDIYEHMQ

SEQ ID NO: 42320 - protein, 9 aa, Artificial Sequence
  Description of Artificial Sequence: Synthetic peptide
TRFASWEGM

SEQ ID NO: 42321 - protein, 9 aa, Artificial Sequence
  Description of Artificial Sequence: Synthetic peptide
TSEFVAISM

SEQ ID NO: 42322 - protein, 9 aa, Artificial Sequence
  Description of Artificial Sequence: Synthetic peptide
TTEMSDMHW

SEQ ID NO: 42323 - protein, 9 aa, Artificial Sequence
  Description of Artificial Sequence: Synthetic peptide
TTSADPHCG

SEQ ID NO: 42324 - protein, 9 aa, Artificial Sequence
  Description of Artificial Sequence: Synthetic peptide
TTWVYWNEF

SEQ ID NO: 42325 - protein, 9 aa, Artificial Sequence
  Description of Artificial Sequence: Synthetic peptide
TVSGIDHPK

SEQ ID NO: 42326 - protein, 9 aa, Artificial Sequence
  Description of Artificial Sequence: Synthetic peptide
TVVINDCEF

SEQ ID NO: 42327 - protein, 9 aa, Artificial Sequence
  Description of Artificial Sequence: Synthetic peptide
TVWVYWNEF

SEQ ID NO: 42328 - protein, 9 aa, Artificial Sequence
  Description of Artificial Sequence: Synthetic peptide
TYDQKKNQM

SEQ ID NO: 42329 - protein, 9 aa, Artificial Sequence
  Description of Artificial Sequence: Synthetic peptide
VCAEFPHGR

SEQ ID NO: 42330 - protein, 9 aa, Artificial Sequence
  Description of Artificial Sequence: Synthetic peptide
VCAIVNTCN

SEQ ID NO: 42331 - protein, 9 aa, Artificial Sequence
  Description of Artificial Sequence: Synthetic peptide
VCNRNVNRP

SEQ ID NO: 42332 - protein, 9 aa, Artificial Sequence
  Description of Artificial Sequence: Synthetic peptide
VCWLWFYCG

SEQ ID NO: 42333 - protein, 9 aa, Artificial Sequence
  Description of Artificial Sequence: Synthetic peptide
VCWLWFYFA

SEQ ID NO: 42334 - protein, 9 aa, Artificial Sequence
  Description of Artificial Sequence: Synthetic peptide
VCWLWFYFV

SEQ ID NO: 42335 - protein, 9 aa, Artificial Sequence
  Description of Artificial Sequence: Synthetic peptide
VCWVWFYFG

SEQ ID NO: 42336 - protein, 9 aa, Artificial Sequence
  Description of Artificial Sequence: Synthetic peptide
VCWWWFYFG

SEQ ID NO: 42337 - protein, 9 aa, Artificial Sequence
  Description of Artificial Sequence: Synthetic peptide
VFHSNPIVR

SEQ ID NO: 42338 - protein, 9 aa, Artificial Sequence
  Description of Artificial Sequence: Synthetic peptide
VFVAPMPGM

SEQ ID NO: 42339 - protein, 9 aa, Artificial Sequence
  Description of Artificial Sequence: Synthetic peptide
VFWMKCGWK

SEQ ID NO: 42340 - protein, 9 aa, Artificial Sequence
  Description of Artificial Sequence: Synthetic peptide
VFWMQCGWR

SEQ ID NO: 42341 - protein, 9 aa, Artificial Sequence
  Description of Artificial Sequence: Synthetic peptide
VGIPERAMP

SEQ ID NO: 42342 - protein, 9 aa, Artificial Sequence
  Description of Artificial Sequence: Synthetic peptide
VGWLWFYFG

SEQ ID NO: 42343 - protein, 9 aa, Artificial Sequence
  Description of Artificial Sequence: Synthetic peptide
VHKWDTLRD

SEQ ID NO: 42344 - protein, 9 aa, Artificial Sequence
  Description of Artificial Sequence: Synthetic peptide
VHMGEKMWS

SEQ ID NO: 42345 - protein, 9 aa, Artificial Sequence
  Description of Artificial Sequence: Synthetic peptide
VHMGQKMWN

SEQ ID NO: 42346 - protein, 9 aa, Artificial Sequence
  Description of Artificial Sequence: Synthetic peptide
VIARCSNTW

SEQ ID NO: 42347 - protein, 9 aa, Artificial Sequence
  Description of Artificial Sequence: Synthetic peptide
VIIRCSNTW

SEQ ID NO: 42348 - protein, 9 aa, Artificial Sequence
  Description of Artificial Sequence: Synthetic peptide
VILRCSNTW

SEQ ID NO: 42349 - protein, 9 aa, Artificial Sequence
  Description of Artificial Sequence: Synthetic peptide
VIVNYEGEM

SEQ ID NO: 42350 - protein, 9 aa, Artificial Sequence
  Description of Artificial Sequence: Synthetic peptide
VIVRCANTW

SEQ ID NO: 42351 - protein, 9 aa, Artificial Sequence
  Description of Artificial Sequence: Synthetic peptide
VIVRCPNTW

SEQ ID NO: 42352 - protein, 9 aa, Artificial Sequence
  Description of Artificial Sequence: Synthetic peptide
VIVRCSNTG

SEQ ID NO: 42353 - protein, 9 aa, Artificial Sequence
  Description of Artificial Sequence: Synthetic peptide
VIVRGSNTW

SEQ ID NO: 42354 - protein, 9 aa, Artificial Sequence
  Description of Artificial Sequence: Synthetic peptide
VKFWTDNTD

SEQ ID NO: 42355 - protein, 9 aa, Artificial Sequence
  Description of Artificial Sequence: Synthetic peptide
VLVRCSNTW

SEQ ID NO: 42356 - protein, 9 aa, Artificial Sequence
  Description of Artificial Sequence: Synthetic peptide
VMEFTEDGN

SEQ ID NO: 42357 - protein, 9 aa, Artificial Sequence
  Description of Artificial Sequence: Synthetic peptide
VNDCCTMRD

SEQ ID NO: 42358 - protein, 9 aa, Artificial Sequence
  Description of Artificial Sequence: Synthetic peptide
VPDLFNQFC

SEQ ID NO: 42359 - protein, 9 aa, Artificial Sequence
  Description of Artificial Sequence: Synthetic peptide
VPHPFKCGG

SEQ ID NO: 42360 - protein, 9 aa, Artificial Sequence
  Description of Artificial Sequence: Synthetic peptide
VSDFKIYMG

SEQ ID NO: 42361 - protein, 9 aa, Artificial Sequence
  Description of Artificial Sequence: Synthetic peptide
VSDTLNCGS

SEQ ID NO: 42362 - protein, 9 aa, Artificial Sequence
  Description of Artificial Sequence: Synthetic peptide
VSFLPDEYC

SEQ ID NO: 42363 - protein, 9 aa, Artificial Sequence
  Description of Artificial Sequence: Synthetic peptide
VSFLPNQYC

SEQ ID NO: 42364 - protein, 9 aa, Artificial Sequence
  Description of Artificial Sequence: Synthetic peptide
VSYHWTHAG

SEQ ID NO: 42365 - protein, 9 aa, Artificial Sequence
  Description of Artificial Sequence: Synthetic peptide
VTAFKIYMG

SEQ ID NO: 42366 - protein, 9 aa, Artificial Sequence
  Description of Artificial Sequence: Synthetic peptide
VTAREEKCG

SEQ ID NO: 42367 - protein, 9 aa, Artificial Sequence
  Description of Artificial Sequence: Synthetic peptide
VTDFEIYMG

SEQ ID NO: 42368 - protein, 9 aa, Artificial Sequence
  Description of Artificial Sequence: Synthetic peptide
VTGAMMYMG

SEQ ID NO: 42369 - protein, 9 aa, Artificial Sequence
  Description of Artificial Sequence: Synthetic peptide
VTIHERRCN

SEQ ID NO: 42370 - protein, 9 aa, Artificial Sequence
  Description of Artificial Sequence: Synthetic peptide
VTSEWMHMA

SEQ ID NO: 42371 - protein, 9 aa, Artificial Sequence
  Description of Artificial Sequence: Synthetic peptide
VTVHEHRCN

SEQ ID NO: 42372 - protein, 9 aa, Artificial Sequence
  Description of Artificial Sequence: Synthetic peptide
VVICKRFVG

SEQ ID NO: 42373 - protein, 9 aa, Artificial Sequence
  Description of Artificial Sequence: Synthetic peptide
VVTVDGNNR

SEQ ID NO: 42374 - protein, 9 aa, Artificial Sequence
  Description of Artificial Sequence: Synthetic peptide
VWFAENNGL

SEQ ID NO: 42375 - protein, 9 aa, Artificial Sequence
  Description of Artificial Sequence: Synthetic peptide
VWMDCSIMC

SEQ ID NO: 42376 - protein, 9 aa, Artificial Sequence
  Description of Artificial Sequence: Synthetic peptide
VYEERNAQM

SEQ ID NO: 42377 - protein, 9 aa, Artificial Sequence
  Description of Artificial Sequence: Synthetic peptide
VYRLRERQE

SEQ ID NO: 42378 - protein, 9 aa, Artificial Sequence
  Description of Artificial Sequence: Synthetic peptide
VYRVREKQE

SEQ ID NO: 42379 - protein, 9 aa, Artificial Sequence
  Description of Artificial Sequence: Synthetic peptide
WDCLLHKWR

SEQ ID NO: 42380 - protein, 9 aa, Artificial Sequence
  Description of Artificial Sequence: Synthetic peptide
WDCLLNRWR

SEQ ID NO: 42381 - protein, 9 aa, Artificial Sequence
  Description of Artificial Sequence: Synthetic peptide
WDCLVNKWR

SEQ ID NO: 42382 - protein, 9 aa, Artificial Sequence
  Description of Artificial Sequence: Synthetic peptide
WECLLNKWR

SEQ ID NO: 42383 - protein, 9 aa, Artificial Sequence
  Description of Artificial Sequence: Synthetic peptide
WGEACKLDT

SEQ ID NO: 42384 - protein, 9 aa, Artificial Sequence
  Description of Artificial Sequence: Synthetic peptide
WHCLLNKWR

SEQ ID NO: 42385 - protein, 9 aa, Artificial Sequence
  Description of Artificial Sequence: Synthetic peptide
WHGMRMIRA

SEQ ID NO: 42386 - protein, 9 aa, Artificial Sequence
  Description of Artificial Sequence: Synthetic peptide
WHGMRMIRT

SEQ ID NO: 42387 - protein, 9 aa, Artificial Sequence
  Description of Artificial Sequence: Synthetic peptide
WHGMRMLRP

SEQ ID NO: 42388 - protein, 9 aa, Artificial Sequence
  Description of Artificial Sequence: Synthetic peptide
WHGMRMVRP

SEQ ID NO: 42389 - protein, 9 aa, Artificial Sequence
  Description of Artificial Sequence: Synthetic peptide
WKVIYHQPG

SEQ ID NO: 42390 - protein, 9 aa, Artificial Sequence
  Description of Artificial Sequence: Synthetic peptide
WKVIYHQRG

SEQ ID NO: 42391 - protein, 9 aa, Artificial Sequence
  Description of Artificial Sequence: Synthetic peptide
WMEHYGNCD

SEQ ID NO: 42392 - protein, 9 aa, Artificial Sequence
  Description of Artificial Sequence: Synthetic peptide
WMEPYDNCD

SEQ ID NO: 42393 - protein, 9 aa, Artificial Sequence
  Description of Artificial Sequence: Synthetic peptide
WMEPYGNCE

SEQ ID NO: 42394 - protein, 9 aa, Artificial Sequence
  Description of Artificial Sequence: Synthetic peptide
WMEPYGNCN

SEQ ID NO: 42395 - protein, 9 aa, Artificial Sequence
  Description of Artificial Sequence: Synthetic peptide
WMEPYGNYD

SEQ ID NO: 42396 - protein, 9 aa, Artificial Sequence
  Description of Artificial Sequence: Synthetic peptide
WMESYGNCD

SEQ ID NO: 42397 - protein, 9 aa, Artificial Sequence
  Description of Artificial Sequence: Synthetic peptide
WMGPYGNCD

SEQ ID NO: 42398 - protein, 9 aa, Artificial Sequence
  Description of Artificial Sequence: Synthetic peptide
WMKSYDHGS

SEQ ID NO: 42399 - protein, 9 aa, Artificial Sequence
  Description of Artificial Sequence: Synthetic peptide
WMSKQMFKG

SEQ ID NO: 42400 - protein, 9 aa, Artificial Sequence
  Description of Artificial Sequence: Synthetic peptide
WMSQQMFKG

SEQ ID NO: 42401 - protein, 9 aa, Artificial Sequence
  Description of Artificial Sequence: Synthetic peptide
WNCLLNKWR

SEQ ID NO: 42402 - protein, 9 aa, Artificial Sequence
  Description of Artificial Sequence: Synthetic peptide
WSSVAHPGN

SEQ ID NO: 42403 - protein, 9 aa, Artificial Sequence
  Description of Artificial Sequence: Synthetic peptide
WVGQFWQGI

SEQ ID NO: 42404 - protein, 9 aa, Artificial Sequence
  Description of Artificial Sequence: Synthetic peptide
WWAPPWHAL

SEQ ID NO: 42405 - protein, 9 aa, Artificial Sequence
  Description of Artificial Sequence: Synthetic peptide
WWTDMSSWK

SEQ ID NO: 42406 - protein, 9 aa, Artificial Sequence
  Description of Artificial Sequence: Synthetic peptide
WWTDTSSWT

SEQ ID NO: 42407 - protein, 9 aa, Artificial Sequence
  Description of Artificial Sequence: Synthetic peptide
WWTNMSSWT

SEQ ID NO: 42408 - protein, 9 aa, Artificial Sequence
  Description of Artificial Sequence: Synthetic peptide
WYGMRMIRP

SEQ ID NO: 42409 - protein, 9 aa, Artificial Sequence
  Description of Artificial Sequence: Synthetic peptide
YGYLVHIPR

SEQ ID NO: 42410 - protein, 9 aa, Artificial Sequence
  Description of Artificial Sequence: Synthetic peptide
YHEICHISK

SEQ ID NO: 42411 - protein, 9 aa, Artificial Sequence
  Description of Artificial Sequence: Synthetic peptide
YHTACKKLC

SEQ ID NO: 42412 - protein, 9 aa, Artificial Sequence
  Description of Artificial Sequence: Synthetic peptide
YKFWTDNTD

SEQ ID NO: 42413 - protein, 9 aa, Artificial Sequence
  Description of Artificial Sequence: Synthetic peptide
YLKDVDFDS

SEQ ID NO: 42414 - protein, 9 aa, Artificial Sequence
  Description of Artificial Sequence: Synthetic peptide
YPQCVQWFW

SEQ ID NO: 42415 - protein, 9 aa, Artificial Sequence
  Description of Artificial Sequence: Synthetic peptide
YPRCAQWFW

SEQ ID NO: 42416 - protein, 9 aa, Artificial Sequence
  Description of Artificial Sequence: Synthetic peptide
YQHWAMVQR

SEQ ID NO: 42417 - protein, 9 aa, Artificial Sequence
  Description of Artificial Sequence: Synthetic peptide
YQHWTMDQR

SEQ ID NO: 42418 - protein, 9 aa, Artificial Sequence
  Description of Artificial Sequence: Synthetic peptide
YVEYVIWPD

SEQ ID NO: 42419 - protein, 9 aa, Artificial Sequence
  Description of Artificial Sequence: Synthetic peptide
YVSQMWMRC

SEQ ID NO: 42420 - protein, 9 aa, Artificial Sequence
  Description of Artificial Sequence: Synthetic peptide
YVSQVWMQC

SEQ ID NO: 42421 - protein, 9 aa, Artificial Sequence
  Description of Artificial Sequence: Synthetic peptide
YWLLDHANF

SEQ ID NO: 42422 - protein, 9 aa, Artificial Sequence
  Description of Artificial Sequence: Synthetic peptide
YYAICHISK

SEQ ID NO: 42423 - protein, 9 aa, Artificial Sequence
  Description of Artificial Sequence: Synthetic peptide
YYEFCHISK

SEQ ID NO: 42424 - protein, 9 aa, Artificial Sequence
  Description of Artificial Sequence: Synthetic peptide
YYEICDISK

SEQ ID NO: 42425 - protein, 9 aa, Artificial Sequence
  Description of Artificial Sequence: Synthetic peptide
YYEICHICK

SEQ ID NO: 42426 - protein, 9 aa, Artificial Sequence
  Description of Artificial Sequence: Synthetic peptide
YYEICHIST

SEQ ID NO: 42427 - protein, 9 aa, Artificial Sequence
  Description of Artificial Sequence: Synthetic peptide
YYEICHLSK

SEQ ID NO: 42428 - protein, 9 aa, Artificial Sequence
  Description of Artificial Sequence: Synthetic peptide
YYEICNISK

SEQ ID NO: 42429 - protein, 9 aa, Artificial Sequence
  Description of Artificial Sequence: Synthetic peptide
YYEICPISK

SEQ ID NO: 42430 - protein, 9 aa, Artificial Sequence
  Description of Artificial Sequence: Synthetic peptide
YYEICQISK

SEQ ID NO: 42431 - protein, 9 aa, Artificial Sequence
  Description of Artificial Sequence: Synthetic peptide
YYEICRISK

SEQ ID NO: 42432 - protein, 9 aa, Artificial Sequence
  Description of Artificial Sequence: Synthetic peptide
YYEICYISK

SEQ ID NO: 42433 - protein, 9 aa, Artificial Sequence
  Description of Artificial Sequence: Synthetic peptide
YYELCHISK

SEQ ID NO: 42434 - protein, 9 aa, Artificial Sequence
  Description of Artificial Sequence: Synthetic peptide
YYGICHISK

SEQ ID NO: 42435 - protein, 9 aa, Artificial Sequence
  Description of Artificial Sequence: Synthetic peptide
YYKICHISK

SEQ ID NO: 42436 - protein, 9 aa, Artificial Sequence
  Description of Artificial Sequence: Synthetic peptide
YYQICHISK

SEQ ID NO: 42437 - protein, 9 aa, Artificial Sequence
  Description of Artificial Sequence: Synthetic peptide
YYVICHISK

SEQ ID NO: 42438 - protein, 9 aa, Artificial Sequence
  Description of Artificial Sequence: Synthetic peptide
KGVWCKIDV

SEQ ID NO: 42439 - protein, 9 aa, Artificial Sequence
  Description of Artificial Sequence: Synthetic peptide
QQFPHNRQC

SEQ ID NO: 42440 - protein, 9 aa, Artificial Sequence
  Description of Artificial Sequence: Synthetic peptide
DLKERMRGF

SEQ ID NO: 42441 - protein, 9 aa, Artificial Sequence
  Description of Artificial Sequence: Synthetic peptide
ISTKWDYIA

SEQ ID NO: 42442 - protein, 9 aa, Artificial Sequence
  Description of Artificial Sequence: Synthetic peptide
ISWISHASP

SEQ ID NO: 42443 - protein, 9 aa, Artificial Sequence
  Description of Artificial Sequence: Synthetic peptide
DKTVQTSAR

SEQ ID NO: 42444 - protein, 9 aa, Artificial Sequence
  Description of Artificial Sequence: Synthetic peptide
RMYATEHCS

SEQ ID NO: 42445 - protein, 9 aa, Artificial Sequence
  Description of Artificial Sequence: Synthetic peptide
GLWLNVAPR

SEQ ID NO: 42446 - protein, 9 aa, Artificial Sequence
  Description of Artificial Sequence: Synthetic peptide
SMHYYDTFE

SEQ ID NO: 42447 - protein, 9 aa, Artificial Sequence
  Description of Artificial Sequence: Synthetic peptide
FNIHGDLLC

SEQ ID NO: 42448 - protein, 9 aa, Artificial Sequence
  Description of Artificial Sequence: Synthetic peptide
WMSEQMFKG

SEQ ID NO: 42449 - protein, 9 aa, Artificial Sequence
  Description of Artificial Sequence: Synthetic peptide
ILNMKACDV

SEQ ID NO: 42450 - protein, 9 aa, Artificial Sequence
  Description of Artificial Sequence: Synthetic peptide
VFKRVVGFA

SEQ ID NO: 42451 - protein, 9 aa, Artificial Sequence
  Description of Artificial Sequence: Synthetic peptide
QMQNENRQM

SEQ ID NO: 42452 - protein, 9 aa, Artificial Sequence
  Description of Artificial Sequence: Synthetic peptide
RTREPFWWW

SEQ ID NO: 42453 - protein, 9 aa, Artificial Sequence
  Description of Artificial Sequence: Synthetic peptide
MQYRGMSAS

SEQ ID NO: 42454 - protein, 9 aa, Artificial Sequence
  Description of Artificial Sequence: Synthetic peptide
VSDTMNCGS

SEQ ID NO: 42455 - protein, 9 aa, Artificial Sequence
  Description of Artificial Sequence: Synthetic peptide
EAEPWDYWA

SEQ ID NO: 42456 - protein, 9 aa, Artificial Sequence
  Description of Artificial Sequence: Synthetic peptide
IAWADGLEF

SEQ ID NO: 42457 - protein, 9 aa, Artificial Sequence
  Description of Artificial Sequence: Synthetic peptide
IAWCDGLEF

SEQ ID NO: 42458 - protein, 9 aa, Artificial Sequence
  Description of Artificial Sequence: Synthetic peptide
IAWSDGLEF

SEQ ID NO: 42459 - protein, 9 aa, Artificial Sequence
  Description of Artificial Sequence: Synthetic peptide
IAWSDGMEF

SEQ ID NO: 42460 - protein, 9 aa, Artificial Sequence
  Description of Artificial Sequence: Synthetic peptide
IAWYDGLEF

SEQ ID NO: 42461 - protein, 9 aa, Artificial Sequence
  Description of Artificial Sequence: Synthetic peptide
IVWSDGLEF

SEQ ID NO: 42462 - protein, 9 aa, Artificial Sequence
  Description of Artificial Sequence: Synthetic peptide
MAWSDGLEF

SEQ ID NO: 42463 - protein, 9 aa, Artificial Sequence
  Description of Artificial Sequence: Synthetic peptide
MWIEFNEYG

SEQ ID NO: 42464 - protein, 9 aa, Artificial Sequence
  Description of Artificial Sequence: Synthetic peptide
MWPEFNEYG

SEQ ID NO: 42465 - protein, 9 aa, Artificial Sequence
  Description of Artificial Sequence: Synthetic peptide
MWTECNEYG

SEQ ID NO: 42466 - protein, 9 aa, Artificial Sequence
  Description of Artificial Sequence: Synthetic peptide
MWTEFDEYG

SEQ ID NO: 42467 - protein, 9 aa, Artificial Sequence
  Description of Artificial Sequence: Synthetic peptide
MWTEFNAYG

SEQ ID NO: 42468 - protein, 9 aa, Artificial Sequence
  Description of Artificial Sequence: Synthetic peptide
MWTEFNECG

SEQ ID NO: 42469 - protein, 9 aa, Artificial Sequence
  Description of Artificial Sequence: Synthetic peptide
MWTEFNESG

SEQ ID NO: 42470 - protein, 9 aa, Artificial Sequence
  Description of Artificial Sequence: Synthetic peptide
MWTEFNEYE

SEQ ID NO: 42471 - protein, 9 aa, Artificial Sequence
  Description of Artificial Sequence: Synthetic peptide
MWTEFNEYV

SEQ ID NO: 42472 - protein, 9 aa, Artificial Sequence
  Description of Artificial Sequence: Synthetic peptide
MWTEFNGYG

SEQ ID NO: 42473 - protein, 9 aa, Artificial Sequence
  Description of Artificial Sequence: Synthetic peptide
MWTEFNKYG

SEQ ID NO: 42474 - protein, 9 aa, Artificial Sequence
  Description of Artificial Sequence: Synthetic peptide
MWTEFNVYG

SEQ ID NO: 42475 - protein, 9 aa, Artificial Sequence
  Description of Artificial Sequence: Synthetic peptide
MWTEFSEYG

SEQ ID NO: 42476 - protein, 9 aa, Artificial Sequence
  Description of Artificial Sequence: Synthetic peptide
MWTEFTEYG

SEQ ID NO: 42477 - protein, 9 aa, Artificial Sequence
  Description of Artificial Sequence: Synthetic peptide
MWTESNEYG

SEQ ID NO: 42478 - protein, 9 aa, Artificial Sequence
  Description of Artificial Sequence: Synthetic peptide
MWTEVNEYG

SEQ ID NO: 42479 - protein, 9 aa, Artificial Sequence
  Description of Artificial Sequence: Synthetic peptide
MWTGFNEYG

SEQ ID NO: 42480 - protein, 9 aa, Artificial Sequence
  Description of Artificial Sequence: Synthetic peptide
SAWSDGLEF

SEQ ID NO: 42481 - protein, 9 aa, Artificial Sequence
  Description of Artificial Sequence: Synthetic peptide
VWTEFNEYG

SEQ ID NO: 42482 - protein, 9 aa, Artificial Sequence
  Description of Artificial Sequence: Synthetic peptide
MWAEFNEYG

SEQ ID NO: 42483 - protein, 9 aa, Artificial Sequence
  Description of Artificial Sequence: Synthetic peptide
MWTEFNEYW

SEQ ID NO: 42484 - protein, 9 aa, Artificial Sequence
  Description of Artificial Sequence: Synthetic peptide
MWTEFNENG

SEQ ID NO: 42485 - protein, 9 aa, Artificial Sequence
  Description of Artificial Sequence: Synthetic peptide
MWTEFNEHG

SEQ ID NO: 42486 - protein, 9 aa, Artificial Sequence
  Description of Artificial Sequence: Synthetic peptide
LFLQLYRHC

SEQ ID NO: 42487 - protein, 9 aa, Artificial Sequence
  Description of Artificial Sequence: Synthetic peptide
LWRSLQDGN

SEQ ID NO: 42488 - protein, 9 aa, Artificial Sequence
  Description of Artificial Sequence: Synthetic peptide
QISVYDTKY

SEQ ID NO: 42489 - protein, 9 aa, Artificial Sequence
  Description of Artificial Sequence: Synthetic peptide
AMHCQPAFA

SEQ ID NO: 42490 - protein, 9 aa, Artificial Sequence
  Description of Artificial Sequence: Synthetic peptide
NAIPYFVQA

SEQ ID NO: 42491 - protein, 9 aa, Artificial Sequence
  Description of Artificial Sequence: Synthetic peptide
GLNICKNQQ

SEQ ID NO: 42492 - protein, 9 aa, Artificial Sequence
  Description of Artificial Sequence: Synthetic peptide
MMVQWGAMA

SEQ ID NO: 42493 - protein, 9 aa, Artificial Sequence
  Description of Artificial Sequence: Synthetic peptide
MTSTSSRGE

SEQ ID NO: 42494 - protein, 9 aa, Artificial Sequence
  Description of Artificial Sequence: Synthetic peptide
DGQNRDQMC

SEQ ID NO: 42495 - protein, 9 aa, Artificial Sequence
  Description of Artificial Sequence: Synthetic peptide
DKIDTCCFL

SEQ ID NO: 42496 - protein, 9 aa, Artificial Sequence
  Description of Artificial Sequence: Synthetic peptide
NTQVISRWT

SEQ ID NO: 42497 - protein, 9 aa, Artificial Sequence
  Description of Artificial Sequence: Synthetic peptide
GTMCREQMI

SEQ ID NO: 42498 - protein, 9 aa, Artificial Sequence
  Description of Artificial Sequence: Synthetic peptide
KTCLCIFTK

SEQ ID NO: 42499 - protein, 9 aa, Artificial Sequence
  Description of Artificial Sequence: Synthetic peptide
EASIQASWN

SEQ ID NO: 42500 - protein, 9 aa, Artificial Sequence
  Description of Artificial Sequence: Synthetic peptide
HACSLLQQY

SEQ ID NO: 42501 - protein, 9 aa, Artificial Sequence
  Description of Artificial Sequence: Synthetic peptide
RVTIMFTGT

SEQ ID NO: 42502 - protein, 9 aa, Artificial Sequence
  Description of Artificial Sequence: Synthetic peptide
LWGWPLHKL

SEQ ID NO: 42503 - protein, 9 aa, Artificial Sequence
  Description of Artificial Sequence: Synthetic peptide
TKQFVHNED

SEQ ID NO: 42504 - protein, 9 aa, Artificial Sequence
  Description of Artificial Sequence: Synthetic peptide
AQIQPAMFP

SEQ ID NO: 42505 - protein, 9 aa, Artificial Sequence
  Description of Artificial Sequence: Synthetic peptide
KGNSVTHVQ

SEQ ID NO: 42506 - protein, 9 aa, Artificial Sequence
  Description of Artificial Sequence: Synthetic peptide
LIHWLKHDL

SEQ ID NO: 42507 - protein, 9 aa, Artificial Sequence
  Description of Artificial Sequence: Synthetic peptide
ICHTEVMFN

SEQ ID NO: 42508 - protein, 9 aa, Artificial Sequence
  Description of Artificial Sequence: Synthetic peptide
RVMMGNNQA

SEQ ID NO: 42509 - protein, 9 aa, Artificial Sequence
  Description of Artificial Sequence: Synthetic peptide
SPQQPSVFH

SEQ ID NO: 42510 - protein, 9 aa, Artificial Sequence
  Description of Artificial Sequence: Synthetic peptide
LTLRQGYIT

SEQ ID NO: 42511 - protein, 9 aa, Artificial Sequence
  Description of Artificial Sequence: Synthetic peptide
EFVLGCQGI

SEQ ID NO: 42512 - protein, 9 aa, Artificial Sequence
  Description of Artificial Sequence: Synthetic peptide
YSSHHSMDY

SEQ ID NO: 42513 - protein, 9 aa, Artificial Sequence
  Description of Artificial Sequence: Synthetic peptide
SVTYHEWHP
